United States Patent Application Publication US 2014/0004565 A1 - sequence listing, part 60

SEQ ID NO: 1438051 - RNA, 19 nt, Artificial Sequence
  Description of Artificial Sequence: Synthetic oligonucleotide
gggauuguccuccagcuuc

SEQ ID NO: 1438052 - RNA, 19 nt, Artificial Sequence
  Description of Artificial Sequence: Synthetic oligonucleotide
gagguacuaggcccaggag

SEQ ID NO: 1438053 - RNA, 19 nt, Artificial Sequence
  Description of Artificial Sequence: Synthetic oligonucleotide
gucggggagggccacgccg

SEQ ID NO: 1438054 - RNA, 19 nt, Artificial Sequence
  Description of Artificial Sequence: Synthetic oligonucleotide
gaggcgaaggggcuuguca

SEQ ID NO: 1438055 - RNA, 19 nt, Artificial Sequence
  Description of Artificial Sequence: Synthetic oligonucleotide
cggcgaauauccuugacgg

SEQ ID NO: 1438056 - RNA, 19 nt, Artificial Sequence
  Description of Artificial Sequence: Synthetic oligonucleotide
uuggugaccuugccagcgc

SEQ ID NO: 1438057 - RNA, 19 nt, Artificial Sequence
  Description of Artificial Sequence: Synthetic oligonucleotide
ugaugugugucuucuccuu

SEQ ID NO: 1438058 - RNA, 19 nt, Artificial Sequence
  Description of Artificial Sequence: Synthetic oligonucleotide
gagauggccuguuguggug

SEQ ID NO: 1438059 - RNA, 19 nt, Artificial Sequence
  Description of Artificial Sequence: Synthetic oligonucleotide
cugcuuuacgcccagaggu

SEQ ID NO: 1438060 - RNA, 19 nt, Artificial Sequence
  Description of Artificial Sequence: Synthetic oligonucleotide
uauugggugagggcuccag

SEQ ID NO: 1438061 - RNA, 19 nt, Artificial Sequence
  Description of Artificial Sequence: Synthetic oligonucleotide
uaggcgcugaccuccuuga

SEQ ID NO: 1438062 - RNA, 19 nt, Artificial Sequence
  Description of Artificial Sequence: Synthetic oligonucleotide
cagggcuucuagcagggac

SEQ ID NO: 1438063 - RNA, 19 nt, Artificial Sequence
  Description of Artificial Sequence: Synthetic oligonucleotide
guacuugguggucucgaac

SEQ ID NO: 1438064 - RNA, 19 nt, Artificial Sequence
  Description of Artificial Sequence: Synthetic oligonucleotide
agcacccaggcauauuuaa

SEQ ID NO: 1438065 - RNA, 19 nt, Artificial Sequence
  Description of Artificial Sequence: Synthetic oligonucleotide
acgcccagagguacuaggc

SEQ ID NO: 1438066 - RNA, 19 nt, Artificial Sequence
  Description of Artificial Sequence: Synthetic oligonucleotide
gcugcuuuacgcccagagg

SEQ ID NO: 1438067 - RNA, 19 nt, Artificial Sequence
  Description of Artificial Sequence: Synthetic oligonucleotide
ugcuuuacgcccagaggua

SEQ ID NO: 1438068 - RNA, 19 nt, Artificial Sequence
  Description of Artificial Sequence: Synthetic oligonucleotide
gagguggguacugugagaa

SEQ ID NO: 1438069 - RNA, 19 nt, Artificial Sequence
  Description of Artificial Sequence: Synthetic oligonucleotide
agacauuugccccggcgaa

SEQ ID NO: 1438070 - RNA, 19 nt, Artificial Sequence
  Description of Artificial Sequence: Synthetic oligonucleotide
uggugaccuugccagcgcc

SEQ ID NO: 1438071 - RNA, 19 nt, Artificial Sequence
  Description of Artificial Sequence: Synthetic oligonucleotide
cauaccaggccgaaggaua

SEQ ID NO: 1438072 - RNA, 19 nt, Artificial Sequence
  Description of Artificial Sequence: Synthetic oligonucleotide
aacucuccacacacauggg

SEQ ID NO: 1438073 - RNA, 19 nt, Artificial Sequence
  Description of Artificial Sequence: Synthetic oligonucleotide
cuugcccgcuuucugcgcc

SEQ ID NO: 1438074 - RNA, 19 nt, Artificial Sequence
  Description of Artificial Sequence: Synthetic oligonucleotide
cucgaacuuccagagggag

SEQ ID NO: 1438075 - RNA, 19 nt, Artificial Sequence
  Description of Artificial Sequence: Synthetic oligonucleotide
uguuguccccaugccagcc

SEQ ID NO: 1438076 - RNA, 19 nt, Artificial Sequence
  Description of Artificial Sequence: Synthetic oligonucleotide
gauuugcccagggugguuc

SEQ ID NO: 1438077 - RNA, 19 nt, Artificial Sequence
  Description of Artificial Sequence: Synthetic oligonucleotide
gguggguacugugagaaac

SEQ ID NO: 1438078 - RNA, 19 nt, Artificial Sequence
  Description of Artificial Sequence: Synthetic oligonucleotide
cuuuccggggaccaucuca

SEQ ID NO: 1438079 - RNA, 19 nt, Artificial Sequence
  Description of Artificial Sequence: Synthetic oligonucleotide
uagccagcgcugauuugcc

SEQ ID NO: 1438080 - RNA, 19 nt, Artificial Sequence
  Description of Artificial Sequence: Synthetic oligonucleotide
aggccgaaggauaccaguc

SEQ ID NO: 1438081 - RNA, 19 nt, Artificial Sequence
  Description of Artificial Sequence: Synthetic oligonucleotide
gcgaauauccuugacggac

SEQ ID NO: 1438082 - RNA, 19 nt, Artificial Sequence
  Description of Artificial Sequence: Synthetic oligonucleotide
caugccagccugagauggg

SEQ ID NO: 1438083 - RNA, 19 nt, Artificial Sequence
  Description of Artificial Sequence: Synthetic oligonucleotide
ucaccagauuucagagacu

SEQ ID NO: 1438084 - RNA, 19 nt, Artificial Sequence
  Description of Artificial Sequence: Synthetic oligonucleotide
uuggcgucgccguggcggg

SEQ ID NO: 1438085 - RNA, 19 nt, Artificial Sequence
  Description of Artificial Sequence: Synthetic oligonucleotide
ccgcauaucgcgcacggcg

SEQ ID NO: 1438086 - RNA, 19 nt, Artificial Sequence
  Description of Artificial Sequence: Synthetic oligonucleotide
aguuccggggaccgggcug

SEQ ID NO: 1438087 - RNA, 19 nt, Artificial Sequence
  Description of Artificial Sequence: Synthetic oligonucleotide
ccggcgaauauccuugacg

SEQ ID NO: 1438088 - RNA, 19 nt, Artificial Sequence
  Description of Artificial Sequence: Synthetic oligonucleotide
cagacauuugccccggcga

SEQ ID NO: 1438089 - RNA, 19 nt, Artificial Sequence
  Description of Artificial Sequence: Synthetic oligonucleotide
gaugccccgcauuuguaaa

SEQ ID NO: 1438090 - RNA, 19 nt, Artificial Sequence
  Description of Artificial Sequence: Synthetic oligonucleotide
cauggcauauugggugagg

SEQ ID NO: 1438091 - RNA, 19 nt, Artificial Sequence
  Description of Artificial Sequence: Synthetic oligonucleotide
ucugccgcauaucgcgcac

SEQ ID NO: 1438092 - RNA, 19 nt, Artificial Sequence
  Description of Artificial Sequence: Synthetic oligonucleotide
uguugaugugugucuucuc

SEQ ID NO: 1438093 - RNA, 19 nt, Artificial Sequence
  Description of Artificial Sequence: Synthetic oligonucleotide
ugggucagauuugcugucc

SEQ ID NO: 1438094 - RNA, 19 nt, Artificial Sequence
  Description of Artificial Sequence: Synthetic oligonucleotide
cacggccacagucugccgc

SEQ ID NO: 1438095 - RNA, 19 nt, Artificial Sequence
  Description of Artificial Sequence: Synthetic oligonucleotide
agagguggguacugugaga

SEQ ID NO: 1438096 - RNA, 19 nt, Artificial Sequence
  Description of Artificial Sequence: Synthetic oligonucleotide
gucagauuugcugucccca

SEQ ID NO: 1438097 - RNA, 19 nt, Artificial Sequence
  Description of Artificial Sequence: Synthetic oligonucleotide
agggacacgccacuugcau

SEQ ID NO: 1438098 - RNA, 19 nt, Artificial Sequence
  Description of Artificial Sequence: Synthetic oligonucleotide
ugccccgcauuuguaaaug

SEQ ID NO: 1438099 - RNA, 19 nt, Artificial Sequence
  Description of Artificial Sequence: Synthetic oligonucleotide
cccacagacauuugccccg

SEQ ID NO: 1438100 - RNA, 19 nt, Artificial Sequence
  Description of Artificial Sequence: Synthetic oligonucleotide
agucugccgcauaucgcgc

SEQ ID NO: 1438101 - RNA, 19 nt, Artificial Sequence
  Description of Artificial Sequence: Synthetic oligonucleotide
uuuacgcccagagguacua

SEQ ID NO: 1438102 - RNA, 19 nt, Artificial Sequence
  Description of Artificial Sequence: Synthetic oligonucleotide
ucgcugagcgccucguggu

SEQ ID NO: 1438103 - RNA, 19 nt, Artificial Sequence
  Description of Artificial Sequence: Synthetic oligonucleotide
ugcccguucuuggagacau

SEQ ID NO: 1438104 - RNA, 19 nt, Artificial Sequence
  Description of Artificial Sequence: Synthetic oligonucleotide
uaggcugguuccguggagu

SEQ ID NO: 1438105 - RNA, 19 nt, Artificial Sequence
  Description of Artificial Sequence: Synthetic oligonucleotide
gugacagucgauaacuggu

SEQ ID NO: 1438106 - RNA, 19 nt, Artificial Sequence
  Description of Artificial Sequence: Synthetic oligonucleotide
ggcaaugugggcuguguga

SEQ ID NO: 1438107 - RNA, 19 nt, Artificial Sequence
  Description of Artificial Sequence: Synthetic oligonucleotide
agucgauaacuggugagua

SEQ ID NO: 1438108 - RNA, 19 nt, Artificial Sequence
  Description of Artificial Sequence: Synthetic oligonucleotide
ggcauauuuaaaggacccc

SEQ ID NO: 1438109 - RNA, 19 nt, Artificial Sequence
  Description of Artificial Sequence: Synthetic oligonucleotide
cuuuugucgaugccccgca

SEQ ID NO: 1438110 - RNA, 19 nt, Artificial Sequence
  Description of Artificial Sequence: Synthetic oligonucleotide
uggaguccaucuuguuaac

SEQ ID NO: 1438111 - RNA, 19 nt, Artificial Sequence
  Description of Artificial Sequence: Synthetic oligonucleotide
guuccggggaccgggcugg

SEQ ID NO: 1438112 - RNA, 19 nt, Artificial Sequence
  Description of Artificial Sequence: Synthetic oligonucleotide
auuugcccagggugguuca

SEQ ID NO: 1438113 - RNA, 19 nt, Artificial Sequence
  Description of Artificial Sequence: Synthetic oligonucleotide
guaggcugguuccguggag

SEQ ID NO: 1438114 - RNA, 19 nt, Artificial Sequence
  Description of Artificial Sequence: Synthetic oligonucleotide
gcagggacacgccacuugc

SEQ ID NO: 1438115 - RNA, 19 nt, Artificial Sequence
  Description of Artificial Sequence: Synthetic oligonucleotide
gauuugcuguccccacaga

SEQ ID NO: 1438116 - RNA, 19 nt, Artificial Sequence
  Description of Artificial Sequence: Synthetic oligonucleotide
ggauaccagucuccacucg

SEQ ID NO: 1438117 - RNA, 19 nt, Artificial Sequence
  Description of Artificial Sequence: Synthetic oligonucleotide
caucauagcgcuucucacu

SEQ ID NO: 1438118 - RNA, 19 nt, Artificial Sequence
  Description of Artificial Sequence: Synthetic oligonucleotide
acccacaaugagcugcuuu

SEQ ID NO: 1438119 - RNA, 19 nt, Artificial Sequence
  Description of Artificial Sequence: Synthetic oligonucleotide
uuuugucgaugccccgcau

SEQ ID NO: 1438120 - RNA, 19 nt, Artificial Sequence
  Description of Artificial Sequence: Synthetic oligonucleotide
ugcgccuucugugcggacu

SEQ ID NO: 1438121 - RNA, 19 nt, Artificial Sequence
  Description of Artificial Sequence: Synthetic oligonucleotide
gcaggauuguguccagggc

SEQ ID NO: 1438122 - RNA, 19 nt, Artificial Sequence
  Description of Artificial Sequence: Synthetic oligonucleotide
agggccacgccuggggagg

SEQ ID NO: 1438123 - RNA, 19 nt, Artificial Sequence
  Description of Artificial Sequence: Synthetic oligonucleotide
augacgcccacggccacag

SEQ ID NO: 1438124 - RNA, 19 nt, Artificial Sequence
  Description of Artificial Sequence: Synthetic oligonucleotide
ugggauuguccuccagcuu

SEQ ID NO: 1438125 - RNA, 19 nt, Artificial Sequence
  Description of Artificial Sequence: Synthetic oligonucleotide
gcaaugugggcugugugac

SEQ ID NO: 1438126 - RNA, 19 nt, Artificial Sequence
  Description of Artificial Sequence: Synthetic oligonucleotide
auagcgcuucucacuguag

SEQ ID NO: 1438127 - RNA, 19 nt, Artificial Sequence
  Description of Artificial Sequence: Synthetic oligonucleotide
ugucgaugccccgcauuug

SEQ ID NO: 1438128 - RNA, 19 nt, Artificial Sequence
  Description of Artificial Sequence: Synthetic oligonucleotide
cauaucgcgcacggcgaag

SEQ ID NO: 1438129 - RNA, 19 nt, Artificial Sequence
  Description of Artificial Sequence: Synthetic oligonucleotide
ugggaggcgaaggggcuug

SEQ ID NO: 1438130 - RNA, 19 nt, Artificial Sequence
  Description of Artificial Sequence: Synthetic oligonucleotide
ucugcgccuucugugcgga

SEQ ID NO: 1438131 - RNA, 19 nt, Artificial Sequence
  Description of Artificial Sequence: Synthetic oligonucleotide
gaaccauggcauauugggu

SEQ ID NO: 1438132 - RNA, 19 nt, Artificial Sequence
  Description of Artificial Sequence: Synthetic oligonucleotide
ugaugacgcccacggccac

SEQ ID NO: 1438133 - RNA, 19 nt, Artificial Sequence
  Description of Artificial Sequence: Synthetic oligonucleotide
aaacuucucgaugguccuu

SEQ ID NO: 1438134 - RNA, 19 nt, Artificial Sequence
  Description of Artificial Sequence: Synthetic oligonucleotide
gcauauuuaaaggaccccu

SEQ ID NO: 1438135 - RNA, 19 nt, Artificial Sequence
  Description of Artificial Sequence: Synthetic oligonucleotide
gugggucagauuugcuguc

SEQ ID NO: 1438136 - RNA, 19 nt, Artificial Sequence
  Description of Artificial Sequence: Synthetic oligonucleotide
cauagcgcuucucacugua

SEQ ID NO: 1438137 - RNA, 19 nt, Artificial Sequence
  Description of Artificial Sequence: Synthetic oligonucleotide
augccccgcauuuguaaau

SEQ ID NO: 1438138 - RNA, 19 nt, Artificial Sequence
  Description of Artificial Sequence: Synthetic oligonucleotide
gggucagauuugcuguccc

SEQ ID NO: 1438139 - RNA, 19 nt, Artificial Sequence
  Description of Artificial Sequence: Synthetic oligonucleotide
ugaugaccugggaggugaa

SEQ ID NO: 1438140 - RNA, 19 nt, Artificial Sequence
  Description of Artificial Sequence: Synthetic oligonucleotide
caaacuucucgaugguccu

SEQ ID NO: 1438141 - RNA, 19 nt, Artificial Sequence
  Description of Artificial Sequence: Synthetic oligonucleotide
ccgguuugcccguucuugg

SEQ ID NO: 1438142 - RNA, 19 nt, Artificial Sequence
  Description of Artificial Sequence: Synthetic oligonucleotide
uucuugccagaacgccggu

SEQ ID NO: 1438143 - RNA, 19 nt, Artificial Sequence
  Description of Artificial Sequence: Synthetic oligonucleotide
ggcaccgucggggagggcc

SEQ ID NO: 1438144 - RNA, 19 nt, Artificial Sequence
  Description of Artificial Sequence: Synthetic oligonucleotide
cccgcauuuguaaaugaga

SEQ ID NO: 1438145 - RNA, 19 nt, Artificial Sequence
  Description of Artificial Sequence: Synthetic oligonucleotide
ucgaugccccgcauuugua

SEQ ID NO: 1438146 - RNA, 19 nt, Artificial Sequence
  Description of Artificial Sequence: Synthetic oligonucleotide
cagauuugcuguccccaca

SEQ ID NO: 1438147 - RNA, 19 nt, Artificial Sequence
  Description of Artificial Sequence: Synthetic oligonucleotide
gagggccacgccgcgggcg

SEQ ID NO: 1438148 - RNA, 19 nt, Artificial Sequence
  Description of Artificial Sequence: Synthetic oligonucleotide
cgauaacuggugaguagcc

SEQ ID NO: 1438149 - RNA, 19 nt, Artificial Sequence
  Description of Artificial Sequence: Synthetic oligonucleotide
uggagacaucaaugauggu

SEQ ID NO: 1438150 - RNA, 19 nt, Artificial Sequence
  Description of Artificial Sequence: Synthetic oligonucleotide
gucgaugccccgcauuugu

SEQ ID NO: 1438151 - RNA, 19 nt, Artificial Sequence
  Description of Artificial Sequence: Synthetic oligonucleotide
ccccgcauuuguaaaugag

SEQ ID NO: 1438152 - RNA, 19 nt, Artificial Sequence
  Description of Artificial Sequence: Synthetic oligonucleotide
ugccccggcgaauauccuu

SEQ ID NO: 1438153 - RNA, 19 nt, Artificial Sequence
  Description of Artificial Sequence: Synthetic oligonucleotide
gcgcugaccuccuugacaa

SEQ ID NO: 1438154 - RNA, 19 nt, Artificial Sequence
  Description of Artificial Sequence: Synthetic oligonucleotide
gccgaaggauaccagucuc

SEQ ID NO: 1438155 - RNA, 19 nt, Artificial Sequence
  Description of Artificial Sequence: Synthetic oligonucleotide
cacaugggcuuuccgggga

SEQ ID NO: 1438156 - RNA, 19 nt, Artificial Sequence
  Description of Artificial Sequence: Synthetic oligonucleotide
ggcgcugaccuccuugaca

SEQ ID NO: 1438157 - RNA, 19 nt, Artificial Sequence
  Description of Artificial Sequence: Synthetic oligonucleotide
augccacgcucccucucug

SEQ ID NO: 1438158 - RNA, 19 nt, Artificial Sequence
  Description of Artificial Sequence: Synthetic oligonucleotide
gcugugugacagucgauaa

SEQ ID NO: 1438159 - RNA, 19 nt, Artificial Sequence
  Description of Artificial Sequence: Synthetic oligonucleotide
ggugaccuugccagcgccg

SEQ ID NO: 1438160 - RNA, 19 nt, Artificial Sequence
  Description of Artificial Sequence: Synthetic oligonucleotide
gucugccgcauaucgcgca

SEQ ID NO: 1438161 - RNA, 19 nt, Artificial Sequence
  Description of Artificial Sequence: Synthetic oligonucleotide
gccagcgcugauuugccca

SEQ ID NO: 1438162 - RNA, 19 nt, Artificial Sequence
  Description of Artificial Sequence: Synthetic oligonucleotide
caaugugggcugugugaca

SEQ ID NO: 1438163 - RNA, 19 nt, Artificial Sequence
  Description of Artificial Sequence: Synthetic oligonucleotide
gcuuuacgcccagagguac

SEQ ID NO: 1438164 - RNA, 19 nt, Artificial Sequence
  Description of Artificial Sequence: Synthetic oligonucleotide
ccaccaaucuuguacacgu

SEQ ID NO: 1438165 - RNA, 19 nt, Artificial Sequence
  Description of Artificial Sequence: Synthetic oligonucleotide
agcgccucguggugcauuu

SEQ ID NO: 1438166 - RNA, 19 nt, Artificial Sequence
  Description of Artificial Sequence: Synthetic oligonucleotide
agggcacuguggcuggguu

SEQ ID NO: 1438167 - RNA, 19 nt, Artificial Sequence
  Description of Artificial Sequence: Synthetic oligonucleotide
uuccggggaccaucucaac

SEQ ID NO: 1438168 - RNA, 19 nt, Artificial Sequence
  Description of Artificial Sequence: Synthetic oligonucleotide
acuucaccucuguggugau

SEQ ID NO: 1438169 - RNA, 19 nt, Artificial Sequence
  Description of Artificial Sequence: Synthetic oligonucleotide
acgccacuugcauuuccuu

SEQ ID NO: 1438170 - RNA, 19 nt, Artificial Sequence
  Description of Artificial Sequence: Synthetic oligonucleotide
ggcgaagcggccgagaggu

SEQ ID NO: 1438171 - RNA, 19 nt, Artificial Sequence
  Description of Artificial Sequence: Synthetic oligonucleotide
uugcccgcuuucugcgccu

SEQ ID NO: 1438172 - RNA, 19 nt, Artificial Sequence
  Description of Artificial Sequence: Synthetic oligonucleotide
gaugacgcccacggccaca

SEQ ID NO: 1438173 - RNA, 19 nt, Artificial Sequence
  Description of Artificial Sequence: Synthetic oligonucleotide
ugucccgguuugcccguuc

SEQ ID NO: 1438174 - RNA, 19 nt, Artificial Sequence
  Description of Artificial Sequence: Synthetic oligonucleotide
cugccgcauaucgcgcacg

SEQ ID NO: 1438175 - RNA, 19 nt, Artificial Sequence
  Description of Artificial Sequence: Synthetic oligonucleotide
ggaccaucucaacgauggc

SEQ ID NO: 1438176 - RNA, 19 nt, Artificial Sequence
  Description of Artificial Sequence: Synthetic oligonucleotide
ccggggaccaucucaacga

SEQ ID NO: 1438177 - RNA, 19 nt, Artificial Sequence
  Description of Artificial Sequence: Synthetic oligonucleotide
ggcgaauauccuugacgga

SEQ ID NO: 1438178 - RNA, 19 nt, Artificial Sequence
  Description of Artificial Sequence: Synthetic oligonucleotide
agguggguacugugagaaa

SEQ ID NO: 1438179 - RNA, 19 nt, Artificial Sequence
  Description of Artificial Sequence: Synthetic oligonucleotide
acgcccacggccacagucu

SEQ ID NO: 1438180 - RNA, 19 nt, Artificial Sequence
  Description of Artificial Sequence: Synthetic oligonucleotide
accaccauaccaggccgaa

SEQ ID NO: 1438181 - RNA, 19 nt, Artificial Sequence
  Description of Artificial Sequence: Synthetic oligonucleotide
gauuguguccagggcuucu

SEQ ID NO: 1438182 - RNA, 19 nt, Artificial Sequence
  Description of Artificial Sequence: Synthetic oligonucleotide
cagucgauaacuggugagu

SEQ ID NO: 1438183 - RNA, 19 nt, Artificial Sequence
  Description of Artificial Sequence: Synthetic oligonucleotide
ggcugugugacagucgaua

SEQ ID NO: 1438184 - RNA, 19 nt, Artificial Sequence
  Description of Artificial Sequence: Synthetic oligonucleotide
cacagacauuugccccggc

SEQ ID NO: 1438185 - RNA, 19 nt, Artificial Sequence
  Description of Artificial Sequence: Synthetic oligonucleotide
caggccgaaggauaccagu

SEQ ID NO: 1438186 - RNA, 19 nt, Artificial Sequence
  Description of Artificial Sequence: Synthetic oligonucleotide
ggacacgccacuugcauuu

SEQ ID NO: 1438187 - RNA, 19 nt, Artificial Sequence
  Description of Artificial Sequence: Synthetic oligonucleotide
cuucaccucuguggugaug

SEQ ID NO: 1438188 - RNA, 19 nt, Artificial Sequence
  Description of Artificial Sequence: Synthetic oligonucleotide
guggguacugugagaaacu

SEQ ID NO: 1438189 - RNA, 19 nt, Artificial Sequence
  Description of Artificial Sequence: Synthetic oligonucleotide
cuuuacgcccagagguacu

SEQ ID NO: 1438190 - RNA, 19 nt, Artificial Sequence
  Description of Artificial Sequence: Synthetic oligonucleotide
ucccgguuugcccguucuu

SEQ ID NO: 1438191 - RNA, 19 nt, Artificial Sequence
  Description of Artificial Sequence: Synthetic oligonucleotide
cccgcgcuucacuugcccg

SEQ ID NO: 1438192 - RNA, 19 nt, Artificial Sequence
  Description of Artificial Sequence: Synthetic oligonucleotide
ccgaguuccggggaccggg

SEQ ID NO: 1438193 - RNA, 19 nt, Artificial Sequence
  Description of Artificial Sequence: Synthetic oligonucleotide
ccgcauuuguaaaugagau

SEQ ID NO: 1438194 - RNA, 19 nt, Artificial Sequence
  Description of Artificial Sequence: Synthetic oligonucleotide
cgaauauccuugacggaca

SEQ ID NO: 1438195 - RNA, 19 nt, Artificial Sequence
  Description of Artificial Sequence: Synthetic oligonucleotide
cuguccccacagacauuug

SEQ ID NO: 1438196 - RNA, 19 nt, Artificial Sequence
  Description of Artificial Sequence: Synthetic oligonucleotide
cacgccacuugcauuuccu

SEQ ID NO: 1438197 - RNA, 19 nt, Artificial Sequence
  Description of Artificial Sequence: Synthetic oligonucleotide
ccgcgcuucacuugcccgc

SEQ ID NO: 1438198 - RNA, 19 nt, Artificial Sequence
  Description of Artificial Sequence: Synthetic oligonucleotide
ccagagggagaugucgaug

SEQ ID NO: 1438199 - RNA, 19 nt, Artificial Sequence
  Description of Artificial Sequence: Synthetic oligonucleotide
gccccggcgaauauccuug

SEQ ID NO: 1438200 - RNA, 19 nt, Artificial Sequence
  Description of Artificial Sequence: Synthetic oligonucleotide
acuaggcccaggagggcau

SEQ ID NO: 1438201 - RNA, 19 nt, Artificial Sequence
  Description of Artificial Sequence: Synthetic oligonucleotide
gggcaugucccgguuugcc

SEQ ID NO: 1438202 - RNA, 19 nt, Artificial Sequence
  Description of Artificial Sequence: Synthetic oligonucleotide
cugugcggacuuggugacc

SEQ ID NO: 1438203 - RNA, 19 nt, Artificial Sequence
  Description of Artificial Sequence: Synthetic oligonucleotide
gacacgccacuugcauuuc

SEQ ID NO: 1438204 - RNA, 19 nt, Artificial Sequence
  Description of Artificial Sequence: Synthetic oligonucleotide
auauugggugagggcucca

SEQ ID NO: 1438205 - RNA, 19 nt, Artificial Sequence
  Description of Artificial Sequence: Synthetic oligonucleotide
gcggccgagagguggguac

SEQ ID NO: 1438206 - RNA, 19 nt, Artificial Sequence
  Description of Artificial Sequence: Synthetic oligonucleotide
ccgagagguggguacugug

SEQ ID NO: 1438207 - RNA, 19 nt, Artificial Sequence
  Description of Artificial Sequence: Synthetic oligonucleotide
caccaccauaccaggccga

SEQ ID NO: 1438208 - RNA, 19 nt, Artificial Sequence
  Description of Artificial Sequence: Synthetic oligonucleotide
gcugagcgccucguggugc

SEQ ID NO: 1438209 - RNA, 19 nt, Artificial Sequence
  Description of Artificial Sequence: Synthetic oligonucleotide
gcuucacuugcccgcuuuc

SEQ ID NO: 1438210 - RNA, 19 nt, Artificial Sequence
  Description of Artificial Sequence: Synthetic oligonucleotide
ccaaucuuguacacguccu

SEQ ID NO: 1438211 - RNA, 19 nt, Artificial Sequence
  Description of Artificial Sequence: Synthetic oligonucleotide
cagaacgccggucaaucuu

SEQ ID NO: 1438212 - RNA, 19 nt, Artificial Sequence
  Description of Artificial Sequence: Synthetic oligonucleotide
gggcuucuagcagggacac

SEQ ID NO: 1438213 - RNA, 19 nt, Artificial Sequence
  Description of Artificial Sequence: Synthetic oligonucleotide
gcggggccgaguuccgggg

SEQ ID NO: 1438214 - RNA, 19 nt, Artificial Sequence
  Description of Artificial Sequence: Synthetic oligonucleotide
cccgguuugcccguucuug

SEQ ID NO: 1438215 - RNA, 19 nt, Artificial Sequence
  Description of Artificial Sequence: Synthetic oligonucleotide
gcgcucuacuuuccagccc

SEQ ID NO: 1438216 - RNA, 19 nt, Artificial Sequence
  Description of Artificial Sequence: Synthetic oligonucleotide
ggccgaguuccggggaccg

SEQ ID NO: 1438217 - RNA, 19 nt, Artificial Sequence
  Description of Artificial Sequence: Synthetic oligonucleotide
ccacagacauuugccccgg

SEQ ID NO: 1438218 - RNA, 19 nt, Artificial Sequence
  Description of Artificial Sequence: Synthetic oligonucleotide
gcgcccgcgcuucacuugc

SEQ ID NO: 1438219 - RNA, 19 nt, Artificial Sequence
  Description of Artificial Sequence: Synthetic oligonucleotide
ggccgaaggauaccagucu

SEQ ID NO: 1438220 - RNA, 19 nt, Artificial Sequence
  Description of Artificial Sequence: Synthetic oligonucleotide
cagcgcugauuugcccagg

SEQ ID NO: 1438221 - RNA, 19 nt, Artificial Sequence
  Description of Artificial Sequence: Synthetic oligonucleotide
cuaggcccaggagggcaug

SEQ ID NO: 1438222 - RNA, 19 nt, Artificial Sequence
  Description of Artificial Sequence: Synthetic oligonucleotide
gggcaggauuguguccagg

SEQ ID NO: 1438223 - RNA, 19 nt, Artificial Sequence
  Description of Artificial Sequence: Synthetic oligonucleotide
ggggaccaucucaacgaug

SEQ ID NO: 1438224 - RNA, 19 nt, Artificial Sequence
  Description of Artificial Sequence: Synthetic oligonucleotide
cuucacuugcccgcuuucu

SEQ ID NO: 1438225 - RNA, 19 nt, Artificial Sequence
  Description of Artificial Sequence: Synthetic oligonucleotide
ugggcuuuccggggaccau

SEQ ID NO: 1438226 - RNA, 19 nt, Artificial Sequence
  Description of Artificial Sequence: Synthetic oligonucleotide
gacuugccugaguccacau

SEQ ID NO: 1438227 - RNA, 19 nt, Artificial Sequence
  Description of Artificial Sequence: Synthetic oligonucleotide
cucuguggugauguuuacu

SEQ ID NO: 1438228 - RNA, 19 nt, Artificial Sequence
  Description of Artificial Sequence: Synthetic oligonucleotide
gaguuccggggaccgggcu

SEQ ID NO: 1438229 - RNA, 19 nt, Artificial Sequence
  Description of Artificial Sequence: Synthetic oligonucleotide
cagccuccugagguggguc

SEQ ID NO: 1438230 - RNA, 19 nt, Artificial Sequence
  Description of Artificial Sequence: Synthetic oligonucleotide
ggcuucuagcagggacacg

SEQ ID NO: 1438231 - RNA, 19 nt, Artificial Sequence
  Description of Artificial Sequence: Synthetic oligonucleotide
ggcgcccgcgcuucacuug

SEQ ID NO: 1438232 - RNA, 19 nt, Artificial Sequence
  Description of Artificial Sequence: Synthetic oligonucleotide
uggcuggguuguagccaau

SEQ ID NO: 1438233 - RNA, 19 nt, Artificial Sequence
  Description of Artificial Sequence: Synthetic oligonucleotide
cagccugagaugggcacaa

SEQ ID NO: 1438234 - RNA, 19 nt, Artificial Sequence
  Description of Artificial Sequence: Synthetic oligonucleotide
gcauaucgcgcacggcgaa

SEQ ID NO: 1438235 - RNA, 19 nt, Artificial Sequence
  Description of Artificial Sequence: Synthetic oligonucleotide
cugauuugcccaggguggu

SEQ ID NO: 1438236 - RNA, 19 nt, Artificial Sequence
  Description of Artificial Sequence: Synthetic oligonucleotide
ugacgcccacggccacagu

SEQ ID NO: 1438237 - RNA, 19 nt, Artificial Sequence
  Description of Artificial Sequence: Synthetic oligonucleotide
ccauggcauauugggugag

SEQ ID NO: 1438238 - RNA, 19 nt, Artificial Sequence
  Description of Artificial Sequence: Synthetic oligonucleotide
gaacgccggucaaucuucu

SEQ ID NO: 1438239 - RNA, 19 nt, Artificial Sequence
  Description of Artificial Sequence: Synthetic oligonucleotide
cgaaggauaccagucucca

SEQ ID NO: 1438240 - RNA, 19 nt, Artificial Sequence
  Description of Artificial Sequence: Synthetic oligonucleotide
uggcgucgccguggcgggg

SEQ ID NO: 1438241 - RNA, 19 nt, Artificial Sequence
  Description of Artificial Sequence: Synthetic oligonucleotide
gcccgcgcuucacuugccc

SEQ ID NO: 1438242 - RNA, 19 nt, Artificial Sequence
  Description of Artificial Sequence: Synthetic oligonucleotide
gggcuuuccggggaccauc

SEQ ID NO: 1438243 - RNA, 19 nt, Artificial Sequence
  Description of Artificial Sequence: Synthetic oligonucleotide
caugucccgguuugcccgu

SEQ ID NO: 1438244 - RNA, 19 nt, Artificial Sequence
  Description of Artificial Sequence: Synthetic oligonucleotide
gaggugggucagauuugcu

SEQ ID NO: 1438245 - RNA, 19 nt, Artificial Sequence
  Description of Artificial Sequence: Synthetic oligonucleotide
ggauuguccuccagcuucu

SEQ ID NO: 1438246 - RNA, 19 nt, Artificial Sequence
  Description of Artificial Sequence: Synthetic oligonucleotide
gcgcacggcgaagcggccg

SEQ ID NO: 1438247 - RNA, 19 nt, Artificial Sequence
  Description of Artificial Sequence: Synthetic oligonucleotide
ggcgaaggggcuugucagu

SEQ ID NO: 1438248 - RNA, 19 nt, Artificial Sequence
  Description of Artificial Sequence: Synthetic oligonucleotide
cgcauaucgcgcacggcga

SEQ ID NO: 1438249 - RNA, 19 nt, Artificial Sequence
  Description of Artificial Sequence: Synthetic oligonucleotide
cugcgccuucugugcggac

SEQ ID NO: 1438250 - RNA, 19 nt, Artificial Sequence
  Description of Artificial Sequence: Synthetic oligonucleotide
cgaguuccggggaccgggc

SEQ ID NO: 1438251 - RNA, 19 nt, Artificial Sequence
  Description of Artificial Sequence: Synthetic oligonucleotide
ggcgcggcaccgucgggga

SEQ ID NO: 1438252 - RNA, 19 nt, Artificial Sequence
  Description of Artificial Sequence: Synthetic oligonucleotide
ccuugcgcucuacuuucca

SEQ ID NO: 1438253 - RNA, 19 nt, Artificial Sequence
  Description of Artificial Sequence: Synthetic oligonucleotide
cgaacuuccagagggagau

SEQ ID NO: 1438254 - RNA, 19 nt, Artificial Sequence
  Description of Artificial Sequence: Synthetic oligonucleotide
caaucucaucauagcgcuu

SEQ ID NO: 1438255 - RNA, 19 nt, Artificial Sequence
  Description of Artificial Sequence: Synthetic oligonucleotide
gcggcaccgucggggaggg

SEQ ID NO: 1438256 - RNA, 19 nt, Artificial Sequence
  Description of Artificial Sequence: Synthetic oligonucleotide
cccggcgaauauccuugac

SEQ ID NO: 1438257 - RNA, 19 nt, Artificial Sequence
  Description of Artificial Sequence: Synthetic oligonucleotide
ugagcgccucguggugcau

SEQ ID NO: 1438258 - RNA, 19 nt, Artificial Sequence
  Description of Artificial Sequence: Synthetic oligonucleotide
ccaccauaccaggccgaag

SEQ ID NO: 1438259 - RNA, 19 nt, Artificial Sequence
  Description of Artificial Sequence: Synthetic oligonucleotide
ccaaugccaccaaucuugu

SEQ ID NO: 1438260 - RNA, 19 nt, Artificial Sequence
  Description of Artificial Sequence: Synthetic oligonucleotide
cgcucuacuuuccagcccu

SEQ ID NO: 1438261 - RNA, 19 nt, Artificial Sequence
  Description of Artificial Sequence: Synthetic oligonucleotide
gccgaguuccggggaccgg

SEQ ID NO: 1438262 - RNA, 19 nt, Artificial Sequence
  Description of Artificial Sequence: Synthetic oligonucleotide
cggcgaagcggccgagagg

SEQ ID NO: 1438263 - RNA, 19 nt, Artificial Sequence
  Description of Artificial Sequence: Synthetic oligonucleotide
gcuuuccggggaccaucuc

SEQ ID NO: 1438264 - RNA, 19 nt, Artificial Sequence
  Description of Artificial Sequence: Synthetic oligonucleotide
gccgcauaucgcgcacggc

SEQ ID NO: 1438265 - RNA, 19 nt, Artificial Sequence
  Description of Artificial Sequence: Synthetic oligonucleotide
cauuugccccggcgaauau

SEQ ID NO: 1438266 - RNA, 19 nt, Artificial Sequence
  Description of Artificial Sequence: Synthetic oligonucleotide
ccacggccacagucugccg

SEQ ID NO: 1438267 - RNA, 19 nt, Artificial Sequence
  Description of Artificial Sequence: Synthetic oligonucleotide
cacggcgaagcggccgaga

SEQ ID NO: 1438268 - RNA, 19 nt, Artificial Sequence
  Description of Artificial Sequence: Synthetic oligonucleotide
ccagccugagaugggcaca

SEQ ID NO: 1438269 - RNA, 19 nt, Artificial Sequence
  Description of Artificial Sequence: Synthetic oligonucleotide
ggcuuuccggggaccaucu

SEQ ID NO: 1438270 - RNA, 19 nt, Artificial Sequence
  Description of Artificial Sequence: Synthetic oligonucleotide
ggaggcgaaggggcuuguc

SEQ ID NO: 1438271 - RNA, 19 nt, Artificial Sequence
  Description of Artificial Sequence: Synthetic oligonucleotide
cuccugaggugggucagau

SEQ ID NO: 1438272 - RNA, 19 nt, Artificial Sequence
  Description of Artificial Sequence: Synthetic oligonucleotide
gcaccgucggggagggcca

SEQ ID NO: 1438273 - RNA, 19 nt, Artificial Sequence
  Description of Artificial Sequence: Synthetic oligonucleotide
ccuugacggacacauucuu

SEQ ID NO: 1438274 - RNA, 19 nt, Artificial Sequence
  Description of Artificial Sequence: Synthetic oligonucleotide
ggccacgccuggggagggg

SEQ ID NO: 1438275 - RNA, 19 nt, Artificial Sequence
  Description of Artificial Sequence: Synthetic oligonucleotide
gcgcugauuugcccagggu

SEQ ID NO: 1438276 - RNA, 19 nt, Artificial Sequence
  Description of Artificial Sequence: Synthetic oligonucleotide
gcccacggccacagucugc

SEQ ID NO: 1438277 - RNA, 19 nt, Artificial Sequence
  Description of Artificial Sequence: Synthetic oligonucleotide
ggagggcaugucccgguuu

SEQ ID NO: 1438278 - RNA, 19 nt, Artificial Sequence
  Description of Artificial Sequence: Synthetic oligonucleotide
augucccgguuugcccguu

SEQ ID NO: 1438279 - RNA, 19 nt, Artificial Sequence
  Description of Artificial Sequence: Synthetic oligonucleotide
gcgcggcaccgucggggag

SEQ ID NO: 1438280 - RNA, 19 nt, Artificial Sequence
  Description of Artificial Sequence: Synthetic oligonucleotide
cgccggucaaucuucuccu

SEQ ID NO: 1438281 - RNA, 19 nt, Artificial Sequence
  Description of Artificial Sequence: Synthetic oligonucleotide
gagcgccucguggugcauu

SEQ ID NO: 1438282 - RNA, 19 nt, Artificial Sequence
  Description of Artificial Sequence: Synthetic oligonucleotide
gugggaggcgaaggggcuu

SEQ ID NO: 1438283 - RNA, 19 nt, Artificial Sequence
  Description of Artificial Sequence: Synthetic oligonucleotide
gcacggcgaagcggccgag

SEQ ID NO: 1438284 - RNA, 19 nt, Artificial Sequence
  Description of Artificial Sequence: Synthetic oligonucleotide
ccauaccaggccgaaggau

SEQ ID NO: 1438285 - RNA, 19 nt, Artificial Sequence
  Description of Artificial Sequence: Synthetic oligonucleotide
cgcacggcgaagcggccga

SEQ ID NO: 1438286 - RNA, 19 nt, Artificial Sequence
  Description of Artificial Sequence: Synthetic oligonucleotide
ccccggcgaauauccuuga

SEQ ID NO: 1438287 - RNA, 19 nt, Artificial Sequence
  Description of Artificial Sequence: Synthetic oligonucleotide
gccgagagguggguacugu

SEQ ID NO: 1438288 - RNA, 19 nt, Artificial Sequence
  Description of Artificial Sequence: Synthetic oligonucleotide
gcgaagcggccgagaggug

SEQ ID NO: 1438289 - RNA, 19 nt, Artificial Sequence
  Description of Artificial Sequence: Synthetic oligonucleotide
cgcgcacggcgaagcggcc

SEQ ID NO: 1438290 - RNA, 19 nt, Artificial Sequence
  Description of Artificial Sequence: Synthetic oligonucleotide
cugaguccacauggccaau

SEQ ID NO: 1438291 - RNA, 19 nt, Artificial Sequence
  Description of Artificial Sequence: Synthetic oligonucleotide
ccgcaaacuugcaggcaau

SEQ ID NO: 1438292 - RNA, 19 nt, Artificial Sequence
  Description of Artificial Sequence: Synthetic oligonucleotide
gugcggacuuggugaccuu

SEQ ID NO: 1438293 - RNA, 19 nt, Artificial Sequence
  Description of Artificial Sequence: Synthetic oligonucleotide
cgcccgcgcuucacuugcc

SEQ ID NO: 1438294 - RNA, 19 nt, Artificial Sequence
  Description of Artificial Sequence: Synthetic oligonucleotide
cgaugguccuuuugucgau

SEQ ID NO: 1438295 - RNA, 19 nt, Artificial Sequence
  Description of Artificial Sequence: Synthetic oligonucleotide
cagggugguucaggaugau

SEQ ID NO: 1438296 - RNA, 19 nt, Artificial Sequence
  Description of Artificial Sequence: Synthetic oligonucleotide
gcgggcgcccgcgcuucac

SEQ ID NO: 1438297 - RNA, 19 nt, Artificial Sequence
  Description of Artificial Sequence: Synthetic oligonucleotide
cggggccgaguuccgggga

SEQ ID NO: 1438298 - RNA, 19 nt, Artificial Sequence
  Description of Artificial Sequence: Synthetic oligonucleotide
gggaggcgaaggggcuugu

SEQ ID NO: 1438299 - RNA, 19 nt, Artificial Sequence
  Description of Artificial Sequence: Synthetic oligonucleotide
cgcuucacuugcccgcuuu

SEQ ID NO: 1438300 - RNA, 19 nt, Artificial Sequence
  Description of Artificial Sequence: Synthetic oligonucleotide
cggggaccaucucaacgau

SEQ ID NO: 1438301 - RNA, 19 nt, Artificial Sequence
  Description of Artificial Sequence: Synthetic oligonucleotide
cgcgcuucacuugcccgcu

SEQ ID NO: 1438302 - RNA, 19 nt, Artificial Sequence
  Description of Artificial Sequence: Synthetic oligonucleotide
gcgcuucacuugcccgcuu

SEQ ID NO: 1438303 - RNA, 19 nt, Artificial Sequence
  Description of Artificial Sequence: Synthetic oligonucleotide
cggccgagagguggguacu

SEQ ID NO: 1438304 - RNA, 19 nt, Artificial Sequence
  Description of Artificial Sequence: Synthetic oligonucleotide
cgcugaccuccuugacaau

SEQ ID NO: 1438305 - RNA, 19 nt, Artificial Sequence
  Description of Artificial Sequence: Synthetic oligonucleotide
cgcgggcgcccgcgcuuca

SEQ ID NO: 1438306 - RNA, 19 nt, Artificial Sequence
  Description of Artificial Sequence: Synthetic oligonucleotide
acaaauuuaauauagaugg

SEQ ID NO: 1438307 - RNA, 19 nt, Artificial Sequence
  Description of Artificial Sequence: Synthetic oligonucleotide
aauauagauggauuuaggg

SEQ ID NO: 1438308 - RNA, 19 nt, Artificial Sequence
  Description of Artificial Sequence: Synthetic oligonucleotide
guaaguaauacuuauagag

SEQ ID NO: 1438309 - RNA, 19 nt, Artificial Sequence
  Description of Artificial Sequence: Synthetic oligonucleotide
aguuguuaaauuuuaaggg

SEQ ID NO: 1438310 - RNA, 19 nt, Artificial Sequence
  Description of Artificial Sequence: Synthetic oligonucleotide
caacuuauuggaaagaugg

SEQ ID NO: 1438311 - RNA, 19 nt, Artificial Sequence
  Description of Artificial Sequence: Synthetic oligonucleotide
ucuacuaugauucuuuaga

SEQ ID NO: 1438312 - RNA, 19 nt, Artificial Sequence
  Description of Artificial Sequence: Synthetic oligonucleotide
ucuaaauuguauacaauag

SEQ ID NO: 1438313 - RNA, 19 nt, Artificial Sequence
  Description of Artificial Sequence: Synthetic oligonucleotide
uucuacaaauuuaauauag

SEQ ID NO: 1438314 - RNA, 19 nt, Artificial Sequence
  Description of Artificial Sequence: Synthetic oligonucleotide
auauagauggauuuagggg

SEQ ID NO: 1438315 - RNA, 19 nt, Artificial Sequence
  Description of Artificial Sequence: Synthetic oligonucleotide
uauagauggauuuagggga

SEQ ID NO: 1438316 - RNA, 19 nt, Artificial Sequence
  Description of Artificial Sequence: Synthetic oligonucleotide
aaaguauaaguuuugucca

SEQ ID NO: 1438317 - RNA, 19 nt, Artificial Sequence
  Description of Artificial Sequence: Synthetic oligonucleotide
uacaauaguagcuaaaggu

SEQ ID NO: 1438318 - RNA, 19 nt, Artificial Sequence
  Description of Artificial Sequence: Synthetic oligonucleotide
acuucuacaaauuuaauau

SEQ ID NO: 1438319 - RNA, 19 nt, Artificial Sequence
  Description of Artificial Sequence: Synthetic oligonucleotide
aaagauggagccuugaaaa

SEQ ID NO: 1438320 - RNA, 19 nt, Artificial Sequence
  Description of Artificial Sequence: Synthetic oligonucleotide
acuaugauucuuuagaggu

SEQ ID NO: 1438321 - RNA, 19 nt, Artificial Sequence
  Description of Artificial Sequence: Synthetic oligonucleotide
aaucuguacaauauucugc

SEQ ID NO: 1438322 - RNA, 19 nt, Artificial Sequence
  Description of Artificial Sequence: Synthetic oligonucleotide
uauauuagggcucuaaaau

SEQ ID NO: 1438323 - RNA, 19 nt, Artificial Sequence
  Description of Artificial Sequence: Synthetic oligonucleotide
ucauaugaaacucaaagua

SEQ ID NO: 1438324 - RNA, 19 nt, Artificial Sequence
  Description of Artificial Sequence: Synthetic oligonucleotide
caguuguuaaauuuuaagg

SEQ ID NO: 1438325 - RNA, 19 nt, Artificial Sequence
  Description of Artificial Sequence: Synthetic oligonucleotide
ugaaacucaaaguauaagu

SEQ ID NO: 1438326 - RNA, 19 nt, Artificial Sequence
  Description of Artificial Sequence: Synthetic oligonucleotide
uauuagggcucuaaaaucc

SEQ ID NO: 1438327 - RNA, 19 nt, Artificial Sequence
  Description of Artificial Sequence: Synthetic oligonucleotide
aaaaugagcauaucaggug

SEQ ID NO: 1438328 - RNA, 19 nt, Artificial Sequence
  Description of Artificial Sequence: Synthetic oligonucleotide
aaauaguucccaugaagag

SEQ ID NO: 1438329 - RNA, 19 nt, Artificial Sequence
  Description of Artificial Sequence: Synthetic oligonucleotide
aauuauccgucccucgggc

SEQ ID NO: 1438330 - RNA, 19 nt, Artificial Sequence
  Description of Artificial Sequence: Synthetic oligonucleotide
aauacuuauagagaugugu

SEQ ID NO: 1438331 - RNA, 19 nt, Artificial Sequence
  Description of Artificial Sequence: Synthetic oligonucleotide
cuuauuggaaagauggagc

SEQ ID NO: 1438332 - RNA, 19 nt, Artificial Sequence
  Description of Artificial Sequence: Synthetic oligonucleotide
cucaaaaugagcauaucag

SEQ ID NO: 1438333 - RNA, 19 nt, Artificial Sequence
  Description of Artificial Sequence: Synthetic oligonucleotide
aacaguucccauuucaacu

SEQ ID NO: 1438334 - RNA, 19 nt, Artificial Sequence
  Description of Artificial Sequence: Synthetic oligonucleotide
ucaguuguuaaauuuuaag

SEQ ID NO: 1438335 - RNA, 19 nt, Artificial Sequence
  Description of Artificial Sequence: Synthetic oligonucleotide
aagaaaaucccucucuacu

SEQ ID NO: 1438336 - RNA, 19 nt, Artificial Sequence
  Description of Artificial Sequence: Synthetic oligonucleotide
uagcaaaacacuugguugg

SEQ ID NO: 1438337 - RNA, 19 nt, Artificial Sequence
  Description of Artificial Sequence: Synthetic oligonucleotide
ugacucaagauuuacuugc

SEQ ID NO: 1438338 - RNA, 19 nt, Artificial Sequence
  Description of Artificial Sequence: Synthetic oligonucleotide
uaauauagauggauuuagg

SEQ ID NO: 1438339 - RNA, 19 nt, Artificial Sequence
  Description of Artificial Sequence: Synthetic oligonucleotide
aaaauaguucccaugaaga

SEQ ID NO: 1438340 - RNA, 19 nt, Artificial Sequence
  Description of Artificial Sequence: Synthetic oligonucleotide
auauuagggcucuaaaauc

SEQ ID NO: 1438341 - RNA, 19 nt, Artificial Sequence
  Description of Artificial Sequence: Synthetic oligonucleotide
cuaaagguaauauugaaaa

SEQ ID NO: 1438342 - RNA, 19 nt, Artificial Sequence
  Description of Artificial Sequence: Synthetic oligonucleotide
auaauuauccgucccucgg

SEQ ID NO: 1438343 - RNA, 19 nt, Artificial Sequence
  Description of Artificial Sequence: Synthetic oligonucleotide
uacuaugauucuuuagagg

SEQ ID NO: 1438344 - RNA, 19 nt, Artificial Sequence
  Description of Artificial Sequence: Synthetic oligonucleotide
auacaauaguagcuaaagg

SEQ ID NO: 1438345 - RNA, 19 nt, Artificial Sequence
  Description of Artificial Sequence: Synthetic oligonucleotide
acucgggucauaauuaucc

SEQ ID NO: 1438346 - RNA, 19 nt, Artificial Sequence
  Description of Artificial Sequence: Synthetic oligonucleotide
uggcaguaaauacugaaca

SEQ ID NO: 1438347 - RNA, 19 nt, Artificial Sequence
  Description of Artificial Sequence: Synthetic oligonucleotide
ugcacuggucucaucaugg

SEQ ID NO: 1438348 - RNA, 19 nt, Artificial Sequence
  Description of Artificial Sequence: Synthetic oligonucleotide
ugaaaguggccucucaaug

SEQ ID NO: 1438349 - RNA, 19 nt, Artificial Sequence
  Description of Artificial Sequence: Synthetic oligonucleotide
uggguaacggaacuagggg

SEQ ID NO: 1438350 - RNA, 19 nt, Artificial Sequence
  Description of Artificial Sequence: Synthetic oligonucleotide
uuuucggaaucccuccugg

SEQ ID NO: 1438351 - RNA, 19 nt, Artificial Sequence
  Description of Artificial Sequence: Synthetic oligonucleotide
uuauauuagggcucuaaaa

SEQ ID NO: 1438352 - RNA, 19 nt, Artificial Sequence
  Description of Artificial Sequence: Synthetic oligonucleotide
uuuauauuagggcucuaaa

SEQ ID NO: 1438353 - RNA, 19 nt, Artificial Sequence
  Description of Artificial Sequence: Synthetic oligonucleotide
aaguugguacaucacauaa

SEQ ID NO: 1438354 - RNA, 19 nt, Artificial Sequence
  Description of Artificial Sequence: Synthetic oligonucleotide
uggauuuaggggaaacucc

SEQ ID NO: 1438355 - RNA, 19 nt, Artificial Sequence
  Description of Artificial Sequence: Synthetic oligonucleotide
auaguucccaugaagaguc

SEQ ID NO: 1438356 - RNA, 19 nt, Artificial Sequence
  Description of Artificial Sequence: Synthetic oligonucleotide
aagaacugacccaccaugc

SEQ ID NO: 1438357 - RNA, 19 nt, Artificial Sequence
  Description of Artificial Sequence: Synthetic oligonucleotide
aauaccaagguagcaguag

SEQ ID NO: 1438358 - RNA, 19 nt, Artificial Sequence
  Description of Artificial Sequence: Synthetic oligonucleotide
uuuacugaagguuuuggua

SEQ ID NO: 1438359 - RNA, 19 nt, Artificial Sequence
  Description of Artificial Sequence: Synthetic oligonucleotide
aauaguucccaugaagagu

SEQ ID NO: 1438360 - RNA, 19 nt, Artificial Sequence
  Description of Artificial Sequence: Synthetic oligonucleotide
ugaaacucuaaauuguaua

SEQ ID NO: 1438361 - RNA, 19 nt, Artificial Sequence
  Description of Artificial Sequence: Synthetic oligonucleotide
uuacugaagguuuugguau

SEQ ID NO: 1438362 - RNA, 19 nt, Artificial Sequence
  Description of Artificial Sequence: Synthetic oligonucleotide
uguaaugaggcuugugcug

SEQ ID NO: 1438363 - RNA, 19 nt, Artificial Sequence
  Description of Artificial Sequence: Synthetic oligonucleotide
caauauggaauguaccuac

SEQ ID NO: 1438364 - RNA, 19 nt, Artificial Sequence
  Description of Artificial Sequence: Synthetic oligonucleotide
uacuucuacaaauuuaaua

SEQ ID NO: 1438365 - RNA, 19 nt, Artificial Sequence
  Description of Artificial Sequence: Synthetic oligonucleotide
ugugacucaagauuuacuu

SEQ ID NO: 1438366 - RNA, 19 nt, Artificial Sequence
  Description of Artificial Sequence: Synthetic oligonucleotide
cuacuaugauucuuuagag

SEQ ID NO: 1438367 - RNA, 19 nt, Artificial Sequence
  Description of Artificial Sequence: Synthetic oligonucleotide
aaacaaacacugcugcaga

SEQ ID NO: 1438368 - RNA, 19 nt, Artificial Sequence
  Description of Artificial Sequence: Synthetic oligonucleotide
uggcauaaagaccuggacu

SEQ ID NO: 1438369 - RNA, 19 nt, Artificial Sequence
  Description of Artificial Sequence: Synthetic oligonucleotide
aauguaccuacauuuguuu

SEQ ID NO: 1438370 - RNA, 19 nt, Artificial Sequence
  Description of Artificial Sequence: Synthetic oligonucleotide
uuuauucaagguuguaagu

SEQ ID NO: 1438371 - RNA, 19 nt, Artificial Sequence
  Description of Artificial Sequence: Synthetic oligonucleotide
uaagcaccuagcuucacug

SEQ ID NO: 1438372 - RNA, 19 nt, Artificial Sequence
  Description of Artificial Sequence: Synthetic oligonucleotide
cauaaaaguugguacauca

SEQ ID NO: 1438373 - RNA, 19 nt, Artificial Sequence
  Description of Artificial Sequence: Synthetic oligonucleotide
uuaugaaggaugacacuca

SEQ ID NO: 1438374 - RNA, 19 nt, Artificial Sequence
  Description of Artificial Sequence: Synthetic oligonucleotide
ugcaagaccugcuugcuca

SEQ ID NO: 1438375 - RNA, 19 nt, Artificial Sequence
  Description of Artificial Sequence: Synthetic oligonucleotide
ucggaguugaaguacuccc

SEQ ID NO: 1438376 - RNA, 19 nt, Artificial Sequence
  Description of Artificial Sequence: Synthetic oligonucleotide
caaauccuuaugaaggaug

SEQ ID NO: 1438377 - RNA, 19 nt, Artificial Sequence
  Description of Artificial Sequence: Synthetic oligonucleotide
cuggguaacggaacuaggg

SEQ ID NO: 1438378 - RNA, 19 nt, Artificial Sequence
  Description of Artificial Sequence: Synthetic oligonucleotide
auuguauacaauaguagcu

SEQ ID NO: 1438379 - RNA, 19 nt, Artificial Sequence
  Description of Artificial Sequence: Synthetic oligonucleotide
uuuccagcggguguuauag

SEQ ID NO: 1438380 - RNA, 19 nt, Artificial Sequence
  Description of Artificial Sequence: Synthetic oligonucleotide
aaauccuuaugaaggauga

SEQ ID NO: 1438381 - RNA, 19 nt, Artificial Sequence
  Description of Artificial Sequence: Synthetic oligonucleotide
ucaagguuguaaguaauac

SEQ ID NO: 1438382 - RNA, 19 nt, Artificial Sequence
  Description of Artificial Sequence: Synthetic oligonucleotide
uguuaaauuuuaaggggua

SEQ ID NO: 1438383 - RNA, 19 nt, Artificial Sequence
  Description of Artificial Sequence: Synthetic oligonucleotide
gaagacgcuugccaagggg

SEQ ID NO: 1438384 - RNA, 19 nt, Artificial Sequence
  Description of Artificial Sequence: Synthetic oligonucleotide
aggggaaacuccaggaucc

SEQ ID NO: 1438385 - RNA, 19 nt, Artificial Sequence
  Description of Artificial Sequence: Synthetic oligonucleotide
ucggaaucccuccuggcag

SEQ ID NO: 1438386 - RNA, 19 nt, Artificial Sequence
  Description of Artificial Sequence: Synthetic oligonucleotide
uuuuaagggguauccgaug

SEQ ID NO: 1438387 - RNA, 19 nt, Artificial Sequence
  Description of Artificial Sequence: Synthetic oligonucleotide
auaaaaguugguacaucac

SEQ ID NO: 1438388 - RNA, 19 nt, Artificial Sequence
  Description of Artificial Sequence: Synthetic oligonucleotide
aacauucccaccgguuggc

SEQ ID NO: 1438389 - RNA, 19 nt, Artificial Sequence
  Description of Artificial Sequence: Synthetic oligonucleotide
uguaccuacauuuguuuau

SEQ ID NO: 1438390 - RNA, 19 nt, Artificial Sequence
  Description of Artificial Sequence: Synthetic oligonucleotide
caacuaaugagccagcgga

SEQ ID NO: 1438391 - RNA, 19 nt, Artificial Sequence
  Description of Artificial Sequence: Synthetic oligonucleotide
ucuggguaacggaacuagg

SEQ ID NO: 1438392 - RNA, 19 nt, Artificial Sequence
  Description of Artificial Sequence: Synthetic oligonucleotide
uguauacaauaguagcuaa

SEQ ID NO: 1438393 - RNA, 19 nt, Artificial Sequence
  Description of Artificial Sequence: Synthetic oligonucleotide
aaauggcaaacacaaccau

SEQ ID NO: 1438394 - RNA, 19 nt, Artificial Sequence
  Description of Artificial Sequence: Synthetic oligonucleotide
uccagcggguguuauagcc

SEQ ID NO: 1438395 - RNA, 19 nt, Artificial Sequence
  Description of Artificial Sequence: Synthetic oligonucleotide
aaaguacuuuugcaggcaa

SEQ ID NO: 1438396 - RNA, 19 nt, Artificial Sequence
  Description of Artificial Sequence: Synthetic oligonucleotide
caggcacucaacuaaugag

SEQ ID NO: 1438397 - RNA, 19 nt, Artificial Sequence
  Description of Artificial Sequence: Synthetic oligonucleotide
uggccaacuuauuggaaag

SEQ ID NO: 1438398 - RNA, 19 nt, Artificial Sequence
  Description of Artificial Sequence: Synthetic oligonucleotide
auguccucuuuccagcggg

SEQ ID NO: 1438399 - RNA, 19 nt, Artificial Sequence
  Description of Artificial Sequence: Synthetic oligonucleotide
uacuucuaccuguaaugag

SEQ ID NO: 1438400 - RNA, 19 nt, Artificial Sequence
  Description of Artificial Sequence: Synthetic oligonucleotide
uuguauacaauaguagcua

SEQ ID NO: 1438401 - RNA, 19 nt, Artificial Sequence
  Description of Artificial Sequence: Synthetic oligonucleotide
aaaguugguacaucacaua

SEQ ID NO: 1438402 - RNA, 19 nt, Artificial Sequence
  Description of Artificial Sequence: Synthetic oligonucleotide
ucuuuagagguugcacugg

SEQ ID NO: 1438403 - RNA, 19 nt, Artificial Sequence
  Description of Artificial Sequence: Synthetic oligonucleotide
agaugauccggguggguuc

SEQ ID NO: 1438404 - RNA, 19 nt, Artificial Sequence
  Description of Artificial Sequence: Synthetic oligonucleotide
aauuuguaguaaacguucu

SEQ ID NO: 1438405 - RNA, 19 nt, Artificial Sequence
  Description of Artificial Sequence: Synthetic oligonucleotide
acuaggggaaagaaugcac

SEQ ID NO: 1438406 - RNA, 19 nt, Artificial Sequence
  Description of Artificial Sequence: Synthetic oligonucleotide
caccuagcuucacugaugg

SEQ ID NO: 1438407 - RNA, 19 nt, Artificial Sequence
  Description of Artificial Sequence: Synthetic oligonucleotide
uacuuauagagauguguaa

SEQ ID NO: 1438408 - RNA, 19 nt, Artificial Sequence
  Description of Artificial Sequence: Synthetic oligonucleotide
aacugacccaccaugcaag

SEQ ID NO: 1438409 - RNA, 19 nt, Artificial Sequence
  Description of Artificial Sequence: Synthetic oligonucleotide
ugagaggguuuccaggcca

SEQ ID NO: 1438410 - RNA, 19 nt, Artificial Sequence
  Description of Artificial Sequence: Synthetic oligonucleotide
aguagcuaaagguaauauu

SEQ ID NO: 1438411 - RNA, 19 nt, Artificial Sequence
  Description of Artificial Sequence: Synthetic oligonucleotide
cuggcaguaaauacugaac

SEQ ID NO: 1438412 - RNA, 19 nt, Artificial Sequence
  Description of Artificial Sequence: Synthetic oligonucleotide
augaaacucaaaguauaag

SEQ ID NO: 1438413 - RNA, 19 nt, Artificial Sequence
  Description of Artificial Sequence: Synthetic oligonucleotide
cacaucuggugaaaguggc

SEQ ID NO: 1438414 - RNA, 19 nt, Artificial Sequence
  Description of Artificial Sequence: Synthetic oligonucleotide
acugugacucaagauuuac

SEQ ID NO: 1438415 - RNA, 19 nt, Artificial Sequence
  Description of Artificial Sequence: Synthetic oligonucleotide
cuaaugagccagcggaaag

SEQ ID NO: 1438416 - RNA, 19 nt, Artificial Sequence
  Description of Artificial Sequence: Synthetic oligonucleotide
cuaccuguaaugaggcuug

SEQ ID NO: 1438417 - RNA, 19 nt, Artificial Sequence
  Description of Artificial Sequence: Synthetic oligonucleotide
aacccaaucuuuacugaag

SEQ ID NO: 1438418 - RNA, 19 nt, Artificial Sequence
  Description of Artificial Sequence: Synthetic oligonucleotide
auccuuaugaaggaugaca

SEQ ID NO: 1438419 - RNA, 19 nt, Artificial Sequence
  Description of Artificial Sequence: Synthetic oligonucleotide
ugauuggaaauagcaaaac

SEQ ID NO: 1438420 - RNA, 19 nt, Artificial Sequence
  Description of Artificial Sequence: Synthetic oligonucleotide
gugacucaagauuuacuug

SEQ ID NO: 1438421 - RNA, 19 nt, Artificial Sequence
  Description of Artificial Sequence: Synthetic oligonucleotide
gguuuugguauuugcuugg

SEQ ID NO: 1438422 - RNA, 19 nt, Artificial Sequence
  Description of Artificial Sequence: Synthetic oligonucleotide
aacuaggggaaagaaugca

SEQ ID NO: 1438423 - RNA, 19 nt, Artificial Sequence
  Description of Artificial Sequence: Synthetic oligonucleotide
agcggaaagaaaaucccuc

SEQ ID NO: 1438424 - RNA, 19 nt, Artificial Sequence
  Description of Artificial Sequence: Synthetic oligonucleotide
aauaguagcuaaagguaau

SEQ ID NO: 1438425 - RNA, 19 nt, Artificial Sequence
  Description of Artificial Sequence: Synthetic oligonucleotide
acacugauuggaaauagca

SEQ ID NO: 1438426 - RNA, 19 nt, Artificial Sequence
  Description of Artificial Sequence: Synthetic oligonucleotide
augccaacccaaucuuuac

SEQ ID NO: 1438427 - RNA, 19 nt, Artificial Sequence
  Description of Artificial Sequence: Synthetic oligonucleotide
ucuaccuguaaugaggcuu

SEQ ID NO: 1438428 - RNA, 19 nt, Artificial Sequence
  Description of Artificial Sequence: Synthetic oligonucleotide
uggagccuugaaaagucug

SEQ ID NO: 1438429 - RNA, 19 nt, Artificial Sequence
  Description of Artificial Sequence: Synthetic oligonucleotide
aaguacuuuugcaggcaac

SEQ ID NO: 1438430 - RNA, 19 nt, Artificial Sequence
  Description of Artificial Sequence: Synthetic oligonucleotide
aguaauacuuauagagaug

SEQ ID NO: 1438431 - RNA, 19 nt, Artificial Sequence
  Description of Artificial Sequence: Synthetic oligonucleotide
auucccaccgguuggcuug

SEQ ID NO: 1438432 - RNA, 19 nt, Artificial Sequence
  Description of Artificial Sequence: Synthetic oligonucleotide
auaccaagguagcaguaga

SEQ ID NO: 1438433 - RNA, 19 nt, Artificial Sequence
  Description of Artificial Sequence: Synthetic oligonucleotide
caaaaugagcauaucaggu

SEQ ID NO: 1438434 - RNA, 19 nt, Artificial Sequence
  Description of Artificial Sequence: Synthetic oligonucleotide
uuguuuauauuagggcucu

SEQ ID NO: 1438435 - RNA, 19 nt, Artificial Sequence
  Description of Artificial Sequence: Synthetic oligonucleotide
cucggcauagugguaacgg

SEQ ID NO: 1438436 - RNA, 19 nt, Artificial Sequence
  Description of Artificial Sequence: Synthetic oligonucleotide
ugcacucgggucauaauua

SEQ ID NO: 1438437 - RNA, 19 nt, Artificial Sequence
  Description of Artificial Sequence: Synthetic oligonucleotide
auauggaauguaccuacau

SEQ ID NO: 1438438 - RNA, 19 nt, Artificial Sequence
  Description of Artificial Sequence: Synthetic oligonucleotide
aacggauguccucuuucca

SEQ ID NO: 1438439 - RNA, 19 nt, Artificial Sequence
  Description of Artificial Sequence: Synthetic oligonucleotide
cuaaauuguauacaauagu

SEQ ID NO: 1438440 - RNA, 19 nt, Artificial Sequence
  Description of Artificial Sequence: Synthetic oligonucleotide
uucucggaguugaaguacu

SEQ ID NO: 1438441 - RNA, 19 nt, Artificial Sequence
  Description of Artificial Sequence: Synthetic oligonucleotide
uugcacucgggucauaauu

SEQ ID NO: 1438442 - RNA, 19 nt, Artificial Sequence
  Description of Artificial Sequence: Synthetic oligonucleotide
gagcauaucaggugagguc

SEQ ID NO: 1438443 - RNA, 19 nt, Artificial Sequence
  Description of Artificial Sequence: Synthetic oligonucleotide
ugguauuugcuuggaaaug

SEQ ID NO: 1438444 - RNA, 19 nt, Artificial Sequence
  Description of Artificial Sequence: Synthetic oligonucleotide
ugugagcugaucucggcau

SEQ ID NO: 1438445 - RNA, 19 nt, Artificial Sequence
  Description of Artificial Sequence: Synthetic oligonucleotide
cuaggggaaagaaugcaca

SEQ ID NO: 1438446 - RNA, 19 nt, Artificial Sequence
  Description of Artificial Sequence: Synthetic oligonucleotide
ugaccucagcaauaccaag

SEQ ID NO: 1438447 - RNA, 19 nt, Artificial Sequence
  Description of Artificial Sequence: Synthetic oligonucleotide
ggguguuauagccaauucc

SEQ ID NO: 1438448 - RNA, 19 nt, Artificial Sequence
  Description of Artificial Sequence: Synthetic oligonucleotide
gaacuaggggaaagaaugc

SEQ ID NO: 1438449 - RNA, 19 nt, Artificial Sequence
  Description of Artificial Sequence: Synthetic oligonucleotide
aauauggaauguaccuaca

SEQ ID NO: 1438450 - RNA, 19 nt, Artificial Sequence
  Description of Artificial Sequence: Synthetic oligonucleotide
caauuucauaugaaacuca

SEQ ID NO: 1438451 - RNA, 19 nt, Artificial Sequence
  Description of Artificial Sequence: Synthetic oligonucleotide
aggggaaagaaugcacacg

SEQ ID NO: 1438452 - RNA, 19 nt, Artificial Sequence
  Description of Artificial Sequence: Synthetic oligonucleotide
aaugagccagcggaaagaa

SEQ ID NO: 1438453 - RNA, 19 nt, Artificial Sequence
  Description of Artificial Sequence: Synthetic oligonucleotide
ucgggucauaauuauccgu

SEQ ID NO: 1438454 - RNA, 19 nt, Artificial Sequence
  Description of Artificial Sequence: Synthetic oligonucleotide
cugauggugaucucuaaaa

SEQ ID NO: 1438455 - RNA, 19 nt, Artificial Sequence
  Description of Artificial Sequence: Synthetic oligonucleotide
agauggagccuugaaaagu

SEQ ID NO: 1438456 - RNA, 19 nt, Artificial Sequence
  Description of Artificial Sequence: Synthetic oligonucleotide
ugacacucaguuguuaaau

SEQ ID NO: 1438457 - RNA, 19 nt, Artificial Sequence
  Description of Artificial Sequence: Synthetic oligonucleotide
gauuuaggggaaacuccag

SEQ ID NO: 1438458 - RNA, 19 nt, Artificial Sequence
  Description of Artificial Sequence: Synthetic oligonucleotide
auuugcuuggaaauguaaa

SEQ ID NO: 1438459 - RNA, 19 nt, Artificial Sequence
  Description of Artificial Sequence: Synthetic oligonucleotide
gcucaaaaugagcauauca

SEQ ID NO: 1438460 - RNA, 19 nt, Artificial Sequence
  Description of Artificial Sequence: Synthetic oligonucleotide
auacuuauagagaugugua

SEQ ID NO: 1438461 - RNA, 19 nt, Artificial Sequence
  Description of Artificial Sequence: Synthetic oligonucleotide
accaugcaagaccugcuug

SEQ ID NO: 1438462 - RNA, 19 nt, Artificial Sequence
  Description of Artificial Sequence: Synthetic oligonucleotide
ugccaacccaaucuuuacu

SEQ ID NO: 1438463 - RNA, 19 nt, Artificial Sequence
  Description of Artificial Sequence: Synthetic oligonucleotide
agaacugacccaccaugca

SEQ ID NO: 1438464 - RNA, 19 nt, Artificial Sequence
  Description of Artificial Sequence: Synthetic oligonucleotide
ugagcugaucucggcauag

SEQ ID NO: 1438465 - RNA, 19 nt, Artificial Sequence
  Description of Artificial Sequence: Synthetic oligonucleotide
auggguauccagucaauuu

SEQ ID NO: 1438466 - RNA, 19 nt, Artificial Sequence
  Description of Artificial Sequence: Synthetic oligonucleotide
acucaagauuuacuugcca

SEQ ID NO: 1438467 - RNA, 19 nt, Artificial Sequence
  Description of Artificial Sequence: Synthetic oligonucleotide
uacuugccauuaucuauug

SEQ ID NO: 1438468 - RNA, 19 nt, Artificial Sequence
  Description of Artificial Sequence: Synthetic oligonucleotide
ucacugauggugaucucua

SEQ ID NO: 1438469 - RNA, 19 nt, Artificial Sequence
  Description of Artificial Sequence: Synthetic oligonucleotide
aacggaacuaggggaaaga

SEQ ID NO: 1438470 - RNA, 19 nt, Artificial Sequence
  Description of Artificial Sequence: Synthetic oligonucleotide
ugccauuaucuauugcuua

SEQ ID NO: 1438471 - RNA, 19 nt, Artificial Sequence
  Description of Artificial Sequence: Synthetic oligonucleotide
auuuuaagggguauccgau

SEQ ID NO: 1438472 - RNA, 19 nt, Artificial Sequence
  Description of Artificial Sequence: Synthetic oligonucleotide
uauuggaaagauggagccu

SEQ ID NO: 1438473 - RNA, 19 nt, Artificial Sequence
  Description of Artificial Sequence: Synthetic oligonucleotide
guaacggauguccucuuuc

SEQ ID NO: 1438474 - RNA, 19 nt, Artificial Sequence
  Description of Artificial Sequence: Synthetic oligonucleotide
aauggguauccagucaauu

SEQ ID NO: 1438475 - RNA, 19 nt, Artificial Sequence
  Description of Artificial Sequence: Synthetic oligonucleotide
uaacggaacuaggggaaag

SEQ ID NO: 1438476 - RNA, 19 nt, Artificial Sequence
  Description of Artificial Sequence: Synthetic oligonucleotide
acuggucucaucauggaaa

SEQ ID NO: 1438477 - RNA, 19 nt, Artificial Sequence
  Description of Artificial Sequence: Synthetic oligonucleotide
aaguuuuguccaauaugga

SEQ ID NO: 1438478 - RNA, 19 nt, Artificial Sequence
  Description of Artificial Sequence: Synthetic oligonucleotide
ggucauaauuauccguccc

SEQ ID NO: 1438479 - RNA, 19 nt, Artificial Sequence
  Description of Artificial Sequence: Synthetic oligonucleotide
gguugcacuggucucauca

SEQ ID NO: 1438480 - RNA, 19 nt, Artificial Sequence
  Description of Artificial Sequence: Synthetic oligonucleotide
aagcaccuagcuucacuga

SEQ ID NO: 1438481 - RNA, 19 nt, Artificial Sequence
  Description of Artificial Sequence: Synthetic oligonucleotide
uaguagcuaaagguaauau

SEQ ID NO: 1438482 - RNA, 19 nt, Artificial Sequence
  Description of Artificial Sequence: Synthetic oligonucleotide
uuagggcucuaaaauccau

SEQ ID NO: 1438483 - RNA, 19 nt, Artificial Sequence
  Description of Artificial Sequence: Synthetic oligonucleotide
caccgguuggcuuggagug

SEQ ID NO: 1438484 - RNA, 19 nt, Artificial Sequence
  Description of Artificial Sequence: Synthetic oligonucleotide
acccauuaaugccaaccca

SEQ ID NO: 1438485 - RNA, 19 nt, Artificial Sequence
  Description of Artificial Sequence: Synthetic oligonucleotide
gaacugacccaccaugcaa

SEQ ID NO: 1438486 - RNA, 19 nt, Artificial Sequence
  Description of Artificial Sequence: Synthetic oligonucleotide
agccuuauuuacugugacu

SEQ ID NO: 1438487 - RNA, 19 nt, Artificial Sequence
  Description of Artificial Sequence: Synthetic oligonucleotide
gucuggguaacggaacuag

SEQ ID NO: 1438488 - RNA, 19 nt, Artificial Sequence
  Description of Artificial Sequence: Synthetic oligonucleotide
agcaguagaugauccgggu

SEQ ID NO: 1438489 - RNA, 19 nt, Artificial Sequence
  Description of Artificial Sequence: Synthetic oligonucleotide
agaaugcacacgcccaaau

SEQ ID NO: 1438490 - RNA, 19 nt, Artificial Sequence
  Description of Artificial Sequence: Synthetic oligonucleotide
uagugguaacggauguccu

SEQ ID NO: 1438491 - RNA, 19 nt, Artificial Sequence
  Description of Artificial Sequence: Synthetic oligonucleotide
gccuuauuuacugugacuc

SEQ ID NO: 1438492 - RNA, 19 nt, Artificial Sequence
  Description of Artificial Sequence: Synthetic oligonucleotide
aucucggcauagugguaac

SEQ ID NO: 1438493 - RNA, 19 nt, Artificial Sequence
  Description of Artificial Sequence: Synthetic oligonucleotide
caacccugcccucuuuucc

SEQ ID NO: 1438494 - RNA, 19 nt, Artificial Sequence
  Description of Artificial Sequence: Synthetic oligonucleotide
aaaaucgauguuaccuuuu

SEQ ID NO: 1438495 - RNA, 19 nt, Artificial Sequence
  Description of Artificial Sequence: Synthetic oligonucleotide
uccaggcacucaacuaaug

SEQ ID NO: 1438496 - RNA, 19 nt, Artificial Sequence
  Description of Artificial Sequence: Synthetic oligonucleotide
accuacauuuguuuauauu

SEQ ID NO: 1438497 - RNA, 19 nt, Artificial Sequence
  Description of Artificial Sequence: Synthetic oligonucleotide
uaaugaggcuugugcugag

SEQ ID NO: 1438498 - RNA, 19 nt, Artificial Sequence
  Description of Artificial Sequence: Synthetic oligonucleotide
acaauacaguucugagaca

SEQ ID NO: 1438499 - RNA, 19 nt, Artificial Sequence
  Description of Artificial Sequence: Synthetic oligonucleotide
acucaacuaaugagccagc

SEQ ID NO: 1438500 - RNA, 19 nt, Artificial Sequence
  Description of Artificial Sequence: Synthetic oligonucleotide
augacacucaguuguuaaa

SEQ ID NO: 1438501 - RNA, 19 nt, Artificial Sequence
  Description of Artificial Sequence: Synthetic oligonucleotide
uuauccgucccucgggcuu

SEQ ID NO: 1438502 - RNA, 19 nt, Artificial Sequence
  Description of Artificial Sequence: Synthetic oligonucleotide
cuuauuuauucaagguugu

SEQ ID NO: 1438503 - RNA, 19 nt, Artificial Sequence
  Description of Artificial Sequence: Synthetic oligonucleotide
agcaccuagcuucacugau

SEQ ID NO: 1438504 - RNA, 19 nt, Artificial Sequence
  Description of Artificial Sequence: Synthetic oligonucleotide
auguaccuacauuuguuua

SEQ ID NO: 1438505 - RNA, 19 nt, Artificial Sequence
  Description of Artificial Sequence: Synthetic oligonucleotide
cucggaguugaaguacucc

SEQ ID NO: 1438506 - RNA, 19 nt, Artificial Sequence
  Description of Artificial Sequence: Synthetic oligonucleotide
uagggcucuaaaauccauu

SEQ ID NO: 1438507 - RNA, 19 nt, Artificial Sequence
  Description of Artificial Sequence: Synthetic oligonucleotide
cuucucggaguugaaguac

SEQ ID NO: 1438508 - RNA, 19 nt, Artificial Sequence
  Description of Artificial Sequence: Synthetic oligonucleotide
ccagucaauuuccaugugc

SEQ ID NO: 1438509 - RNA, 19 nt, Artificial Sequence
  Description of Artificial Sequence: Synthetic oligonucleotide
gaucucggcauagugguaa

SEQ ID NO: 1438510 - RNA, 19 nt, Artificial Sequence
  Description of Artificial Sequence: Synthetic oligonucleotide
agaguccugaccucagcaa

SEQ ID NO: 1438511 - RNA, 19 nt, Artificial Sequence
  Description of Artificial Sequence: Synthetic oligonucleotide
aacaacauucccaccgguu

SEQ ID NO: 1438512 - RNA, 19 nt, Artificial Sequence
  Description of Artificial Sequence: Synthetic oligonucleotide
ggcacucaacuaaugagcc

SEQ ID NO: 1438513 - RNA, 19 nt, Artificial Sequence
  Description of Artificial Sequence: Synthetic oligonucleotide
agaccuggacuuuucggaa

SEQ ID NO: 1438514 - RNA, 19 nt, Artificial Sequence
  Description of Artificial Sequence: Synthetic oligonucleotide
agccagcggaaagaaaauc

SEQ ID NO: 1438515 - RNA, 19 nt, Artificial Sequence
  Description of Artificial Sequence: Synthetic oligonucleotide
caccugugagcugaucucg

SEQ ID NO: 1438516 - RNA, 19 nt, Artificial Sequence
  Description of Artificial Sequence: Synthetic oligonucleotide
auuauccgucccucgggcu

SEQ ID NO: 1438517 - RNA, 19 nt, Artificial Sequence
  Description of Artificial Sequence: Synthetic oligonucleotide
ucucggcauagugguaacg

SEQ ID NO: 1438518 - RNA, 19 nt, Artificial Sequence
  Description of Artificial Sequence: Synthetic oligonucleotide
cagccuuauuuacugugac

SEQ ID NO: 1438519 - RNA, 19 nt, Artificial Sequence
  Description of Artificial Sequence: Synthetic oligonucleotide
guggguucuacuucuaccu

SEQ ID NO: 1438520 - RNA, 19 nt, Artificial Sequence
  Description of Artificial Sequence: Synthetic oligonucleotide
uggugaaaguggccucuca

SEQ ID NO: 1438521 - RNA, 19 nt, Artificial Sequence
  Description of Artificial Sequence: Synthetic oligonucleotide
aacuaaugagccagcggaa

SEQ ID NO: 1438522 - RNA, 19 nt, Artificial Sequence
  Description of Artificial Sequence: Synthetic oligonucleotide
acuaaugagccagcggaaa

SEQ ID NO: 1438523 - RNA, 19 nt, Artificial Sequence
  Description of Artificial Sequence: Synthetic oligonucleotide
cacgcccaaauccuuauga

SEQ ID NO: 1438524 - RNA, 19 nt, Artificial Sequence
  Description of Artificial Sequence: Synthetic oligonucleotide
auaguagcuaaagguaaua

SEQ ID NO: 1438525 - RNA, 19 nt, Artificial Sequence
  Description of Artificial Sequence: Synthetic oligonucleotide
acucccgaagacgcuugcc

SEQ ID NO: 1438526 - RNA, 19 nt, Artificial Sequence
  Description of Artificial Sequence: Synthetic oligonucleotide
ugccaaggggcaccuguga

SEQ ID NO: 1438527 - RNA, 19 nt, Artificial Sequence
  Description of Artificial Sequence: Synthetic oligonucleotide
gggucauaauuauccgucc

SEQ ID NO: 1438528 - RNA, 19 nt, Artificial Sequence
  Description of Artificial Sequence: Synthetic oligonucleotide
aauacaguucugagacaaa

SEQ ID NO: 1438529 - RNA, 19 nt, Artificial Sequence
  Description of Artificial Sequence: Synthetic oligonucleotide
uaccuacauuuguuuauau

SEQ ID NO: 1438530 - RNA, 19 nt, Artificial Sequence
  Description of Artificial Sequence: Synthetic oligonucleotide
agaccugcuugcucaaaau

SEQ ID NO: 1438531 - RNA, 19 nt, Artificial Sequence
  Description of Artificial Sequence: Synthetic oligonucleotide
ggauuuaggggaaacucca

SEQ ID NO: 1438532 - RNA, 19 nt, Artificial Sequence
  Description of Artificial Sequence: Synthetic oligonucleotide
ggguaacggaacuagggga

SEQ ID NO: 1438533 - RNA, 19 nt, Artificial Sequence
  Description of Artificial Sequence: Synthetic oligonucleotide
agucuacuaugauucuuua

SEQ ID NO: 1438534 - RNA, 19 nt, Artificial Sequence
  Description of Artificial Sequence: Synthetic oligonucleotide
aguucccaugaagagucug

SEQ ID NO: 1438535 - RNA, 19 nt, Artificial Sequence
  Description of Artificial Sequence: Synthetic oligonucleotide
gccaauggcauaaagaccu

SEQ ID NO: 1438536 - RNA, 19 nt, Artificial Sequence
  Description of Artificial Sequence: Synthetic oligonucleotide
uucuaccuguaaugaggcu

SEQ ID NO: 1438537 - RNA, 19 nt, Artificial Sequence
  Description of Artificial Sequence: Synthetic oligonucleotide
cuggacuuuucggaauccc

SEQ ID NO: 1438538 - RNA, 19 nt, Artificial Sequence
  Description of Artificial Sequence: Synthetic oligonucleotide
ucccgaagacgcuugccaa

SEQ ID NO: 1438539 - RNA, 19 nt, Artificial Sequence
  Description of Artificial Sequence: Synthetic oligonucleotide
cucaguuguuaaauuuuaa

SEQ ID NO: 1438540 - RNA, 19 nt, Artificial Sequence
  Description of Artificial Sequence: Synthetic oligonucleotide
cucaagauuuacuugccau

SEQ ID NO: 1438541 - RNA, 19 nt, Artificial Sequence
  Description of Artificial Sequence: Synthetic oligonucleotide
uuugcacucgggucauaau

SEQ ID NO: 1438542 - RNA, 19 nt, Artificial Sequence
  Description of Artificial Sequence: Synthetic oligonucleotide
gagccuugaaaagucuguc

SEQ ID NO: 1438543 - RNA, 19 nt, Artificial Sequence
  Description of Artificial Sequence: Synthetic oligonucleotide
ugcccucuuuuccuggguc

SEQ ID NO: 1438544 - RNA, 19 nt, Artificial Sequence
  Description of Artificial Sequence: Synthetic oligonucleotide
agucugauggcagcaucug

SEQ ID NO: 1438545 - RNA, 19 nt, Artificial Sequence
  Description of Artificial Sequence: Synthetic oligonucleotide
agggguauccgauggcuuu

SEQ ID NO: 1438546 - RNA, 19 nt, Artificial Sequence
  Description of Artificial Sequence: Synthetic oligonucleotide
ggcauaaagaccuggacuu

SEQ ID NO: 1438547 - RNA, 19 nt, Artificial Sequence
  Description of Artificial Sequence: Synthetic oligonucleotide
uccuggcaguaaauacuga

SEQ ID NO: 1438548 - RNA, 19 nt, Artificial Sequence
  Description of Artificial Sequence: Synthetic oligonucleotide
ucucggaguugaaguacuc

SEQ ID NO: 1438549 - RNA, 19 nt, Artificial Sequence
  Description of Artificial Sequence: Synthetic oligonucleotide
guauacaauaguagcuaaa

SEQ ID NO: 1438550 - RNA, 19 nt, Artificial Sequence
  Description of Artificial Sequence: Synthetic oligonucleotide
gguuguaaguaauacuuau

SEQ ID NO: 1438551 - RNA, 19 nt, Artificial Sequence
  Description of Artificial Sequence: Synthetic oligonucleotide
aagaaugcacacgcccaaa

SEQ ID NO: 1438552 - RNA, 19 nt, Artificial Sequence
  Description of Artificial Sequence: Synthetic oligonucleotide
ggaguugaaguacucccga

SEQ ID NO: 1438553 - RNA, 19 nt, Artificial Sequence
  Description of Artificial Sequence: Synthetic oligonucleotide
uacucccgaagacgcuugc

SEQ ID NO: 1438554 - RNA, 19 nt, Artificial Sequence
  Description of Artificial Sequence: Synthetic oligonucleotide
cugaccucagcaauaccaa

SEQ ID NO: 1438555 - RNA, 19 nt, Artificial Sequence
  Description of Artificial Sequence: Synthetic oligonucleotide
gcaguagaugauccgggug

SEQ ID NO: 1438556 - RNA, 19 nt, Artificial Sequence
  Description of Artificial Sequence: Synthetic oligonucleotide
gaguugaaguacucccgaa

SEQ ID NO: 1438557 - RNA, 19 nt, Artificial Sequence
  Description of Artificial Sequence: Synthetic oligonucleotide
gcuaaagguaauauugaaa

SEQ ID NO: 1438558 - RNA, 19 nt, Artificial Sequence
  Description of Artificial Sequence: Synthetic oligonucleotide
uguccucuuuccagcgggu

SEQ ID NO: 1438559 - RNA, 19 nt, Artificial Sequence
  Description of Artificial Sequence: Synthetic oligonucleotide
ggucucaucauggaaaaua

SEQ ID NO: 1438560 - RNA, 19 nt, Artificial Sequence
  Description of Artificial Sequence: Synthetic oligonucleotide
acucuaaauuguauacaau

SEQ ID NO: 1438561 - RNA, 19 nt, Artificial Sequence
  Description of Artificial Sequence: Synthetic oligonucleotide
cagaguccugaccucagca

SEQ ID NO: 1438562 - RNA, 19 nt, Artificial Sequence
  Description of Artificial Sequence: Synthetic oligonucleotide
agagucuacuaugauucuu

SEQ ID NO: 1438563 - RNA, 19 nt, Artificial Sequence
  Description of Artificial Sequence: Synthetic oligonucleotide
guucccaugaagagucuga

SEQ ID NO: 1438564 - RNA, 19 nt, Artificial Sequence
  Description of Artificial Sequence: Synthetic oligonucleotide
aguacucccgaagacgcuu

SEQ ID NO: 1438565 - RNA, 19 nt, Artificial Sequence
  Description of Artificial Sequence: Synthetic oligonucleotide
cauagugguaacggauguc

SEQ ID NO: 1438566 - RNA, 19 nt, Artificial Sequence
  Description of Artificial Sequence: Synthetic oligonucleotide
ugcauucuucauagccaau

SEQ ID NO: 1438567 - RNA, 19 nt, Artificial Sequence
  Description of Artificial Sequence: Synthetic oligonucleotide
cacucgggucauaauuauc

SEQ ID NO: 1438568 - RNA, 19 nt, Artificial Sequence
  Description of Artificial Sequence: Synthetic oligonucleotide
gggguagucuggguaacgg

SEQ ID NO: 1438569 - RNA, 19 nt, Artificial Sequence
  Description of Artificial Sequence: Synthetic oligonucleotide
cucuaagcaccuagcuuca

SEQ ID NO: 1438570 - RNA, 19 nt, Artificial Sequence
  Description of Artificial Sequence: Synthetic oligonucleotide
ggaauguaccuacauuugu

SEQ ID NO: 1438571 - RNA, 19 nt, Artificial Sequence
  Description of Artificial Sequence: Synthetic oligonucleotide
uuccagcggguguuauagc

SEQ ID NO: 1438572 - RNA, 19 nt, Artificial Sequence
  Description of Artificial Sequence: Synthetic oligonucleotide
cugugagcugaucucggca

SEQ ID NO: 1438573 - RNA, 19 nt, Artificial Sequence
  Description of Artificial Sequence: Synthetic oligonucleotide
ugcacacgcccaaauccuu

SEQ ID NO: 1438574 - RNA, 19 nt, Artificial Sequence
  Description of Artificial Sequence: Synthetic oligonucleotide
agaggguuuccaggccaac

SEQ ID NO: 1438575 - RNA, 19 nt, Artificial Sequence
  Description of Artificial Sequence: Synthetic oligonucleotide
cuugugcugagaggguuuc

SEQ ID NO: 1438576 - RNA, 19 nt, Artificial Sequence
  Description of Artificial Sequence: Synthetic oligonucleotide
acacgcccaaauccuuaug

SEQ ID NO: 1438577 - RNA, 19 nt, Artificial Sequence
  Description of Artificial Sequence: Synthetic oligonucleotide
uggccucucaaugcauucu

SEQ ID NO: 1438578 - RNA, 19 nt, Artificial Sequence
  Description of Artificial Sequence: Synthetic oligonucleotide
ggugaaaguggccucucaa

SEQ ID NO: 1438579 - RNA, 19 nt, Artificial Sequence
  Description of Artificial Sequence: Synthetic oligonucleotide
ugcucaaaaugagcauauc

SEQ ID NO: 1438580 - RNA, 19 nt, Artificial Sequence
  Description of Artificial Sequence: Synthetic oligonucleotide
aaacguucuuccaguucau

SEQ ID NO: 1438581 - RNA, 19 nt, Artificial Sequence
  Description of Artificial Sequence: Synthetic oligonucleotide
acggaacuaggggaaagaa

SEQ ID NO: 1438582 - RNA, 19 nt, Artificial Sequence
  Description of Artificial Sequence: Synthetic oligonucleotide
gagucuacuaugauucuuu

SEQ ID NO: 1438583 - RNA, 19 nt, Artificial Sequence
  Description of Artificial Sequence: Synthetic oligonucleotide
gguaacggaacuaggggaa

SEQ ID NO: 1438584 - RNA, 19 nt, Artificial Sequence
  Description of Artificial Sequence: Synthetic oligonucleotide
ugaucucggcauaguggua

SEQ ID NO: 1438585 - RNA, 19 nt, Artificial Sequence
  Description of Artificial Sequence: Synthetic oligonucleotide
ggacuuuucggaaucccuc

SEQ ID NO: 1438586 - RNA, 19 nt, Artificial Sequence
  Description of Artificial Sequence: Synthetic oligonucleotide
accgguuggcuuggagugg

SEQ ID NO: 1438587 - RNA, 19 nt, Artificial Sequence
  Description of Artificial Sequence: Synthetic oligonucleotide
guccugaccucagcaauac

SEQ ID NO: 1438588 - RNA, 19 nt, Artificial Sequence
  Description of Artificial Sequence: Synthetic oligonucleotide
agguuguaaguaauacuua

SEQ ID NO: 1438589 - RNA, 19 nt, Artificial Sequence
  Description of Artificial Sequence: Synthetic oligonucleotide
guaccuacauuuguuuaua

SEQ ID NO: 1438590 - RNA, 19 nt, Artificial Sequence
  Description of Artificial Sequence: Synthetic oligonucleotide
cccauuaaugccaacccaa

SEQ ID NO: 1438591 - RNA, 19 nt, Artificial Sequence
  Description of Artificial Sequence: Synthetic oligonucleotide
cucaaaguauaaguuuugu

SEQ ID NO: 1438592 - RNA, 19 nt, Artificial Sequence
  Description of Artificial Sequence: Synthetic oligonucleotide
gaguccugaccucagcaau

SEQ ID NO: 1438593 - RNA, 19 nt, Artificial Sequence
  Description of Artificial Sequence: Synthetic oligonucleotide
gaacaacauucccaccggu

SEQ ID NO: 1438594 - RNA, 19 nt, Artificial Sequence
  Description of Artificial Sequence: Synthetic oligonucleotide
gccaaggggcaccugugag

SEQ ID NO: 1438595 - RNA, 19 nt, Artificial Sequence
  Description of Artificial Sequence: Synthetic oligonucleotide
gauccacaauacaguucug

SEQ ID NO: 1438596 - RNA, 19 nt, Artificial Sequence
  Description of Artificial Sequence: Synthetic oligonucleotide
caagguagcaguagaugau

SEQ ID NO: 1438597 - RNA, 19 nt, Artificial Sequence
  Description of Artificial Sequence: Synthetic oligonucleotide
cuaagcaccuagcuucacu

SEQ ID NO: 1438598 - RNA, 19 nt, Artificial Sequence
  Description of Artificial Sequence: Synthetic oligonucleotide
gugguaacggauguccucu

SEQ ID NO: 1438599 - RNA, 19 nt, Artificial Sequence
  Description of Artificial Sequence: Synthetic oligonucleotide
caauaccaagguagcagua

SEQ ID NO: 1438600 - RNA, 19 nt, Artificial Sequence
  Description of Artificial Sequence: Synthetic oligonucleotide
guacucccgaagacgcuug

SEQ ID NO: 1438601 - RNA, 19 nt, Artificial Sequence
  Description of Artificial Sequence: Synthetic oligonucleotide
ccuggcaguaaauacugaa

SEQ ID NO: 1438602 - RNA, 19 nt, Artificial Sequence
  Description of Artificial Sequence: Synthetic oligonucleotide
agacgcuugccaaggggca

SEQ ID NO: 1438603 - RNA, 19 nt, Artificial Sequence
  Description of Artificial Sequence: Synthetic oligonucleotide
auggagccuugaaaagucu

SEQ ID NO: 1438604 - RNA, 19 nt, Artificial Sequence
  Description of Artificial Sequence: Synthetic oligonucleotide
ccgaagacgcuugccaagg

SEQ ID NO: 1438605 - RNA, 19 nt, Artificial Sequence
  Description of Artificial Sequence: Synthetic oligonucleotide
ucccuccuggcaguaaaua

SEQ ID NO: 1438606 - RNA, 19 nt, Artificial Sequence
  Description of Artificial Sequence: Synthetic oligonucleotide
uauccgucccucgggcuuc

SEQ ID NO: 1438607 - RNA, 19 nt, Artificial Sequence
  Description of Artificial Sequence: Synthetic oligonucleotide
uagcuucacugauggugau

SEQ ID NO: 1438608 - RNA, 19 nt, Artificial Sequence
  Description of Artificial Sequence: Synthetic oligonucleotide
cuaugauucuuuagagguu

SEQ ID NO: 1438609 - RNA, 19 nt, Artificial Sequence
  Description of Artificial Sequence: Synthetic oligonucleotide
cagcggaaagaaaaucccu

SEQ ID NO: 1438610 - RNA, 19 nt, Artificial Sequence
  Description of Artificial Sequence: Synthetic oligonucleotide
uguuuauauuagggcucua

SEQ ID NO: 1438611 - RNA, 19 nt, Artificial Sequence
  Description of Artificial Sequence: Synthetic oligonucleotide
gaugauccggguggguucu

SEQ ID NO: 1438612 - RNA, 19 nt, Artificial Sequence
  Description of Artificial Sequence: Synthetic oligonucleotide
ccaggcacucaacuaauga

SEQ ID NO: 1438613 - RNA, 19 nt, Artificial Sequence
  Description of Artificial Sequence: Synthetic oligonucleotide
ggcgcuccacaucugguga

SEQ ID NO: 1438614 - RNA, 19 nt, Artificial Sequence
  Description of Artificial Sequence: Synthetic oligonucleotide
aguccugaccucagcaaua

SEQ ID NO: 1438615 - RNA, 19 nt, Artificial Sequence
  Description of Artificial Sequence: Synthetic oligonucleotide
gcggaaagaaaaucccucu

SEQ ID NO: 1438616 - RNA, 19 nt, Artificial Sequence
  Description of Artificial Sequence: Synthetic oligonucleotide
cccgaagacgcuugccaag

SEQ ID NO: 1438617 - RNA, 19 nt, Artificial Sequence
  Description of Artificial Sequence: Synthetic oligonucleotide
guaacggaacuaggggaaa

SEQ ID NO: 1438618 - RNA, 19 nt, Artificial Sequence
  Description of Artificial Sequence: Synthetic oligonucleotide
accuagcuucacugauggu

SEQ ID NO: 1438619 - RNA, 19 nt, Artificial Sequence
  Description of Artificial Sequence: Synthetic oligonucleotide
ugguaacggauguccucuu

SEQ ID NO: 1438620 - RNA, 19 nt, Artificial Sequence
  Description of Artificial Sequence: Synthetic oligonucleotide
gccauuaucuauugcuuau

SEQ ID NO: 1438621 - RNA, 19 nt, Artificial Sequence
  Description of Artificial Sequence: Synthetic oligonucleotide
gguauccagucaauuucca

SEQ ID NO: 1438622 - RNA, 19 nt, Artificial Sequence
  Description of Artificial Sequence: Synthetic oligonucleotide
ggguggguucuacuucuac

SEQ ID NO: 1438623 - RNA, 19 nt, Artificial Sequence
  Description of Artificial Sequence: Synthetic oligonucleotide
gcacucaacuaaugagcca

SEQ ID NO: 1438624 - RNA, 19 nt, Artificial Sequence
  Description of Artificial Sequence: Synthetic oligonucleotide
uaccuguaaugaggcuugu

SEQ ID NO: 1438625 - RNA, 19 nt, Artificial Sequence
  Description of Artificial Sequence: Synthetic oligonucleotide
gagaggguuuccaggccaa

SEQ ID NO: 1438626 - RNA, 19 nt, Artificial Sequence
  Description of Artificial Sequence: Synthetic oligonucleotide
gauccggguggguucuacu

SEQ ID NO: 1438627 - RNA, 19 nt, Artificial Sequence
  Description of Artificial Sequence: Synthetic oligonucleotide
cgucccucgggcuucucgg

SEQ ID NO: 1438628 - RNA, 19 nt, Artificial Sequence
  Description of Artificial Sequence: Synthetic oligonucleotide
uggucucaucauggaaaau

SEQ ID NO: 1438629 - RNA, 19 nt, Artificial Sequence
  Description of Artificial Sequence: Synthetic oligonucleotide
cagcucuaagcaccuagcu

SEQ ID NO: 1438630 - RNA, 19 nt, Artificial Sequence
  Description of Artificial Sequence: Synthetic oligonucleotide
ggagugggcaauggguauc

SEQ ID NO: 1438631 - RNA, 19 nt, Artificial Sequence
  Description of Artificial Sequence: Synthetic oligonucleotide
gugagcugaucucggcaua

SEQ ID NO: 1438632 - RNA, 19 nt, Artificial Sequence
  Description of Artificial Sequence: Synthetic oligonucleotide
aggaugacacucaguuguu

SEQ ID NO: 1438633 - RNA, 19 nt, Artificial Sequence
  Description of Artificial Sequence: Synthetic oligonucleotide
ccaauauggaauguaccua

SEQ ID NO: 1438634 - RNA, 19 nt, Artificial Sequence
  Description of Artificial Sequence: Synthetic oligonucleotide
ccuggacuuuucggaaucc

SEQ ID NO: 1438635 - RNA, 19 nt, Artificial Sequence
  Description of Artificial Sequence: Synthetic oligonucleotide
cagagucuacuaugauucu

SEQ ID NO: 1438636 - RNA, 19 nt, Artificial Sequence
  Description of Artificial Sequence: Synthetic oligonucleotide
gguuggcuuggagugggca

SEQ ID NO: 1438637 - RNA, 19 nt, Artificial Sequence
  Description of Artificial Sequence: Synthetic oligonucleotide
caugcaagaccugcuugcu

SEQ ID NO: 1438638 - RNA, 19 nt, Artificial Sequence
  Description of Artificial Sequence: Synthetic oligonucleotide
ccagcggguguuauagcca

SEQ ID NO: 1438639 - RNA, 19 nt, Artificial Sequence
  Description of Artificial Sequence: Synthetic oligonucleotide
gccaacuuauuggaaagau

SEQ ID NO: 1438640 - RNA, 19 nt, Artificial Sequence
  Description of Artificial Sequence: Synthetic oligonucleotide
cgaagacgcuugccaaggg

SEQ ID NO: 1438641 - RNA, 19 nt, Artificial Sequence
  Description of Artificial Sequence: Synthetic oligonucleotide
ccgucccucgggcuucucg

SEQ ID NO: 1438642 - RNA, 19 nt, Artificial Sequence
  Description of Artificial Sequence: Synthetic oligonucleotide
aucccuccuggcaguaaau

SEQ ID NO: 1438643 - RNA, 19 nt, Artificial Sequence
  Description of Artificial Sequence: Synthetic oligonucleotide
aggccaacccugcccucuu

SEQ ID NO: 1438644 - RNA, 19 nt, Artificial Sequence
  Description of Artificial Sequence: Synthetic oligonucleotide
ccuuaugaaggaugacacu

SEQ ID NO: 1438645 - RNA, 19 nt, Artificial Sequence
  Description of Artificial Sequence: Synthetic oligonucleotide
cuggcgcuccacaucuggu

SEQ ID NO: 1438646 - RNA, 19 nt, Artificial Sequence
  Description of Artificial Sequence: Synthetic oligonucleotide
gagguugcacuggucucau

SEQ ID NO: 1438647 - RNA, 19 nt, Artificial Sequence
  Description of Artificial Sequence: Synthetic oligonucleotide
gagcugaucucggcauagu

SEQ ID NO: 1438648 - RNA, 19 nt, Artificial Sequence
  Description of Artificial Sequence: Synthetic oligonucleotide
gcacucgggucauaauuau

SEQ ID NO: 1438649 - RNA, 19 nt, Artificial Sequence
  Description of Artificial Sequence: Synthetic oligonucleotide
cccaaucuuuacugaaggu

SEQ ID NO: 1438650 - RNA, 19 nt, Artificial Sequence
  Description of Artificial Sequence: Synthetic oligonucleotide
ccaccgguuggcuuggagu

SEQ ID NO: 1438651 - RNA, 19 nt, Artificial Sequence
  Description of Artificial Sequence: Synthetic oligonucleotide
gguaacggauguccucuuu

SEQ ID NO: 1438652 - RNA, 19 nt, Artificial Sequence
  Description of Artificial Sequence: Synthetic oligonucleotide
cccucucuacuucuacaaa

SEQ ID NO: 1438653 - RNA, 19 nt, Artificial Sequence
  Description of Artificial Sequence: Synthetic oligonucleotide
gcgcuccacaucuggugaa

SEQ ID NO: 1438654 - RNA, 19 nt, Artificial Sequence
  Description of Artificial Sequence: Synthetic oligonucleotide
auccgucccucgggcuucu

SEQ ID NO: 1438655 - RNA, 19 nt, Artificial Sequence
  Description of Artificial Sequence: Synthetic oligonucleotide
ggaaucccuccuggcagua

SEQ ID NO: 1438656 - RNA, 19 nt, Artificial Sequence
  Description of Artificial Sequence: Synthetic oligonucleotide
ucccaccgguuggcuugga

SEQ ID NO: 1438657 - RNA, 19 nt, Artificial Sequence
  Description of Artificial Sequence: Synthetic oligonucleotide
augauccggguggguucua

SEQ ID NO: 1438658 - RNA, 19 nt, Artificial Sequence
  Description of Artificial Sequence: Synthetic oligonucleotide
gcuugccaaggggcaccug

SEQ ID NO: 1438659 - RNA, 19 nt, Artificial Sequence
  Description of Artificial Sequence: Synthetic oligonucleotide
cgguuggcuuggagugggc

SEQ ID NO: 1438660 - RNA, 19 nt, Artificial Sequence
  Description of Artificial Sequence: Synthetic oligonucleotide
gggguauccgauggcuuuu

SEQ ID NO: 1438661 - RNA, 19 nt, Artificial Sequence
  Description of Artificial Sequence: Synthetic oligonucleotide
uccgucccucgggcuucuc

SEQ ID NO: 1438662 - RNA, 19 nt, Artificial Sequence
  Description of Artificial Sequence: Synthetic oligonucleotide
cgcuccacaucuggugaaa

SEQ ID NO: 1438663 - RNA, 19 nt, Artificial Sequence
  Description of Artificial Sequence: Synthetic oligonucleotide
ugccauaguaccaaaauag

SEQ ID NO: 1438664 - RNA, 19 nt, Artificial Sequence
  Description of Artificial Sequence: Synthetic oligonucleotide
uaucauaguacccaggucu

SEQ ID NO: 1438665 - RNA, 19 nt, Artificial Sequence
  Description of Artificial Sequence: Synthetic oligonucleotide
uucucauacaaacagauau

SEQ ID NO: 1438666 - RNA, 19 nt, Artificial Sequence
  Description of Artificial Sequence: Synthetic oligonucleotide
  modified_base (14)..(14): a, c, u, g, unknown or other
accagugaaacccnagggc

SEQ ID NO: 1438667 - RNA, 19 nt, Artificial Sequence
  Description of Artificial Sequence: Synthetic oligonucleotide
uaugcaaggcuuucgagcg

SEQ ID NO: 1438668 - RNA, 19 nt, Artificial Sequence
  Description of Artificial Sequence: Synthetic oligonucleotide
aagaacaauuuauauccuc

SEQ ID NO: 1438669 - RNA, 19 nt, Artificial Sequence
  Description of Artificial Sequence: Synthetic oligonucleotide
acaaguguucaacagguac

SEQ ID NO: 1438670 - RNA, 19 nt, Artificial Sequence
  Description of Artificial Sequence: Synthetic oligonucleotide
aacacauguccccucauuc

SEQ ID NO: 1438671 - RNA, 19 nt, Artificial Sequence
  Description of Artificial Sequence: Synthetic oligonucleotide
agcauugauacagacaccc

SEQ ID NO: 1438672 - RNA, 19 nt, Artificial Sequence
  Description of Artificial Sequence: Synthetic oligonucleotide
cauaagucagaaaacaaug

SEQ ID NO: 1438673 - RNA, 19 nt, Artificial Sequence
  Description of Artificial Sequence: Synthetic oligonucleotide
aucccaucaacacacgugc

SEQ ID NO: 1438674 - RNA, 19 nt, Artificial Sequence
  Description of Artificial Sequence: Synthetic oligonucleotide
augggaguaucauaguacc

SEQ ID NO: 1438675 - RNA, 19 nt, Artificial Sequence
  Description of Artificial Sequence: Synthetic oligonucleotide
aggacauagacaugugucc

SEQ ID NO: 1438676 - RNA, 19 nt, Artificial Sequence
  Description of Artificial Sequence: Synthetic oligonucleotide
cuagaguacacguuuauac

SEQ ID NO: 1438677 - RNA, 19 nt, Artificial Sequence
  Description of Artificial Sequence: Synthetic oligonucleotide
cacaaugggaguaucauag

SEQ ID NO: 1438678 - RNA, 19 nt, Artificial Sequence
  Description of Artificial Sequence: Synthetic oligonucleotide
uuucgagcgaccaaguuca

SEQ ID NO: 1438679 - RNA, 19 nt, Artificial Sequence
  Description of Artificial Sequence: Synthetic oligonucleotide
aaucucugaggaucagugc

SEQ ID NO: 1438680 - RNA, 19 nt, Artificial Sequence
  Description of Artificial Sequence: Synthetic oligonucleotide
aauaggccaacacacagaa

SEQ ID NO: 1438681 - RNA, 19 nt, Artificial Sequence
  Description of Artificial Sequence: Synthetic oligonucleotide
uacacguuuauacugaaua

SEQ ID NO: 1438682 - RNA, 19 nt, Artificial Sequence
  Description of Artificial Sequence: Synthetic oligonucleotide
auaagucagaaaacaaugc

SEQ ID NO: 1438683 - RNA, 19 nt, Artificial Sequence
  Description of Artificial Sequence: Synthetic oligonucleotide
guuagaguugcacucauug

SEQ ID NO: 1438684 - RNA, 19 nt, Artificial Sequence
  Description of Artificial Sequence: Synthetic oligonucleotide
aacaaguacgcauuuuccu

SEQ ID NO: 1438685 - RNA, 19 nt, Artificial Sequence
  Description of Artificial Sequence: Synthetic oligonucleotide
auugauaucauggagcaga

SEQ ID NO: 1438686 - RNA, 19 nt, Artificial Sequence
  Description of Artificial Sequence: Synthetic oligonucleotide
gauacagacacccgagugc

SEQ ID NO: 1438687 - RNA, 19 nt, Artificial Sequence
  Description of Artificial Sequence: Synthetic oligonucleotide
gaccuuauuacaccuuugg

SEQ ID NO: 1438688 - RNA, 19 nt, Artificial Sequence
  Description of Artificial Sequence: Synthetic oligonucleotide
cuaacagaccuuauuacac

SEQ ID NO: 1438689 - RNA, 19 nt, Artificial Sequence
  Description of Artificial Sequence: Synthetic oligonucleotide
acauucaaggcgcugguuc

SEQ ID NO: 1438690 - RNA, 19 nt, Artificial Sequence
  Description of Artificial Sequence: Synthetic oligonucleotide
aguaucauaguacccaggu

SEQ ID NO: 1438691 - RNA, 19 nt, Artificial Sequence
  Description of Artificial Sequence: Synthetic oligonucleotide
agugcagcagccaagaguc

SEQ ID NO: 1438692 - RNA, 19 nt, Artificial Sequence
  Description of Artificial Sequence: Synthetic oligonucleotide
agaguacacguuuauacug

SEQ ID NO: 1438693 - RNA, 19 nt, Artificial Sequence
  Description of Artificial Sequence: Synthetic oligonucleotide
uauccuccuaugaagucgg

SEQ ID NO: 1438694 - RNA, 19 nt, Artificial Sequence
  Description of Artificial Sequence: Synthetic oligonucleotide
uaugaagucgguacaggug

SEQ ID NO: 1438695 - RNA, 19 nt, Artificial Sequence
  Description of Artificial Sequence: Synthetic oligonucleotide
gaacaauuuauauccuccc

SEQ ID NO: 1438696 - RNA, 19 nt, Artificial Sequence
  Description of Artificial Sequence: Synthetic oligonucleotide
cuaugcaaggcuuucgagc

SEQ ID NO: 1438697 - RNA, 19 nt, Artificial Sequence
  Description of Artificial Sequence: Synthetic oligonucleotide
uuuuacacggagaucggcu

SEQ ID NO: 1438698 - RNA, 19 nt, Artificial Sequence
  Description of Artificial Sequence: Synthetic oligonucleotide
ugaaugugcuucacagugg

SEQ ID NO: 1438699 - RNA, 19 nt, Artificial Sequence
  Description of Artificial Sequence: Synthetic oligonucleotide
cauuccaacauucuccuac

SEQ ID NO: 1438700 - RNA, 19 nt, Artificial Sequence
  Description of Artificial Sequence: Synthetic oligonucleotide
ucugcuggaucaaugaguc

SEQ ID NO: 1438701 - RNA, 19 nt, Artificial Sequence
  Description of Artificial Sequence: Synthetic oligonucleotide
auacaaacagauauaaugu

SEQ ID NO: 1438702 - RNA, 19 nt, Artificial Sequence
  Description of Artificial Sequence: Synthetic oligonucleotide
aguugacacccugauaucc

SEQ ID NO: 1438703 - RNA, 19 nt, Artificial Sequence
  Description of Artificial Sequence: Synthetic oligonucleotide
ucuagguucugaaaccaca

SEQ ID NO: 1438704 - RNA, 19 nt, Artificial Sequence
  Description of Artificial Sequence: Synthetic oligonucleotide
auacucgcaguugacaccc

SEQ ID NO: 1438705 - RNA, 19 nt, Artificial Sequence
  Description of Artificial Sequence: Synthetic oligonucleotide
aaacaggagcugucagugc

SEQ ID NO: 1438706 - RNA, 19 nt, Artificial Sequence
  Description of Artificial Sequence: Synthetic oligonucleotide
aaguguucaacagguacuc

SEQ ID NO: 1438707 - RNA, 19 nt, Artificial Sequence
  Description of Artificial Sequence: Synthetic oligonucleotide
auacugaauaggccaacac

SEQ ID NO: 1438708 - RNA, 19 nt, Artificial Sequence
  Description of Artificial Sequence: Synthetic oligonucleotide
ugaggaucagugcagcagc

SEQ ID NO: 1438709 - RNA, 19 nt, Artificial Sequence
  Description of Artificial Sequence: Synthetic oligonucleotide
ucugaaaccacacgcuaac

SEQ ID NO: 1438710 - RNA, 19 nt, Artificial Sequence
  Description of Artificial Sequence: Synthetic oligonucleotide
aguagcuccccguguagcc

SEQ ID NO: 1438711 - RNA, 19 nt, Artificial Sequence
  Description of Artificial Sequence: Synthetic oligonucleotide
gaaugugcuucacaguggc

SEQ ID NO: 1438712 - RNA, 19 nt, Artificial Sequence
  Description of Artificial Sequence: Synthetic oligonucleotide
ucaggcacggguuagaguu

SEQ ID NO: 1438713 - RNA, 19 nt, Artificial Sequence
  Description of Artificial Sequence: Synthetic oligonucleotide
  modified_base (15)..(15): a, c, u, g, unknown or other
gaccagugaaacccnaggg

SEQ ID NO: 1438714 - RNA, 19 nt, Artificial Sequence
  Description of Artificial Sequence: Synthetic oligonucleotide
ggaugaaugugcuucacag

SEQ ID NO: 1438715 - RNA, 19 nt, Artificial Sequence
  Description of Artificial Sequence: Synthetic oligonucleotide
uaacagaccuuauuacacc

SEQ ID NO: 1438716 - RNA, 19 nt, Artificial Sequence
  Description of Artificial Sequence: Synthetic oligonucleotide
guaccaaaauaguuauggg

SEQ ID NO: 1438717 - RNA, 19 nt, Artificial Sequence
  Description of Artificial Sequence: Synthetic oligonucleotide
  modified_base (8)..(8): a, c, u, g, unknown or other
gaaacccnagggcacaagc

SEQ ID NO: 1438718 - RNA, 19 nt, Artificial Sequence
  Description of Artificial Sequence: Synthetic oligonucleotide
uagaguacacguuuauacu

SEQ ID NO: 1438719 - RNA, 19 nt, Artificial Sequence
  Description of Artificial Sequence: Synthetic oligonucleotide
cacguuuauacugaauagg

SEQ ID NO: 1438720 - RNA, 19 nt, Artificial Sequence
  Description of Artificial Sequence: Synthetic oligonucleotide
uuuacacggagaucggcug

SEQ ID NO: 1438721 - RNA, 19 nt, Artificial Sequence
  Description of Artificial Sequence: Synthetic oligonucleotide
ccagcauugauacagacac

SEQ ID NO: 1438722 - RNA, 19 nt, Artificial Sequence
  Description of Artificial Sequence: Synthetic oligonucleotide
ucaacagguacuccuuucu

SEQ ID NO: 1438723 - RNA, 19 nt, Artificial Sequence
  Description of Artificial Sequence: Synthetic oligonucleotide
ucaucuuaaacuacuuguu

SEQ ID NO: 1438724 - RNA, 19 nt, Artificial Sequence
  Description of Artificial Sequence: Synthetic oligonucleotide
ugggcaauugcuucuugag

SEQ ID NO: 1438725 - RNA, 19 nt, Artificial Sequence
  Description of Artificial Sequence: Synthetic oligonucleotide
auguuuauagucaggagca

SEQ ID NO: 1438726 - RNA, 19 nt, Artificial Sequence
  Description of Artificial Sequence: Synthetic oligonucleotide
acagauauaaugucacuuu

SEQ ID NO: 1438727 - RNA, 19 nt, Artificial Sequence
  Description of Artificial Sequence: Synthetic oligonucleotide
agauauaaugucacuuuuc

SEQ ID NO: 1438728 - RNA, 19 nt, Artificial Sequence
  Description of Artificial Sequence: Synthetic oligonucleotide
ucuaugcaaggcuuucgag

SEQ ID NO: 1438729 - RNA, 19 nt, Artificial Sequence
  Description of Artificial Sequence: Synthetic oligonucleotide
uccuauguuuauagucagg

SEQ ID NO: 1438730 - RNA, 19 nt, Artificial Sequence
  Description of Artificial Sequence: Synthetic oligonucleotide
uuagaguugcacucauuga

SEQ ID NO: 1438731 - RNA, 19 nt, Artificial Sequence
  Description of Artificial Sequence: Synthetic oligonucleotide
guauccuccuaugaagucg

SEQ ID NO: 1438732 - RNA, 19 nt, Artificial Sequence
  Description of Artificial Sequence: Synthetic oligonucleotide
caggacauagacauguguc

SEQ ID NO: 1438733 - RNA, 19 nt, Artificial Sequence
  Description of Artificial Sequence: Synthetic oligonucleotide
cuuucgagcgaccaaguuc

SEQ ID NO: 1438734 - RNA, 19 nt, Artificial Sequence
  Description of Artificial Sequence: Synthetic oligonucleotide
cuauguuuauagucaggag

SEQ ID NO: 1438735 - RNA, 19 nt, Artificial Sequence
  Description of Artificial Sequence: Synthetic oligonucleotide
agucgguacagguggcacc

SEQ ID NO: 1438736 - RNA, 19 nt, Artificial Sequence
  Description of Artificial Sequence: Synthetic oligonucleotide
  modified_base (6)..(6): a, c, u, g, unknown or other
aacccnagggcacaagcaa

SEQ ID NO: 1438737 - RNA, 19 nt, Artificial Sequence
  Description of Artificial Sequence: Synthetic oligonucleotide
gguucuuuucuaugcaagg

SEQ ID NO: 1438738 - RNA, 19 nt, Artificial Sequence
  Description of Artificial Sequence: Synthetic oligonucleotide
acaguaugcaccgucccac

SEQ ID NO: 1438739 - RNA, 19 nt, Artificial Sequence
  Description of Artificial Sequence: Synthetic oligonucleotide
cacguugagcacaucacag

SEQ ID NO: 1438740 - RNA, 19 nt, Artificial Sequence
  Description of Artificial Sequence: Synthetic oligonucleotide
guuagcuuaucucuugguc

SEQ ID NO: 1438741 - RNA, 19 nt, Artificial Sequence
  Description of Artificial Sequence: Synthetic oligonucleotide
uuucuaugcaaggcuuucg

SEQ ID NO: 1438742 - RNA, 19 nt, Artificial Sequence
  Description of Artificial Sequence: Synthetic oligonucleotide
acggagaucggcugcagag

SEQ ID NO: 1438743 - RNA, 19 nt, Artificial Sequence
  Description of Artificial Sequence: Synthetic oligonucleotide
cuagguucugaaaccacac

SEQ ID NO: 1438744 - RNA, 19 nt, Artificial Sequence
  Description of Artificial Sequence: Synthetic oligonucleotide
ucaaucaagugcuguggca

SEQ ID NO: 1438745 - RNA, 19 nt, Artificial Sequence
  Description of Artificial Sequence: Synthetic oligonucleotide
uguguccuuccaaauaguc

SEQ ID NO: 1438746 - RNA, 19 nt, Artificial Sequence
  Description of Artificial Sequence: Synthetic oligonucleotide
caaucaagugcuguggcag

SEQ ID NO: 1438747 - RNA, 19 nt, Artificial Sequence
  Description of Artificial Sequence: Synthetic oligonucleotide
uggauuggacgcacacucg

SEQ ID NO: 1438748 - RNA, 19 nt, Artificial Sequence
  Description of Artificial Sequence: Synthetic oligonucleotide
gaucccaucaacacacgug

SEQ ID NO: 1438749 - RNA, 19 nt, Artificial Sequence
  Description of Artificial Sequence: Synthetic oligonucleotide
  modified_base (7)..(7): a, c, u, g, unknown or other
aaacccnagggcacaagca

SEQ ID NO: 1438750 - RNA, 19 nt, Artificial Sequence
  Description of Artificial Sequence: Synthetic oligonucleotide
agcgguagguacccaggcc

SEQ ID NO: 1438751 - RNA, 19 nt, Artificial Sequence
  Description of Artificial Sequence: Synthetic oligonucleotide
uucugaaaccacacgcuaa

SEQ ID NO: 1438752 - RNA, 19 nt, Artificial Sequence
  Description of Artificial Sequence: Synthetic oligonucleotide
aaccacacgcuaacagacc

SEQ ID NO: 1438753 - RNA, 19 nt, Artificial Sequence
  Description of Artificial Sequence: Synthetic oligonucleotide
uguacacaaggaaguugcc

SEQ ID NO: 1438754 - RNA, 19 nt, Artificial Sequence
  Description of Artificial Sequence: Synthetic oligonucleotide
acaaguacgcauuuuccuu

SEQ ID NO: 1438755 - RNA, 19 nt, Artificial Sequence
  Description of Artificial Sequence: Synthetic oligonucleotide
acauaagucagaaaacaau

SEQ ID NO: 1438756 - RNA, 19 nt, Artificial Sequence
  Description of Artificial Sequence: Synthetic oligonucleotide
cauacucgcaguugacacc

SEQ ID NO: 1438757 - RNA, 19 nt, Artificial Sequence
  Description of Artificial Sequence: Synthetic oligonucleotide
acauagacauguguccuuc

SEQ ID NO: 1438758 - RNA, 19 nt, Artificial Sequence
  Description of Artificial Sequence: Synthetic oligonucleotide
ggucauuccaacauucucc

SEQ ID NO: 1438759 - RNA, 19 nt, Artificial Sequence
  Description of Artificial Sequence: Synthetic oligonucleotide
uuauuacaccuuugguucu

SEQ ID NO: 1438760 - RNA, 19 nt, Artificial Sequence
  Description of Artificial Sequence: Synthetic oligonucleotide
ugcuccucgcaguagcucc

SEQ ID NO: 1438761 - RNA, 19 nt, Artificial Sequence
  Description of Artificial Sequence: Synthetic oligonucleotide
uuacacggagaucggcugc

SEQ ID NO: 1438762 - RNA, 19 nt, Artificial Sequence
  Description of Artificial Sequence: Synthetic oligonucleotide
ucacaguaugcaccguccc

SEQ ID NO: 1438763 - RNA, 19 nt, Artificial Sequence
  Description of Artificial Sequence: Synthetic oligonucleotide
ugggaguaucauaguaccc

SEQ ID NO: 1438764 - RNA, 19 nt, Artificial Sequence
  Description of Artificial Sequence: Synthetic oligonucleotide
cauugauacagacacccga

SEQ ID NO: 1438765 - RNA, 19 nt, Artificial Sequence
  Description of Artificial Sequence: Synthetic oligonucleotide
aaaggcauguggaagucaa

SEQ ID NO: 1438766 - RNA, 19 nt, Artificial Sequence
  Description of Artificial Sequence: Synthetic oligonucleotide
uacgcauuuuccuuccuau

SEQ ID NO: 1438767 - RNA, 19 nt, Artificial Sequence
  Description of Artificial Sequence: Synthetic oligonucleotide
uugauacagacacccgagu

SEQ ID NO: 1438768 - RNA, 19 nt, Artificial Sequence
  Description of Artificial Sequence: Synthetic oligonucleotide
gagucccuucaucugcugg

SEQ ID NO: 1438769 - RNA, 19 nt, Artificial Sequence
  Description of Artificial Sequence: Synthetic oligonucleotide
acccugauauccuggaaca

SEQ ID NO: 1438770 - RNA, 19 nt, Artificial Sequence
  Description of Artificial Sequence: Synthetic oligonucleotide
ucaaugagucccagaauuu

SEQ ID NO: 1438771 - RNA, 19 nt, Artificial Sequence
  Description of Artificial Sequence: Synthetic oligonucleotide
uucauacucgcaguugaca

SEQ ID NO: 1438772 - RNA, 19 nt, Artificial Sequence
  Description of Artificial Sequence: Synthetic oligonucleotide
uuggucauuccaacauucu

SEQ ID NO: 1438773 - RNA, 19 nt, Artificial Sequence
  Description of Artificial Sequence: Synthetic oligonucleotide
agucagaaaacaaugcuua

SEQ ID NO: 1438774 - RNA, 19 nt, Artificial Sequence
  Description of Artificial Sequence: Synthetic oligonucleotide
aggcauguggaagucaaag

SEQ ID NO: 1438775 - RNA, 19 nt, Artificial Sequence
  Description of Artificial Sequence: Synthetic oligonucleotide
ugcuggcauggauuggacg

SEQ ID NO: 1438776 - RNA, 19 nt, Artificial Sequence
  Description of Artificial Sequence: Synthetic oligonucleotide
aagucaaaggaagggaaua

SEQ ID NO: 1438777 - RNA, 19 nt, Artificial Sequence
  Description of Artificial Sequence: Synthetic oligonucleotide
auuccaacauucuccuacu

SEQ ID NO: 1438778 - RNA, 19 nt, Artificial Sequence
  Description of Artificial Sequence: Synthetic oligonucleotide
guuuauagucaggagcaug

SEQ ID NO: 1438779 - RNA, 19 nt, Artificial Sequence
  Description of Artificial Sequence: Synthetic oligonucleotide
cacauguccccucauucag

SEQ ID NO: 1438780 - RNA, 19 nt, Artificial Sequence
  Description of Artificial Sequence: Synthetic oligonucleotide
acgcuaacagaccuuauua

SEQ ID NO: 1438781 - RNA, 19 nt, Artificial Sequence
  Description of Artificial Sequence: Synthetic oligonucleotide
caguuagcuuaucucuugg

SEQ ID NO: 1438782 - RNA, 19 nt, Artificial Sequence
  Description of Artificial Sequence: Synthetic oligonucleotide
uaguacccaggucuccuag

SEQ ID NO: 1438783 - RNA, 19 nt, Artificial Sequence
  Description of Artificial Sequence: Synthetic oligonucleotide
acacguugagcacaucaca

SEQ ID NO: 1438784 - RNA, 19 nt, Artificial Sequence
  Description of Artificial Sequence: Synthetic oligonucleotide
ugaucccaucaacacacgu

SEQ ID NO: 1438785 - RNA, 19 nt, Artificial Sequence
  Description of Artificial Sequence: Synthetic oligonucleotide
auaucauggagcagaagga

SEQ ID NO: 1438786 - RNA, 19 nt, Artificial Sequence
  Description of Artificial Sequence: Synthetic oligonucleotide
cuggugagugcacucgucc

SEQ ID NO: 1438787 - RNA, 19 nt, Artificial Sequence
  Description of Artificial Sequence: Synthetic oligonucleotide
caccgucccacccaggagg

SEQ ID NO: 1438788 - RNA, 19 nt, Artificial Sequence
  Description of Artificial Sequence: Synthetic oligonucleotide
cacccugauauccuggaac

SEQ ID NO: 1438789 - RNA, 19 nt, Artificial Sequence
  Description of Artificial Sequence: Synthetic oligonucleotide
uagcuuaucucuuggucau

SEQ ID NO: 1438790 - RNA, 19 nt, Artificial Sequence
  Description of Artificial Sequence: Synthetic oligonucleotide
aucaacacauguccccuca

SEQ ID NO: 1438791 - RNA, 19 nt, Artificial Sequence
  Description of Artificial Sequence: Synthetic oligonucleotide
uuuucuaugcaaggcuuuc

SEQ ID NO: 1438792 - RNA, 19 nt, Artificial Sequence
  Description of Artificial Sequence: Synthetic oligonucleotide
uucaacagguacuccuuuc

SEQ ID NO: 1438793 - RNA, 19 nt, Artificial Sequence
  Description of Artificial Sequence: Synthetic oligonucleotide
uguauccuccuaugaaguc

SEQ ID NO: 1438794 - RNA, 19 nt, Artificial Sequence
  Description of Artificial Sequence: Synthetic oligonucleotide
gaguaucauaguacccagg

SEQ ID NO: 1438795 - RNA, 19 nt, Artificial Sequence
  Description of Artificial Sequence: Synthetic oligonucleotide
ggaguaucauaguacccag

SEQ ID NO: 1438796 - RNA, 19 nt, Artificial Sequence
  Description of Artificial Sequence: Synthetic oligonucleotide
aucauaguacccaggucuc

SEQ ID NO: 1438797 - RNA, 19 nt, Artificial Sequence
  Description of Artificial Sequence: Synthetic oligonucleotide
cucgucaagcugcuccucg

SEQ ID NO: 1438798 - RNA, 19 nt, Artificial Sequence
  Description of Artificial Sequence: Synthetic oligonucleotide
ugaagucgguacagguggc

SEQ ID NO: 1438799 - RNA, 19 nt, Artificial Sequence
  Description of Artificial Sequence: Synthetic oligonucleotide
agguacccaggccaucaac

SEQ ID NO: 1438800 - RNA, 19 nt, Artificial Sequence
  Description of Artificial Sequence: Synthetic oligonucleotide
ggagcugucagugcauucg

SEQ ID NO: 1438801 - RNA, 19 nt, Artificial Sequence
  Description of Artificial Sequence: Synthetic oligonucleotide
ccuccuaugaagucgguac

SEQ ID NO: 1438802 - RNA, 19 nt, Artificial Sequence
  Description of Artificial Sequence: Synthetic oligonucleotide
gacacguugagcacaucac

SEQ ID NO: 1438803 - RNA, 19 nt, Artificial Sequence
  Description of Artificial Sequence: Synthetic oligonucleotide
guguccuuccaaauagucc

SEQ ID NO: 1438804 - RNA, 19 nt, Artificial Sequence
  Description of Artificial Sequence: Synthetic oligonucleotide
auacauucaaggcgcuggu

SEQ ID NO: 1438805 - RNA, 19 nt, Artificial Sequence
  Description of Artificial Sequence: Synthetic oligonucleotide
aacacacgugccaccauug

SEQ ID NO: 1438806 - RNA, 19 nt, Artificial Sequence
  Description of Artificial Sequence: Synthetic oligonucleotide
cucguccacuucauacucg

SEQ ID NO: 1438807 - RNA, 19 nt, Artificial Sequence
  Description of Artificial Sequence: Synthetic oligonucleotide
uccccguguagcccagugg

SEQ ID NO: 1438808 - RNA, 19 nt, Artificial Sequence
  Description of Artificial Sequence: Synthetic oligonucleotide
gguacuccuuucugcaagg

SEQ ID NO: 1438809 - RNA, 19 nt, Artificial Sequence
  Description of Artificial Sequence: Synthetic oligonucleotide
uggacgcacacucgucaag

SEQ ID NO: 1438810 - RNA, 19 nt, Artificial Sequence
  Description of Artificial Sequence: Synthetic oligonucleotide
acaacacaaugggaguauc

SEQ ID NO: 1438811 - RNA, 19 nt, Artificial Sequence
  Description of Artificial Sequence: Synthetic oligonucleotide
acguugagcacaucacagu

SEQ ID NO: 1438812 - RNA, 19 nt, Artificial Sequence
  Description of Artificial Sequence: Synthetic oligonucleotide
cuucauacucgcaguugac

SEQ ID NO: 1438813 - RNA, 19 nt, Artificial Sequence
  Description of Artificial Sequence: Synthetic oligonucleotide
uggugagugcacucgucca

SEQ ID NO: 1438814 - RNA, 19 nt, Artificial Sequence
  Description of Artificial Sequence: Synthetic oligonucleotide
gaauaggccaacacacaga

SEQ ID NO: 1438815 - RNA, 19 nt, Artificial Sequence
  Description of Artificial Sequence: Synthetic oligonucleotide
ugauauccuggaacacacu

SEQ ID NO: 1438816 - RNA, 19 nt, Artificial Sequence
  Description of Artificial Sequence: Synthetic oligonucleotide
gagcgaccaaguucaauca

SEQ ID NO: 1438817 - RNA, 19 nt, Artificial Sequence
  Description of Artificial Sequence: Synthetic oligonucleotide
gcaguugacacccugauau

SEQ ID NO: 1438818 - RNA, 19 nt, Artificial Sequence
  Description of Artificial Sequence: Synthetic oligonucleotide
aggcacggguuagaguugc

SEQ ID NO: 1438819 - RNA, 19 nt, Artificial Sequence
  Description of Artificial Sequence: Synthetic oligonucleotide
ucauacauucaaggcgcug

SEQ ID NO: 1438820 - RNA, 19 nt, Artificial Sequence
  Description of Artificial Sequence: Synthetic oligonucleotide
uugccgguguagcccaaag

SEQ ID NO: 1438821 - RNA, 19 nt, Artificial Sequence
  Description of Artificial Sequence: Synthetic oligonucleotide
aucaacacacgugccacca

SEQ ID NO: 1438822 - RNA, 19 nt, Artificial Sequence
  Description of Artificial Sequence: Synthetic oligonucleotide
  modified_base (11)..(11): a, c, u, g, unknown or other
agugaaacccnagggcaca

SEQ ID NO: 1438823 - RNA, 19 nt, Artificial Sequence
  Description of Artificial Sequence: Synthetic oligonucleotide
acgcauuuuccuuccuaug

SEQ ID NO: 1438824 - RNA, 19 nt, Artificial Sequence
  Description of Artificial Sequence: Synthetic oligonucleotide
cauucaaggcgcugguuca

SEQ ID NO: 1438825 - RNA, 19 nt, Artificial Sequence
  Description of Artificial Sequence: Synthetic oligonucleotide
ugauaucauggagcagaag

SEQ ID NO: 1438826 - RNA, 19 nt, Artificial Sequence
  Description of Artificial Sequence: Synthetic oligonucleotide
ucgucaagcugcuccucgc

SEQ ID NO: 1438827 - RNA, 19 nt, Artificial Sequence
  Description of Artificial Sequence: Synthetic oligonucleotide
ucaaggcgcugguucaagu

SEQ ID NO: 1438828 - RNA, 19 nt, Artificial Sequence
  Description of Artificial Sequence: Synthetic oligonucleotide
cugaauaggccaacacaca

SEQ ID NO: 1438829 - RNA, 19 nt, Artificial Sequence
  Description of Artificial Sequence: Synthetic oligonucleotide
ggcagugauggguauugcc

SEQ ID NO: 1438830 - RNA, 19 nt, Artificial Sequence
  Description of Artificial Sequence: Synthetic oligonucleotide
acgcacacucgucaagcug

SEQ ID NO: 1438831 - RNA, 19 nt, Artificial Sequence
  Description of Artificial Sequence: Synthetic oligonucleotide
gggaguaucauaguaccca

SEQ ID NO: 1438832 - RNA, 19 nt, Artificial Sequence
  Description of Artificial Sequence: Synthetic oligonucleotide
caaggaaguugccauagua

SEQ ID NO: 1438833 - RNA, 19 nt, Artificial Sequence
  Description of Artificial Sequence: Synthetic oligonucleotide
caacacaaugggaguauca

SEQ ID NO: 1438834 - RNA, 19 nt, Artificial Sequence
  Description of Artificial Sequence: Synthetic oligonucleotide
ucgcaguugacacccugau

SEQ ID NO: 1438835 - RNA, 19 nt, Artificial Sequence
  Description of Artificial Sequence: Synthetic oligonucleotide
gucauuccaacauucuccu

SEQ ID NO: 1438836 - RNA, 19 nt, Artificial Sequence
  Description of Artificial Sequence: Synthetic oligonucleotide
ggacacguugagcacauca

SEQ ID NO: 1438837 - RNA, 19 nt, Artificial Sequence
  Description of Artificial Sequence: Synthetic oligonucleotide
  modified_base (9)..(9): a, c, u, g, unknown or other
ugaaacccnagggcacaag

SEQ ID NO: 1438838 - RNA, 19 nt, Artificial Sequence
  Description of Artificial Sequence: Synthetic oligonucleotide
gcacucguccacuucauac

SEQ ID NO: 1438839 - RNA, 19 nt, Artificial Sequence
  Description of Artificial Sequence: Synthetic oligonucleotide
uucaaggcgcugguucaag

SEQ ID NO: 1438840 - RNA, 19 nt, Artificial Sequence
  Description of Artificial Sequence: Synthetic oligonucleotide
aggucuccuagaguacacg

SEQ ID NO: 1438841 - RNA, 19 nt, Artificial Sequence
  Description of Artificial Sequence: Synthetic oligonucleotide
uuuguacauggaaccuuuu

SEQ ID NO: 1438842 - RNA, 19 nt, Artificial Sequence
  Description of Artificial Sequence: Synthetic oligonucleotide
gggcaauugcuucuugagc

SEQ ID NO: 1438843 - RNA, 19 nt, Artificial Sequence
  Description of Artificial Sequence: Synthetic oligonucleotide
uucaggcacggguuagagu

SEQ ID NO: 1438844 - RNA, 19 nt, Artificial Sequence
  Description of Artificial Sequence: Synthetic oligonucleotide
caccauugaaacaggagcu

SEQ ID NO: 1438845 - RNA, 19 nt, Artificial Sequence
  Description of Artificial Sequence: Synthetic oligonucleotide
gguguagcccaaaggacag

SEQ ID NO: 1438846 - RNA, 19 nt, Artificial Sequence
  Description of Artificial Sequence: Synthetic oligonucleotide
cucgcaguagcuccccgug

SEQ ID NO: 1438847 - RNA, 19 nt, Artificial Sequence
  Description of Artificial Sequence: Synthetic oligonucleotide
cagcauugauacagacacc

SEQ ID NO: 1438848 - RNA, 19 nt, Artificial Sequence
  Description of Artificial Sequence: Synthetic oligonucleotide
acauguccccucauucagg

SEQ ID NO: 1438849 - RNA, 19 nt, Artificial Sequence
  Description of Artificial Sequence: Synthetic oligonucleotide
acucgcaguugacacccug

SEQ ID NO: 1438850 - RNA, 19 nt, Artificial Sequence
  Description of Artificial Sequence: Synthetic oligonucleotide
acacgugccaccauugaaa

SEQ ID NO: 1438851 - RNA, 19 nt, Artificial Sequence
  Description of Artificial Sequence: Synthetic oligonucleotide
caguaugcaccgucccacc

SEQ ID NO: 1438852 - RNA, 19 nt, Artificial Sequence
  Description of Artificial Sequence: Synthetic oligonucleotide
uacacggagaucggcugca

SEQ ID NO: 1438853 - RNA, 19 nt, Artificial Sequence
  Description of Artificial Sequence: Synthetic oligonucleotide
ucaacacauguccccucau

SEQ ID NO: 1438854 - RNA, 19 nt, Artificial Sequence
  Description of Artificial Sequence: Synthetic oligonucleotide
ccuauguuuauagucagga

SEQ ID NO: 1438855 - RNA, 19 nt, Artificial Sequence
  Description of Artificial Sequence: Synthetic oligonucleotide
uguuuauagucaggagcau

SEQ ID NO: 1438856 - RNA, 19 nt, Artificial Sequence
  Description of Artificial Sequence: Synthetic oligonucleotide
gacacccgagugcuggcac

SEQ ID NO: 1438857 - RNA, 19 nt, Artificial Sequence
  Description of Artificial Sequence: Synthetic oligonucleotide
cgagcgaccaaguucaauc

SEQ ID NO: 1438858 - RNA, 19 nt, Artificial Sequence
  Description of Artificial Sequence: Synthetic oligonucleotide
cauugauaucauggagcag

SEQ ID NO: 1438859 - RNA, 19 nt, Artificial Sequence
  Description of Artificial Sequence: Synthetic oligonucleotide
  modified_base (5)..(5): a, c, u, g, unknown or other
acccnagggcacaagcaag

SEQ ID NO: 1438860 - RNA, 19 nt, Artificial Sequence
  Description of Artificial Sequence: Synthetic oligonucleotide
gugggcaauugcuucuuga

SEQ ID NO: 1438861 - RNA, 19 nt, Artificial Sequence
  Description of Artificial Sequence: Synthetic oligonucleotide
agcgaccaaguucaaucaa

SEQ ID NO: 1438862 - RNA, 19 nt, Artificial Sequence
  Description of Artificial Sequence: Synthetic oligonucleotide
uagcuccccguguagccca

SEQ ID NO: 1438863 - RNA, 19 nt, Artificial Sequence
  Description of Artificial Sequence: Synthetic oligonucleotide
ugauggguauugccagcau

SEQ ID NO: 1438864 - RNA, 19 nt, Artificial Sequence
  Description of Artificial Sequence: Synthetic oligonucleotide
ccccguguagcccaguggg

SEQ ID NO: 1438865 - RNA, 19 nt, Artificial Sequence
  Description of Artificial Sequence: Synthetic oligonucleotide
gauuggacgcacacucguc

SEQ ID NO: 1438866 - RNA, 19 nt, Artificial Sequence
  Description of Artificial Sequence: Synthetic oligonucleotide
  modified_base (2)..(2): a, c, u, g, unknown or other
cnagggcacaagcaagaga

SEQ ID NO: 1438867 - RNA, 19 nt, Artificial Sequence
  Description of Artificial Sequence: Synthetic oligonucleotide
caucaacacauguccccuc

SEQ ID NO: 1438868 - RNA, 19 nt, Artificial Sequence
  Description of Artificial Sequence: Synthetic oligonucleotide
gcgaccaaguucaaucaag

SEQ ID NO: 1438869 - RNA, 19 nt, Artificial Sequence
  Description of Artificial Sequence: Synthetic oligonucleotide
uacagacacccgagugcug

SEQ ID NO: 1438870 - RNA, 19 nt, Artificial Sequence
  Description of Artificial Sequence: Synthetic oligonucleotide
ucaacacacgugccaccau

SEQ ID NO: 1438871 - RNA, 19 nt, Artificial Sequence
  Description of Artificial Sequence: Synthetic oligonucleotide
cuguauccuccuaugaagu

SEQ ID NO: 1438872 - RNA, 19 nt, Artificial Sequence
  Description of Artificial Sequence: Synthetic oligonucleotide
aguacgcauuuuccuuccu

SEQ ID NO: 1438873 - RNA, 19 nt, Artificial Sequence
  Description of Artificial Sequence: Synthetic oligonucleotide
ccaguuagcuuaucucuug

SEQ ID NO: 1438874 - RNA, 19 nt, Artificial Sequence
  Description of Artificial Sequence: Synthetic oligonucleotide
ggccucaggacauagacau

SEQ ID NO: 1438875 - RNA, 19 nt, Artificial Sequence
  Description of Artificial Sequence: Synthetic oligonucleotide
ggugagugcacucguccac

SEQ ID NO: 1438876 - RNA, 19 nt, Artificial Sequence
  Description of Artificial Sequence: Synthetic oligonucleotide
cacaguaugcaccguccca

SEQ ID NO: 1438877 - RNA, 19 nt, Artificial Sequence
  Description of Artificial Sequence: Synthetic oligonucleotide
gugauggguauugccagca

SEQ ID NO: 1438878 - RNA, 19 nt, Artificial Sequence
  Description of Artificial Sequence: Synthetic oligonucleotide
aggagcaugcagucauuuu

SEQ ID NO: 1438879 - RNA, 19 nt, Artificial Sequence
  Description of Artificial Sequence: Synthetic oligonucleotide
uggcagaccugugcugaag

SEQ ID NO: 1438880 - RNA, 19 nt, Artificial Sequence
  Description of Artificial Sequence: Synthetic oligonucleotide
gcauugauacagacacccg

SEQ ID NO: 1438881 - RNA, 19 nt, Artificial Sequence
  Description of Artificial Sequence: Synthetic oligonucleotide
caguagcuccccguguagc

SEQ ID NO: 1438882 - RNA, 19 nt, Artificial Sequence
  Description of Artificial Sequence: Synthetic oligonucleotide
gaagucgguacagguggca

SEQ ID NO: 1438883 - RNA, 19 nt, Artificial Sequence
  Description of Artificial Sequence: Synthetic oligonucleotide
gacauguguccuuccaaau

SEQ ID NO: 1438884 - RNA, 19 nt, Artificial Sequence
  Description of Artificial Sequence: Synthetic oligonucleotide
ggaaguugccauaguacca

SEQ ID NO: 1438885 - RNA, 19 nt, Artificial Sequence
  Description of Artificial Sequence: Synthetic oligonucleotide
gauggguauugccagcauu

SEQ ID NO: 1438886 - RNA, 19 nt, Artificial Sequence
  Description of Artificial Sequence: Synthetic oligonucleotide
gcgguagguacccaggcca

SEQ ID NO: 1438887 - RNA, 19 nt, Artificial Sequence
  Description of Artificial Sequence: Synthetic oligonucleotide
gucuagguucugaaaccac

SEQ ID NO: 1438888 - RNA, 19 nt, Artificial Sequence
  Description of Artificial Sequence: Synthetic oligonucleotide
gagugcacucguccacuuc

SEQ ID NO: 1438889 - RNA, 19 nt, Artificial Sequence
  Description of Artificial Sequence: Synthetic oligonucleotide
ucauuccaacauucuccua

SEQ ID NO: 1438890 - RNA, 19 nt, Artificial Sequence
  Description of Artificial Sequence: Synthetic oligonucleotide
acgugccaccauugaaaca

SEQ ID NO: 1438891 - RNA, 19 nt, Artificial Sequence
  Description of Artificial Sequence: Synthetic oligonucleotide
ugagugcacucguccacuu

SEQ ID NO: 1438892 - RNA, 19 nt, Artificial Sequence
  Description of Artificial Sequence: Synthetic oligonucleotide
augcaaggcuuucgagcga

SEQ ID NO: 1438893 - RNA, 19 nt, Artificial Sequence
  Description of Artificial Sequence: Synthetic oligonucleotide
cagauauaaugucacuuuu

SEQ ID NO: 1438894 - RNA, 19 nt, Artificial Sequence
  Description of Artificial Sequence: Synthetic oligonucleotide
uccccucauucaggcacgg

SEQ ID NO: 1438895 - RNA, 19 nt, Artificial Sequence
  Description of Artificial Sequence: Synthetic oligonucleotide
cacggguuagaguugcacu

SEQ ID NO: 1438896 - RNA, 19 nt, Artificial Sequence
  Description of Artificial Sequence: Synthetic oligonucleotide
ccuacuuuuccugcuuuac

SEQ ID NO: 1438897 - RNA, 19 nt, Artificial Sequence
  Description of Artificial Sequence: Synthetic oligonucleotide
cacucacaucuguauccuc

SEQ ID NO: 1438898 - RNA, 19 nt, Artificial Sequence
  Description of Artificial Sequence: Synthetic oligonucleotide
auaggccaacacacagaag

SEQ ID NO: 1438899 - RNA, 19 nt, Artificial Sequence
  Description of Artificial Sequence: Synthetic oligonucleotide
caagugcuguggcagaccu

SEQ ID NO: 1438900 - RNA, 19 nt, Artificial Sequence
  Description of Artificial Sequence: Synthetic oligonucleotide
auguguccuuccaaauagu

SEQ ID NO: 1438901 - RNA, 19 nt, Artificial Sequence
  Description of Artificial Sequence: Synthetic oligonucleotide
gcaguagcuccccguguag

SEQ ID NO: 1438902 - RNA, 19 nt, Artificial Sequence
  Description of Artificial Sequence: Synthetic oligonucleotide
guugacacccugauauccu

SEQ ID NO: 1438903 - RNA, 19 nt, Artificial Sequence
  Description of Artificial Sequence: Synthetic oligonucleotide
uggcagugauggguauugc

SEQ ID NO: 1438904 - RNA, 19 nt, Artificial Sequence
  Description of Artificial Sequence: Synthetic oligonucleotide
cuccccguguagcccagug

SEQ ID NO: 1438905 - RNA, 19 nt, Artificial Sequence
  Description of Artificial Sequence: Synthetic oligonucleotide
cuuuucuaugcaaggcuuu

SEQ ID NO: 1438906 - RNA, 19 nt, Artificial Sequence
  Description of Artificial Sequence: Synthetic oligonucleotide
ccgagugcuggcacaagug

SEQ ID NO: 1438907 - RNA, 19 nt, Artificial Sequence
  Description of Artificial Sequence: Synthetic oligonucleotide
cacaucuguauccuccuau

SEQ ID NO: 1438908 - RNA, 19 nt, Artificial Sequence
  Description of Artificial Sequence: Synthetic oligonucleotide
gagcugucagugcauucgu

SEQ ID NO: 1438909 - RNA, 19 nt, Artificial Sequence
  Description of Artificial Sequence: Synthetic oligonucleotide
uuuugccgguguagcccaa

SEQ ID NO: 1438910 - RNA, 19 nt, Artificial Sequence
  Description of Artificial Sequence: Synthetic oligonucleotide
ucgagcgaccaaguucaau

SEQ ID NO: 1438911 - RNA, 19 nt, Artificial Sequence
  Description of Artificial Sequence: Synthetic oligonucleotide
cacacgcuaacagaccuua

SEQ ID NO: 1438912 - RNA, 19 nt, Artificial Sequence
  Description of Artificial Sequence: Synthetic oligonucleotide
ccugauauccuggaacaca

SEQ ID NO: 1438913 - RNA, 19 nt, Artificial Sequence
  Description of Artificial Sequence: Synthetic oligonucleotide
uuugccgguguagcccaaa

SEQ ID NO: 1438914 - RNA, 19 nt, Artificial Sequence
  Description of Artificial Sequence: Synthetic oligonucleotide
ggauuggacgcacacucgu

SEQ ID NO: 1438915 - RNA, 19 nt, Artificial Sequence
  Description of Artificial Sequence: Synthetic oligonucleotide
cugaaaccacacgcuaaca

SEQ ID NO: 1438916 - RNA, 19 nt, Artificial Sequence
  Description of Artificial Sequence: Synthetic oligonucleotide
gcugguucaagucuagguu

SEQ ID NO: 1438917 - RNA, 19 nt, Artificial Sequence
  Description of Artificial Sequence: Synthetic oligonucleotide
ggucuccuagaguacacgu

SEQ ID NO: 1438918 - RNA, 19 nt, Artificial Sequence
  Description of Artificial Sequence: Synthetic oligonucleotide
ccaacauucuccuacuuuu

SEQ ID NO: 1438919 - RNA, 19 nt, Artificial Sequence
  Description of Artificial Sequence: Synthetic oligonucleotide
uacucgcaguugacacccu

SEQ ID NO: 1438920 - RNA, 19 nt, Artificial Sequence
  Description of Artificial Sequence: Synthetic oligonucleotide
  modified_base (4)..(4): a, c, u, g, unknown or other
cccnagggcacaagcaaga

SEQ ID NO: 1438921 - RNA, 19 nt, Artificial Sequence
  Description of Artificial Sequence: Synthetic oligonucleotide
ugcggccuugcaggacacg

SEQ ID NO: 1438922 - RNA, 19 nt, Artificial Sequence
  Description of Artificial Sequence: Synthetic oligonucleotide
cagaccuuauuacaccuuu

SEQ ID NO: 1438923 - RNA, 19 nt, Artificial Sequence
  Description of Artificial Sequence: Synthetic oligonucleotide
  modified_base (10)..(10): a, c, u, g, unknown or other
gugaaacccnagggcacaa

SEQ ID NO: 1438924 - RNA, 19 nt, Artificial Sequence
  Description of Artificial Sequence: Synthetic oligonucleotide
ggagaucggcugcagaggu

SEQ ID NO: 1438925 - RNA, 19 nt, Artificial Sequence
  Description of Artificial Sequence: Synthetic oligonucleotide
uucgagcgaccaaguucaa

SEQ ID NO: 1438926 - RNA, 19 nt, Artificial Sequence
  Description of Artificial Sequence: Synthetic oligonucleotide
acagaccuuauuacaccuu

SEQ ID NO: 1438927 - RNA, 19 nt, Artificial Sequence
  Description of Artificial Sequence: Synthetic oligonucleotide
ggugggcaauugcuucuug

SEQ ID NO: 1438928 - RNA, 19 nt, Artificial Sequence
  Description of Artificial Sequence: Synthetic oligonucleotide
cgguguagcccaaaggaca

SEQ ID NO: 1438929 - RNA, 19 nt, Artificial Sequence
  Description of Artificial Sequence: Synthetic oligonucleotide
  modified_base (3)..(3): a, c, u, g, unknown or other
ccnagggcacaagcaagag

SEQ ID NO: 1438930 - RNA, 19 nt, Artificial Sequence
  Description of Artificial Sequence: Synthetic oligonucleotide
cacgcuaacagaccuuauu

SEQ ID NO: 1438931 - RNA, 19 nt, Artificial Sequence
  Description of Artificial Sequence: Synthetic oligonucleotide
ccauaguaccaaaauaguu

SEQ ID NO: 1438932 - RNA, 19 nt, Artificial Sequence
  Description of Artificial Sequence: Synthetic oligonucleotide
cuccucgcaguagcucccc

SEQ ID NO: 1438933 - RNA, 19 nt, Artificial Sequence
  Description of Artificial Sequence: Synthetic oligonucleotide
cauggauuggacgcacacu

SEQ ID NO: 1438934 - RNA, 19 nt, Artificial Sequence
  Description of Artificial Sequence: Synthetic oligonucleotide
gccauaguaccaaaauagu

SEQ ID NO: 1438935 - RNA, 19 nt, Artificial Sequence
  Description of Artificial Sequence: Synthetic oligonucleotide
cacggagaucggcugcaga

SEQ ID NO: 1438936 - RNA, 19 nt, Artificial Sequence
  Description of Artificial Sequence: Synthetic oligonucleotide
gcaccgucccacccaggag

SEQ ID NO: 1438937 - RNA, 19 nt, Artificial Sequence
  Description of Artificial Sequence: Synthetic oligonucleotide
gcacggguuagaguugcac

SEQ ID NO: 1438938 - RNA, 19 nt, Artificial Sequence
  Description of Artificial Sequence: Synthetic oligonucleotide
ggcaaucucugaggaucag

SEQ ID NO: 1438939 - RNA, 19 nt, Artificial Sequence
  Description of Artificial Sequence: Synthetic oligonucleotide
cugcggccuugcaggacac

SEQ ID NO: 1438940 - RNA, 19 nt, Artificial Sequence
  Description of Artificial Sequence: Synthetic oligonucleotide
ccucaggacauagacaugu

SEQ ID NO: 1438941 - RNA, 19 nt, Artificial Sequence
  Description of Artificial Sequence: Synthetic oligonucleotide
aggacacguugagcacauc

SEQ ID NO: 1438942 - RNA, 19 nt, Artificial Sequence
  Description of Artificial Sequence: Synthetic oligonucleotide
gugagugcacucguccacu

SEQ ID NO: 1438943 - RNA, 19 nt, Artificial Sequence
  Description of Artificial Sequence: Synthetic oligonucleotide
cccguguagcccagugggc

SEQ ID NO: 1438944 - RNA, 19 nt, Artificial Sequence
  Description of Artificial Sequence: Synthetic oligonucleotide
caacacacgugccaccauu

SEQ ID NO: 1438945 - RNA, 19 nt, Artificial Sequence
  Description of Artificial Sequence: Synthetic oligonucleotide
ccccuggugagugcacucg

SEQ ID NO: 1438946 - RNA, 19 nt, Artificial Sequence
  Description of Artificial Sequence: Synthetic oligonucleotide
ggggaugaaugugcuucac

SEQ ID NO: 1438947 - RNA, 19 nt, Artificial Sequence
  Description of Artificial Sequence: Synthetic oligonucleotide
cggagaucggcugcagagg

SEQ ID NO: 1438948 - RNA, 19 nt, Artificial Sequence
  Description of Artificial Sequence: Synthetic oligonucleotide
caacacauguccccucauu

SEQ ID NO: 1438949 - RNA, 19 nt, Artificial Sequence
  Description of Artificial Sequence: Synthetic oligonucleotide
caggacacguugagcacau

SEQ ID NO: 1438950 - RNA, 19 nt, Artificial Sequence
  Description of Artificial Sequence: Synthetic oligonucleotide
acacgcuaacagaccuuau

SEQ ID NO: 1438951 - RNA, 19 nt, Artificial Sequence
  Description of Artificial Sequence: Synthetic oligonucleotide
ccaggucuccuagaguaca

SEQ ID NO: 1438952 - RNA, 19 nt, Artificial Sequence
  Description of Artificial Sequence: Synthetic oligonucleotide
gguagguacccaggccauc

SEQ ID NO: 1438953 - RNA, 19 nt, Artificial Sequence
  Description of Artificial Sequence: Synthetic oligonucleotide
cccugauauccuggaacac

SEQ ID NO: 1438954 - RNA, 19 nt, Artificial Sequence
  Description of Artificial Sequence: Synthetic oligonucleotide
ccuagaguacacguuuaua

SEQ ID NO: 1438955 - RNA, 19 nt, Artificial Sequence
  Description of Artificial Sequence: Synthetic oligonucleotide
ccguguagcccagugggca

SEQ ID NO: 1438956 - RNA, 19 nt, Artificial Sequence
  Description of Artificial Sequence: Synthetic oligonucleotide
cgaccaaguucaaucaagu

SEQ ID NO: 1438957 - RNA, 19 nt, Artificial Sequence
  Description of Artificial Sequence: Synthetic oligonucleotide
cagucauuuucugguuacu

SEQ ID NO: 1438958 - RNA, 19 nt, Artificial Sequence
  Description of Artificial Sequence: Synthetic oligonucleotide
auccuccuaugaagucggu

SEQ ID NO: 1438959 - RNA, 19 nt, Artificial Sequence
  Description of Artificial Sequence: Synthetic oligonucleotide
gcaaggcuuucgagcgacc

SEQ ID NO: 1438960 - RNA, 19 nt, Artificial Sequence
  Description of Artificial Sequence: Synthetic oligonucleotide
ggguuagaguugcacucau

SEQ ID NO: 1438961 - RNA, 19 nt, Artificial Sequence
  Description of Artificial Sequence: Synthetic oligonucleotide
ccucauucaggcacggguu

SEQ ID NO: 1438962 - RNA, 19 nt, Artificial Sequence
  Description of Artificial Sequence: Synthetic oligonucleotide
cgcugguucaagucuaggu

SEQ ID NO: 1438963 - RNA, 19 nt, Artificial Sequence
  Description of Artificial Sequence: Synthetic oligonucleotide
caggagcaugcagucauuu

SEQ ID NO: 1438964 - RNA, 19 nt, Artificial Sequence
  Description of Artificial Sequence: Synthetic oligonucleotide
cggguuagaguugcacuca

SEQ ID NO: 1438965 - RNA, 19 nt, Artificial Sequence
  Description of Artificial Sequence: Synthetic oligonucleotide
gugcacucguccacuucau

SEQ ID NO: 1438966 - RNA, 19 nt, Artificial Sequence
  Description of Artificial Sequence: Synthetic oligonucleotide
cgcaguagcuccccgugua

SEQ ID NO: 1438967 - RNA, 19 nt, Artificial Sequence
  Description of Artificial Sequence: Synthetic oligonucleotide
ggcacggguuagaguugca

SEQ ID NO: 1438968 - RNA, 19 nt, Artificial Sequence
  Description of Artificial Sequence: Synthetic oligonucleotide
ccucgcaguagcuccccgu

SEQ ID NO: 1438969 - RNA, 19 nt, Artificial Sequence
  Description of Artificial Sequence: Synthetic oligonucleotide
caccagggucugacaguuu

SEQ ID NO: 1438970 - RNA, 19 nt, Artificial Sequence
  Description of Artificial Sequence: Synthetic oligonucleotide
ccgucccacccaggaggac

SEQ ID NO: 1438971 - RNA, 19 nt, Artificial Sequence
  Description of Artificial Sequence: Synthetic oligonucleotide
aauauaauuaaccacgcug

SEQ ID NO: 1438972 - RNA, 19 nt, Artificial Sequence
  Description of Artificial Sequence: Synthetic oligonucleotide
aaauaaugcaaggaaagcc

SEQ ID NO: 1438973 - RNA, 19 nt, Artificial Sequence
  Description of Artificial Sequence: Synthetic oligonucleotide
aauaaugcaaggaaagccc

SEQ ID NO: 1438974 - RNA, 19 nt, Artificial Sequence
  Description of Artificial Sequence: Synthetic oligonucleotide
gucaauauaauuaaccacg

SEQ ID NO: 1438975 - RNA, 19 nt, Artificial Sequence
  Description of Artificial Sequence: Synthetic oligonucleotide
aauucugacuucguuaccc

SEQ ID NO: 1438976 - RNA, 19 nt, Artificial Sequence
  Description of Artificial Sequence: Synthetic oligonucleotide
aacaccuuaguuuuccagg

SEQ ID NO: 1438977 - RNA, 19 nt, Artificial Sequence
  Description of Artificial Sequence: Synthetic oligonucleotide
gacaucuugacccaggugc

SEQ ID NO: 1438978 - RNA, 19 nt, Artificial Sequence
  Description of Artificial Sequence: Synthetic oligonucleotide
aagaaaccaaaauucugac

SEQ ID NO: 1438979 - RNA, 19 nt, Artificial Sequence
  Description of Artificial Sequence: Synthetic oligonucleotide
auauaauuaaccacgcugg

SEQ ID NO: 1438980 - RNA, 19 nt, Artificial Sequence
  Description of Artificial Sequence: Synthetic oligonucleotide
gagcaguugagccugaccg

SEQ ID NO: 1438981 - RNA, 19 nt, Artificial Sequence
  Description of Artificial Sequence: Synthetic oligonucleotide
auuggccgugauuauaucc

SEQ ID NO: 1438982 - RNA, 19 nt, Artificial Sequence
  Description of Artificial Sequence: Synthetic oligonucleotide
aacgaccugguccaacucc

SEQ ID NO: 1438983 - RNA, 19 nt, Artificial Sequence
  Description of Artificial Sequence: Synthetic oligonucleotide
ucuauguuuguauuuugcc

SEQ ID NO: 1438984 - RNA, 19 nt, Artificial Sequence
  Description of Artificial Sequence: Synthetic oligonucleotide
uaaagauacugccauacuc

SEQ ID NO: 1438985 - RNA, 19 nt, Artificial Sequence
  Description of Artificial Sequence: Synthetic oligonucleotide
aacucaacagcuucacguc

SEQ ID NO: 1438986 - RNA, 19 nt, Artificial Sequence
  Description of Artificial Sequence: Synthetic oligonucleotide
aaauucugacuucguuacc

SEQ ID NO: 1438987 - RNA, 19 nt, Artificial Sequence
  Description of Artificial Sequence: Synthetic oligonucleotide
uuguauuuugccuugcuuc

SEQ ID NO: 1438988 - RNA, 19 nt, Artificial Sequence
  Description of Artificial Sequence: Synthetic oligonucleotide
uugagcaccauuuaauaaa

SEQ ID NO: 1438989 - RNA, 19 nt, Artificial Sequence
  Description of Artificial Sequence: Synthetic oligonucleotide
uuaucaguaccauuccagc

SEQ ID NO: 1438990 - RNA, 19 nt, Artificial Sequence
  Description of Artificial Sequence: Synthetic oligonucleotide
uguauuuugccuugcuuca

SEQ ID NO: 1438991 - RNA, 19 nt, Artificial Sequence
  Description of Artificial Sequence: Synthetic oligonucleotide
gaucuuuccauucgaagac

SEQ ID NO: 1438992 - RNA, 19 nt, Artificial Sequence
  Description of Artificial Sequence: Synthetic oligonucleotide
caaggaaagccccacagag

SEQ ID NO: 1438993 - RNA, 19 nt, Artificial Sequence
  Description of Artificial Sequence: Synthetic oligonucleotide
guaauugacccucugggug

SEQ ID NO: 1438994 - RNA, 19 nt, Artificial Sequence
  Description of Artificial Sequence: Synthetic oligonucleotide
uucguuacccaaauauccc

SEQ ID NO: 1438995 - RNA, 19 nt, Artificial Sequence
  Description of Artificial Sequence: Synthetic oligonucleotide
aagacacagacaugacagg

SEQ ID NO: 1438996 - RNA, 19 nt, Artificial Sequence
  Description of Artificial Sequence: Synthetic oligonucleotide
guucucaacgaccuggucc

SEQ ID NO: 1438997 - RNA, 19 nt, Artificial Sequence
  Description of Artificial Sequence: Synthetic oligonucleotide
aagauacugccauacucug

SEQ ID NO: 1438998 - RNA, 19 nt, Artificial Sequence
  Description of Artificial Sequence: Synthetic oligonucleotide
acucaacagcuucacgucc

SEQ ID NO: 1438999 - RNA, 19 nt, Artificial Sequence
  Description of Artificial Sequence: Synthetic oligonucleotide
auaaugcaaggaaagcccc

SEQ ID NO: 1439000 - RNA, 19 nt, Artificial Sequence
  Description of Artificial Sequence: Synthetic oligonucleotide
agcuguagaagccuggugu

SEQ ID NO: 1439001 - RNA, 19 nt, Artificial Sequence
  Description of Artificial Sequence: Synthetic oligonucleotide
uucucaacgaccuggucca

SEQ ID NO: 1439002 - RNA, 19 nt, Artificial Sequence
  Description of Artificial Sequence: Synthetic oligonucleotide
uaucaguaccauuccagcc

SEQ ID NO: 1439003 - RNA, 19 nt, Artificial Sequence
  Description of Artificial Sequence: Synthetic oligonucleotide
auucguguaauugacccuc

SEQ ID NO: 1439004 - RNA, 19 nt, Artificial Sequence
  Description of Artificial Sequence: Synthetic oligonucleotide
guuaucaguaccauuccag

SEQ ID NO: 1439005 - RNA, 19 nt, Artificial Sequence
  Description of Artificial Sequence: Synthetic oligonucleotide
aauuaaccacgcuggucuc

SEQ ID NO: 1439006 - RNA, 19 nt, Artificial Sequence
  Description of Artificial Sequence: Synthetic oligonucleotide
uauaauuaaccacgcuggu

SEQ ID NO: 1439007 - RNA, 19 nt, Artificial Sequence
  Description of Artificial Sequence: Synthetic oligonucleotide
aucaguaccauuccagccu

SEQ ID NO: 1439008 - RNA, 19 nt, Artificial Sequence
  Description of Artificial Sequence: Synthetic oligonucleotide
uucgaagaccacaaagaac

SEQ ID NO: 1439009 - RNA, 19 nt, Artificial Sequence
  Description of Artificial Sequence: Synthetic oligonucleotide
uuagguaucguuuccugau

SEQ ID NO: 1439010 - RNA, 19 nt, Artificial Sequence
  Description of Artificial Sequence: Synthetic oligonucleotide
ucggcugcuuuaaauaaug

SEQ ID NO: 1439011 - RNA, 19 nt, Artificial Sequence
  Description of Artificial Sequence: Synthetic oligonucleotide
uauuuugccuugcuucagc

SEQ ID NO: 1439012 - RNA, 19 nt, Artificial Sequence
  Description of Artificial Sequence: Synthetic oligonucleotide
aggagugcgaugguguucc

SEQ ID NO: 1439013 - RNA, 19 nt, Artificial Sequence
  Description of Artificial Sequence: Synthetic oligonucleotide
uuuaggcaggccuugcuga

SEQ ID NO: 1439014 - RNA, 19 nt, Artificial Sequence
  Description of Artificial Sequence: Synthetic oligonucleotide
auaauuaaccacgcugguc

SEQ ID NO: 1439015 - RNA, 19 nt, Artificial Sequence
  Description of Artificial Sequence: Synthetic oligonucleotide
aauaaagucuauguuugua

SEQ ID NO: 1439016 - RNA, 19 nt, Artificial Sequence
  Description of Artificial Sequence: Synthetic oligonucleotide
ggauucguguaauugaccc

SEQ ID NO: 1439017 - RNA, 19 nt, Artificial Sequence
  Description of Artificial Sequence: Synthetic oligonucleotide
uagagggcaaucccugggg

SEQ ID NO: 1439018 - RNA, 19 nt, Artificial Sequence
  Description of Artificial Sequence: Synthetic oligonucleotide
cuugccggaacucaacagc

SEQ ID NO: 1439019 - RNA, 19 nt, Artificial Sequence
  Description of Artificial Sequence: Synthetic oligonucleotide
ucagugauggucugguaga

SEQ ID NO: 1439020 - RNA, 19 nt, Artificial Sequence
  Description of Artificial Sequence: Synthetic oligonucleotide
gaagggauucguguaauug

SEQ ID NO: 1439021 - RNA, 19 nt, Artificial Sequence
  Description of Artificial Sequence: Synthetic oligonucleotide
cauucgaagaccacaaaga

SEQ ID NO: 1439022 - RNA, 19 nt, Artificial Sequence
  Description of Artificial Sequence: Synthetic oligonucleotide
aacuccuggaaagaggaga

SEQ ID NO: 1439023 - RNA, 19 nt, Artificial Sequence
  Description of Artificial Sequence: Synthetic oligonucleotide
gucguuaucaguaccauuc

SEQ ID NO: 1439024 - RNA, 19 nt, Artificial Sequence
  Description of Artificial Sequence: Synthetic oligonucleotide
gauuauauccuggaccuuc

SEQ ID NO: 1439025 - RNA, 19 nt, Artificial Sequence
  Description of Artificial Sequence: Synthetic oligonucleotide
auucgaagaccacaaagaa

SEQ ID NO: 1439026 - RNA, 19 nt, Artificial Sequence
  Description of Artificial Sequence: Synthetic oligonucleotide
augguaugauuggagaagg

SEQ ID NO: 1439027 - RNA, 19 nt, Artificial Sequence
  Description of Artificial Sequence: Synthetic oligonucleotide
aagacguucuuuaggcagg

SEQ ID NO: 1439028 - RNA, 19 nt, Artificial Sequence
  Description of Artificial Sequence: Synthetic oligonucleotide
ucguuacccaaauaucccc

SEQ ID NO: 1439029 - RNA, 19 nt, Artificial Sequence
  Description of Artificial Sequence: Synthetic oligonucleotide
uguauggaaacuguuuuau

SEQ ID NO: 1439030 - RNA, 19 nt, Artificial Sequence
  Description of Artificial Sequence: Synthetic oligonucleotide
aacucggcugcuuuaaaua

SEQ ID NO: 1439031 - RNA, 19 nt, Artificial Sequence
  Description of Artificial Sequence: Synthetic oligonucleotide
uuuguauuuugccuugcuu

SEQ ID NO: 1439032 - RNA, 19 nt, Artificial Sequence
  Description of Artificial Sequence: Synthetic oligonucleotide
cucaacagcuucacguccg

SEQ ID NO: 1439033 - RNA, 19 nt, Artificial Sequence
  Description of Artificial Sequence: Synthetic oligonucleotide
uucacguccguccuccucu

SEQ ID NO: 1439034 - RNA, 19 nt, Artificial Sequence
  Description of Artificial Sequence: Synthetic oligonucleotide
aaacucggcugcuuuaaau

SEQ ID NO: 1439035 - RNA, 19 nt, Artificial Sequence
  Description of Artificial Sequence: Synthetic oligonucleotide
auugagcaccauuuaauaa

SEQ ID NO: 1439036 - RNA, 19 nt, Artificial Sequence
  Description of Artificial Sequence: Synthetic oligonucleotide
ggucaauauaauuaaccac

SEQ ID NO: 1439037 - RNA, 19 nt, Artificial Sequence
  Description of Artificial Sequence: Synthetic oligonucleotide
ucguuaucaguaccauucc

SEQ ID NO: 1439038 - RNA, 19 nt, Artificial Sequence
  Description of Artificial Sequence: Synthetic oligonucleotide
ugguaugauuggagaaggg

SEQ ID NO: 1439039 - RNA, 19 nt, Artificial Sequence
  Description of Artificial Sequence: Synthetic oligonucleotide
cucugaguucucaacgacc

SEQ ID NO: 1439040 - RNA, 19 nt, Artificial Sequence
  Description of Artificial Sequence: Synthetic oligonucleotide
ucauaguggugcuuacagc

SEQ ID NO: 1439041 - RNA, 19 nt, Artificial Sequence
  Description of Artificial Sequence: Synthetic oligonucleotide
acuucguuacccaaauauc

SEQ ID NO: 1439042 - RNA, 19 nt, Artificial Sequence
  Description of Artificial Sequence: Synthetic oligonucleotide
aaggaaagccccacagagg

SEQ ID NO: 1439043 - RNA, 19 nt, Artificial Sequence
  Description of Artificial Sequence: Synthetic oligonucleotide
gauugagcaccauuuaaua

SEQ ID NO: 1439044 - RNA, 19 nt, Artificial Sequence
  Description of Artificial Sequence: Synthetic oligonucleotide
uuaugugguuuguugccug

SEQ ID NO: 1439045 - RNA, 19 nt, Artificial Sequence
  Description of Artificial Sequence: Synthetic oligonucleotide
guaagacacagacaugaca

SEQ ID NO: 1439046 - RNA, 19 nt, Artificial Sequence
  Description of Artificial Sequence: Synthetic oligonucleotide
caaaauucugacuucguua

SEQ ID NO: 1439047 - RNA, 19 nt, Artificial Sequence
  Description of Artificial Sequence: Synthetic oligonucleotide
acguucuuuaggcaggccu

SEQ ID NO: 1439048 - RNA, 19 nt, Artificial Sequence
  Description of Artificial Sequence: Synthetic oligonucleotide
aagacggccacagccauga

SEQ ID NO: 1439049 - RNA, 19 nt, Artificial Sequence
  Description of Artificial Sequence: Synthetic oligonucleotide
guagagggcaaucccuggg

SEQ ID NO: 1439050 - RNA, 19 nt, Artificial Sequence
  Description of Artificial Sequence: Synthetic oligonucleotide
aagucuauguuuguauuuu

SEQ ID NO: 1439051 - RNA, 19 nt, Artificial Sequence
  Description of Artificial Sequence: Synthetic oligonucleotide
gacuucguuacccaaauau

SEQ ID NO: 1439052 - RNA, 19 nt, Artificial Sequence
  Description of Artificial Sequence: Synthetic oligonucleotide
gugggaugaccucauagug

SEQ ID NO: 1439053 - RNA, 19 nt, Artificial Sequence
  Description of Artificial Sequence: Synthetic oligonucleotide
uggggcaucauagcggucc

SEQ ID NO: 1439054 - RNA, 19 nt, Artificial Sequence
  Description of Artificial Sequence: Synthetic oligonucleotide
ugagccucuccuagagagg

SEQ ID NO: 1439055 - RNA, 19 nt, Artificial Sequence
  Description of Artificial Sequence: Synthetic oligonucleotide
ggaucuuuccauucgaaga

SEQ ID NO: 1439056 - RNA, 19 nt, Artificial Sequence
  Description of Artificial Sequence: Synthetic oligonucleotide
gauguggagagguccugcc

SEQ ID NO: 1439057 - RNA, 19 nt, Artificial Sequence
  Description of Artificial Sequence: Synthetic oligonucleotide
ugagcaguugagccugacc

SEQ ID NO: 1439058 - RNA, 19 nt, Artificial Sequence
  Description of Artificial Sequence: Synthetic oligonucleotide
caccauuuaauaaagucua

SEQ ID NO: 1439059 - RNA, 19 nt, Artificial Sequence
  Description of Artificial Sequence: Synthetic oligonucleotide
agcaguugagccugaccgg

SEQ ID NO: 1439060 - RNA, 19 nt, Artificial Sequence
  Description of Artificial Sequence: Synthetic oligonucleotide
uuacagcugagcaguugag

SEQ ID NO: 1439061 - RNA, 19 nt, Artificial Sequence
  Description of Artificial Sequence: Synthetic oligonucleotide
ucacuggggauugagcacc

SEQ ID NO: 1439062 - RNA, 19 nt, Artificial Sequence
  Description of Artificial Sequence: Synthetic oligonucleotide
cauaguggugcuuacagcu

SEQ ID NO: 1439063 - RNA, 19 nt, Artificial Sequence
  Description of Artificial Sequence: Synthetic oligonucleotide
cuuacagcugagcaguuga

SEQ ID NO: 1439064 - RNA, 19 nt, Artificial Sequence
  Description of Artificial Sequence: Synthetic oligonucleotide
cgugauuauauccuggacc

SEQ ID NO: 1439065 - RNA, 19 nt, Artificial Sequence
  Description of Artificial Sequence: Synthetic oligonucleotide
cucgccacuguauggaaac

SEQ ID NO: 1439066 - RNA, 19 nt, Artificial Sequence
  Description of Artificial Sequence: Synthetic oligonucleotide
ucccaggucguuaucagua

SEQ ID NO: 1439067 - RNA, 19 nt, Artificial Sequence
  Description of Artificial Sequence: Synthetic oligonucleotide
ugaagcccaaaguauuaaa

SEQ ID NO: 1439068 - RNA, 19 nt, Artificial Sequence
  Description of Artificial Sequence: Synthetic oligonucleotide
caacaccuuaguuuuccag

SEQ ID NO: 1439069 - RNA, 19 nt, Artificial Sequence
  Description of Artificial Sequence: Synthetic oligonucleotide
agugauggucugguagacc

SEQ ID NO: 1439070 - RNA, 19 nt, Artificial Sequence
  Description of Artificial Sequence: Synthetic oligonucleotide
cuuuaggcaggccuugcug

SEQ ID NO: 1439071 - RNA, 19 nt, Artificial Sequence
  Description of Artificial Sequence: Synthetic oligonucleotide
ugauuggagaagggauucg

SEQ ID NO: 1439072 - RNA, 19 nt, Artificial Sequence
  Description of Artificial Sequence: Synthetic oligonucleotide
gucuauguuuguauuuugc

SEQ ID NO: 1439073 - RNA, 19 nt, Artificial Sequence
  Description of Artificial Sequence: Synthetic oligonucleotide
agaccccuggaccuuggac

SEQ ID NO: 1439074 - RNA, 19 nt, Artificial Sequence
  Description of Artificial Sequence: Synthetic oligonucleotide
uguuugagcuucucucgga

SEQ ID NO: 1439075 - RNA, 19 nt, Artificial Sequence
  Description of Artificial Sequence: Synthetic oligonucleotide
uuuuauagcggacgcucuu

SEQ ID NO: 1439076 - RNA, 19 nt, Artificial Sequence
  Description of Artificial Sequence: Synthetic oligonucleotide
cuuccucacguccuguggc

SEQ ID NO: 1439077 - RNA, 19 nt, Artificial Sequence
  Description of Artificial Sequence: Synthetic oligonucleotide
aagcccgccuugucugagc

SEQ ID NO: 1439078 - RNA, 19 nt, Artificial Sequence
  Description of Artificial Sequence: Synthetic oligonucleotide
uuccuaccuggucaggugu

SEQ ID NO: 1439079 - RNA, 19 nt, Artificial Sequence
  Description of Artificial Sequence: Synthetic oligonucleotide
agcaggacggagaagacgu

SEQ ID NO: 1439080 - RNA, 19 nt, Artificial Sequence
  Description of Artificial Sequence: Synthetic oligonucleotide
uuauauccuggaccuucug

SEQ ID NO: 1439081 - RNA, 19 nt, Artificial Sequence
  Description of Artificial Sequence: Synthetic oligonucleotide
guaucguuuccugauuuug

SEQ ID NO: 1439082 - RNA, 19 nt, Artificial Sequence
  Description of Artificial Sequence: Synthetic oligonucleotide
ucgauggcacugaaguccu

SEQ ID NO: 1439083 - RNA, 19 nt, Artificial Sequence
  Description of Artificial Sequence: Synthetic oligonucleotide
ugacaucuugacccaggug

SEQ ID NO: 1439084 - RNA, 19 nt, Artificial Sequence
  Description of Artificial Sequence: Synthetic oligonucleotide
uggccccuggacaaucagg

SEQ ID NO: 1439085 - RNA, 19 nt, Artificial Sequence
  Description of Artificial Sequence: Synthetic oligonucleotide
guguguuccuaccugguca

SEQ ID NO: 1439086 - RNA, 19 nt, Artificial Sequence
  Description of Artificial Sequence: Synthetic oligonucleotide
acaaucagggccgacugca

SEQ ID NO: 1439087 - RNA, 19 nt, Artificial Sequence
  Description of Artificial Sequence: Synthetic oligonucleotide
agaagacguucuuuaggca

SEQ ID NO: 1439088 - RNA, 19 nt, Artificial Sequence
  Description of Artificial Sequence: Synthetic oligonucleotide
cuauguuuguauuuugccu

SEQ ID NO: 1439089 - RNA, 19 nt, Artificial Sequence
  Description of Artificial Sequence: Synthetic oligonucleotide
gaugaagggaucuuuccau

SEQ ID NO: 1439090 - RNA, 19 nt, Artificial Sequence
  Description of Artificial Sequence: Synthetic oligonucleotide
uacagcugagcaguugagc

SEQ ID NO: 1439091 - RNA, 19 nt, Artificial Sequence
  Description of Artificial Sequence: Synthetic oligonucleotide
uuuauagcggacgcucuuc

SEQ ID NO: 1439092 - RNA, 19 nt, Artificial Sequence
  Description of Artificial Sequence: Synthetic oligonucleotide
cauacucuggguuuugcaa

SEQ ID NO: 1439093 - RNA, 19 nt, Artificial Sequence
  Description of Artificial Sequence: Synthetic oligonucleotide
uugucugagcugcgcauga

SEQ ID NO: 1439094 - RNA, 19 nt, Artificial Sequence
  Description of Artificial Sequence: Synthetic oligonucleotide
acggagaagacguucuuua

SEQ ID NO: 1439095 - RNA, 19 nt, Artificial Sequence
  Description of Artificial Sequence: Synthetic oligonucleotide
gcuuaugugguuuguugcc

SEQ ID NO: 1439096 - RNA, 19 nt, Artificial Sequence
  Description of Artificial Sequence: Synthetic oligonucleotide
cacgcuggucucuugccgg

SEQ ID NO: 1439097 - RNA, 19 nt, Artificial Sequence
  Description of Artificial Sequence: Synthetic oligonucleotide
agacguucuuuaggcaggc

SEQ ID NO: 1439098 - RNA, 19 nt, Artificial Sequence
  Description of Artificial Sequence: Synthetic oligonucleotide
uggacaaucagggccgacu

SEQ ID NO: 1439099 - RNA, 19 nt, Artificial Sequence
  Description of Artificial Sequence: Synthetic oligonucleotide
ccauucgaagaccacaaag

SEQ ID NO: 1439100 - RNA, 19 nt, Artificial Sequence
  Description of Artificial Sequence: Synthetic oligonucleotide
agccugguguguuccuacc

SEQ ID NO: 1439101 - RNA, 19 nt, Artificial Sequence
  Description of Artificial Sequence: Synthetic oligonucleotide
ggcacugaaguccucguug

SEQ ID NO: 1439102 - RNA, 19 nt, Artificial Sequence
  Description of Artificial Sequence: Synthetic oligonucleotide
acucggcugcuuuaaauaa

SEQ ID NO: 1439103 - RNA, 19 nt, Artificial Sequence
  Description of Artificial Sequence: Synthetic oligonucleotide
cuccuagagaggugguggg

SEQ ID NO: 1439104 - RNA, 19 nt, Artificial Sequence
  Description of Artificial Sequence: Synthetic oligonucleotide
uugcuucagcuuauguggu

SEQ ID NO: 1439105 - RNA, 19 nt, Artificial Sequence
  Description of Artificial Sequence: Synthetic oligonucleotide
uguuccuaccuggucaggu

SEQ ID NO: 1439106 - RNA, 19 nt, Artificial Sequence
  Description of Artificial Sequence: Synthetic oligonucleotide
gacaaucagggccgacugc

SEQ ID NO: 1439107 - RNA, 19 nt, Artificial Sequence
  Description of Artificial Sequence: Synthetic oligonucleotide
uuccucacguccuguggcc

SEQ ID NO: 1439108 - RNA, 19 nt, Artificial Sequence
  Description of Artificial Sequence: Synthetic oligonucleotide
acuuggacuggcuccuugu

SEQ ID NO: 1439109 - RNA, 19 nt, Artificial Sequence
  Description of Artificial Sequence: Synthetic oligonucleotide
gugcgaugguguuccaagg

SEQ ID NO: 1439110 - RNA, 19 nt, Artificial Sequence
  Description of Artificial Sequence: Synthetic oligonucleotide
ugguuuguugccuggccuc

SEQ ID NO: 1439111 - RNA, 19 nt, Artificial Sequence
  Description of Artificial Sequence: Synthetic oligonucleotide
gugggguagaagcccagcc

SEQ ID NO: 1439112 - RNA, 19 nt, Artificial Sequence
  Description of Artificial Sequence: Synthetic oligonucleotide
ucguguaauugacccucug

SEQ ID NO: 1439113 - RNA, 19 nt, Artificial Sequence
  Description of Artificial Sequence: Synthetic oligonucleotide
aaggauuggccgugauuau

SEQ ID NO: 1439114 - RNA, 19 nt, Artificial Sequence
  Description of Artificial Sequence: Synthetic oligonucleotide
agccccacagaggagugcg

SEQ ID NO: 1439115 - RNA, 19 nt, Artificial Sequence
  Description of Artificial Sequence: Synthetic oligonucleotide
agacucgcuguccacgccu

SEQ ID NO: 1439116 - RNA, 19 nt, Artificial Sequence
  Description of Artificial Sequence: Synthetic oligonucleotide
uucguguaauugacccucu

SEQ ID NO: 1439117 - RNA, 19 nt, Artificial Sequence
  Description of Artificial Sequence: Synthetic oligonucleotide
gguaugauuggagaaggga

SEQ ID NO: 1439118 - RNA, 19 nt, Artificial Sequence
  Description of Artificial Sequence: Synthetic oligonucleotide
auuauauccuggaccuucu

SEQ ID NO: 1439119 - RNA, 19 nt, Artificial Sequence
  Description of Artificial Sequence: Synthetic oligonucleotide
uauagcggacgcucuucac

SEQ ID NO: 1439120 - RNA, 19 nt, Artificial Sequence
  Description of Artificial Sequence: Synthetic oligonucleotide
gguagagggcaaucccugg

SEQ ID NO: 1439121 - RNA, 19 nt, Artificial Sequence
  Description of Artificial Sequence: Synthetic oligonucleotide
uggccgugauuauauccug

SEQ ID NO: 1439122 - RNA, 19 nt, Artificial Sequence
  Description of Artificial Sequence: Synthetic oligonucleotide
uagcgguccaccuccuugu

SEQ ID NO: 1439123 - RNA, 19 nt, Artificial Sequence
  Description of Artificial Sequence: Synthetic oligonucleotide
caggucguuaucaguacca

SEQ ID NO: 1439124 - RNA, 19 nt, Artificial Sequence
  Description of Artificial Sequence: Synthetic oligonucleotide
ugguguguuccuaccuggu

SEQ ID NO: 1439125 - RNA, 19 nt, Artificial Sequence
  Description of Artificial Sequence: Synthetic oligonucleotide
gagguguuguccucccuga

SEQ ID NO: 1439126 - RNA, 19 nt, Artificial Sequence
  Description of Artificial Sequence: Synthetic oligonucleotide
guauuuugccuugcuucag

SEQ ID NO: 1439127 - RNA, 19 nt, Artificial Sequence
  Description of Artificial Sequence: Synthetic oligonucleotide
gacuuggacuggcuccuug

SEQ ID NO: 1439128 - RNA, 19 nt, Artificial Sequence
  Description of Artificial Sequence: Synthetic oligonucleotide
uccauucgaagaccacaaa

SEQ ID NO: 1439129 - RNA, 19 nt, Artificial Sequence
  Description of Artificial Sequence: Synthetic oligonucleotide
ggacaaucagggccgacug

SEQ ID NO: 1439130 - RNA, 19 nt, Artificial Sequence
  Description of Artificial Sequence: Synthetic oligonucleotide
gauucguguaauugacccu

SEQ ID NO: 1439131 - RNA, 19 nt, Artificial Sequence
  Description of Artificial Sequence: Synthetic oligonucleotide
ggccccuggacaaucaggg

SEQ ID NO: 1439132 - RNA, 19 nt, Artificial Sequence
  Description of Artificial Sequence: Synthetic oligonucleotide
guaccauuccagccucuug

SEQ ID NO: 1439133 - RNA, 19 nt, Artificial Sequence
  Description of Artificial Sequence: Synthetic oligonucleotide
aggaccgcgcugcaagaug

SEQ ID NO: 1439134 - RNA, 19 nt, Artificial Sequence
  Description of Artificial Sequence: Synthetic oligonucleotide
cucggcagcaggccucugg

SEQ ID NO: 1439135 - RNA, 19 nt, Artificial Sequence
  Description of Artificial Sequence: Synthetic oligonucleotide
gcucaggcggaacugcagg

SEQ ID NO: 1439136 - RNA, 19 nt, Artificial Sequence
  Description of Artificial Sequence: Synthetic oligonucleotide
aguuccugucuccgggcug

SEQ ID NO: 1439137 - RNA, 19 nt, Artificial Sequence
  Description of Artificial Sequence: Synthetic oligonucleotide
cuugucugagcugcgcaug

SEQ ID NO: 1439138 - RNA, 19 nt, Artificial Sequence
  Description of Artificial Sequence: Synthetic oligonucleotide
gccugaccgggguagaggg

SEQ ID NO: 1439139 - RNA, 19 nt, Artificial Sequence
  Description of Artificial Sequence: Synthetic oligonucleotide
uggucagguguuucuccca

SEQ ID NO: 1439140 - RNA, 19 nt, Artificial Sequence
  Description of Artificial Sequence: Synthetic oligonucleotide
cguguaauugacccucugg

SEQ ID NO: 1439141 - RNA, 19 nt, Artificial Sequence
  Description of Artificial Sequence: Synthetic oligonucleotide
acaugacaggguguuugag

SEQ ID NO: 1439142 - RNA, 19 nt, Artificial Sequence
  Description of Artificial Sequence: Synthetic oligonucleotide
guuccaaggauuggccgug

SEQ ID NO: 1439143 - RNA, 19 nt, Artificial Sequence
  Description of Artificial Sequence: Synthetic oligonucleotide
ggguuuugcaacaccuuag

SEQ ID NO: 1439144 - RNA, 19 nt, Artificial Sequence
  Description of Artificial Sequence: Synthetic oligonucleotide
ugccucgccacuguaugga

SEQ ID NO: 1439145 - RNA, 19 nt, Artificial Sequence
  Description of Artificial Sequence: Synthetic oligonucleotide
agcggacgcucuucacugg

SEQ ID NO: 1439146 - RNA, 19 nt, Artificial Sequence
  Description of Artificial Sequence: Synthetic oligonucleotide
auuaaccacgcuggucucu

SEQ ID NO: 1439147 - RNA, 19 nt, Artificial Sequence
  Description of Artificial Sequence: Synthetic oligonucleotide
guauggaaacuguuuuaua

SEQ ID NO: 1439148 - RNA, 19 nt, Artificial Sequence
  Description of Artificial Sequence: Synthetic oligonucleotide
caggcggaacugcaggaac

SEQ ID NO: 1439149 - RNA, 19 nt, Artificial Sequence
  Description of Artificial Sequence: Synthetic oligonucleotide
ucccgagaacuuccagcug

SEQ ID NO: 1439150 - RNA, 19 nt, Artificial Sequence
  Description of Artificial Sequence: Synthetic oligonucleotide
ugaagcccgccuugucuga

SEQ ID NO: 1439151 - RNA, 19 nt, Artificial Sequence
  Description of Artificial Sequence: Synthetic oligonucleotide
gauuggagaagggauucgu

SEQ ID NO: 1439152 - RNA, 19 nt, Artificial Sequence
  Description of Artificial Sequence: Synthetic oligonucleotide
uuaaccacgcuggucucuu

SEQ ID NO: 1439153 - RNA, 19 nt, Artificial Sequence
  Description of Artificial Sequence: Synthetic oligonucleotide
cuggcaagaggugggauga

SEQ ID NO: 1439154 - RNA, 19 nt, Artificial Sequence
  Description of Artificial Sequence: Synthetic oligonucleotide
aggacggagaagacguucu

SEQ ID NO: 1439155 - RNA, 19 nt, Artificial Sequence
  Description of Artificial Sequence: Synthetic oligonucleotide
aggugcggaagccucccga

SEQ ID NO: 1439156 - RNA, 19 nt, Artificial Sequence
  Description of Artificial Sequence: Synthetic oligonucleotide
caagaccccuggaccuugg

SEQ ID NO: 1439157 - RNA, 19 nt, Artificial Sequence
  Description of Artificial Sequence: Synthetic oligonucleotide
gggauugagcaccauuuaa

SEQ ID NO: 1439158 - RNA, 19 nt, Artificial Sequence
  Description of Artificial Sequence: Synthetic oligonucleotide
cucccgagaacuuccagcu

SEQ ID NO: 1439159 - RNA, 19 nt, Artificial Sequence
  Description of Artificial Sequence: Synthetic oligonucleotide
ucauagcgguccaccuccu

SEQ ID NO: 1439160 - RNA, 19 nt, Artificial Sequence
  Description of Artificial Sequence: Synthetic oligonucleotide
auacugccauacucugggu

SEQ ID NO: 1439161 - RNA, 19 nt, Artificial Sequence
  Description of Artificial Sequence: Synthetic oligonucleotide
ggagaagggauucguguaa

SEQ ID NO: 1439162 - RNA, 19 nt, Artificial Sequence
  Description of Artificial Sequence: Synthetic oligonucleotide
gcaugguaugauuggagaa

SEQ ID NO: 1439163 - RNA, 19 nt, Artificial Sequence
  Description of Artificial Sequence: Synthetic oligonucleotide
uccucacguccuguggccc

SEQ ID NO: 1439164 - RNA, 19 nt, Artificial Sequence
  Description of Artificial Sequence: Synthetic oligonucleotide
agcccgccuugucugagcu

SEQ ID NO: 1439165 - RNA, 19 nt, Artificial Sequence
  Description of Artificial Sequence: Synthetic oligonucleotide
cagcuguagaagccuggug

SEQ ID NO: 1439166 - RNA, 19 nt, Artificial Sequence
  Description of Artificial Sequence: Synthetic oligonucleotide
gguccugccggaucauggc

SEQ ID NO: 1439167 - RNA, 19 nt, Artificial Sequence
  Description of Artificial Sequence: Synthetic oligonucleotide
gaagcccgccuugucugag

SEQ ID NO: 1439168 - RNA, 19 nt, Artificial Sequence
  Description of Artificial Sequence: Synthetic oligonucleotide
cucuccuagagagguggug

SEQ ID NO: 1439169 - RNA, 19 nt, Artificial Sequence
  Description of Artificial Sequence: Synthetic oligonucleotide
gaagacggccacagccaug

SEQ ID NO: 1439170 - RNA, 19 nt, Artificial Sequence
  Description of Artificial Sequence: Synthetic oligonucleotide
uccuaccuggucagguguu

SEQ ID NO: 1439171 - RNA, 19 nt, Artificial Sequence
  Description of Artificial Sequence: Synthetic oligonucleotide
acgaccugguccaacuccu

SEQ ID NO: 1439172 - RNA, 19 nt, Artificial Sequence
  Description of Artificial Sequence: Synthetic oligonucleotide
uggcacugaaguccucguu

SEQ ID NO: 1439173 - RNA, 19 nt, Artificial Sequence
  Description of Artificial Sequence: Synthetic oligonucleotide
cuucacguccguccuccuc

SEQ ID NO: 1439174 - RNA, 19 nt, Artificial Sequence
  Description of Artificial Sequence: Synthetic oligonucleotide
cagugauggucugguagac

SEQ ID NO: 1439175 - RNA, 19 nt, Artificial Sequence
  Description of Artificial Sequence: Synthetic oligonucleotide
gccgugauuauauccugga

SEQ ID NO: 1439176 - RNA, 19 nt, Artificial Sequence
  Description of Artificial Sequence: Synthetic oligonucleotide
guggccccuggacaaucag

SEQ ID NO: 1439177 - RNA, 19 nt, Artificial Sequence
  Description of Artificial Sequence: Synthetic oligonucleotide
gcucugaguucucaacgac

SEQ ID NO: 1439178 - RNA, 19 nt, Artificial Sequence
  Description of Artificial Sequence: Synthetic oligonucleotide
cuugucccgcucgucugcc

SEQ ID NO: 1439179 - RNA, 19 nt, Artificial Sequence
  Description of Artificial Sequence: Synthetic oligonucleotide
accgggguagagggcaauc

SEQ ID NO: 1439180 - RNA, 19 nt, Artificial Sequence
  Description of Artificial Sequence: Synthetic oligonucleotide
uucuggaugaagggaucuu

SEQ ID NO: 1439181 - RNA, 19 nt, Artificial Sequence
  Description of Artificial Sequence: Synthetic oligonucleotide
gggauucguguaauugacc

SEQ ID NO: 1439182 - RNA, 19 nt, Artificial Sequence
  Description of Artificial Sequence: Synthetic oligonucleotide
gcggacgcucuucacuggg

SEQ ID NO: 1439183 - RNA, 19 nt, Artificial Sequence
  Description of Artificial Sequence: Synthetic oligonucleotide
cucaacgaccugguccaac

SEQ ID NO: 1439184 - RNA, 19 nt, Artificial Sequence
  Description of Artificial Sequence: Synthetic oligonucleotide
ccaggucguuaucaguacc

SEQ ID NO: 1439185 - RNA, 19 nt, Artificial Sequence
  Description of Artificial Sequence: Synthetic oligonucleotide
cagacucgcuguccacgcc

SEQ ID NO: 1439186 - RNA, 19 nt, Artificial Sequence
  Description of Artificial Sequence: Synthetic oligonucleotide
cagguguuucucccagguc

SEQ ID NO: 1439187 - RNA, 19 nt, Artificial Sequence
  Description of Artificial Sequence: Synthetic oligonucleotide
gacguucuuuaggcaggcc

SEQ ID NO: 1439188 - RNA, 19 nt, Artificial Sequence
  Description of Artificial Sequence: Synthetic oligonucleotide
aggauuggccgugauuaua

SEQ ID NO: 1439189 - RNA, 19 nt, Artificial Sequence
  Description of Artificial Sequence: Synthetic oligonucleotide
ggguagagggcaaucccug

SEQ ID NO: 1439190 - RNA, 19 nt, Artificial Sequence
  Description of Artificial Sequence: Synthetic oligonucleotide
cuuaugugguuuguugccu

SEQ ID NO: 1439191 - RNA, 19 nt, Artificial Sequence
  Description of Artificial Sequence: Synthetic oligonucleotide
caacgaccugguccaacuc

SEQ ID NO: 1439192 - RNA, 19 nt, Artificial Sequence
  Description of Artificial Sequence: Synthetic oligonucleotide
guggugcuuacagcugagc

SEQ ID NO: 1439193 - RNA, 19 nt, Artificial Sequence
  Description of Artificial Sequence: Synthetic oligonucleotide
ucagggccgacugcauggu

SEQ ID NO: 1439194 - RNA, 19 nt, Artificial Sequence
  Description of Artificial Sequence: Synthetic oligonucleotide
ugcuuacagcugagcaguu

SEQ ID NO: 1439195 - RNA, 19 nt, Artificial Sequence
  Description of Artificial Sequence: Synthetic oligonucleotide
acgcuggucucuugccgga

SEQ ID NO: 1439196 - RNA, 19 nt, Artificial Sequence
  Description of Artificial Sequence: Synthetic oligonucleotide
cugacuucguuacccaaau

SEQ ID NO: 1439197 - RNA, 19 nt, Artificial Sequence
  Description of Artificial Sequence: Synthetic oligonucleotide
ggauugagcaccauuuaau

SEQ ID NO: 1439198 - RNA, 19 nt, Artificial Sequence
  Description of Artificial Sequence: Synthetic oligonucleotide
agggaucuuuccauucgaa

SEQ ID NO: 1439199 - RNA, 19 nt, Artificial Sequence
  Description of Artificial Sequence: Synthetic oligonucleotide
gguggugcaguuccugucu

SEQ ID NO: 1439200 - RNA, 19 nt, Artificial Sequence
  Description of Artificial Sequence: Synthetic oligonucleotide
cguugcucuggcucaggcg

SEQ ID NO: 1439201 - RNA, 19 nt, Artificial Sequence
  Description of Artificial Sequence: Synthetic oligonucleotide
caggugcggaagccucccg

SEQ ID NO: 1439202 - RNA, 19 nt, Artificial Sequence
  Description of Artificial Sequence: Synthetic oligonucleotide
ccgugauuauauccuggac

SEQ ID NO: 1439203 - RNA, 19 nt, Artificial Sequence
  Description of Artificial Sequence: Synthetic oligonucleotide
gcuuacagcugagcaguug

SEQ ID NO: 1439204 - RNA, 19 nt, Artificial Sequence
  Description of Artificial Sequence: Synthetic oligonucleotide
gaagccugguguguuccua

SEQ ID NO: 1439205 - RNA, 19 nt, Artificial Sequence
  Description of Artificial Sequence: Synthetic oligonucleotide
gggccgacugcaugguaug

SEQ ID NO: 1439206 - RNA, 19 nt, Artificial Sequence
  Description of Artificial Sequence: Synthetic oligonucleotide
gagaagggauucguguaau

SEQ ID NO: 1439207 - RNA, 19 nt, Artificial Sequence
  Description of Artificial Sequence: Synthetic oligonucleotide
acguccuguggccccugga

SEQ ID NO: 1439208 - RNA, 19 nt, Artificial Sequence
  Description of Artificial Sequence: Synthetic oligonucleotide
cuguccacgccuggcaaga

SEQ ID NO: 1439209 - RNA, 19 nt, Artificial Sequence
  Description of Artificial Sequence: Synthetic oligonucleotide
uugucccgcucgucugccu

SEQ ID NO: 1439210 - RNA, 19 nt, Artificial Sequence
  Description of Artificial Sequence: Synthetic oligonucleotide
gucugccugcucugaguuc

SEQ ID NO: 1439211 - RNA, 19 nt, Artificial Sequence
  Description of Artificial Sequence: Synthetic oligonucleotide
ccauacucuggguuuugca

SEQ ID NO: 1439212 - RNA, 19 nt, Artificial Sequence
  Description of Artificial Sequence: Synthetic oligonucleotide
gugcggaagccucccgaga

SEQ ID NO: 1439213 - RNA, 19 nt, Artificial Sequence
  Description of Artificial Sequence: Synthetic oligonucleotide
gacgcucuucacuggggau

SEQ ID NO: 1439214 - RNA, 19 nt, Artificial Sequence
  Description of Artificial Sequence: Synthetic oligonucleotide
cugagcaguugagccugac

SEQ ID NO: 1439215 - RNA, 19 nt, Artificial Sequence
  Description of Artificial Sequence: Synthetic oligonucleotide
gcgcaugaacuccuggaaa

SEQ ID NO: 1439216 - RNA, 19 nt, Artificial Sequence
  Description of Artificial Sequence: Synthetic oligonucleotide
cacagacaugacagggugu

SEQ ID NO: 1439217 - RNA, 19 nt, Artificial Sequence
  Description of Artificial Sequence: Synthetic oligonucleotide
cucggcugcuuuaaauaau

SEQ ID NO: 1439218 - RNA, 19 nt, Artificial Sequence
  Description of Artificial Sequence: Synthetic oligonucleotide
ggauuggccgugauuauau

SEQ ID NO: 1439219 - RNA, 19 nt, Artificial Sequence
  Description of Artificial Sequence: Synthetic oligonucleotide
gagcaccauuuaauaaagu

SEQ ID NO: 1439220 - RNA, 19 nt, Artificial Sequence
  Description of Artificial Sequence: Synthetic oligonucleotide
ggggauugagcaccauuua

SEQ ID NO: 1439221 - RNA, 19 nt, Artificial Sequence
  Description of Artificial Sequence: Synthetic oligonucleotide
ccucacguccuguggcccc

SEQ ID NO: 1439222 - RNA, 19 nt, Artificial Sequence
  Description of Artificial Sequence: Synthetic oligonucleotide
ccgggguagagggcaaucc

SEQ ID NO: 1439223 - RNA, 19 nt, Artificial Sequence
  Description of Artificial Sequence: Synthetic oligonucleotide
cuguuuuauagcggacgcu

SEQ ID NO: 1439224 - RNA, 19 nt, Artificial Sequence
  Description of Artificial Sequence: Synthetic oligonucleotide
acgccuggcaagaccccug

SEQ ID NO: 1439225 - RNA, 19 nt, Artificial Sequence
  Description of Artificial Sequence: Synthetic oligonucleotide
cuggacaaucagggccgac

SEQ ID NO: 1439226 - RNA, 19 nt, Artificial Sequence
  Description of Artificial Sequence: Synthetic oligonucleotide
cguuaucaguaccauucca

SEQ ID NO: 1439227 - RNA, 19 nt, Artificial Sequence
  Description of Artificial Sequence: Synthetic oligonucleotide
ggaggaccgcgcugcaaga

SEQ ID NO: 1439228 - RNA, 19 nt, Artificial Sequence
  Description of Artificial Sequence: Synthetic oligonucleotide
gccccuggacaaucagggc

SEQ ID NO: 1439229 - RNA, 19 nt, Artificial Sequence
  Description of Artificial Sequence: Synthetic oligonucleotide
gguaucguuuccugauuuu

SEQ ID NO: 1439230 - RNA, 19 nt, Artificial Sequence
  Description of Artificial Sequence: Synthetic oligonucleotide
gcaagaccccuggaccuug

SEQ ID NO: 1439231 - RNA, 19 nt, Artificial Sequence
  Description of Artificial Sequence: Synthetic oligonucleotide
ucucaacgaccugguccaa

SEQ ID NO: 1439232 - RNA, 19 nt, Artificial Sequence
  Description of Artificial Sequence: Synthetic oligonucleotide
gcggaagccucccgagaac

SEQ ID NO: 1439233 - RNA, 19 nt, Artificial Sequence
  Description of Artificial Sequence: Synthetic oligonucleotide
cccgggaccgcgacgccgc

SEQ ID NO: 1439234 - RNA, 19 nt, Artificial Sequence
  Description of Artificial Sequence: Synthetic oligonucleotide
gcgaugguguuccaaggau

SEQ ID NO: 1439235 - RNA, 19 nt, Artificial Sequence
  Description of Artificial Sequence: Synthetic oligonucleotide
gccucuggucaauauaauu

SEQ ID NO: 1439236 - RNA, 19 nt, Artificial Sequence
  Description of Artificial Sequence: Synthetic oligonucleotide
cuggggcaucauagcgguc

SEQ ID NO: 1439237 - RNA, 19 nt, Artificial Sequence
  Description of Artificial Sequence: Synthetic oligonucleotide
ggaugaccucauaguggug

SEQ ID NO: 1439238 - RNA, 19 nt, Artificial Sequence
  Description of Artificial Sequence: Synthetic oligonucleotide
ccaggugcggaagccuccc

SEQ ID NO: 1439239 - RNA, 19 nt, Artificial Sequence
  Description of Artificial Sequence: Synthetic oligonucleotide
gggguagagggcaaucccu

SEQ ID NO: 1439240 - RNA, 19 nt, Artificial Sequence
  Description of Artificial Sequence: Synthetic oligonucleotide
ggucguuaucaguaccauu

SEQ ID NO: 1439241 - RNA, 19 nt, Artificial Sequence
  Description of Artificial Sequence: Synthetic oligonucleotide
ccgagaacuuccagcugga

SEQ ID NO: 1439242 - RNA, 19 nt, Artificial Sequence
  Description of Artificial Sequence: Synthetic oligonucleotide
gguuuguugccuggccucu

SEQ ID NO: 1439243 - RNA, 19 nt, Artificial Sequence
  Description of Artificial Sequence: Synthetic oligonucleotide
caaucagggccgacugcau

SEQ ID NO: 1439244 - RNA, 19 nt, Artificial Sequence
  Description of Artificial Sequence: Synthetic oligonucleotide
ccacgccuggcaagacccc

SEQ ID NO: 1439245 - RNA, 19 nt, Artificial Sequence
  Description of Artificial Sequence: Synthetic oligonucleotide
gaggaccgcgcugcaagau

SEQ ID NO: 1439246 - RNA, 19 nt, Artificial Sequence
  Description of Artificial Sequence: Synthetic oligonucleotide
ucucggcagcaggccucug

SEQ ID NO: 1439247 - RNA, 19 nt, Artificial Sequence
  Description of Artificial Sequence: Synthetic oligonucleotide
gcucccgcuuccucacguc

SEQ ID NO: 1439248 - RNA, 19 nt, Artificial Sequence
  Description of Artificial Sequence: Synthetic oligonucleotide
ccgccuugucugagcugcg

SEQ ID NO: 1439249 - RNA, 19 nt, Artificial Sequence
  Description of Artificial Sequence: Synthetic oligonucleotide
cagcccgcugcggcucgcc

SEQ ID NO: 1439250 - RNA, 19 nt, Artificial Sequence
  Description of Artificial Sequence: Synthetic oligonucleotide
ccucgccacuguauggaaa

SEQ ID NO: 1439251 - RNA, 19 nt, Artificial Sequence
  Description of Artificial Sequence: Synthetic oligonucleotide
caguaccauuccagccucu

SEQ ID NO: 1439252 - RNA, 19 nt, Artificial Sequence
  Description of Artificial Sequence: Synthetic oligonucleotide
gccucgccacuguauggaa

SEQ ID NO: 1439253 - RNA, 19 nt, Artificial Sequence
  Description of Artificial Sequence: Synthetic oligonucleotide
ggccgacugcaugguauga

SEQ ID NO: 1439254 - RNA, 19 nt, Artificial Sequence
  Description of Artificial Sequence: Synthetic oligonucleotide
ccaggcuucugaagcccaa

SEQ ID NO: 1439255 - RNA, 19 nt, Artificial Sequence
  Description of Artificial Sequence: Synthetic oligonucleotide
cggcggaggaccgcgcugc

SEQ ID NO: 1439256 - RNA, 19 nt, Artificial Sequence
  Description of Artificial Sequence: Synthetic oligonucleotide
cugccauacucuggguuuu

SEQ ID NO: 1439257 - RNA, 19 nt, Artificial Sequence
  Description of Artificial Sequence: Synthetic oligonucleotide
cagggccgacugcauggua

SEQ ID NO: 1439258 - RNA, 19 nt, Artificial Sequence
  Description of Artificial Sequence: Synthetic oligonucleotide
cauagcgguccaccuccuu

SEQ ID NO: 1439259 - RNA, 19 nt, Artificial Sequence
  Description of Artificial Sequence: Synthetic oligonucleotide
cgccuugucugagcugcgc

SEQ ID NO: 1439260 - RNA, 19 nt, Artificial Sequence
  Description of Artificial Sequence: Synthetic oligonucleotide
cgaugguguuccaaggauu

SEQ ID NO: 1439261 - RNA, 19 nt, Artificial Sequence
  Description of Artificial Sequence: Synthetic oligonucleotide
gccgacugcaugguaugau

SEQ ID NO: 1439262 - RNA, 19 nt, Artificial Sequence
  Description of Artificial Sequence: Synthetic oligonucleotide
gaccgggguagagggcaau

SEQ ID NO: 1439263 - RNA, 19 nt, Artificial Sequence
  Description of Artificial Sequence: Synthetic oligonucleotide
ccgggaccgcgacgccgcg

SEQ ID NO: 1439264 - RNA, 19 nt, Artificial Sequence
  Description of Artificial Sequence: Synthetic oligonucleotide
ccuggacaaucagggccga

SEQ ID NO: 1439265 - RNA, 19 nt, Artificial Sequence
  Description of Artificial Sequence: Synthetic oligonucleotide
ggcaagaccccuggaccuu

SEQ ID NO: 1439266 - RNA, 19 nt, Artificial Sequence
  Description of Artificial Sequence: Synthetic oligonucleotide
gcuucacguccguccuccu

SEQ ID NO: 1439267 - RNA, 19 nt, Artificial Sequence
  Description of Artificial Sequence: Synthetic oligonucleotide
gcggaggaccgcgcugcaa

SEQ ID NO: 1439268 - RNA, 19 nt, Artificial Sequence
  Description of Artificial Sequence: Synthetic oligonucleotide
ccuaccuggucagguguuu

SEQ ID NO: 1439269 - RNA, 19 nt, Artificial Sequence
  Description of Artificial Sequence: Synthetic oligonucleotide
gcaggacggagaagacguu

SEQ ID NO: 1439270 - RNA, 19 nt, Artificial Sequence
  Description of Artificial Sequence: Synthetic oligonucleotide
ccgcgacgccgcggcggag

SEQ ID NO: 1439271 - RNA, 19 nt, Artificial Sequence
  Description of Artificial Sequence: Synthetic oligonucleotide
auauucuuaaaauuggacc

SEQ ID NO: 1439272 - RNA, 19 nt, Artificial Sequence
  Description of Artificial Sequence: Synthetic oligonucleotide
uguuuaaugacacugaggu

SEQ ID NO: 1439273 - RNA, 19 nt, Artificial Sequence
  Description of Artificial Sequence: Synthetic oligonucleotide
aaauuggaccugcagaugg

SEQ ID NO: 1439274 - RNA, 19 nt, Artificial Sequence
  Description of Artificial Sequence: Synthetic oligonucleotide
uuaaaauuggaccugcaga

SEQ ID NO: 1439275 - RNA, 19 nt, Artificial Sequence
  Description of Artificial Sequence: Synthetic oligonucleotide
ucgccauccagcaagaagg

SEQ ID NO: 1439276 - RNA, 19 nt, Artificial Sequence
  Description of Artificial Sequence: Synthetic oligonucleotide
aagcgaaauggauuuauuc

SEQ ID NO: 1439277 - RNA, 19 nt, Artificial Sequence
  Description of Artificial Sequence: Synthetic oligonucleotide
uugauaucaaauguguacg

SEQ ID NO: 1439278 - RNA, 19 nt, Artificial Sequence
  Description of Artificial Sequence: Synthetic oligonucleotide
aacauuaguggcaugcggc

SEQ ID NO: 1439279 - RNA, 19 nt, Artificial Sequence
  Description of Artificial Sequence: Synthetic oligonucleotide
aaagucggaguccucggcc

SEQ ID NO: 1439280 - RNA, 19 nt, Artificial Sequence
  Description of Artificial Sequence: Synthetic oligonucleotide
uucccuacaagcgaaaugg

SEQ ID NO: 1439281 - RNA, 19 nt, Artificial Sequence
  Description of Artificial Sequence: Synthetic oligonucleotide
auugcauccauuaacagag

SEQ ID NO: 1439282 - RNA, 19 nt, Artificial Sequence
  Description of Artificial Sequence: Synthetic oligonucleotide
uuugaguggagaaaacgcc

SEQ ID NO: 1439283 - RNA, 19 nt, Artificial Sequence
  Description of Artificial Sequence: Synthetic oligonucleotide
cacucuuagacccagagac

SEQ ID NO: 1439284 - RNA, 19 nt, Artificial Sequence
  Description of Artificial Sequence: Synthetic oligonucleotide
uccuauggaagcaggaagg

SEQ ID NO: 1439285 - RNA, 19 nt, Artificial Sequence
  Description of Artificial Sequence: Synthetic oligonucleotide
cuuugaguggagaaaacgc

SEQ ID NO: 1439286 - RNA, 19 nt, Artificial Sequence
  Description of Artificial Sequence: Synthetic oligonucleotide
gauaccacgauggaggaag

SEQ ID NO: 1439287 - RNA, 19 nt, Artificial Sequence
  Description of Artificial Sequence: Synthetic oligonucleotide
aagaucuggucaccgauag

SEQ ID NO: 1439288 - RNA, 19 nt, Artificial Sequence
  Description of Artificial Sequence: Synthetic oligonucleotide
uagccuagcacucuuagac

SEQ ID NO: 1439289 - RNA, 19 nt, Artificial Sequence
  Description of Artificial Sequence: Synthetic oligonucleotide
ucauucuugaaugaagggc

SEQ ID NO: 1439290 - RNA, 19 nt, Artificial Sequence
  Description of Artificial Sequence: Synthetic oligonucleotide
caugagagcauccaugggc

SEQ ID NO: 1439291 - RNA, 19 nt, Artificial Sequence
  Description of Artificial Sequence: Synthetic oligonucleotide
uaucaaauguguacggcug

SEQ ID NO: 1439292 - RNA, 19 nt, Artificial Sequence
  Description of Artificial Sequence: Synthetic oligonucleotide
gagaaaacgccauagggca

SEQ ID NO: 1439293 - RNA, 19 nt, Artificial Sequence
  Description of Artificial Sequence: Synthetic oligonucleotide
aaauguguacggcugcuug

SEQ ID NO: 1439294 - RNA, 19 nt, Artificial Sequence
  Description of Artificial Sequence: Synthetic oligonucleotide
agcgaaauggauuuauuca

SEQ ID NO: 1439295 - RNA, 19 nt, Artificial Sequence
  Description of Artificial Sequence: Synthetic oligonucleotide
uccauuaacagaguggugu

SEQ ID NO: 1439296 - RNA, 19 nt, Artificial Sequence
  Description of Artificial Sequence: Synthetic oligonucleotide
acuccagucguucaugagg

SEQ ID NO: 1439297 - RNA, 19 nt, Artificial Sequence
  Description of Artificial Sequence: Synthetic oligonucleotide
aaauggauuuauucauucu

SEQ ID NO: 1439298 - RNA, 19 nt, Artificial Sequence
  Description of Artificial Sequence: Synthetic oligonucleotide
auaucaaauguguacggcu

SEQ ID NO: 1439299 - RNA, 19 nt, Artificial Sequence
  Description of Artificial Sequence: Synthetic oligonucleotide
cuuaaaauuggaccugcag

SEQ ID NO: 1439300 - RNA, 19 nt, Artificial Sequence
  Description of Artificial Sequence: Synthetic oligonucleotide
cuuaggacgaggaucaguc

SEQ ID NO: 1439301 - RNA, 19 nt, Artificial Sequence
  Description of Artificial Sequence: Synthetic oligonucleotide
agacccagagaccucaccg

SEQ ID NO: 1439302 - RNA, 19 nt, Artificial Sequence
  Description of Artificial Sequence: Synthetic oligonucleotide
uggggugccagauaccacg

SEQ ID NO: 1439303 - RNA, 19 nt, Artificial Sequence
  Description of Artificial Sequence: Synthetic oligonucleotide
aauauaggacaugaugaca

SEQ ID NO: 1439304 - RNA, 19 nt, Artificial Sequence
  Description of Artificial Sequence: Synthetic oligonucleotide
aacauaaugccaacauuag

SEQ ID NO: 1439305 - RNA, 19 nt, Artificial Sequence
  Description of Artificial Sequence: Synthetic oligonucleotide
gguaaguggagccaauugg

SEQ ID NO: 1439306 - RNA, 19 nt, Artificial Sequence
  Description of Artificial Sequence: Synthetic oligonucleotide
guucaugaggaccaucccg

SEQ ID NO: 1439307 - RNA, 19 nt, Artificial Sequence
  Description of Artificial Sequence: Synthetic oligonucleotide
aaaccaacacgguagccgu

SEQ ID NO: 1439308 - RNA, 19 nt, Artificial Sequence
  Description of Artificial Sequence: Synthetic oligonucleotide
gguucugauccacugaugg

SEQ ID NO: 1439309 - RNA, 19 nt, Artificial Sequence
  Description of Artificial Sequence: Synthetic oligonucleotide
caaggcaacagacaaguug

SEQ ID NO: 1439310 - RNA, 19 nt, Artificial Sequence
  Description of Artificial Sequence: Synthetic oligonucleotide
auaggacaugaugacaagc

SEQ ID NO: 1439311 - RNA, 19 nt, Artificial Sequence
  Description of Artificial Sequence: Synthetic oligonucleotide
agccacaccaauccguggc

SEQ ID NO: 1439312 - RNA, 19 nt, Artificial Sequence
  Description of Artificial Sequence: Synthetic oligonucleotide
cauucuugaaugaagggca

SEQ ID NO: 1439313 - RNA, 19 nt, Artificial Sequence
  Description of Artificial Sequence: Synthetic oligonucleotide
uagggcagguuuuggaugg

SEQ ID NO: 1439314 - RNA, 19 nt, Artificial Sequence
  Description of Artificial Sequence: Synthetic oligonucleotide
uccguguagucuccuaugg

SEQ ID NO: 1439315 - RNA, 19 nt, Artificial Sequence
  Description of Artificial Sequence: Synthetic oligonucleotide
ugaccuguuaugaugacuu

SEQ ID NO: 1439316 - RNA, 19 nt, Artificial Sequence
  Description of Artificial Sequence: Synthetic oligonucleotide
caauccguggcuuugggug

SEQ ID NO: 1439317 - RNA, 19 nt, Artificial Sequence
  Description of Artificial Sequence: Synthetic oligonucleotide
guaaguggagccaauuggg

SEQ ID NO: 1439318 - RNA, 19 nt, Artificial Sequence
  Description of Artificial Sequence: Synthetic oligonucleotide
aggacaugaugacaagcac

SEQ ID NO: 1439319 - RNA, 19 nt, Artificial Sequence
  Description of Artificial Sequence: Synthetic oligonucleotide
aacgccauagggcagguuu

SEQ ID NO: 1439320 - RNA, 19 nt, Artificial Sequence
  Description of Artificial Sequence: Synthetic oligonucleotide
gaacauaaugccaacauua

SEQ ID NO: 1439321 - RNA, 19 nt, Artificial Sequence
  Description of Artificial Sequence: Synthetic oligonucleotide
gauaucaaauguguacggc

SEQ ID NO: 1439322 - RNA, 19 nt, Artificial Sequence
  Description of Artificial Sequence: Synthetic oligonucleotide
gguuggacaccacaaaggg

SEQ ID NO: 1439323 - RNA, 19 nt, Artificial Sequence
  Description of Artificial Sequence: Synthetic oligonucleotide
uccuuucaaggcaacagac

SEQ ID NO: 1439324 - RNA, 19 nt, Artificial Sequence
  Description of Artificial Sequence: Synthetic oligonucleotide
aauguguacggcugcuugu

SEQ ID NO: 1439325 - RNA, 19 nt, Artificial Sequence
  Description of Artificial Sequence: Synthetic oligonucleotide
acgaggaucagucuagccu

SEQ ID NO: 1439326 - RNA, 19 nt, Artificial Sequence
  Description of Artificial Sequence: Synthetic oligonucleotide
gaaaacgccauagggcagg

SEQ ID NO: 1439327 - RNA, 19 nt, Artificial Sequence
  Description of Artificial Sequence: Synthetic oligonucleotide
ucggccaccggaauauagg

SEQ ID NO: 1439328 - RNA, 19 nt, Artificial Sequence
  Description of Artificial Sequence: Synthetic oligonucleotide
ggaaggugcaucuuggcag

SEQ ID NO: 1439329 - RNA, 19 nt, Artificial Sequence
  Description of Artificial Sequence: Synthetic oligonucleotide
augaggaccaucccgaaaa

SEQ ID NO: 1439330 - RNA, 19 nt, Artificial Sequence
  Description of Artificial Sequence: Synthetic oligonucleotide
agccuagcacucuuagacc

SEQ ID NO: 1439331 - RNA, 19 nt, Artificial Sequence
  Description of Artificial Sequence: Synthetic oligonucleotide
aguggagaaaacgccauag

SEQ ID NO: 1439332 - RNA, 19 nt, Artificial Sequence
  Description of Artificial Sequence: Synthetic oligonucleotide
agccaauugggcaucagcg

SEQ ID NO: 1439333 - RNA, 19 nt, Artificial Sequence
  Description of Artificial Sequence: Synthetic oligonucleotide
caucccgaaaaugugcucg

SEQ ID NO: 1439334 - RNA, 19 nt, Artificial Sequence
  Description of Artificial Sequence: Synthetic oligonucleotide
gaguugucucaucaaagac

SEQ ID NO: 1439335 - RNA, 19 nt, Artificial Sequence
  Description of Artificial Sequence: Synthetic oligonucleotide
agcacucuuagacccagag

SEQ ID NO: 1439336 - RNA, 19 nt, Artificial Sequence
  Description of Artificial Sequence: Synthetic oligonucleotide
gacuucaucgccauccagc

SEQ ID NO: 1439337 - RNA, 19 nt, Artificial Sequence
  Description of Artificial Sequence: Synthetic oligonucleotide
uucuuaaaauuggaccugc

SEQ ID NO: 1439338 - RNA, 19 nt, Artificial Sequence
  Description of Artificial Sequence: Synthetic oligonucleotide
aucgccauccagcaagaag

SEQ ID NO: 1439339 - RNA, 19 nt, Artificial Sequence
  Description of Artificial Sequence: Synthetic oligonucleotide
agaugguggucccaaagcu

SEQ ID NO: 1439340 - RNA, 19 nt, Artificial Sequence
  Description of Artificial Sequence: Synthetic oligonucleotide
auauaggacaugaugacaa

SEQ ID NO: 1439341 - RNA, 19 nt, Artificial Sequence
  Description of Artificial Sequence: Synthetic oligonucleotide
caacauuaguggcaugcgg

SEQ ID NO: 1439342 - RNA, 19 nt, Artificial Sequence
  Description of Artificial Sequence: Synthetic oligonucleotide
aucagcgcauucuccuugc

SEQ ID NO: 1439343 - RNA, 19 nt, Artificial Sequence
  Description of Artificial Sequence: Synthetic oligonucleotide
aaaauuggaccugcagaug

SEQ ID NO: 1439344 - RNA, 19 nt, Artificial Sequence
  Description of Artificial Sequence: Synthetic oligonucleotide
guuuuggaugggaaagucg

SEQ ID NO: 1439345 - RNA, 19 nt, Artificial Sequence
  Description of Artificial Sequence: Synthetic oligonucleotide
ugcaaggaugcucuugccu

SEQ ID NO: 1439346 - RNA, 19 nt, Artificial Sequence
  Description of Artificial Sequence: Synthetic oligonucleotide
aguggcaugcggccgagag

SEQ ID NO: 1439347 - RNA, 19 nt, Artificial Sequence
  Description of Artificial Sequence: Synthetic oligonucleotide
aguugucucaucaaagaca

SEQ ID NO: 1439348 - RNA, 19 nt, Artificial Sequence
  Description of Artificial Sequence: Synthetic oligonucleotide
agcaugguccaguacauau

SEQ ID NO: 1439349 - RNA, 19 nt, Artificial Sequence
  Description of Artificial Sequence: Synthetic oligonucleotide
ucuuaaaauuggaccugca

SEQ ID NO: 1439350 - RNA, 19 nt, Artificial Sequence
  Description of Artificial Sequence: Synthetic oligonucleotide
gugccagauaccacgaugg

SEQ ID NO: 1439351 - RNA, 19 nt, Artificial Sequence
  Description of Artificial Sequence: Synthetic oligonucleotide
gucucgugcacuccagucg

SEQ ID NO: 1439352 - RNA, 19 nt, Artificial Sequence
  Description of Artificial Sequence: Synthetic oligonucleotide
uggcaccguacacaggagg

SEQ ID NO: 1439353 - RNA, 19 nt, Artificial Sequence
  Description of Artificial Sequence: Synthetic oligonucleotide
uaacagaguggugugugag

SEQ ID NO: 1439354 - RNA, 19 nt, Artificial Sequence
  Description of Artificial Sequence: Synthetic oligonucleotide
ugaugacaagcacccagca

SEQ ID NO: 1439355 - RNA, 19 nt, Artificial Sequence
  Description of Artificial Sequence: Synthetic oligonucleotide
ugggccuucggauuggggu

SEQ ID NO: 1439356 - RNA, 19 nt, Artificial Sequence
  Description of Artificial Sequence: Synthetic oligonucleotide
uguguacggcugcuugugg

SEQ ID NO: 1439357 - RNA, 19 nt, Artificial Sequence
  Description of Artificial Sequence: Synthetic oligonucleotide
gucaccgauagccacacca

SEQ ID NO: 1439358 - RNA, 19 nt, Artificial Sequence
  Description of Artificial Sequence: Synthetic oligonucleotide
uuaacagagugguguguga

SEQ ID NO: 1439359 - RNA, 19 nt, Artificial Sequence
  Description of Artificial Sequence: Synthetic oligonucleotide
agcgggaucgagcuuagga

SEQ ID NO: 1439360 - RNA, 19 nt, Artificial Sequence
  Description of Artificial Sequence: Synthetic oligonucleotide
ucucgugcacuccagucgu

SEQ ID NO: 1439361 - RNA, 19 nt, Artificial Sequence
  Description of Artificial Sequence: Synthetic oligonucleotide
gaagccugggaggugaaug

SEQ ID NO: 1439362 - RNA, 19 nt, Artificial Sequence
  Description of Artificial Sequence: Synthetic oligonucleotide
uuuggaugggaaagucgga

SEQ ID NO: 1439363 - RNA, 19 nt, Artificial Sequence
  Description of Artificial Sequence: Synthetic oligonucleotide
gauauggcaagggcuuggg

SEQ ID NO: 1439364 - RNA, 19 nt, Artificial Sequence
  Description of Artificial Sequence: Synthetic oligonucleotide
uggcaugcggccgagagga

SEQ ID NO: 1439365 - RNA, 19 nt, Artificial Sequence
  Description of Artificial Sequence: Synthetic oligonucleotide
gagccaauugggcaucagc

SEQ ID NO: 1439366 - RNA, 19 nt, Artificial Sequence
  Description of Artificial Sequence: Synthetic oligonucleotide
aaugcacgcugucgaagcu

SEQ ID NO: 1439367 - RNA, 19 nt, Artificial Sequence
  Description of Artificial Sequence: Synthetic oligonucleotide
ugucgaagcuccuugucau

SEQ ID NO: 1439368 - RNA, 19 nt, Artificial Sequence
  Description of Artificial Sequence: Synthetic oligonucleotide
uccaguacauauucuuaaa

SEQ ID NO: 1439369 - RNA, 19 nt, Artificial Sequence
  Description of Artificial Sequence: Synthetic oligonucleotide
accacgauggaggaagcuc

SEQ ID NO: 1439370 - RNA, 19 nt, Artificial Sequence
  Description of Artificial Sequence: Synthetic oligonucleotide
auuaguggcaugcggccga

SEQ ID NO: 1439371 - RNA, 19 nt, Artificial Sequence
  Description of Artificial Sequence: Synthetic oligonucleotide
uggggauuggcucuccaaa

SEQ ID NO: 1439372 - RNA, 19 nt, Artificial Sequence
  Description of Artificial Sequence: Synthetic oligonucleotide
agaucuggucaccgauagc

SEQ ID NO: 1439373 - RNA, 19 nt, Artificial Sequence
  Description of Artificial Sequence: Synthetic oligonucleotide
aagucggaguccucggcca

SEQ ID NO: 1439374 - RNA, 19 nt, Artificial Sequence
  Description of Artificial Sequence: Synthetic oligonucleotide
ugcucgugggcuuuggaaa

SEQ ID NO: 1439375 - RNA, 19 nt, Artificial Sequence
  Description of Artificial Sequence: Synthetic oligonucleotide
aguuccagcauagagccaa

SEQ ID NO: 1439376 - RNA, 19 nt, Artificial Sequence
  Description of Artificial Sequence: Synthetic oligonucleotide
cuugccccugaacauaaug

SEQ ID NO: 1439377 - RNA, 19 nt, Artificial Sequence
  Description of Artificial Sequence: Synthetic oligonucleotide
accggaauauaggacauga

SEQ ID NO: 1439378 - RNA, 19 nt, Artificial Sequence
  Description of Artificial Sequence: Synthetic oligonucleotide
uuggagagaacagggccag

SEQ ID NO: 1439379 - RNA, 19 nt, Artificial Sequence
  Description of Artificial Sequence: Synthetic oligonucleotide
gagcuuaggacgaggauca

SEQ ID NO: 1439380 - RNA, 19 nt, Artificial Sequence
  Description of Artificial Sequence: Synthetic oligonucleotide
agacaaguugauaucaaau

SEQ ID NO: 1439381 - RNA, 19 nt, Artificial Sequence
  Description of Artificial Sequence: Synthetic oligonucleotide
caacagacaaguugauauc

SEQ ID NO: 1439382 - RNA, 19 nt, Artificial Sequence
  Description of Artificial Sequence: Synthetic oligonucleotide
gcuuugaguggagaaaacg

SEQ ID NO: 1439383 - RNA, 19 nt, Artificial Sequence
  Description of Artificial Sequence: Synthetic oligonucleotide
ugguccaguacauauucuu

SEQ ID NO: 1439384 - RNA, 19 nt, Artificial Sequence
  Description of Artificial Sequence: Synthetic oligonucleotide
gaccaucccgaaaaugugc

SEQ ID NO: 1439385 - RNA, 19 nt, Artificial Sequence
  Description of Artificial Sequence: Synthetic oligonucleotide
agauauggcaagggcuugg

SEQ ID NO: 1439386 - RNA, 19 nt, Artificial Sequence
  Description of Artificial Sequence: Synthetic oligonucleotide
acgguagccgucucccugg

SEQ ID NO: 1439387 - RNA, 19 nt, Artificial Sequence
  Description of Artificial Sequence: Synthetic oligonucleotide
uugucaucucugagccugg

SEQ ID NO: 1439388 - RNA, 19 nt, Artificial Sequence
  Description of Artificial Sequence: Synthetic oligonucleotide
guuaucaggucucaucugu

SEQ ID NO: 1439389 - RNA, 19 nt, Artificial Sequence
  Description of Artificial Sequence: Synthetic oligonucleotide
ucaccgauagccacaccaa

SEQ ID NO: 1439390 - RNA, 19 nt, Artificial Sequence
  Description of Artificial Sequence: Synthetic oligonucleotide
uugagaguugucucaucaa

SEQ ID NO: 1439391 - RNA, 19 nt, Artificial Sequence
  Description of Artificial Sequence: Synthetic oligonucleotide
accgauagccacaccaauc

SEQ ID NO: 1439392 - RNA, 19 nt, Artificial Sequence
  Description of Artificial Sequence: Synthetic oligonucleotide
ggauuggggugccagauac

SEQ ID NO: 1439393 - RNA, 19 nt, Artificial Sequence
  Description of Artificial Sequence: Synthetic oligonucleotide
gacgaggaucagucuagcc

SEQ ID NO: 1439394 - RNA, 19 nt, Artificial Sequence
  Description of Artificial Sequence: Synthetic oligonucleotide
gcagugaccuguuaugaug

SEQ ID NO: 1439395 - RNA, 19 nt, Artificial Sequence
  Description of Artificial Sequence: Synthetic oligonucleotide
uggcuagcgggaucgagcu

SEQ ID NO: 1439396 - RNA, 19 nt, Artificial Sequence
  Description of Artificial Sequence: Synthetic oligonucleotide
ccgaaaaugugcucguggg

SEQ ID NO: 1439397 - RNA, 19 nt, Artificial Sequence
  Description of Artificial Sequence: Synthetic oligonucleotide
aagggcaugagagcaucca

SEQ ID NO: 1439398 - RNA, 19 nt, Artificial Sequence
  Description of Artificial Sequence: Synthetic oligonucleotide
agagauauggcaagggcuu

SEQ ID NO: 1439399 - RNA, 19 nt, Artificial Sequence
  Description of Artificial Sequence: Synthetic oligonucleotide
guuuaaugacacugagguc

SEQ ID NO: 1439400 - RNA, 19 nt, Artificial Sequence
  Description of Artificial Sequence: Synthetic oligonucleotide
gcagggguuggcuagcggg

SEQ ID NO: 1439401 - RNA, 19 nt, Artificial Sequence
  Description of Artificial Sequence: Synthetic oligonucleotide
agaggaguagaaguccgug

SEQ ID NO: 1439402 - RNA, 19 nt, Artificial Sequence
  Description of Artificial Sequence: Synthetic oligonucleotide
uggcuuugaguggagaaaa

SEQ ID NO: 1439403 - RNA, 19 nt, Artificial Sequence
  Description of Artificial Sequence: Synthetic oligonucleotide
cuugaaugaagggcagcag

SEQ ID NO: 1439404 - RNA, 19 nt, Artificial Sequence
  Description of Artificial Sequence: Synthetic oligonucleotide
gaacagggccagugaagag

SEQ ID NO: 1439405 - RNA, 19 nt, Artificial Sequence
  Description of Artificial Sequence: Synthetic oligonucleotide
augagagcauccaugggca

SEQ ID NO: 1439406 - RNA, 19 nt, Artificial Sequence
  Description of Artificial Sequence: Synthetic oligonucleotide
gauccacugaugguuccag

SEQ ID NO: 1439407 - RNA, 19 nt, Artificial Sequence
  Description of Artificial Sequence: Synthetic oligonucleotide
cuccagucguucaugagga

SEQ ID NO: 1439408 - RNA, 19 nt, Artificial Sequence
  Description of Artificial Sequence: Synthetic oligonucleotide
accaauccguggcuuuggg

SEQ ID NO: 1439409 - RNA, 19 nt, Artificial Sequence
  Description of Artificial Sequence: Synthetic oligonucleotide
gcagagauauggcaagggc

SEQ ID NO: 1439410 - RNA, 19 nt, Artificial Sequence
  Description of Artificial Sequence: Synthetic oligonucleotide
ccgauagccacaccaaucc

SEQ ID NO: 1439411 - RNA, 19 nt, Artificial Sequence
  Description of Artificial Sequence: Synthetic oligonucleotide
auagccacaccaauccgug

SEQ ID NO: 1439412 - RNA, 19 nt, Artificial Sequence
  Description of Artificial Sequence: Synthetic oligonucleotide
gaucgagcuuaggacgagg

SEQ ID NO: 1439413 - RNA, 19 nt, Artificial Sequence
  Description of Artificial Sequence: Synthetic oligonucleotide
gggguuggacaccacaaag

SEQ ID NO: 1439414 - RNA, 19 nt, Artificial Sequence
  Description of Artificial Sequence: Synthetic oligonucleotide
cauuaguggcaugcggccg

SEQ ID NO: 1439415 - RNA, 19 nt, Artificial Sequence
  Description of Artificial Sequence: Synthetic oligonucleotide
accuguuaugaugacuuca

SEQ ID NO: 1439416 - RNA, 19 nt, Artificial Sequence
  Description of Artificial Sequence: Synthetic oligonucleotide
gggaaagucggaguccucg

SEQ ID NO: 1439417 - RNA, 19 nt, Artificial Sequence
  Description of Artificial Sequence: Synthetic oligonucleotide
uuaggacgaggaucagucu

SEQ ID NO: 1439418 - RNA, 19 nt, Artificial Sequence
  Description of Artificial Sequence: Synthetic oligonucleotide
guguacggcugcuuguggc

SEQ ID NO: 1439419 - RNA, 19 nt, Artificial Sequence
  Description of Artificial Sequence: Synthetic oligonucleotide
cagugaccuguuaugauga

SEQ ID NO: 1439420 - RNA, 19 nt, Artificial Sequence
  Description of Artificial Sequence: Synthetic oligonucleotide
ggugccagauaccacgaug

SEQ ID NO: 1439421 - RNA, 19 nt, Artificial Sequence
  Description of Artificial Sequence: Synthetic oligonucleotide
caggaaagcccguggcggg

SEQ ID NO: 1439422 - RNA, 19 nt, Artificial Sequence
  Description of Artificial Sequence: Synthetic oligonucleotide
uggcucuccaaaucuguuc

SEQ ID NO: 1439423 - RNA, 19 nt, Artificial Sequence
  Description of Artificial Sequence: Synthetic oligonucleotide
acaagcgaaauggauuuau

SEQ ID NO: 1439424 - RNA, 19 nt, Artificial Sequence
  Description of Artificial Sequence: Synthetic oligonucleotide
cuggaugucucgugcacuc

SEQ ID NO: 1439425 - RNA, 19 nt, Artificial Sequence
  Description of Artificial Sequence: Synthetic oligonucleotide
ggguuggacaccacaaagg

SEQ ID NO: 1439426 - RNA, 19 nt, Artificial Sequence
  Description of Artificial Sequence: Synthetic oligonucleotide
aauuggaccugcagauggu

SEQ ID NO: 1439427 - RNA, 19 nt, Artificial Sequence
  Description of Artificial Sequence: Synthetic oligonucleotide
caguacauauucuuaaaau

SEQ ID NO: 1439428 - RNA, 19 nt, Artificial Sequence
  Description of Artificial Sequence: Synthetic oligonucleotide
gaugucucgugcacuccag

SEQ ID NO: 1439429 - RNA, 19 nt, Artificial Sequence
  Description of Artificial Sequence: Synthetic oligonucleotide
ucccuacaagcgaaaugga

SEQ ID NO: 1439430 - RNA, 19 nt, Artificial Sequence
  Description of Artificial Sequence: Synthetic oligonucleotide
aggacgaggaucagucuag

SEQ ID NO: 1439431 - RNA, 19 nt, Artificial Sequence
  Description of Artificial Sequence: Synthetic oligonucleotide
agucggaguccucggccac

SEQ ID NO: 1439432 - RNA, 19 nt, Artificial Sequence
  Description of Artificial Sequence: Synthetic oligonucleotide
cacgauggaggaagcucgg

SEQ ID NO: 1439433 - RNA, 19 nt, Artificial Sequence
  Description of Artificial Sequence: Synthetic oligonucleotide
gcuggcaccguacacagga

SEQ ID NO: 1439434 - RNA, 19 nt, Artificial Sequence
  Description of Artificial Sequence: Synthetic oligonucleotide
cuauggaagcaggaaggug

SEQ ID NO: 1439435 - RNA, 19 nt, Artificial Sequence
  Description of Artificial Sequence: Synthetic oligonucleotide
caucagcgcauucuccuug

SEQ ID NO: 1439436 - RNA, 19 nt, Artificial Sequence
  Description of Artificial Sequence: Synthetic oligonucleotide
cauccauuaacagaguggu

SEQ ID NO: 1439437 - RNA, 19 nt, Artificial Sequence
  Description of Artificial Sequence: Synthetic oligonucleotide
gccaccggaauauaggaca

SEQ ID NO: 1439438 - RNA, 19 nt, Artificial Sequence
  Description of Artificial Sequence: Synthetic oligonucleotide
cucggccaccggaauauag

SEQ ID NO: 1439439 - RNA, 19 nt, Artificial Sequence
  Description of Artificial Sequence: Synthetic oligonucleotide
cagagauauggcaagggcu

SEQ ID NO: 1439440 - RNA, 19 nt, Artificial Sequence
  Description of Artificial Sequence: Synthetic oligonucleotide
ucuuagacccagagaccuc

SEQ ID NO: 1439441 - RNA, 19 nt, Artificial Sequence
  Description of Artificial Sequence: Synthetic oligonucleotide
cuagcacucuuagacccag

SEQ ID NO: 1439442 - RNA, 19 nt, Artificial Sequence
  Description of Artificial Sequence: Synthetic oligonucleotide
ggggccgacaaagaaagcc

SEQ ID NO: 1439443 - RNA, 19 nt, Artificial Sequence
  Description of Artificial Sequence: Synthetic oligonucleotide
augggaaagucggaguccu

SEQ ID NO: 1439444 - RNA, 19 nt, Artificial Sequence
  Description of Artificial Sequence: Synthetic oligonucleotide
ugguaucccacagguaagu

SEQ ID NO: 1439445 - RNA, 19 nt, Artificial Sequence
  Description of Artificial Sequence: Synthetic oligonucleotide
uucggauuggggugccaga

SEQ ID NO: 1439446 - RNA, 19 nt, Artificial Sequence
  Description of Artificial Sequence: Synthetic oligonucleotide
acgauggaggaagcucggc

SEQ ID NO: 1439447 - RNA, 19 nt, Artificial Sequence
  Description of Artificial Sequence: Synthetic oligonucleotide
ucgauggccuuuguucccc

SEQ ID NO: 1439448 - RNA, 19 nt, Artificial Sequence
  Description of Artificial Sequence: Synthetic oligonucleotide
aggaaagcccguggcgggc

SEQ ID NO: 1439449 - RNA, 19 nt, Artificial Sequence
  Description of Artificial Sequence: Synthetic oligonucleotide
ucgagcuuaggacgaggau

SEQ ID NO: 1439450 - RNA, 19 nt, Artificial Sequence
  Description of Artificial Sequence: Synthetic oligonucleotide
auguguacggcugcuugug

SEQ ID NO: 1439451 - RNA, 19 nt, Artificial Sequence
  Description of Artificial Sequence: Synthetic oligonucleotide
agguguuuaaugacacuga

SEQ ID NO: 1439452 - RNA, 19 nt, Artificial Sequence
  Description of Artificial Sequence: Synthetic oligonucleotide
guagccgccuggcucauuc

SEQ ID NO: 1439453 - RNA, 19 nt, Artificial Sequence
  Description of Artificial Sequence: Synthetic oligonucleotide
cuucggauuggggugccag

SEQ ID NO: 1439454 - RNA, 19 nt, Artificial Sequence
  Description of Artificial Sequence: Synthetic oligonucleotide
agaaaacgccauagggcag

SEQ ID NO: 1439455 - RNA, 19 nt, Artificial Sequence
  Description of Artificial Sequence: Synthetic oligonucleotide
cuguuaugaugacuucauc

SEQ ID NO: 1439456 - RNA, 19 nt, Artificial Sequence
  Description of Artificial Sequence: Synthetic oligonucleotide
cugucgaagcuccuuguca

SEQ ID NO: 1439457 - RNA, 19 nt, Artificial Sequence
  Description of Artificial Sequence: Synthetic oligonucleotide
cccgaaaaugugcucgugg

SEQ ID NO: 1439458 - RNA, 19 nt, Artificial Sequence
  Description of Artificial Sequence: Synthetic oligonucleotide
gccauuuccaacuccaugu

SEQ ID NO: 1439459 - RNA, 19 nt, Artificial Sequence
  Description of Artificial Sequence: Synthetic oligonucleotide
cuacaagcgaaauggauuu

SEQ ID NO: 1439460 - RNA, 19 nt, Artificial Sequence
  Description of Artificial Sequence: Synthetic oligonucleotide
guccaagaucuggucaccg

SEQ ID NO: 1439461 - RNA, 19 nt, Artificial Sequence
  Description of Artificial Sequence: Synthetic oligonucleotide
auaccacgauggaggaagc

SEQ ID NO: 1439462 - RNA, 19 nt, Artificial Sequence
  Description of Artificial Sequence: Synthetic oligonucleotide
aucccgaaaaugugcucgu

SEQ ID NO: 1439463 - RNA, 19 nt, Artificial Sequence
  Description of Artificial Sequence: Synthetic oligonucleotide
accaucccgaaaaugugcu

SEQ ID NO: 1439464 - RNA, 19 nt, Artificial Sequence
  Description of Artificial Sequence: Synthetic oligonucleotide
gccaauugggcaucagcgc

SEQ ID NO: 1439465 - RNA, 19 nt, Artificial Sequence
  Description of Artificial Sequence: Synthetic oligonucleotide
aguugauaucaaaugugua

SEQ ID NO: 1439466 - RNA, 19 nt, Artificial Sequence
  Description of Artificial Sequence: Synthetic oligonucleotide
ucagcgcauucuccuugcc

SEQ ID NO: 1439467 - RNA, 19 nt, Artificial Sequence
  Description of Artificial Sequence: Synthetic oligonucleotide
ggcagagauauggcaaggg

SEQ ID NO: 1439468 - RNA, 19 nt, Artificial Sequence
  Description of Artificial Sequence: Synthetic oligonucleotide
gccuuuguuccccuccagg

SEQ ID NO: 1439469 - RNA, 19 nt, Artificial Sequence
  Description of Artificial Sequence: Synthetic oligonucleotide
augcacgcugucgaagcuc

SEQ ID NO: 1439470 - RNA, 19 nt, Artificial Sequence
  Description of Artificial Sequence: Synthetic oligonucleotide
gggaggugaaugcacgcug

SEQ ID NO: 1439471 - RNA, 19 nt, Artificial Sequence
  Description of Artificial Sequence: Synthetic oligonucleotide
ugagagcauccaugggcac

SEQ ID NO: 1439472 - RNA, 19 nt, Artificial Sequence
  Description of Artificial Sequence: Synthetic oligonucleotide
cacgguagccgucucccug

SEQ ID NO: 1439473 - RNA, 19 nt, Artificial Sequence
  Description of Artificial Sequence: Synthetic oligonucleotide
aaaacgccauagggcaggu

SEQ ID NO: 1439474 - RNA, 19 nt, Artificial Sequence
  Description of Artificial Sequence: Synthetic oligonucleotide
gauuggggugccagauacc

SEQ ID NO: 1439475 - RNA, 19 nt, Artificial Sequence
  Description of Artificial Sequence: Synthetic oligonucleotide
ccggggccgacaaagaaag

SEQ ID NO: 1439476 - RNA, 19 nt, Artificial Sequence
  Description of Artificial Sequence: Synthetic oligonucleotide
gaccuguuaugaugacuuc

SEQ ID NO: 1439477 - RNA, 19 nt, Artificial Sequence
  Description of Artificial Sequence: Synthetic oligonucleotide
cugcaaggaugcucuugcc

SEQ ID NO: 1439478 - RNA, 19 nt, Artificial Sequence
  Description of Artificial Sequence: Synthetic oligonucleotide
gaggugaaugcacgcuguc

SEQ ID NO: 1439479 - RNA, 19 nt, Artificial Sequence
  Description of Artificial Sequence: Synthetic oligonucleotide
ccaaaucuguucccggggc

SEQ ID NO: 1439480 - RNA, 19 nt, Artificial Sequence
  Description of Artificial Sequence: Synthetic oligonucleotide
ucggauuggggugccagau

SEQ ID NO: 1439481 - RNA, 19 nt, Artificial Sequence
  Description of Artificial Sequence: Synthetic oligonucleotide
gcgggaucgagcuuaggac

SEQ ID NO: 1439482 - RNA, 19 nt, Artificial Sequence
  Description of Artificial Sequence: Synthetic oligonucleotide
auggggauuggcucuccaa

SEQ ID NO: 1439483 - RNA, 19 nt, Artificial Sequence
  Description of Artificial Sequence: Synthetic oligonucleotide
cgggaucgagcuuaggacg

SEQ ID NO: 1439484 - RNA, 19 nt, Artificial Sequence
  Description of Artificial Sequence: Synthetic oligonucleotide
uccucggccaccggaauau

SEQ ID NO: 1439485 - RNA, 19 nt, Artificial Sequence
  Description of Artificial Sequence: Synthetic oligonucleotide
ugcuggcaccguacacagg

SEQ ID NO: 1439486 - RNA, 19 nt, Artificial Sequence
  Description of Artificial Sequence: Synthetic oligonucleotide
auccguggcuuuggguggc

SEQ ID NO: 1439487 - RNA, 19 nt, Artificial Sequence
  Description of Artificial Sequence: Synthetic oligonucleotide
guuggcuagcgggaucgag

SEQ ID NO: 1439488 - RNA, 19 nt, Artificial Sequence
  Description of Artificial Sequence: Synthetic oligonucleotide
aaagcccguggcgggcagg

SEQ ID NO: 1439489 - RNA, 19 nt, Artificial Sequence
  Description of Artificial Sequence: Synthetic oligonucleotide
aucgagcuuaggacgagga

SEQ ID NO: 1439490 - RNA, 19 nt, Artificial Sequence
  Description of Artificial Sequence: Synthetic oligonucleotide
cuagcgggaucgagcuuag

SEQ ID NO: 1439491 - RNA, 19 nt, Artificial Sequence
  Description of Artificial Sequence: Synthetic oligonucleotide
cucagauugcauccauuaa

SEQ ID NO: 1439492 - RNA, 19 nt, Artificial Sequence
  Description of Artificial Sequence: Synthetic oligonucleotide
augucucgugcacuccagu

SEQ ID NO: 1439493 - RNA, 19 nt, Artificial Sequence
  Description of Artificial Sequence: Synthetic oligonucleotide
cgagaggaguagaaguccg

SEQ ID NO: 1439494 - RNA, 19 nt, Artificial Sequence
  Description of Artificial Sequence: Synthetic oligonucleotide
ucccggggccgacaaagaa

SEQ ID NO: 1439495 - RNA, 19 nt, Artificial Sequence
  Description of Artificial Sequence: Synthetic oligonucleotide
uuaguggcaugcggccgag

SEQ ID NO: 1439496 - RNA, 19 nt, Artificial Sequence
  Description of Artificial Sequence: Synthetic oligonucleotide
aauugggcaucagcgcauu

SEQ ID NO: 1439497 - RNA, 19 nt, Artificial Sequence
  Description of Artificial Sequence: Synthetic oligonucleotide
gcaugagagcauccauggg

SEQ ID NO: 1439498 - RNA, 19 nt, Artificial Sequence
  Description of Artificial Sequence: Synthetic oligonucleotide
gaaagcccguggcgggcag

SEQ ID NO: 1439499 - RNA, 19 nt, Artificial Sequence
  Description of Artificial Sequence: Synthetic oligonucleotide
cagauaccacgauggagga

SEQ ID NO: 1439500 - RNA, 19 nt, Artificial Sequence
  Description of Artificial Sequence: Synthetic oligonucleotide
uggaugucucgugcacucc

SEQ ID NO: 1439501 - RNA, 19 nt, Artificial Sequence
  Description of Artificial Sequence: Synthetic oligonucleotide
ggcaccguacacaggaggc

SEQ ID NO: 1439502 - RNA, 19 nt, Artificial Sequence
  Description of Artificial Sequence: Synthetic oligonucleotide
uugaguuaucaggucucau

SEQ ID NO: 1439503 - RNA, 19 nt, Artificial Sequence
  Description of Artificial Sequence: Synthetic oligonucleotide
gccagauaccacgauggag

SEQ ID NO: 1439504 - RNA, 19 nt, Artificial Sequence
  Description of Artificial Sequence: Synthetic oligonucleotide
gggauuggcucuccaaauc

SEQ ID NO: 1439505 - RNA, 19 nt, Artificial Sequence
  Description of Artificial Sequence: Synthetic oligonucleotide
gcaaggcuguggcuugugg

SEQ ID NO: 1439506 - RNA, 19 nt, Artificial Sequence
  Description of Artificial Sequence: Synthetic oligonucleotide
gguuuuggaugggaaaguc

SEQ ID NO: 1439507 - RNA, 19 nt, Artificial Sequence
  Description of Artificial Sequence: Synthetic oligonucleotide
cagagaccucaccgaaccc

SEQ ID NO: 1439508 - RNA, 19 nt, Artificial Sequence
  Description of Artificial Sequence: Synthetic oligonucleotide
cuggucaccgauagccaca

SEQ ID NO: 1439509 - RNA, 19 nt, Artificial Sequence
  Description of Artificial Sequence: Synthetic oligonucleotide
ccuggcucauuccuucucc

SEQ ID NO: 1439510 - RNA, 19 nt, Artificial Sequence
  Description of Artificial Sequence: Synthetic oligonucleotide
caagaagguccuggucugc

SEQ ID NO: 1439511 - RNA, 19 nt, Artificial Sequence
  Description of Artificial Sequence: Synthetic oligonucleotide
gcgaaauggauuuauucau

SEQ ID NO: 1439512 - RNA, 19 nt, Artificial Sequence
  Description of Artificial Sequence: Synthetic oligonucleotide
caccaauccguggcuuugg

SEQ ID NO: 1439513 - RNA, 19 nt, Artificial Sequence
  Description of Artificial Sequence: Synthetic oligonucleotide
agccgccuggcucauuccu

SEQ ID NO: 1439514 - RNA, 19 nt, Artificial Sequence
  Description of Artificial Sequence: Synthetic oligonucleotide
ggauuggcucuccaaaucu

SEQ ID NO: 1439515 - RNA, 19 nt, Artificial Sequence
  Description of Artificial Sequence: Synthetic oligonucleotide
caagaucuggucaccgaua

SEQ ID NO: 1439516 - RNA, 19 nt, Artificial Sequence
  Description of Artificial Sequence: Synthetic oligonucleotide
cuggcaccguacacaggag

SEQ ID NO: 1439517 - RNA, 19 nt, Artificial Sequence
  Description of Artificial Sequence: Synthetic oligonucleotide
ggaccugcagaugguagcc

SEQ ID NO: 1439518 - RNA, 19 nt, Artificial Sequence
  Description of Artificial Sequence: Synthetic oligonucleotide
uacggcugcuuguggcaga

SEQ ID NO: 1439519 - RNA, 19 nt, Artificial Sequence
  Description of Artificial Sequence: Synthetic oligonucleotide
ucccgaaaaugugcucgug

SEQ ID NO: 1439520 - RNA, 19 nt, Artificial Sequence
  Description of Artificial Sequence: Synthetic oligonucleotide
ucgugcacuccagucguuc

SEQ ID NO: 1439521 - RNA, 19 nt, Artificial Sequence
  Description of Artificial Sequence: Synthetic oligonucleotide
uccagucguucaugaggac

SEQ ID NO: 1439522 - RNA, 19 nt, Artificial Sequence
  Description of Artificial Sequence: Synthetic oligonucleotide
uagcacucuuagacccaga

SEQ ID NO: 1439523 - RNA, 19 nt, Artificial Sequence
  Description of Artificial Sequence: Synthetic oligonucleotide
gagcuugcuggcaccguac

SEQ ID NO: 1439524 - RNA, 19 nt, Artificial Sequence
  Description of Artificial Sequence: Synthetic oligonucleotide
guucugauccacugauggu

SEQ ID NO: 1439525 - RNA, 19 nt, Artificial Sequence
  Description of Artificial Sequence: Synthetic oligonucleotide
uaccacgauggaggaagcu

SEQ ID NO: 1439526 - RNA, 19 nt, Artificial Sequence
  Description of Artificial Sequence: Synthetic oligonucleotide
gugaaugcacgcugucgaa

SEQ ID NO: 1439527 - RNA, 19 nt, Artificial Sequence
  Description of Artificial Sequence: Synthetic oligonucleotide
aagccauuuccaacuccau

SEQ ID NO: 1439528 - RNA, 19 nt, Artificial Sequence
  Description of Artificial Sequence: Synthetic oligonucleotide
uacaagcgaaauggauuua

SEQ ID NO: 1439529 - RNA, 19 nt, Artificial Sequence
  Description of Artificial Sequence: Synthetic oligonucleotide
ccuuucaaggcaacagaca

SEQ ID NO: 1439530 - RNA, 19 nt, Artificial Sequence
  Description of Artificial Sequence: Synthetic oligonucleotide
caugcggccgagaggagua

SEQ ID NO: 1439531 - RNA, 19 nt, Artificial Sequence
  Description of Artificial Sequence: Synthetic oligonucleotide
gucgaagcuccuugucauc

SEQ ID NO: 1439532 - RNA, 19 nt, Artificial Sequence
  Description of Artificial Sequence: Synthetic oligonucleotide
acaaagggcaugagagcau

SEQ ID NO: 1439533 - RNA, 19 nt, Artificial Sequence
  Description of Artificial Sequence: Synthetic oligonucleotide
uagccgucucccuggcagu

SEQ ID NO: 1439534 - RNA, 19 nt, Artificial Sequence
  Description of Artificial Sequence: Synthetic oligonucleotide
cagggguuggcuagcggga

SEQ ID NO: 1439535 - RNA, 19 nt, Artificial Sequence
  Description of Artificial Sequence: Synthetic oligonucleotide
ggcuuuggguggcuuugag

SEQ ID NO: 1439536 - RNA, 19 nt, Artificial Sequence
  Description of Artificial Sequence: Synthetic oligonucleotide
ugccaacauuaguggcaug

SEQ ID NO: 1439537 - RNA, 19 nt, Artificial Sequence
  Description of Artificial Sequence: Synthetic oligonucleotide
aggacaguuccagcauaga

SEQ ID NO: 1439538 - RNA, 19 nt, Artificial Sequence
  Description of Artificial Sequence: Synthetic oligonucleotide
caugaggaccaucccgaaa

SEQ ID NO: 1439539 - RNA, 19 nt, Artificial Sequence
  Description of Artificial Sequence: Synthetic oligonucleotide
ggccgagaggaguagaagu

SEQ ID NO: 1439540 - RNA, 19 nt, Artificial Sequence
  Description of Artificial Sequence: Synthetic oligonucleotide
cguguagucuccuauggaa

SEQ ID NO: 1439541 - RNA, 19 nt, Artificial Sequence
  Description of Artificial Sequence: Synthetic oligonucleotide
ccuacaagcgaaauggauu

SEQ ID NO: 1439542 - RNA, 19 nt, Artificial Sequence
  Description of Artificial Sequence: Synthetic oligonucleotide
gggccgacaaagaaagcca

SEQ ID NO: 1439543 - RNA, 19 nt, Artificial Sequence
  Description of Artificial Sequence: Synthetic oligonucleotide
gcacucuuagacccagaga

SEQ ID NO: 1439544 - RNA, 19 nt, Artificial Sequence
  Description of Artificial Sequence: Synthetic oligonucleotide
gccgagaggaguagaaguc

SEQ ID NO: 1439545 - RNA, 19 nt, Artificial Sequence
  Description of Artificial Sequence: Synthetic oligonucleotide
uggagccaauugggcauca

SEQ ID NO: 1439546 - RNA, 19 nt, Artificial Sequence
  Description of Artificial Sequence: Synthetic oligonucleotide
uguucccggggccgacaaa

SEQ ID NO: 1439547 - RNA, 19 nt, Artificial Sequence
  Description of Artificial Sequence: Synthetic oligonucleotide
augggccuucggauugggg

SEQ ID NO: 1439548 - RNA, 19 nt, Artificial Sequence
  Description of Artificial Sequence: Synthetic oligonucleotide
gcuagcgggaucgagcuua

SEQ ID NO: 1439549 - RNA, 19 nt, Artificial Sequence
  Description of Artificial Sequence: Synthetic oligonucleotide
gguccaagaucuggucacc

SEQ ID NO: 1439550 - RNA, 19 nt, Artificial Sequence
  Description of Artificial Sequence: Synthetic oligonucleotide
ugcggccgagaggaguaga

SEQ ID NO: 1439551 - RNA, 19 nt, Artificial Sequence
  Description of Artificial Sequence: Synthetic oligonucleotide
agauaccacgauggaggaa

SEQ ID NO: 1439552 - RNA, 19 nt, Artificial Sequence
  Description of Artificial Sequence: Synthetic oligonucleotide
ggcagggguuggcuagcgg

SEQ ID NO: 1439553 - RNA, 19 nt, Artificial Sequence
  Description of Artificial Sequence: Synthetic oligonucleotide
cgauagccacaccaauccg

SEQ ID NO: 1439554 - RNA, 19 nt, Artificial Sequence
  Description of Artificial Sequence: Synthetic oligonucleotide
gggaucgagcuuaggacga

SEQ ID NO: 1439555 - RNA, 19 nt, Artificial Sequence
  Description of Artificial Sequence: Synthetic oligonucleotide
ccauagggcagguuuugga

SEQ ID NO: 1439556 - RNA, 19 nt, Artificial Sequence
  Description of Artificial Sequence: Synthetic oligonucleotide
gugaccuguuaugaugacu

SEQ ID NO: 1439557 - RNA, 19 nt, Artificial Sequence
  Description of Artificial Sequence: Synthetic oligonucleotide
agcuuaggacgaggaucag

SEQ ID NO: 1439558 - RNA, 19 nt, Artificial Sequence
  Description of Artificial Sequence: Synthetic oligonucleotide
uagcgggaucgagcuuagg

SEQ ID NO: 1439559 - RNA, 19 nt, Artificial Sequence
  Description of Artificial Sequence: Synthetic oligonucleotide
ggaucgagcuuaggacgag

SEQ ID NO: 1439560 - RNA, 19 nt, Artificial Sequence
  Description of Artificial Sequence: Synthetic oligonucleotide
caagcgaaauggauuuauu

SEQ ID NO: 1439561 - RNA, 19 nt, Artificial Sequence
  Description of Artificial Sequence: Synthetic oligonucleotide
caauugggcaucagcgcau

SEQ ID NO: 1439562 - RNA, 19 nt, Artificial Sequence
  Description of Artificial Sequence: Synthetic oligonucleotide
ggcuuugaguggagaaaac

SEQ ID NO: 1439563 - RNA, 19 nt, Artificial Sequence
  Description of Artificial Sequence: Synthetic oligonucleotide
agccgucucccuggcagug

SEQ ID NO: 1439564 - RNA, 19 nt, Artificial Sequence
  Description of Artificial Sequence: Synthetic oligonucleotide
ggacgaggaucagucuagc

SEQ ID NO: 1439565 - RNA, 19 nt, Artificial Sequence
  Description of Artificial Sequence: Synthetic oligonucleotide
ccuguuaugaugacuucau

SEQ ID NO: 1439566 - RNA, 19 nt, Artificial Sequence
  Description of Artificial Sequence: Synthetic oligonucleotide
agaagccugggaggugaau

SEQ ID NO: 1439567 - RNA, 19 nt, Artificial Sequence
  Description of Artificial Sequence: Synthetic oligonucleotide
aaacgccauagggcagguu

SEQ ID NO: 1439568 - RNA, 19 nt, Artificial Sequence
  Description of Artificial Sequence: Synthetic oligonucleotide
gcuuggcccaggcccauga

SEQ ID NO: 1439569 - RNA, 19 nt, Artificial Sequence
  Description of Artificial Sequence: Synthetic oligonucleotide
augcggccgagaggaguag

SEQ ID NO: 1439570 - RNA, 19 nt, Artificial Sequence
  Description of Artificial Sequence: Synthetic oligonucleotide
ggagccaauugggcaucag

SEQ ID NO: 1439571 - RNA, 19 nt, Artificial Sequence
  Description of Artificial Sequence: Synthetic oligonucleotide
caguuccagcauagagcca

SEQ ID NO: 1439572 - RNA, 19 nt, Artificial Sequence
  Description of Artificial Sequence: Synthetic oligonucleotide
ccuagcacucuuagaccca

SEQ ID NO: 1439573 - RNA, 19 nt, Artificial Sequence
  Description of Artificial Sequence: Synthetic oligonucleotide
ggggauuggcucuccaaau

SEQ ID NO: 1439574 - RNA, 19 nt, Artificial Sequence
  Description of Artificial Sequence: Synthetic oligonucleotide
ccaucccgaaaaugugcuc

SEQ ID NO: 1439575 - RNA, 19 nt, Artificial Sequence
  Description of Artificial Sequence: Synthetic oligonucleotide
gggcaccacccauggggag

SEQ ID NO: 1439576 - RNA, 19 nt, Artificial Sequence
  Description of Artificial Sequence: Synthetic oligonucleotide
ugagggcaggcagcacuuu

SEQ ID NO: 1439577 - RNA, 19 nt, Artificial Sequence
  Description of Artificial Sequence: Synthetic oligonucleotide
guccucggccaccggaaua

SEQ ID NO: 1439578 - RNA, 19 nt, Artificial Sequence
  Description of Artificial Sequence: Synthetic oligonucleotide
uaguggcaugcggccgaga

SEQ ID NO: 1439579 - RNA, 19 nt, Artificial Sequence
  Description of Artificial Sequence: Synthetic oligonucleotide
gggguuggcuagcgggauc

SEQ ID NO: 1439580 - RNA, 19 nt, Artificial Sequence
  Description of Artificial Sequence: Synthetic oligonucleotide
cuuggcccaggcccaugaa

SEQ ID NO: 1439581 - RNA, 19 nt, Artificial Sequence
  Description of Artificial Sequence: Synthetic oligonucleotide
cagaucgauggccuuuguu

SEQ ID NO: 1439582 - RNA, 19 nt, Artificial Sequence
  Description of Artificial Sequence: Synthetic oligonucleotide
caccgauagccacaccaau

SEQ ID NO: 1439583 - RNA, 19 nt, Artificial Sequence
  Description of Artificial Sequence: Synthetic oligonucleotide
gucuagccuagcacucuua

SEQ ID NO: 1439584 - RNA, 19 nt, Artificial Sequence
  Description of Artificial Sequence: Synthetic oligonucleotide
ccaagaucuggucaccgau

SEQ ID NO: 1439585 - RNA, 19 nt, Artificial Sequence
  Description of Artificial Sequence: Synthetic oligonucleotide
ggucucagauugcauccau

SEQ ID NO: 1439586 - RNA, 19 nt, Artificial Sequence
  Description of Artificial Sequence: Synthetic oligonucleotide
ccguguagucuccuaugga

SEQ ID NO: 1439587 - RNA, 19 nt, Artificial Sequence
  Description of Artificial Sequence: Synthetic oligonucleotide
gcucgugggcuuuggaaau

SEQ ID NO: 1439588 - RNA, 19 nt, Artificial Sequence
  Description of Artificial Sequence: Synthetic oligonucleotide
gcuuaggacgaggaucagu

SEQ ID NO: 1439589 - RNA, 19 nt, Artificial Sequence
  Description of Artificial Sequence: Synthetic oligonucleotide
ggucaccgauagccacacc

SEQ ID NO: 1439590 - RNA, 19 nt, Artificial Sequence
  Description of Artificial Sequence: Synthetic oligonucleotide
cccggggccgacaaagaaa

SEQ ID NO: 1439591 - RNA, 19 nt, Artificial Sequence
  Description of Artificial Sequence: Synthetic oligonucleotide
ggggugccagauaccacga

SEQ ID NO: 1439592 - RNA, 19 nt, Artificial Sequence
  Description of Artificial Sequence: Synthetic oligonucleotide
cccuacaagcgaaauggau

SEQ ID NO: 1439593 - RNA, 19 nt, Artificial Sequence
  Description of Artificial Sequence: Synthetic oligonucleotide
cggccaugguaucccacag

SEQ ID NO: 1439594 - RNA, 19 nt, Artificial Sequence
  Description of Artificial Sequence: Synthetic oligonucleotide
ccgacaaagaaagccauuu

SEQ ID NO: 1439595 - RNA, 19 nt, Artificial Sequence
  Description of Artificial Sequence: Synthetic oligonucleotide
gguagccgucucccuggca

SEQ ID NO: 1439596 - RNA, 19 nt, Artificial Sequence
  Description of Artificial Sequence: Synthetic oligonucleotide
cggccaccggaauauagga

SEQ ID NO: 1439597 - RNA, 19 nt, Artificial Sequence
  Description of Artificial Sequence: Synthetic oligonucleotide
gccacaccaauccguggcu

SEQ ID NO: 1439598 - RNA, 19 nt, Artificial Sequence
  Description of Artificial Sequence: Synthetic oligonucleotide
cgaaauggauuuauucauu

SEQ ID NO: 1439599 - RNA, 19 nt, Artificial Sequence
  Description of Artificial Sequence: Synthetic oligonucleotide
gcuggaugucucgugcacu

SEQ ID NO: 1439600 - RNA, 19 nt, Artificial Sequence
  Description of Artificial Sequence: Synthetic oligonucleotide
cgugcacuccagucguuca

SEQ ID NO: 1439601 - RNA, 19 nt, Artificial Sequence
  Description of Artificial Sequence: Synthetic oligonucleotide
caccguacacaggaggcuu

SEQ ID NO: 1439602 - RNA, 19 nt, Artificial Sequence
  Description of Artificial Sequence: Synthetic oligonucleotide
ccaacacgguagccgucuc

SEQ ID NO: 1439603 - RNA, 19 nt, Artificial Sequence
  Description of Artificial Sequence: Synthetic oligonucleotide
ggccgacaaagaaagccau

SEQ ID NO: 1439604 - RNA, 19 nt, Artificial Sequence
  Description of Artificial Sequence: Synthetic oligonucleotide
cagcaugguccaguacaua

SEQ ID NO: 1439605 - RNA, 19 nt, Artificial Sequence
  Description of Artificial Sequence: Synthetic oligonucleotide
ccaauccguggcuuugggu

SEQ ID NO: 1439606 - RNA, 19 nt, Artificial Sequence
  Description of Artificial Sequence: Synthetic oligonucleotide
gcggccgagaggaguagaa

SEQ ID NO: 1439607 - RNA, 19 nt, Artificial Sequence
  Description of Artificial Sequence: Synthetic oligonucleotide
gcaccguacacaggaggcu

SEQ ID NO: 1439608 - RNA, 19 nt, Artificial Sequence
  Description of Artificial Sequence: Synthetic oligonucleotide
gcaugcggccgagaggagu

SEQ ID NO: 1439609 - RNA, 19 nt, Artificial Sequence
  Description of Artificial Sequence: Synthetic oligonucleotide
ggcaugcggccgagaggag

SEQ ID NO: 1439610 - RNA, 19 nt, Artificial Sequence
  Description of Artificial Sequence: Synthetic oligonucleotide
cacgcugucgaagcuccuu

SEQ ID NO: 1439611 - RNA, 19 nt, Artificial Sequence
  Description of Artificial Sequence: Synthetic oligonucleotide
gguuggcuagcgggaucga

SEQ ID NO: 1439612 - RNA, 19 nt, Artificial Sequence
  Description of Artificial Sequence: Synthetic oligonucleotide
gcgcauucuccuugccccu

SEQ ID NO: 1439613 - RNA, 19 nt, Artificial Sequence
  Description of Artificial Sequence: Synthetic oligonucleotide
ccggaauauaggacaugau

SEQ ID NO: 1439614 - RNA, 19 nt, Artificial Sequence
  Description of Artificial Sequence: Synthetic oligonucleotide
gccgucucccuggcaguga

SEQ ID NO: 1439615 - RNA, 19 nt, Artificial Sequence
  Description of Artificial Sequence: Synthetic oligonucleotide
gggugccagauaccacgau

SEQ ID NO: 1439616 - RNA, 19 nt, Artificial Sequence
  Description of Artificial Sequence: Synthetic oligonucleotide
cucgugcacuccagucguu

SEQ ID NO: 1439617 - RNA, 19 nt, Artificial Sequence
  Description of Artificial Sequence: Synthetic oligonucleotide
ccuucggauuggggugcca

SEQ ID NO: 1439618 - RNA, 19 nt, Artificial Sequence
  Description of Artificial Sequence: Synthetic oligonucleotide
ggcuagcgggaucgagcuu

SEQ ID NO: 1439619 - RNA, 19 nt, Artificial Sequence
  Description of Artificial Sequence: Synthetic oligonucleotide
gccgccuggcucauuccuu

SEQ ID NO: 1439620 - RNA, 19 nt, Artificial Sequence
  Description of Artificial Sequence: Synthetic oligonucleotide
ccacaccaauccguggcuu

SEQ ID NO: 1439621 - RNA, 19 nt, Artificial Sequence
  Description of Artificial Sequence: Synthetic oligonucleotide
ccucggccaccggaauaua

SEQ ID NO: 1439622 - RNA, 19 nt, Artificial Sequence
  Description of Artificial Sequence: Synthetic oligonucleotide
gguagccgccuggcucauu

SEQ ID NO: 1439623 - RNA, 19 nt, Artificial Sequence
  Description of Artificial Sequence: Synthetic oligonucleotide
auagauagugggcagagcc

SEQ ID NO: 1439624 - RNA, 19 nt, Artificial Sequence
  Description of Artificial Sequence: Synthetic oligonucleotide
ugugccuaaaauaagguag

SEQ ID NO: 1439625 - RNA, 19 nt, Artificial Sequence
  Description of Artificial Sequence: Synthetic oligonucleotide
agcaaaauacaccacuccc

SEQ ID NO: 1439626 - RNA, 19 nt, Artificial Sequence
  Description of Artificial Sequence: Synthetic oligonucleotide
uguguggaaacccacaacc

SEQ ID NO: 1439627 - RNA, 19 nt, Artificial Sequence
  Description of Artificial Sequence: Synthetic oligonucleotide
caauaaguuacccaguucc

SEQ ID NO: 1439628 - RNA, 19 nt, Artificial Sequence
  Description of Artificial Sequence: Synthetic oligonucleotide
uuauucuagagguaggaag

SEQ ID NO: 1439629 - RNA, 19 nt, Artificial Sequence
  Description of Artificial Sequence: Synthetic oligonucleotide
aaugacauagauagugggc

SEQ ID NO: 1439630 - RNA, 19 nt, Artificial Sequence
  Description of Artificial Sequence: Synthetic oligonucleotide
aguaccugaguacaguugg

SEQ ID NO: 1439631 - RNA, 19 nt, Artificial Sequence
  Description of Artificial Sequence: Synthetic oligonucleotide
uauucuagagguaggaaga

SEQ ID NO: 1439632 - RNA, 19 nt, Artificial Sequence
  Description of Artificial Sequence: Synthetic oligonucleotide
ucuagagguaggaagagga

SEQ ID NO: 1439633 - RNA, 19 nt, Artificial Sequence
  Description of Artificial Sequence: Synthetic oligonucleotide
acggagaucagcuugcaac

SEQ ID NO: 1439634 - RNA, 19 nt, Artificial Sequence
  Description of Artificial Sequence: Synthetic oligonucleotide
agcaaaucccgccaugucc

SEQ ID NO: 1439635 - RNA, 19 nt, Artificial Sequence
  Description of Artificial Sequence: Synthetic oligonucleotide
uguggaaacccacaacccg

SEQ ID NO: 1439636 - RNA, 19 nt, Artificial Sequence
  Description of Artificial Sequence: Synthetic oligonucleotide
gagacuacucuccaagugg

SEQ ID NO: 1439637 - RNA, 19 nt, Artificial Sequence
  Description of Artificial Sequence: Synthetic oligonucleotide
aaaauaagguagaagucag

SEQ ID NO: 1439638 - RNA, 19 nt, Artificial Sequence
  Description of Artificial Sequence: Synthetic oligonucleotide
aacccggccauccuguacc

SEQ ID NO: 1439639 - RNA, 19 nt, Artificial Sequence
  Description of Artificial Sequence: Synthetic oligonucleotide
aauaaguuacccaguuccc

SEQ ID NO: 1439640 - RNA, 19 nt, Artificial Sequence
  Description of Artificial Sequence: Synthetic oligonucleotide
agaaacacguucuucagcu

SEQ ID NO: 1439641 - RNA, 19 nt, Artificial Sequence
  Description of Artificial Sequence: Synthetic oligonucleotide
uccccaauaaguuacccag

SEQ ID NO: 1439642 - RNA, 19 nt, Artificial Sequence
  Description of Artificial Sequence: Synthetic oligonucleotide
agagguaggaagaggaucc

SEQ ID NO: 1439643 - RNA, 19 nt, Artificial Sequence
  Description of Artificial Sequence: Synthetic oligonucleotide
aaaauacaccacucccugg

SEQ ID NO: 1439644 - RNA, 19 nt, Artificial Sequence
  Description of Artificial Sequence: Synthetic oligonucleotide
ucuuuauucuagagguagg

SEQ ID NO: 1439645 - RNA, 19 nt, Artificial Sequence
  Description of Artificial Sequence: Synthetic oligonucleotide
caauacaacugcuuguccc

SEQ ID NO: 1439646 - RNA, 19 nt, Artificial Sequence
  Description of Artificial Sequence: Synthetic oligonucleotide
agguugagauucuuuauuc

SEQ ID NO: 1439647 - RNA, 19 nt, Artificial Sequence
  Description of Artificial Sequence: Synthetic oligonucleotide
ugggguuuaggacagccag

SEQ ID NO: 1439648 - RNA, 19 nt, Artificial Sequence
  Description of Artificial Sequence: Synthetic oligonucleotide
guaugugccuaaaauaagg

SEQ ID NO: 1439649 - RNA, 19 nt, Artificial Sequence
  Description of Artificial Sequence: Synthetic oligonucleotide
auugggcuuagccaacagc

SEQ ID NO: 1439650 - RNA, 19 nt, Artificial Sequence
  Description of Artificial Sequence: Synthetic oligonucleotide
gaaguaggcaagaaacacg

SEQ ID NO: 1439651 - RNA, 19 nt, Artificial Sequence
  Description of Artificial Sequence: Synthetic oligonucleotide
uucccuaagccgcugagcc

SEQ ID NO: 1439652 - RNA, 19 nt, Artificial Sequence
  Description of Artificial Sequence: Synthetic oligonucleotide
aagguaugugccuaaaaua

SEQ ID NO: 1439653 - RNA, 19 nt, Artificial Sequence
  Description of Artificial Sequence: Synthetic oligonucleotide
gguaaugacauagauagug

SEQ ID NO: 1439654 - RNA, 19 nt, Artificial Sequence
  Description of Artificial Sequence: Synthetic oligonucleotide
gacaccacgaguccaacgc

SEQ ID NO: 1439655 - RNA, 19 nt, Artificial Sequence
  Description of Artificial Sequence: Synthetic oligonucleotide
uaggcaagaaacacguucu

SEQ ID NO: 1439656 - RNA, 19 nt, Artificial Sequence
  Description of Artificial Sequence: Synthetic oligonucleotide
acgaguccaacgcaucucc

SEQ ID NO: 1439657 - RNA, 19 nt, Artificial Sequence
  Description of Artificial Sequence: Synthetic oligonucleotide
ugagccuugggguuuagga

SEQ ID NO: 1439658 - RNA, 19 nt, Artificial Sequence
  Description of Artificial Sequence: Synthetic oligonucleotide
guaggcaagaaacacguuc

SEQ ID NO: 1439659 - RNA, 19 nt, Artificial Sequence
  Description of Artificial Sequence: Synthetic oligonucleotide
acaggccacacugagacac

SEQ ID NO: 1439660 - RNA, 19 nt, Artificial Sequence
  Description of Artificial Sequence: Synthetic oligonucleotide
aucgacaccaggaaguagg

SEQ ID NO: 1439661 - RNA, 19 nt, Artificial Sequence
  Description of Artificial Sequence: Synthetic oligonucleotide
aagagcucccggcuguagg

SEQ ID NO: 1439662 - RNA, 19 nt, Artificial Sequence
  Description of Artificial Sequence: Synthetic oligonucleotide
ugcgcuguucuacuccucg

SEQ ID NO: 1439663 - RNA, 19 nt, Artificial Sequence
  Description of Artificial Sequence: Synthetic oligonucleotide
aaauaagguagaagucagg

SEQ ID NO: 1439664 - RNA, 19 nt, Artificial Sequence
  Description of Artificial Sequence: Synthetic oligonucleotide
cacaagauggcucaggaga

SEQ ID NO: 1439665 - RNA, 19 nt, Artificial Sequence
  Description of Artificial Sequence: Synthetic oligonucleotide
aucuuagguuucucugucc

SEQ ID NO: 1439666 - RNA, 19 nt, Artificial Sequence
  Description of Artificial Sequence: Synthetic oligonucleotide
ucaucuuagguuucucugu

SEQ ID NO: 1439667 - RNA, 19 nt, Artificial Sequence
  Description of Artificial Sequence: Synthetic oligonucleotide
cagggcaacagcaaauccc

SEQ ID NO: 1439668 - RNA, 19 nt, Artificial Sequence
  Description of Artificial Sequence: Synthetic oligonucleotide
ucaauacaacugcuugucc

SEQ ID NO: 1439669 - RNA, 19 nt, Artificial Sequence
  Description of Artificial Sequence: Synthetic oligonucleotide
augacauagauagugggca

SEQ ID NO: 1439670 - RNA, 19 nt, Artificial Sequence
  Description of Artificial Sequence: Synthetic oligonucleotide
uccacaagauggcucagga

SEQ ID NO: 1439671 - RNA, 19 nt, Artificial Sequence
  Description of Artificial Sequence: Synthetic oligonucleotide
ucagcuugcaacugggaaa

SEQ ID NO: 1439672 - RNA, 19 nt, Artificial Sequence
  Description of Artificial Sequence: Synthetic oligonucleotide
cacacuaguaccugaguac

SEQ ID NO: 1439673 - RNA, 19 nt, Artificial Sequence
  Description of Artificial Sequence: Synthetic oligonucleotide
ugugugaagaggagaccag

SEQ ID NO: 1439674 - RNA, 19 nt, Artificial Sequence
  Description of Artificial Sequence: Synthetic oligonucleotide
ugaggcugccaucacaccu

SEQ ID NO: 1439675 - RNA, 19 nt, Artificial Sequence
  Description of Artificial Sequence: Synthetic oligonucleotide
caauggcugggucugagcc

SEQ ID NO: 1439676 - RNA, 19 nt, Artificial Sequence
  Description of Artificial Sequence: Synthetic oligonucleotide
aagaggauccgcaugcuca

SEQ ID NO: 1439677 - RNA, 19 nt, Artificial Sequence
  Description of Artificial Sequence: Synthetic oligonucleotide
caucacaccucaauggcug

SEQ ID NO: 1439678 - RNA, 19 nt, Artificial Sequence
  Description of Artificial Sequence: Synthetic oligonucleotide
cucgccuucccuaagccgc

SEQ ID NO: 1439679 - RNA, 19 nt, Artificial Sequence
  Description of Artificial Sequence: Synthetic oligonucleotide
agacuacucuccaaguggc

SEQ ID NO: 1439680 - RNA, 19 nt, Artificial Sequence
  Description of Artificial Sequence: Synthetic oligonucleotide
uguuggguucccaugcugu

SEQ ID NO: 1439681 - RNA, 19 nt, Artificial Sequence
  Description of Artificial Sequence: Synthetic oligonucleotide
caucaucagcaaaauacac

SEQ ID NO: 1439682 - RNA, 19 nt, Artificial Sequence
  Description of Artificial Sequence: Synthetic oligonucleotide
ugacauagauagugggcag

SEQ ID NO: 1439683 - RNA, 19 nt, Artificial Sequence
  Description of Artificial Sequence: Synthetic oligonucleotide
ugugugccacacuaguacc

SEQ ID NO: 1439684 - RNA, 19 nt, Artificial Sequence
  Description of Artificial Sequence: Synthetic oligonucleotide
aggacccucaaaucgcagg

SEQ ID NO: 1439685 - RNA, 19 nt, Artificial Sequence
  Description of Artificial Sequence: Synthetic oligonucleotide
uacaccacucccugggucc

SEQ ID NO: 1439686 - RNA, 19 nt, Artificial Sequence
  Description of Artificial Sequence: Synthetic oligonucleotide
aaacccacaacccggccau

SEQ ID NO: 1439687 - RNA, 19 nt, Artificial Sequence
  Description of Artificial Sequence: Synthetic oligonucleotide
gaguacaguuggcagcccg

SEQ ID NO: 1439688 - RNA, 19 nt, Artificial Sequence
  Description of Artificial Sequence: Synthetic oligonucleotide
uggucgacggagaucagcu

SEQ ID NO: 1439689 - RNA, 19 nt, Artificial Sequence
  Description of Artificial Sequence: Synthetic oligonucleotide
aaguuacccaguucccuca

SEQ ID NO: 1439690 - RNA, 19 nt, Artificial Sequence
  Description of Artificial Sequence: Synthetic oligonucleotide
uuugccucggagccagucc

SEQ ID NO: 1439691 - RNA, 19 nt, Artificial Sequence
  Description of Artificial Sequence: Synthetic oligonucleotide
uacccgaggacccucaaau

SEQ ID NO: 1439692 - RNA, 19 nt, Artificial Sequence
  Description of Artificial Sequence: Synthetic oligonucleotide
acaagauggcucaggagac

SEQ ID NO: 1439693 - RNA, 19 nt, Artificial Sequence
  Description of Artificial Sequence: Synthetic oligonucleotide
guuuaggacagccaggugu

SEQ ID NO: 1439694 - RNA, 19 nt, Artificial Sequence
  Description of Artificial Sequence: Synthetic oligonucleotide
agcggagggaggcagucac

SEQ ID NO: 1439695 - RNA, 19 nt, Artificial Sequence
  Description of Artificial Sequence: Synthetic oligonucleotide
uucuagagguaggaagagg

SEQ ID NO: 1439696 - RNA, 19 nt, Artificial Sequence
  Description of Artificial Sequence: Synthetic oligonucleotide
agauagugggcagagccuc

SEQ ID NO: 1439697 - RNA, 19 nt, Artificial Sequence
  Description of Artificial Sequence: Synthetic oligonucleotide
uggugggucuuucuccccg

SEQ ID NO: 1439698 - RNA, 19 nt, Artificial Sequence
  Description of Artificial Sequence: Synthetic oligonucleotide
uacaguuggcagcccgugg

SEQ ID NO: 1439699 - RNA, 19 nt, Artificial Sequence
  Description of Artificial Sequence: Synthetic oligonucleotide
uguagacggggcaccaggc

SEQ ID NO: 1439700 - RNA, 19 nt, Artificial Sequence
  Description of Artificial Sequence: Synthetic oligonucleotide
agguaugugccuaaaauaa

SEQ ID NO: 1439701 - RNA, 19 nt, Artificial Sequence
  Description of Artificial Sequence: Synthetic oligonucleotide
auacaccacucccuggguc

SEQ ID NO: 1439702 - RNA, 19 nt, Artificial Sequence
  Description of Artificial Sequence: Synthetic oligonucleotide
guggaaacccacaacccgg

SEQ ID NO: 1439703 - RNA, 19 nt, Artificial Sequence
  Description of Artificial Sequence: Synthetic oligonucleotide
cugggcauugggcuuagcc

SEQ ID NO: 1439704 - RNA, 19 nt, Artificial Sequence
  Description of Artificial Sequence: Synthetic oligonucleotide
uacuccucggggccgaacc

SEQ ID NO: 1439705 - RNA, 19 nt, Artificial Sequence
  Description of Artificial Sequence: Synthetic oligonucleotide
cucaauacaacugcuuguc

SEQ ID NO: 1439706 - RNA, 19 nt, Artificial Sequence
  Description of Artificial Sequence: Synthetic oligonucleotide
gcaagaaacacguucuuca

SEQ ID NO: 1439707 - RNA, 19 nt, Artificial Sequence
  Description of Artificial Sequence: Synthetic oligonucleotide
agagccucgggcucagggg

SEQ ID NO: 1439708 - RNA, 19 nt, Artificial Sequence
  Description of Artificial Sequence: Synthetic oligonucleotide
acauagauagugggcagag

SEQ ID NO: 1439709 - RNA, 19 nt, Artificial Sequence
  Description of Artificial Sequence: Synthetic oligonucleotide
uucauggccgcgccgccgg

SEQ ID NO: 1439710 - RNA, 19 nt, Artificial Sequence
  Description of Artificial Sequence: Synthetic oligonucleotide
uggaaacccacaacccggc

SEQ ID NO: 1439711 - RNA, 19 nt, Artificial Sequence
  Description of Artificial Sequence: Synthetic oligonucleotide
ucaaaucgcaggccgccca

SEQ ID NO: 1439712 - RNA, 19 nt, Artificial Sequence
  Description of Artificial Sequence: Synthetic oligonucleotide
agcuucauggccgcgccgc

SEQ ID NO: 1439713 - RNA, 19 nt, Artificial Sequence
  Description of Artificial Sequence: Synthetic oligonucleotide
ucggagccaguccagggcc

SEQ ID NO: 1439714 - RNA, 19 nt, Artificial Sequence
  Description of Artificial Sequence: Synthetic oligonucleotide
cacacugagacaccacgag

SEQ ID NO: 1439715 - RNA, 19 nt, Artificial Sequence
  Description of Artificial Sequence: Synthetic oligonucleotide
uagaggaggccggcgaucg

SEQ ID NO: 1439716 - RNA, 19 nt, Artificial Sequence
  Description of Artificial Sequence: Synthetic oligonucleotide
aucuccuuaaagagcuccc

SEQ ID NO: 1439717 - RNA, 19 nt, Artificial Sequence
  Description of Artificial Sequence: Synthetic oligonucleotide
ggcucaauacaacugcuug

SEQ ID NO: 1439718 - RNA, 19 nt, Artificial Sequence
  Description of Artificial Sequence: Synthetic oligonucleotide
cuguucuacuccucggggc

SEQ ID NO: 1439719 - RNA, 19 nt, Artificial Sequence
  Description of Artificial Sequence: Synthetic oligonucleotide
auaaguuacccaguucccu

SEQ ID NO: 1439720 - RNA, 19 nt, Artificial Sequence
  Description of Artificial Sequence: Synthetic oligonucleotide
aaaucgcaggccgcccacc

SEQ ID NO: 1439721 - RNA, 19 nt, Artificial Sequence
  Description of Artificial Sequence: Synthetic oligonucleotide
agaccagcgggguagggcu

SEQ ID NO: 1439722 - RNA, 19 nt, Artificial Sequence
  Description of Artificial Sequence: Synthetic oligonucleotide
gccaagcugcaccagagcg

SEQ ID NO: 1439723 - RNA, 19 nt, Artificial Sequence
  Description of Artificial Sequence: Synthetic oligonucleotide
gagccuugggguuuaggac

SEQ ID NO: 1439724 - RNA, 19 nt, Artificial Sequence
  Description of Artificial Sequence: Synthetic oligonucleotide
ugcuuguccccaauaaguu

SEQ ID NO: 1439725 - RNA, 19 nt, Artificial Sequence
  Description of Artificial Sequence: Synthetic oligonucleotide
agacaccacgaguccaacg

SEQ ID NO: 1439726 - RNA, 19 nt, Artificial Sequence
  Description of Artificial Sequence: Synthetic oligonucleotide
cagagcguagaggaggccg

SEQ ID NO: 1439727 - RNA, 19 nt, Artificial Sequence
  Description of Artificial Sequence: Synthetic oligonucleotide
auucuagagguaggaagag

SEQ ID NO: 1439728 - RNA, 19 nt, Artificial Sequence
  Description of Artificial Sequence: Synthetic oligonucleotide
augcuuguccccaauaagu

SEQ ID NO: 1439729 - RNA, 19 nt, Artificial Sequence
  Description of Artificial Sequence: Synthetic oligonucleotide
caucuuagguuucucuguc

SEQ ID NO: 1439730 - RNA, 19 nt, Artificial Sequence
  Description of Artificial Sequence: Synthetic oligonucleotide
uggcuggccaagcugcacc

SEQ ID NO: 1439731 - RNA, 19 nt, Artificial Sequence
  Description of Artificial Sequence: Synthetic oligonucleotide
aucacaccucaauggcugg

SEQ ID NO: 1439732 - RNA, 19 nt, Artificial Sequence
  Description of Artificial Sequence: Synthetic oligonucleotide
caccagagcguagaggagg

SEQ ID NO: 1439733 - RNA, 19 nt, Artificial Sequence
  Description of Artificial Sequence: Synthetic oligonucleotide
gauggggcugaccuggcuc

SEQ ID NO: 1439734 - RNA, 19 nt, Artificial Sequence
  Description of Artificial Sequence: Synthetic oligonucleotide
cuuuauucuagagguagga

SEQ ID NO: 1439735 - RNA, 19 nt, Artificial Sequence
  Description of Artificial Sequence: Synthetic oligonucleotide
acuaguaccugaguacagu

SEQ ID NO: 1439736 - RNA, 19 nt, Artificial Sequence
  Description of Artificial Sequence: Synthetic oligonucleotide
agguaggaagaggauccgc

SEQ ID NO: 1439737 - RNA, 19 nt, Artificial Sequence
  Description of Artificial Sequence: Synthetic oligonucleotide
ggaaguaggcaagaaacac

SEQ ID NO: 1439738 - RNA, 19 nt, Artificial Sequence
  Description of Artificial Sequence: Synthetic oligonucleotide
aaucgcaggccgcccacca

SEQ ID NO: 1439739 - RNA, 19 nt, Artificial Sequence
  Description of Artificial Sequence: Synthetic oligonucleotide
augugccuaaaauaaggua

SEQ ID NO: 1439740 - RNA, 19 nt, Artificial Sequence
  Description of Artificial Sequence: Synthetic oligonucleotide
aucuguccugcuccacccc

SEQ ID NO: 1439741 - RNA, 19 nt, Artificial Sequence
  Description of Artificial Sequence: Synthetic oligonucleotide
cacacccugugguuggagg

SEQ ID NO: 1439742 - RNA, 19 nt, Artificial Sequence
  Description of Artificial Sequence: Synthetic oligonucleotide
uggcucuagguccuuggga

SEQ ID NO: 1439743 - RNA, 19 nt, Artificial Sequence
  Description of Artificial Sequence: Synthetic oligonucleotide
accagagcguagaggaggc

SEQ ID NO: 1439744 - RNA, 19 nt, Artificial Sequence
  Description of Artificial Sequence: Synthetic oligonucleotide
gauagugggcagagccucg

SEQ ID NO: 1439745 - RNA, 19 nt, Artificial Sequence
  Description of Artificial Sequence: Synthetic oligonucleotide
ugugccacacuaguaccug

SEQ ID NO: 1439746 - RNA, 19 nt, Artificial Sequence
  Description of Artificial Sequence: Synthetic oligonucleotide
aaaucccgccauguccagg

SEQ ID NO: 1439747 - RNA, 19 nt, Artificial Sequence
  Description of Artificial Sequence: Synthetic oligonucleotide
uccgugugugccacacuag

SEQ ID NO: 1439748 - RNA, 19 nt, Artificial Sequence
  Description of Artificial Sequence: Synthetic oligonucleotide
ggcaacagcaaaucccgcc

SEQ ID NO: 1439749 - RNA, 19 nt, Artificial Sequence
  Description of Artificial Sequence: Synthetic oligonucleotide
gccacacugagacaccacg

SEQ ID NO: 1439750 - RNA, 19 nt, Artificial Sequence
  Description of Artificial Sequence: Synthetic oligonucleotide
ggagacuacucuccaagug

SEQ ID NO: 1439751 - RNA, 19 nt, Artificial Sequence
  Description of Artificial Sequence: Synthetic oligonucleotide
uuguccccaauaaguuacc

SEQ ID NO: 1439752 - RNA, 19 nt, Artificial Sequence
  Description of Artificial Sequence: Synthetic oligonucleotide
gaagaggauccgcaugcuc

SEQ ID NO: 1439753 - RNA, 19 nt, Artificial Sequence
  Description of Artificial Sequence: Synthetic oligonucleotide
cucagggucugggacagcc

SEQ ID NO: 1439754 - RNA, 19 nt, Artificial Sequence
  Description of Artificial Sequence: Synthetic oligonucleotide
ggcuuagccaacagcaagg

SEQ ID NO: 1439755 - RNA, 19 nt, Artificial Sequence
  Description of Artificial Sequence: Synthetic oligonucleotide
aggacagccagguguguga

SEQ ID NO: 1439756 - RNA, 19 nt, Artificial Sequence
  Description of Artificial Sequence: Synthetic oligonucleotide
cacuaguaccugaguacag

SEQ ID NO: 1439757 - RNA, 19 nt, Artificial Sequence
  Description of Artificial Sequence: Synthetic oligonucleotide
gguaugugccuaaaauaag

SEQ ID NO: 1439758 - RNA, 19 nt, Artificial Sequence
  Description of Artificial Sequence: Synthetic oligonucleotide
ggauccacaagauggcuca

SEQ ID NO: 1439759 - RNA, 19 nt, Artificial Sequence
  Description of Artificial Sequence: Synthetic oligonucleotide
aggagacuacucuccaagu

SEQ ID NO: 1439760 - RNA, 19 nt, Artificial Sequence
  Description of Artificial Sequence: Synthetic oligonucleotide
acaagguaugugccuaaaa

SEQ ID NO: 1439761 - RNA, 19 nt, Artificial Sequence
  Description of Artificial Sequence: Synthetic oligonucleotide
aggauccgcaugcucaggu

SEQ ID NO: 1439762 - RNA, 19 nt, Artificial Sequence
  Description of Artificial Sequence: Synthetic oligonucleotide
acagcaaaucccgccaugu

SEQ ID NO: 1439763 - RNA, 19 nt, Artificial Sequence
  Description of Artificial Sequence: Synthetic oligonucleotide
gugugugaagaggagacca

SEQ ID NO: 1439764 - RNA, 19 nt, Artificial Sequence
  Description of Artificial Sequence: Synthetic oligonucleotide
agagcucccggcuguaggu

SEQ ID NO: 1439765 - RNA, 19 nt, Artificial Sequence
  Description of Artificial Sequence: Synthetic oligonucleotide
cucggagccaguccagggc

SEQ ID NO: 1439766 - RNA, 19 nt, Artificial Sequence
  Description of Artificial Sequence: Synthetic oligonucleotide
auccuguacccgaggaccc

SEQ ID NO: 1439767 - RNA, 19 nt, Artificial Sequence
  Description of Artificial Sequence: Synthetic oligonucleotide
ucacaccucaauggcuggg

SEQ ID NO: 1439768 - RNA, 19 nt, Artificial Sequence
  Description of Artificial Sequence: Synthetic oligonucleotide
cccgaggacccucaaaucg

SEQ ID NO: 1439769 - RNA, 19 nt, Artificial Sequence
  Description of Artificial Sequence: Synthetic oligonucleotide
gcuguucuacuccucgggg

SEQ ID NO: 1439770 - RNA, 19 nt, Artificial Sequence
  Description of Artificial Sequence: Synthetic oligonucleotide
acccacaacccggccaucc

SEQ ID NO: 1439771 - RNA, 19 nt, Artificial Sequence
  Description of Artificial Sequence: Synthetic oligonucleotide
aggaaguaggcaagaaaca

SEQ ID NO: 1439772 - RNA, 19 nt, Artificial Sequence
  Description of Artificial Sequence: Synthetic oligonucleotide
agguccuugggauccacaa

SEQ ID NO: 1439773 - RNA, 19 nt, Artificial Sequence
  Description of Artificial Sequence: Synthetic oligonucleotide
ggacccucaaaucgcaggc

SEQ ID NO: 1439774 - RNA, 19 nt, Artificial Sequence
  Description of Artificial Sequence: Synthetic oligonucleotide
guuggguucccaugcugug

SEQ ID NO: 1439775 - RNA, 19 nt, Artificial Sequence
  Description of Artificial Sequence: Synthetic oligonucleotide
gagguaggaagaggauccg

SEQ ID NO: 1439776 - RNA, 19 nt, Artificial Sequence
  Description of Artificial Sequence: Synthetic oligonucleotide
uguccccaauaaguuaccc

SEQ ID NO: 1439777 - RNA, 19 nt, Artificial Sequence
  Description of Artificial Sequence: Synthetic oligonucleotide
guggcucuagguccuuggg

SEQ ID NO: 1439778 - RNA, 19 nt, Artificial Sequence
  Description of Artificial Sequence: Synthetic oligonucleotide
uccuagguugagauucuuu

SEQ ID NO: 1439779 - RNA, 19 nt, Artificial Sequence
  Description of Artificial Sequence: Synthetic oligonucleotide
gguggugggucuuucuccc

SEQ ID NO: 1439780 - RNA, 19 nt, Artificial Sequence
  Description of Artificial Sequence: Synthetic oligonucleotide
gggcuuagccaacagcaag

SEQ ID NO: 1439781 - RNA, 19 nt, Artificial Sequence
  Description of Artificial Sequence: Synthetic oligonucleotide
auagugggcagagccucgg

SEQ ID NO: 1439782 - RNA, 19 nt, Artificial Sequence
  Description of Artificial Sequence: Synthetic oligonucleotide
gacauagauagugggcaga

SEQ ID NO: 1439783 - RNA, 19 nt, Artificial Sequence
  Description of Artificial Sequence: Synthetic oligonucleotide
ugggcuuagccaacagcaa

SEQ ID NO: 1439784 - RNA, 19 nt, Artificial Sequence
  Description of Artificial Sequence: Synthetic oligonucleotide
uccaacgcaucuccuuaaa

SEQ ID NO: 1439785 - RNA, 19 nt, Artificial Sequence
  Description of Artificial Sequence: Synthetic oligonucleotide
agccgcugagccuuggggu

SEQ ID NO: 1439786 - RNA, 19 nt, Artificial Sequence
  Description of Artificial Sequence: Synthetic oligonucleotide
gcuugcaacugggaaaucc

SEQ ID NO: 1439787 - RNA, 19 nt, Artificial Sequence
  Description of Artificial Sequence: Synthetic oligonucleotide
uggcucgccuucccuaagc

SEQ ID NO: 1439788 - RNA, 19 nt, Artificial Sequence
  Description of Artificial Sequence: Synthetic oligonucleotide
gccuaaaauaagguagaag

SEQ ID NO: 1439789 - RNA, 19 nt, Artificial Sequence
  Description of Artificial Sequence: Synthetic oligonucleotide
gagaccagcgggguagggc

SEQ ID NO: 1439790 - RNA, 19 nt, Artificial Sequence
  Description of Artificial Sequence: Synthetic oligonucleotide
cuguguggaaacccacaac

SEQ ID NO: 1439791 - RNA, 19 nt, Artificial Sequence
  Description of Artificial Sequence: Synthetic oligonucleotide
cuccugaguccaucugucc

SEQ ID NO: 1439792 - RNA, 19 nt, Artificial Sequence
  Description of Artificial Sequence: Synthetic oligonucleotide
uggcucaauacaacugcuu

SEQ ID NO: 1439793 - RNA, 19 nt, Artificial Sequence
  Description of Artificial Sequence: Synthetic oligonucleotide
gaucgacaccaggaaguag

SEQ ID NO: 1439794 - RNA, 19 nt, Artificial Sequence
  Description of Artificial Sequence: Synthetic oligonucleotide
ugcaugcuuguccccaaua

SEQ ID NO: 1439795 - RNA, 19 nt, Artificial Sequence
  Description of Artificial Sequence: Synthetic oligonucleotide
cuugcaacugggaaauccu

SEQ ID NO: 1439796 - RNA, 19 nt, Artificial Sequence
  Description of Artificial Sequence: Synthetic oligonucleotide
ugugguuggaggggcugcc

SEQ ID NO: 1439797 - RNA, 19 nt, Artificial Sequence
  Description of Artificial Sequence: Synthetic oligonucleotide
agcgggguagggcucucag

SEQ ID NO: 1439798 - RNA, 19 nt, Artificial Sequence
  Description of Artificial Sequence: Synthetic oligonucleotide
cauugggcuuagccaacag

SEQ ID NO: 1439799 - RNA, 19 nt, Artificial Sequence
  Description of Artificial Sequence: Synthetic oligonucleotide
acaccacgaguccaacgca

SEQ ID NO: 1439800 - RNA, 19 nt, Artificial Sequence
  Description of Artificial Sequence: Synthetic oligonucleotide
ggcgaucgacaccaggaag

SEQ ID NO: 1439801 - RNA, 19 nt, Artificial Sequence
  Description of Artificial Sequence: Synthetic oligonucleotide
gacuacucuccaaguggcc

SEQ ID NO: 1439802 - RNA, 19 nt, Artificial Sequence
  Description of Artificial Sequence: Synthetic oligonucleotide
uucccaugcuguguggaaa

SEQ ID NO: 1439803 - RNA, 19 nt, Artificial Sequence
  Description of Artificial Sequence: Synthetic oligonucleotide
gguaggaagaggauccgca

SEQ ID NO: 1439804 - RNA, 19 nt, Artificial Sequence
  Description of Artificial Sequence: Synthetic oligonucleotide
uccgcaugcucaggugggg

SEQ ID NO: 1439805 - RNA, 19 nt, Artificial Sequence
  Description of Artificial Sequence: Synthetic oligonucleotide
aggccggcgaucgacacca

SEQ ID NO: 1439806 - RNA, 19 nt, Artificial Sequence
  Description of Artificial Sequence: Synthetic oligonucleotide
gucugggacagccgaacca

SEQ ID NO: 1439807 - RNA, 19 nt, Artificial Sequence
  Description of Artificial Sequence: Synthetic oligonucleotide
ugggauccacaagauggcu

SEQ ID NO: 1439808 - RNA, 19 nt, Artificial Sequence
  Description of Artificial Sequence: Synthetic oligonucleotide
acucccugggucccuggug

SEQ ID NO: 1439809 - RNA, 19 nt, Artificial Sequence
  Description of Artificial Sequence: Synthetic oligonucleotide
caaaucgcaggccgcccac

SEQ ID NO: 1439810 - RNA, 19 nt, Artificial Sequence
  Description of Artificial Sequence: Synthetic oligonucleotide
guucuacuccucggggccg

SEQ ID NO: 1439811 - RNA, 19 nt, Artificial Sequence
  Description of Artificial Sequence: Synthetic oligonucleotide
caaaucccgccauguccag

SEQ ID NO: 1439812 - RNA, 19 nt, Artificial Sequence
  Description of Artificial Sequence: Synthetic oligonucleotide
aguacaguuggcagcccgu

SEQ ID NO: 1439813 - RNA, 19 nt, Artificial Sequence
  Description of Artificial Sequence: Synthetic oligonucleotide
ggguggucgacggagauca

SEQ ID NO: 1439814 - RNA, 19 nt, Artificial Sequence
  Description of Artificial Sequence: Synthetic oligonucleotide
cacguucuucagcuucagc

SEQ ID NO: 1439815 - RNA, 19 nt, Artificial Sequence
  Description of Artificial Sequence: Synthetic oligonucleotide
accacgaguccaacgcauc

SEQ ID NO: 1439816 - RNA, 19 nt, Artificial Sequence
  Description of Artificial Sequence: Synthetic oligonucleotide
gaggaggccggcgaucgac

SEQ ID NO: 1439817 - RNA, 19 nt, Artificial Sequence
  Description of Artificial Sequence: Synthetic oligonucleotide
auacaacugcuugucccca

SEQ ID NO: 1439818 - RNA, 19 nt, Artificial Sequence
  Description of Artificial Sequence: Synthetic oligonucleotide
guggucgacggagaucagc

SEQ ID NO: 1439819 - RNA, 19 nt, Artificial Sequence
  Description of Artificial Sequence: Synthetic oligonucleotide
ucccuaagccgcugagccu

SEQ ID NO: 1439820 - RNA, 19 nt, Artificial Sequence
  Description of Artificial Sequence: Synthetic oligonucleotide
uuguugcgcuguucuacuc

SEQ ID NO: 1439821 - RNA, 19 nt, Artificial Sequence
  Description of Artificial Sequence: Synthetic oligonucleotide
guccgugugugccacacua

SEQ ID NO: 1439822 - RNA, 19 nt, Artificial Sequence
  Description of Artificial Sequence: Synthetic oligonucleotide
guacaguuggcagcccgug

SEQ ID NO: 1439823 - RNA, 19 nt, Artificial Sequence
  Description of Artificial Sequence: Synthetic oligonucleotide
gaggccggcgaucgacacc

SEQ ID NO: 1439824 - RNA, 19 nt, Artificial Sequence
  Description of Artificial Sequence: Synthetic oligonucleotide
ccuagguugagauucuuua

SEQ ID NO: 1439825 - RNA, 19 nt, Artificial Sequence
  Description of Artificial Sequence: Synthetic oligonucleotide
auggcuggccaagcugcac

SEQ ID NO: 1439826 - RNA, 19 nt, Artificial Sequence
  Description of Artificial Sequence: Synthetic oligonucleotide
agcucccggcuguaggugu

SEQ ID NO: 1439827 - RNA, 19 nt, Artificial Sequence
  Description of Artificial Sequence: Synthetic oligonucleotide
gcugaccuggcucaauaca

SEQ ID NO: 1439828 - RNA, 19 nt, Artificial Sequence
  Description of Artificial Sequence: Synthetic oligonucleotide
uguacccgaggacccucaa

SEQ ID NO: 1439829 - RNA, 19 nt, Artificial Sequence
  Description of Artificial Sequence: Synthetic oligonucleotide
gguugagauucuuuauucu

SEQ ID NO: 1439830 - RNA, 19 nt, Artificial Sequence
  Description of Artificial Sequence: Synthetic oligonucleotide
gucacauggcuggccaagc

SEQ ID NO: 1439831 - RNA, 19 nt, Artificial Sequence
  Description of Artificial Sequence: Synthetic oligonucleotide
cuucauggccgcgccgccg

SEQ ID NO: 1439832 - RNA, 19 nt, Artificial Sequence
  Description of Artificial Sequence: Synthetic oligonucleotide
uucccucagccacccuccc

SEQ ID NO: 1439833 - RNA, 19 nt, Artificial Sequence
  Description of Artificial Sequence: Synthetic oligonucleotide
guaccagccuggcauaggu

SEQ ID NO: 1439834 - RNA, 19 nt, Artificial Sequence
  Description of Artificial Sequence: Synthetic oligonucleotide
cuagguugagauucuuuau

SEQ ID NO: 1439835 - RNA, 19 nt, Artificial Sequence
  Description of Artificial Sequence: Synthetic oligonucleotide
gggguuuaggacagccagg

SEQ ID NO: 1439836 - RNA, 19 nt, Artificial Sequence
  Description of Artificial Sequence: Synthetic oligonucleotide
aucgcaggccgcccaccag

SEQ ID NO: 1439837 - RNA, 19 nt, Artificial Sequence
  Description of Artificial Sequence: Synthetic oligonucleotide
cuuguugcgcuguucuacu

SEQ ID NO: 1439838 - RNA, 19 nt, Artificial Sequence
  Description of Artificial Sequence: Synthetic oligonucleotide
uguccgugugugccacacu

SEQ ID NO: 1439839 - RNA, 19 nt, Artificial Sequence
  Description of Artificial Sequence: Synthetic oligonucleotide
guugcgcuguucuacuccu

SEQ ID NO: 1439840 - RNA, 19 nt, Artificial Sequence
  Description of Artificial Sequence: Synthetic oligonucleotide
aacugggcauugggcuuag

SEQ ID NO: 1439841 - RNA, 19 nt, Artificial Sequence
  Description of Artificial Sequence: Synthetic oligonucleotide
ccaacgcaucuccuuaaag

SEQ ID NO: 1439842 - RNA, 19 nt, Artificial Sequence
  Description of Artificial Sequence: Synthetic oligonucleotide
ucuagguccuugggaucca

SEQ ID NO: 1439843 - RNA, 19 nt, Artificial Sequence
  Description of Artificial Sequence: Synthetic oligonucleotide
cagcaaaucccgccauguc

SEQ ID NO: 1439844 - RNA, 19 nt, Artificial Sequence
  Description of Artificial Sequence: Synthetic oligonucleotide
uccuggcucgccuucccua

SEQ ID NO: 1439845 - RNA, 19 nt, Artificial Sequence
  Description of Artificial Sequence: Synthetic oligonucleotide
cagccuggcauaggugggg

SEQ ID NO: 1439846 - RNA, 19 nt, Artificial Sequence
  Description of Artificial Sequence: Synthetic oligonucleotide
ugaguacaguuggcagccc

SEQ ID NO: 1439847 - RNA, 19 nt, Artificial Sequence
  Description of Artificial Sequence: Synthetic oligonucleotide
gaucagcuugcaacuggga

SEQ ID NO: 1439848 - RNA, 19 nt, Artificial Sequence
  Description of Artificial Sequence: Synthetic oligonucleotide
cuuugccucggagccaguc

SEQ ID NO: 1439849 - RNA, 19 nt, Artificial Sequence
  Description of Artificial Sequence: Synthetic oligonucleotide
cacgaguccaacgcaucuc

SEQ ID NO: 1439850 - RNA, 19 nt, Artificial Sequence
  Description of Artificial Sequence: Synthetic oligonucleotide
gcaugcuuguccccaauaa

SEQ ID NO: 1439851 - RNA, 19 nt, Artificial Sequence
  Description of Artificial Sequence: Synthetic oligonucleotide
gacggagaucagcuugcaa

SEQ ID NO: 1439852 - RNA, 19 nt, Artificial Sequence
  Description of Artificial Sequence: Synthetic oligonucleotide
cugcagcucgaagcggagg

SEQ ID NO: 1439853 - RNA, 19 nt, Artificial Sequence
  Description of Artificial Sequence: Synthetic oligonucleotide
uucuacuccucggggccga

SEQ ID NO: 1439854 - RNA, 19 nt, Artificial Sequence
  Description of Artificial Sequence: Synthetic oligonucleotide
guucccaugcuguguggaa

SEQ ID NO: 1439855 - RNA, 19 nt, Artificial Sequence
  Description of Artificial Sequence: Synthetic oligonucleotide
ggucugggacagccgaacc

SEQ ID NO: 1439856 - RNA, 19 nt, Artificial Sequence
  Description of Artificial Sequence: Synthetic oligonucleotide
caacccggccauccuguac

SEQ ID NO: 1439857 - RNA, 19 nt, Artificial Sequence
  Description of Artificial Sequence: Synthetic oligonucleotide
guaggaagaggauccgcau

SEQ ID NO: 1439858 - RNA, 19 nt, Artificial Sequence
  Description of Artificial Sequence: Synthetic oligonucleotide
gugggucuuucuccccgcc

SEQ ID NO: 1439859 - RNA, 19 nt, Artificial Sequence
  Description of Artificial Sequence: Synthetic oligonucleotide
gccgaacccauccuggcuc

SEQ ID NO: 1439860 - RNA, 19 nt, Artificial Sequence
  Description of Artificial Sequence: Synthetic oligonucleotide
caggugugugaagaggaga

SEQ ID NO: 1439861 - RNA, 19 nt, Artificial Sequence
  Description of Artificial Sequence: Synthetic oligonucleotide
aagcggagggaggcaguca

SEQ ID NO: 1439862 - RNA, 19 nt, Artificial Sequence
  Description of Artificial Sequence: Synthetic oligonucleotide
caagcugcaccagagcgua

SEQ ID NO: 1439863 - RNA, 19 nt, Artificial Sequence
  Description of Artificial Sequence: Synthetic oligonucleotide
gguuuaggacagccaggug

SEQ ID NO: 1439864 - RNA, 19 nt, Artificial Sequence
  Description of Artificial Sequence: Synthetic oligonucleotide
ccacaagauggcucaggag

SEQ ID NO: 1439865 - RNA, 19 nt, Artificial Sequence
  Description of Artificial Sequence: Synthetic oligonucleotide
ucggggccgaacccauccu

SEQ ID NO: 1439866 - RNA, 19 nt, Artificial Sequence
  Description of Artificial Sequence: Synthetic oligonucleotide
gagacaccacgaguccaac

SEQ ID NO: 1439867 - RNA, 19 nt, Artificial Sequence
  Description of Artificial Sequence: Synthetic oligonucleotide
gcucaauacaacugcuugu

SEQ ID NO: 1439868 - RNA, 19 nt, Artificial Sequence
  Description of Artificial Sequence: Synthetic oligonucleotide
ggcucgccuucccuaagcc

SEQ ID NO: 1439869 - RNA, 19 nt, Artificial Sequence
  Description of Artificial Sequence: Synthetic oligonucleotide
ccaugcuguguggaaaccc

SEQ ID NO: 1439870 - RNA, 19 nt, Artificial Sequence
  Description of Artificial Sequence: Synthetic oligonucleotide
ggggccgaacccauccugg

SEQ ID NO: 1439871 - RNA, 19 nt, Artificial Sequence
  Description of Artificial Sequence: Synthetic oligonucleotide
uaaagagcucccggcugua

SEQ ID NO: 1439872 - RNA, 19 nt, Artificial Sequence
  Description of Artificial Sequence: Synthetic oligonucleotide
ggcucuagguccuugggau

SEQ ID NO: 1439873 - RNA, 19 nt, Artificial Sequence
  Description of Artificial Sequence: Synthetic oligonucleotide
ccacccucccuccugaguc

SEQ ID NO: 1439874 - RNA, 19 nt, Artificial Sequence
  Description of Artificial Sequence: Synthetic oligonucleotide
ccugcuucaucuuagguuu

SEQ ID NO: 1439875 - RNA, 19 nt, Artificial Sequence
  Description of Artificial Sequence: Synthetic oligonucleotide
cuuagguuucucuguccgu

SEQ ID NO: 1439876 - RNA, 19 nt, Artificial Sequence
  Description of Artificial Sequence: Synthetic oligonucleotide
ggugggucuuucuccccgc

SEQ ID NO: 1439877 - RNA, 19 nt, Artificial Sequence
  Description of Artificial Sequence: Synthetic oligonucleotide
cugagacaccacgagucca

SEQ ID NO: 1439878 - RNA, 19 nt, Artificial Sequence
  Description of Artificial Sequence: Synthetic oligonucleotide
gugggcagugccacauggc

SEQ ID NO: 1439879 - RNA, 19 nt, Artificial Sequence
  Description of Artificial Sequence: Synthetic oligonucleotide
cuaagccgcugagccuugg

SEQ ID NO: 1439880 - RNA, 19 nt, Artificial Sequence
  Description of Artificial Sequence: Synthetic oligonucleotide
gcgcuguucuacuccucgg

SEQ ID NO: 1439881 - RNA, 19 nt, Artificial Sequence
  Description of Artificial Sequence: Synthetic oligonucleotide
ccuugggauccacaagaug

SEQ ID NO: 1439882 - RNA, 19 nt, Artificial Sequence
  Description of Artificial Sequence: Synthetic oligonucleotide
gagcucccggcuguaggug

SEQ ID NO: 1439883 - RNA, 19 nt, Artificial Sequence
  Description of Artificial Sequence: Synthetic oligonucleotide
gugccacacuaguaccuga

SEQ ID NO: 1439884 - RNA, 19 nt, Artificial Sequence
  Description of Artificial Sequence: Synthetic oligonucleotide
gaguccaacgcaucuccuu

SEQ ID NO: 1439885 - RNA, 19 nt, Artificial Sequence
  Description of Artificial Sequence: Synthetic oligonucleotide
ggcugaccuggcucaauac

SEQ ID NO: 1439886 - RNA, 19 nt, Artificial Sequence
  Description of Artificial Sequence: Synthetic oligonucleotide
uugcgcuguucuacuccuc

SEQ ID NO: 1439887 - RNA, 19 nt, Artificial Sequence
  Description of Artificial Sequence: Synthetic oligonucleotide
ccucggagccaguccaggg

SEQ ID NO: 1439888 - RNA, 19 nt, Artificial Sequence
  Description of Artificial Sequence: Synthetic oligonucleotide
guagaggaggccggcgauc

SEQ ID NO: 1439889 - RNA, 19 nt, Artificial Sequence
  Description of Artificial Sequence: Synthetic oligonucleotide
cagucccacaagguaugug

SEQ ID NO: 1439890 - RNA, 19 nt, Artificial Sequence
  Description of Artificial Sequence: Synthetic oligonucleotide
gggauccacaagauggcuc

SEQ ID NO: 1439891 - RNA, 19 nt, Artificial Sequence
  Description of Artificial Sequence: Synthetic oligonucleotide
gcuuguccccaauaaguua

SEQ ID NO: 1439892 - RNA, 19 nt, Artificial Sequence
  Description of Artificial Sequence: Synthetic oligonucleotide
uccaggggaaagggccugu

SEQ ID NO: 1439893 - RNA, 19 nt, Artificial Sequence
  Description of Artificial Sequence: Synthetic oligonucleotide
ccgaacccauccuggcucg

SEQ ID NO: 1439894 - RNA, 19 nt, Artificial Sequence
  Description of Artificial Sequence: Synthetic oligonucleotide
cuggcucgccuucccuaag

SEQ ID NO: 1439895 - RNA, 19 nt, Artificial Sequence
  Description of Artificial Sequence: Synthetic oligonucleotide
guagacggggcaccaggcu

SEQ ID NO: 1439896 - RNA, 19 nt, Artificial Sequence
  Description of Artificial Sequence: Synthetic oligonucleotide
guccaucuguccugcucca

SEQ ID NO: 1439897 - RNA, 19 nt, Artificial Sequence
  Description of Artificial Sequence: Synthetic oligonucleotide
cguggcucuagguccuugg

SEQ ID NO: 1439898 - RNA, 19 nt, Artificial Sequence
  Description of Artificial Sequence: Synthetic oligonucleotide
cuagguccuugggauccac

SEQ ID NO: 1439899 - RNA, 19 nt, Artificial Sequence
  Description of Artificial Sequence: Synthetic oligonucleotide
cccgagaccagcgggguag

SEQ ID NO: 1439900 - RNA, 19 nt, Artificial Sequence
  Description of Artificial Sequence: Synthetic oligonucleotide
gggacagccgaaccagcuc

SEQ ID NO: 1439901 - RNA, 19 nt, Artificial Sequence
  Description of Artificial Sequence: Synthetic oligonucleotide
gguagggcucucagcgucc

SEQ ID NO: 1439902 - RNA, 19 nt, Artificial Sequence
  Description of Artificial Sequence: Synthetic oligonucleotide
ggagggaggcagucacaug

SEQ ID NO: 1439903 - RNA, 19 nt, Artificial Sequence
  Description of Artificial Sequence: Synthetic oligonucleotide
cacaacccggccauccugu

SEQ ID NO: 1439904 - RNA, 19 nt, Artificial Sequence
  Description of Artificial Sequence: Synthetic oligonucleotide
guacccgaggacccucaaa

SEQ ID NO: 1439905 - RNA, 19 nt, Artificial Sequence
  Description of Artificial Sequence: Synthetic oligonucleotide
ccaguguagacggggcacc

SEQ ID NO: 1439906 - RNA, 19 nt, Artificial Sequence
  Description of Artificial Sequence: Synthetic oligonucleotide
gcugccaucacaccucaau

SEQ ID NO: 1439907 - RNA, 19 nt, Artificial Sequence
  Description of Artificial Sequence: Synthetic oligonucleotide
uuccuagguugagauucuu

SEQ ID NO: 1439908 - RNA, 19 nt, Artificial Sequence
  Description of Artificial Sequence: Synthetic oligonucleotide
ccacacuaguaccugagua

SEQ ID NO: 1439909 - RNA, 19 nt, Artificial Sequence
  Description of Artificial Sequence: Synthetic oligonucleotide
ggucuuucuccccgccaac

SEQ ID NO: 1439910 - RNA, 19 nt, Artificial Sequence
  Description of Artificial Sequence: Synthetic oligonucleotide
acugggcauugggcuuagc

SEQ ID NO: 1439911 - RNA, 19 nt, Artificial Sequence
  Description of Artificial Sequence: Synthetic oligonucleotide
gccggcgaucgacaccagg

SEQ ID NO: 1439912 - RNA, 19 nt, Artificial Sequence
  Description of Artificial Sequence: Synthetic oligonucleotide
cuguacccgaggacccuca

SEQ ID NO: 1439913 - RNA, 19 nt, Artificial Sequence
  Description of Artificial Sequence: Synthetic oligonucleotide
ccuucccuaagccgcugag

SEQ ID NO: 1439914 - RNA, 19 nt, Artificial Sequence
  Description of Artificial Sequence: Synthetic oligonucleotide
gggccgaacccauccuggc

SEQ ID NO: 1439915 - RNA, 19 nt, Artificial Sequence
  Description of Artificial Sequence: Synthetic oligonucleotide
cauggccgcgccgccgggg

SEQ ID NO: 1439916 - RNA, 19 nt, Artificial Sequence
  Description of Artificial Sequence: Synthetic oligonucleotide
aguaggcaagaaacacguu

SEQ ID NO: 1439917 - RNA, 19 nt, Artificial Sequence
  Description of Artificial Sequence: Synthetic oligonucleotide
gguucccaugcugugugga

SEQ ID NO: 1439918 - RNA, 19 nt, Artificial Sequence
  Description of Artificial Sequence: Synthetic oligonucleotide
ccacacugagacaccacga

SEQ ID NO: 1439919 - RNA, 19 nt, Artificial Sequence
  Description of Artificial Sequence: Synthetic oligonucleotide
uccccgccaacagcacccc

SEQ ID NO: 1439920 - RNA, 19 nt, Artificial Sequence
  Description of Artificial Sequence: Synthetic oligonucleotide
aggaggccggcgaucgaca

SEQ ID NO: 1439921 - RNA, 19 nt, Artificial Sequence
  Description of Artificial Sequence: Synthetic oligonucleotide
ccacaacccggccauccug

SEQ ID NO: 1439922 - RNA, 19 nt, Artificial Sequence
  Description of Artificial Sequence: Synthetic oligonucleotide
gugugccacacuaguaccu

SEQ ID NO: 1439923 - RNA, 19 nt, Artificial Sequence
  Description of Artificial Sequence: Synthetic oligonucleotide
cacaagguaugugccuaaa

SEQ ID NO: 1439924 - RNA, 19 nt, Artificial Sequence
  Description of Artificial Sequence: Synthetic oligonucleotide
gcgggguagggcucucagc

SEQ ID NO: 1439925 - RNA, 19 nt, Artificial Sequence
  Description of Artificial Sequence: Synthetic oligonucleotide
ggaaagggccuguuggguu

SEQ ID NO: 1439926 - RNA, 19 nt, Artificial Sequence
  Description of Artificial Sequence: Synthetic oligonucleotide
gggcaggcgggguccgccg

SEQ ID NO: 1439927 - RNA, 19 nt, Artificial Sequence
  Description of Artificial Sequence: Synthetic oligonucleotide
caccacgaguccaacgcau

SEQ ID NO: 1439928 - RNA, 19 nt, Artificial Sequence
  Description of Artificial Sequence: Synthetic oligonucleotide
ccggcuguagguguuguca

SEQ ID NO: 1439929 - RNA, 19 nt, Artificial Sequence
  Description of Artificial Sequence: Synthetic oligonucleotide
ggcauugggcuuagccaac

SEQ ID NO: 1439930 - RNA, 19 nt, Artificial Sequence
  Description of Artificial Sequence: Synthetic oligonucleotide
cuacuccucggggccgaac

SEQ ID NO: 1439931 - RNA, 19 nt, Artificial Sequence
  Description of Artificial Sequence: Synthetic oligonucleotide
cugcuuguccccagccugu

SEQ ID NO: 1439932 - RNA, 19 nt, Artificial Sequence
  Description of Artificial Sequence: Synthetic oligonucleotide
cucccggcuguagguguug

SEQ ID NO: 1439933 - RNA, 19 nt, Artificial Sequence
  Description of Artificial Sequence: Synthetic oligonucleotide
aaguggccccggggugcag

SEQ ID NO: 1439934 - RNA, 19 nt, Artificial Sequence
  Description of Artificial Sequence: Synthetic oligonucleotide
ucuacuccucggggccgaa

SEQ ID NO: 1439935 - RNA, 19 nt, Artificial Sequence
  Description of Artificial Sequence: Synthetic oligonucleotide
ccggccauccuguacccga

SEQ ID NO: 1439936 - RNA, 19 nt, Artificial Sequence
  Description of Artificial Sequence: Synthetic oligonucleotide
cccaugcuguguggaaacc

SEQ ID NO: 1439937 - RNA, 19 nt, Artificial Sequence
  Description of Artificial Sequence: Synthetic oligonucleotide
cccggggugcaguugcauc

SEQ ID NO: 1439938 - RNA, 19 nt, Artificial Sequence
  Description of Artificial Sequence: Synthetic oligonucleotide
gggcaacagcaaaucccgc

SEQ ID NO: 1439939 - RNA, 19 nt, Artificial Sequence
  Description of Artificial Sequence: Synthetic oligonucleotide
agggccuguuggguuccca

SEQ ID NO: 1439940 - RNA, 19 nt, Artificial Sequence
  Description of Artificial Sequence: Synthetic oligonucleotide
agggucugggacagccgaa

SEQ ID NO: 1439941 - RNA, 19 nt, Artificial Sequence
  Description of Artificial Sequence: Synthetic oligonucleotide
ccaucacaccucaauggcu

SEQ ID NO: 1439942 - RNA, 19 nt, Artificial Sequence
  Description of Artificial Sequence: Synthetic oligonucleotide
ccccagauggggcugaccu

SEQ ID NO: 1439943 - RNA, 19 nt, Artificial Sequence
  Description of Artificial Sequence: Synthetic oligonucleotide
cccaauaaguuacccaguu

SEQ ID NO: 1439944 - RNA, 19 nt, Artificial Sequence
  Description of Artificial Sequence: Synthetic oligonucleotide
uggggcugaccuggcucaa

SEQ ID NO: 1439945 - RNA, 19 nt, Artificial Sequence
  Description of Artificial Sequence: Synthetic oligonucleotide
ggcgggguccgccggggac

SEQ ID NO: 1439946 - RNA, 19 nt, Artificial Sequence
  Description of Artificial Sequence: Synthetic oligonucleotide
cccgccauguccaggggaa

SEQ ID NO: 1439947 - RNA, 19 nt, Artificial Sequence
  Description of Artificial Sequence: Synthetic oligonucleotide
uggccccggggugcaguug

SEQ ID NO: 1439948 - RNA, 19 nt, Artificial Sequence
  Description of Artificial Sequence: Synthetic oligonucleotide
gggaaagggccuguugggu

SEQ ID NO: 1439949 - RNA, 19 nt, Artificial Sequence
  Description of Artificial Sequence: Synthetic oligonucleotide
ccuaagccgcugagccuug

SEQ ID NO: 1439950 - RNA, 19 nt, Artificial Sequence
  Description of Artificial Sequence: Synthetic oligonucleotide
ggguccgccggggaccggc

SEQ ID NO: 1439951 - RNA, 19 nt, Artificial Sequence
  Description of Artificial Sequence: Synthetic oligonucleotide
gggguggucgacggagauc

SEQ ID NO: 1439952 - RNA, 19 nt, Artificial Sequence
  Description of Artificial Sequence: Synthetic oligonucleotide
gccuucccuaagccgcuga

SEQ ID NO: 1439953 - RNA, 19 nt, Artificial Sequence
  Description of Artificial Sequence: Synthetic oligonucleotide
ggccacacugagacaccac

SEQ ID NO: 1439954 - RNA, 19 nt, Artificial Sequence
  Description of Artificial Sequence: Synthetic oligonucleotide
ccuggcucgccuucccuaa

SEQ ID NO: 1439955 - RNA, 19 nt, Artificial Sequence
  Description of Artificial Sequence: Synthetic oligonucleotide
ccacaagguaugugccuaa

SEQ ID NO: 1439956 - RNA, 19 nt, Artificial Sequence
  Description of Artificial Sequence: Synthetic oligonucleotide
gguggucgacggagaucag

SEQ ID NO: 1439957 - RNA, 19 nt, Artificial Sequence
  Description of Artificial Sequence: Synthetic oligonucleotide
gcagcucgaagcggaggga

SEQ ID NO: 1439958 - RNA, 19 nt, Artificial Sequence
  Description of Artificial Sequence: Synthetic oligonucleotide
gcccagucccacaagguau

SEQ ID NO: 1439959 - RNA, 19 nt, Artificial Sequence
  Description of Artificial Sequence: Synthetic oligonucleotide
cgugugugccacacuagua

SEQ ID NO: 1439960 - RNA, 19 nt, Artificial Sequence
  Description of Artificial Sequence: Synthetic oligonucleotide
cggccauccuguacccgag

SEQ ID NO: 1439961 - RNA, 19 nt, Artificial Sequence
  Description of Artificial Sequence: Synthetic oligonucleotide
ggggugcaguugcaucaaa

SEQ ID NO: 1439962 - RNA, 19 nt, Artificial Sequence
  Description of Artificial Sequence: Synthetic oligonucleotide
ccgugugugccacacuagu

SEQ ID NO: 1439963 - RNA, 19 nt, Artificial Sequence
  Description of Artificial Sequence: Synthetic oligonucleotide
ggaccggcagggacagauc

SEQ ID NO: 1439964 - RNA, 19 nt, Artificial Sequence
  Description of Artificial Sequence: Synthetic oligonucleotide
ccgagaccagcgggguagg

SEQ ID NO: 1439965 - RNA, 19 nt, Artificial Sequence
  Description of Artificial Sequence: Synthetic oligonucleotide
gggguagggcucucagcgu

SEQ ID NO: 1439966 - RNA, 19 nt, Artificial Sequence
  Description of Artificial Sequence: Synthetic oligonucleotide
ccccaauaaguuacccagu

SEQ ID NO: 1439967 - RNA, 19 nt, Artificial Sequence
  Description of Artificial Sequence: Synthetic oligonucleotide
cggggccgaacccauccug

SEQ ID NO: 1439968 - RNA, 19 nt, Artificial Sequence
  Description of Artificial Sequence: Synthetic oligonucleotide
ccacacccugugguuggag

SEQ ID NO: 1439969 - RNA, 19 nt, Artificial Sequence
  Description of Artificial Sequence: Synthetic oligonucleotide
gggccuguuggguucccau

SEQ ID NO: 1439970 - RNA, 19 nt, Artificial Sequence
  Description of Artificial Sequence: Synthetic oligonucleotide
gccgcugagccuugggguu

SEQ ID NO: 1439971 - RNA, 19 nt, Artificial Sequence
  Description of Artificial Sequence: Synthetic oligonucleotide
gcugagccuugggguuuag

SEQ ID NO: 1439972 - RNA, 19 nt, Artificial Sequence
  Description of Artificial Sequence: Synthetic oligonucleotide
cccggccauccuguacccg

SEQ ID NO: 1439973 - RNA, 19 nt, Artificial Sequence
  Description of Artificial Sequence: Synthetic oligonucleotide
ggucgacggagaucagcuu

SEQ ID NO: 1439974 - RNA, 19 nt, Artificial Sequence
  Description of Artificial Sequence: Synthetic oligonucleotide
gccacccucccuccugagu

SEQ ID NO: 1439975 - RNA, 19 nt, Artificial Sequence
  Description of Artificial Sequence: Synthetic oligonucleotide
cccuaagccgcugagccuu

SEQ ID NO: 1439976 - RNA, 19 nt, Artificial Sequence
  Description of Artificial Sequence: Synthetic oligonucleotide
cagcgggguagggcucuca

SEQ ID NO: 1439977 - RNA, 19 nt, Artificial Sequence
  Description of Artificial Sequence: Synthetic oligonucleotide
cgaucgacaccaggaagua

SEQ ID NO: 1439978 - RNA, 19 nt, Artificial Sequence
  Description of Artificial Sequence: Synthetic oligonucleotide
ccguggcucuagguccuug

SEQ ID NO: 1439979 - RNA, 19 nt, Artificial Sequence
  Description of Artificial Sequence: Synthetic oligonucleotide
guggccccggggugcaguu

SEQ ID NO: 1439980 - RNA, 19 nt, Artificial Sequence
  Description of Artificial Sequence: Synthetic oligonucleotide
cggcgaucgacaccaggaa

SEQ ID NO: 1439981 - RNA, 19 nt, Artificial Sequence
  Description of Artificial Sequence: Synthetic oligonucleotide
ccgcaugcucaggugggga

SEQ ID NO: 1439982 - RNA, 19 nt, Artificial Sequence
  Description of Artificial Sequence: Synthetic oligonucleotide
gccacacccugugguugga

SEQ ID NO: 1439983 - RNA, 19 nt, Artificial Sequence
  Description of Artificial Sequence: Synthetic oligonucleotide
cgaacccauccuggcucgc

SEQ ID NO: 1439984 - RNA, 19 nt, Artificial Sequence
  Description of Artificial Sequence: Synthetic oligonucleotide
gacuggccuggagcccagu

SEQ ID NO: 1439985 - RNA, 19 nt, Artificial Sequence
  Description of Artificial Sequence: Synthetic oligonucleotide
gcucagggucugggacagc

SEQ ID NO: 1439986 - RNA, 19 nt, Artificial Sequence
  Description of Artificial Sequence: Synthetic oligonucleotide
cgggguccgccggggaccg

SEQ ID NO: 1439987 - RNA, 19 nt, Artificial Sequence
  Description of Artificial Sequence: Synthetic oligonucleotide
gguccgccggggaccggca

SEQ ID NO: 1439988 - RNA, 19 nt, Artificial Sequence
  Description of Artificial Sequence: Synthetic oligonucleotide
cgaguccaacgcaucuccu

SEQ ID NO: 1439989 - RNA, 19 nt, Artificial Sequence
  Description of Artificial Sequence: Synthetic oligonucleotide
cguagaggaggccggcgau

SEQ ID NO: 1439990 - RNA, 19 nt, Artificial Sequence
  Description of Artificial Sequence: Synthetic oligonucleotide
ggccggcgaucgacaccag

SEQ ID NO: 1439991 - RNA, 19 nt, Artificial Sequence
  Description of Artificial Sequence: Synthetic oligonucleotide
caguucccucagccacccu

SEQ ID NO: 1439992 - RNA, 19 nt, Artificial Sequence
  Description of Artificial Sequence: Synthetic oligonucleotide
ggcugccaucacaccucaa

SEQ ID NO: 1439993 - RNA, 19 nt, Artificial Sequence
  Description of Artificial Sequence: Synthetic oligonucleotide
cggagggaggcagucacau

SEQ ID NO: 1439994 - RNA, 19 nt, Artificial Sequence
  Description of Artificial Sequence: Synthetic oligonucleotide
ccagucccacaagguaugu

SEQ ID NO: 1439995 - RNA, 19 nt, Artificial Sequence
  Description of Artificial Sequence: Synthetic oligonucleotide
gccccgagaccagcggggu

SEQ ID NO: 1439996 - RNA, 19 nt, Artificial Sequence
  Description of Artificial Sequence: Synthetic oligonucleotide
gggguccgccggggaccgg

SEQ ID NO: 1439997 - RNA, 19 nt, Artificial Sequence
  Description of Artificial Sequence: Synthetic oligonucleotide
ccagcgggguagggcucuc

SEQ ID NO: 1439998 - RNA, 19 nt, Artificial Sequence
  Description of Artificial Sequence: Synthetic oligonucleotide
ggggcugaccuggcucaau

SEQ ID NO: 1439999 - RNA, 19 nt, Artificial Sequence
  Description of Artificial Sequence: Synthetic oligonucleotide
ccccgagaccagcggggua

SEQ ID NO: 1440000 - RNA, 19 nt, Artificial Sequence
  Description of Artificial Sequence: Synthetic oligonucleotide
ccgccauguccaggggaaa

SEQ ID NO: 1440001 - RNA, 19 nt, Artificial Sequence
  Description of Artificial Sequence: Synthetic oligonucleotide
cgcugagccuugggguuua

SEQ ID NO: 1440002 - RNA, 19 nt, Artificial Sequence
  Description of Artificial Sequence: Synthetic oligonucleotide
ccgcugagccuugggguuu

SEQ ID NO: 1440003 - RNA, 19 nt, Artificial Sequence
  Description of Artificial Sequence: Synthetic oligonucleotide
cccguggcucuagguccuu

SEQ ID NO: 1440004 - RNA, 19 nt, Artificial Sequence
  Description of Artificial Sequence: Synthetic oligonucleotide
uaucuuauggucuuugccg

SEQ ID NO: 1440005 - RNA, 19 nt, Artificial Sequence
  Description of Artificial Sequence: Synthetic oligonucleotide
ucuuugauagacaaugugc

SEQ ID NO: 1440006 - RNA, 19 nt, Artificial Sequence
  Description of Artificial Sequence: Synthetic oligonucleotide
aaaauacaaggucuugugg

SEQ ID NO: 1440007 - RNA, 19 nt, Artificial Sequence
  Description of Artificial Sequence: Synthetic oligonucleotide
aaugagaaacuucccauag

SEQ ID NO: 1440008 - RNA, 19 nt, Artificial Sequence
  Description of Artificial Sequence: Synthetic oligonucleotide
aaauacaaggucuuguggu

SEQ ID NO: 1440009 - RNA, 19 nt, Artificial Sequence
  Description of Artificial Sequence: Synthetic oligonucleotide
ugagaaacuucccauagcc

SEQ ID NO: 1440010 - RNA, 19 nt, Artificial Sequence
  Description of Artificial Sequence: Synthetic oligonucleotide
aauacaaggucuugugguc

SEQ ID NO: 1440011 - RNA, 19 nt, Artificial Sequence
  Description of Artificial Sequence: Synthetic oligonucleotide
cuuugauagacaaugugcc

SEQ ID NO: 1440012 - RNA, 19 nt, Artificial Sequence
  Description of Artificial Sequence: Synthetic oligonucleotide
gacaauauaucuuaugguc

SEQ ID NO: 1440013 - RNA, 19 nt, Artificial Sequence
  Description of Artificial Sequence: Synthetic oligonucleotide
aaugccaggugcuaucggg

SEQ ID NO: 1440014 - RNA, 19 nt, Artificial Sequence
  Description of Artificial Sequence: Synthetic oligonucleotide
uacauuguuuccaucgggg

SEQ ID NO: 1440015 - RNA, 19 nt, Artificial Sequence
  Description of Artificial Sequence: Synthetic oligonucleotide
uguugaagccuacauagug

SEQ ID NO: 1440016 - RNA, 19 nt, Artificial Sequence
  Description of Artificial Sequence: Synthetic oligonucleotide
ucagguauuucucagaguu

SEQ ID NO: 1440017 - RNA, 19 nt, Artificial Sequence
  Description of Artificial Sequence: Synthetic oligonucleotide
agaucuuugauagacaaug

SEQ ID NO: 1440018 - RNA, 19 nt, Artificial Sequence
  Description of Artificial Sequence: Synthetic oligonucleotide
aagucguugcagcaacugc

SEQ ID NO: 1440019 - RNA, 19 nt, Artificial Sequence
  Description of Artificial Sequence: Synthetic oligonucleotide
uccgucaaaauguaaaaga

SEQ ID NO: 1440020 - RNA, 19 nt, Artificial Sequence
  Description of Artificial Sequence: Synthetic oligonucleotide
aagacaaagggcuccacgu

SEQ ID NO: 1440021 - RNA, 19 nt, Artificial Sequence
  Description of Artificial Sequence: Synthetic oligonucleotide
uacaguacucuccagcuug

SEQ ID NO: 1440022 - RNA, 19 nt, Artificial Sequence
  Description of Artificial Sequence: Synthetic oligonucleotide
uuucgagugaucuugcgcu

SEQ ID NO: 1440023 - RNA, 19 nt, Artificial Sequence
  Description of Artificial Sequence: Synthetic oligonucleotide
uggucauucacucuagacu

SEQ ID NO: 1440024 - RNA, 19 nt, Artificial Sequence
  Description of Artificial Sequence: Synthetic oligonucleotide
uacauagaauucuucucgg

SEQ ID NO: 1440025 - RNA, 19 nt, Artificial Sequence
  Description of Artificial Sequence: Synthetic oligonucleotide
uuucauaguucccaaugug

SEQ ID NO: 1440026 - RNA, 19 nt, Artificial Sequence
  Description of Artificial Sequence: Synthetic oligonucleotide
uucuguacgugguugaucu

SEQ ID NO: 1440027 - RNA, 19 nt, Artificial Sequence
  Description of Artificial Sequence: Synthetic oligonucleotide
auagccacgccucugguag

SEQ ID NO: 1440028 - RNA, 19 nt, Artificial Sequence
  Description of Artificial Sequence: Synthetic oligonucleotide
acauaguguacauagaauu

SEQ ID NO: 1440029 - RNA, 19 nt, Artificial Sequence
  Description of Artificial Sequence: Synthetic oligonucleotide
uggcugagaucuuugauag

SEQ ID NO: 1440030 - RNA, 19 nt, Artificial Sequence
  Description of Artificial Sequence: Synthetic oligonucleotide
ucuuggucagugcuagucg

SEQ ID NO: 1440031 - RNA, 19 nt, Artificial Sequence
  Description of Artificial Sequence: Synthetic oligonucleotide
aacaggucuguacacauau

SEQ ID NO: 1440032 - RNA, 19 nt, Artificial Sequence
  Description of Artificial Sequence: Synthetic oligonucleotide
guuucuccgauuuccacgg

SEQ ID NO: 1440033 - RNA, 19 nt, Artificial Sequence
  Description of Artificial Sequence: Synthetic oligonucleotide
uugauagacaaugugcccc

SEQ ID NO: 1440034 - RNA, 19 nt, Artificial Sequence
  Description of Artificial Sequence: Synthetic oligonucleotide
aggcaguacucgcagagcc

SEQ ID NO: 1440035 - RNA, 19 nt, Artificial Sequence
  Description of Artificial Sequence: Synthetic oligonucleotide
acaaaacaggucuguacac

SEQ ID NO: 1440036 - RNA, 19 nt, Artificial Sequence
  Description of Artificial Sequence: Synthetic oligonucleotide
uacgugguugaucucauca

SEQ ID NO: 1440037 - RNA, 19 nt, Artificial Sequence
  Description of Artificial Sequence: Synthetic oligonucleotide
caaaauacaaggucuugug

SEQ ID NO: 1440038 - RNA, 19 nt, Artificial Sequence
  Description of Artificial Sequence: Synthetic oligonucleotide
uccaggaaaagcuuagcca

SEQ ID NO: 1440039 - RNA, 19 nt, Artificial Sequence
  Description of Artificial Sequence: Synthetic oligonucleotide
ugauagacaaugugccccg

SEQ ID NO: 1440040 - RNA, 19 nt, Artificial Sequence
  Description of Artificial Sequence: Synthetic oligonucleotide
aaaacaggucuguacacau

SEQ ID NO: 1440041 - RNA, 19 nt, Artificial Sequence
  Description of Artificial Sequence: Synthetic oligonucleotide
uuugauagacaaugugccc

SEQ ID NO: 1440042 - RNA, 19 nt, Artificial Sequence
  Description of Artificial Sequence: Synthetic oligonucleotide
uucacuuuggugaucgccu

SEQ ID NO: 1440043 - RNA, 19 nt, Artificial Sequence
  Description of Artificial Sequence: Synthetic oligonucleotide
ugagaucuuugauagacaa

SEQ ID NO: 1440044 - RNA, 19 nt, Artificial Sequence
  Description of Artificial Sequence: Synthetic oligonucleotide
augagaaacuucccauagc

SEQ ID NO: 1440045 - RNA, 19 nt, Artificial Sequence
  Description of Artificial Sequence: Synthetic oligonucleotide
cucagaguucuuuugcacg

SEQ ID NO: 1440046 - RNA, 19 nt, Artificial Sequence
  Description of Artificial Sequence: Synthetic oligonucleotide
uaggugguuucuuauacug

SEQ ID NO: 1440047 - RNA, 19 nt, Artificial Sequence
  Description of Artificial Sequence: Synthetic oligonucleotide
ugcauaggucuucuguacg

SEQ ID NO: 1440048 - RNA, 19 nt, Artificial Sequence
  Description of Artificial Sequence: Synthetic oligonucleotide
ugaggcaguacucgcagag

SEQ ID NO: 1440049 - RNA, 19 nt, Artificial Sequence
  Description of Artificial Sequence: Synthetic oligonucleotide
uuuggugaucgccucaugu

SEQ ID NO: 1440050 - RNA, 19 nt, Artificial Sequence
  Description of Artificial Sequence: Synthetic oligonucleotide
cauaguguacauagaauuc

SEQ ID NO: 1440051 - RNA, 19 nt, Artificial Sequence
  Description of Artificial Sequence: Synthetic oligonucleotide
ggcuacauuguuuccaucg

SEQ ID NO: 1440052 - RNA, 19 nt, Artificial Sequence
  Description of Artificial Sequence: Synthetic oligonucleotide
agagacgcggcccggagac

SEQ ID NO: 1440053 - RNA, 19 nt, Artificial Sequence
  Description of Artificial Sequence: Synthetic oligonucleotide
uuuugguuucgagugaucu

SEQ ID NO: 1440054 - RNA, 19 nt, Artificial Sequence
  Description of Artificial Sequence: Synthetic oligonucleotide
agucgguucuuguccaccc

SEQ ID NO: 1440055 - RNA, 19 nt, Artificial Sequence
  Description of Artificial Sequence: Synthetic oligonucleotide
uacauaguguacauagaau

SEQ ID NO: 1440056 - RNA, 19 nt, Artificial Sequence
  Description of Artificial Sequence: Synthetic oligonucleotide
gccuacauaguguacauag

SEQ ID NO: 1440057 - RNA, 19 nt, Artificial Sequence
  Description of Artificial Sequence: Synthetic oligonucleotide
cuuggucagugcuagucgg

SEQ ID NO: 1440058 - RNA, 19 nt, Artificial Sequence
  Description of Artificial Sequence: Synthetic oligonucleotide
auaguguacauagaauucu

SEQ ID NO: 1440059 - RNA, 19 nt, Artificial Sequence
  Description of Artificial Sequence: Synthetic oligonucleotide
ucucgcaggaucucuagca

SEQ ID NO: 1440060 - RNA, 19 nt, Artificial Sequence
  Description of Artificial Sequence: Synthetic oligonucleotide
agagccuacaguacucucc

SEQ ID NO: 1440061 - RNA, 19 nt, Artificial Sequence
  Description of Artificial Sequence: Synthetic oligonucleotide
ucuuauacugggcacuuuu

SEQ ID NO: 1440062 - RNA, 19 nt, Artificial Sequence
  Description of Artificial Sequence: Synthetic oligonucleotide
uauuuacagguuagaggcc

SEQ ID NO: 1440063 - RNA, 19 nt, Artificial Sequence
  Description of Artificial Sequence: Synthetic oligonucleotide
uacucgcagagccaaagcu

SEQ ID NO: 1440064 - RNA, 19 nt, Artificial Sequence
  Description of Artificial Sequence: Synthetic oligonucleotide
acaauauaucuuauggucu

SEQ ID NO: 1440065 - RNA, 19 nt, Artificial Sequence
  Description of Artificial Sequence: Synthetic oligonucleotide
aaauaccaggcaucaauuu

SEQ ID NO: 1440066 - RNA, 19 nt, Artificial Sequence
  Description of Artificial Sequence: Synthetic oligonucleotide
cuacauuguuuccaucggg

SEQ ID NO: 1440067 - RNA, 19 nt, Artificial Sequence
  Description of Artificial Sequence: Synthetic oligonucleotide
ucuccgauuuccacgguga

SEQ ID NO: 1440068 - RNA, 19 nt, Artificial Sequence
  Description of Artificial Sequence: Synthetic oligonucleotide
agucguugcagcaacugcg

SEQ ID NO: 1440069 - RNA, 19 nt, Artificial Sequence
  Description of Artificial Sequence: Synthetic oligonucleotide
uucugguucgccacgcgcc

SEQ ID NO: 1440070 - RNA, 19 nt, Artificial Sequence
  Description of Artificial Sequence: Synthetic oligonucleotide
uuccgucaaaauguaaaag

SEQ ID NO: 1440071 - RNA, 19 nt, Artificial Sequence
  Description of Artificial Sequence: Synthetic oligonucleotide
aguacucuccagcuuggag

SEQ ID NO: 1440072 - RNA, 19 nt, Artificial Sequence
  Description of Artificial Sequence: Synthetic oligonucleotide
uugcgauagaucuccuucc

SEQ ID NO: 1440073 - RNA, 19 nt, Artificial Sequence
  Description of Artificial Sequence: Synthetic oligonucleotide
ugaaugccaggugcuaucg

SEQ ID NO: 1440074 - RNA, 19 nt, Artificial Sequence
  Description of Artificial Sequence: Synthetic oligonucleotide
aucuuauggucuuugccgu

SEQ ID NO: 1440075 - RNA, 19 nt, Artificial Sequence
  Description of Artificial Sequence: Synthetic oligonucleotide
ccaggaaaagcuuagccag

SEQ ID NO: 1440076 - RNA, 19 nt, Artificial Sequence
  Description of Artificial Sequence: Synthetic oligonucleotide
ugcgauagaucuccuuccc

SEQ ID NO: 1440077 - RNA, 19 nt, Artificial Sequence
  Description of Artificial Sequence: Synthetic oligonucleotide
gaagccuacauaguguaca

SEQ ID NO: 1440078 - RNA, 19 nt, Artificial Sequence
  Description of Artificial Sequence: Synthetic oligonucleotide
ucugguucgccacgcgccg

SEQ ID NO: 1440079 - RNA, 19 nt, Artificial Sequence
  Description of Artificial Sequence: Synthetic oligonucleotide
gguuagaggccagaaaacg

SEQ ID NO: 1440080 - RNA, 19 nt, Artificial Sequence
  Description of Artificial Sequence: Synthetic oligonucleotide
cuugaggcaguacucgcag

SEQ ID NO: 1440081 - RNA, 19 nt, Artificial Sequence
  Description of Artificial Sequence: Synthetic oligonucleotide
ugccuaucuacuuccguca

SEQ ID NO: 1440082 - RNA, 19 nt, Artificial Sequence
  Description of Artificial Sequence: Synthetic oligonucleotide
uuuggcugagaucuuugau

SEQ ID NO: 1440083 - RNA, 19 nt, Artificial Sequence
  Description of Artificial Sequence: Synthetic oligonucleotide
uugccuaucuacuuccguc

SEQ ID NO: 1440084 - RNA, 19 nt, Artificial Sequence
  Description of Artificial Sequence: Synthetic oligonucleotide
uucucggcccuccugguca

SEQ ID NO: 1440085 - RNA, 19 nt, Artificial Sequence
  Description of Artificial Sequence: Synthetic oligonucleotide
cuugcgcucaggcugcucc

SEQ ID NO: 1440086 - RNA, 19 nt, Artificial Sequence
  Description of Artificial Sequence: Synthetic oligonucleotide
guacuugaggcaguacucg

SEQ ID NO: 1440087 - RNA, 19 nt, Artificial Sequence
  Description of Artificial Sequence: Synthetic oligonucleotide
acucacuucuuagaaagcu

SEQ ID NO: 1440088 - RNA, 19 nt, Artificial Sequence
  Description of Artificial Sequence: Synthetic oligonucleotide
agacaaugugccccggaag

SEQ ID NO: 1440089 - RNA, 19 nt, Artificial Sequence
  Description of Artificial Sequence: Synthetic oligonucleotide
gacugccgcauuuuccccg

SEQ ID NO: 1440090 - RNA, 19 nt, Artificial Sequence
  Description of Artificial Sequence: Synthetic oligonucleotide
uucuccgauuuccacggug

SEQ ID NO: 1440091 - RNA, 19 nt, Artificial Sequence
  Description of Artificial Sequence: Synthetic oligonucleotide
guacguuucuccgauuucc

SEQ ID NO: 1440092 - RNA, 19 nt, Artificial Sequence
  Description of Artificial Sequence: Synthetic oligonucleotide
uagacaaugugccccggaa

SEQ ID NO: 1440093 - RNA, 19 nt, Artificial Sequence
  Description of Artificial Sequence: Synthetic oligonucleotide
agcucacucagguauuucu

SEQ ID NO: 1440094 - RNA, 19 nt, Artificial Sequence
  Description of Artificial Sequence: Synthetic oligonucleotide
uuuccacggugacuucugg

SEQ ID NO: 1440095 - RNA, 19 nt, Artificial Sequence
  Description of Artificial Sequence: Synthetic oligonucleotide
aaugugggccccuugccua

SEQ ID NO: 1440096 - RNA, 19 nt, Artificial Sequence
  Description of Artificial Sequence: Synthetic oligonucleotide
auauaucuuauggucuuug

SEQ ID NO: 1440097 - RNA, 19 nt, Artificial Sequence
  Description of Artificial Sequence: Synthetic oligonucleotide
aguguacauagaauucuuc

SEQ ID NO: 1440098 - RNA, 19 nt, Artificial Sequence
  Description of Artificial Sequence: Synthetic oligonucleotide
acacauauuuacagguuag

SEQ ID NO: 1440099 - RNA, 19 nt, Artificial Sequence
  Description of Artificial Sequence: Synthetic oligonucleotide
cuuauggucuuugccgucc

SEQ ID NO: 1440100 - RNA, 19 nt, Artificial Sequence
  Description of Artificial Sequence: Synthetic oligonucleotide
uacguuucuccgauuucca

SEQ ID NO: 1440101 - RNA, 19 nt, Artificial Sequence
  Description of Artificial Sequence: Synthetic oligonucleotide
auaccaggcaucaauuuca

SEQ ID NO: 1440102 - RNA, 19 nt, Artificial Sequence
  Description of Artificial Sequence: Synthetic oligonucleotide
aagccuacauaguguacau

SEQ ID NO: 1440103 - RNA, 19 nt, Artificial Sequence
  Description of Artificial Sequence: Synthetic oligonucleotide
cacggugacuucugguucg

SEQ ID NO: 1440104 - RNA, 19 nt, Artificial Sequence
  Description of Artificial Sequence: Synthetic oligonucleotide
cuucccauagccacgccuc

SEQ ID NO: 1440105 - RNA, 19 nt, Artificial Sequence
  Description of Artificial Sequence: Synthetic oligonucleotide
augaccaguagcuucggua

SEQ ID NO: 1440106 - RNA, 19 nt, Artificial Sequence
  Description of Artificial Sequence: Synthetic oligonucleotide
agugcuagucgguucuugu

SEQ ID NO: 1440107 - RNA, 19 nt, Artificial Sequence
  Description of Artificial Sequence: Synthetic oligonucleotide
uucgguagcugaguuuucc

SEQ ID NO: 1440108 - RNA, 19 nt, Artificial Sequence
  Description of Artificial Sequence: Synthetic oligonucleotide
agguuagaggccagaaaac

SEQ ID NO: 1440109 - RNA, 19 nt, Artificial Sequence
  Description of Artificial Sequence: Synthetic oligonucleotide
gaagucguugcagcaacug

SEQ ID NO: 1440110 - RNA, 19 nt, Artificial Sequence
  Description of Artificial Sequence: Synthetic oligonucleotide
acagguacguuucuccgau

SEQ ID NO: 1440111 - RNA, 19 nt, Artificial Sequence
  Description of Artificial Sequence: Synthetic oligonucleotide
gaguccacuguaauaggug

SEQ ID NO: 1440112 - RNA, 19 nt, Artificial Sequence
  Description of Artificial Sequence: Synthetic oligonucleotide
cucgacugccgcauuuucc

SEQ ID NO: 1440113 - RNA, 19 nt, Artificial Sequence
  Description of Artificial Sequence: Synthetic oligonucleotide
gaaugccaggugcuaucgg

SEQ ID NO: 1440114 - RNA, 19 nt, Artificial Sequence
  Description of Artificial Sequence: Synthetic oligonucleotide
gacaaugugccccggaagu

SEQ ID NO: 1440115 - RNA, 19 nt, Artificial Sequence
  Description of Artificial Sequence: Synthetic oligonucleotide
aaugugccccggaagucuc

SEQ ID NO: 1440116 - RNA, 19 nt, Artificial Sequence
  Description of Artificial Sequence: Synthetic oligonucleotide
ugccccggaagucucgcag

SEQ ID NO: 1440117 - RNA, 19 nt, Artificial Sequence
  Description of Artificial Sequence: Synthetic oligonucleotide
ggucauuuggcugagaucu

SEQ ID NO: 1440118 - RNA, 19 nt, Artificial Sequence
  Description of Artificial Sequence: Synthetic oligonucleotide
ugaagccuacauaguguac

SEQ ID NO: 1440119 - RNA, 19 nt, Artificial Sequence
  Description of Artificial Sequence: Synthetic oligonucleotide
agaguucuuuugcacggca

SEQ ID NO: 1440120 - RNA, 19 nt, Artificial Sequence
  Description of Artificial Sequence: Synthetic oligonucleotide
uucccauagucuucuggga

SEQ ID NO: 1440121 - RNA, 19 nt, Artificial Sequence
  Description of Artificial Sequence: Synthetic oligonucleotide
uguccacccauucguccag

SEQ ID NO: 1440122 - RNA, 19 nt, Artificial Sequence
  Description of Artificial Sequence: Synthetic oligonucleotide
uuugguuucgagugaucuu

SEQ ID NO: 1440123 - RNA, 19 nt, Artificial Sequence
  Description of Artificial Sequence: Synthetic oligonucleotide
ucguccagucgccuguuga

SEQ ID NO: 1440124 - RNA, 19 nt, Artificial Sequence
  Description of Artificial Sequence: Synthetic oligonucleotide
caggcgacucacuucuuag

SEQ ID NO: 1440125 - RNA, 19 nt, Artificial Sequence
  Description of Artificial Sequence: Synthetic oligonucleotide
uuagaaagcuugacuuguu

SEQ ID NO: 1440126 - RNA, 19 nt, Artificial Sequence
  Description of Artificial Sequence: Synthetic oligonucleotide
ugacacagaucacgugcug

SEQ ID NO: 1440127 - RNA, 19 nt, Artificial Sequence
  Description of Artificial Sequence: Synthetic oligonucleotide
cacuucauacacagagaug

SEQ ID NO: 1440128 - RNA, 19 nt, Artificial Sequence
  Description of Artificial Sequence: Synthetic oligonucleotide
agucucgcaggaucucuag

SEQ ID NO: 1440129 - RNA, 19 nt, Artificial Sequence
  Description of Artificial Sequence: Synthetic oligonucleotide
cuucugguucgccacgcgc

SEQ ID NO: 1440130 - RNA, 19 nt, Artificial Sequence
  Description of Artificial Sequence: Synthetic oligonucleotide
auuuuccccgggcccgggc

SEQ ID NO: 1440131 - RNA, 19 nt, Artificial Sequence
  Description of Artificial Sequence: Synthetic oligonucleotide
agacgcggcccggagaccc

SEQ ID NO: 1440132 - RNA, 19 nt, Artificial Sequence
  Description of Artificial Sequence: Synthetic oligonucleotide
caauguggaucuugucuac

SEQ ID NO: 1440133 - RNA, 19 nt, Artificial Sequence
  Description of Artificial Sequence: Synthetic oligonucleotide
uguacgugguugaucucau

SEQ ID NO: 1440134 - RNA, 19 nt, Artificial Sequence
  Description of Artificial Sequence: Synthetic oligonucleotide
uuauggucuuugccgucca

SEQ ID NO: 1440135 - RNA, 19 nt, Artificial Sequence
  Description of Artificial Sequence: Synthetic oligonucleotide
auagacaaugugccccgga

SEQ ID NO: 1440136 - RNA, 19 nt, Artificial Sequence
  Description of Artificial Sequence: Synthetic oligonucleotide
acaaugugccccggaaguc

SEQ ID NO: 1440137 - RNA, 19 nt, Artificial Sequence
  Description of Artificial Sequence: Synthetic oligonucleotide
cuuccgucaaaauguaaaa

SEQ ID NO: 1440138 - RNA, 19 nt, Artificial Sequence
  Description of Artificial Sequence: Synthetic oligonucleotide
cuaucuacuuccgucaaaa

SEQ ID NO: 1440139 - RNA, 19 nt, Artificial Sequence
  Description of Artificial Sequence: Synthetic oligonucleotide
agguacguuucuccgauuu

SEQ ID NO: 1440140 - RNA, 19 nt, Artificial Sequence
  Description of Artificial Sequence: Synthetic oligonucleotide
gguuucuuauacugggcac

SEQ ID NO: 1440141 - RNA, 19 nt, Artificial Sequence
  Description of Artificial Sequence: Synthetic oligonucleotide
gucguugcagcaacugcgg

SEQ ID NO: 1440142 - RNA, 19 nt, Artificial Sequence
  Description of Artificial Sequence: Synthetic oligonucleotide
ugccaggugcuaucgggcc

SEQ ID NO: 1440143 - RNA, 19 nt, Artificial Sequence
  Description of Artificial Sequence: Synthetic oligonucleotide
gugagaaauaccaggcauc

SEQ ID NO: 1440144 - RNA, 19 nt, Artificial Sequence
  Description of Artificial Sequence: Synthetic oligonucleotide
ucuaccagcuuagguguga

SEQ ID NO: 1440145 - RNA, 19 nt, Artificial Sequence
  Description of Artificial Sequence: Synthetic oligonucleotide
ugguucgccacgcgccggg

SEQ ID NO: 1440146 - RNA, 19 nt, Artificial Sequence
  Description of Artificial Sequence: Synthetic oligonucleotide
uuggucagugcuagucggu

SEQ ID NO: 1440147 - RNA, 19 nt, Artificial Sequence
  Description of Artificial Sequence: Synthetic oligonucleotide
agcaagacccaugaccagu

SEQ ID NO: 1440148 - RNA, 19 nt, Artificial Sequence
  Description of Artificial Sequence: Synthetic oligonucleotide
gauagacaaugugccccgg

SEQ ID NO: 1440149 - RNA, 19 nt, Artificial Sequence
  Description of Artificial Sequence: Synthetic oligonucleotide
gagauguugcucuugcgau

SEQ ID NO: 1440150 - RNA, 19 nt, Artificial Sequence
  Description of Artificial Sequence: Synthetic oligonucleotide
agaguccacuguaauaggu

SEQ ID NO: 1440151 - RNA, 19 nt, Artificial Sequence
  Description of Artificial Sequence: Synthetic oligonucleotide
uagcaagacccaugaccag

SEQ ID NO: 1440152 - RNA, 19 nt, Artificial Sequence
  Description of Artificial Sequence: Synthetic oligonucleotide
gucauucacucuagacugg

SEQ ID NO: 1440153 - RNA, 19 nt, Artificial Sequence
  Description of Artificial Sequence: Synthetic oligonucleotide
ucuuauggucuuugccguc

SEQ ID NO: 1440154 - RNA, 19 nt, Artificial Sequence
  Description of Artificial Sequence: Synthetic oligonucleotide
gguuucgagugaucuugcg

SEQ ID NO: 1440155 - RNA, 19 nt, Artificial Sequence
  Description of Artificial Sequence: Synthetic oligonucleotide
gcacagguacguuucuccg

SEQ ID NO: 1440156 - RNA, 19 nt, Artificial Sequence
  Description of Artificial Sequence: Synthetic oligonucleotide
uugcgcucaggcugcuccg

SEQ ID NO: 1440157 - RNA, 19 nt, Artificial Sequence
  Description of Artificial Sequence: Synthetic oligonucleotide
cauaggucuucuguacgug

SEQ ID NO: 1440158 - RNA, 19 nt, Artificial Sequence
  Description of Artificial Sequence: Synthetic oligonucleotide
gcucuugcgauagaucucc

SEQ ID NO: 1440159 - RNA, 19 nt, Artificial Sequence
  Description of Artificial Sequence: Synthetic oligonucleotide
acgugguugaucucaucau

SEQ ID NO: 1440160 - RNA, 19 nt, Artificial Sequence
  Description of Artificial Sequence: Synthetic oligonucleotide
caaaacaggucuguacaca

SEQ ID NO: 1440161 - RNA, 19 nt, Artificial Sequence
  Description of Artificial Sequence: Synthetic oligonucleotide
ucggcggagagacgcggcc

SEQ ID NO: 1440162 - RNA, 19 nt, Artificial Sequence
  Description of Artificial Sequence: Synthetic oligonucleotide
uacuuccgucaaaauguaa

SEQ ID NO: 1440163 - RNA, 19 nt, Artificial Sequence
  Description of Artificial Sequence: Synthetic oligonucleotide
caaugagaaacuucccaua

SEQ ID NO: 1440164 - RNA, 19 nt, Artificial Sequence
  Description of Artificial Sequence: Synthetic oligonucleotide
ugccgcauuuuccccgggc

SEQ ID NO: 1440165 - RNA, 19 nt, Artificial Sequence
  Description of Artificial Sequence: Synthetic oligonucleotide
ucccgaagucguugcagca

SEQ ID NO: 1440166 - RNA, 19 nt, Artificial Sequence
  Description of Artificial Sequence: Synthetic oligonucleotide
agauguugcucuugcgaua

SEQ ID NO: 1440167 - RNA, 19 nt, Artificial Sequence
  Description of Artificial Sequence: Synthetic oligonucleotide
acaguacucuccagcuugg

SEQ ID NO: 1440168 - RNA, 19 nt, Artificial Sequence
  Description of Artificial Sequence: Synthetic oligonucleotide
uagucgguucuuguccacc

SEQ ID NO: 1440169 - RNA, 19 nt, Artificial Sequence
  Description of Artificial Sequence: Synthetic oligonucleotide
uaccaggcaucaauuucau

SEQ ID NO: 1440170 - RNA, 19 nt, Artificial Sequence
  Description of Artificial Sequence: Synthetic oligonucleotide
ucacucuagacuggaucac

SEQ ID NO: 1440171 - RNA, 19 nt, Artificial Sequence
  Description of Artificial Sequence: Synthetic oligonucleotide
uccgauuuccacggugacu

SEQ ID NO: 1440172 - RNA, 19 nt, Artificial Sequence
  Description of Artificial Sequence: Synthetic oligonucleotide
agacccggcaggccccucg

SEQ ID NO: 1440173 - RNA, 19 nt, Artificial Sequence
  Description of Artificial Sequence: Synthetic oligonucleotide
uguugcucccugugccgcc

SEQ ID NO: 1440174 - RNA, 19 nt, Artificial Sequence
  Description of Artificial Sequence: Synthetic oligonucleotide
ugaccauguugagggacug

SEQ ID NO: 1440175 - RNA, 19 nt, Artificial Sequence
  Description of Artificial Sequence: Synthetic oligonucleotide
auuuccacggugacuucug

SEQ ID NO: 1440176 - RNA, 19 nt, Artificial Sequence
  Description of Artificial Sequence: Synthetic oligonucleotide
uucccauagccacgccucu

SEQ ID NO: 1440177 - RNA, 19 nt, Artificial Sequence
  Description of Artificial Sequence: Synthetic oligonucleotide
ucgagugaucuugcgcuca

SEQ ID NO: 1440178 - RNA, 19 nt, Artificial Sequence
  Description of Artificial Sequence: Synthetic oligonucleotide
cuguacgugguugaucuca

SEQ ID NO: 1440179 - RNA, 19 nt, Artificial Sequence
  Description of Artificial Sequence: Synthetic oligonucleotide
guugaagccuacauagugu

SEQ ID NO: 1440180 - RNA, 19 nt, Artificial Sequence
  Description of Artificial Sequence: Synthetic oligonucleotide
aggcgacucacuucuuaga

SEQ ID NO: 1440181 - RNA, 19 nt, Artificial Sequence
  Description of Artificial Sequence: Synthetic oligonucleotide
gaaauaccaggcaucaauu

SEQ ID NO: 1440182 - RNA, 19 nt, Artificial Sequence
  Description of Artificial Sequence: Synthetic oligonucleotide
ggaaaagcuuagccagcag

SEQ ID NO: 1440183 - RNA, 19 nt, Artificial Sequence
  Description of Artificial Sequence: Synthetic oligonucleotide
ggugaucgccucauguucc

SEQ ID NO: 1440184 - RNA, 19 nt, Artificial Sequence
  Description of Artificial Sequence: Synthetic oligonucleotide
gaggcaguacucgcagagc

SEQ ID NO: 1440185 - RNA, 19 nt, Artificial Sequence
  Description of Artificial Sequence: Synthetic oligonucleotide
caacugcggcuguugcucc

SEQ ID NO: 1440186 - RNA, 19 nt, Artificial Sequence
  Description of Artificial Sequence: Synthetic oligonucleotide
cacagaucacgugcuggcc

SEQ ID NO: 1440187 - RNA, 19 nt, Artificial Sequence
  Description of Artificial Sequence: Synthetic oligonucleotide
acaggcgacucacuucuua

SEQ ID NO: 1440188 - RNA, 19 nt, Artificial Sequence
  Description of Artificial Sequence: Synthetic oligonucleotide
acggugacuucugguucgc

SEQ ID NO: 1440189 - RNA, 19 nt, Artificial Sequence
  Description of Artificial Sequence: Synthetic oligonucleotide
gagugaucuugcgcucagg

SEQ ID NO: 1440190 - RNA, 19 nt, Artificial Sequence
  Description of Artificial Sequence: Synthetic oligonucleotide
uagcuucgguagcugaguu

SEQ ID NO: 1440191 - RNA, 19 nt, Artificial Sequence
  Description of Artificial Sequence: Synthetic oligonucleotide
gucagugcuagucgguucu

SEQ ID NO: 1440192 - RNA, 19 nt, Artificial Sequence
  Description of Artificial Sequence: Synthetic oligonucleotide
gugcuagucgguucuuguc

SEQ ID NO: 1440193 - RNA, 19 nt, Artificial Sequence
  Description of Artificial Sequence: Synthetic oligonucleotide
cagcaacugcggcuguugc

SEQ ID NO: 1440194 - RNA, 19 nt, Artificial Sequence
  Description of Artificial Sequence: Synthetic oligonucleotide
cacagguacguuucuccga

SEQ ID NO: 1440195 - RNA, 19 nt, Artificial Sequence
  Description of Artificial Sequence: Synthetic oligonucleotide
guuccucuaccagcuuagg

SEQ ID NO: 1440196 - RNA, 19 nt, Artificial Sequence
  Description of Artificial Sequence: Synthetic oligonucleotide
ugugccccggaagucucgc

SEQ ID NO: 1440197 - RNA, 19 nt, Artificial Sequence
  Description of Artificial Sequence: Synthetic oligonucleotide
agacacagguucugacaau

SEQ ID NO: 1440198 - RNA, 19 nt, Artificial Sequence
  Description of Artificial Sequence: Synthetic oligonucleotide
agcucauaacugaaagcaa

SEQ ID NO: 1440199 - RNA, 19 nt, Artificial Sequence
  Description of Artificial Sequence: Synthetic oligonucleotide
gcgguagcucuucucauac

SEQ ID NO: 1440200 - RNA, 19 nt, Artificial Sequence
  Description of Artificial Sequence: Synthetic oligonucleotide
uuucuccgauuuccacggu

SEQ ID NO: 1440201 - RNA, 19 nt, Artificial Sequence
  Description of Artificial Sequence: Synthetic oligonucleotide
uggaucacuucugcugaau

SEQ ID NO: 1440202 - RNA, 19 nt, Artificial Sequence
  Description of Artificial Sequence: Synthetic oligonucleotide
cucuaccagcuuaggugug

SEQ ID NO: 1440203 - RNA, 19 nt, Artificial Sequence
  Description of Artificial Sequence: Synthetic oligonucleotide
cuccgauuuccacggugac

SEQ ID NO: 1440204 - RNA, 19 nt, Artificial Sequence
  Description of Artificial Sequence: Synthetic oligonucleotide
agcuuagccagcagacaca

SEQ ID NO: 1440205 - RNA, 19 nt, Artificial Sequence
  Description of Artificial Sequence: Synthetic oligonucleotide
ccaauguggaucuugucua

SEQ ID NO: 1440206 - RNA, 19 nt, Artificial Sequence
  Description of Artificial Sequence: Synthetic oligonucleotide
cacagguucugacaauaua

SEQ ID NO: 1440207 - RNA, 19 nt, Artificial Sequence
  Description of Artificial Sequence: Synthetic oligonucleotide
gguacguuucuccgauuuc

SEQ ID NO: 1440208 - RNA, 19 nt, Artificial Sequence
  Description of Artificial Sequence: Synthetic oligonucleotide
gagagacgcggcccggaga

SEQ ID NO: 1440209 - RNA, 19 nt, Artificial Sequence
  Description of Artificial Sequence: Synthetic oligonucleotide
cuggagagccuacaguacu

SEQ ID NO: 1440210 - RNA, 19 nt, Artificial Sequence
  Description of Artificial Sequence: Synthetic oligonucleotide
ggggucggcggagagacgc

SEQ ID NO: 1440211 - RNA, 19 nt, Artificial Sequence
  Description of Artificial Sequence: Synthetic oligonucleotide
aagucucgcaggaucucua

SEQ ID NO: 1440212 - RNA, 19 nt, Artificial Sequence
  Description of Artificial Sequence: Synthetic oligonucleotide
gugaucuugcgcucaggcu

SEQ ID NO: 1440213 - RNA, 19 nt, Artificial Sequence
  Description of Artificial Sequence: Synthetic oligonucleotide
cuucgguagcugaguuuuc

SEQ ID NO: 1440214 - RNA, 19 nt, Artificial Sequence
  Description of Artificial Sequence: Synthetic oligonucleotide
ucgccuguugaagccuaca

SEQ ID NO: 1440215 - RNA, 19 nt, Artificial Sequence
  Description of Artificial Sequence: Synthetic oligonucleotide
cucgcaggaucucuagcaa

SEQ ID NO: 1440216 - RNA, 19 nt, Artificial Sequence
  Description of Artificial Sequence: Synthetic oligonucleotide
ccuugccuaucuacuuccg

SEQ ID NO: 1440217 - RNA, 19 nt, Artificial Sequence
  Description of Artificial Sequence: Synthetic oligonucleotide
ccggaagucucgcaggauc

SEQ ID NO: 1440218 - RNA, 19 nt, Artificial Sequence
  Description of Artificial Sequence: Synthetic oligonucleotide
gugcuaucgggccgccggc

SEQ ID NO: 1440219 - RNA, 19 nt, Artificial Sequence
  Description of Artificial Sequence: Synthetic oligonucleotide
cuucucggcccuccugguc

SEQ ID NO: 1440220 - RNA, 19 nt, Artificial Sequence
  Description of Artificial Sequence: Synthetic oligonucleotide
ggcuccacgucaaaauaca

SEQ ID NO: 1440221 - RNA, 19 nt, Artificial Sequence
  Description of Artificial Sequence: Synthetic oligonucleotide
ucgccacgcgccggggucg

SEQ ID NO: 1440222 - RNA, 19 nt, Artificial Sequence
  Description of Artificial Sequence: Synthetic oligonucleotide
ccuacauaguguacauaga

SEQ ID NO: 1440223 - RNA, 19 nt, Artificial Sequence
  Description of Artificial Sequence: Synthetic oligonucleotide
cacuuuggugaucgccuca

SEQ ID NO: 1440224 - RNA, 19 nt, Artificial Sequence
  Description of Artificial Sequence: Synthetic oligonucleotide
ugcuaucgggccgccggca

SEQ ID NO: 1440225 - RNA, 19 nt, Artificial Sequence
  Description of Artificial Sequence: Synthetic oligonucleotide
ggucagugcuagucgguuc

SEQ ID NO: 1440226 - RNA, 19 nt, Artificial Sequence
  Description of Artificial Sequence: Synthetic oligonucleotide
cagugcuagucgguucuug

SEQ ID NO: 1440227 - RNA, 19 nt, Artificial Sequence
  Description of Artificial Sequence: Synthetic oligonucleotide
uucuuauacugggcacuuu

SEQ ID NO: 1440228 - RNA, 19 nt, Artificial Sequence
  Description of Artificial Sequence: Synthetic oligonucleotide
cauagccacgccucuggua

SEQ ID NO: 1440229 - RNA, 19 nt, Artificial Sequence
  Description of Artificial Sequence: Synthetic oligonucleotide
gccccggaagucucgcagg

SEQ ID NO: 1440230 - RNA, 19 nt, Artificial Sequence
  Description of Artificial Sequence: Synthetic oligonucleotide
guacgugguugaucucauc

SEQ ID NO: 1440231 - RNA, 19 nt, Artificial Sequence
  Description of Artificial Sequence: Synthetic oligonucleotide
cacgcgccggggucggcgg

SEQ ID NO: 1440232 - RNA, 19 nt, Artificial Sequence
  Description of Artificial Sequence: Synthetic oligonucleotide
ucggcccuccuggucauuc

SEQ ID NO: 1440233 - RNA, 19 nt, Artificial Sequence
  Description of Artificial Sequence: Synthetic oligonucleotide
gagaucuuugauagacaau

SEQ ID NO: 1440234 - RNA, 19 nt, Artificial Sequence
  Description of Artificial Sequence: Synthetic oligonucleotide
cuugccuaucuacuuccgu

SEQ ID NO: 1440235 - RNA, 19 nt, Artificial Sequence
  Description of Artificial Sequence: Synthetic oligonucleotide
cagguggaagcgguagcuc

SEQ ID NO: 1440236 - RNA, 19 nt, Artificial Sequence
  Description of Artificial Sequence: Synthetic oligonucleotide
ggucuuugccguccacuuc

SEQ ID NO: 1440237 - RNA, 19 nt, Artificial Sequence
  Description of Artificial Sequence: Synthetic oligonucleotide
gcucauaacugaaagcaau

SEQ ID NO: 1440238 - RNA, 19 nt, Artificial Sequence
  Description of Artificial Sequence: Synthetic oligonucleotide
gaucacgugcuggcccuuc

SEQ ID NO: 1440239 - RNA, 19 nt, Artificial Sequence
  Description of Artificial Sequence: Synthetic oligonucleotide
accaggcaucaauuucaua

SEQ ID NO: 1440240 - RNA, 19 nt, Artificial Sequence
  Description of Artificial Sequence: Synthetic oligonucleotide
gcgauagaucuccuuccca

SEQ ID NO: 1440241 - RNA, 19 nt, Artificial Sequence
  Description of Artificial Sequence: Synthetic oligonucleotide
gaucucuagcaagacccau

SEQ ID NO: 1440242 - RNA, 19 nt, Artificial Sequence
  Description of Artificial Sequence: Synthetic oligonucleotide
cucagguauuucucagagu

SEQ ID NO: 1440243 - RNA, 19 nt, Artificial Sequence
  Description of Artificial Sequence: Synthetic oligonucleotide
ggucggcggagagacgcgg

SEQ ID NO: 1440244 - RNA, 19 nt, Artificial Sequence
  Description of Artificial Sequence: Synthetic oligonucleotide
cugguucgccacgcgccgg

SEQ ID NO: 1440245 - RNA, 19 nt, Artificial Sequence
  Description of Artificial Sequence: Synthetic oligonucleotide
ccgcauuuuccccgggccc

SEQ ID NO: 1440246 - RNA, 19 nt, Artificial Sequence
  Description of Artificial Sequence: Synthetic oligonucleotide
gcgacucacuucuuagaaa

SEQ ID NO: 1440247 - RNA, 19 nt, Artificial Sequence
  Description of Artificial Sequence: Synthetic oligonucleotide
gccuguugaagccuacaua

SEQ ID NO: 1440248 - RNA, 19 nt, Artificial Sequence
  Description of Artificial Sequence: Synthetic oligonucleotide
gggugaugcuggucauuug

SEQ ID NO: 1440249 - RNA, 19 nt, Artificial Sequence
  Description of Artificial Sequence: Synthetic oligonucleotide
ccacggugacuucugguuc

SEQ ID NO: 1440250 - RNA, 19 nt, Artificial Sequence
  Description of Artificial Sequence: Synthetic oligonucleotide
gcaguacucgcagagccaa

SEQ ID NO: 1440251 - RNA, 19 nt, Artificial Sequence
  Description of Artificial Sequence: Synthetic oligonucleotide
ccggcaggccccucgacug

SEQ ID NO: 1440252 - RNA, 19 nt, Artificial Sequence
  Description of Artificial Sequence: Synthetic oligonucleotide
cgcauuuuccccgggcccg

SEQ ID NO: 1440253 - RNA, 19 nt, Artificial Sequence
  Description of Artificial Sequence: Synthetic oligonucleotide
cuaucgggccgccggcaca

SEQ ID NO: 1440254 - RNA, 19 nt, Artificial Sequence
  Description of Artificial Sequence: Synthetic oligonucleotide
cccauagucuucugggaaa

SEQ ID NO: 1440255 - RNA, 19 nt, Artificial Sequence
  Description of Artificial Sequence: Synthetic oligonucleotide
ccaggugcuaucgggccgc

SEQ ID NO: 1440256 - RNA, 19 nt, Artificial Sequence
  Description of Artificial Sequence: Synthetic oligonucleotide
gucggcggagagacgcggc

SEQ ID NO: 1440257 - RNA, 19 nt, Artificial Sequence
  Description of Artificial Sequence: Synthetic oligonucleotide
aggugcuaucgggccgccg

SEQ ID NO: 1440258 - RNA, 19 nt, Artificial Sequence
  Description of Artificial Sequence: Synthetic oligonucleotide
agccuacauaguguacaua

SEQ ID NO: 1440259 - RNA, 19 nt, Artificial Sequence
  Description of Artificial Sequence: Synthetic oligonucleotide
gacccggcaggccccucga

SEQ ID NO: 1440260 - RNA, 19 nt, Artificial Sequence
  Description of Artificial Sequence: Synthetic oligonucleotide
cugccgcauuuuccccggg

SEQ ID NO: 1440261 - RNA, 19 nt, Artificial Sequence
  Description of Artificial Sequence: Synthetic oligonucleotide
gcuaucgggccgccggcac

SEQ ID NO: 1440262 - RNA, 19 nt, Artificial Sequence
  Description of Artificial Sequence: Synthetic oligonucleotide
gcuucgguagcugaguuuu

SEQ ID NO: 1440263 - RNA, 19 nt, Artificial Sequence
  Description of Artificial Sequence: Synthetic oligonucleotide
acaggucuguacacauauu

SEQ ID NO: 1440264 - RNA, 19 nt, Artificial Sequence
  Description of Artificial Sequence: Synthetic oligonucleotide
ugaucgccucauguuccuu

SEQ ID NO: 1440265 - RNA, 19 nt, Artificial Sequence
  Description of Artificial Sequence: Synthetic oligonucleotide
ccggggucggcggagagac

SEQ ID NO: 1440266 - RNA, 19 nt, Artificial Sequence
  Description of Artificial Sequence: Synthetic oligonucleotide
cacucuagacuggaucacu

SEQ ID NO: 1440267 - RNA, 19 nt, Artificial Sequence
  Description of Artificial Sequence: Synthetic oligonucleotide
gucgccuguugaagccuac

SEQ ID NO: 1440268 - RNA, 19 nt, Artificial Sequence
  Description of Artificial Sequence: Synthetic oligonucleotide
caugaccaguagcuucggu

SEQ ID NO: 1440269 - RNA, 19 nt, Artificial Sequence
  Description of Artificial Sequence: Synthetic oligonucleotide
caguacucgcagagccaaa

SEQ ID NO: 1440270 - RNA, 19 nt, Artificial Sequence
  Description of Artificial Sequence: Synthetic oligonucleotide
ggagagccuacaguacucu

SEQ ID NO: 1440271 - RNA, 19 nt, Artificial Sequence
  Description of Artificial Sequence: Synthetic oligonucleotide
ccgauuuccacggugacuu

SEQ ID NO: 1440272 - RNA, 19 nt, Artificial Sequence
  Description of Artificial Sequence: Synthetic oligonucleotide
gggucggcggagagacgcg

SEQ ID NO: 1440273 - RNA, 19 nt, Artificial Sequence
  Description of Artificial Sequence: Synthetic oligonucleotide
caguacucuccagcuugga

SEQ ID NO: 1440274 - RNA, 19 nt, Artificial Sequence
  Description of Artificial Sequence: Synthetic oligonucleotide
ccuaucuacuuccgucaaa

SEQ ID NO: 1440275 - RNA, 19 nt, Artificial Sequence
  Description of Artificial Sequence: Synthetic oligonucleotide
cgacugccgcauuuucccc

SEQ ID NO: 1440276 - RNA, 19 nt, Artificial Sequence
  Description of Artificial Sequence: Synthetic oligonucleotide
gguucgccacgcgccgggg

SEQ ID NO: 1440277 - RNA, 19 nt, Artificial Sequence
  Description of Artificial Sequence: Synthetic oligonucleotide
gcuccacgucaaaauacaa

SEQ ID NO: 1440278 - RNA, 19 nt, Artificial Sequence
  Description of Artificial Sequence: Synthetic oligonucleotide
gugccccggaagucucgca

SEQ ID NO: 1440279 - RNA, 19 nt, Artificial Sequence
  Description of Artificial Sequence: Synthetic oligonucleotide
caggugcuaucgggccgcc

SEQ ID NO: 1440280 - RNA, 19 nt, Artificial Sequence
  Description of Artificial Sequence: Synthetic oligonucleotide
gacccaugaccaguagcuu

SEQ ID NO: 1440281 - RNA, 19 nt, Artificial Sequence
  Description of Artificial Sequence: Synthetic oligonucleotide
agaucacgugcuggcccuu

SEQ ID NO: 1440282 - RNA, 19 nt, Artificial Sequence
  Description of Artificial Sequence: Synthetic oligonucleotide
guucgccacgcgccggggu

SEQ ID NO: 1440283 - RNA, 19 nt, Artificial Sequence
  Description of Artificial Sequence: Synthetic oligonucleotide
gccacgccucugguagggg

SEQ ID NO: 1440284 - RNA, 19 nt, Artificial Sequence
  Description of Artificial Sequence: Synthetic oligonucleotide
ccacgcgccggggucggcg

SEQ ID NO: 1440285 - RNA, 19 nt, Artificial Sequence
  Description of Artificial Sequence: Synthetic oligonucleotide
cguccagucgccuguugaa

SEQ ID NO: 1440286 - RNA, 19 nt, Artificial Sequence
  Description of Artificial Sequence: Synthetic oligonucleotide
cagucgccuguugaagccu

SEQ ID NO: 1440287 - RNA, 19 nt, Artificial Sequence
  Description of Artificial Sequence: Synthetic oligonucleotide
ccccggaagucucgcagga

SEQ ID NO: 1440288 - RNA, 19 nt, Artificial Sequence
  Description of Artificial Sequence: Synthetic oligonucleotide
gucauuuggcugagaucuu

SEQ ID NO: 1440289 - RNA, 19 nt, Artificial Sequence
  Description of Artificial Sequence: Synthetic oligonucleotide
gguggaagcgguagcucuu

SEQ ID NO: 1440290 - RNA, 19 nt, Artificial Sequence
  Description of Artificial Sequence: Synthetic oligonucleotide
ggccgccggcacagguacg

SEQ ID NO: 1440291 - RNA, 19 nt, Artificial Sequence
  Description of Artificial Sequence: Synthetic oligonucleotide
gcggcccggagacccggca

SEQ ID NO: 1440292 - RNA, 19 nt, Artificial Sequence
  Description of Artificial Sequence: Synthetic oligonucleotide
cagguacguuucuccgauu

SEQ ID NO: 1440293 - RNA, 19 nt, Artificial Sequence
  Description of Artificial Sequence: Synthetic oligonucleotide
gccgccggcacagguacgu

SEQ ID NO: 1440294 - RNA, 19 nt, Artificial Sequence
  Description of Artificial Sequence: Synthetic oligonucleotide
cggcacagguacguuucuc

SEQ ID NO: 1440295 - RNA, 19 nt, Artificial Sequence
  Description of Artificial Sequence: Synthetic oligonucleotide
cggugacuucugguucgcc

SEQ ID NO: 1440296 - RNA, 19 nt, Artificial Sequence
  Description of Artificial Sequence: Synthetic oligonucleotide
cgaagucguugcagcaacu

SEQ ID NO: 1440297 - RNA, 19 nt, Artificial Sequence
  Description of Artificial Sequence: Synthetic oligonucleotide
cccggcaggccccucgacu

SEQ ID NO: 1440298 - RNA, 19 nt, Artificial Sequence
  Description of Artificial Sequence: Synthetic oligonucleotide
cacaggcgacucacuucuu

SEQ ID NO: 1440299 - RNA, 19 nt, Artificial Sequence
  Description of Artificial Sequence: Synthetic oligonucleotide
ggccccucgacugccgcau

SEQ ID NO: 1440300 - RNA, 19 nt, Artificial Sequence
  Description of Artificial Sequence: Synthetic oligonucleotide
cggggucggcggagagacg

SEQ ID NO: 1440301 - RNA, 19 nt, Artificial Sequence
  Description of Artificial Sequence: Synthetic oligonucleotide
cgccuguugaagccuacau

SEQ ID NO: 1440302 - RNA, 19 nt, Artificial Sequence
  Description of Artificial Sequence: Synthetic oligonucleotide
ccgccagcucacucaggua

SEQ ID NO: 1440303 - RNA, 19 nt, Artificial Sequence
  Description of Artificial Sequence: Synthetic oligonucleotide
gccgacaaugugggccccu

SEQ ID NO: 1440304 - RNA, 19 nt, Artificial Sequence
  Description of Artificial Sequence: Synthetic oligonucleotide
cgcggcccggagacccggc

SEQ ID NO: 1440305 - RNA, 19 nt, Artificial Sequence
  Description of Artificial Sequence: Synthetic oligonucleotide
cggcccuccuggucauuca

SEQ ID NO: 1440306 - RNA, 19 nt, Artificial Sequence
  Description of Artificial Sequence: Synthetic oligonucleotide
ccggcacagguacguuucu

SEQ ID NO: 1440307 - RNA, 19 nt, Artificial Sequence
  Description of Artificial Sequence: Synthetic oligonucleotide
cgguagcucuucucauacu

SEQ ID NO: 1440308 - RNA, 19 nt, Artificial Sequence
  Description of Artificial Sequence: Synthetic oligonucleotide
cccauucguccagucgccu

SEQ ID NO: 1440309 - RNA, 19 nt, Artificial Sequence
  Description of Artificial Sequence: Synthetic oligonucleotide
ccccucgacugccgcauuu

SEQ ID NO: 1440310 - RNA, 19 nt, Artificial Sequence
  Description of Artificial Sequence: Synthetic oligonucleotide
cccucgacugccgcauuuu

SEQ ID NO: 1440311 - RNA, 19 nt, Artificial Sequence
  Description of Artificial Sequence: Synthetic oligonucleotide
cgccggcacagguacguuu

SEQ ID NO: 1440312 - RNA, 19 nt, Artificial Sequence
  Description of Artificial Sequence: Synthetic oligonucleotide
cucggcccuccuggucauu

SEQ ID NO: 1440313 - RNA, 19 nt, Artificial Sequence
  Description of Artificial Sequence: Synthetic oligonucleotide
gccccucgacugccgcauu

SEQ ID NO: 1440314 - RNA, 19 nt, Artificial Sequence
  Description of Artificial Sequence: Synthetic oligonucleotide
ccgccggcacagguacguu

SEQ ID NO: 1440315 - RNA, 19 nt, Artificial Sequence
  Description of Artificial Sequence: Synthetic oligonucleotide
uguucaaacaguaaacucg

SEQ ID NO: 1440316 - RNA, 19 nt, Artificial Sequence
  Description of Artificial Sequence: Synthetic oligonucleotide
ucuggaaugaucuaaagag

SEQ ID NO: 1440317 - RNA, 19 nt, Artificial Sequence
  Description of Artificial Sequence: Synthetic oligonucleotide
ugauacaaaagacagguca

SEQ ID NO: 1440318 - RNA, 19 nt, Artificial Sequence
  Description of Artificial Sequence: Synthetic oligonucleotide
aaacaguaaacucgacugc

SEQ ID NO: 1440319 - RNA, 19 nt, Artificial Sequence
  Description of Artificial Sequence: Synthetic oligonucleotide
aacuugguuagcuggagac

SEQ ID NO: 1440320 - RNA, 19 nt, Artificial Sequence
  Description of Artificial Sequence: Synthetic oligonucleotide
uguaaugcugcuuagcagc

SEQ ID NO: 1440321 - RNA, 19 nt, Artificial Sequence
  Description of Artificial Sequence: Synthetic oligonucleotide
agaucaauaugaauggucc

SEQ ID NO: 1440322 - RNA, 19 nt, Artificial Sequence
  Description of Artificial Sequence: Synthetic oligonucleotide
uccuguucuauacacaucc

SEQ ID NO: 1440323 - RNA, 19 nt, Artificial Sequence
  Description of Artificial Sequence: Synthetic oligonucleotide
ugagcuauggaguuggaca

SEQ ID NO: 1440324 - RNA, 19 nt, Artificial Sequence
  Description of Artificial Sequence: Synthetic oligonucleotide
uuuucuacaggugaguuga

SEQ ID NO: 1440325 - RNA, 19 nt, Artificial Sequence
  Description of Artificial Sequence: Synthetic oligonucleotide
ucuaaagaguuccaccuug

SEQ ID NO: 1440326 - RNA, 19 nt, Artificial Sequence
  Description of Artificial Sequence: Synthetic oligonucleotide
agugcauuagcagugcacc

SEQ ID NO: 1440327 - RNA, 19 nt, Artificial Sequence
  Description of Artificial Sequence: Synthetic oligonucleotide
ucuggguaaagccaagacc

SEQ ID NO: 1440328 - RNA, 19 nt, Artificial Sequence
  Description of Artificial Sequence: Synthetic oligonucleotide
ucaaacaguaaacucgacu

SEQ ID NO: 1440329 - RNA, 19 nt, Artificial Sequence
  Description of Artificial Sequence: Synthetic oligonucleotide
ugauccaggaugcaaacga

SEQ ID NO: 1440330 - RNA, 19 nt, Artificial Sequence
  Description of Artificial Sequence: Synthetic oligonucleotide
uuggcuacagaacugccag

SEQ ID NO: 1440331 - RNA, 19 nt, Artificial Sequence
  Description of Artificial Sequence: Synthetic oligonucleotide
ugugcauagcacaauugag

SEQ ID NO: 1440332 - RNA, 19 nt, Artificial Sequence
  Description of Artificial Sequence: Synthetic oligonucleotide
ugaucuaaagaguuccacc

SEQ ID NO: 1440333 - RNA, 19 nt, Artificial Sequence
  Description of Artificial Sequence: Synthetic oligonucleotide
gauuguuacucuuuucuac

SEQ ID NO: 1440334 - RNA, 19 nt, Artificial Sequence
  Description of Artificial Sequence: Synthetic oligonucleotide
aacuaccuggagcuauucc

SEQ ID NO: 1440335 - RNA, 19 nt, Artificial Sequence
  Description of Artificial Sequence: Synthetic oligonucleotide
gaauccucuagauuguuac

SEQ ID NO: 1440336 - RNA, 19 nt, Artificial Sequence
  Description of Artificial Sequence: Synthetic oligonucleotide
caaacgaugguuucuuccg

SEQ ID NO: 1440337 - RNA, 19 nt, Artificial Sequence
  Description of Artificial Sequence: Synthetic oligonucleotide
ucaauaugaaugguccugg

SEQ ID NO: 1440338 - RNA, 19 nt, Artificial Sequence
  Description of Artificial Sequence: Synthetic oligonucleotide
uuagcuggagacuguaucc

SEQ ID NO: 1440339 - RNA, 19 nt, Artificial Sequence
  Description of Artificial Sequence: Synthetic oligonucleotide
gucaaugcucuccucaugg

SEQ ID NO: 1440340 - RNA, 19 nt, Artificial Sequence
  Description of Artificial Sequence: Synthetic oligonucleotide
agucacauccaaaggaugc

SEQ ID NO: 1440341 - RNA, 19 nt, Artificial Sequence
  Description of Artificial Sequence: Synthetic oligonucleotide
ucuggaaacuccuucuggc

SEQ ID NO: 1440342 - RNA, 19 nt, Artificial Sequence
  Description of Artificial Sequence: Synthetic oligonucleotide
auuguuacucuuuucuaca

SEQ ID NO: 1440343 - RNA, 19 nt, Artificial Sequence
  Description of Artificial Sequence: Synthetic oligonucleotide
acggcugccagcaaggucc

SEQ ID NO: 1440344 - RNA, 19 nt, Artificial Sequence
  Description of Artificial Sequence: Synthetic oligonucleotide
aggcagaucaauaugaaug

SEQ ID NO: 1440345 - RNA, 19 nt, Artificial Sequence
  Description of Artificial Sequence: Synthetic oligonucleotide
auacacauccaccacuuug

SEQ ID NO: 1440346 - RNA, 19 nt, Artificial Sequence
  Description of Artificial Sequence: Synthetic oligonucleotide
ucugguuugauugaaccac

SEQ ID NO: 1440347 - RNA, 19 nt, Artificial Sequence
  Description of Artificial Sequence: Synthetic oligonucleotide
auuagcagugcacccuggc

SEQ ID NO: 1440348 - RNA, 19 nt, Artificial Sequence
  Description of Artificial Sequence: Synthetic oligonucleotide
ugguaugucagcucuuugc

SEQ ID NO: 1440349 - RNA, 19 nt, Artificial Sequence
  Description of Artificial Sequence: Synthetic oligonucleotide
aguggcgucacaaacuugg

SEQ ID NO: 1440350 - RNA, 19 nt, Artificial Sequence
  Description of Artificial Sequence: Synthetic oligonucleotide
uuccuguucccauugagac

SEQ ID NO: 1440351 - RNA, 19 nt, Artificial Sequence
  Description of Artificial Sequence: Synthetic oligonucleotide
auuuaaacuggugguaguc

SEQ ID NO: 1440352 - RNA, 19 nt, Artificial Sequence
  Description of Artificial Sequence: Synthetic oligonucleotide
ggcagaucaauaugaaugg

SEQ ID NO: 1440353 - RNA, 19 nt, Artificial Sequence
  Description of Artificial Sequence: Synthetic oligonucleotide
uuguacuccugauaggugu

SEQ ID NO: 1440354 - RNA, 19 nt, Artificial Sequence
  Description of Artificial Sequence: Synthetic oligonucleotide
ucuguucaaacaguaaacu

SEQ ID NO: 1440355 - RNA, 19 nt, Artificial Sequence
  Description of Artificial Sequence: Synthetic oligonucleotide
acuauagugugcauagcac

SEQ ID NO: 1440356 - RNA, 19 nt, Artificial Sequence
  Description of Artificial Sequence: Synthetic oligonucleotide
ucauggugagcuauggagu

SEQ ID NO: 1440357 - RNA, 19 nt, Artificial Sequence
  Description of Artificial Sequence: Synthetic oligonucleotide
gagacaacuuccuuuguca

SEQ ID NO: 1440358 - RNA, 19 nt, Artificial Sequence
  Description of Artificial Sequence: Synthetic oligonucleotide
ugauucgggaucuggcccg

SEQ ID NO: 1440359 - RNA, 19 nt, Artificial Sequence
  Description of Artificial Sequence: Synthetic oligonucleotide
ggagcuauuccauuggcag

SEQ ID NO: 1440360 - RNA, 19 nt, Artificial Sequence
  Description of Artificial Sequence: Synthetic oligonucleotide
agacaacuuccuuugucac

SEQ ID NO: 1440361 - RNA, 19 nt, Artificial Sequence
  Description of Artificial Sequence: Synthetic oligonucleotide
gagaaggcagaucaauaug

SEQ ID NO: 1440362 - RNA, 19 nt, Artificial Sequence
  Description of Artificial Sequence: Synthetic oligonucleotide
cucuguucaaacaguaaac

SEQ ID NO: 1440363 - RNA, 19 nt, Artificial Sequence
  Description of Artificial Sequence: Synthetic oligonucleotide
uaucaguggcgucacaaac

SEQ ID NO: 1440364 - RNA, 19 nt, Artificial Sequence
  Description of Artificial Sequence: Synthetic oligonucleotide
uuuguuauucccuguggaa

SEQ ID NO: 1440365 - RNA, 19 nt, Artificial Sequence
  Description of Artificial Sequence: Synthetic oligonucleotide
gaucuaaagaguuccaccu

SEQ ID NO: 1440366 - RNA, 19 nt, Artificial Sequence
  Description of Artificial Sequence: Synthetic oligonucleotide
ucuagauuguuacucuuuu

SEQ ID NO: 1440367 - RNA, 19 nt, Artificial Sequence
  Description of Artificial Sequence: Synthetic oligonucleotide
uuguuacucuuuucuacag

SEQ ID NO: 1440368 - RNA, 19 nt, Artificial Sequence
  Description of Artificial Sequence: Synthetic oligonucleotide
aucaauaugaaugguccug

SEQ ID NO: 1440369 - RNA, 19 nt, Artificial Sequence
  Description of Artificial Sequence: Synthetic oligonucleotide
ucgggaucuggcccgaggg

SEQ ID NO: 1440370 - RNA, 19 nt, Artificial Sequence
  Description of Artificial Sequence: Synthetic oligonucleotide
cuaaagaguuccaccuugc

SEQ ID NO: 1440371 - RNA, 19 nt, Artificial Sequence
  Description of Artificial Sequence: Synthetic oligonucleotide
auccucuagauuguuacuc

SEQ ID NO: 1440372 - RNA, 19 nt, Artificial Sequence
  Description of Artificial Sequence: Synthetic oligonucleotide
agcggcucuguucaaacag

SEQ ID NO: 1440373 - RNA, 19 nt, Artificial Sequence
  Description of Artificial Sequence: Synthetic oligonucleotide
aauccucuagauuguuacu

SEQ ID NO: 1440374 - RNA, 19 nt, Artificial Sequence
  Description of Artificial Sequence: Synthetic oligonucleotide
uccacaguccucuuugagu

SEQ ID NO: 1440375 - RNA, 19 nt, Artificial Sequence
  Description of Artificial Sequence: Synthetic oligonucleotide
cacuaaagacacuaucuuc

SEQ ID NO: 1440376 - RNA, 19 nt, Artificial Sequence
  Description of Artificial Sequence: Synthetic oligonucleotide
aaggcagaucaauaugaau

SEQ ID NO: 1440377 - RNA, 19 nt, Artificial Sequence
  Description of Artificial Sequence: Synthetic oligonucleotide
uucuauacacauccaccac

SEQ ID NO: 1440378 - RNA, 19 nt, Artificial Sequence
  Description of Artificial Sequence: Synthetic oligonucleotide
aacgaugguuucuuccgga

SEQ ID NO: 1440379 - RNA, 19 nt, Artificial Sequence
  Description of Artificial Sequence: Synthetic oligonucleotide
acuggcacuuccuuaucag

SEQ ID NO: 1440380 - RNA, 19 nt, Artificial Sequence
  Description of Artificial Sequence: Synthetic oligonucleotide
acagcggcucuguucaaac

SEQ ID NO: 1440381 - RNA, 19 nt, Artificial Sequence
  Description of Artificial Sequence: Synthetic oligonucleotide
aacucgacugcucuauuuu

SEQ ID NO: 1440382 - RNA, 19 nt, Artificial Sequence
  Description of Artificial Sequence: Synthetic oligonucleotide
uucaauucaggaacuccaa

SEQ ID NO: 1440383 - RNA, 19 nt, Artificial Sequence
  Description of Artificial Sequence: Synthetic oligonucleotide
gguagauaggcucuuccag

SEQ ID NO: 1440384 - RNA, 19 nt, Artificial Sequence
  Description of Artificial Sequence: Synthetic oligonucleotide
gcaguuugacacuauagug

SEQ ID NO: 1440385 - RNA, 19 nt, Artificial Sequence
  Description of Artificial Sequence: Synthetic oligonucleotide
gucauugaggaugucuccg

SEQ ID NO: 1440386 - RNA, 19 nt, Artificial Sequence
  Description of Artificial Sequence: Synthetic oligonucleotide
uacaaaagacaggucaggu

SEQ ID NO: 1440387 - RNA, 19 nt, Artificial Sequence
  Description of Artificial Sequence: Synthetic oligonucleotide
uccauucacgguuuggcuc

SEQ ID NO: 1440388 - RNA, 19 nt, Artificial Sequence
  Description of Artificial Sequence: Synthetic oligonucleotide
cuguaaugcugcuuagcag

SEQ ID NO: 1440389 - RNA, 19 nt, Artificial Sequence
  Description of Artificial Sequence: Synthetic oligonucleotide
gauggagaagguaucucug

SEQ ID NO: 1440390 - RNA, 19 nt, Artificial Sequence
  Description of Artificial Sequence: Synthetic oligonucleotide
cuguucuauacacauccac

SEQ ID NO: 1440391 - RNA, 19 nt, Artificial Sequence
  Description of Artificial Sequence: Synthetic oligonucleotide
uccugugucucauggugag

SEQ ID NO: 1440392 - RNA, 19 nt, Artificial Sequence
  Description of Artificial Sequence: Synthetic oligonucleotide
caggacggcugccaaaugg

SEQ ID NO: 1440393 - RNA, 19 nt, Artificial Sequence
  Description of Artificial Sequence: Synthetic oligonucleotide
uuuacacgaagcagcccca

SEQ ID NO: 1440394 - RNA, 19 nt, Artificial Sequence
  Description of Artificial Sequence: Synthetic oligonucleotide
uggagcauguccugucucc

SEQ ID NO: 1440395 - RNA, 19 nt, Artificial Sequence
  Description of Artificial Sequence: Synthetic oligonucleotide
agugucauggcaggaguuc

SEQ ID NO: 1440396 - RNA, 19 nt, Artificial Sequence
  Description of Artificial Sequence: Synthetic oligonucleotide
cugauucgggaucuggccc

SEQ ID NO: 1440397 - RNA, 19 nt, Artificial Sequence
  Description of Artificial Sequence: Synthetic oligonucleotide
aucugguuugauugaacca

SEQ ID NO: 1440398 - RNA, 19 nt, Artificial Sequence
  Description of Artificial Sequence: Synthetic oligonucleotide
ugaguugauggcccaauuu

SEQ ID NO: 1440399 - RNA, 19 nt, Artificial Sequence
  Description of Artificial Sequence: Synthetic oligonucleotide
guuacucuuuucuacaggu

SEQ ID NO: 1440400 - RNA, 19 nt, Artificial Sequence
  Description of Artificial Sequence: Synthetic oligonucleotide
auagcugccccacaaggaa

SEQ ID NO: 1440401 - RNA, 19 nt, Artificial Sequence
  Description of Artificial Sequence: Synthetic oligonucleotide
cuucuggaaugaucuaaag

SEQ ID NO: 1440402 - RNA, 19 nt, Artificial Sequence
  Description of Artificial Sequence: Synthetic oligonucleotide
guucauuuaaacugguggu

SEQ ID NO: 1440403 - RNA, 19 nt, Artificial Sequence
  Description of Artificial Sequence: Synthetic oligonucleotide
uguaugggcacuucccaau

SEQ ID NO: 1440404 - RNA, 19 nt, Artificial Sequence
  Description of Artificial Sequence: Synthetic oligonucleotide
uucauuuaaacugguggua

SEQ ID NO: 1440405 - RNA, 19 nt, Artificial Sequence
  Description of Artificial Sequence: Synthetic oligonucleotide
uggcacuaaagacacuauc

SEQ ID NO: 1440406 - RNA, 19 nt, Artificial Sequence
  Description of Artificial Sequence: Synthetic oligonucleotide
ugauagguguccagcuucu

SEQ ID NO: 1440407 - RNA, 19 nt, Artificial Sequence
  Description of Artificial Sequence: Synthetic oligonucleotide
agacacuaucuucuuucag

SEQ ID NO: 1440408 - RNA, 19 nt, Artificial Sequence
  Description of Artificial Sequence: Synthetic oligonucleotide
cugauagguguccagcuuc

SEQ ID NO: 1440409 - RNA, 19 nt, Artificial Sequence
  Description of Artificial Sequence: Synthetic oligonucleotide
aaacuaccuggagcuauuc

SEQ ID NO: 1440410 - RNA, 19 nt, Artificial Sequence
  Description of Artificial Sequence: Synthetic oligonucleotide
uuauucccuguggaaagcc

SEQ ID NO: 1440411 - RNA, 19 nt, Artificial Sequence
  Description of Artificial Sequence: Synthetic oligonucleotide
ggguuucugauccaggaug

SEQ ID NO: 1440412 - RNA, 19 nt, Artificial Sequence
  Description of Artificial Sequence: Synthetic oligonucleotide
uuaucaguggcgucacaaa

SEQ ID NO: 1440413 - RNA, 19 nt, Artificial Sequence
  Description of Artificial Sequence: Synthetic oligonucleotide
cuuuguuauucccugugga

SEQ ID NO: 1440414 - RNA, 19 nt, Artificial Sequence
  Description of Artificial Sequence: Synthetic oligonucleotide
cagcaagguccauucacgg

SEQ ID NO: 1440415 - RNA, 19 nt, Artificial Sequence
  Description of Artificial Sequence: Synthetic oligonucleotide
acaaggaacgagccggccu

SEQ ID NO: 1440416 - RNA, 19 nt, Artificial Sequence
  Description of Artificial Sequence: Synthetic oligonucleotide
ggccuauacauuucguucc

SEQ ID NO: 1440417 - RNA, 19 nt, Artificial Sequence
  Description of Artificial Sequence: Synthetic oligonucleotide
aagauuggagcugcugaca

SEQ ID NO: 1440418 - RNA, 19 nt, Artificial Sequence
  Description of Artificial Sequence: Synthetic oligonucleotide
acauuucguuccuguuccc

SEQ ID NO: 1440419 - RNA, 19 nt, Artificial Sequence
  Description of Artificial Sequence: Synthetic oligonucleotide
cuagauuguuacucuuuuc

SEQ ID NO: 1440420 - RNA, 19 nt, Artificial Sequence
  Description of Artificial Sequence: Synthetic oligonucleotide
uucuguaaugcugcuuagc

SEQ ID NO: 1440421 - RNA, 19 nt, Artificial Sequence
  Description of Artificial Sequence: Synthetic oligonucleotide
agaacugccagggucuuca

SEQ ID NO: 1440422 - RNA, 19 nt, Artificial Sequence
  Description of Artificial Sequence: Synthetic oligonucleotide
caaggaacgagccggccug

SEQ ID NO: 1440423 - RNA, 19 nt, Artificial Sequence
  Description of Artificial Sequence: Synthetic oligonucleotide
agauuggagcugcugacau

SEQ ID NO: 1440424 - RNA, 19 nt, Artificial Sequence
  Description of Artificial Sequence: Synthetic oligonucleotide
acuuccuuaucaguggcgu

SEQ ID NO: 1440425 - RNA, 19 nt, Artificial Sequence
  Description of Artificial Sequence: Synthetic oligonucleotide
acgaugguuucuuccggag

SEQ ID NO: 1440426 - RNA, 19 nt, Artificial Sequence
  Description of Artificial Sequence: Synthetic oligonucleotide
aggaagugcauuagcagug

SEQ ID NO: 1440427 - RNA, 19 nt, Artificial Sequence
  Description of Artificial Sequence: Synthetic oligonucleotide
auuucguuccuguucccau

SEQ ID NO: 1440428 - RNA, 19 nt, Artificial Sequence
  Description of Artificial Sequence: Synthetic oligonucleotide
cucuggguaaagccaagac

SEQ ID NO: 1440429 - RNA, 19 nt, Artificial Sequence
  Description of Artificial Sequence: Synthetic oligonucleotide
uugcugauucgggaucugg

SEQ ID NO: 1440430 - RNA, 19 nt, Artificial Sequence
  Description of Artificial Sequence: Synthetic oligonucleotide
cacccuggcauccaaggac

SEQ ID NO: 1440431 - RNA, 19 nt, Artificial Sequence
  Description of Artificial Sequence: Synthetic oligonucleotide
aacgagccggccugguaug

SEQ ID NO: 1440432 - RNA, 19 nt, Artificial Sequence
  Description of Artificial Sequence: Synthetic oligonucleotide
ggcuacagaacugccaggg

SEQ ID NO: 1440433 - RNA, 19 nt, Artificial Sequence
  Description of Artificial Sequence: Synthetic oligonucleotide
acacuauagugugcauagc

SEQ ID NO: 1440434 - RNA, 19 nt, Artificial Sequence
  Description of Artificial Sequence: Synthetic oligonucleotide
cacuuugaaacuaccugga

SEQ ID NO: 1440435 - RNA, 19 nt, Artificial Sequence
  Description of Artificial Sequence: Synthetic oligonucleotide
aagccucuggguaaagcca

SEQ ID NO: 1440436 - RNA, 19 nt, Artificial Sequence
  Description of Artificial Sequence: Synthetic oligonucleotide
guaugggcacuucccaaug

SEQ ID NO: 1440437 - RNA, 19 nt, Artificial Sequence
  Description of Artificial Sequence: Synthetic oligonucleotide
gaucaauaugaaugguccu

SEQ ID NO: 1440438 - RNA, 19 nt, Artificial Sequence
  Description of Artificial Sequence: Synthetic oligonucleotide
uucaggacggcugccaaau

SEQ ID NO: 1440439 - RNA, 19 nt, Artificial Sequence
  Description of Artificial Sequence: Synthetic oligonucleotide
ggcgucacaaacuugguua

SEQ ID NO: 1440440 - RNA, 19 nt, Artificial Sequence
  Description of Artificial Sequence: Synthetic oligonucleotide
gcugauucgggaucuggcc

SEQ ID NO: 1440441 - RNA, 19 nt, Artificial Sequence
  Description of Artificial Sequence: Synthetic oligonucleotide
aguaaacucgacugcucua

SEQ ID NO: 1440442 - RNA, 19 nt, Artificial Sequence
  Description of Artificial Sequence: Synthetic oligonucleotide
uugguuagcuggagacugu

SEQ ID NO: 1440443 - RNA, 19 nt, Artificial Sequence
  Description of Artificial Sequence: Synthetic oligonucleotide
cugauccaggaugcaaacg

SEQ ID NO: 1440444 - RNA, 19 nt, Artificial Sequence
  Description of Artificial Sequence: Synthetic oligonucleotide
ucaucuuggacuggccuau

SEQ ID NO: 1440445 - RNA, 19 nt, Artificial Sequence
  Description of Artificial Sequence: Synthetic oligonucleotide
gguuucugauccaggaugc

SEQ ID NO: 1440446 - RNA, 19 nt, Artificial Sequence
  Description of Artificial Sequence: Synthetic oligonucleotide
ucacgguuuggcucaggcu

SEQ ID NO: 1440447 - RNA, 19 nt, Artificial Sequence
  Description of Artificial Sequence: Synthetic oligonucleotide
cugauagcugccccacaag

SEQ ID NO: 1440448 - RNA, 19 nt, Artificial Sequence
  Description of Artificial Sequence: Synthetic oligonucleotide
cacuucccaaugaccacag

SEQ ID NO: 1440449 - RNA, 19 nt, Artificial Sequence
  Description of Artificial Sequence: Synthetic oligonucleotide
ucccuguggaaagccauug

SEQ ID NO: 1440450 - RNA, 19 nt, Artificial Sequence
  Description of Artificial Sequence: Synthetic oligonucleotide
gaagugcauuagcagugca

SEQ ID NO: 1440451 - RNA, 19 nt, Artificial Sequence
  Description of Artificial Sequence: Synthetic oligonucleotide
cuuaucaguggcgucacaa

SEQ ID NO: 1440452 - RNA, 19 nt, Artificial Sequence
  Description of Artificial Sequence: Synthetic oligonucleotide
guuggacagugucauggca

SEQ ID NO: 1440453 - RNA, 19 nt, Artificial Sequence
  Description of Artificial Sequence: Synthetic oligonucleotide
cagcacuccagcugauagc

SEQ ID NO: 1440454 - RNA, 19 nt, Artificial Sequence
  Description of Artificial Sequence: Synthetic oligonucleotide
cauagcacaauugagcaau

SEQ ID NO: 1440455 - RNA, 19 nt, Artificial Sequence
  Description of Artificial Sequence: Synthetic oligonucleotide
cuauacauuucguuccugu

SEQ ID NO: 1440456 - RNA, 19 nt, Artificial Sequence
  Description of Artificial Sequence: Synthetic oligonucleotide
augucuccgcucuuccuca

SEQ ID NO: 1440457 - RNA, 19 nt, Artificial Sequence
  Description of Artificial Sequence: Synthetic oligonucleotide
uuggacuggccuauacauu

SEQ ID NO: 1440458 - RNA, 19 nt, Artificial Sequence
  Description of Artificial Sequence: Synthetic oligonucleotide
uggguaaagccaagaccuc

SEQ ID NO: 1440459 - RNA, 19 nt, Artificial Sequence
  Description of Artificial Sequence: Synthetic oligonucleotide
guccugucuccccugccgg

SEQ ID NO: 1440460 - RNA, 19 nt, Artificial Sequence
  Description of Artificial Sequence: Synthetic oligonucleotide
gauuggagcugcugacauc

SEQ ID NO: 1440461 - RNA, 19 nt, Artificial Sequence
  Description of Artificial Sequence: Synthetic oligonucleotide
ugguuugauugaaccacuu

SEQ ID NO: 1440462 - RNA, 19 nt, Artificial Sequence
  Description of Artificial Sequence: Synthetic oligonucleotide
aaggaacgagccggccugg

SEQ ID NO: 1440463 - RNA, 19 nt, Artificial Sequence
  Description of Artificial Sequence: Synthetic oligonucleotide
guccacuauaguuggagcu

SEQ ID NO: 1440464 - RNA, 19 nt, Artificial Sequence
  Description of Artificial Sequence: Synthetic oligonucleotide
uccccugccgggcuuuaca

SEQ ID NO: 1440465 - RNA, 19 nt, Artificial Sequence
  Description of Artificial Sequence: Synthetic oligonucleotide
guuccuguucccauugaga

SEQ ID NO: 1440466 - RNA, 19 nt, Artificial Sequence
  Description of Artificial Sequence: Synthetic oligonucleotide
uaaacucgacugcucuauu

SEQ ID NO: 1440467 - RNA, 19 nt, Artificial Sequence
  Description of Artificial Sequence: Synthetic oligonucleotide
cauugagacaacuuccuuu

SEQ ID NO: 1440468 - RNA, 19 nt, Artificial Sequence
  Description of Artificial Sequence: Synthetic oligonucleotide
gguaagauuggagcugcug

SEQ ID NO: 1440469 - RNA, 19 nt, Artificial Sequence
  Description of Artificial Sequence: Synthetic oligonucleotide
augaaugguccugguagca

SEQ ID NO: 1440470 - RNA, 19 nt, Artificial Sequence
  Description of Artificial Sequence: Synthetic oligonucleotide
caggucaggucugagcuuc

SEQ ID NO: 1440471 - RNA, 19 nt, Artificial Sequence
  Description of Artificial Sequence: Synthetic oligonucleotide
cuuccuuaucaguggcguc

SEQ ID NO: 1440472 - RNA, 19 nt, Artificial Sequence
  Description of Artificial Sequence: Synthetic oligonucleotide
gcgucacaaacuugguuag

SEQ ID NO: 1440473 - RNA, 19 nt, Artificial Sequence
  Description of Artificial Sequence: Synthetic oligonucleotide
ggaaugaucuaaagaguuc

SEQ ID NO: 1440474 - RNA, 19 nt, Artificial Sequence
  Description of Artificial Sequence: Synthetic oligonucleotide
uggcgucacaaacuugguu

SEQ ID NO: 1440475 - RNA, 19 nt, Artificial Sequence
  Description of Artificial Sequence: Synthetic oligonucleotide
agaguucauuuaaacuggu

SEQ ID NO: 1440476 - RNA, 19 nt, Artificial Sequence
  Description of Artificial Sequence: Synthetic oligonucleotide
aucuucuuucaggacggcu

SEQ ID NO: 1440477 - RNA, 19 nt, Artificial Sequence
  Description of Artificial Sequence: Synthetic oligonucleotide
uacuccugauaggugucca

SEQ ID NO: 1440478 - RNA, 19 nt, Artificial Sequence
  Description of Artificial Sequence: Synthetic oligonucleotide
ggcuuuacacgaagcagcc

SEQ ID NO: 1440479 - RNA, 19 nt, Artificial Sequence
  Description of Artificial Sequence: Synthetic oligonucleotide
ggguaaagccaagaccucc

SEQ ID NO: 1440480 - RNA, 19 nt, Artificial Sequence
  Description of Artificial Sequence: Synthetic oligonucleotide
gaacgagccggccugguau

SEQ ID NO: 1440481 - RNA, 19 nt, Artificial Sequence
  Description of Artificial Sequence: Synthetic oligonucleotide
cugcacagcggcucuguuc

SEQ ID NO: 1440482 - RNA, 19 nt, Artificial Sequence
  Description of Artificial Sequence: Synthetic oligonucleotide
gcuauggaguuggacagug

SEQ ID NO: 1440483 - RNA, 19 nt, Artificial Sequence
  Description of Artificial Sequence: Synthetic oligonucleotide
uccuuaucaguggcgucac

SEQ ID NO: 1440484 - RNA, 19 nt, Artificial Sequence
  Description of Artificial Sequence: Synthetic oligonucleotide
gggcaguuugacacuauag

SEQ ID NO: 1440485 - RNA, 19 nt, Artificial Sequence
  Description of Artificial Sequence: Synthetic oligonucleotide
uucccuguggaaagccauu

SEQ ID NO: 1440486 - RNA, 19 nt, Artificial Sequence
  Description of Artificial Sequence: Synthetic oligonucleotide
cugcucuauuuucaauuca

SEQ ID NO: 1440487 - RNA, 19 nt, Artificial Sequence
  Description of Artificial Sequence: Synthetic oligonucleotide
gcuaugaucucagcauggc

SEQ ID NO: 1440488 - RNA, 19 nt, Artificial Sequence
  Description of Artificial Sequence: Synthetic oligonucleotide
acgguuuggcucaggcuuc

SEQ ID NO: 1440489 - RNA, 19 nt, Artificial Sequence
  Description of Artificial Sequence: Synthetic oligonucleotide
uuacacgaagcagccccac

SEQ ID NO: 1440490 - RNA, 19 nt, Artificial Sequence
  Description of Artificial Sequence: Synthetic oligonucleotide
aggacggcugccaaaugga

SEQ ID NO: 1440491 - RNA, 19 nt, Artificial Sequence
  Description of Artificial Sequence: Synthetic oligonucleotide
ggaugcaaacgaugguuuc

SEQ ID NO: 1440492 - RNA, 19 nt, Artificial Sequence
  Description of Artificial Sequence: Synthetic oligonucleotide
gagcuauuccauuggcagu

SEQ ID NO: 1440493 - RNA, 19 nt, Artificial Sequence
  Description of Artificial Sequence: Synthetic oligonucleotide
gugagcuauggaguuggac

SEQ ID NO: 1440494 - RNA, 19 nt, Artificial Sequence
  Description of Artificial Sequence: Synthetic oligonucleotide
cuauacacauccaccacuu

SEQ ID NO: 1440495 - RNA, 19 nt, Artificial Sequence
  Description of Artificial Sequence: Synthetic oligonucleotide
ugguaagauuggagcugcu

SEQ ID NO: 1440496 - RNA, 19 nt, Artificial Sequence
  Description of Artificial Sequence: Synthetic oligonucleotide
cauuuaaacuggugguagu

SEQ ID NO: 1440497 - RNA, 19 nt, Artificial Sequence
  Description of Artificial Sequence: Synthetic oligonucleotide
aggaugcaaacgaugguuu

SEQ ID NO: 1440498 - RNA, 19 nt, Artificial Sequence
  Description of Artificial Sequence: Synthetic oligonucleotide
ggaagugcauuagcagugc

SEQ ID NO: 1440499 - RNA, 19 nt, Artificial Sequence
  Description of Artificial Sequence: Synthetic oligonucleotide
ggagaagguaucucuggaa

SEQ ID NO: 1440500 - RNA, 19 nt, Artificial Sequence
  Description of Artificial Sequence: Synthetic oligonucleotide
ugugucucauggugagcua

SEQ ID NO: 1440501 - RNA, 19 nt, Artificial Sequence
  Description of Artificial Sequence: Synthetic oligonucleotide
uuugagucccuggcacuaa

SEQ ID NO: 1440502 - RNA, 19 nt, Artificial Sequence
  Description of Artificial Sequence: Synthetic oligonucleotide
ccacuauaguuggagcugg

SEQ ID NO: 1440503 - RNA, 19 nt, Artificial Sequence
  Description of Artificial Sequence: Synthetic oligonucleotide
guagucagguggguuucug

SEQ ID NO: 1440504 - RNA, 19 nt, Artificial Sequence
  Description of Artificial Sequence: Synthetic oligonucleotide
cacgguuuggcucaggcuu

SEQ ID NO: 1440505 - RNA, 19 nt, Artificial Sequence
  Description of Artificial Sequence: Synthetic oligonucleotide
acccuggcauccaaggaca

SEQ ID NO: 1440506 - RNA, 19 nt, Artificial Sequence
  Description of Artificial Sequence: Synthetic oligonucleotide
cacuggcacuuccuuauca

SEQ ID NO: 1440507 - RNA, 19 nt, Artificial Sequence
  Description of Artificial Sequence: Synthetic oligonucleotide
cauuucguuccuguuccca

SEQ ID NO: 1440508 - RNA, 19 nt, Artificial Sequence
  Description of Artificial Sequence: Synthetic oligonucleotide
ugguuagcuggagacugua

SEQ ID NO: 1440509 - RNA, 19 nt, Artificial Sequence
  Description of Artificial Sequence: Synthetic oligonucleotide
caccugccagucaaugcuc

SEQ ID NO: 1440510 - RNA, 19 nt, Artificial Sequence
  Description of Artificial Sequence: Synthetic oligonucleotide
agcuggagacuguauccuu

SEQ ID NO: 1440511 - RNA, 19 nt, Artificial Sequence
  Description of Artificial Sequence: Synthetic oligonucleotide
cuguaugggcacuucccaa

SEQ ID NO: 1440512 - RNA, 19 nt, Artificial Sequence
  Description of Artificial Sequence: Synthetic oligonucleotide
cacaaggaacgagccggcc

SEQ ID NO: 1440513 - RNA, 19 nt, Artificial Sequence
  Description of Artificial Sequence: Synthetic oligonucleotide
gcugauagcugccccacaa

SEQ ID NO: 1440514 - RNA, 19 nt, Artificial Sequence
  Description of Artificial Sequence: Synthetic oligonucleotide
uaccuggagcuauuccauu

SEQ ID NO: 1440515 - RNA, 19 nt, Artificial Sequence
  Description of Artificial Sequence: Synthetic oligonucleotide
acuggccuauacauuucgu

SEQ ID NO: 1440516 - RNA, 19 nt, Artificial Sequence
  Description of Artificial Sequence: Synthetic oligonucleotide
ggcacuucccaaugaccac

SEQ ID NO: 1440517 - RNA, 19 nt, Artificial Sequence
  Description of Artificial Sequence: Synthetic oligonucleotide
caccacuuugaaacuaccu

SEQ ID NO: 1440518 - RNA, 19 nt, Artificial Sequence
  Description of Artificial Sequence: Synthetic oligonucleotide
cugguuugauugaaccacu

SEQ ID NO: 1440519 - RNA, 19 nt, Artificial Sequence
  Description of Artificial Sequence: Synthetic oligonucleotide
aggucaggucugagcuucc

SEQ ID NO: 1440520 - RNA, 19 nt, Artificial Sequence
  Description of Artificial Sequence: Synthetic oligonucleotide
agcuauggaguuggacagu

SEQ ID NO: 1440521 - RNA, 19 nt, Artificial Sequence
  Description of Artificial Sequence: Synthetic oligonucleotide
caguggcgucacaaacuug

SEQ ID NO: 1440522 - RNA, 19 nt, Artificial Sequence
  Description of Artificial Sequence: Synthetic oligonucleotide
cauggugagcuauggaguu

SEQ ID NO: 1440523 - RNA, 19 nt, Artificial Sequence
  Description of Artificial Sequence: Synthetic oligonucleotide
gaacugccagggucuucac

SEQ ID NO: 1440524 - RNA, 19 nt, Artificial Sequence
  Description of Artificial Sequence: Synthetic oligonucleotide
guccauucacgguuuggcu

SEQ ID NO: 1440525 - RNA, 19 nt, Artificial Sequence
  Description of Artificial Sequence: Synthetic oligonucleotide
cuaccuggagcuauuccau

SEQ ID NO: 1440526 - RNA, 19 nt, Artificial Sequence
  Description of Artificial Sequence: Synthetic oligonucleotide
guuucugauccaggaugca

SEQ ID NO: 1440527 - RNA, 19 nt, Artificial Sequence
  Description of Artificial Sequence: Synthetic oligonucleotide
auucacgguuuggcucagg

SEQ ID NO: 1440528 - RNA, 19 nt, Artificial Sequence
  Description of Artificial Sequence: Synthetic oligonucleotide
cuuugagucccuggcacua

SEQ ID NO: 1440529 - RNA, 19 nt, Artificial Sequence
  Description of Artificial Sequence: Synthetic oligonucleotide
acccugacagagucugguu

SEQ ID NO: 1440530 - RNA, 19 nt, Artificial Sequence
  Description of Artificial Sequence: Synthetic oligonucleotide
guaaugcugcuuagcagcu

SEQ ID NO: 1440531 - RNA, 19 nt, Artificial Sequence
  Description of Artificial Sequence: Synthetic oligonucleotide
auccaccacuuugaaacua

SEQ ID NO: 1440532 - RNA, 19 nt, Artificial Sequence
  Description of Artificial Sequence: Synthetic oligonucleotide
gagucugguugcuugucuu

SEQ ID NO: 1440533 - RNA, 19 nt, Artificial Sequence
  Description of Artificial Sequence: Synthetic oligonucleotide
ccugccgggcuuuacacga

SEQ ID NO: 1440534 - RNA, 19 nt, Artificial Sequence
  Description of Artificial Sequence: Synthetic oligonucleotide
cuggccuauacauuucguu

SEQ ID NO: 1440535 - RNA, 19 nt, Artificial Sequence
  Description of Artificial Sequence: Synthetic oligonucleotide
cauugaggaugucuccgcu

SEQ ID NO: 1440536 - RNA, 19 nt, Artificial Sequence
  Description of Artificial Sequence: Synthetic oligonucleotide
gcuucuggaaugaucuaaa

SEQ ID NO: 1440537 - RNA, 19 nt, Artificial Sequence
  Description of Artificial Sequence: Synthetic oligonucleotide
gcauagcacaauugagcaa

SEQ ID NO: 1440538 - RNA, 19 nt, Artificial Sequence
  Description of Artificial Sequence: Synthetic oligonucleotide
gaaacuaccuggagcuauu

SEQ ID NO: 1440539 - RNA, 19 nt, Artificial Sequence
  Description of Artificial Sequence: Synthetic oligonucleotide
guagcagcaagaguucauu

SEQ ID NO: 1440540 - RNA, 19 nt, Artificial Sequence
  Description of Artificial Sequence: Synthetic oligonucleotide
gauucgggaucuggcccga

SEQ ID NO: 1440541 - RNA, 19 nt, Artificial Sequence
  Description of Artificial Sequence: Synthetic oligonucleotide
cauucacgguuuggcucag

SEQ ID NO: 1440542 - RNA, 19 nt, Artificial Sequence
  Description of Artificial Sequence: Synthetic oligonucleotide
gcuuuacacgaagcagccc

SEQ ID NO: 1440543 - RNA, 19 nt, Artificial Sequence
  Description of Artificial Sequence: Synthetic oligonucleotide
cagcggcucuguucaaaca

SEQ ID NO: 1440544 - RNA, 19 nt, Artificial Sequence
  Description of Artificial Sequence: Synthetic oligonucleotide
ggccugguaugucagcucu

SEQ ID NO: 1440545 - RNA, 19 nt, Artificial Sequence
  Description of Artificial Sequence: Synthetic oligonucleotide
cccugccgggcuuuacacg

SEQ ID NO: 1440546 - RNA, 19 nt, Artificial Sequence
  Description of Artificial Sequence: Synthetic oligonucleotide
guucccauugagacaacuu

SEQ ID NO: 1440547 - RNA, 19 nt, Artificial Sequence
  Description of Artificial Sequence: Synthetic oligonucleotide
cuauggaguuggacagugu

SEQ ID NO: 1440548 - RNA, 19 nt, Artificial Sequence
  Description of Artificial Sequence: Synthetic oligonucleotide
ggaauccucuagauuguua

SEQ ID NO: 1440549 - RNA, 19 nt, Artificial Sequence
  Description of Artificial Sequence: Synthetic oligonucleotide
ccuguucuauacacaucca

SEQ ID NO: 1440550 - RNA, 19 nt, Artificial Sequence
  Description of Artificial Sequence: Synthetic oligonucleotide
cagccccuggcuuucucaa

SEQ ID NO: 1440551 - RNA, 19 nt, Artificial Sequence
  Description of Artificial Sequence: Synthetic oligonucleotide
cuggcacuaaagacacuau

SEQ ID NO: 1440552 - RNA, 19 nt, Artificial Sequence
  Description of Artificial Sequence: Synthetic oligonucleotide
cccauugagacaacuuccu

SEQ ID NO: 1440553 - RNA, 19 nt, Artificial Sequence
  Description of Artificial Sequence: Synthetic oligonucleotide
gcagugcacccuggcaucc

SEQ ID NO: 1440554 - RNA, 19 nt, Artificial Sequence
  Description of Artificial Sequence: Synthetic oligonucleotide
ggcucuguucaaacaguaa

SEQ ID NO: 1440555 - RNA, 19 nt, Artificial Sequence
  Description of Artificial Sequence: Synthetic oligonucleotide
ccccugccgggcuuuacac

SEQ ID NO: 1440556 - RNA, 19 nt, Artificial Sequence
  Description of Artificial Sequence: Synthetic oligonucleotide
acgagccggccugguaugu

SEQ ID NO: 1440557 - RNA, 19 nt, Artificial Sequence
  Description of Artificial Sequence: Synthetic oligonucleotide
gccgggcuuuacacgaagc

SEQ ID NO: 1440558 - RNA, 19 nt, Artificial Sequence
  Description of Artificial Sequence: Synthetic oligonucleotide
ggacuggccuauacauuuc

SEQ ID NO: 1440559 - RNA, 19 nt, Artificial Sequence
  Description of Artificial Sequence: Synthetic oligonucleotide
cacagcggcucuguucaaa

SEQ ID NO: 1440560 - RNA, 19 nt, Artificial Sequence
  Description of Artificial Sequence: Synthetic oligonucleotide
gcuacagaacugccagggu

SEQ ID NO: 1440561 - RNA, 19 nt, Artificial Sequence
  Description of Artificial Sequence: Synthetic oligonucleotide
cauggcugucauugaggau

SEQ ID NO: 1440562 - RNA, 19 nt, Artificial Sequence
  Description of Artificial Sequence: Synthetic oligonucleotide
ggaacgagccggccuggua

SEQ ID NO: 1440563 - RNA, 19 nt, Artificial Sequence
  Description of Artificial Sequence: Synthetic oligonucleotide
cagugucauggcaggaguu

SEQ ID NO: 1440564 - RNA, 19 nt, Artificial Sequence
  Description of Artificial Sequence: Synthetic oligonucleotide
cgucacaaacuugguuagc

SEQ ID NO: 1440565 - RNA, 19 nt, Artificial Sequence
  Description of Artificial Sequence: Synthetic oligonucleotide
cgggaucuggcccgagggc

SEQ ID NO: 1440566 - RNA, 19 nt, Artificial Sequence
  Description of Artificial Sequence: Synthetic oligonucleotide
cugccgggcuuuacacgaa

SEQ ID NO: 1440567 - RNA, 19 nt, Artificial Sequence
  Description of Artificial Sequence: Synthetic oligonucleotide
guggcgucacaaacuuggu

SEQ ID NO: 1440568 - RNA, 19 nt, Artificial Sequence
  Description of Artificial Sequence: Synthetic oligonucleotide
ggagugcgcuccaggcuuc

SEQ ID NO: 1440569 - RNA, 19 nt, Artificial Sequence
  Description of Artificial Sequence: Synthetic oligonucleotide
cuccccugccgggcuuuac

SEQ ID NO: 1440570 - RNA, 19 nt, Artificial Sequence
  Description of Artificial Sequence: Synthetic oligonucleotide
ggugagcuauggaguugga

SEQ ID NO: 1440571 - RNA, 19 nt, Artificial Sequence
  Description of Artificial Sequence: Synthetic oligonucleotide
gcuguccacuauaguugga

SEQ ID NO: 1440572 - RNA, 19 nt, Artificial Sequence
  Description of Artificial Sequence: Synthetic oligonucleotide
ucuccccugccgggcuuua

SEQ ID NO: 1440573 - RNA, 19 nt, Artificial Sequence
  Description of Artificial Sequence: Synthetic oligonucleotide
cugcacccugacagagucu

SEQ ID NO: 1440574 - RNA, 19 nt, Artificial Sequence
  Description of Artificial Sequence: Synthetic oligonucleotide
gcucccgauuucuuucuuu

SEQ ID NO: 1440575 - RNA, 19 nt, Artificial Sequence
  Description of Artificial Sequence: Synthetic oligonucleotide
ccaagaccuccugacaccu

SEQ ID NO: 1440576 - RNA, 19 nt, Artificial Sequence
  Description of Artificial Sequence: Synthetic oligonucleotide
cacugcacagcggcucugu

SEQ ID NO: 1440577 - RNA, 19 nt, Artificial Sequence
  Description of Artificial Sequence: Synthetic oligonucleotide
gcggcucuguucaaacagu

SEQ ID NO: 1440578 - RNA, 19 nt, Artificial Sequence
  Description of Artificial Sequence: Synthetic oligonucleotide
caguccucuuugagucccu

SEQ ID NO: 1440579 - RNA, 19 nt, Artificial Sequence
  Description of Artificial Sequence: Synthetic oligonucleotide
ccucuagauuguuacucuu

SEQ ID NO: 1440580 - RNA, 19 nt, Artificial Sequence
  Description of Artificial Sequence: Synthetic oligonucleotide
gguagucagguggguuucu

SEQ ID NO: 1440581 - RNA, 19 nt, Artificial Sequence
  Description of Artificial Sequence: Synthetic oligonucleotide
ccugauagguguccagcuu

SEQ ID NO: 1440582 - RNA, 19 nt, Artificial Sequence
  Description of Artificial Sequence: Synthetic oligonucleotide
ccuuaucaguggcgucaca

SEQ ID NO: 1440583 - RNA, 19 nt, Artificial Sequence
  Description of Artificial Sequence: Synthetic oligonucleotide
cccgagggcucccgauuuc

SEQ ID NO: 1440584 - RNA, 19 nt, Artificial Sequence
  Description of Artificial Sequence: Synthetic oligonucleotide
gaguuccaccuugcugauu

SEQ ID NO: 1440585 - RNA, 19 nt, Artificial Sequence
  Description of Artificial Sequence: Synthetic oligonucleotide
cgaugguuucuuccggagu

SEQ ID NO: 1440586 - RNA, 19 nt, Artificial Sequence
  Description of Artificial Sequence: Synthetic oligonucleotide
ccggccugguaugucagcu

SEQ ID NO: 1440587 - RNA, 19 nt, Artificial Sequence
  Description of Artificial Sequence: Synthetic oligonucleotide
ccggagugcgcuccaggcu

SEQ ID NO: 1440588 - RNA, 19 nt, Artificial Sequence
  Description of Artificial Sequence: Synthetic oligonucleotide
cggagugcgcuccaggcuu

SEQ ID NO: 1440589 - RNA, 19 nt, Artificial Sequence
  Description of Artificial Sequence: Synthetic oligonucleotide
ggcucccgauuucuuucuu

SEQ ID NO: 1440590 - RNA, 19 nt, Artificial Sequence
  Description of Artificial Sequence: Synthetic oligonucleotide
cgacugcucuauuuucaau

SEQ ID NO: 1440591 - RNA, 19 nt, Artificial Sequence
  Description of Artificial Sequence: Synthetic oligonucleotide
ccgagggcucccgauuucu

SEQ ID NO: 1440592 - RNA, 19 nt, Artificial Sequence
  Description of Artificial Sequence: Synthetic oligonucleotide
gccugguaugucagcucuu

SEQ ID NO: 1440593 - RNA, 19 nt, Artificial Sequence
  Description of Artificial Sequence: Synthetic oligonucleotide
cccuggcacuaaagacacu

SEQ ID NO: 1440594 - RNA, 19 nt, Artificial Sequence
  Description of Artificial Sequence: Synthetic oligonucleotide
aauaauaugaucugacucc

SEQ ID NO: 1440595 - RNA, 19 nt, Artificial Sequence
  Description of Artificial Sequence: Synthetic oligonucleotide
aguaaaagcaaccagaacc

SEQ ID NO: 1440596 - RNA, 19 nt, Artificial Sequence
  Description of Artificial Sequence: Synthetic oligonucleotide
aagauuaccauuuaaagca

SEQ ID NO: 1440597 - RNA, 19 nt, Artificial Sequence
  Description of Artificial Sequence: Synthetic oligonucleotide
aaagaaauauuguucagug

SEQ ID NO: 1440598 - RNA, 19 nt, Artificial Sequence
  Description of Artificial Sequence: Synthetic oligonucleotide
aaaucagcacccuaacugc

SEQ ID NO: 1440599 - RNA, 19 nt, Artificial Sequence
  Description of Artificial Sequence: Synthetic oligonucleotide
uuaagauuaccauuuaaag

SEQ ID NO: 1440600 - RNA, 19 nt, Artificial Sequence
  Description of Artificial Sequence: Synthetic oligonucleotide
ucuauucuagaacugaugc

SEQ ID NO: 1440601 - RNA, 19 nt, Artificial Sequence
  Description of Artificial Sequence: Synthetic oligonucleotide
aauaaacuuccuuauagca

SEQ ID NO: 1440602 - RNA, 19 nt, Artificial Sequence
  Description of Artificial Sequence: Synthetic oligonucleotide
ucuagcuuaguacaaagag

SEQ ID NO: 1440603 - RNA, 19 nt, Artificial Sequence
  Description of Artificial Sequence: Synthetic oligonucleotide
uuaacaauuugguaaaccc

SEQ ID NO: 1440604 - RNA, 19 nt, Artificial Sequence
  Description of Artificial Sequence: Synthetic oligonucleotide
uuauuaucucagaagauag

SEQ ID NO: 1440605 - RNA, 19 nt, Artificial Sequence
  Description of Artificial Sequence: Synthetic oligonucleotide
uaagauuaccauuuaaagc

SEQ ID NO: 1440606 - RNA, 19 nt, Artificial Sequence
  Description of Artificial Sequence: Synthetic oligonucleotide
uguauuauacagauggcug

SEQ ID NO: 1440607 - RNA, 19 nt, Artificial Sequence
  Description of Artificial Sequence: Synthetic oligonucleotide
auuaucucagaagauaggc

SEQ ID NO: 1440608 - RNA, 19 nt, Artificial Sequence
  Description of Artificial Sequence: Synthetic oligonucleotide
aauaugaucugacuccaag

SEQ ID NO: 1440609 - RNA, 19 nt, Artificial Sequence
  Description of Artificial Sequence: Synthetic oligonucleotide
ugagucauaaaacccaaag

SEQ ID NO: 1440610 - RNA, 19 nt, Artificial Sequence
  Description of Artificial Sequence: Synthetic oligonucleotide
uauucuagaacugaugcag

SEQ ID NO: 1440611 - RNA, 19 nt, Artificial Sequence
  Description of Artificial Sequence: Synthetic oligonucleotide
uagcuuaguacaaagaggu

SEQ ID NO: 1440612 - RNA, 19 nt, Artificial Sequence
  Description of Artificial Sequence: Synthetic oligonucleotide
guuuggaacacaaagcugg

SEQ ID NO: 1440613 - RNA, 19 nt, Artificial Sequence
  Description of Artificial Sequence: Synthetic oligonucleotide
auaaauaauaugaucugac

SEQ ID NO: 1440614 - RNA, 19 nt, Artificial Sequence
  Description of Artificial Sequence: Synthetic oligonucleotide
aacagucgaugcuugaagg

SEQ ID NO: 1440615 - RNA, 19 nt, Artificial Sequence
  Description of Artificial Sequence: Synthetic oligonucleotide
aguaucucaacgucuuugc

SEQ ID NO: 1440616 - RNA, 19 nt, Artificial Sequence
  Description of Artificial Sequence: Synthetic oligonucleotide
ugacuuuuaaguuauugcu

SEQ ID NO: 1440617 - RNA, 19 nt, Artificial Sequence
  Description of Artificial Sequence: Synthetic oligonucleotide
uauuggauccauuucagga

SEQ ID NO: 1440618 - RNA, 19 nt, Artificial Sequence
  Description of Artificial Sequence: Synthetic oligonucleotide
uaucucaacgucuuugccg

SEQ ID NO: 1440619 - RNA, 19 nt, Artificial Sequence
  Description of Artificial Sequence: Synthetic oligonucleotide
ucggagaggauuaaaagca

SEQ ID NO: 1440620 - RNA, 19 nt, Artificial Sequence
  Description of Artificial Sequence: Synthetic oligonucleotide
aaaagguaaauacacugaa

SEQ ID NO: 1440621 - RNA, 19 nt, Artificial Sequence
  Description of Artificial Sequence: Synthetic oligonucleotide
uuuagaaggauuuccacuc

SEQ ID NO: 1440622 - RNA, 19 nt, Artificial Sequence
  Description of Artificial Sequence: Synthetic oligonucleotide
auaauucugaccuacaaua

SEQ ID NO: 1440623 - RNA, 19 nt, Artificial Sequence
  Description of Artificial Sequence: Synthetic oligonucleotide
agucauaaaacccaaagua

SEQ ID NO: 1440624 - RNA, 19 nt, Artificial Sequence
  Description of Artificial Sequence: Synthetic oligonucleotide
aaacugacagcagaucacc

SEQ ID NO: 1440625 - RNA, 19 nt, Artificial Sequence
  Description of Artificial Sequence: Synthetic oligonucleotide
uuuaaagcaagagagguaa

SEQ ID NO: 1440626 - RNA, 19 nt, Artificial Sequence
  Description of Artificial Sequence: Synthetic oligonucleotide
uuuggaaucgcaauaggaa

SEQ ID NO: 1440627 - RNA, 19 nt, Artificial Sequence
  Description of Artificial Sequence: Synthetic oligonucleotide
cuuggaugacaucugaugg

SEQ ID NO: 1440628 - RNA, 19 nt, Artificial Sequence
  Description of Artificial Sequence: Synthetic oligonucleotide
aagaaauaaacuuccuuau

SEQ ID NO: 1440629 - RNA, 19 nt, Artificial Sequence
  Description of Artificial Sequence: Synthetic oligonucleotide
uucacucuauucuagaacu

SEQ ID NO: 1440630 - RNA, 19 nt, Artificial Sequence
  Description of Artificial Sequence: Synthetic oligonucleotide
ugucuuucggcucugccgg

SEQ ID NO: 1440631 - RNA, 19 nt, Artificial Sequence
  Description of Artificial Sequence: Synthetic oligonucleotide
uuuggggaguuucacaugc

SEQ ID NO: 1440632 - RNA, 19 nt, Artificial Sequence
  Description of Artificial Sequence: Synthetic oligonucleotide
guauugaacagucggagag

SEQ ID NO: 1440633 - RNA, 19 nt, Artificial Sequence
  Description of Artificial Sequence: Synthetic oligonucleotide
uucagugaaccuaagaaau

SEQ ID NO: 1440634 - RNA, 19 nt, Artificial Sequence
  Description of Artificial Sequence: Synthetic oligonucleotide
aaaauauaccaaaagguaa

SEQ ID NO: 1440635 - RNA, 19 nt, Artificial Sequence
  Description of Artificial Sequence: Synthetic oligonucleotide
uauuaucucagaagauagg

SEQ ID NO: 1440636 - RNA, 19 nt, Artificial Sequence
  Description of Artificial Sequence: Synthetic oligonucleotide
aacccuguauaauucugac

SEQ ID NO: 1440637 - RNA, 19 nt, Artificial Sequence
  Description of Artificial Sequence: Synthetic oligonucleotide
uuaaugaagcgcaaggcuc

SEQ ID NO: 1440638 - RNA, 19 nt, Artificial Sequence
  Description of Artificial Sequence: Synthetic oligonucleotide
agugcugaguaauucuagc

SEQ ID NO: 1440639 - RNA, 19 nt, Artificial Sequence
  Description of Artificial Sequence: Synthetic oligonucleotide
auaugaucugacuccaagg

SEQ ID NO: 1440640 - RNA, 19 nt, Artificial Sequence
  Description of Artificial Sequence: Synthetic oligonucleotide
ugauggaaugucaagugug

SEQ ID NO: 1440641 - RNA, 19 nt, Artificial Sequence
  Description of Artificial Sequence: Synthetic oligonucleotide
ucuaacugaauuauuggau

SEQ ID NO: 1440642 - RNA, 19 nt, Artificial Sequence
  Description of Artificial Sequence: Synthetic oligonucleotide
acccaaaguacucaguuuc

SEQ ID NO: 1440643 - RNA, 19 nt, Artificial Sequence
  Description of Artificial Sequence: Synthetic oligonucleotide
uaaauaauaugaucugacu

SEQ ID NO: 1440644 - RNA, 19 nt, Artificial Sequence
  Description of Artificial Sequence: Synthetic oligonucleotide
auuuccacuccacguaugc

SEQ ID NO: 1440645 - RNA, 19 nt, Artificial Sequence
  Description of Artificial Sequence: Synthetic oligonucleotide
agaaucacauucauguggc

SEQ ID NO: 1440646 - RNA, 19 nt, Artificial Sequence
  Description of Artificial Sequence: Synthetic oligonucleotide
auuaggucauuuccuauuc

SEQ ID NO: 1440647 - RNA, 19 nt, Artificial Sequence
  Description of Artificial Sequence: Synthetic oligonucleotide
aaugagugcugaguaauuc

SEQ ID NO: 1440648 - RNA, 19 nt, Artificial Sequence
  Description of Artificial Sequence: Synthetic oligonucleotide
aauuugguaaacccuguau

SEQ ID NO: 1440649 - RNA, 19 nt, Artificial Sequence
  Description of Artificial Sequence: Synthetic oligonucleotide
uuuccuauucaaguaaaag

SEQ ID NO: 1440650 - RNA, 19 nt, Artificial Sequence
  Description of Artificial Sequence: Synthetic oligonucleotide
uaacugaauuauuggaucc

SEQ ID NO: 1440651 - RNA, 19 nt, Artificial Sequence
  Description of Artificial Sequence: Synthetic oligonucleotide
ucuuauuucaggcacuuuu

SEQ ID NO: 1440652 - RNA, 19 nt, Artificial Sequence
  Description of Artificial Sequence: Synthetic oligonucleotide
auacuaaucuauaacaucu

SEQ ID NO: 1440653 - RNA, 19 nt, Artificial Sequence
  Description of Artificial Sequence: Synthetic oligonucleotide
aaggauuuccacuccacgu

SEQ ID NO: 1440654 - RNA, 19 nt, Artificial Sequence
  Description of Artificial Sequence: Synthetic oligonucleotide
aguuacaagugcuggcagc

SEQ ID NO: 1440655 - RNA, 19 nt, Artificial Sequence
  Description of Artificial Sequence: Synthetic oligonucleotide
auuguuuugguagacacca

SEQ ID NO: 1440656 - RNA, 19 nt, Artificial Sequence
  Description of Artificial Sequence: Synthetic oligonucleotide
uuuggaauggagaugugau

SEQ ID NO: 1440657 - RNA, 19 nt, Artificial Sequence
  Description of Artificial Sequence: Synthetic oligonucleotide
aacuuaaauacuaaucuau

SEQ ID NO: 1440658 - RNA, 19 nt, Artificial Sequence
  Description of Artificial Sequence: Synthetic oligonucleotide
ugaagcgcaaggcucagcc

SEQ ID NO: 1440659 - RNA, 19 nt, Artificial Sequence
  Description of Artificial Sequence: Synthetic oligonucleotide
cuacugcaaacuuaaauac

SEQ ID NO: 1440660 - RNA, 19 nt, Artificial Sequence
  Description of Artificial Sequence: Synthetic oligonucleotide
uguagcuacuaucaaaaua

SEQ ID NO: 1440661 - RNA, 19 nt, Artificial Sequence
  Description of Artificial Sequence: Synthetic oligonucleotide
uuucaggcacuuuuaaagc

SEQ ID NO: 1440662 - RNA, 19 nt, Artificial Sequence
  Description of Artificial Sequence: Synthetic oligonucleotide
uuugguaaacccuguauaa

SEQ ID NO: 1440663 - RNA, 19 nt, Artificial Sequence
  Description of Artificial Sequence: Synthetic oligonucleotide
cuacuaucaaaauaaauaa

SEQ ID NO: 1440664 - RNA, 19 nt, Artificial Sequence
  Description of Artificial Sequence: Synthetic oligonucleotide
cuaacugaauuauuggauc

SEQ ID NO: 1440665 - RNA, 19 nt, Artificial Sequence
  Description of Artificial Sequence: Synthetic oligonucleotide
uggcuuuugacauucagau

SEQ ID NO: 1440666 - RNA, 19 nt, Artificial Sequence
  Description of Artificial Sequence: Synthetic oligonucleotide
uuugaaaugagugcugagu

SEQ ID NO: 1440667 - RNA, 19 nt, Artificial Sequence
  Description of Artificial Sequence: Synthetic oligonucleotide
auaacaucuaacugaauua

SEQ ID NO: 1440668 - RNA, 19 nt, Artificial Sequence
  Description of Artificial Sequence: Synthetic oligonucleotide
uuauuggauccauuucagg

SEQ ID NO: 1440669 - RNA, 19 nt, Artificial Sequence
  Description of Artificial Sequence: Synthetic oligonucleotide
uaauuugaaaugagugcug

SEQ ID NO: 1440670 - RNA, 19 nt, Artificial Sequence
  Description of Artificial Sequence: Synthetic oligonucleotide
guagcuacuaucaaaauaa

SEQ ID NO: 1440671 - RNA, 19 nt, Artificial Sequence
  Description of Artificial Sequence: Synthetic oligonucleotide
ugaccuacaauauuacaaa

SEQ ID NO: 1440672 - RNA, 19 nt, Artificial Sequence
  Description of Artificial Sequence: Synthetic oligonucleotide
aacugcuuagugcucagga

SEQ ID NO: 1440673 - RNA, 19 nt, Artificial Sequence
  Description of Artificial Sequence: Synthetic oligonucleotide
gucggagaggauuaaaagc

SEQ ID NO: 1440674 - RNA, 19 nt, Artificial Sequence
  Description of Artificial Sequence: Synthetic oligonucleotide
ucgcaauaggaauaaauuc

SEQ ID NO: 1440675 - RNA, 19 nt, Artificial Sequence
  Description of Artificial Sequence: Synthetic oligonucleotide
ugaucugacuccaagguuu

SEQ ID NO: 1440676 - RNA, 19 nt, Artificial Sequence
  Description of Artificial Sequence: Synthetic oligonucleotide
uaaugaagcgcaaggcuca

SEQ ID NO: 1440677 - RNA, 19 nt, Artificial Sequence
  Description of Artificial Sequence: Synthetic oligonucleotide
uauacagauggcuguagcu

SEQ ID NO: 1440678 - RNA, 19 nt, Artificial Sequence
  Description of Artificial Sequence: Synthetic oligonucleotide
agucggagaggauuaaaag

SEQ ID NO: 1440679 - RNA, 19 nt, Artificial Sequence
  Description of Artificial Sequence: Synthetic oligonucleotide
ugcaauaaaugcucugucu

SEQ ID NO: 1440680 - RNA, 19 nt, Artificial Sequence
  Description of Artificial Sequence: Synthetic oligonucleotide
gaugcuugaaggugguuug

SEQ ID NO: 1440681 - RNA, 19 nt, Artificial Sequence
  Description of Artificial Sequence: Synthetic oligonucleotide
caagguuuaacucugagcu

SEQ ID NO: 1440682 - RNA, 19 nt, Artificial Sequence
  Description of Artificial Sequence: Synthetic oligonucleotide
gcugguauugaacagucgg

SEQ ID NO: 1440683 - RNA, 19 nt, Artificial Sequence
  Description of Artificial Sequence: Synthetic oligonucleotide
agaaguucccaacagucga

SEQ ID NO: 1440684 - RNA, 19 nt, Artificial Sequence
  Description of Artificial Sequence: Synthetic oligonucleotide
aagcgcaaggcucagccug

SEQ ID NO: 1440685 - RNA, 19 nt, Artificial Sequence
  Description of Artificial Sequence: Synthetic oligonucleotide
aggaagaguacaaugcaac

SEQ ID NO: 1440686 - RNA, 19 nt, Artificial Sequence
  Description of Artificial Sequence: Synthetic oligonucleotide
gaaccuaagaaauaaacuu

SEQ ID NO: 1440687 - RNA, 19 nt, Artificial Sequence
  Description of Artificial Sequence: Synthetic oligonucleotide
agguaaauacacugaaugu

SEQ ID NO: 1440688 - RNA, 19 nt, Artificial Sequence
  Description of Artificial Sequence: Synthetic oligonucleotide
gagguaaggacguucuggc

SEQ ID NO: 1440689 - RNA, 19 nt, Artificial Sequence
  Description of Artificial Sequence: Synthetic oligonucleotide
uucaggauugugcuuauua

SEQ ID NO: 1440690 - RNA, 19 nt, Artificial Sequence
  Description of Artificial Sequence: Synthetic oligonucleotide
aauucugaccuacaauauu

SEQ ID NO: 1440691 - RNA, 19 nt, Artificial Sequence
  Description of Artificial Sequence: Synthetic oligonucleotide
aagaaaaucagcacccuaa

SEQ ID NO: 1440692 - RNA, 19 nt, Artificial Sequence
  Description of Artificial Sequence: Synthetic oligonucleotide
aguucccaacagucgaugc

SEQ ID NO: 1440693 - RNA, 19 nt, Artificial Sequence
  Description of Artificial Sequence: Synthetic oligonucleotide
uguauaauucugaccuaca

SEQ ID NO: 1440694 - RNA, 19 nt, Artificial Sequence
  Description of Artificial Sequence: Synthetic oligonucleotide
ggauuaaaagcaguguugg

SEQ ID NO: 1440695 - RNA, 19 nt, Artificial Sequence
  Description of Artificial Sequence: Synthetic oligonucleotide
gaaacugagaaugacuuaa

SEQ ID NO: 1440696 - RNA, 19 nt, Artificial Sequence
  Description of Artificial Sequence: Synthetic oligonucleotide
ugcugaguaauucuagcuc

SEQ ID NO: 1440697 - RNA, 19 nt, Artificial Sequence
  Description of Artificial Sequence: Synthetic oligonucleotide
ugguauugaacagucggag

SEQ ID NO: 1440698 - RNA, 19 nt, Artificial Sequence
  Description of Artificial Sequence: Synthetic oligonucleotide
ugguuuggaauggagaugu

SEQ ID NO: 1440699 - RNA, 19 nt, Artificial Sequence
  Description of Artificial Sequence: Synthetic oligonucleotide
uauugaacagucggagagg

SEQ ID NO: 1440700 - RNA, 19 nt, Artificial Sequence
  Description of Artificial Sequence: Synthetic oligonucleotide
agcuuuugaccaucacugc

SEQ ID NO: 1440701 - RNA, 19 nt, Artificial Sequence
  Description of Artificial Sequence: Synthetic oligonucleotide
acaccauuugguuccacag

SEQ ID NO: 1440702 - RNA, 19 nt, Artificial Sequence
  Description of Artificial Sequence: Synthetic oligonucleotide
auuugguaaacccuguaua

SEQ ID NO: 1440703 - RNA, 19 nt, Artificial Sequence
  Description of Artificial Sequence: Synthetic oligonucleotide
uacugcaaacuuaaauacu

SEQ ID NO: 1440704 - RNA, 19 nt, Artificial Sequence
  Description of Artificial Sequence: Synthetic oligonucleotide
uaauucuagcucccaaacu

SEQ ID NO: 1440705 - RNA, 19 nt, Artificial Sequence
  Description of Artificial Sequence: Synthetic oligonucleotide
aucucaacgucuuugccgu

SEQ ID NO: 1440706 - RNA, 19 nt, Artificial Sequence
  Description of Artificial Sequence: Synthetic oligonucleotide
uguggagacucacuccaag

SEQ ID NO: 1440707 - RNA, 19 nt, Artificial Sequence
  Description of Artificial Sequence: Synthetic oligonucleotide
uccacaguuacaagugcug

SEQ ID NO: 1440708 - RNA, 19 nt, Artificial Sequence
  Description of Artificial Sequence: Synthetic oligonucleotide
aaucgcaauaggaauaaau

SEQ ID NO: 1440709 - RNA, 19 nt, Artificial Sequence
  Description of Artificial Sequence: Synthetic oligonucleotide
uuggaaucgcaauaggaau

SEQ ID NO: 1440710 - RNA, 19 nt, Artificial Sequence
  Description of Artificial Sequence: Synthetic oligonucleotide
gaucacgccccuuuagaag

SEQ ID NO: 1440711 - RNA, 19 nt, Artificial Sequence
  Description of Artificial Sequence: Synthetic oligonucleotide
uuauuucaggcacuuuuaa

SEQ ID NO: 1440712 - RNA, 19 nt, Artificial Sequence
  Description of Artificial Sequence: Synthetic oligonucleotide
cagaaguucccaacagucg

SEQ ID NO: 1440713 - RNA, 19 nt, Artificial Sequence
  Description of Artificial Sequence: Synthetic oligonucleotide
aagggcuuaaugaagcgca

SEQ ID NO: 1440714 - RNA, 19 nt, Artificial Sequence
  Description of Artificial Sequence: Synthetic oligonucleotide
aguaauucuagcucccaaa

SEQ ID NO: 1440715 - RNA, 19 nt, Artificial Sequence
  Description of Artificial Sequence: Synthetic oligonucleotide
uuucacaugccuccauugu

SEQ ID NO: 1440716 - RNA, 19 nt, Artificial Sequence
  Description of Artificial Sequence: Synthetic oligonucleotide
uuaaagcaagagagguaag

SEQ ID NO: 1440717 - RNA, 19 nt, Artificial Sequence
  Description of Artificial Sequence: Synthetic oligonucleotide
auuauuggauccauuucag

SEQ ID NO: 1440718 - RNA, 19 nt, Artificial Sequence
  Description of Artificial Sequence: Synthetic oligonucleotide
aggauugugcuuauuaucu

SEQ ID NO: 1440719 - RNA, 19 nt, Artificial Sequence
  Description of Artificial Sequence: Synthetic oligonucleotide
ggcuuaaugaagcgcaagg

SEQ ID NO: 1440720 - RNA, 19 nt, Artificial Sequence
  Description of Artificial Sequence: Synthetic oligonucleotide
aagcugguauugaacaguc

SEQ ID NO: 1440721 - RNA, 19 nt, Artificial Sequence
  Description of Artificial Sequence: Synthetic oligonucleotide
gggcaaaaguaucucaacg

SEQ ID NO: 1440722 - RNA, 19 nt, Artificial Sequence
  Description of Artificial Sequence: Synthetic oligonucleotide
guggcagucuuauuucagg

SEQ ID NO: 1440723 - RNA, 19 nt, Artificial Sequence
  Description of Artificial Sequence: Synthetic oligonucleotide
ugguaaacccuguauaauu

SEQ ID NO: 1440724 - RNA, 19 nt, Artificial Sequence
  Description of Artificial Sequence: Synthetic oligonucleotide
aaggaugaugccugggaau

SEQ ID NO: 1440725 - RNA, 19 nt, Artificial Sequence
  Description of Artificial Sequence: Synthetic oligonucleotide
uccccuucuagcuuaguac

SEQ ID NO: 1440726 - RNA, 19 nt, Artificial Sequence
  Description of Artificial Sequence: Synthetic oligonucleotide
gcugaguaauucuagcucc

SEQ ID NO: 1440727 - RNA, 19 nt, Artificial Sequence
  Description of Artificial Sequence: Synthetic oligonucleotide
uggaaucgcaauaggaaua

SEQ ID NO: 1440728 - RNA, 19 nt, Artificial Sequence
  Description of Artificial Sequence: Synthetic oligonucleotide
uggaauggagaugugauuu

SEQ ID NO: 1440729 - RNA, 19 nt, Artificial Sequence
  Description of Artificial Sequence: Synthetic oligonucleotide
uguuuugguagacaccauu

SEQ ID NO: 1440730 - RNA, 19 nt, Artificial Sequence
  Description of Artificial Sequence: Synthetic oligonucleotide
aggauuaaaagcaguguug

SEQ ID NO: 1440731 - RNA, 19 nt, Artificial Sequence
  Description of Artificial Sequence: Synthetic oligonucleotide
auaauaugaucugacucca

SEQ ID NO: 1440732 - RNA, 19 nt, Artificial Sequence
  Description of Artificial Sequence: Synthetic oligonucleotide
cucuauucuagaacugaug

SEQ ID NO: 1440733 - RNA, 19 nt, Artificial Sequence
  Description of Artificial Sequence: Synthetic oligonucleotide
augagugcugaguaauucu

SEQ ID NO: 1440734 - RNA, 19 nt, Artificial Sequence
  Description of Artificial Sequence: Synthetic oligonucleotide
aacugaauuauuggaucca

SEQ ID NO: 1440735 - RNA, 19 nt, Artificial Sequence
  Description of Artificial Sequence: Synthetic oligonucleotide
uggcagucuuauuucaggc

SEQ ID NO: 1440736 - RNA, 19 nt, Artificial Sequence
  Description of Artificial Sequence: Synthetic oligonucleotide
cuuauagcauuucucucuc

SEQ ID NO: 1440737 - RNA, 19 nt, Artificial Sequence
  Description of Artificial Sequence: Synthetic oligonucleotide
ucaaguguggagacucacu

SEQ ID NO: 1440738 - RNA, 19 nt, Artificial Sequence
  Description of Artificial Sequence: Synthetic oligonucleotide
acugaugcaggaaacugag

SEQ ID NO: 1440739 - RNA, 19 nt, Artificial Sequence
  Description of Artificial Sequence: Synthetic oligonucleotide
ugaacagucggagaggauu

SEQ ID NO: 1440740 - RNA, 19 nt, Artificial Sequence
  Description of Artificial Sequence: Synthetic oligonucleotide
gauuaccauuuaaagcaag

SEQ ID NO: 1440741 - RNA, 19 nt, Artificial Sequence
  Description of Artificial Sequence: Synthetic oligonucleotide
uuaggucauuuccuauuca

SEQ ID NO: 1440742 - RNA, 19 nt, Artificial Sequence
  Description of Artificial Sequence: Synthetic oligonucleotide
uuuggaacacaaagcuggu

SEQ ID NO: 1440743 - RNA, 19 nt, Artificial Sequence
  Description of Artificial Sequence: Synthetic oligonucleotide
agaagauaggcaacuagca

SEQ ID NO: 1440744 - RNA, 19 nt, Artificial Sequence
  Description of Artificial Sequence: Synthetic oligonucleotide
uucugcaauaaaugcucug

SEQ ID NO: 1440745 - RNA, 19 nt, Artificial Sequence
  Description of Artificial Sequence: Synthetic oligonucleotide
aacugaugcaggaaacuga

SEQ ID NO: 1440746 - RNA, 19 nt, Artificial Sequence
  Description of Artificial Sequence: Synthetic oligonucleotide
cugauuagaagguucagcu

SEQ ID NO: 1440747 - RNA, 19 nt, Artificial Sequence
  Description of Artificial Sequence: Synthetic oligonucleotide
cugaguaauucuagcuccc

SEQ ID NO: 1440748 - RNA, 19 nt, Artificial Sequence
  Description of Artificial Sequence: Synthetic oligonucleotide
uggcauuggagucucuccu

SEQ ID NO: 1440749 - RNA, 19 nt, Artificial Sequence
  Description of Artificial Sequence: Synthetic oligonucleotide
agcauguucaucugggaua

SEQ ID NO: 1440750 - RNA, 19 nt, Artificial Sequence
  Description of Artificial Sequence: Synthetic oligonucleotide
cuguauaauucugaccuac

SEQ ID NO: 1440751 - RNA, 19 nt, Artificial Sequence
  Description of Artificial Sequence: Synthetic oligonucleotide
caacagucgaugcuugaag

SEQ ID NO: 1440752 - RNA, 19 nt, Artificial Sequence
  Description of Artificial Sequence: Synthetic oligonucleotide
auuaccauuuaaagcaaga

SEQ ID NO: 1440753 - RNA, 19 nt, Artificial Sequence
  Description of Artificial Sequence: Synthetic oligonucleotide
cugccggagaaucacauuc

SEQ ID NO: 1440754 - RNA, 19 nt, Artificial Sequence
  Description of Artificial Sequence: Synthetic oligonucleotide
agagaucacgccccuuuag

SEQ ID NO: 1440755 - RNA, 19 nt, Artificial Sequence
  Description of Artificial Sequence: Synthetic oligonucleotide
acgucuuugccguuggcca

SEQ ID NO: 1440756 - RNA, 19 nt, Artificial Sequence
  Description of Artificial Sequence: Synthetic oligonucleotide
uaacucugagcucuuggau

SEQ ID NO: 1440757 - RNA, 19 nt, Artificial Sequence
  Description of Artificial Sequence: Synthetic oligonucleotide
gacuccaagguuuaacucu

SEQ ID NO: 1440758 - RNA, 19 nt, Artificial Sequence
  Description of Artificial Sequence: Synthetic oligonucleotide
agucgaugcuugaaggugg

SEQ ID NO: 1440759 - RNA, 19 nt, Artificial Sequence
  Description of Artificial Sequence: Synthetic oligonucleotide
auauuacaaagagugacuu

SEQ ID NO: 1440760 - RNA, 19 nt, Artificial Sequence
  Description of Artificial Sequence: Synthetic oligonucleotide
auauuguucagugaaccua

SEQ ID NO: 1440761 - RNA, 19 nt, Artificial Sequence
  Description of Artificial Sequence: Synthetic oligonucleotide
ugggcaaaaguaucucaac

SEQ ID NO: 1440762 - RNA, 19 nt, Artificial Sequence
  Description of Artificial Sequence: Synthetic oligonucleotide
uggggaguuucacaugccu

SEQ ID NO: 1440763 - RNA, 19 nt, Artificial Sequence
  Description of Artificial Sequence: Synthetic oligonucleotide
auugaacagucggagagga

SEQ ID NO: 1440764 - RNA, 19 nt, Artificial Sequence
  Description of Artificial Sequence: Synthetic oligonucleotide
agaaggauuuccacuccac

SEQ ID NO: 1440765 - RNA, 19 nt, Artificial Sequence
  Description of Artificial Sequence: Synthetic oligonucleotide
aucgcaauaggaauaaauu

SEQ ID NO: 1440766 - RNA, 19 nt, Artificial Sequence
  Description of Artificial Sequence: Synthetic oligonucleotide
gagacucacuccaagggac

SEQ ID NO: 1440767 - RNA, 19 nt, Artificial Sequence
  Description of Artificial Sequence: Synthetic oligonucleotide
ucugacuccaagguuuaac

SEQ ID NO: 1440768 - RNA, 19 nt, Artificial Sequence
  Description of Artificial Sequence: Synthetic oligonucleotide
uccuuauagcauuucucuc

SEQ ID NO: 1440769 - RNA, 19 nt, Artificial Sequence
  Description of Artificial Sequence: Synthetic oligonucleotide
auacacugaauguauuaua

SEQ ID NO: 1440770 - RNA, 19 nt, Artificial Sequence
  Description of Artificial Sequence: Synthetic oligonucleotide
acagucgaugcuugaaggu

SEQ ID NO: 1440771 - RNA, 19 nt, Artificial Sequence
  Description of Artificial Sequence: Synthetic oligonucleotide
acguaugcaaaccuugguu

SEQ ID NO: 1440772 - RNA, 19 nt, Artificial Sequence
  Description of Artificial Sequence: Synthetic oligonucleotide
auucugaccuacaauauua

SEQ ID NO: 1440773 - RNA, 19 nt, Artificial Sequence
  Description of Artificial Sequence: Synthetic oligonucleotide
accuacaauauuacaaaga

SEQ ID NO: 1440774 - RNA, 19 nt, Artificial Sequence
  Description of Artificial Sequence: Synthetic oligonucleotide
uuacaaagagugacuuuua

SEQ ID NO: 1440775 - RNA, 19 nt, Artificial Sequence
  Description of Artificial Sequence: Synthetic oligonucleotide
cuagaacugaugcaggaaa

SEQ ID NO: 1440776 - RNA, 19 nt, Artificial Sequence
  Description of Artificial Sequence: Synthetic oligonucleotide
guauuauacagauggcugu

SEQ ID NO: 1440777 - RNA, 19 nt, Artificial Sequence
  Description of Artificial Sequence: Synthetic oligonucleotide
cuauucuagaacugaugca

SEQ ID NO: 1440778 - RNA, 19 nt, Artificial Sequence
  Description of Artificial Sequence: Synthetic oligonucleotide
ucauuaggucauuuccuau

SEQ ID NO: 1440779 - RNA, 19 nt, Artificial Sequence
  Description of Artificial Sequence: Synthetic oligonucleotide
ugacuccaagguuuaacuc

SEQ ID NO: 1440780 - RNA, 19 nt, Artificial Sequence
  Description of Artificial Sequence: Synthetic oligonucleotide
guaucucaacgucuuugcc

SEQ ID NO: 1440781 - RNA, 19 nt, Artificial Sequence
  Description of Artificial Sequence: Synthetic oligonucleotide
acaaagaggugagucauaa

SEQ ID NO: 1440782 - RNA, 19 nt, Artificial Sequence
  Description of Artificial Sequence: Synthetic oligonucleotide
aggaaacugagaaugacuu

SEQ ID NO: 1440783 - RNA, 19 nt, Artificial Sequence
  Description of Artificial Sequence: Synthetic oligonucleotide
gagaucacgccccuuuaga

SEQ ID NO: 1440784 - RNA, 19 nt, Artificial Sequence
  Description of Artificial Sequence: Synthetic oligonucleotide
aaggugguuuggaauggag

SEQ ID NO: 1440785 - RNA, 19 nt, Artificial Sequence
  Description of Artificial Sequence: Synthetic oligonucleotide
agagugacuuuuaaguuau

SEQ ID NO: 1440786 - RNA, 19 nt, Artificial Sequence
  Description of Artificial Sequence: Synthetic oligonucleotide
aaguucccaacagucgaug

SEQ ID NO: 1440787 - RNA, 19 nt, Artificial Sequence
  Description of Artificial Sequence: Synthetic oligonucleotide
gaucaccgccgucuguggg

SEQ ID NO: 1440788 - RNA, 19 nt, Artificial Sequence
  Description of Artificial Sequence: Synthetic oligonucleotide
ugauuagaagguucagcuu

SEQ ID NO: 1440789 - RNA, 19 nt, Artificial Sequence
  Description of Artificial Sequence: Synthetic oligonucleotide
aggugagucauaaaaccca

SEQ ID NO: 1440790 - RNA, 19 nt, Artificial Sequence
  Description of Artificial Sequence: Synthetic oligonucleotide
aaaguaucucaacgucuuu

SEQ ID NO: 1440791 - RNA, 19 nt, Artificial Sequence
  Description of Artificial Sequence: Synthetic oligonucleotide
gagugcugaguaauucuag

SEQ ID NO: 1440792 - RNA, 19 nt, Artificial Sequence
  Description of Artificial Sequence: Synthetic oligonucleotide
ugccggagaaucacauuca

SEQ ID NO: 1440793 - RNA, 19 nt, Artificial Sequence
  Description of Artificial Sequence: Synthetic oligonucleotide
acuccacguaugcaaaccu

SEQ ID NO: 1440794 - RNA, 19 nt, Artificial Sequence
  Description of Artificial Sequence: Synthetic oligonucleotide
caagggcuuaaugaagcgc

SEQ ID NO: 1440795 - RNA, 19 nt, Artificial Sequence
  Description of Artificial Sequence: Synthetic oligonucleotide
agaucacgccccuuuagaa

SEQ ID NO: 1440796 - RNA, 19 nt, Artificial Sequence
  Description of Artificial Sequence: Synthetic oligonucleotide
ccaagguuuaacucugagc

SEQ ID NO: 1440797 - RNA, 19 nt, Artificial Sequence
  Description of Artificial Sequence: Synthetic oligonucleotide
uugguuccacaguuacaag

SEQ ID NO: 1440798 - RNA, 19 nt, Artificial Sequence
  Description of Artificial Sequence: Synthetic oligonucleotide
aguacucaguuucuacuua

SEQ ID NO: 1440799 - RNA, 19 nt, Artificial Sequence
  Description of Artificial Sequence: Synthetic oligonucleotide
uacucaguuucuacuuaaa

SEQ ID NO: 1440800 - RNA, 19 nt, Artificial Sequence
  Description of Artificial Sequence: Synthetic oligonucleotide
caaaaguaucucaacgucu

SEQ ID NO: 1440801 - RNA, 19 nt, Artificial Sequence
  Description of Artificial Sequence: Synthetic oligonucleotide
ugaguaauucuagcuccca

SEQ ID NO: 1440802 - RNA, 19 nt, Artificial Sequence
  Description of Artificial Sequence: Synthetic oligonucleotide
acacaccccuacugcaaac

SEQ ID NO: 1440803 - RNA, 19 nt, Artificial Sequence
  Description of Artificial Sequence: Synthetic oligonucleotide
uaauaugaucugacuccaa

SEQ ID NO: 1440804 - RNA, 19 nt, Artificial Sequence
  Description of Artificial Sequence: Synthetic oligonucleotide
cacuccaagggacuagcug

SEQ ID NO: 1440805 - RNA, 19 nt, Artificial Sequence
  Description of Artificial Sequence: Synthetic oligonucleotide
gugauuucacucuauucua

SEQ ID NO: 1440806 - RNA, 19 nt, Artificial Sequence
  Description of Artificial Sequence: Synthetic oligonucleotide
uuagugcucaggaggguuu

SEQ ID NO: 1440807 - RNA, 19 nt, Artificial Sequence
  Description of Artificial Sequence: Synthetic oligonucleotide
cuaacugcuuagugcucag

SEQ ID NO: 1440808 - RNA, 19 nt, Artificial Sequence
  Description of Artificial Sequence: Synthetic oligonucleotide
guuuggaauggagauguga

SEQ ID NO: 1440809 - RNA, 19 nt, Artificial Sequence
  Description of Artificial Sequence: Synthetic oligonucleotide
gacguucuggcauuggagu

SEQ ID NO: 1440810 - RNA, 19 nt, Artificial Sequence
  Description of Artificial Sequence: Synthetic oligonucleotide
uugguaaacccuguauaau

SEQ ID NO: 1440811 - RNA, 19 nt, Artificial Sequence
  Description of Artificial Sequence: Synthetic oligonucleotide
aggacguucuggcauugga

SEQ ID NO: 1440812 - RNA, 19 nt, Artificial Sequence
  Description of Artificial Sequence: Synthetic oligonucleotide
gguagacaccauuugguuc

SEQ ID NO: 1440813 - RNA, 19 nt, Artificial Sequence
  Description of Artificial Sequence: Synthetic oligonucleotide
agaucaccgccgucugugg

SEQ ID NO: 1440814 - RNA, 19 nt, Artificial Sequence
  Description of Artificial Sequence: Synthetic oligonucleotide
ucagcacccuaacugcuua

SEQ ID NO: 1440815 - RNA, 19 nt, Artificial Sequence
  Description of Artificial Sequence: Synthetic oligonucleotide
caggcacuuuuaaagcaug

SEQ ID NO: 1440816 - RNA, 19 nt, Artificial Sequence
  Description of Artificial Sequence: Synthetic oligonucleotide
cugguauugaacagucgga

SEQ ID NO: 1440817 - RNA, 19 nt, Artificial Sequence
  Description of Artificial Sequence: Synthetic oligonucleotide
uuauagcauuucucucucu

SEQ ID NO: 1440818 - RNA, 19 nt, Artificial Sequence
  Description of Artificial Sequence: Synthetic oligonucleotide
gcuggauugcuuuggggag

SEQ ID NO: 1440819 - RNA, 19 nt, Artificial Sequence
  Description of Artificial Sequence: Synthetic oligonucleotide
auguggcagucuuauuuca

SEQ ID NO: 1440820 - RNA, 19 nt, Artificial Sequence
  Description of Artificial Sequence: Synthetic oligonucleotide
uuggggaguuucacaugcc

SEQ ID NO: 1440821 - RNA, 19 nt, Artificial Sequence
  Description of Artificial Sequence: Synthetic oligonucleotide
cgcaauaggaauaaauuca

SEQ ID NO: 1440822 - RNA, 19 nt, Artificial Sequence
  Description of Artificial Sequence: Synthetic oligonucleotide
caguuacaagugcuggcag

SEQ ID NO: 1440823 - RNA, 19 nt, Artificial Sequence
  Description of Artificial Sequence: Synthetic oligonucleotide
gcuuaaugaagcgcaaggc

SEQ ID NO: 1440824 - RNA, 19 nt, Artificial Sequence
  Description of Artificial Sequence: Synthetic oligonucleotide
cagucgaugcuugaaggug

SEQ ID NO: 1440825 - RNA, 19 nt, Artificial Sequence
  Description of Artificial Sequence: Synthetic oligonucleotide
cuccugauuagaagguuca

SEQ ID NO: 1440826 - RNA, 19 nt, Artificial Sequence
  Description of Artificial Sequence: Synthetic oligonucleotide
acugaauuauuggauccau

SEQ ID NO: 1440827 - RNA, 19 nt, Artificial Sequence
  Description of Artificial Sequence: Synthetic oligonucleotide
cacuccacguaugcaaacc

SEQ ID NO: 1440828 - RNA, 19 nt, Artificial Sequence
  Description of Artificial Sequence: Synthetic oligonucleotide
aaacugagaaugacuuaau

SEQ ID NO: 1440829 - RNA, 19 nt, Artificial Sequence
  Description of Artificial Sequence: Synthetic oligonucleotide
aaggacguucuggcauugg

SEQ ID NO: 1440830 - RNA, 19 nt, Artificial Sequence
  Description of Artificial Sequence: Synthetic oligonucleotide
cucauuaggucauuuccua

SEQ ID NO: 1440831 - RNA, 19 nt, Artificial Sequence
  Description of Artificial Sequence: Synthetic oligonucleotide
cucacuccaagggacuagc

SEQ ID NO: 1440832 - RNA, 19 nt, Artificial Sequence
  Description of Artificial Sequence: Synthetic oligonucleotide
agcuacuaucaaaauaaau

SEQ ID NO: 1440833 - RNA, 19 nt, Artificial Sequence
  Description of Artificial Sequence: Synthetic oligonucleotide
guacucaguuucuacuuaa

SEQ ID NO: 1440834 - RNA, 19 nt, Artificial Sequence
  Description of Artificial Sequence: Synthetic oligonucleotide
auucuagcucccaaacuga

SEQ ID NO: 1440835 - RNA, 19 nt, Artificial Sequence
  Description of Artificial Sequence: Synthetic oligonucleotide
guaaacccuguauaauucu

SEQ ID NO: 1440836 - RNA, 19 nt, Artificial Sequence
  Description of Artificial Sequence: Synthetic oligonucleotide
aaaugagugcugaguaauu

SEQ ID NO: 1440837 - RNA, 19 nt, Artificial Sequence
  Description of Artificial Sequence: Synthetic oligonucleotide
cacacacacacaccccuac

SEQ ID NO: 1440838 - RNA, 19 nt, Artificial Sequence
  Description of Artificial Sequence: Synthetic oligonucleotide
uuuccacuccacguaugca

SEQ ID NO: 1440839 - RNA, 19 nt, Artificial Sequence
  Description of Artificial Sequence: Synthetic oligonucleotide
gguauugaacagucggaga

SEQ ID NO: 1440840 - RNA, 19 nt, Artificial Sequence
  Description of Artificial Sequence: Synthetic oligonucleotide
cccuguauaauucugaccu

SEQ ID NO: 1440841 - RNA, 19 nt, Artificial Sequence
  Description of Artificial Sequence: Synthetic oligonucleotide
acaauuugguaaacccugu

SEQ ID NO: 1440842 - RNA, 19 nt, Artificial Sequence
  Description of Artificial Sequence: Synthetic oligonucleotide
ggcaaaaguaucucaacgu

SEQ ID NO: 1440843 - RNA, 19 nt, Artificial Sequence
  Description of Artificial Sequence: Synthetic oligonucleotide
uuucggcucugccggagaa

SEQ ID NO: 1440844 - RNA, 19 nt, Artificial Sequence
  Description of Artificial Sequence: Synthetic oligonucleotide
gucaaggaugaugccuggg

SEQ ID NO: 1440845 - RNA, 19 nt, Artificial Sequence
  Description of Artificial Sequence: Synthetic oligonucleotide
agguaaggacguucuggca

SEQ ID NO: 1440846 - RNA, 19 nt, Artificial Sequence
  Description of Artificial Sequence: Synthetic oligonucleotide
gguuuggaacacaaagcug

SEQ ID NO: 1440847 - RNA, 19 nt, Artificial Sequence
  Description of Artificial Sequence: Synthetic oligonucleotide
gcuguagcuacuaucaaaa

SEQ ID NO: 1440848 - RNA, 19 nt, Artificial Sequence
  Description of Artificial Sequence: Synthetic oligonucleotide
acacacacacaccccuacu

SEQ ID NO: 1440849 - RNA, 19 nt, Artificial Sequence
  Description of Artificial Sequence: Synthetic oligonucleotide
cagucggagaggauuaaaa

SEQ ID NO: 1440850 - RNA, 19 nt, Artificial Sequence
  Description of Artificial Sequence: Synthetic oligonucleotide
ccacguaugcaaaccuugg

SEQ ID NO: 1440851 - RNA, 19 nt, Artificial Sequence
  Description of Artificial Sequence: Synthetic oligonucleotide
acucuauucuagaacugau

SEQ ID NO: 1440852 - RNA, 19 nt, Artificial Sequence
  Description of Artificial Sequence: Synthetic oligonucleotide
agauuaccauuuaaagcaa

SEQ ID NO: 1440853 - RNA, 19 nt, Artificial Sequence
  Description of Artificial Sequence: Synthetic oligonucleotide
augaagcgcaaggcucagc

SEQ ID NO: 1440854 - RNA, 19 nt, Artificial Sequence
  Description of Artificial Sequence: Synthetic oligonucleotide
ucggcucugccggagaauc

SEQ ID NO: 1440855 - RNA, 19 nt, Artificial Sequence
  Description of Artificial Sequence: Synthetic oligonucleotide
caaggaugaugccugggaa

SEQ ID NO: 1440856 - RNA, 19 nt, Artificial Sequence
  Description of Artificial Sequence: Synthetic oligonucleotide
agucuuauuucaggcacuu

SEQ ID NO: 1440857 - RNA, 19 nt, Artificial Sequence
  Description of Artificial Sequence: Synthetic oligonucleotide
acucacuccaagggacuag

SEQ ID NO: 1440858 - RNA, 19 nt, Artificial Sequence
  Description of Artificial Sequence: Synthetic oligonucleotide
uaaggacguucuggcauug

SEQ ID NO: 1440859 - RNA, 19 nt, Artificial Sequence
  Description of Artificial Sequence: Synthetic oligonucleotide
ucacgccccuuuagaagga

SEQ ID NO: 1440860 - RNA, 19 nt, Artificial Sequence
  Description of Artificial Sequence: Synthetic oligonucleotide
gaacagucggagaggauua

SEQ ID NO: 1440861 - RNA, 19 nt, Artificial Sequence
  Description of Artificial Sequence: Synthetic oligonucleotide
ggugggcaaaaguaucuca

SEQ ID NO: 1440862 - RNA, 19 nt, Artificial Sequence
  Description of Artificial Sequence: Synthetic oligonucleotide
cggagaaucacauucaugu

SEQ ID NO: 1440863 - RNA, 19 nt, Artificial Sequence
  Description of Artificial Sequence: Synthetic oligonucleotide
gugggcaaaaguaucucaa

SEQ ID NO: 1440864 - RNA, 19 nt, Artificial Sequence
  Description of Artificial Sequence: Synthetic oligonucleotide
accccuacugcaaacuuaa

SEQ ID NO: 1440865 - RNA, 19 nt, Artificial Sequence
  Description of Artificial Sequence: Synthetic oligonucleotide
ccaagggacuagcugcugg

SEQ ID NO: 1440866 - RNA, 19 nt, Artificial Sequence
  Description of Artificial Sequence: Synthetic oligonucleotide
agcugguauugaacagucg

SEQ ID NO: 1440867 - RNA, 19 nt, Artificial Sequence
  Description of Artificial Sequence: Synthetic oligonucleotide
ggucaaggaugaugccugg

SEQ ID NO: 1440868 - RNA, 19 nt, Artificial Sequence
  Description of Artificial Sequence: Synthetic oligonucleotide
ggacguucuggcauuggag

SEQ ID NO: 1440869 - RNA, 19 nt, Artificial Sequence
  Description of Artificial Sequence: Synthetic oligonucleotide
caagaaaaucagcacccua

SEQ ID NO: 1440870 - RNA, 19 nt, Artificial Sequence
  Description of Artificial Sequence: Synthetic oligonucleotide
agcuuaguacaaagaggug

SEQ ID NO: 1440871 - RNA, 19 nt, Artificial Sequence
  Description of Artificial Sequence: Synthetic oligonucleotide
ccacaguuacaagugcugg

SEQ ID NO: 1440872 - RNA, 19 nt, Artificial Sequence
  Description of Artificial Sequence: Synthetic oligonucleotide
ucugccggagaaucacauu

SEQ ID NO: 1440873 - RNA, 19 nt, Artificial Sequence
  Description of Artificial Sequence: Synthetic oligonucleotide
aacagucggagaggauuaa

SEQ ID NO: 1440874 - RNA, 19 nt, Artificial Sequence
  Description of Artificial Sequence: Synthetic oligonucleotide
ggcuguagcuacuaucaaa

SEQ ID NO: 1440875 - RNA, 19 nt, Artificial Sequence
  Description of Artificial Sequence: Synthetic oligonucleotide
gcaauaaaugcucugucuu

SEQ ID NO: 1440876 - RNA, 19 nt, Artificial Sequence
  Description of Artificial Sequence: Synthetic oligonucleotide
cauuaggucauuuccuauu

SEQ ID NO: 1440877 - RNA, 19 nt, Artificial Sequence
  Description of Artificial Sequence: Synthetic oligonucleotide
gggaauggguuuuggucac

SEQ ID NO: 1440878 - RNA, 19 nt, Artificial Sequence
  Description of Artificial Sequence: Synthetic oligonucleotide
gaaggugguuuggaaugga

SEQ ID NO: 1440879 - RNA, 19 nt, Artificial Sequence
  Description of Artificial Sequence: Synthetic oligonucleotide
uuggaacacaaagcuggua

SEQ ID NO: 1440880 - RNA, 19 nt, Artificial Sequence
  Description of Artificial Sequence: Synthetic oligonucleotide
ccuuauagcauuucucucu

SEQ ID NO: 1440881 - RNA, 19 nt, Artificial Sequence
  Description of Artificial Sequence: Synthetic oligonucleotide
ggaaucgcaauaggaauaa

SEQ ID NO: 1440882 - RNA, 19 nt, Artificial Sequence
  Description of Artificial Sequence: Synthetic oligonucleotide
gcacccuaacugcuuagug

SEQ ID NO: 1440883 - RNA, 19 nt, Artificial Sequence
  Description of Artificial Sequence: Synthetic oligonucleotide
ucagccuggcagagaucac

SEQ ID NO: 1440884 - RNA, 19 nt, Artificial Sequence
  Description of Artificial Sequence: Synthetic oligonucleotide
agcacccuaacugcuuagu

SEQ ID NO: 1440885 - RNA, 19 nt, Artificial Sequence
  Description of Artificial Sequence: Synthetic oligonucleotide
gucuuugccguuggccacc

SEQ ID NO: 1440886 - RNA, 19 nt, Artificial Sequence
  Description of Artificial Sequence: Synthetic oligonucleotide
caauuugguaaacccugua

SEQ ID NO: 1440887 - RNA, 19 nt, Artificial Sequence
  Description of Artificial Sequence: Synthetic oligonucleotide
cuggugggcaaaaguaucu

SEQ ID NO: 1440888 - RNA, 19 nt, Artificial Sequence
  Description of Artificial Sequence: Synthetic oligonucleotide
cagcacccuaacugcuuag

SEQ ID NO: 1440889 - RNA, 19 nt, Artificial Sequence
  Description of Artificial Sequence: Synthetic oligonucleotide
agacucacuccaagggacu

SEQ ID NO: 1440890 - RNA, 19 nt, Artificial Sequence
  Description of Artificial Sequence: Synthetic oligonucleotide
uccaagggacuagcugcug

SEQ ID NO: 1440891 - RNA, 19 nt, Artificial Sequence
  Description of Artificial Sequence: Synthetic oligonucleotide
uggauugcuuuggggaguu

SEQ ID NO: 1440892 - RNA, 19 nt, Artificial Sequence
  Description of Artificial Sequence: Synthetic oligonucleotide
gacagcagaucaccgccgu

SEQ ID NO: 1440893 - RNA, 19 nt, Artificial Sequence
  Description of Artificial Sequence: Synthetic oligonucleotide
agagcucauuaggucauuu

SEQ ID NO: 1440894 - RNA, 19 nt, Artificial Sequence
  Description of Artificial Sequence: Synthetic oligonucleotide
auucaaugcuggauugcuu

SEQ ID NO: 1440895 - RNA, 19 nt, Artificial Sequence
  Description of Artificial Sequence: Synthetic oligonucleotide
ucuuugccguuggccacca

SEQ ID NO: 1440896 - RNA, 19 nt, Artificial Sequence
  Description of Artificial Sequence: Synthetic oligonucleotide
cauucauguggcagucuua

SEQ ID NO: 1440897 - RNA, 19 nt, Artificial Sequence
  Description of Artificial Sequence: Synthetic oligonucleotide
acagucggagaggauuaaa

SEQ ID NO: 1440898 - RNA, 19 nt, Artificial Sequence
  Description of Artificial Sequence: Synthetic oligonucleotide
gggcuuaaugaagcgcaag

SEQ ID NO: 1440899 - RNA, 19 nt, Artificial Sequence
  Description of Artificial Sequence: Synthetic oligonucleotide
guaaggacguucuggcauu

SEQ ID NO: 1440900 - RNA, 19 nt, Artificial Sequence
  Description of Artificial Sequence: Synthetic oligonucleotide
ccggagaaucacauucaug

SEQ ID NO: 1440901 - RNA, 19 nt, Artificial Sequence
  Description of Artificial Sequence: Synthetic oligonucleotide
ccccuucuagcuuaguaca

SEQ ID NO: 1440902 - RNA, 19 nt, Artificial Sequence
  Description of Artificial Sequence: Synthetic oligonucleotide
gcuggugggcaaaaguauc

SEQ ID NO: 1440903 - RNA, 19 nt, Artificial Sequence
  Description of Artificial Sequence: Synthetic oligonucleotide
gaaucgcaauaggaauaaa

SEQ ID NO: 1440904 - RNA, 19 nt, Artificial Sequence
  Description of Artificial Sequence: Synthetic oligonucleotide
gcagcauggagaauuaaau

SEQ ID NO: 1440905 - RNA, 19 nt, Artificial Sequence
  Description of Artificial Sequence: Synthetic oligonucleotide
cacacaccccuacugcaaa

SEQ ID NO: 1440906 - RNA, 19 nt, Artificial Sequence
  Description of Artificial Sequence: Synthetic oligonucleotide
gaaguucccaacagucgau

SEQ ID NO: 1440907 - RNA, 19 nt, Artificial Sequence
  Description of Artificial Sequence: Synthetic oligonucleotide
caccccuacugcaaacuua

SEQ ID NO: 1440908 - RNA, 19 nt, Artificial Sequence
  Description of Artificial Sequence: Synthetic oligonucleotide
ggaggguuucucaagggcu

SEQ ID NO: 1440909 - RNA, 19 nt, Artificial Sequence
  Description of Artificial Sequence: Synthetic oligonucleotide
cacguaugcaaaccuuggu

SEQ ID NO: 1440910 - RNA, 19 nt, Artificial Sequence
  Description of Artificial Sequence: Synthetic oligonucleotide
ggcucugccggagaaucac

SEQ ID NO: 1440911 - RNA, 19 nt, Artificial Sequence
  Description of Artificial Sequence: Synthetic oligonucleotide
cuuucggcucugccggaga

SEQ ID NO: 1440912 - RNA, 19 nt, Artificial Sequence
  Description of Artificial Sequence: Synthetic oligonucleotide
cagucuuauuucaggcacu

SEQ ID NO: 1440913 - RNA, 19 nt, Artificial Sequence
  Description of Artificial Sequence: Synthetic oligonucleotide
gacucacuccaagggacua

SEQ ID NO: 1440914 - RNA, 19 nt, Artificial Sequence
  Description of Artificial Sequence: Synthetic oligonucleotide
ccuaacugcuuagugcuca

SEQ ID NO: 1440915 - RNA, 19 nt, Artificial Sequence
  Description of Artificial Sequence: Synthetic oligonucleotide
cuccaagguuuaacucuga

SEQ ID NO: 1440916 - RNA, 19 nt, Artificial Sequence
  Description of Artificial Sequence: Synthetic oligonucleotide
caccauuugguuccacagu

SEQ ID NO: 1440917 - RNA, 19 nt, Artificial Sequence
  Description of Artificial Sequence: Synthetic oligonucleotide
ccguuggccaccacagcac

SEQ ID NO: 1440918 - RNA, 19 nt, Artificial Sequence
  Description of Artificial Sequence: Synthetic oligonucleotide
uucggcucugccggagaau

SEQ ID NO: 1440919 - RNA, 19 nt, Artificial Sequence
  Description of Artificial Sequence: Synthetic oligonucleotide
cuccaagggacuagcugcu

SEQ ID NO: 1440920 - RNA, 19 nt, Artificial Sequence
  Description of Artificial Sequence: Synthetic oligonucleotide
cuagcugcuggugggcaaa

SEQ ID NO: 1440921 - RNA, 19 nt, Artificial Sequence
  Description of Artificial Sequence: Synthetic oligonucleotide
cuuagugcucaggaggguu

SEQ ID NO: 1440922 - RNA, 19 nt, Artificial Sequence
  Description of Artificial Sequence: Synthetic oligonucleotide
gguuuggaauggagaugug

SEQ ID NO: 1440923 - RNA, 19 nt, Artificial Sequence
  Description of Artificial Sequence: Synthetic oligonucleotide
cccaaacugacagcagauc

SEQ ID NO: 1440924 - RNA, 19 nt, Artificial Sequence
  Description of Artificial Sequence: Synthetic oligonucleotide
gucuuucggcucugccgga

SEQ ID NO: 1440925 - RNA, 19 nt, Artificial Sequence
  Description of Artificial Sequence: Synthetic oligonucleotide
gcucuguuuuggaaucgca

SEQ ID NO: 1440926 - RNA, 19 nt, Artificial Sequence
  Description of Artificial Sequence: Synthetic oligonucleotide
gcuuauuaucucagaagau

SEQ ID NO: 1440927 - RNA, 19 nt, Artificial Sequence
  Description of Artificial Sequence: Synthetic oligonucleotide
ucgaugcuugaaggugguu

SEQ ID NO: 1440928 - RNA, 19 nt, Artificial Sequence
  Description of Artificial Sequence: Synthetic oligonucleotide
cccuacugcaaacuuaaau

SEQ ID NO: 1440929 - RNA, 19 nt, Artificial Sequence
  Description of Artificial Sequence: Synthetic oligonucleotide
cuccacguaugcaaaccuu

SEQ ID NO: 1440930 - RNA, 19 nt, Artificial Sequence
  Description of Artificial Sequence: Synthetic oligonucleotide
cuggauugcuuuggggagu

SEQ ID NO: 1440931 - RNA, 19 nt, Artificial Sequence
  Description of Artificial Sequence: Synthetic oligonucleotide
cacaccccuacugcaaacu

SEQ ID NO: 1440932 - RNA, 19 nt, Artificial Sequence
  Description of Artificial Sequence: Synthetic oligonucleotide
gucgaugcuugaagguggu

SEQ ID NO: 1440933 - RNA, 19 nt, Artificial Sequence
  Description of Artificial Sequence: Synthetic oligonucleotide
ccaacagucgaugcuugaa

SEQ ID NO: 1440934 - RNA, 19 nt, Artificial Sequence
  Description of Artificial Sequence: Synthetic oligonucleotide
cccuaacugcuuagugcuc

SEQ ID NO: 1440935 - RNA, 19 nt, Artificial Sequence
  Description of Artificial Sequence: Synthetic oligonucleotide
cuuugccguuggccaccac

SEQ ID NO: 1440936 - RNA, 19 nt, Artificial Sequence
  Description of Artificial Sequence: Synthetic oligonucleotide
gccccuuuagaaggauuuc

SEQ ID NO: 1440937 - RNA, 19 nt, Artificial Sequence
  Description of Artificial Sequence: Synthetic oligonucleotide
cccuucuagcuuaguacaa

SEQ ID NO: 1440938 - RNA, 19 nt, Artificial Sequence
  Description of Artificial Sequence: Synthetic oligonucleotide
ggcuuuugacauucagauu

SEQ ID NO: 1440939 - RNA, 19 nt, Artificial Sequence
  Description of Artificial Sequence: Synthetic oligonucleotide
cccaacagucgaugcuuga

SEQ ID NO: 1440940 - RNA, 19 nt, Artificial Sequence
  Description of Artificial Sequence: Synthetic oligonucleotide
acgccccuuuagaaggauu

SEQ ID NO: 1440941 - RNA, 19 nt, Artificial Sequence
  Description of Artificial Sequence: Synthetic oligonucleotide
gccggagaaucacauucau

SEQ ID NO: 1440942 - RNA, 19 nt, Artificial Sequence
  Description of Artificial Sequence: Synthetic oligonucleotide
cucuccugauuagaagguu

SEQ ID NO: 1440943 - RNA, 19 nt, Artificial Sequence
  Description of Artificial Sequence: Synthetic oligonucleotide
cauguucaucugggauaaa

SEQ ID NO: 1440944 - RNA, 19 nt, Artificial Sequence
  Description of Artificial Sequence: Synthetic oligonucleotide
gagugacuuuuaaguuauu

SEQ ID NO: 1440945 - RNA, 19 nt, Artificial Sequence
  Description of Artificial Sequence: Synthetic oligonucleotide
gcgcaaggcucagccuggc

SEQ ID NO: 1440946 - RNA, 19 nt, Artificial Sequence
  Description of Artificial Sequence: Synthetic oligonucleotide
ggaauggguuuuggucacu

SEQ ID NO: 1440947 - RNA, 19 nt, Artificial Sequence
  Description of Artificial Sequence: Synthetic oligonucleotide
gcuuagugcucaggagggu

SEQ ID NO: 1440948 - RNA, 19 nt, Artificial Sequence
  Description of Artificial Sequence: Synthetic oligonucleotide
cgccccuuuagaaggauuu

SEQ ID NO: 1440949 - RNA, 19 nt, Artificial Sequence
  Description of Artificial Sequence: Synthetic oligonucleotide
cacgccccuuuagaaggau

SEQ ID NO: 1440950 - RNA, 19 nt, Artificial Sequence
  Description of Artificial Sequence: Synthetic oligonucleotide
ccccuacugcaaacuuaaa

SEQ ID NO: 1440951 - RNA, 19 nt, Artificial Sequence
  Description of Artificial Sequence: Synthetic oligonucleotide
gccgucugugggguccccu

SEQ ID NO: 1440952 - RNA, 19 nt, Artificial Sequence
  Description of Artificial Sequence: Synthetic oligonucleotide
ggcagagaucacgccccuu

SEQ ID NO: 1440953 - RNA, 19 nt, Artificial Sequence
  Description of Artificial Sequence: Synthetic oligonucleotide
ggauugcuuuggggaguuu

SEQ ID NO: 1440954 - RNA, 19 nt, Artificial Sequence
  Description of Artificial Sequence: Synthetic oligonucleotide
aauuucucuagauaaaugu

SEQ ID NO: 1440955 - RNA, 19 nt, Artificial Sequence
  Description of Artificial Sequence: Synthetic oligonucleotide
uauaguaaccugcagagca

SEQ ID NO: 1440956 - RNA, 19 nt, Artificial Sequence
  Description of Artificial Sequence: Synthetic oligonucleotide
ucuccauagaaauaugucg

SEQ ID NO: 1440957 - RNA, 19 nt, Artificial Sequence
  Description of Artificial Sequence: Synthetic oligonucleotide
aaugaagaaaacucggucu

SEQ ID NO: 1440958 - RNA, 19 nt, Artificial Sequence
  Description of Artificial Sequence: Synthetic oligonucleotide
ucuauaguaaccugcagag

SEQ ID NO: 1440959 - RNA, 19 nt, Artificial Sequence
  Description of Artificial Sequence: Synthetic oligonucleotide
aaaucugaggcucuuaacu

SEQ ID NO: 1440960 - RNA, 19 nt, Artificial Sequence
  Description of Artificial Sequence: Synthetic oligonucleotide
ucuucauagcauuauaaag

SEQ ID NO: 1440961 - RNA, 19 nt, Artificial Sequence
  Description of Artificial Sequence: Synthetic oligonucleotide
aaauaugucguggguaucc

SEQ ID NO: 1440962 - RNA, 19 nt, Artificial Sequence
  Description of Artificial Sequence: Synthetic oligonucleotide
uuuaccuagaaaucugagg

SEQ ID NO: 1440963 - RNA, 19 nt, Artificial Sequence
  Description of Artificial Sequence: Synthetic oligonucleotide
ugugaaauugcggaggucg

SEQ ID NO: 1440964 - RNA, 19 nt, Artificial Sequence
  Description of Artificial Sequence: Synthetic oligonucleotide
ucguuuauuucuuagaggu

SEQ ID NO: 1440965 - RNA, 19 nt, Artificial Sequence
  Description of Artificial Sequence: Synthetic oligonucleotide
gaaaacucggucuuguucc

SEQ ID NO: 1440966 - RNA, 19 nt, Artificial Sequence
  Description of Artificial Sequence: Synthetic oligonucleotide
aaaauacauguaccuuucc

SEQ ID NO: 1440967 - RNA, 19 nt, Artificial Sequence
  Description of Artificial Sequence: Synthetic oligonucleotide
ugcaugagcaccuccaugg

SEQ ID NO: 1440968 - RNA, 19 nt, Artificial Sequence
  Description of Artificial Sequence: Synthetic oligonucleotide
ucucguuuauuucuuagag

SEQ ID NO: 1440969 - RNA, 19 nt, Artificial Sequence
  Description of Artificial Sequence: Synthetic oligonucleotide
aaagacauggcguuugggu

SEQ ID NO: 1440970 - RNA, 19 nt, Artificial Sequence
  Description of Artificial Sequence: Synthetic oligonucleotide
aagacauggcguuuggguc

SEQ ID NO: 1440971 - RNA, 19 nt, Artificial Sequence
  Description of Artificial Sequence: Synthetic oligonucleotide
acuuuagagcccuccaucc

SEQ ID NO: 1440972 - RNA, 19 nt, Artificial Sequence
  Description of Artificial Sequence: Synthetic oligonucleotide
uuuguggccaugaacuggg

SEQ ID NO: 1440973 - RNA, 19 nt, Artificial Sequence
  Description of Artificial Sequence: Synthetic oligonucleotide
uaucccaaggcucucauca

SEQ ID NO: 1440974 - RNA, 19 nt, Artificial Sequence
  Description of Artificial Sequence: Synthetic oligonucleotide
uauugaguuuuauaugugc

SEQ ID NO: 1440975 - RNA, 19 nt, Artificial Sequence
  Description of Artificial Sequence: Synthetic oligonucleotide
agauaaaugucauacugcu

SEQ ID NO: 1440976 - RNA, 19 nt, Artificial Sequence
  Description of Artificial Sequence: Synthetic oligonucleotide
cauagaaauaugucguggg

SEQ ID NO: 1440977 - RNA, 19 nt, Artificial Sequence
  Description of Artificial Sequence: Synthetic oligonucleotide
uacgacugggcuuagcugg

SEQ ID NO: 1440978 - RNA, 19 nt, Artificial Sequence
  Description of Artificial Sequence: Synthetic oligonucleotide
uuuggcaguaauuucagaa

SEQ ID NO: 1440979 - RNA, 19 nt, Artificial Sequence
  Description of Artificial Sequence: Synthetic oligonucleotide
uucugcauuagacggagag

SEQ ID NO: 1440980 - RNA, 19 nt, Artificial Sequence
  Description of Artificial Sequence: Synthetic oligonucleotide
ugcauugugcccacgaugc

SEQ ID NO: 1440981 - RNA, 19 nt, Artificial Sequence
  Description of Artificial Sequence: Synthetic oligonucleotide
agaaaacucggucuuguuc

SEQ ID NO: 1440982 - RNA, 19 nt, Artificial Sequence
  Description of Artificial Sequence: Synthetic oligonucleotide
uuaaugaagaaaacucggu

SEQ ID NO: 1440983 - RNA, 19 nt, Artificial Sequence
  Description of Artificial Sequence: Synthetic oligonucleotide
cuguccgaggcuuagauag

SEQ ID NO: 1440984 - RNA, 19 nt, Artificial Sequence
  Description of Artificial Sequence: Synthetic oligonucleotide
auuucuuagaggucuagca

SEQ ID NO: 1440985 - RNA, 19 nt, Artificial Sequence
  Description of Artificial Sequence: Synthetic oligonucleotide
uucauagcauuauaaagaa

SEQ ID NO: 1440986 - RNA, 19 nt, Artificial Sequence
  Description of Artificial Sequence: Synthetic oligonucleotide
acuaucagauucaucgucc

SEQ ID NO: 1440987 - RNA, 19 nt, Artificial Sequence
  Description of Artificial Sequence: Synthetic oligonucleotide
uguuccgucucaaugucag

SEQ ID NO: 1440988 - RNA, 19 nt, Artificial Sequence
  Description of Artificial Sequence: Synthetic oligonucleotide
agaucaaacuugaauuugc

SEQ ID NO: 1440989 - RNA, 19 nt, Artificial Sequence
  Description of Artificial Sequence: Synthetic oligonucleotide
uggcaguaauuucagaagc

SEQ ID NO: 1440990 - RNA, 19 nt, Artificial Sequence
  Description of Artificial Sequence: Synthetic oligonucleotide
uccaguucuaauuuucucu

SEQ ID NO: 1440991 - RNA, 19 nt, Artificial Sequence
  Description of Artificial Sequence: Synthetic oligonucleotide
auacccaucugcuugauaa

SEQ ID NO: 1440992 - RNA, 19 nt, Artificial Sequence
  Description of Artificial Sequence: Synthetic oligonucleotide
ucaguucucguuuauuucu

SEQ ID NO: 1440993 - RNA, 19 nt, Artificial Sequence
  Description of Artificial Sequence: Synthetic oligonucleotide
uaugucugagucaucauua

SEQ ID NO: 1440994 - RNA, 19 nt, Artificial Sequence
  Description of Artificial Sequence: Synthetic oligonucleotide
uagacggagaguauuuuca

SEQ ID NO: 1440995 - RNA, 19 nt, Artificial Sequence
  Description of Artificial Sequence: Synthetic oligonucleotide
aaaacucggucuuguuccg

SEQ ID NO: 1440996 - RNA, 19 nt, Artificial Sequence
  Description of Artificial Sequence: Synthetic oligonucleotide
uguuuaccuagaaaucuga

SEQ ID NO: 1440997 - RNA, 19 nt, Artificial Sequence
  Description of Artificial Sequence: Synthetic oligonucleotide
agaaauaugucguggguau

SEQ ID NO: 1440998 - RNA, 19 nt, Artificial Sequence
  Description of Artificial Sequence: Synthetic oligonucleotide
uuagauagccgucucuccu

SEQ ID NO: 1440999 - RNA, 19 nt, Artificial Sequence
  Description of Artificial Sequence: Synthetic oligonucleotide
gagacaagcccgaaguugg

SEQ ID NO: 1441000 - RNA, 19 nt, Artificial Sequence
  Description of Artificial Sequence: Synthetic oligonucleotide
uuagaggucuagcaauggc

SEQ ID NO: 1441001 - RNA, 19 nt, Artificial Sequence
  Description of Artificial Sequence: Synthetic oligonucleotide
ucuuagaggucuagcaaug

SEQ ID NO: 1441002 - RNA, 19 nt, Artificial Sequence
  Description of Artificial Sequence: Synthetic oligonucleotide
acggagaguauuuucagcu

SEQ ID NO: 1441003 - RNA, 19 nt, Artificial Sequence
  Description of Artificial Sequence: Synthetic oligonucleotide
uuaacucucggcugugucc

SEQ ID NO: 1441004 - RNA, 19 nt, Artificial Sequence
  Description of Artificial Sequence: Synthetic oligonucleotide
cucguuuauuucuuagagg

SEQ ID NO: 1441005 - RNA, 19 nt, Artificial Sequence
  Description of Artificial Sequence: Synthetic oligonucleotide
uagaggucuagcaauggcu

SEQ ID NO: 1441006 - RNA, 19 nt, Artificial Sequence
  Description of Artificial Sequence: Synthetic oligonucleotide
ucuuuagucuucugaaccu

SEQ ID NO: 1441007 - RNA, 19 nt, Artificial Sequence
  Description of Artificial Sequence: Synthetic oligonucleotide
uucuccauagaaauauguc

SEQ ID NO: 1441008 - RNA, 19 nt, Artificial Sequence
  Description of Artificial Sequence: Synthetic oligonucleotide
uuuagcuuauucugcauua

SEQ ID NO: 1441009 - RNA, 19 nt, Artificial Sequence
  Description of Artificial Sequence: Synthetic oligonucleotide
ucauccaggguucagguuu

SEQ ID NO: 1441010 - RNA, 19 nt, Artificial Sequence
  Description of Artificial Sequence: Synthetic oligonucleotide
acuuccacucuugagcagc

SEQ ID NO: 1441011 - RNA, 19 nt, Artificial Sequence
  Description of Artificial Sequence: Synthetic oligonucleotide
uuauucugcauuagacgga

SEQ ID NO: 1441012 - RNA, 19 nt, Artificial Sequence
  Description of Artificial Sequence: Synthetic oligonucleotide
uugucaauucucaucacuu

SEQ ID NO: 1441013 - RNA, 19 nt, Artificial Sequence
  Description of Artificial Sequence: Synthetic oligonucleotide
auagaaauaugucgugggu

SEQ ID NO: 1441014 - RNA, 19 nt, Artificial Sequence
  Description of Artificial Sequence: Synthetic oligonucleotide
gaaauugcggaggucgcgg

SEQ ID NO: 1441015 - RNA, 19 nt, Artificial Sequence
  Description of Artificial Sequence: Synthetic oligonucleotide
gucgcggaaagacauggcg

SEQ ID NO: 1441016 - RNA, 19 nt, Artificial Sequence
  Description of Artificial Sequence: Synthetic oligonucleotide
uucucuagauaaaugucau

SEQ ID NO: 1441017 - RNA, 19 nt, Artificial Sequence
  Description of Artificial Sequence: Synthetic oligonucleotide
aguuccggaauuucucuag

SEQ ID NO: 1441018 - RNA, 19 nt, Artificial Sequence
  Description of Artificial Sequence: Synthetic oligonucleotide
uauaugugccuuuguggcc

SEQ ID NO: 1441019 - RNA, 19 nt, Artificial Sequence
  Description of Artificial Sequence: Synthetic oligonucleotide
ucuuucacggcauacccau

SEQ ID NO: 1441020 - RNA, 19 nt, Artificial Sequence
  Description of Artificial Sequence: Synthetic oligonucleotide
ugagucuccaccuugcauu

SEQ ID NO: 1441021 - RNA, 19 nt, Artificial Sequence
  Description of Artificial Sequence: Synthetic oligonucleotide
guucuuucacggcauaccc

SEQ ID NO: 1441022 - RNA, 19 nt, Artificial Sequence
  Description of Artificial Sequence: Synthetic oligonucleotide
uuuccggacccuacgacug

SEQ ID NO: 1441023 - RNA, 19 nt, Artificial Sequence
  Description of Artificial Sequence: Synthetic oligonucleotide
gcuugauaaagcuucuuag

SEQ ID NO: 1441024 - RNA, 19 nt, Artificial Sequence
  Description of Artificial Sequence: Synthetic oligonucleotide
ucugcaaucuuagagccaa

SEQ ID NO: 1441025 - RNA, 19 nt, Artificial Sequence
  Description of Artificial Sequence: Synthetic oligonucleotide
uugcauugugcccacgaug

SEQ ID NO: 1441026 - RNA, 19 nt, Artificial Sequence
  Description of Artificial Sequence: Synthetic oligonucleotide
uuuagucuucugaaccugu

SEQ ID NO: 1441027 - RNA, 19 nt, Artificial Sequence
  Description of Artificial Sequence: Synthetic oligonucleotide
uacuuuagagcccuccauc

SEQ ID NO: 1441028 - RNA, 19 nt, Artificial Sequence
  Description of Artificial Sequence: Synthetic oligonucleotide
agaaggucagaagucauug

SEQ ID NO: 1441029 - RNA, 19 nt, Artificial Sequence
  Description of Artificial Sequence: Synthetic oligonucleotide
ugcuugauaaagcuucuua

SEQ ID NO: 1441030 - RNA, 19 nt, Artificial Sequence
  Description of Artificial Sequence: Synthetic oligonucleotide
uucucguuuauuucuuaga

SEQ ID NO: 1441031 - RNA, 19 nt, Artificial Sequence
  Description of Artificial Sequence: Synthetic oligonucleotide
ugauaucuuccucuccuac

SEQ ID NO: 1441032 - RNA, 19 nt, Artificial Sequence
  Description of Artificial Sequence: Synthetic oligonucleotide
ugccaaauuaucuuuuauu

SEQ ID NO: 1441033 - RNA, 19 nt, Artificial Sequence
  Description of Artificial Sequence: Synthetic oligonucleotide
cuuagauagccgucucucc

SEQ ID NO: 1441034 - RNA, 19 nt, Artificial Sequence
  Description of Artificial Sequence: Synthetic oligonucleotide
ugcuuuuaagucugcaauc

SEQ ID NO: 1441035 - RNA, 19 nt, Artificial Sequence
  Description of Artificial Sequence: Synthetic oligonucleotide
guucucguuuauuucuuag

SEQ ID NO: 1441036 - RNA, 19 nt, Artificial Sequence
  Description of Artificial Sequence: Synthetic oligonucleotide
uggugagagagcaaugcuc

SEQ ID NO: 1441037 - RNA, 19 nt, Artificial Sequence
  Description of Artificial Sequence: Synthetic oligonucleotide
uuagacggagaguauuuuc

SEQ ID NO: 1441038 - RNA, 19 nt, Artificial Sequence
  Description of Artificial Sequence: Synthetic oligonucleotide
agaagucauugucacucuc

SEQ ID NO: 1441039 - RNA, 19 nt, Artificial Sequence
  Description of Artificial Sequence: Synthetic oligonucleotide
ugaaauugcggaggucgcg

SEQ ID NO: 1441040 - RNA, 19 nt, Artificial Sequence
  Description of Artificial Sequence: Synthetic oligonucleotide
aguucuaauuuucucuuuu

SEQ ID NO: 1441041 - RNA, 19 nt, Artificial Sequence
  Description of Artificial Sequence: Synthetic oligonucleotide
ugucccuuggcaagaaggu

SEQ ID NO: 1441042 - RNA, 19 nt, Artificial Sequence
  Description of Artificial Sequence: Synthetic oligonucleotide
uucaguucucguuuauuuc

SEQ ID NO: 1441043 - RNA, 19 nt, Artificial Sequence
  Description of Artificial Sequence: Synthetic oligonucleotide
gucuuguuccgucucaaug

SEQ ID NO: 1441044 - RNA, 19 nt, Artificial Sequence
  Description of Artificial Sequence: Synthetic oligonucleotide
uagcuuauucugcauuaga

SEQ ID NO: 1441045 - RNA, 19 nt, Artificial Sequence
  Description of Artificial Sequence: Synthetic oligonucleotide
cuuuggaguucgcaggccc

SEQ ID NO: 1441046 - RNA, 19 nt, Artificial Sequence
  Description of Artificial Sequence: Synthetic oligonucleotide
uuagcuuauucugcauuag

SEQ ID NO: 1441047 - RNA, 19 nt, Artificial Sequence
  Description of Artificial Sequence: Synthetic oligonucleotide
aagggaugucagucugugg

SEQ ID NO: 1441048 - RNA, 19 nt, Artificial Sequence
  Description of Artificial Sequence: Synthetic oligonucleotide
gacggagaguauuuucagc

SEQ ID NO: 1441049 - RNA, 19 nt, Artificial Sequence
  Description of Artificial Sequence: Synthetic oligonucleotide
agacggagaguauuuucag

SEQ ID NO: 1441050 - RNA, 19 nt, Artificial Sequence
  Description of Artificial Sequence: Synthetic oligonucleotide
aggcucuuaacucucggcu

SEQ ID NO: 1441051 - RNA, 19 nt, Artificial Sequence
  Description of Artificial Sequence: Synthetic oligonucleotide
uaagccaaguuccggaauu

SEQ ID NO: 1441052 - RNA, 19 nt, Artificial Sequence
  Description of Artificial Sequence: Synthetic oligonucleotide
agagacaagcccgaaguug

SEQ ID NO: 1441053 - RNA, 19 nt, Artificial Sequence
  Description of Artificial Sequence: Synthetic oligonucleotide
gagagcaaugcucucaucu

SEQ ID NO: 1441054 - RNA, 19 nt, Artificial Sequence
  Description of Artificial Sequence: Synthetic oligonucleotide
ucggcugugucccuuggca

SEQ ID NO: 1441055 - RNA, 19 nt, Artificial Sequence
  Description of Artificial Sequence: Synthetic oligonucleotide
uuucagaagcaaguugucu

SEQ ID NO: 1441056 - RNA, 19 nt, Artificial Sequence
  Description of Artificial Sequence: Synthetic oligonucleotide
auagccgucucuccucuag

SEQ ID NO: 1441057 - RNA, 19 nt, Artificial Sequence
  Description of Artificial Sequence: Synthetic oligonucleotide
ugagagagcaaugcucuca

SEQ ID NO: 1441058 - RNA, 19 nt, Artificial Sequence
  Description of Artificial Sequence: Synthetic oligonucleotide
ugggcuuagcuggugagag

SEQ ID NO: 1441059 - RNA, 19 nt, Artificial Sequence
  Description of Artificial Sequence: Synthetic oligonucleotide
uucuuucacggcauaccca

SEQ ID NO: 1441060 - RNA, 19 nt, Artificial Sequence
  Description of Artificial Sequence: Synthetic oligonucleotide
agggucuguagucgcuucc

SEQ ID NO: 1441061 - RNA, 19 nt, Artificial Sequence
  Description of Artificial Sequence: Synthetic oligonucleotide
ucugcuugauaaagcuucu

SEQ ID NO: 1441062 - RNA, 19 nt, Artificial Sequence
  Description of Artificial Sequence: Synthetic oligonucleotide
gugucccuuggcaagaagg

SEQ ID NO: 1441063 - RNA, 19 nt, Artificial Sequence
  Description of Artificial Sequence: Synthetic oligonucleotide
ucaaccucuuugcccagca

SEQ ID NO: 1441064 - RNA, 19 nt, Artificial Sequence
  Description of Artificial Sequence: Synthetic oligonucleotide
ggccacauuauugaguagg

SEQ ID NO: 1441065 - RNA, 19 nt, Artificial Sequence
  Description of Artificial Sequence: Synthetic oligonucleotide
ugaguuuuauaugugccuu

SEQ ID NO: 1441066 - RNA, 19 nt, Artificial Sequence
  Description of Artificial Sequence: Synthetic oligonucleotide
uccggaauuucucuagaua

SEQ ID NO: 1441067 - RNA, 19 nt, Artificial Sequence
  Description of Artificial Sequence: Synthetic oligonucleotide
ucucaaugucagaagggau

SEQ ID NO: 1441068 - RNA, 19 nt, Artificial Sequence
  Description of Artificial Sequence: Synthetic oligonucleotide
ucacggcauacccaucugc

SEQ ID NO: 1441069 - RNA, 19 nt, Artificial Sequence
  Description of Artificial Sequence: Synthetic oligonucleotide
ucgcggaaagacauggcgu

SEQ ID NO: 1441070 - RNA, 19 nt, Artificial Sequence
  Description of Artificial Sequence: Synthetic oligonucleotide
gucgcuuccgauuucuuuc

SEQ ID NO: 1441071 - RNA, 19 nt, Artificial Sequence
  Description of Artificial Sequence: Synthetic oligonucleotide
ucuguagucgcuuccgauu

SEQ ID NO: 1441072 - RNA, 19 nt, Artificial Sequence
  Description of Artificial Sequence: Synthetic oligonucleotide
ucuuuucacaagccacaga

SEQ ID NO: 1441073 - RNA, 19 nt, Artificial Sequence
  Description of Artificial Sequence: Synthetic oligonucleotide
agguaagccaaguuccgga

SEQ ID NO: 1441074 - RNA, 19 nt, Artificial Sequence
  Description of Artificial Sequence: Synthetic oligonucleotide
uuuggaguucgcaggccca

SEQ ID NO: 1441075 - RNA, 19 nt, Artificial Sequence
  Description of Artificial Sequence: Synthetic oligonucleotide
uccgaggcuuagauagccg

SEQ ID NO: 1441076 - RNA, 19 nt, Artificial Sequence
  Description of Artificial Sequence: Synthetic oligonucleotide
uaccuagaaaucugaggcu

SEQ ID NO: 1441077 - RNA, 19 nt, Artificial Sequence
  Description of Artificial Sequence: Synthetic oligonucleotide
cauugucacucucauccag

SEQ ID NO: 1441078 - RNA, 19 nt, Artificial Sequence
  Description of Artificial Sequence: Synthetic oligonucleotide
gauucaucguccucuugga

SEQ ID NO: 1441079 - RNA, 19 nt, Artificial Sequence
  Description of Artificial Sequence: Synthetic oligonucleotide
cuuuagagcccuccauccc

SEQ ID NO: 1441080 - RNA, 19 nt, Artificial Sequence
  Description of Artificial Sequence: Synthetic oligonucleotide
cucuuuggaguucgcaggc

SEQ ID NO: 1441081 - RNA, 19 nt, Artificial Sequence
  Description of Artificial Sequence: Synthetic oligonucleotide
cauccugugaugauccuca

SEQ ID NO: 1441082 - RNA, 19 nt, Artificial Sequence
  Description of Artificial Sequence: Synthetic oligonucleotide
cacuaucagauucaucguc

SEQ ID NO: 1441083 - RNA, 19 nt, Artificial Sequence
  Description of Artificial Sequence: Synthetic oligonucleotide
ucguggguaucccaaggcu

SEQ ID NO: 1441084 - RNA, 19 nt, Artificial Sequence
  Description of Artificial Sequence: Synthetic oligonucleotide
cuuagaggucuagcaaugg

SEQ ID NO: 1441085 - RNA, 19 nt, Artificial Sequence
  Description of Artificial Sequence: Synthetic oligonucleotide
ugaagaaaacucggucuug

SEQ ID NO: 1441086 - RNA, 19 nt, Artificial Sequence
  Description of Artificial Sequence: Synthetic oligonucleotide
ugcaaucuuagagccaaga

SEQ ID NO: 1441087 - RNA, 19 nt, Artificial Sequence
  Description of Artificial Sequence: Synthetic oligonucleotide
auaugugccuuuguggcca

SEQ ID NO: 1441088 - RNA, 19 nt, Artificial Sequence
  Description of Artificial Sequence: Synthetic oligonucleotide
uugggugagcggaaauucu

SEQ ID NO: 1441089 - RNA, 19 nt, Artificial Sequence
  Description of Artificial Sequence: Synthetic oligonucleotide
aaauugcggaggucgcgga

SEQ ID NO: 1441090 - RNA, 19 nt, Artificial Sequence
  Description of Artificial Sequence: Synthetic oligonucleotide
aagcuucuuaguauugagu

SEQ ID NO: 1441091 - RNA, 19 nt, Artificial Sequence
  Description of Artificial Sequence: Synthetic oligonucleotide
cagcucaaccucuuugccc

SEQ ID NO: 1441092 - RNA, 19 nt, Artificial Sequence
  Description of Artificial Sequence: Synthetic oligonucleotide
ugucaauucucaucacuuu

SEQ ID NO: 1441093 - RNA, 19 nt, Artificial Sequence
  Description of Artificial Sequence: Synthetic oligonucleotide
uucccuguuuaccuagaaa

SEQ ID NO: 1441094 - RNA, 19 nt, Artificial Sequence
  Description of Artificial Sequence: Synthetic oligonucleotide
aguucgcaggcccagcgcu

SEQ ID NO: 1441095 - RNA, 19 nt, Artificial Sequence
  Description of Artificial Sequence: Synthetic oligonucleotide
uccauaaaggcuggccuga

SEQ ID NO: 1441096 - RNA, 19 nt, Artificial Sequence
  Description of Artificial Sequence: Synthetic oligonucleotide
ggucccaagaguccacugg

SEQ ID NO: 1441097 - RNA, 19 nt, Artificial Sequence
  Description of Artificial Sequence: Synthetic oligonucleotide
ucugcauuagacggagagu

SEQ ID NO: 1441098 - RNA, 19 nt, Artificial Sequence
  Description of Artificial Sequence: Synthetic oligonucleotide
cugggcaauugccuuaaug

SEQ ID NO: 1441099 - RNA, 19 nt, Artificial Sequence
  Description of Artificial Sequence: Synthetic oligonucleotide
caacaguucuuucacggca

SEQ ID NO: 1441100 - RNA, 19 nt, Artificial Sequence
  Description of Artificial Sequence: Synthetic oligonucleotide
cuuguuccgucucaauguc

SEQ ID NO: 1441101 - RNA, 19 nt, Artificial Sequence
  Description of Artificial Sequence: Synthetic oligonucleotide
ucgcuuccgauuucuuucc

SEQ ID NO: 1441102 - RNA, 19 nt, Artificial Sequence
  Description of Artificial Sequence: Synthetic oligonucleotide
uauugucaauucucaucac

SEQ ID NO: 1441103 - RNA, 19 nt, Artificial Sequence
  Description of Artificial Sequence: Synthetic oligonucleotide
cuuuagucuucugaaccug

SEQ ID NO: 1441104 - RNA, 19 nt, Artificial Sequence
  Description of Artificial Sequence: Synthetic oligonucleotide
gauaucuuccucuccuacu

SEQ ID NO: 1441105 - RNA, 19 nt, Artificial Sequence
  Description of Artificial Sequence: Synthetic oligonucleotide
uccuacuuuagagcccucc

SEQ ID NO: 1441106 - RNA, 19 nt, Artificial Sequence
  Description of Artificial Sequence: Synthetic oligonucleotide
aaguuccggaauuucucua

SEQ ID NO: 1441107 - RNA, 19 nt, Artificial Sequence
  Description of Artificial Sequence: Synthetic oligonucleotide
ccucuccuacuuuagagcc

SEQ ID NO: 1441108 - RNA, 19 nt, Artificial Sequence
  Description of Artificial Sequence: Synthetic oligonucleotide
cuauaguaaccugcagagc

SEQ ID NO: 1441109 - RNA, 19 nt, Artificial Sequence
  Description of Artificial Sequence: Synthetic oligonucleotide
acuggggcgcggcugcucg

SEQ ID NO: 1441110 - RNA, 19 nt, Artificial Sequence
  Description of Artificial Sequence: Synthetic oligonucleotide
acgaugcguuugcugggcc

SEQ ID NO: 1441111 - RNA, 19 nt, Artificial Sequence
  Description of Artificial Sequence: Synthetic oligonucleotide
accugugccaaauuaucuu

SEQ ID NO: 1441112 - RNA, 19 nt, Artificial Sequence
  Description of Artificial Sequence: Synthetic oligonucleotide
uggcuuuccaaguuagcuu

SEQ ID NO: 1441113 - RNA, 19 nt, Artificial Sequence
  Description of Artificial Sequence: Synthetic oligonucleotide
agaacagaugugaucuuca

SEQ ID NO: 1441114 - RNA, 19 nt, Artificial Sequence
  Description of Artificial Sequence: Synthetic oligonucleotide
uuguuccgucucaauguca

SEQ ID NO: 1441115 - RNA, 19 nt, Artificial Sequence
  Description of Artificial Sequence: Synthetic oligonucleotide
uucacggcauacccaucug

SEQ ID NO: 1441116 - RNA, 19 nt, Artificial Sequence
  Description of Artificial Sequence: Synthetic oligonucleotide
ggucucuauaguaaccugc

SEQ ID NO: 1441117 - RNA, 19 nt, Artificial Sequence
  Description of Artificial Sequence: Synthetic oligonucleotide
cuacgacugggcuuagcug

SEQ ID NO: 1441118 - RNA, 19 nt, Artificial Sequence
  Description of Artificial Sequence: Synthetic oligonucleotide
uuccggacccuacgacugg

SEQ ID NO: 1441119 - RNA, 19 nt, Artificial Sequence
  Description of Artificial Sequence: Synthetic oligonucleotide
ucgccggucucuauaguaa

SEQ ID NO: 1441120 - RNA, 19 nt, Artificial Sequence
  Description of Artificial Sequence: Synthetic oligonucleotide
uguccgaggcuuagauagc

SEQ ID NO: 1441121 - RNA, 19 nt, Artificial Sequence
  Description of Artificial Sequence: Synthetic oligonucleotide
aagcccagaugguguaagu

SEQ ID NO: 1441122 - RNA, 19 nt, Artificial Sequence
  Description of Artificial Sequence: Synthetic oligonucleotide
ucucuagauaaaugucaua

SEQ ID NO: 1441123 - RNA, 19 nt, Artificial Sequence
  Description of Artificial Sequence: Synthetic oligonucleotide
ugcauuagacggagaguau

SEQ ID NO: 1441124 - RNA, 19 nt, Artificial Sequence
  Description of Artificial Sequence: Synthetic oligonucleotide
ccaagaguccacuggggcg

SEQ ID NO: 1441125 - RNA, 19 nt, Artificial Sequence
  Description of Artificial Sequence: Synthetic oligonucleotide
agauagccgucucuccucu

SEQ ID NO: 1441126 - RNA, 19 nt, Artificial Sequence
  Description of Artificial Sequence: Synthetic oligonucleotide
aggcuuagauagccgucuc

SEQ ID NO: 1441127 - RNA, 19 nt, Artificial Sequence
  Description of Artificial Sequence: Synthetic oligonucleotide
augucguggguaucccaag

SEQ ID NO: 1441128 - RNA, 19 nt, Artificial Sequence
  Description of Artificial Sequence: Synthetic oligonucleotide
auaugucguggguauccca

SEQ ID NO: 1441129 - RNA, 19 nt, Artificial Sequence
  Description of Artificial Sequence: Synthetic oligonucleotide
ucuagcucacuaucagauu

SEQ ID NO: 1441130 - RNA, 19 nt, Artificial Sequence
  Description of Artificial Sequence: Synthetic oligonucleotide
uuccgauuucuuuccaguu

SEQ ID NO: 1441131 - RNA, 19 nt, Artificial Sequence
  Description of Artificial Sequence: Synthetic oligonucleotide
ucuuaguauugaguuuuau

SEQ ID NO: 1441132 - RNA, 19 nt, Artificial Sequence
  Description of Artificial Sequence: Synthetic oligonucleotide
uucuuaguauugaguuuua

SEQ ID NO: 1441133 - RNA, 19 nt, Artificial Sequence
  Description of Artificial Sequence: Synthetic oligonucleotide
uuccggaauuucucuagau

SEQ ID NO: 1441134 - RNA, 19 nt, Artificial Sequence
  Description of Artificial Sequence: Synthetic oligonucleotide
cucgccucuuuggaguucg

SEQ ID NO: 1441135 - RNA, 19 nt, Artificial Sequence
  Description of Artificial Sequence: Synthetic oligonucleotide
aagaaggucagaagucauu

SEQ ID NO: 1441136 - RNA, 19 nt, Artificial Sequence
  Description of Artificial Sequence: Synthetic oligonucleotide
uacuuccacucuugagcag

SEQ ID NO: 1441137 - RNA, 19 nt, Artificial Sequence
  Description of Artificial Sequence: Synthetic oligonucleotide
cugcauuagacggagagua

SEQ ID NO: 1441138 - RNA, 19 nt, Artificial Sequence
  Description of Artificial Sequence: Synthetic oligonucleotide
ucuuuggaguucgcaggcc

SEQ ID NO: 1441139 - RNA, 19 nt, Artificial Sequence
  Description of Artificial Sequence: Synthetic oligonucleotide
gcauuauaaagaacagaug

SEQ ID NO: 1441140 - RNA, 19 nt, Artificial Sequence
  Description of Artificial Sequence: Synthetic oligonucleotide
ggaguucgcaggcccagcg

SEQ ID NO: 1441141 - RNA, 19 nt, Artificial Sequence
  Description of Artificial Sequence: Synthetic oligonucleotide
aggucuagcaauggcuucu

SEQ ID NO: 1441142 - RNA, 19 nt, Artificial Sequence
  Description of Artificial Sequence: Synthetic oligonucleotide
agcggaaauucuccauaga

SEQ ID NO: 1441143 - RNA, 19 nt, Artificial Sequence
  Description of Artificial Sequence: Synthetic oligonucleotide
uuugcccagcaggucauac

SEQ ID NO: 1441144 - RNA, 19 nt, Artificial Sequence
  Description of Artificial Sequence: Synthetic oligonucleotide
gcggaaauucuccauagaa

SEQ ID NO: 1441145 - RNA, 19 nt, Artificial Sequence
  Description of Artificial Sequence: Synthetic oligonucleotide
agucgcuuccgauuucuuu

SEQ ID NO: 1441146 - RNA, 19 nt, Artificial Sequence
  Description of Artificial Sequence: Synthetic oligonucleotide
agaggccacauuauugagu

SEQ ID NO: 1441147 - RNA, 19 nt, Artificial Sequence
  Description of Artificial Sequence: Synthetic oligonucleotide
gaguucgcaggcccagcgc

SEQ ID NO: 1441148 - RNA, 19 nt, Artificial Sequence
  Description of Artificial Sequence: Synthetic oligonucleotide
uccauggcuguccgaggcu

SEQ ID NO: 1441149 - RNA, 19 nt, Artificial Sequence
  Description of Artificial Sequence: Synthetic oligonucleotide
cucuagcucacuaucagau

SEQ ID NO: 1441150 - RNA, 19 nt, Artificial Sequence
  Description of Artificial Sequence: Synthetic oligonucleotide
gaaauaugucguggguauc

SEQ ID NO: 1441151 - RNA, 19 nt, Artificial Sequence
  Description of Artificial Sequence: Synthetic oligonucleotide
uguagucgcuuccgauuuc

SEQ ID NO: 1441152 - RNA, 19 nt, Artificial Sequence
  Description of Artificial Sequence: Synthetic oligonucleotide
agcccagaugguguaagug

SEQ ID NO: 1441153 - RNA, 19 nt, Artificial Sequence
  Description of Artificial Sequence: Synthetic oligonucleotide
gugaaauugcggaggucgc

SEQ ID NO: 1441154 - RNA, 19 nt, Artificial Sequence
  Description of Artificial Sequence: Synthetic oligonucleotide
uuagagcccuccaucccuu

SEQ ID NO: 1441155 - RNA, 19 nt, Artificial Sequence
  Description of Artificial Sequence: Synthetic oligonucleotide
cuguggcucauaucuuuuc

SEQ ID NO: 1441156 - RNA, 19 nt, Artificial Sequence
  Description of Artificial Sequence: Synthetic oligonucleotide
agccgucucuccucuagcu

SEQ ID NO: 1441157 - RNA, 19 nt, Artificial Sequence
  Description of Artificial Sequence: Synthetic oligonucleotide
auucccuguuuaccuagaa

SEQ ID NO: 1441158 - RNA, 19 nt, Artificial Sequence
  Description of Artificial Sequence: Synthetic oligonucleotide
aguucucguuuauuucuua

SEQ ID NO: 1441159 - RNA, 19 nt, Artificial Sequence
  Description of Artificial Sequence: Synthetic oligonucleotide
uacccaucugcuugauaaa

SEQ ID NO: 1441160 - RNA, 19 nt, Artificial Sequence
  Description of Artificial Sequence: Synthetic oligonucleotide
guccgaggcuuagauagcc

SEQ ID NO: 1441161 - RNA, 19 nt, Artificial Sequence
  Description of Artificial Sequence: Synthetic oligonucleotide
guuaagcccagauggugua

SEQ ID NO: 1441162 - RNA, 19 nt, Artificial Sequence
  Description of Artificial Sequence: Synthetic oligonucleotide
auguaccuuuccagucugc

SEQ ID NO: 1441163 - RNA, 19 nt, Artificial Sequence
  Description of Artificial Sequence: Synthetic oligonucleotide
uccggacccuacgacuggg

SEQ ID NO: 1441164 - RNA, 19 nt, Artificial Sequence
  Description of Artificial Sequence: Synthetic oligonucleotide
guuccggaauuucucuaga

SEQ ID NO: 1441165 - RNA, 19 nt, Artificial Sequence
  Description of Artificial Sequence: Synthetic oligonucleotide
gcuuccgauuucuuuccag

SEQ ID NO: 1441166 - RNA, 19 nt, Artificial Sequence
  Description of Artificial Sequence: Synthetic oligonucleotide
ggcucauaucuuuucacaa

SEQ ID NO: 1441167 - RNA, 19 nt, Artificial Sequence
  Description of Artificial Sequence: Synthetic oligonucleotide
ccagguaagccaaguuccg

SEQ ID NO: 1441168 - RNA, 19 nt, Artificial Sequence
  Description of Artificial Sequence: Synthetic oligonucleotide
gacauggcguuuggguccc

SEQ ID NO: 1441169 - RNA, 19 nt, Artificial Sequence
  Description of Artificial Sequence: Synthetic oligonucleotide
guuuccggacccuacgacu

SEQ ID NO: 1441170 - RNA, 19 nt, Artificial Sequence
  Description of Artificial Sequence: Synthetic oligonucleotide
gcaagaaggucagaaguca

SEQ ID NO: 1441171 - RNA, 19 nt, Artificial Sequence
  Description of Artificial Sequence: Synthetic oligonucleotide
cuuccgauuucuuuccagu

SEQ ID NO: 1441172 - RNA, 19 nt, Artificial Sequence
  Description of Artificial Sequence: Synthetic oligonucleotide
aaacucggucuuguuccgu

SEQ ID NO: 1441173 - RNA, 19 nt, Artificial Sequence
  Description of Artificial Sequence: Synthetic oligonucleotide
cuucuguucucauuucccu

SEQ ID NO: 1441174 - RNA, 19 nt, Artificial Sequence
  Description of Artificial Sequence: Synthetic oligonucleotide
caagcccgaaguuggguga

SEQ ID NO: 1441175 - RNA, 19 nt, Artificial Sequence
  Description of Artificial Sequence: Synthetic oligonucleotide
gcuuagauagccgucucuc

SEQ ID NO: 1441176 - RNA, 19 nt, Artificial Sequence
  Description of Artificial Sequence: Synthetic oligonucleotide
uuaagcccagaugguguaa

SEQ ID NO: 1441177 - RNA, 19 nt, Artificial Sequence
  Description of Artificial Sequence: Synthetic oligonucleotide
cccaagaguccacuggggc

SEQ ID NO: 1441178 - RNA, 19 nt, Artificial Sequence
  Description of Artificial Sequence: Synthetic oligonucleotide
caaguuccggaauuucucu

SEQ ID NO: 1441179 - RNA, 19 nt, Artificial Sequence
  Description of Artificial Sequence: Synthetic oligonucleotide
cacgaugcguuugcugggc

SEQ ID NO: 1441180 - RNA, 19 nt, Artificial Sequence
  Description of Artificial Sequence: Synthetic oligonucleotide
gaggcuuagauagccgucu

SEQ ID NO: 1441181 - RNA, 19 nt, Artificial Sequence
  Description of Artificial Sequence: Synthetic oligonucleotide
gacccuacgacugggcuua

SEQ ID NO: 1441182 - RNA, 19 nt, Artificial Sequence
  Description of Artificial Sequence: Synthetic oligonucleotide
aggccacauuauugaguag

SEQ ID NO: 1441183 - RNA, 19 nt, Artificial Sequence
  Description of Artificial Sequence: Synthetic oligonucleotide
uagaaaucugaggcucuua

SEQ ID NO: 1441184 - RNA, 19 nt, Artificial Sequence
  Description of Artificial Sequence: Synthetic oligonucleotide
cauaaaggcuggccugaca

SEQ ID NO: 1441185 - RNA, 19 nt, Artificial Sequence
  Description of Artificial Sequence: Synthetic oligonucleotide
gcugcucgccucuuuggag

SEQ ID NO: 1441186 - RNA, 19 nt, Artificial Sequence
  Description of Artificial Sequence: Synthetic oligonucleotide
ggugagagagcaaugcucu

SEQ ID NO: 1441187 - RNA, 19 nt, Artificial Sequence
  Description of Artificial Sequence: Synthetic oligonucleotide
cuaucagauucaucguccu

SEQ ID NO: 1441188 - RNA, 19 nt, Artificial Sequence
  Description of Artificial Sequence: Synthetic oligonucleotide
cauuagacggagaguauuu

SEQ ID NO: 1441189 - RNA, 19 nt, Artificial Sequence
  Description of Artificial Sequence: Synthetic oligonucleotide
gggucuguagucgcuuccg

SEQ ID NO: 1441190 - RNA, 19 nt, Artificial Sequence
  Description of Artificial Sequence: Synthetic oligonucleotide
cuuucacggcauacccauc

SEQ ID NO: 1441191 - RNA, 19 nt, Artificial Sequence
  Description of Artificial Sequence: Synthetic oligonucleotide
agaagggaugucagucugu

SEQ ID NO: 1441192 - RNA, 19 nt, Artificial Sequence
  Description of Artificial Sequence: Synthetic oligonucleotide
cuaugucugagucaucauu

SEQ ID NO: 1441193 - RNA, 19 nt, Artificial Sequence
  Description of Artificial Sequence: Synthetic oligonucleotide
cucauuucccucagcucaa

SEQ ID NO: 1441194 - RNA, 19 nt, Artificial Sequence
  Description of Artificial Sequence: Synthetic oligonucleotide
cguuugggucccaagaguc

SEQ ID NO: 1441195 - RNA, 19 nt, Artificial Sequence
  Description of Artificial Sequence: Synthetic oligonucleotide
cugcaaucuuagagccaag

SEQ ID NO: 1441196 - RNA, 19 nt, Artificial Sequence
  Description of Artificial Sequence: Synthetic oligonucleotide
acggcauacccaucugcuu

SEQ ID NO: 1441197 - RNA, 19 nt, Artificial Sequence
  Description of Artificial Sequence: Synthetic oligonucleotide
gcuuuuaagucugcaaucu

SEQ ID NO: 1441198 - RNA, 19 nt, Artificial Sequence
  Description of Artificial Sequence: Synthetic oligonucleotide
guaucccaaggcucucauc

SEQ ID NO: 1441199 - RNA, 19 nt, Artificial Sequence
  Description of Artificial Sequence: Synthetic oligonucleotide
gcauugugcccacgaugcg

SEQ ID NO: 1441200 - RNA, 19 nt, Artificial Sequence
  Description of Artificial Sequence: Synthetic oligonucleotide
cucgccggucucuauagua

SEQ ID NO: 1441201 - RNA, 19 nt, Artificial Sequence
  Description of Artificial Sequence: Synthetic oligonucleotide
caucccuuuggucuucaua

SEQ ID NO: 1441202 - RNA, 19 nt, Artificial Sequence
  Description of Artificial Sequence: Synthetic oligonucleotide
ccuuuguggccaugaacug

SEQ ID NO: 1441203 - RNA, 19 nt, Artificial Sequence
  Description of Artificial Sequence: Synthetic oligonucleotide
cacggcauacccaucugcu

SEQ ID NO: 1441204 - RNA, 19 nt, Artificial Sequence
  Description of Artificial Sequence: Synthetic oligonucleotide
ggcauacccaucugcuuga

SEQ ID NO: 1441205 - RNA, 19 nt, Artificial Sequence
  Description of Artificial Sequence: Synthetic oligonucleotide
agcucacuaucagauucau

SEQ ID NO: 1441206 - RNA, 19 nt, Artificial Sequence
  Description of Artificial Sequence: Synthetic oligonucleotide
cugauucccuguuuaccua

SEQ ID NO: 1441207 - RNA, 19 nt, Artificial Sequence
  Description of Artificial Sequence: Synthetic oligonucleotide
gcaugagcaccuccauggc

SEQ ID NO: 1441208 - RNA, 19 nt, Artificial Sequence
  Description of Artificial Sequence: Synthetic oligonucleotide
ugcucgccucuuuggaguu

SEQ ID NO: 1441209 - RNA, 19 nt, Artificial Sequence
  Description of Artificial Sequence: Synthetic oligonucleotide
guggguaucccaaggcucu

SEQ ID NO: 1441210 - RNA, 19 nt, Artificial Sequence
  Description of Artificial Sequence: Synthetic oligonucleotide
gucagaagucauugucacu

SEQ ID NO: 1441211 - RNA, 19 nt, Artificial Sequence
  Description of Artificial Sequence: Synthetic oligonucleotide
uaugugccuuuguggccau

SEQ ID NO: 1441212 - RNA, 19 nt, Artificial Sequence
  Description of Artificial Sequence: Synthetic oligonucleotide
gucccuuggcaagaagguc

SEQ ID NO: 1441213 - RNA, 19 nt, Artificial Sequence
  Description of Artificial Sequence: Synthetic oligonucleotide
cccuuggcaagaaggucag

SEQ ID NO: 1441214 - RNA, 19 nt, Artificial Sequence
  Description of Artificial Sequence: Synthetic oligonucleotide
caagaaggucagaagucau

SEQ ID NO: 1441215 - RNA, 19 nt, Artificial Sequence
  Description of Artificial Sequence: Synthetic oligonucleotide
ccuacuuuagagcccucca

SEQ ID NO: 1441216 - RNA, 19 nt, Artificial Sequence
  Description of Artificial Sequence: Synthetic oligonucleotide
gcccgaaguugggugagcg

SEQ ID NO: 1441217 - RNA, 19 nt, Artificial Sequence
  Description of Artificial Sequence: Synthetic oligonucleotide
gcggaggucgcggaaagac

SEQ ID NO: 1441218 - RNA, 19 nt, Artificial Sequence
  Description of Artificial Sequence: Synthetic oligonucleotide
uagucgcuuccgauuucuu

SEQ ID NO: 1441219 - RNA, 19 nt, Artificial Sequence
  Description of Artificial Sequence: Synthetic oligonucleotide
cuacuuuagagcccuccau

SEQ ID NO: 1441220 - RNA, 19 nt, Artificial Sequence
  Description of Artificial Sequence: Synthetic oligonucleotide
ccaugucaauuucacuguc

SEQ ID NO: 1441221 - RNA, 19 nt, Artificial Sequence
  Description of Artificial Sequence: Synthetic oligonucleotide
gguuaagcccagauggugu

SEQ ID NO: 1441222 - RNA, 19 nt, Artificial Sequence
  Description of Artificial Sequence: Synthetic oligonucleotide
guagucgcuuccgauuucu

SEQ ID NO: 1441223 - RNA, 19 nt, Artificial Sequence
  Description of Artificial Sequence: Synthetic oligonucleotide
cugugaaauugcggagguc

SEQ ID NO: 1441224 - RNA, 19 nt, Artificial Sequence
  Description of Artificial Sequence: Synthetic oligonucleotide
cugcucgccucuuuggagu

SEQ ID NO: 1441225 - RNA, 19 nt, Artificial Sequence
  Description of Artificial Sequence: Synthetic oligonucleotide
ccgucucuccucuagcuca

SEQ ID NO: 1441226 - RNA, 19 nt, Artificial Sequence
  Description of Artificial Sequence: Synthetic oligonucleotide
gucugcaaucuuagagcca

SEQ ID NO: 1441227 - RNA, 19 nt, Artificial Sequence
  Description of Artificial Sequence: Synthetic oligonucleotide
cauugugcccacgaugcgu

SEQ ID NO: 1441228 - RNA, 19 nt, Artificial Sequence
  Description of Artificial Sequence: Synthetic oligonucleotide
cuguagucgcuuccgauuu

SEQ ID NO: 1441229 - RNA, 19 nt, Artificial Sequence
  Description of Artificial Sequence: Synthetic oligonucleotide
gcuccauccugugaugauc

SEQ ID NO: 1441230 - RNA, 19 nt, Artificial Sequence
  Description of Artificial Sequence: Synthetic oligonucleotide
gugagcggaaauucuccau

SEQ ID NO: 1441231 - RNA, 19 nt, Artificial Sequence
  Description of Artificial Sequence: Synthetic oligonucleotide
gccggucucuauaguaacc

SEQ ID NO: 1441232 - RNA, 19 nt, Artificial Sequence
  Description of Artificial Sequence: Synthetic oligonucleotide
cuugcauugugcccacgau

SEQ ID NO: 1441233 - RNA, 19 nt, Artificial Sequence
  Description of Artificial Sequence: Synthetic oligonucleotide
ggucuguagucgcuuccga

SEQ ID NO: 1441234 - RNA, 19 nt, Artificial Sequence
  Description of Artificial Sequence: Synthetic oligonucleotide
ccucuuggaugucuauguc

SEQ ID NO: 1441235 - RNA, 19 nt, Artificial Sequence
  Description of Artificial Sequence: Synthetic oligonucleotide
gcccacgaugcguuugcug

SEQ ID NO: 1441236 - RNA, 19 nt, Artificial Sequence
  Description of Artificial Sequence: Synthetic oligonucleotide
ggcugcucgccucuuugga

SEQ ID NO: 1441237 - RNA, 19 nt, Artificial Sequence
  Description of Artificial Sequence: Synthetic oligonucleotide
acgacugggcuuagcuggu

SEQ ID NO: 1441238 - RNA, 19 nt, Artificial Sequence
  Description of Artificial Sequence: Synthetic oligonucleotide
ccucuagcucacuaucaga

SEQ ID NO: 1441239 - RNA, 19 nt, Artificial Sequence
  Description of Artificial Sequence: Synthetic oligonucleotide
gcggcugcucgccucuuug

SEQ ID NO: 1441240 - RNA, 19 nt, Artificial Sequence
  Description of Artificial Sequence: Synthetic oligonucleotide
gauagccgucucuccucua

SEQ ID NO: 1441241 - RNA, 19 nt, Artificial Sequence
  Description of Artificial Sequence: Synthetic oligonucleotide
ccuacgacugggcuuagcu

SEQ ID NO: 1441242 - RNA, 19 nt, Artificial Sequence
  Description of Artificial Sequence: Synthetic oligonucleotide
uggcuguccgaggcuuaga

SEQ ID NO: 1441243 - RNA, 19 nt, Artificial Sequence
  Description of Artificial Sequence: Synthetic oligonucleotide
gcuucuuaguauugaguuu

SEQ ID NO: 1441244 - RNA, 19 nt, Artificial Sequence
  Description of Artificial Sequence: Synthetic oligonucleotide
cauacccaucugcuugaua

SEQ ID NO: 1441245 - RNA, 19 nt, Artificial Sequence
  Description of Artificial Sequence: Synthetic oligonucleotide
cugagucuccaccuugcau

SEQ ID NO: 1441246 - RNA, 19 nt, Artificial Sequence
  Description of Artificial Sequence: Synthetic oligonucleotide
ggaggucgcggaaagacau

SEQ ID NO: 1441247 - RNA, 19 nt, Artificial Sequence
  Description of Artificial Sequence: Synthetic oligonucleotide
cggaaagacauggcguuug

SEQ ID NO: 1441248 - RNA, 19 nt, Artificial Sequence
  Description of Artificial Sequence: Synthetic oligonucleotide
uugugcccacgaugcguuu

SEQ ID NO: 1441249 - RNA, 19 nt, Artificial Sequence
  Description of Artificial Sequence: Synthetic oligonucleotide
ugcccacgaugcguuugcu

SEQ ID NO: 1441250 - RNA, 19 nt, Artificial Sequence
  Description of Artificial Sequence: Synthetic oligonucleotide
ggcuuagauagccgucucu

SEQ ID NO: 1441251 - RNA, 19 nt, Artificial Sequence
  Description of Artificial Sequence: Synthetic oligonucleotide
guucgcaggcccagcgcuc

SEQ ID NO: 1441252 - RNA, 19 nt, Artificial Sequence
  Description of Artificial Sequence: Synthetic oligonucleotide
cgaggcuuagauagccguc

SEQ ID NO: 1441253 - RNA, 19 nt, Artificial Sequence
  Description of Artificial Sequence: Synthetic oligonucleotide
cuggggcgcggcugcucgc

SEQ ID NO: 1441254 - RNA, 19 nt, Artificial Sequence
  Description of Artificial Sequence: Synthetic oligonucleotide
gcguuugggucccaagagu

SEQ ID NO: 1441255 - RNA, 19 nt, Artificial Sequence
  Description of Artificial Sequence: Synthetic oligonucleotide
cgcucgccggucucuauag

SEQ ID NO: 1441256 - RNA, 19 nt, Artificial Sequence
  Description of Artificial Sequence: Synthetic oligonucleotide
cuagaaaucugaggcucuu

SEQ ID NO: 1441257 - RNA, 19 nt, Artificial Sequence
  Description of Artificial Sequence: Synthetic oligonucleotide
gguaucccaaggcucucau

SEQ ID NO: 1441258 - RNA, 19 nt, Artificial Sequence
  Description of Artificial Sequence: Synthetic oligonucleotide
gccuuccuugcaugagcac

SEQ ID NO: 1441259 - RNA, 19 nt, Artificial Sequence
  Description of Artificial Sequence: Synthetic oligonucleotide
cgccggucucuauaguaac

SEQ ID NO: 1441260 - RNA, 19 nt, Artificial Sequence
  Description of Artificial Sequence: Synthetic oligonucleotide
cacucucauccaggguuca

SEQ ID NO: 1441261 - RNA, 19 nt, Artificial Sequence
  Description of Artificial Sequence: Synthetic oligonucleotide
ccauaaaggcuggccugac

SEQ ID NO: 1441262 - RNA, 19 nt, Artificial Sequence
  Description of Artificial Sequence: Synthetic oligonucleotide
ggguaucccaaggcucuca

SEQ ID NO: 1441263 - RNA, 19 nt, Artificial Sequence
  Description of Artificial Sequence: Synthetic oligonucleotide
cauggcguuugggucccaa

SEQ ID NO: 1441264 - RNA, 19 nt, Artificial Sequence
  Description of Artificial Sequence: Synthetic oligonucleotide
ccgaggcuuagauagccgu

SEQ ID NO: 1441265 - RNA, 19 nt, Artificial Sequence
  Description of Artificial Sequence: Synthetic oligonucleotide
gucugcugauucccuguuu

SEQ ID NO: 1441266 - RNA, 19 nt, Artificial Sequence
  Description of Artificial Sequence: Synthetic oligonucleotide
cggcugcucgccucuuugg

SEQ ID NO: 1441267 - RNA, 19 nt, Artificial Sequence
  Description of Artificial Sequence: Synthetic oligonucleotide
ggucuuguuccgucucaau

SEQ ID NO: 1441268 - RNA, 19 nt, Artificial Sequence
  Description of Artificial Sequence: Synthetic oligonucleotide
acccuacgacugggcuuag

SEQ ID NO: 1441269 - RNA, 19 nt, Artificial Sequence
  Description of Artificial Sequence: Synthetic oligonucleotide
cgaaguugggugagcggaa

SEQ ID NO: 1441270 - RNA, 19 nt, Artificial Sequence
  Description of Artificial Sequence: Synthetic oligonucleotide
cggaggucgcggaaagaca

SEQ ID NO: 1441271 - RNA, 19 nt, Artificial Sequence
  Description of Artificial Sequence: Synthetic oligonucleotide
cugcuugauaaagcuucuu

SEQ ID NO: 1441272 - RNA, 19 nt, Artificial Sequence
  Description of Artificial Sequence: Synthetic oligonucleotide
cccuacgacugggcuuagc

SEQ ID NO: 1441273 - RNA, 19 nt, Artificial Sequence
  Description of Artificial Sequence: Synthetic oligonucleotide
acauggcguuuggguccca

SEQ ID NO: 1441274 - RNA, 19 nt, Artificial Sequence
  Description of Artificial Sequence: Synthetic oligonucleotide
cgcggaaagacauggcguu

SEQ ID NO: 1441275 - RNA, 19 nt, Artificial Sequence
  Description of Artificial Sequence: Synthetic oligonucleotide
gcucgccucuuuggaguuc

SEQ ID NO: 1441276 - RNA, 19 nt, Artificial Sequence
  Description of Artificial Sequence: Synthetic oligonucleotide
ggcgcggcugcucgccucu

SEQ ID NO: 1441277 - RNA, 19 nt, Artificial Sequence
  Description of Artificial Sequence: Synthetic oligonucleotide
cccagcgcucgccggucuc

SEQ ID NO: 1441278 - RNA, 19 nt, Artificial Sequence
  Description of Artificial Sequence: Synthetic oligonucleotide
gcucgccggucucuauagu

SEQ ID NO: 1441279 - RNA, 19 nt, Artificial Sequence
  Description of Artificial Sequence: Synthetic oligonucleotide
gcggaaagacauggcguuu

SEQ ID NO: 1441280 - RNA, 19 nt, Artificial Sequence
  Description of Artificial Sequence: Synthetic oligonucleotide
cagcgcucgccggucucua

SEQ ID NO: 1441281 - RNA, 19 nt, Artificial Sequence
  Description of Artificial Sequence: Synthetic oligonucleotide
ggccaugaacugggcaauu

SEQ ID NO: 1441282 - RNA, 19 nt, Artificial Sequence
  Description of Artificial Sequence: Synthetic oligonucleotide
ggggcgcggcugcucgccu

SEQ ID NO: 1441283 - RNA, 19 nt, Artificial Sequence
  Description of Artificial Sequence: Synthetic oligonucleotide
gcccagcgcucgccggucu

SEQ ID NO: 1441284 - RNA, 19 nt, Artificial Sequence
  Description of Artificial Sequence: Synthetic oligonucleotide
ccagcgcucgccggucucu

SEQ ID NO: 1441285 - RNA, 19 nt, Artificial Sequence
  Description of Artificial Sequence: Synthetic oligonucleotide
cgcggcugcucgccucuuu

SEQ ID NO: 1441286 - RNA, 19 nt, Artificial Sequence
  Description of Artificial Sequence: Synthetic oligonucleotide
agaacauguauccagaacc

SEQ ID NO: 1441287 - RNA, 19 nt, Artificial Sequence
  Description of Artificial Sequence: Synthetic oligonucleotide
aauaaauucggguauaggu

SEQ ID NO: 1441288 - RNA, 19 nt, Artificial Sequence
  Description of Artificial Sequence: Synthetic oligonucleotide
ugaaauauaucuuuggaca

SEQ ID NO: 1441289 - RNA, 19 nt, Artificial Sequence
  Description of Artificial Sequence: Synthetic oligonucleotide
uuauauuuggccuuuagga

SEQ ID NO: 1441290 - RNA, 19 nt, Artificial Sequence
  Description of Artificial Sequence: Synthetic oligonucleotide
aaaccuuagcaauuguagc

SEQ ID NO: 1441291 - RNA, 19 nt, Artificial Sequence
  Description of Artificial Sequence: Synthetic oligonucleotide
cuuagaaccuucuagcugg

SEQ ID NO: 1441292 - RNA, 19 nt, Artificial Sequence
  Description of Artificial Sequence: Synthetic oligonucleotide
aaaugaucgucuuguaugg

SEQ ID NO: 1441293 - RNA, 19 nt, Artificial Sequence
  Description of Artificial Sequence: Synthetic oligonucleotide
auucucagaacauguaucc

SEQ ID NO: 1441294 - RNA, 19 nt, Artificial Sequence
  Description of Artificial Sequence: Synthetic oligonucleotide
uaagauacggcccugagaa

SEQ ID NO: 1441295 - RNA, 19 nt, Artificial Sequence
  Description of Artificial Sequence: Synthetic oligonucleotide
ucuuuguaagaacagagca

SEQ ID NO: 1441296 - RNA, 19 nt, Artificial Sequence
  Description of Artificial Sequence: Synthetic oligonucleotide
aaaucuuggcuucggaaac

SEQ ID NO: 1441297 - RNA, 19 nt, Artificial Sequence
  Description of Artificial Sequence: Synthetic oligonucleotide
caacauucuaguuugauac

SEQ ID NO: 1441298 - RNA, 19 nt, Artificial Sequence
  Description of Artificial Sequence: Synthetic oligonucleotide
aauauauccauugauucca

SEQ ID NO: 1441299 - RNA, 19 nt, Artificial Sequence
  Description of Artificial Sequence: Synthetic oligonucleotide
auuguagcaggagaaaucc

SEQ ID NO: 1441300 - RNA, 19 nt, Artificial Sequence
  Description of Artificial Sequence: Synthetic oligonucleotide
auucuuuagacuccacugc

SEQ ID NO: 1441301 - RNA, 19 nt, Artificial Sequence
  Description of Artificial Sequence: Synthetic oligonucleotide
uguuuaugcacucuugccc

SEQ ID NO: 1441302 - RNA, 19 nt, Artificial Sequence
  Description of Artificial Sequence: Synthetic oligonucleotide
auaauguguguauuuaguc

SEQ ID NO: 1441303 - RNA, 19 nt, Artificial Sequence
  Description of Artificial Sequence: Synthetic oligonucleotide
ucuaguuugauacauguuu

SEQ ID NO: 1441304 - RNA, 19 nt, Artificial Sequence
  Description of Artificial Sequence: Synthetic oligonucleotide
uacacauugaggcagcuca

SEQ ID NO: 1441305 - RNA, 19 nt, Artificial Sequence
  Description of Artificial Sequence: Synthetic oligonucleotide
uucacuaucucaacaguag

SEQ ID NO: 1441306 - RNA, 19 nt, Artificial Sequence
  Description of Artificial Sequence: Synthetic oligonucleotide
guuugauacauguuugccg

SEQ ID NO: 1441307 - RNA, 19 nt, Artificial Sequence
  Description of Artificial Sequence: Synthetic oligonucleotide
caaaugaucgucuuguaug

SEQ ID NO: 1441308 - RNA, 19 nt, Artificial Sequence
  Description of Artificial Sequence: Synthetic oligonucleotide
ugauggcaaagcuugauag

SEQ ID NO: 1441309 - RNA, 19 nt, Artificial Sequence
  Description of Artificial Sequence: Synthetic oligonucleotide
aauucagucacucgaucug

SEQ ID NO: 1441310 - RNA, 19 nt, Artificial Sequence
  Description of Artificial Sequence: Synthetic oligonucleotide
aauucucagaacauguauc

SEQ ID NO: 1441311 - RNA, 19 nt, Artificial Sequence
  Description of Artificial Sequence: Synthetic oligonucleotide
aaccuuagcaauuguagca

SEQ ID NO: 1441312 - RNA, 19 nt, Artificial Sequence
  Description of Artificial Sequence: Synthetic oligonucleotide
cucacugcaguaauggugg

SEQ ID NO: 1441313 - RNA, 19 nt, Artificial Sequence
  Description of Artificial Sequence: Synthetic oligonucleotide
aaaaugccaggacuguuag

SEQ ID NO: 1441314 - RNA, 19 nt, Artificial Sequence
  Description of Artificial Sequence: Synthetic oligonucleotide
aauguguguauuuagucuu

SEQ ID NO: 1441315 - RNA, 19 nt, Artificial Sequence
  Description of Artificial Sequence: Synthetic oligonucleotide
uuguauggucuucuggucg

SEQ ID NO: 1441316 - RNA, 19 nt, Artificial Sequence
  Description of Artificial Sequence: Synthetic oligonucleotide
guuuucacuaucucaacag

SEQ ID NO: 1441317 - RNA, 19 nt, Artificial Sequence
  Description of Artificial Sequence: Synthetic oligonucleotide
guuuaugcacucuugcccg

SEQ ID NO: 1441318 - RNA, 19 nt, Artificial Sequence
  Description of Artificial Sequence: Synthetic oligonucleotide
ucuguuuaugcacucuugc

SEQ ID NO: 1441319 - RNA, 19 nt, Artificial Sequence
  Description of Artificial Sequence: Synthetic oligonucleotide
uguagcaggagaaauccca

SEQ ID NO: 1441320 - RNA, 19 nt, Artificial Sequence
  Description of Artificial Sequence: Synthetic oligonucleotide
ucucagaacauguauccag

SEQ ID NO: 1441321 - RNA, 19 nt, Artificial Sequence
  Description of Artificial Sequence: Synthetic oligonucleotide
uuagucuuuguaagaacag

SEQ ID NO: 1441322 - RNA, 19 nt, Artificial Sequence
  Description of Artificial Sequence: Synthetic oligonucleotide
ugcacugugcuucaaagac

SEQ ID NO: 1441323 - RNA, 19 nt, Artificial Sequence
  Description of Artificial Sequence: Synthetic oligonucleotide
aauuguagcaggagaaauc

SEQ ID NO: 1441324 - RNA, 19 nt, Artificial Sequence
  Description of Artificial Sequence: Synthetic oligonucleotide
gguccuuacacauugaggc

SEQ ID NO: 1441325 - RNA, 19 nt, Artificial Sequence
  Description of Artificial Sequence: Synthetic oligonucleotide
uuaucaucaaaaccuuagc

SEQ ID NO: 1441326 - RNA, 19 nt, Artificial Sequence
  Description of Artificial Sequence: Synthetic oligonucleotide
uaauguguguauuuagucu

SEQ ID NO: 1441327 - RNA, 19 nt, Artificial Sequence
  Description of Artificial Sequence: Synthetic oligonucleotide
ucuuguauggucuucuggu

SEQ ID NO: 1441328 - RNA, 19 nt, Artificial Sequence
  Description of Artificial Sequence: Synthetic oligonucleotide
acuuacaauaaauucgggu

SEQ ID NO: 1441329 - RNA, 19 nt, Artificial Sequence
  Description of Artificial Sequence: Synthetic oligonucleotide
uguguaaaccauucuuuag

SEQ ID NO: 1441330 - RNA, 19 nt, Artificial Sequence
  Description of Artificial Sequence: Synthetic oligonucleotide
aauaauguguguauuuagu

SEQ ID NO: 1441331 - RNA, 19 nt, Artificial Sequence
  Description of Artificial Sequence: Synthetic oligonucleotide
acacuuacaauaaauucgg

SEQ ID NO: 1441332 - RNA, 19 nt, Artificial Sequence
  Description of Artificial Sequence: Synthetic oligonucleotide
uugaugaguaaagugagga

SEQ ID NO: 1441333 - RNA, 19 nt, Artificial Sequence
  Description of Artificial Sequence: Synthetic oligonucleotide
agauacggcccugagaagc

SEQ ID NO: 1441334 - RNA, 19 nt, Artificial Sequence
  Description of Artificial Sequence: Synthetic oligonucleotide
gauccucucuaugugaugg

SEQ ID NO: 1441335 - RNA, 19 nt, Artificial Sequence
  Description of Artificial Sequence: Synthetic oligonucleotide
uuacaauaaauucggguau

SEQ ID NO: 1441336 - RNA, 19 nt, Artificial Sequence
  Description of Artificial Sequence: Synthetic oligonucleotide
uccuuauuuccuuugguga

SEQ ID NO: 1441337 - RNA, 19 nt, Artificial Sequence
  Description of Artificial Sequence: Synthetic oligonucleotide
ucuaccagaaaguacuuau

SEQ ID NO: 1441338 - RNA, 19 nt, Artificial Sequence
  Description of Artificial Sequence: Synthetic oligonucleotide
cacuguuugagguagucag

SEQ ID NO: 1441339 - RNA, 19 nt, Artificial Sequence
  Description of Artificial Sequence: Synthetic oligonucleotide
aacaguagcucgguaacuc

SEQ ID NO: 1441340 - RNA, 19 nt, Artificial Sequence
  Description of Artificial Sequence: Synthetic oligonucleotide
cuaguuugauacauguuug

SEQ ID NO: 1441341 - RNA, 19 nt, Artificial Sequence
  Description of Artificial Sequence: Synthetic oligonucleotide
auggccguugguuucacac

SEQ ID NO: 1441342 - RNA, 19 nt, Artificial Sequence
  Description of Artificial Sequence: Synthetic oligonucleotide
caauauuuuccauugguca

SEQ ID NO: 1441343 - RNA, 19 nt, Artificial Sequence
  Description of Artificial Sequence: Synthetic oligonucleotide
ucuugaagacaauauuugu

SEQ ID NO: 1441344 - RNA, 19 nt, Artificial Sequence
  Description of Artificial Sequence: Synthetic oligonucleotide
ucuaugugauggcaaagcu

SEQ ID NO: 1441345 - RNA, 19 nt, Artificial Sequence
  Description of Artificial Sequence: Synthetic oligonucleotide
uuagcauggcauacaaaug

SEQ ID NO: 1441346 - RNA, 19 nt, Artificial Sequence
  Description of Artificial Sequence: Synthetic oligonucleotide
aagaggguucacugccucc

SEQ ID NO: 1441347 - RNA, 19 nt, Artificial Sequence
  Description of Artificial Sequence: Synthetic oligonucleotide
cuaucucaacaguagcucg

SEQ ID NO: 1441348 - RNA, 19 nt, Artificial Sequence
  Description of Artificial Sequence: Synthetic oligonucleotide
uggugcucagaaauugacg

SEQ ID NO: 1441349 - RNA, 19 nt, Artificial Sequence
  Description of Artificial Sequence: Synthetic oligonucleotide
uuuagacuccacugcacag

SEQ ID NO: 1441350 - RNA, 19 nt, Artificial Sequence
  Description of Artificial Sequence: Synthetic oligonucleotide
augaucgucuuguaugguc

SEQ ID NO: 1441351 - RNA, 19 nt, Artificial Sequence
  Description of Artificial Sequence: Synthetic oligonucleotide
ugagaagcaacggugguug

SEQ ID NO: 1441352 - RNA, 19 nt, Artificial Sequence
  Description of Artificial Sequence: Synthetic oligonucleotide
uuaagauacggcccugaga

SEQ ID NO: 1441353 - RNA, 19 nt, Artificial Sequence
  Description of Artificial Sequence: Synthetic oligonucleotide
uaaauucggguauagguuu

SEQ ID NO: 1441354 - RNA, 19 nt, Artificial Sequence
  Description of Artificial Sequence: Synthetic oligonucleotide
auccuuauuuccuuuggug

SEQ ID NO: 1441355 - RNA, 19 nt, Artificial Sequence
  Description of Artificial Sequence: Synthetic oligonucleotide
uguauccagaaccauccgu

SEQ ID NO: 1441356 - RNA, 19 nt, Artificial Sequence
  Description of Artificial Sequence: Synthetic oligonucleotide
agaauucagucacucgauc

SEQ ID NO: 1441357 - RNA, 19 nt, Artificial Sequence
  Description of Artificial Sequence: Synthetic oligonucleotide
agucuuuguaagaacagag

SEQ ID NO: 1441358 - RNA, 19 nt, Artificial Sequence
  Description of Artificial Sequence: Synthetic oligonucleotide
aguggaucugaugaaccgc

SEQ ID NO: 1441359 - RNA, 19 nt, Artificial Sequence
  Description of Artificial Sequence: Synthetic oligonucleotide
uccuggucaaggaauauuc

SEQ ID NO: 1441360 - RNA, 19 nt, Artificial Sequence
  Description of Artificial Sequence: Synthetic oligonucleotide
aggcuuauuuuccucaucu

SEQ ID NO: 1441361 - RNA, 19 nt, Artificial Sequence
  Description of Artificial Sequence: Synthetic oligonucleotide
uaguuugauacauguuugc

SEQ ID NO: 1441362 - RNA, 19 nt, Artificial Sequence
  Description of Artificial Sequence: Synthetic oligonucleotide
uuagcaauuguagcaggag

SEQ ID NO: 1441363 - RNA, 19 nt, Artificial Sequence
  Description of Artificial Sequence: Synthetic oligonucleotide
cauuggucaucacugagug

SEQ ID NO: 1441364 - RNA, 19 nt, Artificial Sequence
  Description of Artificial Sequence: Synthetic oligonucleotide
aauauucuugccaguggag

SEQ ID NO: 1441365 - RNA, 19 nt, Artificial Sequence
  Description of Artificial Sequence: Synthetic oligonucleotide
uuacuguccaggugaagcc

SEQ ID NO: 1441366 - RNA, 19 nt, Artificial Sequence
  Description of Artificial Sequence: Synthetic oligonucleotide
uccauuggucaucacugag

SEQ ID NO: 1441367 - RNA, 19 nt, Artificial Sequence
  Description of Artificial Sequence: Synthetic oligonucleotide
aauugacggagggaagcac

SEQ ID NO: 1441368 - RNA, 19 nt, Artificial Sequence
  Description of Artificial Sequence: Synthetic oligonucleotide
uucggaaaccuggaggagg

SEQ ID NO: 1441369 - RNA, 19 nt, Artificial Sequence
  Description of Artificial Sequence: Synthetic oligonucleotide
uccacacuuacaauaaauu

SEQ ID NO: 1441370 - RNA, 19 nt, Artificial Sequence
  Description of Artificial Sequence: Synthetic oligonucleotide
uggccuuuaggacuucucc

SEQ ID NO: 1441371 - RNA, 19 nt, Artificial Sequence
  Description of Artificial Sequence: Synthetic oligonucleotide
uguucuucuuaaacuggug

SEQ ID NO: 1441372 - RNA, 19 nt, Artificial Sequence
  Description of Artificial Sequence: Synthetic oligonucleotide
agggcccaacuuuaagucc

SEQ ID NO: 1441373 - RNA, 19 nt, Artificial Sequence
  Description of Artificial Sequence: Synthetic oligonucleotide
aagagguuaggacaacauu

SEQ ID NO: 1441374 - RNA, 19 nt, Artificial Sequence
  Description of Artificial Sequence: Synthetic oligonucleotide
aggguugauguguaaacca

SEQ ID NO: 1441375 - RNA, 19 nt, Artificial Sequence
  Description of Artificial Sequence: Synthetic oligonucleotide
uucccuuguuaagauacgg

SEQ ID NO: 1441376 - RNA, 19 nt, Artificial Sequence
  Description of Artificial Sequence: Synthetic oligonucleotide
gagaaaucccaaaaggaga

SEQ ID NO: 1441377 - RNA, 19 nt, Artificial Sequence
  Description of Artificial Sequence: Synthetic oligonucleotide
caauccuuauuuccuuugg

SEQ ID NO: 1441378 - RNA, 19 nt, Artificial Sequence
  Description of Artificial Sequence: Synthetic oligonucleotide
ugaugaguaaagugaggac

SEQ ID NO: 1441379 - RNA, 19 nt, Artificial Sequence
  Description of Artificial Sequence: Synthetic oligonucleotide
ucacgaaggacacgggcug

SEQ ID NO: 1441380 - RNA, 19 nt, Artificial Sequence
  Description of Artificial Sequence: Synthetic oligonucleotide
uguauggucuucuggucga

SEQ ID NO: 1441381 - RNA, 19 nt, Artificial Sequence
  Description of Artificial Sequence: Synthetic oligonucleotide
ucagcaauucuucccuugu

SEQ ID NO: 1441382 - RNA, 19 nt, Artificial Sequence
  Description of Artificial Sequence: Synthetic oligonucleotide
caugcacucuugaacagug

SEQ ID NO: 1441383 - RNA, 19 nt, Artificial Sequence
  Description of Artificial Sequence: Synthetic oligonucleotide
aaccgcacaacauccgcca

SEQ ID NO: 1441384 - RNA, 19 nt, Artificial Sequence
  Description of Artificial Sequence: Synthetic oligonucleotide
uugaacagugggaagggua

SEQ ID NO: 1441385 - RNA, 19 nt, Artificial Sequence
  Description of Artificial Sequence: Synthetic oligonucleotide
acauguauccagaaccauc

SEQ ID NO: 1441386 - RNA, 19 nt, Artificial Sequence
  Description of Artificial Sequence: Synthetic oligonucleotide
cagucaguggaucugauga

SEQ ID NO: 1441387 - RNA, 19 nt, Artificial Sequence
  Description of Artificial Sequence: Synthetic oligonucleotide
aggaguacugagaggaugg

SEQ ID NO: 1441388 - RNA, 19 nt, Artificial Sequence
  Description of Artificial Sequence: Synthetic oligonucleotide
gaaaggguuugcugcacug

SEQ ID NO: 1441389 - RNA, 19 nt, Artificial Sequence
  Description of Artificial Sequence: Synthetic oligonucleotide
uugauguguaaaccauucu

SEQ ID NO: 1441390 - RNA, 19 nt, Artificial Sequence
  Description of Artificial Sequence: Synthetic oligonucleotide
gugaaggaggcuuauuuuc

SEQ ID NO: 1441391 - RNA, 19 nt, Artificial Sequence
  Description of Artificial Sequence: Synthetic oligonucleotide
uggugaaggaggcuuauuu

SEQ ID NO: 1441392 - RNA, 19 nt, Artificial Sequence
  Description of Artificial Sequence: Synthetic oligonucleotide
aaauucggguauagguuuc

SEQ ID NO: 1441393 - RNA, 19 nt, Artificial Sequence
  Description of Artificial Sequence: Synthetic oligonucleotide
agcucgguaacucuuuccu

SEQ ID NO: 1441394 - RNA, 19 nt, Artificial Sequence
  Description of Artificial Sequence: Synthetic oligonucleotide
aaauugacggagggaagca

SEQ ID NO: 1441395 - RNA, 19 nt, Artificial Sequence
  Description of Artificial Sequence: Synthetic oligonucleotide
aaggaauauucuugccagu

SEQ ID NO: 1441396 - RNA, 19 nt, Artificial Sequence
  Description of Artificial Sequence: Synthetic oligonucleotide
uugccaguggagcacaguc

SEQ ID NO: 1441397 - RNA, 19 nt, Artificial Sequence
  Description of Artificial Sequence: Synthetic oligonucleotide
caauaaauucggguauagg

SEQ ID NO: 1441398 - RNA, 19 nt, Artificial Sequence
  Description of Artificial Sequence: Synthetic oligonucleotide
uaggcugcauugaugagua

SEQ ID NO: 1441399 - RNA, 19 nt, Artificial Sequence
  Description of Artificial Sequence: Synthetic oligonucleotide
guaggaaccucucacugca

SEQ ID NO: 1441400 - RNA, 19 nt, Artificial Sequence
  Description of Artificial Sequence: Synthetic oligonucleotide
guuaagauacggcccugag

SEQ ID NO: 1441401 - RNA, 19 nt, Artificial Sequence
  Description of Artificial Sequence: Synthetic oligonucleotide
agcucagcaauucuucccu

SEQ ID NO: 1441402 - RNA, 19 nt, Artificial Sequence
  Description of Artificial Sequence: Synthetic oligonucleotide
acuucaauccuuauuuccu

SEQ ID NO: 1441403 - RNA, 19 nt, Artificial Sequence
  Description of Artificial Sequence: Synthetic oligonucleotide
ucgauuuccuggucaagga

SEQ ID NO: 1441404 - RNA, 19 nt, Artificial Sequence
  Description of Artificial Sequence: Synthetic oligonucleotide
uccgccacacuccacuuca

SEQ ID NO: 1441405 - RNA, 19 nt, Artificial Sequence
  Description of Artificial Sequence: Synthetic oligonucleotide
auaaauucggguauagguu

SEQ ID NO: 1441406 - RNA, 19 nt, Artificial Sequence
  Description of Artificial Sequence: Synthetic oligonucleotide
caaagcuugauagcagggc

SEQ ID NO: 1441407 - RNA, 19 nt, Artificial Sequence
  Description of Artificial Sequence: Synthetic oligonucleotide
cauucuaguuugauacaug

SEQ ID NO: 1441408 - RNA, 19 nt, Artificial Sequence
  Description of Artificial Sequence: Synthetic oligonucleotide
aaguaccagaacacaguuc

SEQ ID NO: 1441409 - RNA, 19 nt, Artificial Sequence
  Description of Artificial Sequence: Synthetic oligonucleotide
uacuuaucaucaaaaccuu

SEQ ID NO: 1441410 - RNA, 19 nt, Artificial Sequence
  Description of Artificial Sequence: Synthetic oligonucleotide
caggugaagccuuucauca

SEQ ID NO: 1441411 - RNA, 19 nt, Artificial Sequence
  Description of Artificial Sequence: Synthetic oligonucleotide
acauugaggcagcucagca

SEQ ID NO: 1441412 - RNA, 19 nt, Artificial Sequence
  Description of Artificial Sequence: Synthetic oligonucleotide
guagagcagggcgaaaggg

SEQ ID NO: 1441413 - RNA, 19 nt, Artificial Sequence
  Description of Artificial Sequence: Synthetic oligonucleotide
aaagagguuaggacaacau

SEQ ID NO: 1441414 - RNA, 19 nt, Artificial Sequence
  Description of Artificial Sequence: Synthetic oligonucleotide
gaaggguaaggagcaaaag

SEQ ID NO: 1441415 - RNA, 19 nt, Artificial Sequence
  Description of Artificial Sequence: Synthetic oligonucleotide
aaguccaugcacucuugaa

SEQ ID NO: 1441416 - RNA, 19 nt, Artificial Sequence
  Description of Artificial Sequence: Synthetic oligonucleotide
uauauccauugauuccaca

SEQ ID NO: 1441417 - RNA, 19 nt, Artificial Sequence
  Description of Artificial Sequence: Synthetic oligonucleotide
gucuuuguaagaacagagc

SEQ ID NO: 1441418 - RNA, 19 nt, Artificial Sequence
  Description of Artificial Sequence: Synthetic oligonucleotide
uuucugguuggaccacugc

SEQ ID NO: 1441419 - RNA, 19 nt, Artificial Sequence
  Description of Artificial Sequence: Synthetic oligonucleotide
cagaacauguauccagaac

SEQ ID NO: 1441420 - RNA, 19 nt, Artificial Sequence
  Description of Artificial Sequence: Synthetic oligonucleotide
cccuuguuaagauacggcc

SEQ ID NO: 1441421 - RNA, 19 nt, Artificial Sequence
  Description of Artificial Sequence: Synthetic oligonucleotide
aagauacggcccugagaag

SEQ ID NO: 1441422 - RNA, 19 nt, Artificial Sequence
  Description of Artificial Sequence: Synthetic oligonucleotide
uuggcuucggaaaccugga

SEQ ID NO: 1441423 - RNA, 19 nt, Artificial Sequence
  Description of Artificial Sequence: Synthetic oligonucleotide
gaggaccucucuaaguacc

SEQ ID NO: 1441424 - RNA, 19 nt, Artificial Sequence
  Description of Artificial Sequence: Synthetic oligonucleotide
aaccacuuguagagcaggg

SEQ ID NO: 1441425 - RNA, 19 nt, Artificial Sequence
  Description of Artificial Sequence: Synthetic oligonucleotide
gguaaggagcaaaagggcc

SEQ ID NO: 1441426 - RNA, 19 nt, Artificial Sequence
  Description of Artificial Sequence: Synthetic oligonucleotide
cacuuacaauaaauucggg

SEQ ID NO: 1441427 - RNA, 19 nt, Artificial Sequence
  Description of Artificial Sequence: Synthetic oligonucleotide
cagucaaaaucuuggcuuc

SEQ ID NO: 1441428 - RNA, 19 nt, Artificial Sequence
  Description of Artificial Sequence: Synthetic oligonucleotide
gauuccacacuuacaauaa

SEQ ID NO: 1441429 - RNA, 19 nt, Artificial Sequence
  Description of Artificial Sequence: Synthetic oligonucleotide
cuuguauggucuucugguc

SEQ ID NO: 1441430 - RNA, 19 nt, Artificial Sequence
  Description of Artificial Sequence: Synthetic oligonucleotide
auguauccagaaccauccg

SEQ ID NO: 1441431 - RNA, 19 nt, Artificial Sequence
  Description of Artificial Sequence: Synthetic oligonucleotide
cuggugcucagaaauugac

SEQ ID NO: 1441432 - RNA, 19 nt, Artificial Sequence
  Description of Artificial Sequence: Synthetic oligonucleotide
ugcacucuugcccggcgag

SEQ ID NO: 1441433 - RNA, 19 nt, Artificial Sequence
  Description of Artificial Sequence: Synthetic oligonucleotide
auguuugccggcagaauuc

SEQ ID NO: 1441434 - RNA, 19 nt, Artificial Sequence
  Description of Artificial Sequence: Synthetic oligonucleotide
agcugauucuucaggcccc

SEQ ID NO: 1441435 - RNA, 19 nt, Artificial Sequence
  Description of Artificial Sequence: Synthetic oligonucleotide
cuuagcaauuguagcagga

SEQ ID NO: 1441436 - RNA, 19 nt, Artificial Sequence
  Description of Artificial Sequence: Synthetic oligonucleotide
aaaggguuugcugcacugu

SEQ ID NO: 1441437 - RNA, 19 nt, Artificial Sequence
  Description of Artificial Sequence: Synthetic oligonucleotide
ccuuguuaagauacggccc

SEQ ID NO: 1441438 - RNA, 19 nt, Artificial Sequence
  Description of Artificial Sequence: Synthetic oligonucleotide
cuuuagacuccacugcaca

SEQ ID NO: 1441439 - RNA, 19 nt, Artificial Sequence
  Description of Artificial Sequence: Synthetic oligonucleotide
ucuuaaacuggugcucaga

SEQ ID NO: 1441440 - RNA, 19 nt, Artificial Sequence
  Description of Artificial Sequence: Synthetic oligonucleotide
aacggugguugaaauauau

SEQ ID NO: 1441441 - RNA, 19 nt, Artificial Sequence
  Description of Artificial Sequence: Synthetic oligonucleotide
gagcaauucucagaacaug

SEQ ID NO: 1441442 - RNA, 19 nt, Artificial Sequence
  Description of Artificial Sequence: Synthetic oligonucleotide
agguccuuacacauugagg

SEQ ID NO: 1441443 - RNA, 19 nt, Artificial Sequence
  Description of Artificial Sequence: Synthetic oligonucleotide
cccaacuuuaaguccaugc

SEQ ID NO: 1441444 - RNA, 19 nt, Artificial Sequence
  Description of Artificial Sequence: Synthetic oligonucleotide
agucaaaaucuuggcuucg

SEQ ID NO: 1441445 - RNA, 19 nt, Artificial Sequence
  Description of Artificial Sequence: Synthetic oligonucleotide
ugcuuguccuucucaguug

SEQ ID NO: 1441446 - RNA, 19 nt, Artificial Sequence
  Description of Artificial Sequence: Synthetic oligonucleotide
aucugaugaaccgcacaac

SEQ ID NO: 1441447 - RNA, 19 nt, Artificial Sequence
  Description of Artificial Sequence: Synthetic oligonucleotide
agggcgaaaggguuugcug

SEQ ID NO: 1441448 - RNA, 19 nt, Artificial Sequence
  Description of Artificial Sequence: Synthetic oligonucleotide
acagucaguggaucugaug

SEQ ID NO: 1441449 - RNA, 19 nt, Artificial Sequence
  Description of Artificial Sequence: Synthetic oligonucleotide
cucaacaguagcucgguaa

SEQ ID NO: 1441450 - RNA, 19 nt, Artificial Sequence
  Description of Artificial Sequence: Synthetic oligonucleotide
guguguggaguucagcuga

SEQ ID NO: 1441451 - RNA, 19 nt, Artificial Sequence
  Description of Artificial Sequence: Synthetic oligonucleotide
caaaaucuuggcuucggaa

SEQ ID NO: 1441452 - RNA, 19 nt, Artificial Sequence
  Description of Artificial Sequence: Synthetic oligonucleotide
uguuaagauacggcccuga

SEQ ID NO: 1441453 - RNA, 19 nt, Artificial Sequence
  Description of Artificial Sequence: Synthetic oligonucleotide
cucagaacauguauccaga

SEQ ID NO: 1441454 - RNA, 19 nt, Artificial Sequence
  Description of Artificial Sequence: Synthetic oligonucleotide
caguggagcacagucagug

SEQ ID NO: 1441455 - RNA, 19 nt, Artificial Sequence
  Description of Artificial Sequence: Synthetic oligonucleotide
uucuaguuugauacauguu

SEQ ID NO: 1441456 - RNA, 19 nt, Artificial Sequence
  Description of Artificial Sequence: Synthetic oligonucleotide
ccauccguggaccaaagag

SEQ ID NO: 1441457 - RNA, 19 nt, Artificial Sequence
  Description of Artificial Sequence: Synthetic oligonucleotide
cagggcccaacuuuaaguc

SEQ ID NO: 1441458 - RNA, 19 nt, Artificial Sequence
  Description of Artificial Sequence: Synthetic oligonucleotide
uugauacauguuugccggc

SEQ ID NO: 1441459 - RNA, 19 nt, Artificial Sequence
  Description of Artificial Sequence: Synthetic oligonucleotide
uacaauaaauucggguaua

SEQ ID NO: 1441460 - RNA, 19 nt, Artificial Sequence
  Description of Artificial Sequence: Synthetic oligonucleotide
caaggaauauauccauuga

SEQ ID NO: 1441461 - RNA, 19 nt, Artificial Sequence
  Description of Artificial Sequence: Synthetic oligonucleotide
aauucggguauagguuucu

SEQ ID NO: 1441462 - RNA, 19 nt, Artificial Sequence
  Description of Artificial Sequence: Synthetic oligonucleotide
ugagguagucagcccaguc

SEQ ID NO: 1441463 - RNA, 19 nt, Artificial Sequence
  Description of Artificial Sequence: Synthetic oligonucleotide
agaaauugacggagggaag

SEQ ID NO: 1441464 - RNA, 19 nt, Artificial Sequence
  Description of Artificial Sequence: Synthetic oligonucleotide
gcugcauugaugaguaaag

SEQ ID NO: 1441465 - RNA, 19 nt, Artificial Sequence
  Description of Artificial Sequence: Synthetic oligonucleotide
aacacaguucccagguccu

SEQ ID NO: 1441466 - RNA, 19 nt, Artificial Sequence
  Description of Artificial Sequence: Synthetic oligonucleotide
aacauguauccagaaccau

SEQ ID NO: 1441467 - RNA, 19 nt, Artificial Sequence
  Description of Artificial Sequence: Synthetic oligonucleotide
aaugaucgucuuguauggu

SEQ ID NO: 1441468 - RNA, 19 nt, Artificial Sequence
  Description of Artificial Sequence: Synthetic oligonucleotide
cuuguuaagauacggcccu

SEQ ID NO: 1441469 - RNA, 19 nt, Artificial Sequence
  Description of Artificial Sequence: Synthetic oligonucleotide
aggguuugcugcacugugc

SEQ ID NO: 1441470 - RNA, 19 nt, Artificial Sequence
  Description of Artificial Sequence: Synthetic oligonucleotide
ggugaagccuuucaucaac

SEQ ID NO: 1441471 - RNA, 19 nt, Artificial Sequence
  Description of Artificial Sequence: Synthetic oligonucleotide
uuaggacaacauucuaguu

SEQ ID NO: 1441472 - RNA, 19 nt, Artificial Sequence
  Description of Artificial Sequence: Synthetic oligonucleotide
auacauguuugccggcaga

SEQ ID NO: 1441473 - RNA, 19 nt, Artificial Sequence
  Description of Artificial Sequence: Synthetic oligonucleotide
gguaggaaccucucacugc

SEQ ID NO: 1441474 - RNA, 19 nt, Artificial Sequence
  Description of Artificial Sequence: Synthetic oligonucleotide
gaccucucuaaguaccaga

SEQ ID NO: 1441475 - RNA, 19 nt, Artificial Sequence
  Description of Artificial Sequence: Synthetic oligonucleotide
uucggguauagguuucuua

SEQ ID NO: 1441476 - RNA, 19 nt, Artificial Sequence
  Description of Artificial Sequence: Synthetic oligonucleotide
gaaccgcacaacauccgcc

SEQ ID NO: 1441477 - RNA, 19 nt, Artificial Sequence
  Description of Artificial Sequence: Synthetic oligonucleotide
cuugaagacaauauuuguu

SEQ ID NO: 1441478 - RNA, 19 nt, Artificial Sequence
  Description of Artificial Sequence: Synthetic oligonucleotide
agaggauggccguugguuu

SEQ ID NO: 1441479 - RNA, 19 nt, Artificial Sequence
  Description of Artificial Sequence: Synthetic oligonucleotide
uccauugauuccacacuua

SEQ ID NO: 1441480 - RNA, 19 nt, Artificial Sequence
  Description of Artificial Sequence: Synthetic oligonucleotide
gacuguuagcauggcauac

SEQ ID NO: 1441481 - RNA, 19 nt, Artificial Sequence
  Description of Artificial Sequence: Synthetic oligonucleotide
acuguuagcauggcauaca

SEQ ID NO: 1441482 - RNA, 19 nt, Artificial Sequence
  Description of Artificial Sequence: Synthetic oligonucleotide
uggaguucagcugauucuu

SEQ ID NO: 1441483 - RNA, 19 nt, Artificial Sequence
  Description of Artificial Sequence: Synthetic oligonucleotide
ugugauggcaaagcuugau

SEQ ID NO: 1441484 - RNA, 19 nt, Artificial Sequence
  Description of Artificial Sequence: Synthetic oligonucleotide
uggcuucggaaaccuggag

SEQ ID NO: 1441485 - RNA, 19 nt, Artificial Sequence
  Description of Artificial Sequence: Synthetic oligonucleotide
acugagaggauggccguug

SEQ ID NO: 1441486 - RNA, 19 nt, Artificial Sequence
  Description of Artificial Sequence: Synthetic oligonucleotide
gugguugaaauauaucuuu

SEQ ID NO: 1441487 - RNA, 19 nt, Artificial Sequence
  Description of Artificial Sequence: Synthetic oligonucleotide
guucccagguccuuacaca

SEQ ID NO: 1441488 - RNA, 19 nt, Artificial Sequence
  Description of Artificial Sequence: Synthetic oligonucleotide
agagcaauucucagaacau

SEQ ID NO: 1441489 - RNA, 19 nt, Artificial Sequence
  Description of Artificial Sequence: Synthetic oligonucleotide
uugacggagggaagcacuu

SEQ ID NO: 1441490 - RNA, 19 nt, Artificial Sequence
  Description of Artificial Sequence: Synthetic oligonucleotide
uggaucugaugaaccgcac

SEQ ID NO: 1441491 - RNA, 19 nt, Artificial Sequence
  Description of Artificial Sequence: Synthetic oligonucleotide
acggugguugaaauauauc

SEQ ID NO: 1441492 - RNA, 19 nt, Artificial Sequence
  Description of Artificial Sequence: Synthetic oligonucleotide
augaaccgcacaacauccg

SEQ ID NO: 1441493 - RNA, 19 nt, Artificial Sequence
  Description of Artificial Sequence: Synthetic oligonucleotide
uucaaagacccagcucacu

SEQ ID NO: 1441494 - RNA, 19 nt, Artificial Sequence
  Description of Artificial Sequence: Synthetic oligonucleotide
accgcacaacauccgccac

SEQ ID NO: 1441495 - RNA, 19 nt, Artificial Sequence
  Description of Artificial Sequence: Synthetic oligonucleotide
cacauugaggcagcucagc

SEQ ID NO: 1441496 - RNA, 19 nt, Artificial Sequence
  Description of Artificial Sequence: Synthetic oligonucleotide
gccggcagaauucagucac

SEQ ID NO: 1441497 - RNA, 19 nt, Artificial Sequence
  Description of Artificial Sequence: Synthetic oligonucleotide
ucgguaacucuuuccuuua

SEQ ID NO: 1441498 - RNA, 19 nt, Artificial Sequence
  Description of Artificial Sequence: Synthetic oligonucleotide
gagguuaggacaacauucu

SEQ ID NO: 1441499 - RNA, 19 nt, Artificial Sequence
  Description of Artificial Sequence: Synthetic oligonucleotide
ucgaucugucuguuuucac

SEQ ID NO: 1441500 - RNA, 19 nt, Artificial Sequence
  Description of Artificial Sequence: Synthetic oligonucleotide
gaggcuuauuuuccucauc

SEQ ID NO: 1441501 - RNA, 19 nt, Artificial Sequence
  Description of Artificial Sequence: Synthetic oligonucleotide
gaaggaggcuuauuuuccu

SEQ ID NO: 1441502 - RNA, 19 nt, Artificial Sequence
  Description of Artificial Sequence: Synthetic oligonucleotide
guggguuacuguccaggug

SEQ ID NO: 1441503 - RNA, 19 nt, Artificial Sequence
  Description of Artificial Sequence: Synthetic oligonucleotide
gcaaagcuugauagcaggg

SEQ ID NO: 1441504 - RNA, 19 nt, Artificial Sequence
  Description of Artificial Sequence: Synthetic oligonucleotide
ggguaaggagcaaaagggc

SEQ ID NO: 1441505 - RNA, 19 nt, Artificial Sequence
  Description of Artificial Sequence: Synthetic oligonucleotide
guggaucugaugaaccgca

SEQ ID NO: 1441506 - RNA, 19 nt, Artificial Sequence
  Description of Artificial Sequence: Synthetic oligonucleotide
ccaacuuuaaguccaugca

SEQ ID NO: 1441507 - RNA, 19 nt, Artificial Sequence
  Description of Artificial Sequence: Synthetic oligonucleotide
gauacggcccugagaagca

SEQ ID NO: 1441508 - RNA, 19 nt, Artificial Sequence
  Description of Artificial Sequence: Synthetic oligonucleotide
ugcccggcgaggaguacug

SEQ ID NO: 1441509 - RNA, 19 nt, Artificial Sequence
  Description of Artificial Sequence: Synthetic oligonucleotide
ugccggcagaauucaguca

SEQ ID NO: 1441510 - RNA, 19 nt, Artificial Sequence
  Description of Artificial Sequence: Synthetic oligonucleotide
uuacacauugaggcagcuc

SEQ ID NO: 1441511 - RNA, 19 nt, Artificial Sequence
  Description of Artificial Sequence: Synthetic oligonucleotide
uuguuaagauacggcccug

SEQ ID NO: 1441512 - RNA, 19 nt, Artificial Sequence
  Description of Artificial Sequence: Synthetic oligonucleotide
cuccacauccaugccacac

SEQ ID NO: 1441513 - RNA, 19 nt, Artificial Sequence
  Description of Artificial Sequence: Synthetic oligonucleotide
guagucagcccagucaaaa

SEQ ID NO: 1441514 - RNA, 19 nt, Artificial Sequence
  Description of Artificial Sequence: Synthetic oligonucleotide
uuuggugaaggaggcuuau

SEQ ID NO: 1441515 - RNA, 19 nt, Artificial Sequence
  Description of Artificial Sequence: Synthetic oligonucleotide
agcuugauagcagggccca

SEQ ID NO: 1441516 - RNA, 19 nt, Artificial Sequence
  Description of Artificial Sequence: Synthetic oligonucleotide
guaaggagcaaaagggccu

SEQ ID NO: 1441517 - RNA, 19 nt, Artificial Sequence
  Description of Artificial Sequence: Synthetic oligonucleotide
gacggagggaagcacuucu

SEQ ID NO: 1441518 - RNA, 19 nt, Artificial Sequence
  Description of Artificial Sequence: Synthetic oligonucleotide
acggcccugagaagcaacg

SEQ ID NO: 1441519 - RNA, 19 nt, Artificial Sequence
  Description of Artificial Sequence: Synthetic oligonucleotide
cacgggcugggguuuguag

SEQ ID NO: 1441520 - RNA, 19 nt, Artificial Sequence
  Description of Artificial Sequence: Synthetic oligonucleotide
gugauggcaaagcuugaua

SEQ ID NO: 1441521 - RNA, 19 nt, Artificial Sequence
  Description of Artificial Sequence: Synthetic oligonucleotide
acgaaggacacgggcuggg

SEQ ID NO: 1441522 - RNA, 19 nt, Artificial Sequence
  Description of Artificial Sequence: Synthetic oligonucleotide
cucacgaaggacacgggcu

SEQ ID NO: 1441523 - RNA, 19 nt, Artificial Sequence
  Description of Artificial Sequence: Synthetic oligonucleotide
agcagggcgaaaggguuug

SEQ ID NO: 1441524 - RNA, 19 nt, Artificial Sequence
  Description of Artificial Sequence: Synthetic oligonucleotide
ucucaacaguagcucggua

SEQ ID NO: 1441525 - RNA, 19 nt, Artificial Sequence
  Description of Artificial Sequence: Synthetic oligonucleotide
gugcucagaaauugacgga

SEQ ID NO: 1441526 - RNA, 19 nt, Artificial Sequence
  Description of Artificial Sequence: Synthetic oligonucleotide
acuggugcucagaaauuga

SEQ ID NO: 1441527 - RNA, 19 nt, Artificial Sequence
  Description of Artificial Sequence: Synthetic oligonucleotide
guagcucgguaacucuuuc

SEQ ID NO: 1441528 - RNA, 19 nt, Artificial Sequence
  Description of Artificial Sequence: Synthetic oligonucleotide
ucuugcccggcgaggagua

SEQ ID NO: 1441529 - RNA, 19 nt, Artificial Sequence
  Description of Artificial Sequence: Synthetic oligonucleotide
accagcccaaggaauauau

SEQ ID NO: 1441530 - RNA, 19 nt, Artificial Sequence
  Description of Artificial Sequence: Synthetic oligonucleotide
aggaggguugauguguaaa

SEQ ID NO: 1441531 - RNA, 19 nt, Artificial Sequence
  Description of Artificial Sequence: Synthetic oligonucleotide
aggugaagccuuucaucaa

SEQ ID NO: 1441532 - RNA, 19 nt, Artificial Sequence
  Description of Artificial Sequence: Synthetic oligonucleotide
guaaagugaggaccucucu

SEQ ID NO: 1441533 - RNA, 19 nt, Artificial Sequence
  Description of Artificial Sequence: Synthetic oligonucleotide
guaggcugcauugaugagu

SEQ ID NO: 1441534 - RNA, 19 nt, Artificial Sequence
  Description of Artificial Sequence: Synthetic oligonucleotide
agcauggcauacaaaugau

SEQ ID NO: 1441535 - RNA, 19 nt, Artificial Sequence
  Description of Artificial Sequence: Synthetic oligonucleotide
ggaucugaugaaccgcaca

SEQ ID NO: 1441536 - RNA, 19 nt, Artificial Sequence
  Description of Artificial Sequence: Synthetic oligonucleotide
cacaccagcccaaggaaua

SEQ ID NO: 1441537 - RNA, 19 nt, Artificial Sequence
  Description of Artificial Sequence: Synthetic oligonucleotide
auauaucuuuggacaacaa

SEQ ID NO: 1441538 - RNA, 19 nt, Artificial Sequence
  Description of Artificial Sequence: Synthetic oligonucleotide
cacgaaggacacgggcugg

SEQ ID NO: 1441539 - RNA, 19 nt, Artificial Sequence
  Description of Artificial Sequence: Synthetic oligonucleotide
gguggcaaugcacacuucu

SEQ ID NO: 1441540 - RNA, 19 nt, Artificial Sequence
  Description of Artificial Sequence: Synthetic oligonucleotide
ggccguugguuucacacca

SEQ ID NO: 1441541 - RNA, 19 nt, Artificial Sequence
  Description of Artificial Sequence: Synthetic oligonucleotide
cuuuaggacuucuccacau

SEQ ID NO: 1441542 - RNA, 19 nt, Artificial Sequence
  Description of Artificial Sequence: Synthetic oligonucleotide
cuaugugauggcaaagcuu

SEQ ID NO: 1441543 - RNA, 19 nt, Artificial Sequence
  Description of Artificial Sequence: Synthetic oligonucleotide
agccacagguaggaaccuc

SEQ ID NO: 1441544 - RNA, 19 nt, Artificial Sequence
  Description of Artificial Sequence: Synthetic oligonucleotide
cucgaucugucuguuuuca

SEQ ID NO: 1441545 - RNA, 19 nt, Artificial Sequence
  Description of Artificial Sequence: Synthetic oligonucleotide
gacaacauucuaguuugau

SEQ ID NO: 1441546 - RNA, 19 nt, Artificial Sequence
  Description of Artificial Sequence: Synthetic oligonucleotide
agaaccauccguggaccaa

SEQ ID NO: 1441547 - RNA, 19 nt, Artificial Sequence
  Description of Artificial Sequence: Synthetic oligonucleotide
gaagcacuucuggggagca

SEQ ID NO: 1441548 - RNA, 19 nt, Artificial Sequence
  Description of Artificial Sequence: Synthetic oligonucleotide
cuuuggugaaggaggcuua

SEQ ID NO: 1441549 - RNA, 19 nt, Artificial Sequence
  Description of Artificial Sequence: Synthetic oligonucleotide
cguugguuucacaccagcc

SEQ ID NO: 1441550 - RNA, 19 nt, Artificial Sequence
  Description of Artificial Sequence: Synthetic oligonucleotide
cucgguaacucuuuccuuu

SEQ ID NO: 1441551 - RNA, 19 nt, Artificial Sequence
  Description of Artificial Sequence: Synthetic oligonucleotide
aguagcucgguaacucuuu

SEQ ID NO: 1441552 - RNA, 19 nt, Artificial Sequence
  Description of Artificial Sequence: Synthetic oligonucleotide
caacauccgccacacucca

SEQ ID NO: 1441553 - RNA, 19 nt, Artificial Sequence
  Description of Artificial Sequence: Synthetic oligonucleotide
ggcgaaaggguuugcugca

SEQ ID NO: 1441554 - RNA, 19 nt, Artificial Sequence
  Description of Artificial Sequence: Synthetic oligonucleotide
aggaccucucuaaguacca

SEQ ID NO: 1441555 - RNA, 19 nt, Artificial Sequence
  Description of Artificial Sequence: Synthetic oligonucleotide
uugcccggcgaggaguacu

SEQ ID NO: 1441556 - RNA, 19 nt, Artificial Sequence
  Description of Artificial Sequence: Synthetic oligonucleotide
gucgaaggucauccauuuc

SEQ ID NO: 1441557 - RNA, 19 nt, Artificial Sequence
  Description of Artificial Sequence: Synthetic oligonucleotide
gagaggauggccguugguu

SEQ ID NO: 1441558 - RNA, 19 nt, Artificial Sequence
  Description of Artificial Sequence: Synthetic oligonucleotide
cagaauucagucacucgau

SEQ ID NO: 1441559 - RNA, 19 nt, Artificial Sequence
  Description of Artificial Sequence: Synthetic oligonucleotide
guuugccggcagaauucag

SEQ ID NO: 1441560 - RNA, 19 nt, Artificial Sequence
  Description of Artificial Sequence: Synthetic oligonucleotide
caauuguagcaggagaaau

SEQ ID NO: 1441561 - RNA, 19 nt, Artificial Sequence
  Description of Artificial Sequence: Synthetic oligonucleotide
cagcaaccacuuguagagc

SEQ ID NO: 1441562 - RNA, 19 nt, Artificial Sequence
  Description of Artificial Sequence: Synthetic oligonucleotide
caggacuguuagcauggca

SEQ ID NO: 1441563 - RNA, 19 nt, Artificial Sequence
  Description of Artificial Sequence: Synthetic oligonucleotide
gauggccguugguuucaca

SEQ ID NO: 1441564 - RNA, 19 nt, Artificial Sequence
  Description of Artificial Sequence: Synthetic oligonucleotide
ugacggagggaagcacuuc

SEQ ID NO: 1441565 - RNA, 19 nt, Artificial Sequence
  Description of Artificial Sequence: Synthetic oligonucleotide
cacucgaucugucuguuuu

SEQ ID NO: 1441566 - RNA, 19 nt, Artificial Sequence
  Description of Artificial Sequence: Synthetic oligonucleotide
cagaaccauccguggacca

SEQ ID NO: 1441567 - RNA, 19 nt, Artificial Sequence
  Description of Artificial Sequence: Synthetic oligonucleotide
ugguuggaccacugcgauu

SEQ ID NO: 1441568 - RNA, 19 nt, Artificial Sequence
  Description of Artificial Sequence: Synthetic oligonucleotide
ucacucgaucugucuguuu

SEQ ID NO: 1441569 - RNA, 19 nt, Artificial Sequence
  Description of Artificial Sequence: Synthetic oligonucleotide
acaccagcccaaggaauau

SEQ ID NO: 1441570 - RNA, 19 nt, Artificial Sequence
  Description of Artificial Sequence: Synthetic oligonucleotide
cagguaggaaccucucacu

SEQ ID NO: 1441571 - RNA, 19 nt, Artificial Sequence
  Description of Artificial Sequence: Synthetic oligonucleotide
ccguugguuucacaccagc

SEQ ID NO: 1441572 - RNA, 19 nt, Artificial Sequence
  Description of Artificial Sequence: Synthetic oligonucleotide
gaggaggguugauguguaa

SEQ ID NO: 1441573 - RNA, 19 nt, Artificial Sequence
  Description of Artificial Sequence: Synthetic oligonucleotide
ggugaaggaggcuuauuuu

SEQ ID NO: 1441574 - RNA, 19 nt, Artificial Sequence
  Description of Artificial Sequence: Synthetic oligonucleotide
ggguuugcugcacugugcu

SEQ ID NO: 1441575 - RNA, 19 nt, Artificial Sequence
  Description of Artificial Sequence: Synthetic oligonucleotide
augugauggcaaagcuuga

SEQ ID NO: 1441576 - RNA, 19 nt, Artificial Sequence
  Description of Artificial Sequence: Synthetic oligonucleotide
ccucucuaaguaccagaac

SEQ ID NO: 1441577 - RNA, 19 nt, Artificial Sequence
  Description of Artificial Sequence: Synthetic oligonucleotide
cacucuugcccggcgagga

SEQ ID NO: 1441578 - RNA, 19 nt, Artificial Sequence
  Description of Artificial Sequence: Synthetic oligonucleotide
cguggaccaaagagguuag

SEQ ID NO: 1441579 - RNA, 19 nt, Artificial Sequence
  Description of Artificial Sequence: Synthetic oligonucleotide
cccaucgauuuccugguca

SEQ ID NO: 1441580 - RNA, 19 nt, Artificial Sequence
  Description of Artificial Sequence: Synthetic oligonucleotide
auucggguauagguuucuu

SEQ ID NO: 1441581 - RNA, 19 nt, Artificial Sequence
  Description of Artificial Sequence: Synthetic oligonucleotide
cccggcgaggaguacugag

SEQ ID NO: 1441582 - RNA, 19 nt, Artificial Sequence
  Description of Artificial Sequence: Synthetic oligonucleotide
agccuuucaucaacuucaa

SEQ ID NO: 1441583 - RNA, 19 nt, Artificial Sequence
  Description of Artificial Sequence: Synthetic oligonucleotide
gcugggguuuguaggcugc

SEQ ID NO: 1441584 - RNA, 19 nt, Artificial Sequence
  Description of Artificial Sequence: Synthetic oligonucleotide
gcaauucucagaacaugua

SEQ ID NO: 1441585 - RNA, 19 nt, Artificial Sequence
  Description of Artificial Sequence: Synthetic oligonucleotide
ccagcccaaggaauauauc

SEQ ID NO: 1441586 - RNA, 19 nt, Artificial Sequence
  Description of Artificial Sequence: Synthetic oligonucleotide
ggucgaaggucauccauuu

SEQ ID NO: 1441587 - RNA, 19 nt, Artificial Sequence
  Description of Artificial Sequence: Synthetic oligonucleotide
ccauuggucaucacugagu

SEQ ID NO: 1441588 - RNA, 19 nt, Artificial Sequence
  Description of Artificial Sequence: Synthetic oligonucleotide
gcacucuugcccggcgagg

SEQ ID NO: 1441589 - RNA, 19 nt, Artificial Sequence
  Description of Artificial Sequence: Synthetic oligonucleotide
cgcacaacauccgccacac

SEQ ID NO: 1441590 - RNA, 19 nt, Artificial Sequence
  Description of Artificial Sequence: Synthetic oligonucleotide
auacggcccugagaagcaa

SEQ ID NO: 1441591 - RNA, 19 nt, Artificial Sequence
  Description of Artificial Sequence: Synthetic oligonucleotide
ccguggaccaaagagguua

SEQ ID NO: 1441592 - RNA, 19 nt, Artificial Sequence
  Description of Artificial Sequence: Synthetic oligonucleotide
aggacacgggcugggguuu

SEQ ID NO: 1441593 - RNA, 19 nt, Artificial Sequence
  Description of Artificial Sequence: Synthetic oligonucleotide
caguagcucgguaacucuu

SEQ ID NO: 1441594 - RNA, 19 nt, Artificial Sequence
  Description of Artificial Sequence: Synthetic oligonucleotide
cuuacacauugaggcagcu

SEQ ID NO: 1441595 - RNA, 19 nt, Artificial Sequence
  Description of Artificial Sequence: Synthetic oligonucleotide
ggaggcuuauuuuccucau

SEQ ID NO: 1441596 - RNA, 19 nt, Artificial Sequence
  Description of Artificial Sequence: Synthetic oligonucleotide
ggguugauguguaaaccau

SEQ ID NO: 1441597 - RNA, 19 nt, Artificial Sequence
  Description of Artificial Sequence: Synthetic oligonucleotide
caguucccagguccuuaca

SEQ ID NO: 1441598 - RNA, 19 nt, Artificial Sequence
  Description of Artificial Sequence: Synthetic oligonucleotide
cuuguagagcagggcgaaa

SEQ ID NO: 1441599 - RNA, 19 nt, Artificial Sequence
  Description of Artificial Sequence: Synthetic oligonucleotide
acacuccacuucagugggu

SEQ ID NO: 1441600 - RNA, 19 nt, Artificial Sequence
  Description of Artificial Sequence: Synthetic oligonucleotide
cuugcccggcgaggaguac

SEQ ID NO: 1441601 - RNA, 19 nt, Artificial Sequence
  Description of Artificial Sequence: Synthetic oligonucleotide
gccguugguuucacaccag

SEQ ID NO: 1441602 - RNA, 19 nt, Artificial Sequence
  Description of Artificial Sequence: Synthetic oligonucleotide
ggaggaggguugaugugua

SEQ ID NO: 1441603 - RNA, 19 nt, Artificial Sequence
  Description of Artificial Sequence: Synthetic oligonucleotide
ggacaacauucuaguuuga

SEQ ID NO: 1441604 - RNA, 19 nt, Artificial Sequence
  Description of Artificial Sequence: Synthetic oligonucleotide
ccgcacaacauccgccaca

SEQ ID NO: 1441605 - RNA, 19 nt, Artificial Sequence
  Description of Artificial Sequence: Synthetic oligonucleotide
ccccauggacaguucuuga

SEQ ID NO: 1441606 - RNA, 19 nt, Artificial Sequence
  Description of Artificial Sequence: Synthetic oligonucleotide
gcccaacuuuaaguccaug

SEQ ID NO: 1441607 - RNA, 19 nt, Artificial Sequence
  Description of Artificial Sequence: Synthetic oligonucleotide
cagggcgaaaggguuugcu

SEQ ID NO: 1441608 - RNA, 19 nt, Artificial Sequence
  Description of Artificial Sequence: Synthetic oligonucleotide
cggcagaauucagucacuc

SEQ ID NO: 1441609 - RNA, 19 nt, Artificial Sequence
  Description of Artificial Sequence: Synthetic oligonucleotide
ggacacgggcugggguuug

SEQ ID NO: 1441610 - RNA, 19 nt, Artificial Sequence
  Description of Artificial Sequence: Synthetic oligonucleotide
ccgccacacuccacuucag

SEQ ID NO: 1441611 - RNA, 19 nt, Artificial Sequence
  Description of Artificial Sequence: Synthetic oligonucleotide
ggauggccguugguuucac

SEQ ID NO: 1441612 - RNA, 19 nt, Artificial Sequence
  Description of Artificial Sequence: Synthetic oligonucleotide
gcccaucgauuuccugguc

SEQ ID NO: 1441613 - RNA, 19 nt, Artificial Sequence
  Description of Artificial Sequence: Synthetic oligonucleotide
gcagggcgaaaggguuugc

SEQ ID NO: 1441614 - RNA, 19 nt, Artificial Sequence
  Description of Artificial Sequence: Synthetic oligonucleotide
gcucgguaacucuuuccuu

SEQ ID NO: 1441615 - RNA, 19 nt, Artificial Sequence
  Description of Artificial Sequence: Synthetic oligonucleotide
cuguccaggugaagccuuu

SEQ ID NO: 1441616 - RNA, 19 nt, Artificial Sequence
  Description of Artificial Sequence: Synthetic oligonucleotide
cauccgccacacuccacuu

SEQ ID NO: 1441617 - RNA, 19 nt, Artificial Sequence
  Description of Artificial Sequence: Synthetic oligonucleotide
gguuugcugcacugugcuu

SEQ ID NO: 1441618 - RNA, 19 nt, Artificial Sequence
  Description of Artificial Sequence: Synthetic oligonucleotide
ccaugcacucuugaacagu

SEQ ID NO: 1441619 - RNA, 19 nt, Artificial Sequence
  Description of Artificial Sequence: Synthetic oligonucleotide
gcuugauagcagggcccaa

SEQ ID NO: 1441620 - RNA, 19 nt, Artificial Sequence
  Description of Artificial Sequence: Synthetic oligonucleotide
gcacaacauccgccacacu

SEQ ID NO: 1441621 - RNA, 19 nt, Artificial Sequence
  Description of Artificial Sequence: Synthetic oligonucleotide
ggcccaacuuuaaguccau

SEQ ID NO: 1441622 - RNA, 19 nt, Artificial Sequence
  Description of Artificial Sequence: Synthetic oligonucleotide
ccacacuguuugagguagu

SEQ ID NO: 1441623 - RNA, 19 nt, Artificial Sequence
  Description of Artificial Sequence: Synthetic oligonucleotide
cgaggaguacugagaggau

SEQ ID NO: 1441624 - RNA, 19 nt, Artificial Sequence
  Description of Artificial Sequence: Synthetic oligonucleotide
gcccggcgaggaguacuga

SEQ ID NO: 1441625 - RNA, 19 nt, Artificial Sequence
  Description of Artificial Sequence: Synthetic oligonucleotide
uuuaguaugucuuagggcu

SEQ ID NO: 1441626 - RNA, 19 nt, Artificial Sequence
  Description of Artificial Sequence: Synthetic oligonucleotide
uuuaagagcauuuucaaac

SEQ ID NO: 1441627 - RNA, 19 nt, Artificial Sequence
  Description of Artificial Sequence: Synthetic oligonucleotide
ucuccuaauauccaagucg

SEQ ID NO: 1441628 - RNA, 19 nt, Artificial Sequence
  Description of Artificial Sequence: Synthetic oligonucleotide
uuuuacuugacuuucauaa

SEQ ID NO: 1441629 - RNA, 19 nt, Artificial Sequence
  Description of Artificial Sequence: Synthetic oligonucleotide
uuuagggugagcaauggcc

SEQ ID NO: 1441630 - RNA, 19 nt, Artificial Sequence
  Description of Artificial Sequence: Synthetic oligonucleotide
aaaggaagauauuuuaaga

SEQ ID NO: 1441631 - RNA, 19 nt, Artificial Sequence
  Description of Artificial Sequence: Synthetic oligonucleotide
auauauacaaaugcagugc

SEQ ID NO: 1441632 - RNA, 19 nt, Artificial Sequence
  Description of Artificial Sequence: Synthetic oligonucleotide
aaaacgaaaugucaucuca

SEQ ID NO: 1441633 - RNA, 19 nt, Artificial Sequence
  Description of Artificial Sequence: Synthetic oligonucleotide
aaucaguguuuucagcugg

SEQ ID NO: 1441634 - RNA, 19 nt, Artificial Sequence
  Description of Artificial Sequence: Synthetic oligonucleotide
caaggagagagguagacgg

SEQ ID NO: 1441635 - RNA, 19 nt, Artificial Sequence
  Description of Artificial Sequence: Synthetic oligonucleotide
acuuaauacagcucucuac

SEQ ID NO: 1441636 - RNA, 19 nt, Artificial Sequence
  Description of Artificial Sequence: Synthetic oligonucleotide
gaggaaggcaaauuggccg

SEQ ID NO: 1441637 - RNA, 19 nt, Artificial Sequence
  Description of Artificial Sequence: Synthetic oligonucleotide
uauauacaaaugcagugca

SEQ ID NO: 1441638 - RNA, 19 nt, Artificial Sequence
  Description of Artificial Sequence: Synthetic oligonucleotide
uuacuugacuuucauaaga

SEQ ID NO: 1441639 - RNA, 19 nt, Artificial Sequence
  Description of Artificial Sequence: Synthetic oligonucleotide
aaauuggccgucaggagcc

SEQ ID NO: 1441640 - RNA, 19 nt, Artificial Sequence
  Description of Artificial Sequence: Synthetic oligonucleotide
ugcguuaggaccaaccgag

SEQ ID NO: 1441641 - RNA, 19 nt, Artificial Sequence
  Description of Artificial Sequence: Synthetic oligonucleotide
agcuaucuuucuuaagugc

SEQ ID NO: 1441642 - RNA, 19 nt, Artificial Sequence
  Description of Artificial Sequence: Synthetic oligonucleotide
aaaggcgcaauccaauaug

SEQ ID NO: 1441643 - RNA, 19 nt, Artificial Sequence
  Description of Artificial Sequence: Synthetic oligonucleotide
uuuaguguccgucggaaga

SEQ ID NO: 1441644 - RNA, 19 nt, Artificial Sequence
  Description of Artificial Sequence: Synthetic oligonucleotide
cuuucguuuauucuugccc

SEQ ID NO: 1441645 - RNA, 19 nt, Artificial Sequence
  Description of Artificial Sequence: Synthetic oligonucleotide
uggucagucacuuaauaca

SEQ ID NO: 1441646 - RNA, 19 nt, Artificial Sequence
  Description of Artificial Sequence: Synthetic oligonucleotide
caugcaguuggccaggugg

SEQ ID NO: 1441647 - RNA, 19 nt, Artificial Sequence
  Description of Artificial Sequence: Synthetic oligonucleotide
uuuauuauacuuucuccaa

SEQ ID NO: 1441648 - RNA, 19 nt, Artificial Sequence
  Description of Artificial Sequence: Synthetic oligonucleotide
uauacaaaugcagugcaug

SEQ ID NO: 1441649 - RNA, 19 nt, Artificial Sequence
  Description of Artificial Sequence: Synthetic oligonucleotide
aguguuuucagcuggcuca

SEQ ID NO: 1441650 - RNA, 19 nt, Artificial Sequence
  Description of Artificial Sequence: Synthetic oligonucleotide
uucuucucaauccccagag

SEQ ID NO: 1441651 - RNA, 19 nt, Artificial Sequence
  Description of Artificial Sequence: Synthetic oligonucleotide
uuuacuugacuuucauaag

SEQ ID NO: 1441652 - RNA, 19 nt, Artificial Sequence
  Description of Artificial Sequence: Synthetic oligonucleotide
uuaacgcccucacacgugg

SEQ ID NO: 1441653 - RNA, 19 nt, Artificial Sequence
  Description of Artificial Sequence: Synthetic oligonucleotide
augucuuagggcuacuuag

SEQ ID NO: 1441654 - RNA, 19 nt, Artificial Sequence
  Description of Artificial Sequence: Synthetic oligonucleotide
ugggguagcagccaccggg

SEQ ID NO: 1441655 - RNA, 19 nt, Artificial Sequence
  Description of Artificial Sequence: Synthetic oligonucleotide
uuucguuuauucuugcccu

SEQ ID NO: 1441656 - RNA, 19 nt, Artificial Sequence
  Description of Artificial Sequence: Synthetic oligonucleotide
acuuucuccaauaaacuuc

SEQ ID NO: 1441657 - RNA, 19 nt, Artificial Sequence
  Description of Artificial Sequence: Synthetic oligonucleotide
ugacuuucugugcucagag

SEQ ID NO: 1441658 - RNA, 19 nt, Artificial Sequence
  Description of Artificial Sequence: Synthetic oligonucleotide
uuuaguuuuccuucacucu

SEQ ID NO: 1441659 - RNA, 19 nt, Artificial Sequence
  Description of Artificial Sequence: Synthetic oligonucleotide
gguuuaguaugucuuaggg

SEQ ID NO: 1441660 - RNA, 19 nt, Artificial Sequence
  Description of Artificial Sequence: Synthetic oligonucleotide
uaauacaaaggcgcaaucc

SEQ ID NO: 1441661 - RNA, 19 nt, Artificial Sequence
  Description of Artificial Sequence: Synthetic oligonucleotide
cuuaauacagcucucuaca

SEQ ID NO: 1441662 - RNA, 19 nt, Artificial Sequence
  Description of Artificial Sequence: Synthetic oligonucleotide
acugcguuaggaccaaccg

SEQ ID NO: 1441663 - RNA, 19 nt, Artificial Sequence
  Description of Artificial Sequence: Synthetic oligonucleotide
aagagcauuuucaaacauc

SEQ ID NO: 1441664 - RNA, 19 nt, Artificial Sequence
  Description of Artificial Sequence: Synthetic oligonucleotide
guuuaguaugucuuagggc

SEQ ID NO: 1441665 - RNA, 19 nt, Artificial Sequence
  Description of Artificial Sequence: Synthetic oligonucleotide
uuaggaccaaccgaggucc

SEQ ID NO: 1441666 - RNA, 19 nt, Artificial Sequence
  Description of Artificial Sequence: Synthetic oligonucleotide
auaauacaaaggcgcaauc

SEQ ID NO: 1441667 - RNA, 19 nt, Artificial Sequence
  Description of Artificial Sequence: Synthetic oligonucleotide
aaccgcuggaaggagacac

SEQ ID NO: 1441668 - RNA, 19 nt, Artificial Sequence
  Description of Artificial Sequence: Synthetic oligonucleotide
cuucacucuuuuauuauac

SEQ ID NO: 1441669 - RNA, 19 nt, Artificial Sequence
  Description of Artificial Sequence: Synthetic oligonucleotide
aaugccgggagcuaucuuu

SEQ ID NO: 1441670 - RNA, 19 nt, Artificial Sequence
  Description of Artificial Sequence: Synthetic oligonucleotide
ugaucgguagcgcuauucc

SEQ ID NO: 1441671 - RNA, 19 nt, Artificial Sequence
  Description of Artificial Sequence: Synthetic oligonucleotide
uguccgucggaagagagag

SEQ ID NO: 1441672 - RNA, 19 nt, Artificial Sequence
  Description of Artificial Sequence: Synthetic oligonucleotide
aggaaauuuagggugagca

SEQ ID NO: 1441673 - RNA, 19 nt, Artificial Sequence
  Description of Artificial Sequence: Synthetic oligonucleotide
agagcauuuucaaacaucu

SEQ ID NO: 1441674 - RNA, 19 nt, Artificial Sequence
  Description of Artificial Sequence: Synthetic oligonucleotide
uugcuuaugccccuuuuac

SEQ ID NO: 1441675 - RNA, 19 nt, Artificial Sequence
  Description of Artificial Sequence: Synthetic oligonucleotide
uauaucagcuggcauuuuc

SEQ ID NO: 1441676 - RNA, 19 nt, Artificial Sequence
  Description of Artificial Sequence: Synthetic oligonucleotide
ucuuaagugcauccaaaau

SEQ ID NO: 1441677 - RNA, 19 nt, Artificial Sequence
  Description of Artificial Sequence: Synthetic oligonucleotide
gucguguugacacuggcug

SEQ ID NO: 1441678 - RNA, 19 nt, Artificial Sequence
  Description of Artificial Sequence: Synthetic oligonucleotide
uguuaacgcccucacacgu

SEQ ID NO: 1441679 - RNA, 19 nt, Artificial Sequence
  Description of Artificial Sequence: Synthetic oligonucleotide
uuucugugcucagaggcgg

SEQ ID NO: 1441680 - RNA, 19 nt, Artificial Sequence
  Description of Artificial Sequence: Synthetic oligonucleotide
aacgcccucacacguggac

SEQ ID NO: 1441681 - RNA, 19 nt, Artificial Sequence
  Description of Artificial Sequence: Synthetic oligonucleotide
gagcuaucuuucuuaagug

SEQ ID NO: 1441682 - RNA, 19 nt, Artificial Sequence
  Description of Artificial Sequence: Synthetic oligonucleotide
ggcuaggaaauuuagggug

SEQ ID NO: 1441683 - RNA, 19 nt, Artificial Sequence
  Description of Artificial Sequence: Synthetic oligonucleotide
aagcgggucaccucguuca

SEQ ID NO: 1441684 - RNA, 19 nt, Artificial Sequence
  Description of Artificial Sequence: Synthetic oligonucleotide
uuuuaguguccgucggaag

SEQ ID NO: 1441685 - RNA, 19 nt, Artificial Sequence
  Description of Artificial Sequence: Synthetic oligonucleotide
aagauauuuuaagagcauu

SEQ ID NO: 1441686 - RNA, 19 nt, Artificial Sequence
  Description of Artificial Sequence: Synthetic oligonucleotide
uaugucuuagggcuacuua

SEQ ID NO: 1441687 - RNA, 19 nt, Artificial Sequence
  Description of Artificial Sequence: Synthetic oligonucleotide
uuugcuuaugccccuuuua

SEQ ID NO: 1441688 - RNA, 19 nt, Artificial Sequence
  Description of Artificial Sequence: Synthetic oligonucleotide
aaggcaaauuggccgucag

SEQ ID NO: 1441689 - RNA, 19 nt, Artificial Sequence
  Description of Artificial Sequence: Synthetic oligonucleotide
ugcauccaaaaucaguguu

SEQ ID NO: 1441690 - RNA, 19 nt, Artificial Sequence
  Description of Artificial Sequence: Synthetic oligonucleotide
uacaaaggcgcaauccaau

SEQ ID NO: 1441691 - RNA, 19 nt, Artificial Sequence
  Description of Artificial Sequence: Synthetic oligonucleotide
ucucuccuaauauccaagu

SEQ ID NO: 1441692 - RNA, 19 nt, Artificial Sequence
  Description of Artificial Sequence: Synthetic oligonucleotide
uccauuauaucagcuggca

SEQ ID NO: 1441693 - RNA, 19 nt, Artificial Sequence
  Description of Artificial Sequence: Synthetic oligonucleotide
uuagugaucgguagcgcua

SEQ ID NO: 1441694 - RNA, 19 nt, Artificial Sequence
  Description of Artificial Sequence: Synthetic oligonucleotide
ugcccuucgucucuucucc

SEQ ID NO: 1441695 - RNA, 19 nt, Artificial Sequence
  Description of Artificial Sequence: Synthetic oligonucleotide
guagcgcuauuccaggacc

SEQ ID NO: 1441696 - RNA, 19 nt, Artificial Sequence
  Description of Artificial Sequence: Synthetic oligonucleotide
aacuacugagcagcugagg

SEQ ID NO: 1441697 - RNA, 19 nt, Artificial Sequence
  Description of Artificial Sequence: Synthetic oligonucleotide
gacuuucugugcucagagg

SEQ ID NO: 1441698 - RNA, 19 nt, Artificial Sequence
  Description of Artificial Sequence: Synthetic oligonucleotide
ucgguagcgcuauuccagg

SEQ ID NO: 1441699 - RNA, 19 nt, Artificial Sequence
  Description of Artificial Sequence: Synthetic oligonucleotide
cucgggucugugcugagcg

SEQ ID NO: 1441700 - RNA, 19 nt, Artificial Sequence
  Description of Artificial Sequence: Synthetic oligonucleotide
guguuaacgcccucacacg

SEQ ID NO: 1441701 - RNA, 19 nt, Artificial Sequence
  Description of Artificial Sequence: Synthetic oligonucleotide
gcuacuuagugaucgguag

SEQ ID NO: 1441702 - RNA, 19 nt, Artificial Sequence
  Description of Artificial Sequence: Synthetic oligonucleotide
cuacuuagugaucgguagc

SEQ ID NO: 1441703 - RNA, 19 nt, Artificial Sequence
  Description of Artificial Sequence: Synthetic oligonucleotide
ucacuuaauacagcucucu

SEQ ID NO: 1441704 - RNA, 19 nt, Artificial Sequence
  Description of Artificial Sequence: Synthetic oligonucleotide
auuauaucagcuggcauuu

SEQ ID NO: 1441705 - RNA, 19 nt, Artificial Sequence
  Description of Artificial Sequence: Synthetic oligonucleotide
auaaaagucuucucuccua

SEQ ID NO: 1441706 - RNA, 19 nt, Artificial Sequence
  Description of Artificial Sequence: Synthetic oligonucleotide
uccgucggaagagagaggu

SEQ ID NO: 1441707 - RNA, 19 nt, Artificial Sequence
  Description of Artificial Sequence: Synthetic oligonucleotide
cuccauuauaucagcuggc

SEQ ID NO: 1441708 - RNA, 19 nt, Artificial Sequence
  Description of Artificial Sequence: Synthetic oligonucleotide
cuuaugccccuuuuacuug

SEQ ID NO: 1441709 - RNA, 19 nt, Artificial Sequence
  Description of Artificial Sequence: Synthetic oligonucleotide
acuuagugaucgguagcgc

SEQ ID NO: 1441710 - RNA, 19 nt, Artificial Sequence
  Description of Artificial Sequence: Synthetic oligonucleotide
auacuuucuccaauaaacu

SEQ ID NO: 1441711 - RNA, 19 nt, Artificial Sequence
  Description of Artificial Sequence: Synthetic oligonucleotide
ugucguguugacacuggcu

SEQ ID NO: 1441712 - RNA, 19 nt, Artificial Sequence
  Description of Artificial Sequence: Synthetic oligonucleotide
ugcuuaugccccuuuuacu

SEQ ID NO: 1441713 - RNA, 19 nt, Artificial Sequence
  Description of Artificial Sequence: Synthetic oligonucleotide
aacuugcagggugcgcugc

SEQ ID NO: 1441714 - RNA, 19 nt, Artificial Sequence
  Description of Artificial Sequence: Synthetic oligonucleotide
gaugacuuucugugcucag

SEQ ID NO: 1441715 - RNA, 19 nt, Artificial Sequence
  Description of Artificial Sequence: Synthetic oligonucleotide
cuucucaauccccagagaa

SEQ ID NO: 1441716 - RNA, 19 nt, Artificial Sequence
  Description of Artificial Sequence: Synthetic oligonucleotide
uuccggaggugcuucacug

SEQ ID NO: 1441717 - RNA, 19 nt, Artificial Sequence
  Description of Artificial Sequence: Synthetic oligonucleotide
aaacgaaaugucaucucaa

SEQ ID NO: 1441718 - RNA, 19 nt, Artificial Sequence
  Description of Artificial Sequence: Synthetic oligonucleotide
aaggcgcaauccaauauga

SEQ ID NO: 1441719 - RNA, 19 nt, Artificial Sequence
  Description of Artificial Sequence: Synthetic oligonucleotide
ggcgcaauccaauaugaac

SEQ ID NO: 1441720 - RNA, 19 nt, Artificial Sequence
  Description of Artificial Sequence: Synthetic oligonucleotide
aaacuacugagcagcugag

SEQ ID NO: 1441721 - RNA, 19 nt, Artificial Sequence
  Description of Artificial Sequence: Synthetic oligonucleotide
aggcaaauuggccgucagg

SEQ ID NO: 1441722 - RNA, 19 nt, Artificial Sequence
  Description of Artificial Sequence: Synthetic oligonucleotide
uacaaaugcagugcauggu

SEQ ID NO: 1441723 - RNA, 19 nt, Artificial Sequence
  Description of Artificial Sequence: Synthetic oligonucleotide
ccaauaaacuuccccaaag

SEQ ID NO: 1441724 - RNA, 19 nt, Artificial Sequence
  Description of Artificial Sequence: Synthetic oligonucleotide
gacuuucguuuauucuugc

SEQ ID NO: 1441725 - RNA, 19 nt, Artificial Sequence
  Description of Artificial Sequence: Synthetic oligonucleotide
uuaguaugucuuagggcua

SEQ ID NO: 1441726 - RNA, 19 nt, Artificial Sequence
  Description of Artificial Sequence: Synthetic oligonucleotide
cacugcguuaggaccaacc

SEQ ID NO: 1441727 - RNA, 19 nt, Artificial Sequence
  Description of Artificial Sequence: Synthetic oligonucleotide
uccccaaaggaagauauuu

SEQ ID NO: 1441728 - RNA, 19 nt, Artificial Sequence
  Description of Artificial Sequence: Synthetic oligonucleotide
aggguuuaguaugucuuag

SEQ ID NO: 1441729 - RNA, 19 nt, Artificial Sequence
  Description of Artificial Sequence: Synthetic oligonucleotide
ggucagucacuuaauacag

SEQ ID NO: 1441730 - RNA, 19 nt, Artificial Sequence
  Description of Artificial Sequence: Synthetic oligonucleotide
ggagcuaucuuucuuaagu

SEQ ID NO: 1441731 - RNA, 19 nt, Artificial Sequence
  Description of Artificial Sequence: Synthetic oligonucleotide
agcaacaaaguagccacca

SEQ ID NO: 1441732 - RNA, 19 nt, Artificial Sequence
  Description of Artificial Sequence: Synthetic oligonucleotide
agacuuucguuuauucuug

SEQ ID NO: 1441733 - RNA, 19 nt, Artificial Sequence
  Description of Artificial Sequence: Synthetic oligonucleotide
cucacacguggacaggaag

SEQ ID NO: 1441734 - RNA, 19 nt, Artificial Sequence
  Description of Artificial Sequence: Synthetic oligonucleotide
cgucucuucuccaugauag

SEQ ID NO: 1441735 - RNA, 19 nt, Artificial Sequence
  Description of Artificial Sequence: Synthetic oligonucleotide
ggguuuaguaugucuuagg

SEQ ID NO: 1441736 - RNA, 19 nt, Artificial Sequence
  Description of Artificial Sequence: Synthetic oligonucleotide
uuuugcuuaugccccuuuu

SEQ ID NO: 1441737 - RNA, 19 nt, Artificial Sequence
  Description of Artificial Sequence: Synthetic oligonucleotide
ucgguguuaacgcccucac

SEQ ID NO: 1441738 - RNA, 19 nt, Artificial Sequence
  Description of Artificial Sequence: Synthetic oligonucleotide
uagcgcuauuccaggacca

SEQ ID NO: 1441739 - RNA, 19 nt, Artificial Sequence
  Description of Artificial Sequence: Synthetic oligonucleotide
ggucauggcguugaucugg

SEQ ID NO: 1441740 - RNA, 19 nt, Artificial Sequence
  Description of Artificial Sequence: Synthetic oligonucleotide
acaaaggcgcaauccaaua

SEQ ID NO: 1441741 - RNA, 19 nt, Artificial Sequence
  Description of Artificial Sequence: Synthetic oligonucleotide
cuccacauggaguccgcag

SEQ ID NO: 1441742 - RNA, 19 nt, Artificial Sequence
  Description of Artificial Sequence: Synthetic oligonucleotide
cucuccuaauauccaaguc

SEQ ID NO: 1441743 - RNA, 19 nt, Artificial Sequence
  Description of Artificial Sequence: Synthetic oligonucleotide
ggcaaauuggccgucagga

SEQ ID NO: 1441744 - RNA, 19 nt, Artificial Sequence
  Description of Artificial Sequence: Synthetic oligonucleotide
uccgccacggccuccacau

SEQ ID NO: 1441745 - RNA, 19 nt, Artificial Sequence
  Description of Artificial Sequence: Synthetic oligonucleotide
guacuuccccaacacacuc

SEQ ID NO: 1441746 - RNA, 19 nt, Artificial Sequence
  Description of Artificial Sequence: Synthetic oligonucleotide
caccucgguguuaacgccc

SEQ ID NO: 1441747 - RNA, 19 nt, Artificial Sequence
  Description of Artificial Sequence: Synthetic oligonucleotide
aauccccagagaauuuuau

SEQ ID NO: 1441748 - RNA, 19 nt, Artificial Sequence
  Description of Artificial Sequence: Synthetic oligonucleotide
uaggaaauuuagggugagc

SEQ ID NO: 1441749 - RNA, 19 nt, Artificial Sequence
  Description of Artificial Sequence: Synthetic oligonucleotide
gcgcaauccaauaugaaca

SEQ ID NO: 1441750 - RNA, 19 nt, Artificial Sequence
  Description of Artificial Sequence: Synthetic oligonucleotide
gcuaucuuucuuaagugca

SEQ ID NO: 1441751 - RNA, 19 nt, Artificial Sequence
  Description of Artificial Sequence: Synthetic oligonucleotide
uccccaacacacucggguc

SEQ ID NO: 1441752 - RNA, 19 nt, Artificial Sequence
  Description of Artificial Sequence: Synthetic oligonucleotide
caguguuuucagcuggcuc

SEQ ID NO: 1441753 - RNA, 19 nt, Artificial Sequence
  Description of Artificial Sequence: Synthetic oligonucleotide
uggaauccuucacgcaaaa

SEQ ID NO: 1441754 - RNA, 19 nt, Artificial Sequence
  Description of Artificial Sequence: Synthetic oligonucleotide
ucaucugcgcccgcugcag

SEQ ID NO: 1441755 - RNA, 19 nt, Artificial Sequence
  Description of Artificial Sequence: Synthetic oligonucleotide
uuuguccggugucguguug

SEQ ID NO: 1441756 - RNA, 19 nt, Artificial Sequence
  Description of Artificial Sequence: Synthetic oligonucleotide
cuucgucucuucuccauga

SEQ ID NO: 1441757 - RNA, 19 nt, Artificial Sequence
  Description of Artificial Sequence: Synthetic oligonucleotide
ggggauuccgcuguuauca

SEQ ID NO: 1441758 - RNA, 19 nt, Artificial Sequence
  Description of Artificial Sequence: Synthetic oligonucleotide
agacacugcguuaggacca

SEQ ID NO: 1441759 - RNA, 19 nt, Artificial Sequence
  Description of Artificial Sequence: Synthetic oligonucleotide
ucggaagagagaggugggc

SEQ ID NO: 1441760 - RNA, 19 nt, Artificial Sequence
  Description of Artificial Sequence: Synthetic oligonucleotide
gaagcgggucaccucguuc

SEQ ID NO: 1441761 - RNA, 19 nt, Artificial Sequence
  Description of Artificial Sequence: Synthetic oligonucleotide
ucgucucuucuccaugaua

SEQ ID NO: 1441762 - RNA, 19 nt, Artificial Sequence
  Description of Artificial Sequence: Synthetic oligonucleotide
aauuggccgucaggagccg

SEQ ID NO: 1441763 - RNA, 19 nt, Artificial Sequence
  Description of Artificial Sequence: Synthetic oligonucleotide
gggucaugcaguuggccag

SEQ ID NO: 1441764 - RNA, 19 nt, Artificial Sequence
  Description of Artificial Sequence: Synthetic oligonucleotide
gcaaauuggccgucaggag

SEQ ID NO: 1441765 - RNA, 19 nt, Artificial Sequence
  Description of Artificial Sequence: Synthetic oligonucleotide
gucggaagagagagguggg

SEQ ID NO: 1441766 - RNA, 19 nt, Artificial Sequence
  Description of Artificial Sequence: Synthetic oligonucleotide
cagcuuggaaugccgggag

SEQ ID NO: 1441767 - RNA, 19 nt, Artificial Sequence
  Description of Artificial Sequence: Synthetic oligonucleotide
cucguucaugcacucgcug

SEQ ID NO: 1441768 - RNA, 19 nt, Artificial Sequence
  Description of Artificial Sequence: Synthetic oligonucleotide
ggaaauuuagggugagcaa

SEQ ID NO: 1441769 - RNA, 19 nt, Artificial Sequence
  Description of Artificial Sequence: Synthetic oligonucleotide
cuccaauaaacuuccccaa

SEQ ID NO: 1441770 - RNA, 19 nt, Artificial Sequence
  Description of Artificial Sequence: Synthetic oligonucleotide
ucguuuauucuugcccuuc

SEQ ID NO: 1441771 - RNA, 19 nt, Artificial Sequence
  Description of Artificial Sequence: Synthetic oligonucleotide
agcuggcucagacuuucgu

SEQ ID NO: 1441772 - RNA, 19 nt, Artificial Sequence
  Description of Artificial Sequence: Synthetic oligonucleotide
augcacucgcugaagccgg

SEQ ID NO: 1441773 - RNA, 19 nt, Artificial Sequence
  Description of Artificial Sequence: Synthetic oligonucleotide
auacaaaggcgcaauccaa

SEQ ID NO: 1441774 - RNA, 19 nt, Artificial Sequence
  Description of Artificial Sequence: Synthetic oligonucleotide
aacuuccccaaaggaagau

SEQ ID NO: 1441775 - RNA, 19 nt, Artificial Sequence
  Description of Artificial Sequence: Synthetic oligonucleotide
agugcauggucagucacuu

SEQ ID NO: 1441776 - RNA, 19 nt, Artificial Sequence
  Description of Artificial Sequence: Synthetic oligonucleotide
uucguuuauucuugcccuu

SEQ ID NO: 1441777 - RNA, 19 nt, Artificial Sequence
  Description of Artificial Sequence: Synthetic oligonucleotide
acucgggucugugcugagc

SEQ ID NO: 1441778 - RNA, 19 nt, Artificial Sequence
  Description of Artificial Sequence: Synthetic oligonucleotide
guuaacgcccucacacgug

SEQ ID NO: 1441779 - RNA, 19 nt, Artificial Sequence
  Description of Artificial Sequence: Synthetic oligonucleotide
aguguccgucggaagagag

SEQ ID NO: 1441780 - RNA, 19 nt, Artificial Sequence
  Description of Artificial Sequence: Synthetic oligonucleotide
uaugccccuuuuacuugac

SEQ ID NO: 1441781 - RNA, 19 nt, Artificial Sequence
  Description of Artificial Sequence: Synthetic oligonucleotide
gguagcgcuauuccaggac

SEQ ID NO: 1441782 - RNA, 19 nt, Artificial Sequence
  Description of Artificial Sequence: Synthetic oligonucleotide
gccaccaaauuauaaaagu

SEQ ID NO: 1441783 - RNA, 19 nt, Artificial Sequence
  Description of Artificial Sequence: Synthetic oligonucleotide
gugucguguugacacuggc

SEQ ID NO: 1441784 - RNA, 19 nt, Artificial Sequence
  Description of Artificial Sequence: Synthetic oligonucleotide
auauacaaaugcagugcau

SEQ ID NO: 1441785 - RNA, 19 nt, Artificial Sequence
  Description of Artificial Sequence: Synthetic oligonucleotide
uucgucucuucuccaugau

SEQ ID NO: 1441786 - RNA, 19 nt, Artificial Sequence
  Description of Artificial Sequence: Synthetic oligonucleotide
acacguggacaggaagcgg

SEQ ID NO: 1441787 - RNA, 19 nt, Artificial Sequence
  Description of Artificial Sequence: Synthetic oligonucleotide
uccggaggugcuucacugu

SEQ ID NO: 1441788 - RNA, 19 nt, Artificial Sequence
  Description of Artificial Sequence: Synthetic oligonucleotide
ggugggcuaggaaauuuag

SEQ ID NO: 1441789 - RNA, 19 nt, Artificial Sequence
  Description of Artificial Sequence: Synthetic oligonucleotide
cgucggaagagagaggugg

SEQ ID NO: 1441790 - RNA, 19 nt, Artificial Sequence
  Description of Artificial Sequence: Synthetic oligonucleotide
gucugugcugagcgcggcg

SEQ ID NO: 1441791 - RNA, 19 nt, Artificial Sequence
  Description of Artificial Sequence: Synthetic oligonucleotide
augccgggagcuaucuuuc

SEQ ID NO: 1441792 - RNA, 19 nt, Artificial Sequence
  Description of Artificial Sequence: Synthetic oligonucleotide
uugguuuguccggugucgu

SEQ ID NO: 1441793 - RNA, 19 nt, Artificial Sequence
  Description of Artificial Sequence: Synthetic oligonucleotide
ggaguccgcagugagggag

SEQ ID NO: 1441794 - RNA, 19 nt, Artificial Sequence
  Description of Artificial Sequence: Synthetic oligonucleotide
uccuaauauccaagucguu

SEQ ID NO: 1441795 - RNA, 19 nt, Artificial Sequence
  Description of Artificial Sequence: Synthetic oligonucleotide
caacuugcagggugcgcug

SEQ ID NO: 1441796 - RNA, 19 nt, Artificial Sequence
  Description of Artificial Sequence: Synthetic oligonucleotide
uagugaucgguagcgcuau

SEQ ID NO: 1441797 - RNA, 19 nt, Artificial Sequence
  Description of Artificial Sequence: Synthetic oligonucleotide
cugcguuaggaccaaccga

SEQ ID NO: 1441798 - RNA, 19 nt, Artificial Sequence
  Description of Artificial Sequence: Synthetic oligonucleotide
aucuuuggcaucacauaaa

SEQ ID NO: 1441799 - RNA, 19 nt, Artificial Sequence
  Description of Artificial Sequence: Synthetic oligonucleotide
cucgcugaagccggcgcgg

SEQ ID NO: 1441800 - RNA, 19 nt, Artificial Sequence
  Description of Artificial Sequence: Synthetic oligonucleotide
uaggaccaaccgagguccc

SEQ ID NO: 1441801 - RNA, 19 nt, Artificial Sequence
  Description of Artificial Sequence: Synthetic oligonucleotide
aucugcgcccgcugcaggu

SEQ ID NO: 1441802 - RNA, 19 nt, Artificial Sequence
  Description of Artificial Sequence: Synthetic oligonucleotide
gcugggguagcagccaccg

SEQ ID NO: 1441803 - RNA, 19 nt, Artificial Sequence
  Description of Artificial Sequence: Synthetic oligonucleotide
gugaucgguagcgcuauuc

SEQ ID NO: 1441804 - RNA, 19 nt, Artificial Sequence
  Description of Artificial Sequence: Synthetic oligonucleotide
uguccggugucguguugac

SEQ ID NO: 1441805 - RNA, 19 nt, Artificial Sequence
  Description of Artificial Sequence: Synthetic oligonucleotide
aggaccaaccgaggucccg

SEQ ID NO: 1441806 - RNA, 19 nt, Artificial Sequence
  Description of Artificial Sequence: Synthetic oligonucleotide
gucuuugguuuguccggug

SEQ ID NO: 1441807 - RNA, 19 nt, Artificial Sequence
  Description of Artificial Sequence: Synthetic oligonucleotide
cccgggguaggucauggcg

SEQ ID NO: 1441808 - RNA, 19 nt, Artificial Sequence
  Description of Artificial Sequence: Synthetic oligonucleotide
gcuaggaaauuuaggguga

SEQ ID NO: 1441809 - RNA, 19 nt, Artificial Sequence
  Description of Artificial Sequence: Synthetic oligonucleotide
cguuuauucuugcccuucg

SEQ ID NO: 1441810 - RNA, 19 nt, Artificial Sequence
  Description of Artificial Sequence: Synthetic oligonucleotide
gggagcuaucuuucuuaag

SEQ ID NO: 1441811 - RNA, 19 nt, Artificial Sequence
  Description of Artificial Sequence: Synthetic oligonucleotide
cacuuaauacagcucucua

SEQ ID NO: 1441812 - RNA, 19 nt, Artificial Sequence
  Description of Artificial Sequence: Synthetic oligonucleotide
aaguagccaccaaauuaua

SEQ ID NO: 1441813 - RNA, 19 nt, Artificial Sequence
  Description of Artificial Sequence: Synthetic oligonucleotide
ggugucguguugacacugg

SEQ ID NO: 1441814 - RNA, 19 nt, Artificial Sequence
  Description of Artificial Sequence: Synthetic oligonucleotide
guuuauucuugcccuucgu

SEQ ID NO: 1441815 - RNA, 19 nt, Artificial Sequence
  Description of Artificial Sequence: Synthetic oligonucleotide
uaguguccgucggaagaga

SEQ ID NO: 1441816 - RNA, 19 nt, Artificial Sequence
  Description of Artificial Sequence: Synthetic oligonucleotide
caucugcgcccgcugcagg

SEQ ID NO: 1441817 - RNA, 19 nt, Artificial Sequence
  Description of Artificial Sequence: Synthetic oligonucleotide
uaacgcccucacacgugga

SEQ ID NO: 1441818 - RNA, 19 nt, Artificial Sequence
  Description of Artificial Sequence: Synthetic oligonucleotide
augccccuuuuacuugacu

SEQ ID NO: 1441819 - RNA, 19 nt, Artificial Sequence
  Description of Artificial Sequence: Synthetic oligonucleotide
ucugugcucagaggcgguc

SEQ ID NO: 1441820 - RNA, 19 nt, Artificial Sequence
  Description of Artificial Sequence: Synthetic oligonucleotide
gggauuccgcuguuaucag

SEQ ID NO: 1441821 - RNA, 19 nt, Artificial Sequence
  Description of Artificial Sequence: Synthetic oligonucleotide
auuggccgucaggagccgg

SEQ ID NO: 1441822 - RNA, 19 nt, Artificial Sequence
  Description of Artificial Sequence: Synthetic oligonucleotide
gcuuaugccccuuuuacuu

SEQ ID NO: 1441823 - RNA, 19 nt, Artificial Sequence
  Description of Artificial Sequence: Synthetic oligonucleotide
ggcggucuuugguuugucc

SEQ ID NO: 1441824 - RNA, 19 nt, Artificial Sequence
  Description of Artificial Sequence: Synthetic oligonucleotide
acuuccccaaaggaagaua

SEQ ID NO: 1441825 - RNA, 19 nt, Artificial Sequence
  Description of Artificial Sequence: Synthetic oligonucleotide
ggcaccaccuggaaaccgc

SEQ ID NO: 1441826 - RNA, 19 nt, Artificial Sequence
  Description of Artificial Sequence: Synthetic oligonucleotide
uggaguccgcagugaggga

SEQ ID NO: 1441827 - RNA, 19 nt, Artificial Sequence
  Description of Artificial Sequence: Synthetic oligonucleotide
cugcaaggcggggugcggc

SEQ ID NO: 1441828 - RNA, 19 nt, Artificial Sequence
  Description of Artificial Sequence: Synthetic oligonucleotide
gccgucaggagccggcacc

SEQ ID NO: 1441829 - RNA, 19 nt, Artificial Sequence
  Description of Artificial Sequence: Synthetic oligonucleotide
caaaggcgcaauccaauau

SEQ ID NO: 1441830 - RNA, 19 nt, Artificial Sequence
  Description of Artificial Sequence: Synthetic oligonucleotide
gcgcaccucgguguuaacg

SEQ ID NO: 1441831 - RNA, 19 nt, Artificial Sequence
  Description of Artificial Sequence: Synthetic oligonucleotide
ggaccaaccgaggucccgc

SEQ ID NO: 1441832 - RNA, 19 nt, Artificial Sequence
  Description of Artificial Sequence: Synthetic oligonucleotide
uuauaucagcuggcauuuu

SEQ ID NO: 1441833 - RNA, 19 nt, Artificial Sequence
  Description of Artificial Sequence: Synthetic oligonucleotide
gggcuaggaaauuuagggu

SEQ ID NO: 1441834 - RNA, 19 nt, Artificial Sequence
  Description of Artificial Sequence: Synthetic oligonucleotide
acgcccucacacguggaca

SEQ ID NO: 1441835 - RNA, 19 nt, Artificial Sequence
  Description of Artificial Sequence: Synthetic oligonucleotide
ggccuccacauggaguccg

SEQ ID NO: 1441836 - RNA, 19 nt, Artificial Sequence
  Description of Artificial Sequence: Synthetic oligonucleotide
aggaaccgcuggaaggaga

SEQ ID NO: 1441837 - RNA, 19 nt, Artificial Sequence
  Description of Artificial Sequence: Synthetic oligonucleotide
gcagugagggaggaaccgc

SEQ ID NO: 1441838 - RNA, 19 nt, Artificial Sequence
  Description of Artificial Sequence: Synthetic oligonucleotide
ggcggggugcggcugcccg

SEQ ID NO: 1441839 - RNA, 19 nt, Artificial Sequence
  Description of Artificial Sequence: Synthetic oligonucleotide
cauccaaaaucaguguuuu

SEQ ID NO: 1441840 - RNA, 19 nt, Artificial Sequence
  Description of Artificial Sequence: Synthetic oligonucleotide
ccuucgucucuucuccaug

SEQ ID NO: 1441841 - RNA, 19 nt, Artificial Sequence
  Description of Artificial Sequence: Synthetic oligonucleotide
cugagccccucaguuccgc

SEQ ID NO: 1441842 - RNA, 19 nt, Artificial Sequence
  Description of Artificial Sequence: Synthetic oligonucleotide
guccgucggaagagagagg

SEQ ID NO: 1441843 - RNA, 19 nt, Artificial Sequence
  Description of Artificial Sequence: Synthetic oligonucleotide
agcgcuauuccaggaccaa

SEQ ID NO: 1441844 - RNA, 19 nt, Artificial Sequence
  Description of Artificial Sequence: Synthetic oligonucleotide
cagugagggaggaaccgcu

SEQ ID NO: 1441845 - RNA, 19 nt, Artificial Sequence
  Description of Artificial Sequence: Synthetic oligonucleotide
acacugcguuaggaccaac

SEQ ID NO: 1441846 - RNA, 19 nt, Artificial Sequence
  Description of Artificial Sequence: Synthetic oligonucleotide
cagugcauggucagucacu

SEQ ID NO: 1441847 - RNA, 19 nt, Artificial Sequence
  Description of Artificial Sequence: Synthetic oligonucleotide
gcgaacggcgcgugcuggg

SEQ ID NO: 1441848 - RNA, 19 nt, Artificial Sequence
  Description of Artificial Sequence: Synthetic oligonucleotide
guguccgucggaagagaga

SEQ ID NO: 1441849 - RNA, 19 nt, Artificial Sequence
  Description of Artificial Sequence: Synthetic oligonucleotide
guuccggaggugcuucacu

SEQ ID NO: 1441850 - RNA, 19 nt, Artificial Sequence
  Description of Artificial Sequence: Synthetic oligonucleotide
gacacugcguuaggaccaa

SEQ ID NO: 1441851 - RNA, 19 nt, Artificial Sequence
  Description of Artificial Sequence: Synthetic oligonucleotide
ugcugagcgcggcggucau

SEQ ID NO: 1441852 - RNA, 19 nt, Artificial Sequence
  Description of Artificial Sequence: Synthetic oligonucleotide
ccgcagugagggaggaacc

SEQ ID NO: 1441853 - RNA, 19 nt, Artificial Sequence
  Description of Artificial Sequence: Synthetic oligonucleotide
ugagcgcggcggucaucug

SEQ ID NO: 1441854 - RNA, 19 nt, Artificial Sequence
  Description of Artificial Sequence: Synthetic oligonucleotide
ggguaggucauggcguuga

SEQ ID NO: 1441855 - RNA, 19 nt, Artificial Sequence
  Description of Artificial Sequence: Synthetic oligonucleotide
aggcggucuuugguuuguc

SEQ ID NO: 1441856 - RNA, 19 nt, Artificial Sequence
  Description of Artificial Sequence: Synthetic oligonucleotide
gggucugugcugagcgcgg

SEQ ID NO: 1441857 - RNA, 19 nt, Artificial Sequence
  Description of Artificial Sequence: Synthetic oligonucleotide
aguccgcagugagggagga

SEQ ID NO: 1441858 - RNA, 19 nt, Artificial Sequence
  Description of Artificial Sequence: Synthetic oligonucleotide
gcguuaggaccaaccgagg

SEQ ID NO: 1441859 - RNA, 19 nt, Artificial Sequence
  Description of Artificial Sequence: Synthetic oligonucleotide
ggcuacuuagugaucggua

SEQ ID NO: 1441860 - RNA, 19 nt, Artificial Sequence
  Description of Artificial Sequence: Synthetic oligonucleotide
gcgcuauuccaggaccaag

SEQ ID NO: 1441861 - RNA, 19 nt, Artificial Sequence
  Description of Artificial Sequence: Synthetic oligonucleotide
aggcgcaauccaauaugaa

SEQ ID NO: 1441862 - RNA, 19 nt, Artificial Sequence
  Description of Artificial Sequence: Synthetic oligonucleotide
cacucgggucugugcugag

SEQ ID NO: 1441863 - RNA, 19 nt, Artificial Sequence
  Description of Artificial Sequence: Synthetic oligonucleotide
agugaucgguagcgcuauu

SEQ ID NO: 1441864 - RNA, 19 nt, Artificial Sequence
  Description of Artificial Sequence: Synthetic oligonucleotide
ccuaauauccaagucguuu

SEQ ID NO: 1441865 - RNA, 19 nt, Artificial Sequence
  Description of Artificial Sequence: Synthetic oligonucleotide
ucgcugaagccggcgcggu

SEQ ID NO: 1441866 - RNA, 19 nt, Artificial Sequence
  Description of Artificial Sequence: Synthetic oligonucleotide
accggggacgaggaauuuu

SEQ ID NO: 1441867 - RNA, 19 nt, Artificial Sequence
  Description of Artificial Sequence: Synthetic oligonucleotide
cagccaccggggacgagga

SEQ ID NO: 1441868 - RNA, 19 nt, Artificial Sequence
  Description of Artificial Sequence: Synthetic oligonucleotide
ucugcgcccgcugcagguu

SEQ ID NO: 1441869 - RNA, 19 nt, Artificial Sequence
  Description of Artificial Sequence: Synthetic oligonucleotide
cgcgguacuuccccaacac

SEQ ID NO: 1441870 - RNA, 19 nt, Artificial Sequence
  Description of Artificial Sequence: Synthetic oligonucleotide
gaccaaccgaggucccgcu

SEQ ID NO: 1441871 - RNA, 19 nt, Artificial Sequence
  Description of Artificial Sequence: Synthetic oligonucleotide
ggcgcgguacuuccccaac

SEQ ID NO: 1441872 - RNA, 19 nt, Artificial Sequence
  Description of Artificial Sequence: Synthetic oligonucleotide
ugcgcaccucgguguuaac

SEQ ID NO: 1441873 - RNA, 19 nt, Artificial Sequence
  Description of Artificial Sequence: Synthetic oligonucleotide
gugcgcaccucgguguuaa

SEQ ID NO: 1441874 - RNA, 19 nt, Artificial Sequence
  Description of Artificial Sequence: Synthetic oligonucleotide
cucaauccccagagaauuu

SEQ ID NO: 1441875 - RNA, 19 nt, Artificial Sequence
  Description of Artificial Sequence: Synthetic oligonucleotide
guuuguccggugucguguu

SEQ ID NO: 1441876 - RNA, 19 nt, Artificial Sequence
  Description of Artificial Sequence: Synthetic oligonucleotide
gcccaacuugcagggugcg

SEQ ID NO: 1441877 - RNA, 19 nt, Artificial Sequence
  Description of Artificial Sequence: Synthetic oligonucleotide
gaggcggucuuugguuugu

SEQ ID NO: 1441878 - RNA, 19 nt, Artificial Sequence
  Description of Artificial Sequence: Synthetic oligonucleotide
ccgggagcuaucuuucuua

SEQ ID NO: 1441879 - RNA, 19 nt, Artificial Sequence
  Description of Artificial Sequence: Synthetic oligonucleotide
ugaagccggcgcgguacuu

SEQ ID NO: 1441880 - RNA, 19 nt, Artificial Sequence
  Description of Artificial Sequence: Synthetic oligonucleotide
ccaacuugcagggugcgcu

SEQ ID NO: 1441881 - RNA, 19 nt, Artificial Sequence
  Description of Artificial Sequence: Synthetic oligonucleotide
guccggugucguguugaca

SEQ ID NO: 1441882 - RNA, 19 nt, Artificial Sequence
  Description of Artificial Sequence: Synthetic oligonucleotide
gugcauggucagucacuua

SEQ ID NO: 1441883 - RNA, 19 nt, Artificial Sequence
  Description of Artificial Sequence: Synthetic oligonucleotide
gaaugccgggagcuaucuu

SEQ ID NO: 1441884 - RNA, 19 nt, Artificial Sequence
  Description of Artificial Sequence: Synthetic oligonucleotide
gcgcgguacuuccccaaca

SEQ ID NO: 1441885 - RNA, 19 nt, Artificial Sequence
  Description of Artificial Sequence: Synthetic oligonucleotide
gggccgccggguccugacg

SEQ ID NO: 1441886 - RNA, 19 nt, Artificial Sequence
  Description of Artificial Sequence: Synthetic oligonucleotide
ggaaugccgggagcuaucu

SEQ ID NO: 1441887 - RNA, 19 nt, Artificial Sequence
  Description of Artificial Sequence: Synthetic oligonucleotide
cguucaugcacucgcugaa

SEQ ID NO: 1441888 - RNA, 19 nt, Artificial Sequence
  Description of Artificial Sequence: Synthetic oligonucleotide
ccgucggaagagagaggug

SEQ ID NO: 1441889 - RNA, 19 nt, Artificial Sequence
  Description of Artificial Sequence: Synthetic oligonucleotide
gcgcgaacggcgcgugcug

SEQ ID NO: 1441890 - RNA, 19 nt, Artificial Sequence
  Description of Artificial Sequence: Synthetic oligonucleotide
ggugcgcugccgggagggg

SEQ ID NO: 1441891 - RNA, 19 nt, Artificial Sequence
  Description of Artificial Sequence: Synthetic oligonucleotide
gggguaggucauggcguug

SEQ ID NO: 1441892 - RNA, 19 nt, Artificial Sequence
  Description of Artificial Sequence: Synthetic oligonucleotide
ccauuauaucagcuggcau

SEQ ID NO: 1441893 - RNA, 19 nt, Artificial Sequence
  Description of Artificial Sequence: Synthetic oligonucleotide
agccaccggggacgaggaa

SEQ ID NO: 1441894 - RNA, 19 nt, Artificial Sequence
  Description of Artificial Sequence: Synthetic oligonucleotide
ggggaugggcacgagcggu

SEQ ID NO: 1441895 - RNA, 19 nt, Artificial Sequence
  Description of Artificial Sequence: Synthetic oligonucleotide
cgaacggcgcgugcugggg

SEQ ID NO: 1441896 - RNA, 19 nt, Artificial Sequence
  Description of Artificial Sequence: Synthetic oligonucleotide
ccaaccgaggucccgcugu

SEQ ID NO: 1441897 - RNA, 19 nt, Artificial Sequence
  Description of Artificial Sequence: Synthetic oligonucleotide
ccgggguaggucauggcgu

SEQ ID NO: 1441898 - RNA, 19 nt, Artificial Sequence
  Description of Artificial Sequence: Synthetic oligonucleotide
cggugucguguugacacug

SEQ ID NO: 1441899 - RNA, 19 nt, Artificial Sequence
  Description of Artificial Sequence: Synthetic oligonucleotide
gggcuacuuagugaucggu

SEQ ID NO: 1441900 - RNA, 19 nt, Artificial Sequence
  Description of Artificial Sequence: Synthetic oligonucleotide
cugaagccggcgcgguacu

SEQ ID NO: 1441901 - RNA, 19 nt, Artificial Sequence
  Description of Artificial Sequence: Synthetic oligonucleotide
ccggcaccaccuggaaacc

SEQ ID NO: 1441902 - RNA, 19 nt, Artificial Sequence
  Description of Artificial Sequence: Synthetic oligonucleotide
cgcggcggucaucugcgcc

SEQ ID NO: 1441903 - RNA, 19 nt, Artificial Sequence
  Description of Artificial Sequence: Synthetic oligonucleotide
gcccgggguaggucauggc

SEQ ID NO: 1441904 - RNA, 19 nt, Artificial Sequence
  Description of Artificial Sequence: Synthetic oligonucleotide
gcccuucgucucuucucca

SEQ ID NO: 1441905 - RNA, 19 nt, Artificial Sequence
  Description of Artificial Sequence: Synthetic oligonucleotide
ccaccuggaaaccgccaaa

SEQ ID NO: 1441906 - RNA, 19 nt, Artificial Sequence
  Description of Artificial Sequence: Synthetic oligonucleotide
ggggugcggcugcccgggg

SEQ ID NO: 1441907 - RNA, 19 nt, Artificial Sequence
  Description of Artificial Sequence: Synthetic oligonucleotide
gccaccggggacgaggaau

SEQ ID NO: 1441908 - RNA, 19 nt, Artificial Sequence
  Description of Artificial Sequence: Synthetic oligonucleotide
cgcgaacggcgcgugcugg

SEQ ID NO: 1441909 - RNA, 19 nt, Artificial Sequence
  Description of Artificial Sequence: Synthetic oligonucleotide
cggcaccaccuggaaaccg

SEQ ID NO: 1441910 - RNA, 19 nt, Artificial Sequence
  Description of Artificial Sequence: Synthetic oligonucleotide
ggcgcgaacggcgcgugcu

SEQ ID NO: 1441911 - RNA, 19 nt, Artificial Sequence
  Description of Artificial Sequence: Synthetic oligonucleotide
ccucguucaugcacucgcu

SEQ ID NO: 1441912 - RNA, 19 nt, Artificial Sequence
  Description of Artificial Sequence: Synthetic oligonucleotide
cgagugcgcaccucggugu

SEQ ID NO: 1441913 - RNA, 19 nt, Artificial Sequence
  Description of Artificial Sequence: Synthetic oligonucleotide
gccgggagcuaucuuucuu

SEQ ID NO: 1441914 - RNA, 19 nt, Artificial Sequence
  Description of Artificial Sequence: Synthetic oligonucleotide
cggggugcggcugcccggg

SEQ ID NO: 1441915 - RNA, 19 nt, Artificial Sequence
  Description of Artificial Sequence: Synthetic oligonucleotide
caaccgaggucccgcuguu

SEQ ID NO: 1441916 - RNA, 19 nt, Artificial Sequence
  Description of Artificial Sequence: Synthetic oligonucleotide
ccgucaggagccggcacca

SEQ ID NO: 1441917 - RNA, 19 nt, Artificial Sequence
  Description of Artificial Sequence: Synthetic oligonucleotide
cgguagcgcuauuccagga

SEQ ID NO: 1441918 - RNA, 19 nt, Artificial Sequence
  Description of Artificial Sequence: Synthetic oligonucleotide
ggaagcgggucaccucguu

SEQ ID NO: 1441919 - RNA, 19 nt, Artificial Sequence
  Description of Artificial Sequence: Synthetic oligonucleotide
ccaccggggacgaggaauu

SEQ ID NO: 1441920 - RNA, 19 nt, Artificial Sequence
  Description of Artificial Sequence: Synthetic oligonucleotide
gcggcgcgaacggcgcgug

SEQ ID NO: 1441921 - RNA, 19 nt, Artificial Sequence
  Description of Artificial Sequence: Synthetic oligonucleotide
cccuucgucucuucuccau

SEQ ID NO: 1441922 - RNA, 19 nt, Artificial Sequence
  Description of Artificial Sequence: Synthetic oligonucleotide
gcggucaucugcgcccgcu

SEQ ID NO: 1441923 - RNA, 19 nt, Artificial Sequence
  Description of Artificial Sequence: Synthetic oligonucleotide
ccggcgcgguacuucccca

SEQ ID NO: 1441924 - RNA, 19 nt, Artificial Sequence
  Description of Artificial Sequence: Synthetic oligonucleotide
gcugagcgcggcggucauc

SEQ ID NO: 1441925 - RNA, 19 nt, Artificial Sequence
  Description of Artificial Sequence: Synthetic oligonucleotide
gcugcccaacuugcagggu

SEQ ID NO: 1441926 - RNA, 19 nt, Artificial Sequence
  Description of Artificial Sequence: Synthetic oligonucleotide
cggcgcgaacggcgcgugc

SEQ ID NO: 1441927 - RNA, 19 nt, Artificial Sequence
  Description of Artificial Sequence: Synthetic oligonucleotide
gcugcccgggguaggucau

SEQ ID NO: 1441928 - RNA, 19 nt, Artificial Sequence
  Description of Artificial Sequence: Synthetic oligonucleotide
cgggguaggucauggcguu

SEQ ID NO: 1441929 - RNA, 19 nt, Artificial Sequence
  Description of Artificial Sequence: Synthetic oligonucleotide
caccggggacgaggaauuu

SEQ ID NO: 1441930 - RNA, 19 nt, Artificial Sequence
  Description of Artificial Sequence: Synthetic oligonucleotide
cggcgcgguacuuccccaa

SEQ ID NO: 1441931 - RNA, 19 nt, Artificial Sequence
  Description of Artificial Sequence: Synthetic oligonucleotide
cgaaggccccguuggggau

SEQ ID NO: 1441932 - RNA, 19 nt, Artificial Sequence
  Description of Artificial Sequence: Synthetic oligonucleotide
cggcugcccgggguagguc

SEQ ID NO: 1441933 - RNA, 19 nt, Artificial Sequence
  Description of Artificial Sequence: Synthetic oligonucleotide
aaugcaagaagccaccugg

SEQ ID NO: 1441934 - RNA, 19 nt, Artificial Sequence
  Description of Artificial Sequence: Synthetic oligonucleotide
aaugcuuuuauuggaagag

SEQ ID NO: 1441935 - RNA, 19 nt, Artificial Sequence
  Description of Artificial Sequence: Synthetic oligonucleotide
uuuuauuggaagagcagug

SEQ ID NO: 1441936 - RNA, 19 nt, Artificial Sequence
  Description of Artificial Sequence: Synthetic oligonucleotide
aagacgacgacggucaccg

SEQ ID NO: 1441937 - RNA, 19 nt, Artificial Sequence
  Description of Artificial Sequence: Synthetic oligonucleotide
aaucccuugggagaggacg

SEQ ID NO: 1441938 - RNA, 19 nt, Artificial Sequence
  Description of Artificial Sequence: Synthetic oligonucleotide
agaaacaugucuguaacag

SEQ ID NO: 1441939 - RNA, 19 nt, Artificial Sequence
  Description of Artificial Sequence: Synthetic oligonucleotide
aggaaugccgacuugaccu

SEQ ID NO: 1441940 - RNA, 19 nt, Artificial Sequence
  Description of Artificial Sequence: Synthetic oligonucleotide
aaacaugucuguaacagcu

SEQ ID NO: 1441941 - RNA, 19 nt, Artificial Sequence
  Description of Artificial Sequence: Synthetic oligonucleotide
gacaugaccagaaagggug

SEQ ID NO: 1441942 - RNA, 19 nt, Artificial Sequence
  Description of Artificial Sequence: Synthetic oligonucleotide
gacaaugugcugcaggaag

SEQ ID NO: 1441943 - RNA, 19 nt, Artificial Sequence
  Description of Artificial Sequence: Synthetic oligonucleotide
aaguccgucacuaggcugc

SEQ ID NO: 1441944 - RNA, 19 nt, Artificial Sequence
  Description of Artificial Sequence: Synthetic oligonucleotide
cuaaagacaggcucgccgg

SEQ ID NO: 1441945 - RNA, 19 nt, Artificial Sequence
  Description of Artificial Sequence: Synthetic oligonucleotide
uuauuggaagagcagugug

SEQ ID NO: 1441946 - RNA, 19 nt, Artificial Sequence
  Description of Artificial Sequence: Synthetic oligonucleotide
agagaaugcaagaagccac

SEQ ID NO: 1441947 - RNA, 19 nt, Artificial Sequence
  Description of Artificial Sequence: Synthetic oligonucleotide
ugcuggaccauccccauag

SEQ ID NO: 1441948 - RNA, 19 nt, Artificial Sequence
  Description of Artificial Sequence: Synthetic oligonucleotide
ucucggacgagacaggaga

SEQ ID NO: 1441949 - RNA, 19 nt, Artificial Sequence
  Description of Artificial Sequence: Synthetic oligonucleotide
gucacuaggcugcacaggg

SEQ ID NO: 1441950 - RNA, 19 nt, Artificial Sequence
  Description of Artificial Sequence: Synthetic oligonucleotide
uggaccauccccauagagc

SEQ ID NO: 1441951 - RNA, 19 nt, Artificial Sequence
  Description of Artificial Sequence: Synthetic oligonucleotide
uggacaugaccagaaaggg

SEQ ID NO: 1441952 - RNA, 19 nt, Artificial Sequence
  Description of Artificial Sequence: Synthetic oligonucleotide
ugaccagaaagggugacag

SEQ ID NO: 1441953 - RNA, 19 nt, Artificial Sequence
  Description of Artificial Sequence: Synthetic oligonucleotide
gacgagacaggagauggcg

SEQ ID NO: 1441954 - RNA, 19 nt, Artificial Sequence
  Description of Artificial Sequence: Synthetic oligonucleotide
aaaguccgucacuaggcug

SEQ ID NO: 1441955 - RNA, 19 nt, Artificial Sequence
  Description of Artificial Sequence: Synthetic oligonucleotide
acggagagaaugcaagaag

SEQ ID NO: 1441956 - RNA, 19 nt, Artificial Sequence
  Description of Artificial Sequence: Synthetic oligonucleotide
ugacgagcaucccugggag

SEQ ID NO: 1441957 - RNA, 19 nt, Artificial Sequence
  Description of Artificial Sequence: Synthetic oligonucleotide
aagacaggcucgccggcac

SEQ ID NO: 1441958 - RNA, 19 nt, Artificial Sequence
  Description of Artificial Sequence: Synthetic oligonucleotide
cuugaguuucugcacgugc

SEQ ID NO: 1441959 - RNA, 19 nt, Artificial Sequence
  Description of Artificial Sequence: Synthetic oligonucleotide
uguaacagcuuuucacaga

SEQ ID NO: 1441960 - RNA, 19 nt, Artificial Sequence
  Description of Artificial Sequence: Synthetic oligonucleotide
uuuauuggaagagcagugu

SEQ ID NO: 1441961 - RNA, 19 nt, Artificial Sequence
  Description of Artificial Sequence: Synthetic oligonucleotide
acgagcaucccugggaggc

SEQ ID NO: 1441962 - RNA, 19 nt, Artificial Sequence
  Description of Artificial Sequence: Synthetic oligonucleotide
agcacaugcucguggaaag

SEQ ID NO: 1441963 - RNA, 19 nt, Artificial Sequence
  Description of Artificial Sequence: Synthetic oligonucleotide
cuguaacagcuuuucacag

SEQ ID NO: 1441964 - RNA, 19 nt, Artificial Sequence
  Description of Artificial Sequence: Synthetic oligonucleotide
ucaccgccgaggcagcucg

SEQ ID NO: 1441965 - RNA, 19 nt, Artificial Sequence
  Description of Artificial Sequence: Synthetic oligonucleotide
caugcugucgucgguaggg

SEQ ID NO: 1441966 - RNA, 19 nt, Artificial Sequence
  Description of Artificial Sequence: Synthetic oligonucleotide
uccgucacuaggcugcaca

SEQ ID NO: 1441967 - RNA, 19 nt, Artificial Sequence
  Description of Artificial Sequence: Synthetic oligonucleotide
gcgaagagggccuugacgc

SEQ ID NO: 1441968 - RNA, 19 nt, Artificial Sequence
  Description of Artificial Sequence: Synthetic oligonucleotide
cuugaccuugaguuucugc

SEQ ID NO: 1441969 - RNA, 19 nt, Artificial Sequence
  Description of Artificial Sequence: Synthetic oligonucleotide
acucucgagggucuucccg

SEQ ID NO: 1441970 - RNA, 19 nt, Artificial Sequence
  Description of Artificial Sequence: Synthetic oligonucleotide
ugcacgugcugcugcauag

SEQ ID NO: 1441971 - RNA, 19 nt, Artificial Sequence
  Description of Artificial Sequence: Synthetic oligonucleotide
gggaaaguccgucacuagg

SEQ ID NO: 1441972 - RNA, 19 nt, Artificial Sequence
  Description of Artificial Sequence: Synthetic oligonucleotide
cacgccuaaagacaggcuc

SEQ ID NO: 1441973 - RNA, 19 nt, Artificial Sequence
  Description of Artificial Sequence: Synthetic oligonucleotide
ucucgauccugcuggucgg

SEQ ID NO: 1441974 - RNA, 19 nt, Artificial Sequence
  Description of Artificial Sequence: Synthetic oligonucleotide
gugcaugcccgacagcugg

SEQ ID NO: 1441975 - RNA, 19 nt, Artificial Sequence
  Description of Artificial Sequence: Synthetic oligonucleotide
gagagaaugcaagaagcca

SEQ ID NO: 1441976 - RNA, 19 nt, Artificial Sequence
  Description of Artificial Sequence: Synthetic oligonucleotide
ugccgcauuguccauguuc

SEQ ID NO: 1441977 - RNA, 19 nt, Artificial Sequence
  Description of Artificial Sequence: Synthetic oligonucleotide
agccucuugcucucggacg

SEQ ID NO: 1441978 - RNA, 19 nt, Artificial Sequence
  Description of Artificial Sequence: Synthetic oligonucleotide
ugugccgaugagcugugcu

SEQ ID NO: 1441979 - RNA, 19 nt, Artificial Sequence
  Description of Artificial Sequence: Synthetic oligonucleotide
auucuggcugcaugugccg

SEQ ID NO: 1441980 - RNA, 19 nt, Artificial Sequence
  Description of Artificial Sequence: Synthetic oligonucleotide
uaaagacaggcucgccggc

SEQ ID NO: 1441981 - RNA, 19 nt, Artificial Sequence
  Description of Artificial Sequence: Synthetic oligonucleotide
ccuaaagacaggcucgccg

SEQ ID NO: 1441982 - RNA, 19 nt, Artificial Sequence
  Description of Artificial Sequence: Synthetic oligonucleotide
ucgggcauccgacgggccg

SEQ ID NO: 1441983 - RNA, 19 nt, Artificial Sequence
  Description of Artificial Sequence: Synthetic oligonucleotide
ggaccauccccauagagca

SEQ ID NO: 1441984 - RNA, 19 nt, Artificial Sequence
  Description of Artificial Sequence: Synthetic oligonucleotide
uguggucuguccucacaag

SEQ ID NO: 1441985 - RNA, 19 nt, Artificial Sequence
  Description of Artificial Sequence: Synthetic oligonucleotide
gucgcaggagucccggucg

SEQ ID NO: 1441986 - RNA, 19 nt, Artificial Sequence
  Description of Artificial Sequence: Synthetic oligonucleotide
cuugacgcguaccgugucg

SEQ ID NO: 1441987 - RNA, 19 nt, Artificial Sequence
  Description of Artificial Sequence: Synthetic oligonucleotide
acaugcucguggaaagggc

SEQ ID NO: 1441988 - RNA, 19 nt, Artificial Sequence
  Description of Artificial Sequence: Synthetic oligonucleotide
cacaugcucguggaaaggg

SEQ ID NO: 1441989 - RNA, 19 nt, Artificial Sequence
  Description of Artificial Sequence: Synthetic oligonucleotide
gcuggcagaaaucugccgc

SEQ ID NO: 1441990 - RNA, 19 nt, Artificial Sequence
  Description of Artificial Sequence: Synthetic oligonucleotide
aggccuggcaaucccuugg

SEQ ID NO: 1441991 - RNA, 19 nt, Artificial Sequence
  Description of Artificial Sequence: Synthetic oligonucleotide
ucgucgguagggcuggaga

SEQ ID NO: 1441992 - RNA, 19 nt, Artificial Sequence
  Description of Artificial Sequence: Synthetic oligonucleotide
gcagaaaucugccgcauug

SEQ ID NO: 1441993 - RNA, 19 nt, Artificial Sequence
  Description of Artificial Sequence: Synthetic oligonucleotide
cauucucgcacacccuggg

SEQ ID NO: 1441994 - RNA, 19 nt, Artificial Sequence
  Description of Artificial Sequence: Synthetic oligonucleotide
gucucaccgauccaugcug

SEQ ID NO: 1441995 - RNA, 19 nt, Artificial Sequence
  Description of Artificial Sequence: Synthetic oligonucleotide
caccuggucucaccgaucc

SEQ ID NO: 1441996 - RNA, 19 nt, Artificial Sequence
  Description of Artificial Sequence: Synthetic oligonucleotide
acggucaccgccgaggcag

SEQ ID NO: 1441997 - RNA, 19 nt, Artificial Sequence
  Description of Artificial Sequence: Synthetic oligonucleotide
ugcaagaagccaccugguc

SEQ ID NO: 1441998 - RNA, 19 nt, Artificial Sequence
  Description of Artificial Sequence: Synthetic oligonucleotide
auucucgcacacccugggg

SEQ ID NO: 1441999 - RNA, 19 nt, Artificial Sequence
  Description of Artificial Sequence: Synthetic oligonucleotide
uccaugcugucgucgguag

SEQ ID NO: 1442000 - RNA, 19 nt, Artificial Sequence
  Description of Artificial Sequence: Synthetic oligonucleotide
aucccuugggagaggacgc

SEQ ID NO: 1442001 - RNA, 19 nt, Artificial Sequence
  Description of Artificial Sequence: Synthetic oligonucleotide
ucugccgcauuguccaugu

SEQ ID NO: 1442002 - RNA, 19 nt, Artificial Sequence
  Description of Artificial Sequence: Synthetic oligonucleotide
ggaaaguccgucacuaggc

SEQ ID NO: 1442003 - RNA, 19 nt, Artificial Sequence
  Description of Artificial Sequence: Synthetic oligonucleotide
acgcguaccgugucgcagg

SEQ ID NO: 1442004 - RNA, 19 nt, Artificial Sequence
  Description of Artificial Sequence: Synthetic oligonucleotide
gucccggucgagcagucgg

SEQ ID NO: 1442005 - RNA, 19 nt, Artificial Sequence
  Description of Artificial Sequence: Synthetic oligonucleotide
acgccuaaagacaggcucg

SEQ ID NO: 1442006 - RNA, 19 nt, Artificial Sequence
  Description of Artificial Sequence: Synthetic oligonucleotide
uggucucaccgauccaugc

SEQ ID NO: 1442007 - RNA, 19 nt, Artificial Sequence
  Description of Artificial Sequence: Synthetic oligonucleotide
ucucgagggucuucccggg

SEQ ID NO: 1442008 - RNA, 19 nt, Artificial Sequence
  Description of Artificial Sequence: Synthetic oligonucleotide
acacccuggggaaaguccg

SEQ ID NO: 1442009 - RNA, 19 nt, Artificial Sequence
  Description of Artificial Sequence: Synthetic oligonucleotide
ucucaccgauccaugcugu

SEQ ID NO: 1442010 - RNA, 19 nt, Artificial Sequence
  Description of Artificial Sequence: Synthetic oligonucleotide
aaagacaggcucgccggca

SEQ ID NO: 1442011 - RNA, 19 nt, Artificial Sequence
  Description of Artificial Sequence: Synthetic oligonucleotide
cuggaccauccccauagag

SEQ ID NO: 1442012 - RNA, 19 nt, Artificial Sequence
  Description of Artificial Sequence: Synthetic oligonucleotide
cuggcaaucccuugggaga

SEQ ID NO: 1442013 - RNA, 19 nt, Artificial Sequence
  Description of Artificial Sequence: Synthetic oligonucleotide
acgacggucaccgccgagg

SEQ ID NO: 1442014 - RNA, 19 nt, Artificial Sequence
  Description of Artificial Sequence: Synthetic oligonucleotide
accgugucgcaggaguccc

SEQ ID NO: 1442015 - RNA, 19 nt, Artificial Sequence
  Description of Artificial Sequence: Synthetic oligonucleotide
cuaggcugcacagggcucc

SEQ ID NO: 1442016 - RNA, 19 nt, Artificial Sequence
  Description of Artificial Sequence: Synthetic oligonucleotide
uggucgguggccagcucag

SEQ ID NO: 1442017 - RNA, 19 nt, Artificial Sequence
  Description of Artificial Sequence: Synthetic oligonucleotide
gacgagcaucccugggagg

SEQ ID NO: 1442018 - RNA, 19 nt, Artificial Sequence
  Description of Artificial Sequence: Synthetic oligonucleotide
cgugcugcugcauagcccg

SEQ ID NO: 1442019 - RNA, 19 nt, Artificial Sequence
  Description of Artificial Sequence: Synthetic oligonucleotide
ucgcgcuggccccggaagg

SEQ ID NO: 1442020 - RNA, 19 nt, Artificial Sequence
  Description of Artificial Sequence: Synthetic oligonucleotide
uugacgcguaccgugucgc

SEQ ID NO: 1442021 - RNA, 19 nt, Artificial Sequence
  Description of Artificial Sequence: Synthetic oligonucleotide
acaaugugcugcaggaaga

SEQ ID NO: 1442022 - RNA, 19 nt, Artificial Sequence
  Description of Artificial Sequence: Synthetic oligonucleotide
uggggaaaguccgucacua

SEQ ID NO: 1442023 - RNA, 19 nt, Artificial Sequence
  Description of Artificial Sequence: Synthetic oligonucleotide
uuugugcuccggguggccc

SEQ ID NO: 1442024 - RNA, 19 nt, Artificial Sequence
  Description of Artificial Sequence: Synthetic oligonucleotide
ucucgcacacccuggggaa

SEQ ID NO: 1442025 - RNA, 19 nt, Artificial Sequence
  Description of Artificial Sequence: Synthetic oligonucleotide
ggucuguccucacaagggc

SEQ ID NO: 1442026 - RNA, 19 nt, Artificial Sequence
  Description of Artificial Sequence: Synthetic oligonucleotide
ucgagggucuucccggguc

SEQ ID NO: 1442027 - RNA, 19 nt, Artificial Sequence
  Description of Artificial Sequence: Synthetic oligonucleotide
gaagacgacgacggucacc

SEQ ID NO: 1442028 - RNA, 19 nt, Artificial Sequence
  Description of Artificial Sequence: Synthetic oligonucleotide
acgacgacggucaccgccg

SEQ ID NO: 1442029 - RNA, 19 nt, Artificial Sequence
  Description of Artificial Sequence: Synthetic oligonucleotide
acagcacccggagacagcu

SEQ ID NO: 1442030 - RNA, 19 nt, Artificial Sequence
  Description of Artificial Sequence: Synthetic oligonucleotide
uggaaagggcuguggucug

SEQ ID NO: 1442031 - RNA, 19 nt, Artificial Sequence
  Description of Artificial Sequence: Synthetic oligonucleotide
uaauagccaucugcagcag

SEQ ID NO: 1442032 - RNA, 19 nt, Artificial Sequence
  Description of Artificial Sequence: Synthetic oligonucleotide
ugggagcccgcgguaauag

SEQ ID NO: 1442033 - RNA, 19 nt, Artificial Sequence
  Description of Artificial Sequence: Synthetic oligonucleotide
gcauuguccauguucucac

SEQ ID NO: 1442034 - RNA, 19 nt, Artificial Sequence
  Description of Artificial Sequence: Synthetic oligonucleotide
gggacaaugugcugcagga

SEQ ID NO: 1442035 - RNA, 19 nt, Artificial Sequence
  Description of Artificial Sequence: Synthetic oligonucleotide
acgugcugcugcauagccc

SEQ ID NO: 1442036 - RNA, 19 nt, Artificial Sequence
  Description of Artificial Sequence: Synthetic oligonucleotide
gaaaguccgucacuaggcu

SEQ ID NO: 1442037 - RNA, 19 nt, Artificial Sequence
  Description of Artificial Sequence: Synthetic oligonucleotide
caaaggguuccuuugugcu

SEQ ID NO: 1442038 - RNA, 19 nt, Artificial Sequence
  Description of Artificial Sequence: Synthetic oligonucleotide
acgccugggaaggagggag

SEQ ID NO: 1442039 - RNA, 19 nt, Artificial Sequence
  Description of Artificial Sequence: Synthetic oligonucleotide
cccacggagagaaugcaag

SEQ ID NO: 1442040 - RNA, 19 nt, Artificial Sequence
  Description of Artificial Sequence: Synthetic oligonucleotide
ucuagcgccccuucucgau

SEQ ID NO: 1442041 - RNA, 19 nt, Artificial Sequence
  Description of Artificial Sequence: Synthetic oligonucleotide
uccgacgggccgacucucg

SEQ ID NO: 1442042 - RNA, 19 nt, Artificial Sequence
  Description of Artificial Sequence: Synthetic oligonucleotide
gccuuugucggccauggac

SEQ ID NO: 1442043 - RNA, 19 nt, Artificial Sequence
  Description of Artificial Sequence: Synthetic oligonucleotide
gacgcguaccgugucgcag

SEQ ID NO: 1442044 - RNA, 19 nt, Artificial Sequence
  Description of Artificial Sequence: Synthetic oligonucleotide
cuccggguggcccaccagc

SEQ ID NO: 1442045 - RNA, 19 nt, Artificial Sequence
  Description of Artificial Sequence: Synthetic oligonucleotide
augcugucgucgguagggc

SEQ ID NO: 1442046 - RNA, 19 nt, Artificial Sequence
  Description of Artificial Sequence: Synthetic oligonucleotide
gcucuagcgccccuucucg

SEQ ID NO: 1442047 - RNA, 19 nt, Artificial Sequence
  Description of Artificial Sequence: Synthetic oligonucleotide
cagguaccggcccaccagc

SEQ ID NO: 1442048 - RNA, 19 nt, Artificial Sequence
  Description of Artificial Sequence: Synthetic oligonucleotide
agaaugcaagaagccaccu

SEQ ID NO: 1442049 - RNA, 19 nt, Artificial Sequence
  Description of Artificial Sequence: Synthetic oligonucleotide
aaugccgacuugaccuuga

SEQ ID NO: 1442050 - RNA, 19 nt, Artificial Sequence
  Description of Artificial Sequence: Synthetic oligonucleotide
cugacgagcaucccuggga

SEQ ID NO: 1442051 - RNA, 19 nt, Artificial Sequence
  Description of Artificial Sequence: Synthetic oligonucleotide
uugucggccauggaccuuc

SEQ ID NO: 1442052 - RNA, 19 nt, Artificial Sequence
  Description of Artificial Sequence: Synthetic oligonucleotide
ucccacggagagaaugcaa

SEQ ID NO: 1442053 - RNA, 19 nt, Artificial Sequence
  Description of Artificial Sequence: Synthetic oligonucleotide
aggagauggcgaagagggc

SEQ ID NO: 1442054 - RNA, 19 nt, Artificial Sequence
  Description of Artificial Sequence: Synthetic oligonucleotide
auccaaagggccagcaccu

SEQ ID NO: 1442055 - RNA, 19 nt, Artificial Sequence
  Description of Artificial Sequence: Synthetic oligonucleotide
cucucggacgagacaggag

SEQ ID NO: 1442056 - RNA, 19 nt, Artificial Sequence
  Description of Artificial Sequence: Synthetic oligonucleotide
gguucccacggagagaaug

SEQ ID NO: 1442057 - RNA, 19 nt, Artificial Sequence
  Description of Artificial Sequence: Synthetic oligonucleotide
agcccgcaugagcacagag

SEQ ID NO: 1442058 - RNA, 19 nt, Artificial Sequence
  Description of Artificial Sequence: Synthetic oligonucleotide
aaggccgccgacauggcuu

SEQ ID NO: 1442059 - RNA, 19 nt, Artificial Sequence
  Description of Artificial Sequence: Synthetic oligonucleotide
ugcaugcccgacagcuggc

SEQ ID NO: 1442060 - RNA, 19 nt, Artificial Sequence
  Description of Artificial Sequence: Synthetic oligonucleotide
cauccccauagagcaaagg

SEQ ID NO: 1442061 - RNA, 19 nt, Artificial Sequence
  Description of Artificial Sequence: Synthetic oligonucleotide
ucggacgagacaggagaug

SEQ ID NO: 1442062 - RNA, 19 nt, Artificial Sequence
  Description of Artificial Sequence: Synthetic oligonucleotide
cuggcagaaaucugccgca

SEQ ID NO: 1442063 - RNA, 19 nt, Artificial Sequence
  Description of Artificial Sequence: Synthetic oligonucleotide
augcccgacagcuggcaga

SEQ ID NO: 1442064 - RNA, 19 nt, Artificial Sequence
  Description of Artificial Sequence: Synthetic oligonucleotide
aggccgccgacauggcuuc

SEQ ID NO: 1442065 - RNA, 19 nt, Artificial Sequence
  Description of Artificial Sequence: Synthetic oligonucleotide
cagcucgggcauccgacgg

SEQ ID NO: 1442066 - RNA, 19 nt, Artificial Sequence
  Description of Artificial Sequence: Synthetic oligonucleotide
aggagucccggucgagcag

SEQ ID NO: 1442067 - RNA, 19 nt, Artificial Sequence
  Description of Artificial Sequence: Synthetic oligonucleotide
gaacugcagcagcccagcc

SEQ ID NO: 1442068 - RNA, 19 nt, Artificial Sequence
  Description of Artificial Sequence: Synthetic oligonucleotide
gaaugccgacuugaccuug

SEQ ID NO: 1442069 - RNA, 19 nt, Artificial Sequence
  Description of Artificial Sequence: Synthetic oligonucleotide
ucuggcugcaugugccgau

SEQ ID NO: 1442070 - RNA, 19 nt, Artificial Sequence
  Description of Artificial Sequence: Synthetic oligonucleotide
ugcugucgucgguagggcu

SEQ ID NO: 1442071 - RNA, 19 nt, Artificial Sequence
  Description of Artificial Sequence: Synthetic oligonucleotide
gccgacuugaccuugaguu

SEQ ID NO: 1442072 - RNA, 19 nt, Artificial Sequence
  Description of Artificial Sequence: Synthetic oligonucleotide
cugucgucgguagggcugg

SEQ ID NO: 1442073 - RNA, 19 nt, Artificial Sequence
  Description of Artificial Sequence: Synthetic oligonucleotide
cagcuucgccagcagcugg

SEQ ID NO: 1442074 - RNA, 19 nt, Artificial Sequence
  Description of Artificial Sequence: Synthetic oligonucleotide
acuaggcugcacagggcuc

SEQ ID NO: 1442075 - RNA, 19 nt, Artificial Sequence
  Description of Artificial Sequence: Synthetic oligonucleotide
gacucucgagggucuuccc

SEQ ID NO: 1442076 - RNA, 19 nt, Artificial Sequence
  Description of Artificial Sequence: Synthetic oligonucleotide
uggcugcaugugccgauga

SEQ ID NO: 1442077 - RNA, 19 nt, Artificial Sequence
  Description of Artificial Sequence: Synthetic oligonucleotide
ggagcccgcgguaauagcc

SEQ ID NO: 1442078 - RNA, 19 nt, Artificial Sequence
  Description of Artificial Sequence: Synthetic oligonucleotide
auagcccgcaugagcacag

SEQ ID NO: 1442079 - RNA, 19 nt, Artificial Sequence
  Description of Artificial Sequence: Synthetic oligonucleotide
augccgacuugaccuugag

SEQ ID NO: 1442080 - RNA, 19 nt, Artificial Sequence
  Description of Artificial Sequence: Synthetic oligonucleotide
cugcccagagaugggcugg

SEQ ID NO: 1442081 - RNA, 19 nt, Artificial Sequence
  Description of Artificial Sequence: Synthetic oligonucleotide
ucccggucgagcagucgga

SEQ ID NO: 1442082 - RNA, 19 nt, Artificial Sequence
  Description of Artificial Sequence: Synthetic oligonucleotide
caugcccgacagcuggcag

SEQ ID NO: 1442083 - RNA, 19 nt, Artificial Sequence
  Description of Artificial Sequence: Synthetic oligonucleotide
agaagccaccuggucucac

SEQ ID NO: 1442084 - RNA, 19 nt, Artificial Sequence
  Description of Artificial Sequence: Synthetic oligonucleotide
aaucugccgcauuguccau

SEQ ID NO: 1442085 - RNA, 19 nt, Artificial Sequence
  Description of Artificial Sequence: Synthetic oligonucleotide
uucuggcugcaugugccga

SEQ ID NO: 1442086 - RNA, 19 nt, Artificial Sequence
  Description of Artificial Sequence: Synthetic oligonucleotide
gaaagggcuguggucuguc

SEQ ID NO: 1442087 - RNA, 19 nt, Artificial Sequence
  Description of Artificial Sequence: Synthetic oligonucleotide
agagggccuugacgcguac

SEQ ID NO: 1442088 - RNA, 19 nt, Artificial Sequence
  Description of Artificial Sequence: Synthetic oligonucleotide
caugugccgaugagcugug

SEQ ID NO: 1442089 - RNA, 19 nt, Artificial Sequence
  Description of Artificial Sequence: Synthetic oligonucleotide
cuguggucuguccucacaa

SEQ ID NO: 1442090 - RNA, 19 nt, Artificial Sequence
  Description of Artificial Sequence: Synthetic oligonucleotide
caugcucguggaaagggcu

SEQ ID NO: 1442091 - RNA, 19 nt, Artificial Sequence
  Description of Artificial Sequence: Synthetic oligonucleotide
aagaagccaccuggucuca

SEQ ID NO: 1442092 - RNA, 19 nt, Artificial Sequence
  Description of Artificial Sequence: Synthetic oligonucleotide
uccugcagccacuggcguc

SEQ ID NO: 1442093 - RNA, 19 nt, Artificial Sequence
  Description of Artificial Sequence: Synthetic oligonucleotide
uccuccugguacuccucgu

SEQ ID NO: 1442094 - RNA, 19 nt, Artificial Sequence
  Description of Artificial Sequence: Synthetic oligonucleotide
cuggucgguggccagcuca

SEQ ID NO: 1442095 - RNA, 19 nt, Artificial Sequence
  Description of Artificial Sequence: Synthetic oligonucleotide
cuagcgccccuucucgauc

SEQ ID NO: 1442096 - RNA, 19 nt, Artificial Sequence
  Description of Artificial Sequence: Synthetic oligonucleotide
ugacgcguaccgugucgca

SEQ ID NO: 1442097 - RNA, 19 nt, Artificial Sequence
  Description of Artificial Sequence: Synthetic oligonucleotide
uucccgggucuggagcccg

SEQ ID NO: 1442098 - RNA, 19 nt, Artificial Sequence
  Description of Artificial Sequence: Synthetic oligonucleotide
ugcccgacagcuggcagaa

SEQ ID NO: 1442099 - RNA, 19 nt, Artificial Sequence
  Description of Artificial Sequence: Synthetic oligonucleotide
ucgcaggagucccggucga

SEQ ID NO: 1442100 - RNA, 19 nt, Artificial Sequence
  Description of Artificial Sequence: Synthetic oligonucleotide
gauggcgaagagggccuug

SEQ ID NO: 1442101 - RNA, 19 nt, Artificial Sequence
  Description of Artificial Sequence: Synthetic oligonucleotide
cggaaggccgccgacaugg

SEQ ID NO: 1442102 - RNA, 19 nt, Artificial Sequence
  Description of Artificial Sequence: Synthetic oligonucleotide
uggcgaagagggccuugac

SEQ ID NO: 1442103 - RNA, 19 nt, Artificial Sequence
  Description of Artificial Sequence: Synthetic oligonucleotide
ggggaaaguccgucacuag

SEQ ID NO: 1442104 - RNA, 19 nt, Artificial Sequence
  Description of Artificial Sequence: Synthetic oligonucleotide
ccauggaccuucugcuggg

SEQ ID NO: 1442105 - RNA, 19 nt, Artificial Sequence
  Description of Artificial Sequence: Synthetic oligonucleotide
augcucguggaaagggcug

SEQ ID NO: 1442106 - RNA, 19 nt, Artificial Sequence
  Description of Artificial Sequence: Synthetic oligonucleotide
cacggagagaaugcaagaa

SEQ ID NO: 1442107 - RNA, 19 nt, Artificial Sequence
  Description of Artificial Sequence: Synthetic oligonucleotide
aucugccgcauuguccaug

SEQ ID NO: 1442108 - RNA, 19 nt, Artificial Sequence
  Description of Artificial Sequence: Synthetic oligonucleotide
gacagcacccggagacagc

SEQ ID NO: 1442109 - RNA, 19 nt, Artificial Sequence
  Description of Artificial Sequence: Synthetic oligonucleotide
gccacgccuaaagacaggc

SEQ ID NO: 1442110 - RNA, 19 nt, Artificial Sequence
  Description of Artificial Sequence: Synthetic oligonucleotide
cucaccgauccaugcuguc

SEQ ID NO: 1442111 - RNA, 19 nt, Artificial Sequence
  Description of Artificial Sequence: Synthetic oligonucleotide
cuuugugcuccggguggcc

SEQ ID NO: 1442112 - RNA, 19 nt, Artificial Sequence
  Description of Artificial Sequence: Synthetic oligonucleotide
agacagcucuucaucugcu

SEQ ID NO: 1442113 - RNA, 19 nt, Artificial Sequence
  Description of Artificial Sequence: Synthetic oligonucleotide
ucccuugggagaggacgcc

SEQ ID NO: 1442114 - RNA, 19 nt, Artificial Sequence
  Description of Artificial Sequence: Synthetic oligonucleotide
gacgacggucaccgccgag

SEQ ID NO: 1442115 - RNA, 19 nt, Artificial Sequence
  Description of Artificial Sequence: Synthetic oligonucleotide
ucgauccugcuggucggug

SEQ ID NO: 1442116 - RNA, 19 nt, Artificial Sequence
  Description of Artificial Sequence: Synthetic oligonucleotide
gcucccggcauucucgcac

SEQ ID NO: 1442117 - RNA, 19 nt, Artificial Sequence
  Description of Artificial Sequence: Synthetic oligonucleotide
augcaagaagccaccuggu

SEQ ID NO: 1442118 - RNA, 19 nt, Artificial Sequence
  Description of Artificial Sequence: Synthetic oligonucleotide
gcauucucgcacacccugg

SEQ ID NO: 1442119 - RNA, 19 nt, Artificial Sequence
  Description of Artificial Sequence: Synthetic oligonucleotide
cccgcaugagcacagagaa

SEQ ID NO: 1442120 - RNA, 19 nt, Artificial Sequence
  Description of Artificial Sequence: Synthetic oligonucleotide
gaagagggccuugacgcgu

SEQ ID NO: 1442121 - RNA, 19 nt, Artificial Sequence
  Description of Artificial Sequence: Synthetic oligonucleotide
gguaugggcugggacagca

SEQ ID NO: 1442122 - RNA, 19 nt, Artificial Sequence
  Description of Artificial Sequence: Synthetic oligonucleotide
gcugucgucgguagggcug

SEQ ID NO: 1442123 - RNA, 19 nt, Artificial Sequence
  Description of Artificial Sequence: Synthetic oligonucleotide
augugccgaugagcugugc

SEQ ID NO: 1442124 - RNA, 19 nt, Artificial Sequence
  Description of Artificial Sequence: Synthetic oligonucleotide
cuuugucggccauggaccu

SEQ ID NO: 1442125 - RNA, 19 nt, Artificial Sequence
  Description of Artificial Sequence: Synthetic oligonucleotide
auagagcaaaggguuccuu

SEQ ID NO: 1442126 - RNA, 19 nt, Artificial Sequence
  Description of Artificial Sequence: Synthetic oligonucleotide
cccauagagcaaaggguuc

SEQ ID NO: 1442127 - RNA, 19 nt, Artificial Sequence
  Description of Artificial Sequence: Synthetic oligonucleotide
auccgacgggccgacucuc

SEQ ID NO: 1442128 - RNA, 19 nt, Artificial Sequence
  Description of Artificial Sequence: Synthetic oligonucleotide
gggugacagaaagcaaggc

SEQ ID NO: 1442129 - RNA, 19 nt, Artificial Sequence
  Description of Artificial Sequence: Synthetic oligonucleotide
gucgagcagucggagcagc

SEQ ID NO: 1442130 - RNA, 19 nt, Artificial Sequence
  Description of Artificial Sequence: Synthetic oligonucleotide
uggcagaaaucugccgcau

SEQ ID NO: 1442131 - RNA, 19 nt, Artificial Sequence
  Description of Artificial Sequence: Synthetic oligonucleotide
ccggagacagcucuucauc

SEQ ID NO: 1442132 - RNA, 19 nt, Artificial Sequence
  Description of Artificial Sequence: Synthetic oligonucleotide
agccaccuggucucaccga

SEQ ID NO: 1442133 - RNA, 19 nt, Artificial Sequence
  Description of Artificial Sequence: Synthetic oligonucleotide
gggguucccacggagagaa

SEQ ID NO: 1442134 - RNA, 19 nt, Artificial Sequence
  Description of Artificial Sequence: Synthetic oligonucleotide
agucccggucgagcagucg

SEQ ID NO: 1442135 - RNA, 19 nt, Artificial Sequence
  Description of Artificial Sequence: Synthetic oligonucleotide
agcccaacaccugcuccug

SEQ ID NO: 1442136 - RNA, 19 nt, Artificial Sequence
  Description of Artificial Sequence: Synthetic oligonucleotide
ccccugacgagcaucccug

SEQ ID NO: 1442137 - RNA, 19 nt, Artificial Sequence
  Description of Artificial Sequence: Synthetic oligonucleotide
ccgccacgccuaaagacag

SEQ ID NO: 1442138 - RNA, 19 nt, Artificial Sequence
  Description of Artificial Sequence: Synthetic oligonucleotide
guaccgugucgcaggaguc

SEQ ID NO: 1442139 - RNA, 19 nt, Artificial Sequence
  Description of Artificial Sequence: Synthetic oligonucleotide
gauccaugcugucgucggu

SEQ ID NO: 1442140 - RNA, 19 nt, Artificial Sequence
  Description of Artificial Sequence: Synthetic oligonucleotide
ccaagcacaugcucgugga

SEQ ID NO: 1442141 - RNA, 19 nt, Artificial Sequence
  Description of Artificial Sequence: Synthetic oligonucleotide
aagagggccuugacgcgua

SEQ ID NO: 1442142 - RNA, 19 nt, Artificial Sequence
  Description of Artificial Sequence: Synthetic oligonucleotide
gcauccgacgggccgacuc

SEQ ID NO: 1442143 - RNA, 19 nt, Artificial Sequence
  Description of Artificial Sequence: Synthetic oligonucleotide
ccuugggagaggacgccug

SEQ ID NO: 1442144 - RNA, 19 nt, Artificial Sequence
  Description of Artificial Sequence: Synthetic oligonucleotide
ugucggccauggaccuucu

SEQ ID NO: 1442145 - RNA, 19 nt, Artificial Sequence
  Description of Artificial Sequence: Synthetic oligonucleotide
agcccgcgguaauagccau

SEQ ID NO: 1442146 - RNA, 19 nt, Artificial Sequence
  Description of Artificial Sequence: Synthetic oligonucleotide
cgaagagggccuugacgcg

SEQ ID NO: 1442147 - RNA, 19 nt, Artificial Sequence
  Description of Artificial Sequence: Synthetic oligonucleotide
cuucccgggucuggagccc

SEQ ID NO: 1442148 - RNA, 19 nt, Artificial Sequence
  Description of Artificial Sequence: Synthetic oligonucleotide
aggcucgccggcaccugac

SEQ ID NO: 1442149 - RNA, 19 nt, Artificial Sequence
  Description of Artificial Sequence: Synthetic oligonucleotide
gaaggccgccgacauggcu

SEQ ID NO: 1442150 - RNA, 19 nt, Artificial Sequence
  Description of Artificial Sequence: Synthetic oligonucleotide
caguguggacaugaccaga

SEQ ID NO: 1442151 - RNA, 19 nt, Artificial Sequence
  Description of Artificial Sequence: Synthetic oligonucleotide
cucuagcgccccuucucga

SEQ ID NO: 1442152 - RNA, 19 nt, Artificial Sequence
  Description of Artificial Sequence: Synthetic oligonucleotide
gacggucaccgccgaggca

SEQ ID NO: 1442153 - RNA, 19 nt, Artificial Sequence
  Description of Artificial Sequence: Synthetic oligonucleotide
gucgucgguagggcuggag

SEQ ID NO: 1442154 - RNA, 19 nt, Artificial Sequence
  Description of Artificial Sequence: Synthetic oligonucleotide
gcaggagucccggucgagc

SEQ ID NO: 1442155 - RNA, 19 nt, Artificial Sequence
  Description of Artificial Sequence: Synthetic oligonucleotide
gccgccacgccuaaagaca

SEQ ID NO: 1442156 - RNA, 19 nt, Artificial Sequence
  Description of Artificial Sequence: Synthetic oligonucleotide
ggcagcucgggcauccgac

SEQ ID NO: 1442157 - RNA, 19 nt, Artificial Sequence
  Description of Artificial Sequence: Synthetic oligonucleotide
ggguccggcuccugggagc

SEQ ID NO: 1442158 - RNA, 19 nt, Artificial Sequence
  Description of Artificial Sequence: Synthetic oligonucleotide
guaugggcugggacagcac

SEQ ID NO: 1442159 - RNA, 19 nt, Artificial Sequence
  Description of Artificial Sequence: Synthetic oligonucleotide
ggacgagacaggagauggc

SEQ ID NO: 1442160 - RNA, 19 nt, Artificial Sequence
  Description of Artificial Sequence: Synthetic oligonucleotide
ucccgggucuggagcccgc

SEQ ID NO: 1442161 - RNA, 19 nt, Artificial Sequence
  Description of Artificial Sequence: Synthetic oligonucleotide
uuugucggccauggaccuu

SEQ ID NO: 1442162 - RNA, 19 nt, Artificial Sequence
  Description of Artificial Sequence: Synthetic oligonucleotide
ggugcaugcccgacagcug

SEQ ID NO: 1442163 - RNA, 19 nt, Artificial Sequence
  Description of Artificial Sequence: Synthetic oligonucleotide
cugcuggucgguggccagc

SEQ ID NO: 1442164 - RNA, 19 nt, Artificial Sequence
  Description of Artificial Sequence: Synthetic oligonucleotide
ccgacauggcuuccugcag

SEQ ID NO: 1442165 - RNA, 19 nt, Artificial Sequence
  Description of Artificial Sequence: Synthetic oligonucleotide
gacgccugggaaggaggga

SEQ ID NO: 1442166 - RNA, 19 nt, Artificial Sequence
  Description of Artificial Sequence: Synthetic oligonucleotide
cacccggagacagcucuuc

SEQ ID NO: 1442167 - RNA, 19 nt, Artificial Sequence
  Description of Artificial Sequence: Synthetic oligonucleotide
uccaaagggccagcaccuu

SEQ ID NO: 1442168 - RNA, 19 nt, Artificial Sequence
  Description of Artificial Sequence: Synthetic oligonucleotide
gccgaugagcugugcugcc

SEQ ID NO: 1442169 - RNA, 19 nt, Artificial Sequence
  Description of Artificial Sequence: Synthetic oligonucleotide
aguccgucacuaggcugca

SEQ ID NO: 1442170 - RNA, 19 nt, Artificial Sequence
  Description of Artificial Sequence: Synthetic oligonucleotide
ggucucaccgauccaugcu

SEQ ID NO: 1442171 - RNA, 19 nt, Artificial Sequence
  Description of Artificial Sequence: Synthetic oligonucleotide
ccuuggagguugcggggag

SEQ ID NO: 1442172 - RNA, 19 nt, Artificial Sequence
  Description of Artificial Sequence: Synthetic oligonucleotide
gcaaucccuugggagagga

SEQ ID NO: 1442173 - RNA, 19 nt, Artificial Sequence
  Description of Artificial Sequence: Synthetic oligonucleotide
ccacggagagaaugcaaga

SEQ ID NO: 1442174 - RNA, 19 nt, Artificial Sequence
  Description of Artificial Sequence: Synthetic oligonucleotide
ggccugaacaaggccuggc

SEQ ID NO: 1442175 - RNA, 19 nt, Artificial Sequence
  Description of Artificial Sequence: Synthetic oligonucleotide
caggcccaggccugaacaa

SEQ ID NO: 1442176 - RNA, 19 nt, Artificial Sequence
  Description of Artificial Sequence: Synthetic oligonucleotide
cucuugcucucggacgaga

SEQ ID NO: 1442177 - RNA, 19 nt, Artificial Sequence
  Description of Artificial Sequence: Synthetic oligonucleotide
ccauccccauagagcaaag

SEQ ID NO: 1442178 - RNA, 19 nt, Artificial Sequence
  Description of Artificial Sequence: Synthetic oligonucleotide
ggacaugaccagaaagggu

SEQ ID NO: 1442179 - RNA, 19 nt, Artificial Sequence
  Description of Artificial Sequence: Synthetic oligonucleotide
ccgcaugagcacagagaag

SEQ ID NO: 1442180 - RNA, 19 nt, Artificial Sequence
  Description of Artificial Sequence: Synthetic oligonucleotide
cccugacgagcaucccugg

SEQ ID NO: 1442181 - RNA, 19 nt, Artificial Sequence
  Description of Artificial Sequence: Synthetic oligonucleotide
cacuggcgucucuccucgc

SEQ ID NO: 1442182 - RNA, 19 nt, Artificial Sequence
  Description of Artificial Sequence: Synthetic oligonucleotide
gucggccauggaccuucug

SEQ ID NO: 1442183 - RNA, 19 nt, Artificial Sequence
  Description of Artificial Sequence: Synthetic oligonucleotide
gcucgggcauccgacgggc

SEQ ID NO: 1442184 - RNA, 19 nt, Artificial Sequence
  Description of Artificial Sequence: Synthetic oligonucleotide
cugcacgugcugcugcaua

SEQ ID NO: 1442185 - RNA, 19 nt, Artificial Sequence
  Description of Artificial Sequence: Synthetic oligonucleotide
gguugcggggaggccgggg

SEQ ID NO: 1442186 - RNA, 19 nt, Artificial Sequence
  Description of Artificial Sequence: Synthetic oligonucleotide
cucggacgagacaggagau

SEQ ID NO: 1442187 - RNA, 19 nt, Artificial Sequence
  Description of Artificial Sequence: Synthetic oligonucleotide
cggucgagcagucggagca

SEQ ID NO: 1442188 - RNA, 19 nt, Artificial Sequence
  Description of Artificial Sequence: Synthetic oligonucleotide
cauccgacgggccgacucu

SEQ ID NO: 1442189 - RNA, 19 nt, Artificial Sequence
  Description of Artificial Sequence: Synthetic oligonucleotide
agcgccccuucucgauccu

SEQ ID NO: 1442190 - RNA, 19 nt, Artificial Sequence
  Description of Artificial Sequence: Synthetic oligonucleotide
cgacucucgagggucuucc

SEQ ID NO: 1442191 - RNA, 19 nt, Artificial Sequence
  Description of Artificial Sequence: Synthetic oligonucleotide
ccggucgagcagucggagc

SEQ ID NO: 1442192 - RNA, 19 nt, Artificial Sequence
  Description of Artificial Sequence: Synthetic oligonucleotide
cccggagccuuugucggcc

SEQ ID NO: 1442193 - RNA, 19 nt, Artificial Sequence
  Description of Artificial Sequence: Synthetic oligonucleotide
gucaccgccgaggcagcuc

SEQ ID NO: 1442194 - RNA, 19 nt, Artificial Sequence
  Description of Artificial Sequence: Synthetic oligonucleotide
cgccgccacgccuaaagac

SEQ ID NO: 1442195 - RNA, 19 nt, Artificial Sequence
  Description of Artificial Sequence: Synthetic oligonucleotide
caccgccgaggcagcucgg

SEQ ID NO: 1442196 - RNA, 19 nt, Artificial Sequence
  Description of Artificial Sequence: Synthetic oligonucleotide
cgucacuaggcugcacagg

SEQ ID NO: 1442197 - RNA, 19 nt, Artificial Sequence
  Description of Artificial Sequence: Synthetic oligonucleotide
cgugucgcaggagucccgg

SEQ ID NO: 1442198 - RNA, 19 nt, Artificial Sequence
  Description of Artificial Sequence: Synthetic oligonucleotide
ccgaugagcugugcugccc

SEQ ID NO: 1442199 - RNA, 19 nt, Artificial Sequence
  Description of Artificial Sequence: Synthetic oligonucleotide
gcccgcaugagcacagaga

SEQ ID NO: 1442200 - RNA, 19 nt, Artificial Sequence
  Description of Artificial Sequence: Synthetic oligonucleotide
gggccgacucucgaggguc

SEQ ID NO: 1442201 - RNA, 19 nt, Artificial Sequence
  Description of Artificial Sequence: Synthetic oligonucleotide
ccucgcucauggguucugg

SEQ ID NO: 1442202 - RNA, 19 nt, Artificial Sequence
  Description of Artificial Sequence: Synthetic oligonucleotide
cagcacccggagacagcuc

SEQ ID NO: 1442203 - RNA, 19 nt, Artificial Sequence
  Description of Artificial Sequence: Synthetic oligonucleotide
gagucccggucgagcaguc

SEQ ID NO: 1442204 - RNA, 19 nt, Artificial Sequence
  Description of Artificial Sequence: Synthetic oligonucleotide
ccuugacgcguaccguguc

SEQ ID NO: 1442205 - RNA, 19 nt, Artificial Sequence
  Description of Artificial Sequence: Synthetic oligonucleotide
agguugcggggaggccggg

SEQ ID NO: 1442206 - RNA, 19 nt, Artificial Sequence
  Description of Artificial Sequence: Synthetic oligonucleotide
cgccuaaagacaggcucgc

SEQ ID NO: 1442207 - RNA, 19 nt, Artificial Sequence
  Description of Artificial Sequence: Synthetic oligonucleotide
ccgugucgcaggagucccg

SEQ ID NO: 1442208 - RNA, 19 nt, Artificial Sequence
  Description of Artificial Sequence: Synthetic oligonucleotide
ggaaugccgacuugaccuu

SEQ ID NO: 1442209 - RNA, 19 nt, Artificial Sequence
  Description of Artificial Sequence: Synthetic oligonucleotide
ugucgucgguagggcugga

SEQ ID NO: 1442210 - RNA, 19 nt, Artificial Sequence
  Description of Artificial Sequence: Synthetic oligonucleotide
cgggucuggagcccgccgc

SEQ ID NO: 1442211 - RNA, 19 nt, Artificial Sequence
  Description of Artificial Sequence: Synthetic oligonucleotide
ggcuguggucuguccucac

SEQ ID NO: 1442212 - RNA, 19 nt, Artificial Sequence
  Description of Artificial Sequence: Synthetic oligonucleotide
cguaccgugucgcaggagu

SEQ ID NO: 1442213 - RNA, 19 nt, Artificial Sequence
  Description of Artificial Sequence: Synthetic oligonucleotide
cgucgguagggcuggagaa

SEQ ID NO: 1442214 - RNA, 19 nt, Artificial Sequence
  Description of Artificial Sequence: Synthetic oligonucleotide
cgacgggccgacucucgag

SEQ ID NO: 1442215 - RNA, 19 nt, Artificial Sequence
  Description of Artificial Sequence: Synthetic oligonucleotide
gccaccuggucucaccgau

SEQ ID NO: 1442216 - RNA, 19 nt, Artificial Sequence
  Description of Artificial Sequence: Synthetic oligonucleotide
gggcuguggucuguccuca

SEQ ID NO: 1442217 - RNA, 19 nt, Artificial Sequence
  Description of Artificial Sequence: Synthetic oligonucleotide
cccgacagcuggcagaaau

SEQ ID NO: 1442218 - RNA, 19 nt, Artificial Sequence
  Description of Artificial Sequence: Synthetic oligonucleotide
cccggucgagcagucggag

SEQ ID NO: 1442219 - RNA, 19 nt, Artificial Sequence
  Description of Artificial Sequence: Synthetic oligonucleotide
ccagccucuugcucucgga

SEQ ID NO: 1442220 - RNA, 19 nt, Artificial Sequence
  Description of Artificial Sequence: Synthetic oligonucleotide
ggucgguggccagcucagc

SEQ ID NO: 1442221 - RNA, 19 nt, Artificial Sequence
  Description of Artificial Sequence: Synthetic oligonucleotide
ccgcauuguccauguucuc

SEQ ID NO: 1442222 - RNA, 19 nt, Artificial Sequence
  Description of Artificial Sequence: Synthetic oligonucleotide
cacccuggggaaaguccgu

SEQ ID NO: 1442223 - RNA, 19 nt, Artificial Sequence
  Description of Artificial Sequence: Synthetic oligonucleotide
cgccacgccuaaagacagg

SEQ ID NO: 1442224 - RNA, 19 nt, Artificial Sequence
  Description of Artificial Sequence: Synthetic oligonucleotide
ccgccgacauggcuuccug

SEQ ID NO: 1442225 - RNA, 19 nt, Artificial Sequence
  Description of Artificial Sequence: Synthetic oligonucleotide
guccgucacuaggcugcac

SEQ ID NO: 1442226 - RNA, 19 nt, Artificial Sequence
  Description of Artificial Sequence: Synthetic oligonucleotide
cggagacagcucuucaucu

SEQ ID NO: 1442227 - RNA, 19 nt, Artificial Sequence
  Description of Artificial Sequence: Synthetic oligonucleotide
cucgagggucuucccgggu

SEQ ID NO: 1442228 - RNA, 19 nt, Artificial Sequence
  Description of Artificial Sequence: Synthetic oligonucleotide
cccgcgguaauagccaucu

SEQ ID NO: 1442229 - RNA, 19 nt, Artificial Sequence
  Description of Artificial Sequence: Synthetic oligonucleotide
cugcaacauucuggcugca

SEQ ID NO: 1442230 - RNA, 19 nt, Artificial Sequence
  Description of Artificial Sequence: Synthetic oligonucleotide
gugucgcaggagucccggu

SEQ ID NO: 1442231 - RNA, 19 nt, Artificial Sequence
  Description of Artificial Sequence: Synthetic oligonucleotide
agcccgccgccacgccuaa

SEQ ID NO: 1442232 - RNA, 19 nt, Artificial Sequence
  Description of Artificial Sequence: Synthetic oligonucleotide
ccggaaggccgccgacaug

SEQ ID NO: 1442233 - RNA, 19 nt, Artificial Sequence
  Description of Artificial Sequence: Synthetic oligonucleotide
gccuugacgcguaccgugu

SEQ ID NO: 1442234 - RNA, 19 nt, Artificial Sequence
  Description of Artificial Sequence: Synthetic oligonucleotide
gcguaccgugucgcaggag

SEQ ID NO: 1442235 - RNA, 19 nt, Artificial Sequence
  Description of Artificial Sequence: Synthetic oligonucleotide
gccgaggcagcucgggcau

SEQ ID NO: 1442236 - RNA, 19 nt, Artificial Sequence
  Description of Artificial Sequence: Synthetic oligonucleotide
cagcggugacggagcagcu

SEQ ID NO: 1442237 - RNA, 19 nt, Artificial Sequence
  Description of Artificial Sequence: Synthetic oligonucleotide
ccgacucucgagggucuuc

SEQ ID NO: 1442238 - RNA, 19 nt, Artificial Sequence
  Description of Artificial Sequence: Synthetic oligonucleotide
gugcuccggguggcccacc

SEQ ID NO: 1442239 - RNA, 19 nt, Artificial Sequence
  Description of Artificial Sequence: Synthetic oligonucleotide
ccgacgggccgacucucga

SEQ ID NO: 1442240 - RNA, 19 nt, Artificial Sequence
  Description of Artificial Sequence: Synthetic oligonucleotide
gggcauccgacgggccgac

SEQ ID NO: 1442241 - RNA, 19 nt, Artificial Sequence
  Description of Artificial Sequence: Synthetic oligonucleotide
cccggagacagcucuucau

SEQ ID NO: 1442242 - RNA, 19 nt, Artificial Sequence
  Description of Artificial Sequence: Synthetic oligonucleotide
gcgccccuucucgauccug

SEQ ID NO: 1442243 - RNA, 19 nt, Artificial Sequence
  Description of Artificial Sequence: Synthetic oligonucleotide
ccgcgguaauagccaucug

SEQ ID NO: 1442244 - RNA, 19 nt, Artificial Sequence
  Description of Artificial Sequence: Synthetic oligonucleotide
ggcucgccggcaccugacu

SEQ ID NO: 1442245 - RNA, 19 nt, Artificial Sequence
  Description of Artificial Sequence: Synthetic oligonucleotide
ccacgccuaaagacaggcu

SEQ ID NO: 1442246 - RNA, 19 nt, Artificial Sequence
  Description of Artificial Sequence: Synthetic oligonucleotide
cgguagggcuggagaaaca

SEQ ID NO: 1442247 - RNA, 19 nt, Artificial Sequence
  Description of Artificial Sequence: Synthetic oligonucleotide
gcccgcgguaauagccauc

SEQ ID NO: 1442248 - RNA, 19 nt, Artificial Sequence
  Description of Artificial Sequence: Synthetic oligonucleotide
ccgccgccacgccuaaaga

SEQ ID NO: 1442249 - RNA, 19 nt, Artificial Sequence
  Description of Artificial Sequence: Synthetic oligonucleotide
gggccuugacgcguaccgu

SEQ ID NO: 1442250 - RNA, 19 nt, Artificial Sequence
  Description of Artificial Sequence: Synthetic oligonucleotide
ccggagccuuugucggcca

SEQ ID NO: 1442251 - RNA, 19 nt, Artificial Sequence
  Description of Artificial Sequence: Synthetic oligonucleotide
cgcguaccgugucgcagga

SEQ ID NO: 1442252 - RNA, 19 nt, Artificial Sequence
  Description of Artificial Sequence: Synthetic oligonucleotide
ggccgacucucgagggucu

SEQ ID NO: 1442253 - RNA, 19 nt, Artificial Sequence
  Description of Artificial Sequence: Synthetic oligonucleotide
gccgccgacauggcuuccu

SEQ ID NO: 1442254 - RNA, 19 nt, Artificial Sequence
  Description of Artificial Sequence: Synthetic oligonucleotide
cagccccggccuccaggua

SEQ ID NO: 1442255 - RNA, 19 nt, Artificial Sequence
  Description of Artificial Sequence: Synthetic oligonucleotide
cccuugggagaggacgccu

SEQ ID NO: 1442256 - RNA, 19 nt, Artificial Sequence
  Description of Artificial Sequence: Synthetic oligonucleotide
cgacgacggucaccgccga

SEQ ID NO: 1442257 - RNA, 19 nt, Artificial Sequence
  Description of Artificial Sequence: Synthetic oligonucleotide
cggcauucucgcacacccu

SEQ ID NO: 1442258 - RNA, 19 nt, Artificial Sequence
  Description of Artificial Sequence: Synthetic oligonucleotide
cugccgcauuguccauguu

SEQ ID NO: 1442259 - RNA, 19 nt, Artificial Sequence
  Description of Artificial Sequence: Synthetic oligonucleotide
gcacccggagacagcucuu

SEQ ID NO: 1442260 - RNA, 19 nt, Artificial Sequence
  Description of Artificial Sequence: Synthetic oligonucleotide
ggcauccgacgggccgacu

SEQ ID NO: 1442261 - RNA, 19 nt, Artificial Sequence
  Description of Artificial Sequence: Synthetic oligonucleotide
gccgacucucgagggucuu

SEQ ID NO: 1442262 - RNA, 19 nt, Artificial Sequence
  Description of Artificial Sequence: Synthetic oligonucleotide
gcccgacagcuggcagaaa

SEQ ID NO: 1442263 - RNA, 19 nt, Artificial Sequence
  Description of Artificial Sequence: Synthetic oligonucleotide
cggagccuuugucggccau

SEQ ID NO: 1442264 - RNA, 19 nt, Artificial Sequence
  Description of Artificial Sequence: Synthetic oligonucleotide
gcccgccgccacgccuaaa

SEQ ID NO: 1442265 - RNA, 19 nt, Artificial Sequence
  Description of Artificial Sequence: Synthetic oligonucleotide
uaaucuuaaauaaaggaga

SEQ ID NO: 1442266 - RNA, 19 nt, Artificial Sequence
  Description of Artificial Sequence: Synthetic oligonucleotide
gaaguaguaaugcaggugg

SEQ ID NO: 1442267 - RNA, 19 nt, Artificial Sequence
  Description of Artificial Sequence: Synthetic oligonucleotide
cuaaucuuaaauaaaggag

SEQ ID NO: 1442268 - RNA, 19 nt, Artificial Sequence
  Description of Artificial Sequence: Synthetic oligonucleotide
uaaggaauaaggaugccag

SEQ ID NO: 1442269 - RNA, 19 nt, Artificial Sequence
  Description of Artificial Sequence: Synthetic oligonucleotide
aaagaggacccucuacccc

SEQ ID NO: 1442270 - RNA, 19 nt, Artificial Sequence
  Description of Artificial Sequence: Synthetic oligonucleotide
cacaugacgaagaacaucc

SEQ ID NO: 1442271 - RNA, 19 nt, Artificial Sequence
  Description of Artificial Sequence: Synthetic oligonucleotide
aagaagagucccaugaugg

SEQ ID NO: 1442272 - RNA, 19 nt, Artificial Sequence
  Description of Artificial Sequence: Synthetic oligonucleotide
aaguacacuguccaguaag

SEQ ID NO: 1442273 - RNA, 19 nt, Artificial Sequence
  Description of Artificial Sequence: Synthetic oligonucleotide
aaagaagagucccaugaug

SEQ ID NO: 1442274 - RNA, 19 nt, Artificial Sequence
  Description of Artificial Sequence: Synthetic oligonucleotide
uuuggaaguacacugucca

SEQ ID NO: 1442275 - RNA, 19 nt, Artificial Sequence
  Description of Artificial Sequence: Synthetic oligonucleotide
uguaaaacauauguggucu

SEQ ID NO: 1442276 - RNA, 19 nt, Artificial Sequence
  Description of Artificial Sequence: Synthetic oligonucleotide
aaggaauaaggaugccagc

SEQ ID NO: 1442277 - RNA, 19 nt, Artificial Sequence
  Description of Artificial Sequence: Synthetic oligonucleotide
aucacaguaaggcacucac

SEQ ID NO: 1442278 - RNA, 19 nt, Artificial Sequence
  Description of Artificial Sequence: Synthetic oligonucleotide
uucagaaguuguaacacca

SEQ ID NO: 1442279 - RNA, 19 nt, Artificial Sequence
  Description of Artificial Sequence: Synthetic oligonucleotide
gagcuaacaguccugagcc

SEQ ID NO: 1442280 - RNA, 19 nt, Artificial Sequence
  Description of Artificial Sequence: Synthetic oligonucleotide
aaguucagaaguuguaaca

SEQ ID NO: 1442281 - RNA, 19 nt, Artificial Sequence
  Description of Artificial Sequence: Synthetic oligonucleotide
agaugcugcuccuagggac

SEQ ID NO: 1442282 - RNA, 19 nt, Artificial Sequence
  Description of Artificial Sequence: Synthetic oligonucleotide
gaugcuaugaggaagaagu

SEQ ID NO: 1442283 - RNA, 19 nt, Artificial Sequence
  Description of Artificial Sequence: Synthetic oligonucleotide
aguucagaaguuguaacac

SEQ ID NO: 1442284 - RNA, 19 nt, Artificial Sequence
  Description of Artificial Sequence: Synthetic oligonucleotide
ugaguaugcaaauuccaca

SEQ ID NO: 1442285 - RNA, 19 nt, Artificial Sequence
  Description of Artificial Sequence: Synthetic oligonucleotide
aguguagcucccuggaugg

SEQ ID NO: 1442286 - RNA, 19 nt, Artificial Sequence
  Description of Artificial Sequence: Synthetic oligonucleotide
uccuuuaccagguccagcc

SEQ ID NO: 1442287 - RNA, 19 nt, Artificial Sequence
  Description of Artificial Sequence: Synthetic oligonucleotide
ugccaaugagcacauacug

SEQ ID NO: 1442288 - RNA, 19 nt, Artificial Sequence
  Description of Artificial Sequence: Synthetic oligonucleotide
uccucuugagggaggaugg

SEQ ID NO: 1442289 - RNA, 19 nt, Artificial Sequence
  Description of Artificial Sequence: Synthetic oligonucleotide
gagcacaugacgaagaaca

SEQ ID NO: 1442290 - RNA, 19 nt, Artificial Sequence
  Description of Artificial Sequence: Synthetic oligonucleotide
acacuguccaguaaggacg

SEQ ID NO: 1442291 - RNA, 19 nt, Artificial Sequence
  Description of Artificial Sequence: Synthetic oligonucleotide
gaagagucccaugauggcg

SEQ ID NO: 1442292 - RNA, 19 nt, Artificial Sequence
  Description of Artificial Sequence: Synthetic oligonucleotide
ucuaaagaggacccucuac

SEQ ID NO: 1442293 - RNA, 19 nt, Artificial Sequence
  Description of Artificial Sequence: Synthetic oligonucleotide
uaugcaaauuccacacuga

SEQ ID NO: 1442294 - RNA, 19 nt, Artificial Sequence
  Description of Artificial Sequence: Synthetic oligonucleotide
agcaaguagagcgccaggc

SEQ ID NO: 1442295 - RNA, 19 nt, Artificial Sequence
  Description of Artificial Sequence: Synthetic oligonucleotide
gcuaaucuuaaauaaagga

SEQ ID NO: 1442296 - RNA, 19 nt, Artificial Sequence
  Description of Artificial Sequence: Synthetic oligonucleotide
ucaucgaccacacuuucau

SEQ ID NO: 1442297 - RNA, 19 nt, Artificial Sequence
  Description of Artificial Sequence: Synthetic oligonucleotide
aaaggacccaaugccagag

SEQ ID NO: 1442298 - RNA, 19 nt, Artificial Sequence
  Description of Artificial Sequence: Synthetic oligonucleotide
cugaguaugcaaauuccac

SEQ ID NO: 1442299 - RNA, 19 nt, Artificial Sequence
  Description of Artificial Sequence: Synthetic oligonucleotide
aauaaggaugccagcagca

SEQ ID NO: 1442300 - RNA, 19 nt, Artificial Sequence
  Description of Artificial Sequence: Synthetic oligonucleotide
auacuucacagacacgaug

SEQ ID NO: 1442301 - RNA, 19 nt, Artificial Sequence
  Description of Artificial Sequence: Synthetic oligonucleotide
caugacgaagaacaucccc

SEQ ID NO: 1442302 - RNA, 19 nt, Artificial Sequence
  Description of Artificial Sequence: Synthetic oligonucleotide
caaguucagaaguuguaac

SEQ ID NO: 1442303 - RNA, 19 nt, Artificial Sequence
  Description of Artificial Sequence: Synthetic oligonucleotide
auauguggucugcauuugg

SEQ ID NO: 1442304 - RNA, 19 nt, Artificial Sequence
  Description of Artificial Sequence: Synthetic oligonucleotide
aaguaguaaugcagguggc

SEQ ID NO: 1442305 - RNA, 19 nt, Artificial Sequence
  Description of Artificial Sequence: Synthetic oligonucleotide
cagccuuuuacucuccagg

SEQ ID NO: 1442306 - RNA, 19 nt, Artificial Sequence
  Description of Artificial Sequence: Synthetic oligonucleotide
gggaucugccaccagaugg

SEQ ID NO: 1442307 - RNA, 19 nt, Artificial Sequence
  Description of Artificial Sequence: Synthetic oligonucleotide
ugauggaagugcuugcuaa

SEQ ID NO: 1442308 - RNA, 19 nt, Artificial Sequence
  Description of Artificial Sequence: Synthetic oligonucleotide
uggcgaucauacuucacag

SEQ ID NO: 1442309 - RNA, 19 nt, Artificial Sequence
  Description of Artificial Sequence: Synthetic oligonucleotide
uuacagucugcagaacccg

SEQ ID NO: 1442310 - RNA, 19 nt, Artificial Sequence
  Description of Artificial Sequence: Synthetic oligonucleotide
ucucuaaagaggacccucu

SEQ ID NO: 1442311 - RNA, 19 nt, Artificial Sequence
  Description of Artificial Sequence: Synthetic oligonucleotide
uucagugggaugagcagga

SEQ ID NO: 1442312 - RNA, 19 nt, Artificial Sequence
  Description of Artificial Sequence: Synthetic oligonucleotide
ugaacggcgcgccauucag

SEQ ID NO: 1442313 - RNA, 19 nt, Artificial Sequence
  Description of Artificial Sequence: Synthetic oligonucleotide
aacggcgcgccauucagga

SEQ ID NO: 1442314 - RNA, 19 nt, Artificial Sequence
  Description of Artificial Sequence: Synthetic oligonucleotide
ugaguaugcuggcugucug

SEQ ID NO: 1442315 - RNA, 19 nt, Artificial Sequence
  Description of Artificial Sequence: Synthetic oligonucleotide
aggaauaaggaugccagca

SEQ ID NO: 1442316 - RNA, 19 nt, Artificial Sequence
  Description of Artificial Sequence: Synthetic oligonucleotide
agaaguuguaacaccaaca

SEQ ID NO: 1442317 - RNA, 19 nt, Artificial Sequence
  Description of Artificial Sequence: Synthetic oligonucleotide
caguuaguaggcacugagg

SEQ ID NO: 1442318 - RNA, 19 nt, Artificial Sequence
  Description of Artificial Sequence: Synthetic oligonucleotide
uuguaacaccaacacuccc

SEQ ID NO: 1442319 - RNA, 19 nt, Artificial Sequence
  Description of Artificial Sequence: Synthetic oligonucleotide
aucucuaaagaggacccuc

SEQ ID NO: 1442320 - RNA, 19 nt, Artificial Sequence
  Description of Artificial Sequence: Synthetic oligonucleotide
ugaagagcaacagcgccug

SEQ ID NO: 1442321 - RNA, 19 nt, Artificial Sequence
  Description of Artificial Sequence: Synthetic oligonucleotide
gagacuaugaggggagcag

SEQ ID NO: 1442322 - RNA, 19 nt, Artificial Sequence
  Description of Artificial Sequence: Synthetic oligonucleotide
aaggagaugcuaugaggaa

SEQ ID NO: 1442323 - RNA, 19 nt, Artificial Sequence
  Description of Artificial Sequence: Synthetic oligonucleotide
gcuauugauguucccaaag

SEQ ID NO: 1442324 - RNA, 19 nt, Artificial Sequence
  Description of Artificial Sequence: Synthetic oligonucleotide
uggaaguacacuguccagu

SEQ ID NO: 1442325 - RNA, 19 nt, Artificial Sequence
  Description of Artificial Sequence: Synthetic oligonucleotide
uuggaaguacacuguccag

SEQ ID NO: 1442326 - RNA, 19 nt, Artificial Sequence
  Description of Artificial Sequence: Synthetic oligonucleotide
aaagucuguauggcugcuc

SEQ ID NO: 1442327 - RNA, 19 nt, Artificial Sequence
  Description of Artificial Sequence: Synthetic oligonucleotide
guaaaacauauguggucug

SEQ ID NO: 1442328 - RNA, 19 nt, Artificial Sequence
  Description of Artificial Sequence: Synthetic oligonucleotide
ugacgaagaacauccccac

SEQ ID NO: 1442329 - RNA, 19 nt, Artificial Sequence
  Description of Artificial Sequence: Synthetic oligonucleotide
aggagaugcuaugaggaag

SEQ ID NO: 1442330 - RNA, 19 nt, Artificial Sequence
  Description of Artificial Sequence: Synthetic oligonucleotide
ucacaguaaggcacucacc

SEQ ID NO: 1442331 - RNA, 19 nt, Artificial Sequence
  Description of Artificial Sequence: Synthetic oligonucleotide
aguaaugcagguggcagcu

SEQ ID NO: 1442332 - RNA, 19 nt, Artificial Sequence
  Description of Artificial Sequence: Synthetic oligonucleotide
aaggacgggucccgcagag

SEQ ID NO: 1442333 - RNA, 19 nt, Artificial Sequence
  Description of Artificial Sequence: Synthetic oligonucleotide
ggaauaaggaugccagcag

SEQ ID NO: 1442334 - RNA, 19 nt, Artificial Sequence
  Description of Artificial Sequence: Synthetic oligonucleotide
aggggaagccaguccagac

SEQ ID NO: 1442335 - RNA, 19 nt, Artificial Sequence
  Description of Artificial Sequence: Synthetic oligonucleotide
acaguguaaggaauaagga

SEQ ID NO: 1442336 - RNA, 19 nt, Artificial Sequence
  Description of Artificial Sequence: Synthetic oligonucleotide
guaaggacgggucccgcag

SEQ ID NO: 1442337 - RNA, 19 nt, Artificial Sequence
  Description of Artificial Sequence: Synthetic oligonucleotide
gcgaucauacuucacagac

SEQ ID NO: 1442338 - RNA, 19 nt, Artificial Sequence
  Description of Artificial Sequence: Synthetic oligonucleotide
agccuuuuacucuccagga

SEQ ID NO: 1442339 - RNA, 19 nt, Artificial Sequence
  Description of Artificial Sequence: Synthetic oligonucleotide
aguaugcaaauuccacacu

SEQ ID NO: 1442340 - RNA, 19 nt, Artificial Sequence
  Description of Artificial Sequence: Synthetic oligonucleotide
uccugagcccacaaaggac

SEQ ID NO: 1442341 - RNA, 19 nt, Artificial Sequence
  Description of Artificial Sequence: Synthetic oligonucleotide
caugcaaguucagaaguug

SEQ ID NO: 1442342 - RNA, 19 nt, Artificial Sequence
  Description of Artificial Sequence: Synthetic oligonucleotide
gcaucgaacauggugagcc

SEQ ID NO: 1442343 - RNA, 19 nt, Artificial Sequence
  Description of Artificial Sequence: Synthetic oligonucleotide
cacuguccaguaaggacgg

SEQ ID NO: 1442344 - RNA, 19 nt, Artificial Sequence
  Description of Artificial Sequence: Synthetic oligonucleotide
gcagguauaccacaccacc

SEQ ID NO: 1442345 - RNA, 19 nt, Artificial Sequence
  Description of Artificial Sequence: Synthetic oligonucleotide
agagcacaugacgaagaac

SEQ ID NO: 1442346 - RNA, 19 nt, Artificial Sequence
  Description of Artificial Sequence: Synthetic oligonucleotide
agacacgaugaggaagagc

SEQ ID NO: 1442347 - RNA, 19 nt, Artificial Sequence
  Description of Artificial Sequence: Synthetic oligonucleotide
aauuccacacugaugccaa

SEQ ID NO: 1442348 - RNA, 19 nt, Artificial Sequence
  Description of Artificial Sequence: Synthetic oligonucleotide
gcaguuaguaggcacugag

SEQ ID NO: 1442349 - RNA, 19 nt, Artificial Sequence
  Description of Artificial Sequence: Synthetic oligonucleotide
cuggcgaucauacuucaca

SEQ ID NO: 1442350 - RNA, 19 nt, Artificial Sequence
  Description of Artificial Sequence: Synthetic oligonucleotide
caaguuggccgugacgccg

SEQ ID NO: 1442351 - RNA, 19 nt, Artificial Sequence
  Description of Artificial Sequence: Synthetic oligonucleotide
aguccugagcccacaaagg

SEQ ID NO: 1442352 - RNA, 19 nt, Artificial Sequence
  Description of Artificial Sequence: Synthetic oligonucleotide
ggacgggucccgcagagcg

SEQ ID NO: 1442353 - RNA, 19 nt, Artificial Sequence
  Description of Artificial Sequence: Synthetic oligonucleotide
caucagguccuuguacugg

SEQ ID NO: 1442354 - RNA, 19 nt, Artificial Sequence
  Description of Artificial Sequence: Synthetic oligonucleotide
gcuaugaggaagaaguaac

SEQ ID NO: 1442355 - RNA, 19 nt, Artificial Sequence
  Description of Artificial Sequence: Synthetic oligonucleotide
ccuuacagucugcagaacc

SEQ ID NO: 1442356 - RNA, 19 nt, Artificial Sequence
  Description of Artificial Sequence: Synthetic oligonucleotide
agcaauccucuugagggag

SEQ ID NO: 1442357 - RNA, 19 nt, Artificial Sequence
  Description of Artificial Sequence: Synthetic oligonucleotide
uaaaaggcggcgcgcucca

SEQ ID NO: 1442358 - RNA, 19 nt, Artificial Sequence
  Description of Artificial Sequence: Synthetic oligonucleotide
gccgugacgccguaaaagg

SEQ ID NO: 1442359 - RNA, 19 nt, Artificial Sequence
  Description of Artificial Sequence: Synthetic oligonucleotide
cagugggaugagcaggagg

SEQ ID NO: 1442360 - RNA, 19 nt, Artificial Sequence
  Description of Artificial Sequence: Synthetic oligonucleotide
cacaaaggacccaaugcca

SEQ ID NO: 1442361 - RNA, 19 nt, Artificial Sequence
  Description of Artificial Sequence: Synthetic oligonucleotide
guaaaaggcggcgcgcucc

SEQ ID NO: 1442362 - RNA, 19 nt, Artificial Sequence
  Description of Artificial Sequence: Synthetic oligonucleotide
agaugcuaugaggaagaag

SEQ ID NO: 1442363 - RNA, 19 nt, Artificial Sequence
  Description of Artificial Sequence: Synthetic oligonucleotide
uuuuacucuccaggauucc

SEQ ID NO: 1442364 - RNA, 19 nt, Artificial Sequence
  Description of Artificial Sequence: Synthetic oligonucleotide
aguaacaguguaaggaaua

SEQ ID NO: 1442365 - RNA, 19 nt, Artificial Sequence
  Description of Artificial Sequence: Synthetic oligonucleotide
uuggccgugacgccguaaa

SEQ ID NO: 1442366 - RNA, 19 nt, Artificial Sequence
  Description of Artificial Sequence: Synthetic oligonucleotide
uugaacggcgcgccauuca

SEQ ID NO: 1442367 - RNA, 19 nt, Artificial Sequence
  Description of Artificial Sequence: Synthetic oligonucleotide
aguaaggacgggucccgca

SEQ ID NO: 1442368 - RNA, 19 nt, Artificial Sequence
  Description of Artificial Sequence: Synthetic oligonucleotide
ucgcuggcgaucauacuuc

SEQ ID NO: 1442369 - RNA, 19 nt, Artificial Sequence
  Description of Artificial Sequence: Synthetic oligonucleotide
acaugacgaagaacauccc

SEQ ID NO: 1442370 - RNA, 19 nt, Artificial Sequence
  Description of Artificial Sequence: Synthetic oligonucleotide
aucgaacauggugagccag

SEQ ID NO: 1442371 - RNA, 19 nt, Artificial Sequence
  Description of Artificial Sequence: Synthetic oligonucleotide
gugacgccguaaaaggcgg

SEQ ID NO: 1442372 - RNA, 19 nt, Artificial Sequence
  Description of Artificial Sequence: Synthetic oligonucleotide
augaagagcaacagcgccu

SEQ ID NO: 1442373 - RNA, 19 nt, Artificial Sequence
  Description of Artificial Sequence: Synthetic oligonucleotide
ggaucugccaccagauggg

SEQ ID NO: 1442374 - RNA, 19 nt, Artificial Sequence
  Description of Artificial Sequence: Synthetic oligonucleotide
ugcgcgcccucccaguuga

SEQ ID NO: 1442375 - RNA, 19 nt, Artificial Sequence
  Description of Artificial Sequence: Synthetic oligonucleotide
ugggaucugccaccagaug

SEQ ID NO: 1442376 - RNA, 19 nt, Artificial Sequence
  Description of Artificial Sequence: Synthetic oligonucleotide
agcagcgcgucggcgagcc

SEQ ID NO: 1442377 - RNA, 19 nt, Artificial Sequence
  Description of Artificial Sequence: Synthetic oligonucleotide
guggcagcuauugauguuc

SEQ ID NO: 1442378 - RNA, 19 nt, Artificial Sequence
  Description of Artificial Sequence: Synthetic oligonucleotide
ugaggacugcaucgaacau

SEQ ID NO: 1442379 - RNA, 19 nt, Artificial Sequence
  Description of Artificial Sequence: Synthetic oligonucleotide
cucccaguugaacggcgcg

SEQ ID NO: 1442380 - RNA, 19 nt, Artificial Sequence
  Description of Artificial Sequence: Synthetic oligonucleotide
uaaggacgggucccgcaga

SEQ ID NO: 1442381 - RNA, 19 nt, Artificial Sequence
  Description of Artificial Sequence: Synthetic oligonucleotide
agagacuaugaggggagca

SEQ ID NO: 1442382 - RNA, 19 nt, Artificial Sequence
  Description of Artificial Sequence: Synthetic oligonucleotide
ucuggcucgcuggcgauca

SEQ ID NO: 1442383 - RNA, 19 nt, Artificial Sequence
  Description of Artificial Sequence: Synthetic oligonucleotide
cgugacgccguaaaaggcg

SEQ ID NO: 1442384 - RNA, 19 nt, Artificial Sequence
  Description of Artificial Sequence: Synthetic oligonucleotide
cagcagguauaccacacca

SEQ ID NO: 1442385 - RNA, 19 nt, Artificial Sequence
  Description of Artificial Sequence: Synthetic oligonucleotide
gacccucacgucaucgacc

SEQ ID NO: 1442386 - RNA, 19 nt, Artificial Sequence
  Description of Artificial Sequence: Synthetic oligonucleotide
acgccguaaaaggcggcgc

SEQ ID NO: 1442387 - RNA, 19 nt, Artificial Sequence
  Description of Artificial Sequence: Synthetic oligonucleotide
uggcaguuaguaggcacug

SEQ ID NO: 1442388 - RNA, 19 nt, Artificial Sequence
  Description of Artificial Sequence: Synthetic oligonucleotide
gacgaagaacauccccaca

SEQ ID NO: 1442389 - RNA, 19 nt, Artificial Sequence
  Description of Artificial Sequence: Synthetic oligonucleotide
ucauccacccaauggccuu

SEQ ID NO: 1442390 - RNA, 19 nt, Artificial Sequence
  Description of Artificial Sequence: Synthetic oligonucleotide
cauauguggucugcauuug

SEQ ID NO: 1442391 - RNA, 19 nt, Artificial Sequence
  Description of Artificial Sequence: Synthetic oligonucleotide
agcuauugauguucccaaa

SEQ ID NO: 1442392 - RNA, 19 nt, Artificial Sequence
  Description of Artificial Sequence: Synthetic oligonucleotide
aacaccccgggugccgccg

SEQ ID NO: 1442393 - RNA, 19 nt, Artificial Sequence
  Description of Artificial Sequence: Synthetic oligonucleotide
agaucacaguaaggcacuc

SEQ ID NO: 1442394 - RNA, 19 nt, Artificial Sequence
  Description of Artificial Sequence: Synthetic oligonucleotide
gauguucccaaagucugua

SEQ ID NO: 1442395 - RNA, 19 nt, Artificial Sequence
  Description of Artificial Sequence: Synthetic oligonucleotide
acgugcacaggagacagau

SEQ ID NO: 1442396 - RNA, 19 nt, Artificial Sequence
  Description of Artificial Sequence: Synthetic oligonucleotide
ucccaguugaacggcgcgc

SEQ ID NO: 1442397 - RNA, 19 nt, Artificial Sequence
  Description of Artificial Sequence: Synthetic oligonucleotide
aggaucucccuggcaggcc

SEQ ID NO: 1442398 - RNA, 19 nt, Artificial Sequence
  Description of Artificial Sequence: Synthetic oligonucleotide
agggacccucacgucaucg

SEQ ID NO: 1442399 - RNA, 19 nt, Artificial Sequence
  Description of Artificial Sequence: Synthetic oligonucleotide
gugcuugcuaaucuuaaau

SEQ ID NO: 1442400 - RNA, 19 nt, Artificial Sequence
  Description of Artificial Sequence: Synthetic oligonucleotide
cagcuauugauguucccaa

SEQ ID NO: 1442401 - RNA, 19 nt, Artificial Sequence
  Description of Artificial Sequence: Synthetic oligonucleotide
ggagaugcuaugaggaaga

SEQ ID NO: 1442402 - RNA, 19 nt, Artificial Sequence
  Description of Artificial Sequence: Synthetic oligonucleotide
ugcuccuagggacccucac

SEQ ID NO: 1442403 - RNA, 19 nt, Artificial Sequence
  Description of Artificial Sequence: Synthetic oligonucleotide
guggugauacuugagauuu

SEQ ID NO: 1442404 - RNA, 19 nt, Artificial Sequence
  Description of Artificial Sequence: Synthetic oligonucleotide
gaacggcgcgccauucagg

SEQ ID NO: 1442405 - RNA, 19 nt, Artificial Sequence
  Description of Artificial Sequence: Synthetic oligonucleotide
uggugauacuugagauuuc

SEQ ID NO: 1442406 - RNA, 19 nt, Artificial Sequence
  Description of Artificial Sequence: Synthetic oligonucleotide
ugacgccguaaaaggcggc

SEQ ID NO: 1442407 - RNA, 19 nt, Artificial Sequence
  Description of Artificial Sequence: Synthetic oligonucleotide
gcgcccucccaguugaacg

SEQ ID NO: 1442408 - RNA, 19 nt, Artificial Sequence
  Description of Artificial Sequence: Synthetic oligonucleotide
gaucacaguaaggcacuca

SEQ ID NO: 1442409 - RNA, 19 nt, Artificial Sequence
  Description of Artificial Sequence: Synthetic oligonucleotide
uugagauuucuggaaucuu

SEQ ID NO: 1442410 - RNA, 19 nt, Artificial Sequence
  Description of Artificial Sequence: Synthetic oligonucleotide
cuugagauuucuggaaucu

SEQ ID NO: 1442411 - RNA, 19 nt, Artificial Sequence
  Description of Artificial Sequence: Synthetic oligonucleotide
cagcaaguagagcgccagg

SEQ ID NO: 1442412 - RNA, 19 nt, Artificial Sequence
  Description of Artificial Sequence: Synthetic oligonucleotide
cacgucaucgaccacacuu

SEQ ID NO: 1442413 - RNA, 19 nt, Artificial Sequence
  Description of Artificial Sequence: Synthetic oligonucleotide
aguagagcgccaggcugag

SEQ ID NO: 1442414 - RNA, 19 nt, Artificial Sequence
  Description of Artificial Sequence: Synthetic oligonucleotide
caucgaccacacuuucauc

SEQ ID NO: 1442415 - RNA, 19 nt, Artificial Sequence
  Description of Artificial Sequence: Synthetic oligonucleotide
aguugaacggcgcgccauu

SEQ ID NO: 1442416 - RNA, 19 nt, Artificial Sequence
  Description of Artificial Sequence: Synthetic oligonucleotide
ggccgugacgccguaaaag

SEQ ID NO: 1442417 - RNA, 19 nt, Artificial Sequence
  Description of Artificial Sequence: Synthetic oligonucleotide
ccuggcaguuaguaggcac

SEQ ID NO: 1442418 - RNA, 19 nt, Artificial Sequence
  Description of Artificial Sequence: Synthetic oligonucleotide
aaguuggccgugacgccgu

SEQ ID NO: 1442419 - RNA, 19 nt, Artificial Sequence
  Description of Artificial Sequence: Synthetic oligonucleotide
gcuaacaguccugagccca

SEQ ID NO: 1442420 - RNA, 19 nt, Artificial Sequence
  Description of Artificial Sequence: Synthetic oligonucleotide
acaugcaaguucagaaguu

SEQ ID NO: 1442421 - RNA, 19 nt, Artificial Sequence
  Description of Artificial Sequence: Synthetic oligonucleotide
caaacaccccgggugccgc

SEQ ID NO: 1442422 - RNA, 19 nt, Artificial Sequence
  Description of Artificial Sequence: Synthetic oligonucleotide
aggaggaugaggacugcau

SEQ ID NO: 1442423 - RNA, 19 nt, Artificial Sequence
  Description of Artificial Sequence: Synthetic oligonucleotide
ugagcccacaaaggaccca

SEQ ID NO: 1442424 - RNA, 19 nt, Artificial Sequence
  Description of Artificial Sequence: Synthetic oligonucleotide
ugcauggacuugggagcag

SEQ ID NO: 1442425 - RNA, 19 nt, Artificial Sequence
  Description of Artificial Sequence: Synthetic oligonucleotide
cuccuagggacccucacgu

SEQ ID NO: 1442426 - RNA, 19 nt, Artificial Sequence
  Description of Artificial Sequence: Synthetic oligonucleotide
aggacgggucccgcagagc

SEQ ID NO: 1442427 - RNA, 19 nt, Artificial Sequence
  Description of Artificial Sequence: Synthetic oligonucleotide
cuggcaguuaguaggcacu

SEQ ID NO: 1442428 - RNA, 19 nt, Artificial Sequence
  Description of Artificial Sequence: Synthetic oligonucleotide
gcagcagaacaguggcugc

SEQ ID NO: 1442429 - RNA, 19 nt, Artificial Sequence
  Description of Artificial Sequence: Synthetic oligonucleotide
cuugggagcagcugaguau

SEQ ID NO: 1442430 - RNA, 19 nt, Artificial Sequence
  Description of Artificial Sequence: Synthetic oligonucleotide
caucgaacauggugagcca

SEQ ID NO: 1442431 - RNA, 19 nt, Artificial Sequence
  Description of Artificial Sequence: Synthetic oligonucleotide
agagcgcggcgcgcgagcg

SEQ ID NO: 1442432 - RNA, 19 nt, Artificial Sequence
  Description of Artificial Sequence: Synthetic oligonucleotide
ggugauacuugagauuucu

SEQ ID NO: 1442433 - RNA, 19 nt, Artificial Sequence
  Description of Artificial Sequence: Synthetic oligonucleotide
ggacccucacgucaucgac

SEQ ID NO: 1442434 - RNA, 19 nt, Artificial Sequence
  Description of Artificial Sequence: Synthetic oligonucleotide
gcgucggcgagccaucccc

SEQ ID NO: 1442435 - RNA, 19 nt, Artificial Sequence
  Description of Artificial Sequence: Synthetic oligonucleotide
ggucagcagguauaccaca

SEQ ID NO: 1442436 - RNA, 19 nt, Artificial Sequence
  Description of Artificial Sequence: Synthetic oligonucleotide
ggcccaugaagagcaacag

SEQ ID NO: 1442437 - RNA, 19 nt, Artificial Sequence
  Description of Artificial Sequence: Synthetic oligonucleotide
acgucaucgaccacacuuu

SEQ ID NO: 1442438 - RNA, 19 nt, Artificial Sequence
  Description of Artificial Sequence: Synthetic oligonucleotide
cucgcuggcgaucauacuu

SEQ ID NO: 1442439 - RNA, 19 nt, Artificial Sequence
  Description of Artificial Sequence: Synthetic oligonucleotide
agacaacaugcaaguucag

SEQ ID NO: 1442440 - RNA, 19 nt, Artificial Sequence
  Description of Artificial Sequence: Synthetic oligonucleotide
gaugggaagcaggccaugu

SEQ ID NO: 1442441 - RNA, 19 nt, Artificial Sequence
  Description of Artificial Sequence: Synthetic oligonucleotide
agcaccaaguuggccguga

SEQ ID NO: 1442442 - RNA, 19 nt, Artificial Sequence
  Description of Artificial Sequence: Synthetic oligonucleotide
cacucaccacacucaucug

SEQ ID NO: 1442443 - RNA, 19 nt, Artificial Sequence
  Description of Artificial Sequence: Synthetic oligonucleotide
uaccagguccagccuuuua

SEQ ID NO: 1442444 - RNA, 19 nt, Artificial Sequence
  Description of Artificial Sequence: Synthetic oligonucleotide
ggcgaucauacuucacaga

SEQ ID NO: 1442445 - RNA, 19 nt, Artificial Sequence
  Description of Artificial Sequence: Synthetic oligonucleotide
cauccacccaauggccuug

SEQ ID NO: 1442446 - RNA, 19 nt, Artificial Sequence
  Description of Artificial Sequence: Synthetic oligonucleotide
uggccgugacgccguaaaa

SEQ ID NO: 1442447 - RNA, 19 nt, Artificial Sequence
  Description of Artificial Sequence: Synthetic oligonucleotide
cccgugaguaugcuggcug

SEQ ID NO: 1442448 - RNA, 19 nt, Artificial Sequence
  Description of Artificial Sequence: Synthetic oligonucleotide
ucacgucaucgaccacacu

SEQ ID NO: 1442449 - RNA, 19 nt, Artificial Sequence
  Description of Artificial Sequence: Synthetic oligonucleotide
ccgugacgccguaaaaggc

SEQ ID NO: 1442450 - RNA, 19 nt, Artificial Sequence
  Description of Artificial Sequence: Synthetic oligonucleotide
uccagacaacaugcaaguu

SEQ ID NO: 1442451 - RNA, 19 nt, Artificial Sequence
  Description of Artificial Sequence: Synthetic oligonucleotide
gcaauccucuugagggagg

SEQ ID NO: 1442452 - RNA, 19 nt, Artificial Sequence
  Description of Artificial Sequence: Synthetic oligonucleotide
cugagcacuggguccacua

SEQ ID NO: 1442453 - RNA, 19 nt, Artificial Sequence
  Description of Artificial Sequence: Synthetic oligonucleotide
aucucccuggcaggcccac

SEQ ID NO: 1442454 - RNA, 19 nt, Artificial Sequence
  Description of Artificial Sequence: Synthetic oligonucleotide
ccacgugcacaggagacag

SEQ ID NO: 1442455 - RNA, 19 nt, Artificial Sequence
  Description of Artificial Sequence: Synthetic oligonucleotide
cagacacgaugaggaagag

SEQ ID NO: 1442456 - RNA, 19 nt, Artificial Sequence
  Description of Artificial Sequence: Synthetic oligonucleotide
cucuaaagaggacccucua

SEQ ID NO: 1442457 - RNA, 19 nt, Artificial Sequence
  Description of Artificial Sequence: Synthetic oligonucleotide
caggcccacgugcacagga

SEQ ID NO: 1442458 - RNA, 19 nt, Artificial Sequence
  Description of Artificial Sequence: Synthetic oligonucleotide
ccaguaaggacgggucccg

SEQ ID NO: 1442459 - RNA, 19 nt, Artificial Sequence
  Description of Artificial Sequence: Synthetic oligonucleotide
gcagaacccgugaguaugc

SEQ ID NO: 1442460 - RNA, 19 nt, Artificial Sequence
  Description of Artificial Sequence: Synthetic oligonucleotide
cauacuucacagacacgau

SEQ ID NO: 1442461 - RNA, 19 nt, Artificial Sequence
  Description of Artificial Sequence: Synthetic oligonucleotide
gaccacacuuucaucucua

SEQ ID NO: 1442462 - RNA, 19 nt, Artificial Sequence
  Description of Artificial Sequence: Synthetic oligonucleotide
ccaaguuggccgugacgcc

SEQ ID NO: 1442463 - RNA, 19 nt, Artificial Sequence
  Description of Artificial Sequence: Synthetic oligonucleotide
ccgcaaacaccccgggugc

SEQ ID NO: 1442464 - RNA, 19 nt, Artificial Sequence
  Description of Artificial Sequence: Synthetic oligonucleotide
gagaugcuaugaggaagaa

SEQ ID NO: 1442465 - RNA, 19 nt, Artificial Sequence
  Description of Artificial Sequence: Synthetic oligonucleotide
caguaaggacgggucccgc

SEQ ID NO: 1442466 - RNA, 19 nt, Artificial Sequence
  Description of Artificial Sequence: Synthetic oligonucleotide
ggcucgcuggcgaucauac

SEQ ID NO: 1442467 - RNA, 19 nt, Artificial Sequence
  Description of Artificial Sequence: Synthetic oligonucleotide
ggucccgcagagcgcggcg

SEQ ID NO: 1442468 - RNA, 19 nt, Artificial Sequence
  Description of Artificial Sequence: Synthetic oligonucleotide
uagggacccucacgucauc

SEQ ID NO: 1442469 - RNA, 19 nt, Artificial Sequence
  Description of Artificial Sequence: Synthetic oligonucleotide
gugaguaugcuggcugucu

SEQ ID NO: 1442470 - RNA, 19 nt, Artificial Sequence
  Description of Artificial Sequence: Synthetic oligonucleotide
aggcccacgugcacaggag

SEQ ID NO: 1442471 - RNA, 19 nt, Artificial Sequence
  Description of Artificial Sequence: Synthetic oligonucleotide
cccaguugaacggcgcgcc

SEQ ID NO: 1442472 - RNA, 19 nt, Artificial Sequence
  Description of Artificial Sequence: Synthetic oligonucleotide
ggaugaggacugcaucgaa

SEQ ID NO: 1442473 - RNA, 19 nt, Artificial Sequence
  Description of Artificial Sequence: Synthetic oligonucleotide
agcgcgucggcgagccauc

SEQ ID NO: 1442474 - RNA, 19 nt, Artificial Sequence
  Description of Artificial Sequence: Synthetic oligonucleotide
gagagacaccagagcuaac

SEQ ID NO: 1442475 - RNA, 19 nt, Artificial Sequence
  Description of Artificial Sequence: Synthetic oligonucleotide
cauggacuugggagcagcu

SEQ ID NO: 1442476 - RNA, 19 nt, Artificial Sequence
  Description of Artificial Sequence: Synthetic oligonucleotide
cgccguaaaaggcggcgcg

SEQ ID NO: 1442477 - RNA, 19 nt, Artificial Sequence
  Description of Artificial Sequence: Synthetic oligonucleotide
cugugggaucugccaccag

SEQ ID NO: 1442478 - RNA, 19 nt, Artificial Sequence
  Description of Artificial Sequence: Synthetic oligonucleotide
uuaccagguccagccuuuu

SEQ ID NO: 1442479 - RNA, 19 nt, Artificial Sequence
  Description of Artificial Sequence: Synthetic oligonucleotide
cugcgcgcccucccaguug

SEQ ID NO: 1442480 - RNA, 19 nt, Artificial Sequence
  Description of Artificial Sequence: Synthetic oligonucleotide
gccguaaaaggcggcgcgc

SEQ ID NO: 1442481 - RNA, 19 nt, Artificial Sequence
  Description of Artificial Sequence: Synthetic oligonucleotide
ccagagcuaacaguccuga

SEQ ID NO: 1442482 - RNA, 19 nt, Artificial Sequence
  Description of Artificial Sequence: Synthetic oligonucleotide
ggcccacgugcacaggaga

SEQ ID NO: 1442483 - RNA, 19 nt, Artificial Sequence
  Description of Artificial Sequence: Synthetic oligonucleotide
auccacccaauggccuuga

SEQ ID NO: 1442484 - RNA, 19 nt, Artificial Sequence
  Description of Artificial Sequence: Synthetic oligonucleotide
cacuagcuuguccuucagu

SEQ ID NO: 1442485 - RNA, 19 nt, Artificial Sequence
  Description of Artificial Sequence: Synthetic oligonucleotide
ccacagcaauccucuugag

SEQ ID NO: 1442486 - RNA, 19 nt, Artificial Sequence
  Description of Artificial Sequence: Synthetic oligonucleotide
gcaccaaguuggccgugac

SEQ ID NO: 1442487 - RNA, 19 nt, Artificial Sequence
  Description of Artificial Sequence: Synthetic oligonucleotide
gcccacgugcacaggagac

SEQ ID NO: 1442488 - RNA, 19 nt, Artificial Sequence
  Description of Artificial Sequence: Synthetic oligonucleotide
cacgugcacaggagacaga

SEQ ID NO: 1442489 - RNA, 19 nt, Artificial Sequence
  Description of Artificial Sequence: Synthetic oligonucleotide
guagagcgccaggcugagc

SEQ ID NO: 1442490 - RNA, 19 nt, Artificial Sequence
  Description of Artificial Sequence: Synthetic oligonucleotide
gacuugggagcagcugagu

SEQ ID NO: 1442491 - RNA, 19 nt, Artificial Sequence
  Description of Artificial Sequence: Synthetic oligonucleotide
cccgaagggagagcccagg

SEQ ID NO: 1442492 - RNA, 19 nt, Artificial Sequence
  Description of Artificial Sequence: Synthetic oligonucleotide
acggcgcgccauucaggaa

SEQ ID NO: 1442493 - RNA, 19 nt, Artificial Sequence
  Description of Artificial Sequence: Synthetic oligonucleotide
aggcagcguguggugggug

SEQ ID NO: 1442494 - RNA, 19 nt, Artificial Sequence
  Description of Artificial Sequence: Synthetic oligonucleotide
accccgggugccgccgccg

SEQ ID NO: 1442495 - RNA, 19 nt, Artificial Sequence
  Description of Artificial Sequence: Synthetic oligonucleotide
ccgccccgcaaacaccccg

SEQ ID NO: 1442496 - RNA, 19 nt, Artificial Sequence
  Description of Artificial Sequence: Synthetic oligonucleotide
ggcaguuaguaggcacuga

SEQ ID NO: 1442497 - RNA, 19 nt, Artificial Sequence
  Description of Artificial Sequence: Synthetic oligonucleotide
cgccgccccgcaaacaccc

SEQ ID NO: 1442498 - RNA, 19 nt, Artificial Sequence
  Description of Artificial Sequence: Synthetic oligonucleotide
gagucccaugauggcgcuc

SEQ ID NO: 1442499 - RNA, 19 nt, Artificial Sequence
  Description of Artificial Sequence: Synthetic oligonucleotide
ugacaccgcccuggcaguu

SEQ ID NO: 1442500 - RNA, 19 nt, Artificial Sequence
  Description of Artificial Sequence: Synthetic oligonucleotide
cugcuccuagggacccuca

SEQ ID NO: 1442501 - RNA, 19 nt, Artificial Sequence
  Description of Artificial Sequence: Synthetic oligonucleotide
gacaccgcccuggcaguua

SEQ ID NO: 1442502 - RNA, 19 nt, Artificial Sequence
  Description of Artificial Sequence: Synthetic oligonucleotide
cgucaucgaccacacuuuc

SEQ ID NO: 1442503 - RNA, 19 nt, Artificial Sequence
  Description of Artificial Sequence: Synthetic oligonucleotide
gccuuuuacucuccaggau

SEQ ID NO: 1442504 - RNA, 19 nt, Artificial Sequence
  Description of Artificial Sequence: Synthetic oligonucleotide
gcugcuccuagggacccuc

SEQ ID NO: 1442505 - RNA, 19 nt, Artificial Sequence
  Description of Artificial Sequence: Synthetic oligonucleotide
cguaaaaggcggcgcgcuc

SEQ ID NO: 1442506 - RNA, 19 nt, Artificial Sequence
  Description of Artificial Sequence: Synthetic oligonucleotide
cgccccgcaaacaccccgg

SEQ ID NO: 1442507 - RNA, 19 nt, Artificial Sequence
  Description of Artificial Sequence: Synthetic oligonucleotide
gagcggggcgcggccagca

SEQ ID NO: 1442508 - RNA, 19 nt, Artificial Sequence
  Description of Artificial Sequence: Synthetic oligonucleotide
gcuggcgaucauacuucac

SEQ ID NO: 1442509 - RNA, 19 nt, Artificial Sequence
  Description of Artificial Sequence: Synthetic oligonucleotide
gccgagcagcgcgucggcg

SEQ ID NO: 1442510 - RNA, 19 nt, Artificial Sequence
  Description of Artificial Sequence: Synthetic oligonucleotide
gcgagcaugcccagcaagu

SEQ ID NO: 1442511 - RNA, 19 nt, Artificial Sequence
  Description of Artificial Sequence: Synthetic oligonucleotide
cgcgccgccccgcaaacac

SEQ ID NO: 1442512 - RNA, 19 nt, Artificial Sequence
  Description of Artificial Sequence: Synthetic oligonucleotide
ggcgcgccauucaggaaca

SEQ ID NO: 1442513 - RNA, 19 nt, Artificial Sequence
  Description of Artificial Sequence: Synthetic oligonucleotide
ccccgaagggagagcccag

SEQ ID NO: 1442514 - RNA, 19 nt, Artificial Sequence
  Description of Artificial Sequence: Synthetic oligonucleotide
guuggccgugacgccguaa

SEQ ID NO: 1442515 - RNA, 19 nt, Artificial Sequence
  Description of Artificial Sequence: Synthetic oligonucleotide
gccgccgccgccgccgccg

SEQ ID NO: 1442516 - RNA, 19 nt, Artificial Sequence
  Description of Artificial Sequence: Synthetic oligonucleotide
caguugaacggcgcgccau

SEQ ID NO: 1442517 - RNA, 19 nt, Artificial Sequence
  Description of Artificial Sequence: Synthetic oligonucleotide
gccuuacagucugcagaac

SEQ ID NO: 1442518 - RNA, 19 nt, Artificial Sequence
  Description of Artificial Sequence: Synthetic oligonucleotide
ugccgccgccgccgccgcc

SEQ ID NO: 1442519 - RNA, 19 nt, Artificial Sequence
  Description of Artificial Sequence: Synthetic oligonucleotide
gccugcugacaccgcccug

SEQ ID NO: 1442520 - RNA, 19 nt, Artificial Sequence
  Description of Artificial Sequence: Synthetic oligonucleotide
cgugaguaugcuggcuguc

SEQ ID NO: 1442521 - RNA, 19 nt, Artificial Sequence
  Description of Artificial Sequence: Synthetic oligonucleotide
ccaguugaacggcgcgcca

SEQ ID NO: 1442522 - RNA, 19 nt, Artificial Sequence
  Description of Artificial Sequence: Synthetic oligonucleotide
gugccgccgccgccgccgc

SEQ ID NO: 1442523 - RNA, 19 nt, Artificial Sequence
  Description of Artificial Sequence: Synthetic oligonucleotide
cgcaaacaccccgggugcc

SEQ ID NO: 1442524 - RNA, 19 nt, Artificial Sequence
  Description of Artificial Sequence: Synthetic oligonucleotide
ccgugaguaugcuggcugu

SEQ ID NO: 1442525 - RNA, 19 nt, Artificial Sequence
  Description of Artificial Sequence: Synthetic oligonucleotide
cagcgcgucggcgagccau

SEQ ID NO: 1442526 - RNA, 19 nt, Artificial Sequence
  Description of Artificial Sequence: Synthetic oligonucleotide
gccccacacgccgcgcgcc

SEQ ID NO: 1442527 - RNA, 19 nt, Artificial Sequence
  Description of Artificial Sequence: Synthetic oligonucleotide
ccuuuaccagguccagccu

SEQ ID NO: 1442528 - RNA, 19 nt, Artificial Sequence
  Description of Artificial Sequence: Synthetic oligonucleotide
gcgcgcccggccgagcagc

SEQ ID NO: 1442529 - RNA, 19 nt, Artificial Sequence
  Description of Artificial Sequence: Synthetic oligonucleotide
gcgccgccccgcaaacacc

SEQ ID NO: 1442530 - RNA, 19 nt, Artificial Sequence
  Description of Artificial Sequence: Synthetic oligonucleotide
gcgcgagcggggcgcggcc

SEQ ID NO: 1442531 - RNA, 19 nt, Artificial Sequence
  Description of Artificial Sequence: Synthetic oligonucleotide
gcucgcuggcgaucauacu

SEQ ID NO: 1442532 - RNA, 19 nt, Artificial Sequence
  Description of Artificial Sequence: Synthetic oligonucleotide
ccguaaaaggcggcgcgcu

SEQ ID NO: 1442533 - RNA, 19 nt, Artificial Sequence
  Description of Artificial Sequence: Synthetic oligonucleotide
cccuggcaguuaguaggca

SEQ ID NO: 1442534 - RNA, 19 nt, Artificial Sequence
  Description of Artificial Sequence: Synthetic oligonucleotide
ccccgcaaacaccccgggu

SEQ ID NO: 1442535 - RNA, 19 nt, Artificial Sequence
  Description of Artificial Sequence: Synthetic oligonucleotide
cuggcucgcuggcgaucau

SEQ ID NO: 1442536 - RNA, 19 nt, Artificial Sequence
  Description of Artificial Sequence: Synthetic oligonucleotide
cccggccgagcagcgcguc

SEQ ID NO: 1442537 - RNA, 19 nt, Artificial Sequence
  Description of Artificial Sequence: Synthetic oligonucleotide
ccgccgccgccgccgccgc

SEQ ID NO: 1442538 - RNA, 19 nt, Artificial Sequence
  Description of Artificial Sequence: Synthetic oligonucleotide
ccugcgcgcccucccaguu

SEQ ID NO: 1442539 - RNA, 19 nt, Artificial Sequence
  Description of Artificial Sequence: Synthetic oligonucleotide
gcgcgcccucccaguugaa

SEQ ID NO: 1442540 - RNA, 19 nt, Artificial Sequence
  Description of Artificial Sequence: Synthetic oligonucleotide
cgccgccgccgccgccgcc

SEQ ID NO: 1442541 - RNA, 19 nt, Artificial Sequence
  Description of Artificial Sequence: Synthetic oligonucleotide
aaaacaaacauucagcacu

SEQ ID NO: 1442542 - RNA, 19 nt, Artificial Sequence
  Description of Artificial Sequence: Synthetic oligonucleotide
aaagugaacaaucuagacg

SEQ ID NO: 1442543 - RNA, 19 nt, Artificial Sequence
  Description of Artificial Sequence: Synthetic oligonucleotide
aauucagccauccaguuag

SEQ ID NO: 1442544 - RNA, 19 nt, Artificial Sequence
  Description of Artificial Sequence: Synthetic oligonucleotide
aguggaagagcuuucaucc

SEQ ID NO: 1442545 - RNA, 19 nt, Artificial Sequence
  Description of Artificial Sequence: Synthetic oligonucleotide
aacaauacuaguuacauua

SEQ ID NO: 1442546 - RNA, 19 nt, Artificial Sequence
  Description of Artificial Sequence: Synthetic oligonucleotide
aauagcaaugcuguaaagc

SEQ ID NO: 1442547 - RNA, 19 nt, Artificial Sequence
  Description of Artificial Sequence: Synthetic oligonucleotide
gauaaauuguuuugcaagg

SEQ ID NO: 1442548 - RNA, 19 nt, Artificial Sequence
  Description of Artificial Sequence: Synthetic oligonucleotide
uuaauuugguucuugaagc

SEQ ID NO: 1442549 - RNA, 19 nt, Artificial Sequence
  Description of Artificial Sequence: Synthetic oligonucleotide
uuagcaaugaccaaaguuc

SEQ ID NO: 1442550 - RNA, 19 nt, Artificial Sequence
  Description of Artificial Sequence: Synthetic oligonucleotide
aaugcaauuguagcaaugc

SEQ ID NO: 1442551 - RNA, 19 nt, Artificial Sequence
  Description of Artificial Sequence: Synthetic oligonucleotide
aaaaguuuagcaaugacca

SEQ ID NO: 1442552 - RNA, 19 nt, Artificial Sequence
  Description of Artificial Sequence: Synthetic oligonucleotide
ucuuagauugacuuaaccc

SEQ ID NO: 1442553 - RNA, 19 nt, Artificial Sequence
  Description of Artificial Sequence: Synthetic oligonucleotide
uuaaaagccauuucgcucc

SEQ ID NO: 1442554 - RNA, 19 nt, Artificial Sequence
  Description of Artificial Sequence: Synthetic oligonucleotide
uuuucuacguuccugccgg

SEQ ID NO: 1442555 - RNA, 19 nt, Artificial Sequence
  Description of Artificial Sequence: Synthetic oligonucleotide
uuuaauaggaauuguguac

SEQ ID NO: 1442556 - RNA, 19 nt, Artificial Sequence
  Description of Artificial Sequence: Synthetic oligonucleotide
ucuaguaacaacucuaggu

SEQ ID NO: 1442557 - RNA, 19 nt, Artificial Sequence
  Description of Artificial Sequence: Synthetic oligonucleotide
acaaucuagacgucaaagc

SEQ ID NO: 1442558 - RNA, 19 nt, Artificial Sequence
  Description of Artificial Sequence: Synthetic oligonucleotide
uacacaaagauuaguagug

SEQ ID NO: 1442559 - RNA, 19 nt, Artificial Sequence
  Description of Artificial Sequence: Synthetic oligonucleotide
uauaauccaaaauguaaag

SEQ ID NO: 1442560 - RNA, 19 nt, Artificial Sequence
  Description of Artificial Sequence: Synthetic oligonucleotide
ucucucuuuagcuauaaug

SEQ ID NO: 1442561 - RNA, 19 nt, Artificial Sequence
  Description of Artificial Sequence: Synthetic oligonucleotide
ugaaucaucaaugcaauug

SEQ ID NO: 1442562 - RNA, 19 nt, Artificial Sequence
  Description of Artificial Sequence: Synthetic oligonucleotide
agacuagugaugucaaacc

SEQ ID NO: 1442563 - RNA, 19 nt, Artificial Sequence
  Description of Artificial Sequence: Synthetic oligonucleotide
uccauuacauuuccgaacc

SEQ ID NO: 1442564 - RNA, 19 nt, Artificial Sequence
  Description of Artificial Sequence: Synthetic oligonucleotide
uuagcuauaaugucuucag

SEQ ID NO: 1442565 - RNA, 19 nt, Artificial Sequence
  Description of Artificial Sequence: Synthetic oligonucleotide
auugaaccguuuuaacucc

SEQ ID NO: 1442566 - RNA, 19 nt, Artificial Sequence
  Description of Artificial Sequence: Synthetic oligonucleotide
ucugguguaaaucuuuuga

SEQ ID NO: 1442567 - RNA, 19 nt, Artificial Sequence
  Description of Artificial Sequence: Synthetic oligonucleotide
uauugaauccuuauuuucu

SEQ ID NO: 1442568 - RNA, 19 nt, Artificial Sequence
  Description of Artificial Sequence: Synthetic oligonucleotide
gaucuaugagaucacuucg

SEQ ID NO: 1442569 - RNA, 19 nt, Artificial Sequence
  Description of Artificial Sequence: Synthetic oligonucleotide
uagguaagcuaccagaaug

SEQ ID NO: 1442570 - RNA, 19 nt, Artificial Sequence
  Description of Artificial Sequence: Synthetic oligonucleotide
ucuacacaaagauuaguag

SEQ ID NO: 1442571 - RNA, 19 nt, Artificial Sequence
  Description of Artificial Sequence: Synthetic oligonucleotide
ucaaaugaugugauuacca

SEQ ID NO: 1442572 - RNA, 19 nt, Artificial Sequence
  Description of Artificial Sequence: Synthetic oligonucleotide
uuagauugacuuaacccag

SEQ ID NO: 1442573 - RNA, 19 nt, Artificial Sequence
  Description of Artificial Sequence: Synthetic oligonucleotide
gaaguguagacaaagggcc

SEQ ID NO: 1442574 - RNA, 19 nt, Artificial Sequence
  Description of Artificial Sequence: Synthetic oligonucleotide
aaggauguaacaauacuag

SEQ ID NO: 1442575 - RNA, 19 nt, Artificial Sequence
  Description of Artificial Sequence: Synthetic oligonucleotide
uguguacuuaauaaauccc

SEQ ID NO: 1442576 - RNA, 19 nt, Artificial Sequence
  Description of Artificial Sequence: Synthetic oligonucleotide
uaaucauacuauugaaucc

SEQ ID NO: 1442577 - RNA, 19 nt, Artificial Sequence
  Description of Artificial Sequence: Synthetic oligonucleotide
uccgcuuuaaaacaaacau

SEQ ID NO: 1442578 - RNA, 19 nt, Artificial Sequence
  Description of Artificial Sequence: Synthetic oligonucleotide
uucauuugaucuaugagau

SEQ ID NO: 1442579 - RNA, 19 nt, Artificial Sequence
  Description of Artificial Sequence: Synthetic oligonucleotide
uuuuaguucucgcuuagga

SEQ ID NO: 1442580 - RNA, 19 nt, Artificial Sequence
  Description of Artificial Sequence: Synthetic oligonucleotide
auggaugauaagcuuuucc

SEQ ID NO: 1442581 - RNA, 19 nt, Artificial Sequence
  Description of Artificial Sequence: Synthetic oligonucleotide
uuccaugauuacaacauag

SEQ ID NO: 1442582 - RNA, 19 nt, Artificial Sequence
  Description of Artificial Sequence: Synthetic oligonucleotide
cuuagauugacuuaaccca

SEQ ID NO: 1442583 - RNA, 19 nt, Artificial Sequence
  Description of Artificial Sequence: Synthetic oligonucleotide
aaucauacuauugaauccu

SEQ ID NO: 1442584 - RNA, 19 nt, Artificial Sequence
  Description of Artificial Sequence: Synthetic oligonucleotide
aagcauauguaaaacguuc

SEQ ID NO: 1442585 - RNA, 19 nt, Artificial Sequence
  Description of Artificial Sequence: Synthetic oligonucleotide
uuaggagggacuucaagag

SEQ ID NO: 1442586 - RNA, 19 nt, Artificial Sequence
  Description of Artificial Sequence: Synthetic oligonucleotide
uuguuaaaagccauuucgc

SEQ ID NO: 1442587 - RNA, 19 nt, Artificial Sequence
  Description of Artificial Sequence: Synthetic oligonucleotide
aauucuuagauugacuuaa

SEQ ID NO: 1442588 - RNA, 19 nt, Artificial Sequence
  Description of Artificial Sequence: Synthetic oligonucleotide
uguaacaauacuaguuaca

SEQ ID NO: 1442589 - RNA, 19 nt, Artificial Sequence
  Description of Artificial Sequence: Synthetic oligonucleotide
ugaccuucucucuugaucc

SEQ ID NO: 1442590 - RNA, 19 nt, Artificial Sequence
  Description of Artificial Sequence: Synthetic oligonucleotide
aacaaucuagacgucaaag

SEQ ID NO: 1442591 - RNA, 19 nt, Artificial Sequence
  Description of Artificial Sequence: Synthetic oligonucleotide
uuuaguucucgcuuaggag

SEQ ID NO: 1442592 - RNA, 19 nt, Artificial Sequence
  Description of Artificial Sequence: Synthetic oligonucleotide
aacauucagcacuggaauc

SEQ ID NO: 1442593 - RNA, 19 nt, Artificial Sequence
  Description of Artificial Sequence: Synthetic oligonucleotide
agcuauaaugucuucagca

SEQ ID NO: 1442594 - RNA, 19 nt, Artificial Sequence
  Description of Artificial Sequence: Synthetic oligonucleotide
uggaugauaagcuuuucca

SEQ ID NO: 1442595 - RNA, 19 nt, Artificial Sequence
  Description of Artificial Sequence: Synthetic oligonucleotide
acuucgaucuaguaacaac

SEQ ID NO: 1442596 - RNA, 19 nt, Artificial Sequence
  Description of Artificial Sequence: Synthetic oligonucleotide
auuacaacauaguaggaau

SEQ ID NO: 1442597 - RNA, 19 nt, Artificial Sequence
  Description of Artificial Sequence: Synthetic oligonucleotide
uacuauugaauccuuauuu

SEQ ID NO: 1442598 - RNA, 19 nt, Artificial Sequence
  Description of Artificial Sequence: Synthetic oligonucleotide
aacucuaggucuucaucac

SEQ ID NO: 1442599 - RNA, 19 nt, Artificial Sequence
  Description of Artificial Sequence: Synthetic oligonucleotide
cauugaaccguuuuaacuc

SEQ ID NO: 1442600 - RNA, 19 nt, Artificial Sequence
  Description of Artificial Sequence: Synthetic oligonucleotide
uuccuuaccaauuuucuac

SEQ ID NO: 1442601 - RNA, 19 nt, Artificial Sequence
  Description of Artificial Sequence: Synthetic oligonucleotide
ugcaauuguagcaaugcac

SEQ ID NO: 1442602 - RNA, 19 nt, Artificial Sequence
  Description of Artificial Sequence: Synthetic oligonucleotide
ggaucuaagaaauucuuag

SEQ ID NO: 1442603 - RNA, 19 nt, Artificial Sequence
  Description of Artificial Sequence: Synthetic oligonucleotide
cuaguaacaacucuagguc

SEQ ID NO: 1442604 - RNA, 19 nt, Artificial Sequence
  Description of Artificial Sequence: Synthetic oligonucleotide
uaaaucuuuugaauucagc

SEQ ID NO: 1442605 - RNA, 19 nt, Artificial Sequence
  Description of Artificial Sequence: Synthetic oligonucleotide
uuaggaaguguagacaaag

SEQ ID NO: 1442606 - RNA, 19 nt, Artificial Sequence
  Description of Artificial Sequence: Synthetic oligonucleotide
uuaacucccugauuagccg

SEQ ID NO: 1442607 - RNA, 19 nt, Artificial Sequence
  Description of Artificial Sequence: Synthetic oligonucleotide
ucuacuugguaccaccuca

SEQ ID NO: 1442608 - RNA, 19 nt, Artificial Sequence
  Description of Artificial Sequence: Synthetic oligonucleotide
uauucuuaauccugugucc

SEQ ID NO: 1442609 - RNA, 19 nt, Artificial Sequence
  Description of Artificial Sequence: Synthetic oligonucleotide
aagccaguagguaagcuac

SEQ ID NO: 1442610 - RNA, 19 nt, Artificial Sequence
  Description of Artificial Sequence: Synthetic oligonucleotide
auuaccacaggaugaaucu

SEQ ID NO: 1442611 - RNA, 19 nt, Artificial Sequence
  Description of Artificial Sequence: Synthetic oligonucleotide
aucuaagaaauucuuagau

SEQ ID NO: 1442612 - RNA, 19 nt, Artificial Sequence
  Description of Artificial Sequence: Synthetic oligonucleotide
uuaauaggaauuguguacu

SEQ ID NO: 1442613 - RNA, 19 nt, Artificial Sequence
  Description of Artificial Sequence: Synthetic oligonucleotide
uguuaaaagccauuucgcu

SEQ ID NO: 1442614 - RNA, 19 nt, Artificial Sequence
  Description of Artificial Sequence: Synthetic oligonucleotide
uccuucaucuacuauuaag

SEQ ID NO: 1442615 - RNA, 19 nt, Artificial Sequence
  Description of Artificial Sequence: Synthetic oligonucleotide
agacaaccuaucuuuaauc

SEQ ID NO: 1442616 - RNA, 19 nt, Artificial Sequence
  Description of Artificial Sequence: Synthetic oligonucleotide
aucauuucaaggauguaac

SEQ ID NO: 1442617 - RNA, 19 nt, Artificial Sequence
  Description of Artificial Sequence: Synthetic oligonucleotide
ugaucuaugagaucacuuc

SEQ ID NO: 1442618 - RNA, 19 nt, Artificial Sequence
  Description of Artificial Sequence: Synthetic oligonucleotide
uuaccaauuuucuacguuc

SEQ ID NO: 1442619 - RNA, 19 nt, Artificial Sequence
  Description of Artificial Sequence: Synthetic oligonucleotide
uuucagacagacuagugau

SEQ ID NO: 1442620 - RNA, 19 nt, Artificial Sequence
  Description of Artificial Sequence: Synthetic oligonucleotide
gacuucaagagcaacauca

SEQ ID NO: 1442621 - RNA, 19 nt, Artificial Sequence
  Description of Artificial Sequence: Synthetic oligonucleotide
aaacugauauaauccaaaa

SEQ ID NO: 1442622 - RNA, 19 nt, Artificial Sequence
  Description of Artificial Sequence: Synthetic oligonucleotide
auuuucuacguuccugccg

SEQ ID NO: 1442623 - RNA, 19 nt, Artificial Sequence
  Description of Artificial Sequence: Synthetic oligonucleotide
ucucucuugauccuuuuac

SEQ ID NO: 1442624 - RNA, 19 nt, Artificial Sequence
  Description of Artificial Sequence: Synthetic oligonucleotide
aaccuaucuuuaaucauac

SEQ ID NO: 1442625 - RNA, 19 nt, Artificial Sequence
  Description of Artificial Sequence: Synthetic oligonucleotide
aacugauauaauccaaaau

SEQ ID NO: 1442626 - RNA, 19 nt, Artificial Sequence
  Description of Artificial Sequence: Synthetic oligonucleotide
ucuggugaagcauauguaa

SEQ ID NO: 1442627 - RNA, 19 nt, Artificial Sequence
  Description of Artificial Sequence: Synthetic oligonucleotide
uaaagugaacaaucuagac

SEQ ID NO: 1442628 - RNA, 19 nt, Artificial Sequence
  Description of Artificial Sequence: Synthetic oligonucleotide
uccuuaccaauuuucuacg

SEQ ID NO: 1442629 - RNA, 19 nt, Artificial Sequence
  Description of Artificial Sequence: Synthetic oligonucleotide
aguuguuaaaagccauuuc

SEQ ID NO: 1442630 - RNA, 19 nt, Artificial Sequence
  Description of Artificial Sequence: Synthetic oligonucleotide
agguacuccccucugaauc

SEQ ID NO: 1442631 - RNA, 19 nt, Artificial Sequence
  Description of Artificial Sequence: Synthetic oligonucleotide
uuucgcuccgcuuuaaaac

SEQ ID NO: 1442632 - RNA, 19 nt, Artificial Sequence
  Description of Artificial Sequence: Synthetic oligonucleotide
aguuaggaaguguagacaa

SEQ ID NO: 1442633 - RNA, 19 nt, Artificial Sequence
  Description of Artificial Sequence: Synthetic oligonucleotide
agauugacuuaacccagac

SEQ ID NO: 1442634 - RNA, 19 nt, Artificial Sequence
  Description of Artificial Sequence: Synthetic oligonucleotide
agcaacaucagacuucagu

SEQ ID NO: 1442635 - RNA, 19 nt, Artificial Sequence
  Description of Artificial Sequence: Synthetic oligonucleotide
uaauuugguucuugaagcc

SEQ ID NO: 1442636 - RNA, 19 nt, Artificial Sequence
  Description of Artificial Sequence: Synthetic oligonucleotide
aauuguagcaaugcacuga

SEQ ID NO: 1442637 - RNA, 19 nt, Artificial Sequence
  Description of Artificial Sequence: Synthetic oligonucleotide
uaccagaauggauauaaac

SEQ ID NO: 1442638 - RNA, 19 nt, Artificial Sequence
  Description of Artificial Sequence: Synthetic oligonucleotide
agacgucaaagccaguagg

SEQ ID NO: 1442639 - RNA, 19 nt, Artificial Sequence
  Description of Artificial Sequence: Synthetic oligonucleotide
auaguaggaauuucuggug

SEQ ID NO: 1442640 - RNA, 19 nt, Artificial Sequence
  Description of Artificial Sequence: Synthetic oligonucleotide
guuaaaagccauuucgcuc

SEQ ID NO: 1442641 - RNA, 19 nt, Artificial Sequence
  Description of Artificial Sequence: Synthetic oligonucleotide
acaacucuaggucuucauc

SEQ ID NO: 1442642 - RNA, 19 nt, Artificial Sequence
  Description of Artificial Sequence: Synthetic oligonucleotide
gacaaccuaucuuuaauca

SEQ ID NO: 1442643 - RNA, 19 nt, Artificial Sequence
  Description of Artificial Sequence: Synthetic oligonucleotide
aguaucuugaauaucccug

SEQ ID NO: 1442644 - RNA, 19 nt, Artificial Sequence
  Description of Artificial Sequence: Synthetic oligonucleotide
ucuaagaaauucuuagauu

SEQ ID NO: 1442645 - RNA, 19 nt, Artificial Sequence
  Description of Artificial Sequence: Synthetic oligonucleotide
agcauugaaccguuuuaac

SEQ ID NO: 1442646 - RNA, 19 nt, Artificial Sequence
  Description of Artificial Sequence: Synthetic oligonucleotide
cuauugaauccuuauuuuc

SEQ ID NO: 1442647 - RNA, 19 nt, Artificial Sequence
  Description of Artificial Sequence: Synthetic oligonucleotide
gaucuaguaacaacucuag

SEQ ID NO: 1442648 - RNA, 19 nt, Artificial Sequence
  Description of Artificial Sequence: Synthetic oligonucleotide
aaauucuuagauugacuua

SEQ ID NO: 1442649 - RNA, 19 nt, Artificial Sequence
  Description of Artificial Sequence: Synthetic oligonucleotide
agucaaaagaaguuuguua

SEQ ID NO: 1442650 - RNA, 19 nt, Artificial Sequence
  Description of Artificial Sequence: Synthetic oligonucleotide
aaagccaguagguaagcua

SEQ ID NO: 1442651 - RNA, 19 nt, Artificial Sequence
  Description of Artificial Sequence: Synthetic oligonucleotide
aaccguuuuaacucccuga

SEQ ID NO: 1442652 - RNA, 19 nt, Artificial Sequence
  Description of Artificial Sequence: Synthetic oligonucleotide
uccaaaauguaaagugaac

SEQ ID NO: 1442653 - RNA, 19 nt, Artificial Sequence
  Description of Artificial Sequence: Synthetic oligonucleotide
aggacuuagaauucugccu

SEQ ID NO: 1442654 - RNA, 19 nt, Artificial Sequence
  Description of Artificial Sequence: Synthetic oligonucleotide
ugaacaaucuagacgucaa

SEQ ID NO: 1442655 - RNA, 19 nt, Artificial Sequence
  Description of Artificial Sequence: Synthetic oligonucleotide
aaagccauuucgcuccgcu

SEQ ID NO: 1442656 - RNA, 19 nt, Artificial Sequence
  Description of Artificial Sequence: Synthetic oligonucleotide
aauuguuuugcaagggagu

SEQ ID NO: 1442657 - RNA, 19 nt, Artificial Sequence
  Description of Artificial Sequence: Synthetic oligonucleotide
gaucuaagaaauucuuaga

SEQ ID NO: 1442658 - RNA, 19 nt, Artificial Sequence
  Description of Artificial Sequence: Synthetic oligonucleotide
uaacucccugauuagccgg

SEQ ID NO: 1442659 - RNA, 19 nt, Artificial Sequence
  Description of Artificial Sequence: Synthetic oligonucleotide
acauuuccgaaccggauca

SEQ ID NO: 1442660 - RNA, 19 nt, Artificial Sequence
  Description of Artificial Sequence: Synthetic oligonucleotide
cauuacauuuccgaaccgg

SEQ ID NO: 1442661 - RNA, 19 nt, Artificial Sequence
  Description of Artificial Sequence: Synthetic oligonucleotide
uacauuuccgaaccggauc

SEQ ID NO: 1442662 - RNA, 19 nt, Artificial Sequence
  Description of Artificial Sequence: Synthetic oligonucleotide
ugaauccuuauuuucugaa

SEQ ID NO: 1442663 - RNA, 19 nt, Artificial Sequence
  Description of Artificial Sequence: Synthetic oligonucleotide
uuuuaacucccugauuagc

SEQ ID NO: 1442664 - RNA, 19 nt, Artificial Sequence
  Description of Artificial Sequence: Synthetic oligonucleotide
uucgcuccgcuuuaaaaca

SEQ ID NO: 1442665 - RNA, 19 nt, Artificial Sequence
  Description of Artificial Sequence: Synthetic oligonucleotide
uuuuauggaugauaagcuu

SEQ ID NO: 1442666 - RNA, 19 nt, Artificial Sequence
  Description of Artificial Sequence: Synthetic oligonucleotide
gggaguaccagucaaaaga

SEQ ID NO: 1442667 - RNA, 19 nt, Artificial Sequence
  Description of Artificial Sequence: Synthetic oligonucleotide
auuguagcaaugcacugaa

SEQ ID NO: 1442668 - RNA, 19 nt, Artificial Sequence
  Description of Artificial Sequence: Synthetic oligonucleotide
ucgaucuaguaacaacucu

SEQ ID NO: 1442669 - RNA, 19 nt, Artificial Sequence
  Description of Artificial Sequence: Synthetic oligonucleotide
ucucauggcuauuucaaau

SEQ ID NO: 1442670 - RNA, 19 nt, Artificial Sequence
  Description of Artificial Sequence: Synthetic oligonucleotide
gcuauaaugucuucagcag

SEQ ID NO: 1442671 - RNA, 19 nt, Artificial Sequence
  Description of Artificial Sequence: Synthetic oligonucleotide
ggaauuguguacuuaauaa

SEQ ID NO: 1442672 - RNA, 19 nt, Artificial Sequence
  Description of Artificial Sequence: Synthetic oligonucleotide
ucuaugagaucacuucgau

SEQ ID NO: 1442673 - RNA, 19 nt, Artificial Sequence
  Description of Artificial Sequence: Synthetic oligonucleotide
uguaaaacguucuguucuc

SEQ ID NO: 1442674 - RNA, 19 nt, Artificial Sequence
  Description of Artificial Sequence: Synthetic oligonucleotide
gaugauaagcuuuuccagu

SEQ ID NO: 1442675 - RNA, 19 nt, Artificial Sequence
  Description of Artificial Sequence: Synthetic oligonucleotide
ucucuuuagcuauaauguc

SEQ ID NO: 1442676 - RNA, 19 nt, Artificial Sequence
  Description of Artificial Sequence: Synthetic oligonucleotide
gacaguuugagacaaccua

SEQ ID NO: 1442677 - RNA, 19 nt, Artificial Sequence
  Description of Artificial Sequence: Synthetic oligonucleotide
uuuugcaagggaguaccag

SEQ ID NO: 1442678 - RNA, 19 nt, Artificial Sequence
  Description of Artificial Sequence: Synthetic oligonucleotide
uuaguaguggaagagcuuu

SEQ ID NO: 1442679 - RNA, 19 nt, Artificial Sequence
  Description of Artificial Sequence: Synthetic oligonucleotide
ggacuuagaauucugccug

SEQ ID NO: 1442680 - RNA, 19 nt, Artificial Sequence
  Description of Artificial Sequence: Synthetic oligonucleotide
uugacuuaacccagacuga

SEQ ID NO: 1442681 - RNA, 19 nt, Artificial Sequence
  Description of Artificial Sequence: Synthetic oligonucleotide
gauuaccacaggaugaauc

SEQ ID NO: 1442682 - RNA, 19 nt, Artificial Sequence
  Description of Artificial Sequence: Synthetic oligonucleotide
acacaaagauuaguagugg

SEQ ID NO: 1442683 - RNA, 19 nt, Artificial Sequence
  Description of Artificial Sequence: Synthetic oligonucleotide
ggaugauaagcuuuuccag

SEQ ID NO: 1442684 - RNA, 19 nt, Artificial Sequence
  Description of Artificial Sequence: Synthetic oligonucleotide
cucucuuuagcuauaaugu

SEQ ID NO: 1442685 - RNA, 19 nt, Artificial Sequence
  Description of Artificial Sequence: Synthetic oligonucleotide
uugaauccuuauuuucuga

SEQ ID NO: 1442686 - RNA, 19 nt, Artificial Sequence
  Description of Artificial Sequence: Synthetic oligonucleotide
uuuccgaaccggaucaaaa

SEQ ID NO: 1442687 - RNA, 19 nt, Artificial Sequence
  Description of Artificial Sequence: Synthetic oligonucleotide
uguccauuacauuuccgaa

SEQ ID NO: 1442688 - RNA, 19 nt, Artificial Sequence
  Description of Artificial Sequence: Synthetic oligonucleotide
agguaagcuaccagaaugg

SEQ ID NO: 1442689 - RNA, 19 nt, Artificial Sequence
  Description of Artificial Sequence: Synthetic oligonucleotide
uucgaucuaguaacaacuc

SEQ ID NO: 1442690 - RNA, 19 nt, Artificial Sequence
  Description of Artificial Sequence: Synthetic oligonucleotide
uggauauuccuuaccaauu

SEQ ID NO: 1442691 - RNA, 19 nt, Artificial Sequence
  Description of Artificial Sequence: Synthetic oligonucleotide
uaaaagccauuucgcuccg

SEQ ID NO: 1442692 - RNA, 19 nt, Artificial Sequence
  Description of Artificial Sequence: Synthetic oligonucleotide
uguaaagcauucuggucuc

SEQ ID NO: 1442693 - RNA, 19 nt, Artificial Sequence
  Description of Artificial Sequence: Synthetic oligonucleotide
uaggaucuaagaaauucuu

SEQ ID NO: 1442694 - RNA, 19 nt, Artificial Sequence
  Description of Artificial Sequence: Synthetic oligonucleotide
uagcuauaaugucuucagc

SEQ ID NO: 1442695 - RNA, 19 nt, Artificial Sequence
  Description of Artificial Sequence: Synthetic oligonucleotide
cauaguaggaauuucuggu

SEQ ID NO: 1442696 - RNA, 19 nt, Artificial Sequence
  Description of Artificial Sequence: Synthetic oligonucleotide
aggaauuguguacuuaaua

SEQ ID NO: 1442697 - RNA, 19 nt, Artificial Sequence
  Description of Artificial Sequence: Synthetic oligonucleotide
ugacaguuugagacaaccu

SEQ ID NO: 1442698 - RNA, 19 nt, Artificial Sequence
  Description of Artificial Sequence: Synthetic oligonucleotide
uggaagagcuuucauccuc

SEQ ID NO: 1442699 - RNA, 19 nt, Artificial Sequence
  Description of Artificial Sequence: Synthetic oligonucleotide
ugagaucacuucgaucuag

SEQ ID NO: 1442700 - RNA, 19 nt, Artificial Sequence
  Description of Artificial Sequence: Synthetic oligonucleotide
aucuagacgucaaagccag

SEQ ID NO: 1442701 - RNA, 19 nt, Artificial Sequence
  Description of Artificial Sequence: Synthetic oligonucleotide
cagacuagugaugucaaac

SEQ ID NO: 1442702 - RNA, 19 nt, Artificial Sequence
  Description of Artificial Sequence: Synthetic oligonucleotide
uccaguuaggaaguguaga

SEQ ID NO: 1442703 - RNA, 19 nt, Artificial Sequence
  Description of Artificial Sequence: Synthetic oligonucleotide
agacagacuagugauguca

SEQ ID NO: 1442704 - RNA, 19 nt, Artificial Sequence
  Description of Artificial Sequence: Synthetic oligonucleotide
ccauuaauuccuuaggauc

SEQ ID NO: 1442705 - RNA, 19 nt, Artificial Sequence
  Description of Artificial Sequence: Synthetic oligonucleotide
gcaacaucagacuucaguc

SEQ ID NO: 1442706 - RNA, 19 nt, Artificial Sequence
  Description of Artificial Sequence: Synthetic oligonucleotide
aggauguaacaauacuagu

SEQ ID NO: 1442707 - RNA, 19 nt, Artificial Sequence
  Description of Artificial Sequence: Synthetic oligonucleotide
acauucagcacuggaaucu

SEQ ID NO: 1442708 - RNA, 19 nt, Artificial Sequence
  Description of Artificial Sequence: Synthetic oligonucleotide
guccauuacauuuccgaac

SEQ ID NO: 1442709 - RNA, 19 nt, Artificial Sequence
  Description of Artificial Sequence: Synthetic oligonucleotide
aacucccugauuagccggc

SEQ ID NO: 1442710 - RNA, 19 nt, Artificial Sequence
  Description of Artificial Sequence: Synthetic oligonucleotide
aacguucuguucucucucu

SEQ ID NO: 1442711 - RNA, 19 nt, Artificial Sequence
  Description of Artificial Sequence: Synthetic oligonucleotide
uguggauauuccuuaccaa

SEQ ID NO: 1442712 - RNA, 19 nt, Artificial Sequence
  Description of Artificial Sequence: Synthetic oligonucleotide
uagauugacuuaacccaga

SEQ ID NO: 1442713 - RNA, 19 nt, Artificial Sequence
  Description of Artificial Sequence: Synthetic oligonucleotide
guacuuaauaaaucccaga

SEQ ID NO: 1442714 - RNA, 19 nt, Artificial Sequence
  Description of Artificial Sequence: Synthetic oligonucleotide
acaaccuaucuuuaaucau

SEQ ID NO: 1442715 - RNA, 19 nt, Artificial Sequence
  Description of Artificial Sequence: Synthetic oligonucleotide
uuacauuuccgaaccggau

SEQ ID NO: 1442716 - RNA, 19 nt, Artificial Sequence
  Description of Artificial Sequence: Synthetic oligonucleotide
uaaaacguucuguucucuc

SEQ ID NO: 1442717 - RNA, 19 nt, Artificial Sequence
  Description of Artificial Sequence: Synthetic oligonucleotide
uucguaaucucuagauuuu

SEQ ID NO: 1442718 - RNA, 19 nt, Artificial Sequence
  Description of Artificial Sequence: Synthetic oligonucleotide
agagcaacaucagacuuca

SEQ ID NO: 1442719 - RNA, 19 nt, Artificial Sequence
  Description of Artificial Sequence: Synthetic oligonucleotide
ugagacaaccuaucuuuaa

SEQ ID NO: 1442720 - RNA, 19 nt, Artificial Sequence
  Description of Artificial Sequence: Synthetic oligonucleotide
auacuauugaauccuuauu

SEQ ID NO: 1442721 - RNA, 19 nt, Artificial Sequence
  Description of Artificial Sequence: Synthetic oligonucleotide
ugacuuaacccagacugac

SEQ ID NO: 1442722 - RNA, 19 nt, Artificial Sequence
  Description of Artificial Sequence: Synthetic oligonucleotide
uucccuuucguaaucucua

SEQ ID NO: 1442723 - RNA, 19 nt, Artificial Sequence
  Description of Artificial Sequence: Synthetic oligonucleotide
aagcuaccagaauggauau

SEQ ID NO: 1442724 - RNA, 19 nt, Artificial Sequence
  Description of Artificial Sequence: Synthetic oligonucleotide
uugaaccguuuuaacuccc

SEQ ID NO: 1442725 - RNA, 19 nt, Artificial Sequence
  Description of Artificial Sequence: Synthetic oligonucleotide
uugcaagggaguaccaguc

SEQ ID NO: 1442726 - RNA, 19 nt, Artificial Sequence
  Description of Artificial Sequence: Synthetic oligonucleotide
gauuaguaguggaagagcu

SEQ ID NO: 1442727 - RNA, 19 nt, Artificial Sequence
  Description of Artificial Sequence: Synthetic oligonucleotide
cuucgaucuaguaacaacu

SEQ ID NO: 1442728 - RNA, 19 nt, Artificial Sequence
  Description of Artificial Sequence: Synthetic oligonucleotide
accguuuuaacucccugau

SEQ ID NO: 1442729 - RNA, 19 nt, Artificial Sequence
  Description of Artificial Sequence: Synthetic oligonucleotide
aggaauuucugguguaaau

SEQ ID NO: 1442730 - RNA, 19 nt, Artificial Sequence
  Description of Artificial Sequence: Synthetic oligonucleotide
agugcuuugguuguugaaa

SEQ ID NO: 1442731 - RNA, 19 nt, Artificial Sequence
  Description of Artificial Sequence: Synthetic oligonucleotide
ucauacuauugaauccuua

SEQ ID NO: 1442732 - RNA, 19 nt, Artificial Sequence
  Description of Artificial Sequence: Synthetic oligonucleotide
uuaucagcauugaaccguu

SEQ ID NO: 1442733 - RNA, 19 nt, Artificial Sequence
  Description of Artificial Sequence: Synthetic oligonucleotide
cuaugagaucacuucgauc

SEQ ID NO: 1442734 - RNA, 19 nt, Artificial Sequence
  Description of Artificial Sequence: Synthetic oligonucleotide
uagccggcacuucauauuc

SEQ ID NO: 1442735 - RNA, 19 nt, Artificial Sequence
  Description of Artificial Sequence: Synthetic oligonucleotide
acuucccuuucguaaucuc

SEQ ID NO: 1442736 - RNA, 19 nt, Artificial Sequence
  Description of Artificial Sequence: Synthetic oligonucleotide
gaaccguuuuaacucccug

SEQ ID NO: 1442737 - RNA, 19 nt, Artificial Sequence
  Description of Artificial Sequence: Synthetic oligonucleotide
aagggaguaccagucaaaa

SEQ ID NO: 1442738 - RNA, 19 nt, Artificial Sequence
  Description of Artificial Sequence: Synthetic oligonucleotide
ucuuaauccuguguccuuc

SEQ ID NO: 1442739 - RNA, 19 nt, Artificial Sequence
  Description of Artificial Sequence: Synthetic oligonucleotide
ugaaccguuuuaacucccu

SEQ ID NO: 1442740 - RNA, 19 nt, Artificial Sequence
  Description of Artificial Sequence: Synthetic oligonucleotide
auuagccggcacuucauau

SEQ ID NO: 1442741 - RNA, 19 nt, Artificial Sequence
  Description of Artificial Sequence: Synthetic oligonucleotide
agggaguaccagucaaaag

SEQ ID NO: 1442742 - RNA, 19 nt, Artificial Sequence
  Description of Artificial Sequence: Synthetic oligonucleotide
ucccuuucguaaucucuag

SEQ ID NO: 1442743 - RNA, 19 nt, Artificial Sequence
  Description of Artificial Sequence: Synthetic oligonucleotide
auuccuuaccaauuuucua

SEQ ID NO: 1442744 - RNA, 19 nt, Artificial Sequence
  Description of Artificial Sequence: Synthetic oligonucleotide
ucaaugcaauuguagcaau

SEQ ID NO: 1442745 - RNA, 19 nt, Artificial Sequence
  Description of Artificial Sequence: Synthetic oligonucleotide
uaggaauuguguacuuaau

SEQ ID NO: 1442746 - RNA, 19 nt, Artificial Sequence
  Description of Artificial Sequence: Synthetic oligonucleotide
caaccuaucuuuaaucaua

SEQ ID NO: 1442747 - RNA, 19 nt, Artificial Sequence
  Description of Artificial Sequence: Synthetic oligonucleotide
aaaagccauuucgcuccgc

SEQ ID NO: 1442748 - RNA, 19 nt, Artificial Sequence
  Description of Artificial Sequence: Synthetic oligonucleotide
uucuacuugguaccaccuc

SEQ ID NO: 1442749 - RNA, 19 nt, Artificial Sequence
  Description of Artificial Sequence: Synthetic oligonucleotide
agcauauguaaaacguucu

SEQ ID NO: 1442750 - RNA, 19 nt, Artificial Sequence
  Description of Artificial Sequence: Synthetic oligonucleotide
uucagucuucucagggaga

SEQ ID NO: 1442751 - RNA, 19 nt, Artificial Sequence
  Description of Artificial Sequence: Synthetic oligonucleotide
cacaaagauuaguagugga

SEQ ID NO: 1442752 - RNA, 19 nt, Artificial Sequence
  Description of Artificial Sequence: Synthetic oligonucleotide
uaacaauacuaguuacauu

SEQ ID NO: 1442753 - RNA, 19 nt, Artificial Sequence
  Description of Artificial Sequence: Synthetic oligonucleotide
auuguuuugcaagggagua

SEQ ID NO: 1442754 - RNA, 19 nt, Artificial Sequence
  Description of Artificial Sequence: Synthetic oligonucleotide
ucccugauuagccggcacu

SEQ ID NO: 1442755 - RNA, 19 nt, Artificial Sequence
  Description of Artificial Sequence: Synthetic oligonucleotide
aaccaagacucaaagcuuu

SEQ ID NO: 1442756 - RNA, 19 nt, Artificial Sequence
  Description of Artificial Sequence: Synthetic oligonucleotide
acaguuugagacaaccuau

SEQ ID NO: 1442757 - RNA, 19 nt, Artificial Sequence
  Description of Artificial Sequence: Synthetic oligonucleotide
aguagguaagcuaccagaa

SEQ ID NO: 1442758 - RNA, 19 nt, Artificial Sequence
  Description of Artificial Sequence: Synthetic oligonucleotide
ugauaagcuuuuccaguuu

SEQ ID NO: 1442759 - RNA, 19 nt, Artificial Sequence
  Description of Artificial Sequence: Synthetic oligonucleotide
gcauauguaaaacguucug

SEQ ID NO: 1442760 - RNA, 19 nt, Artificial Sequence
  Description of Artificial Sequence: Synthetic oligonucleotide
guaacaauacuaguuacau

SEQ ID NO: 1442761 - RNA, 19 nt, Artificial Sequence
  Description of Artificial Sequence: Synthetic oligonucleotide
gaguaccagucaaaagaag

SEQ ID NO: 1442762 - RNA, 19 nt, Artificial Sequence
  Description of Artificial Sequence: Synthetic oligonucleotide
accaauuuucuacguuccu

SEQ ID NO: 1442763 - RNA, 19 nt, Artificial Sequence
  Description of Artificial Sequence: Synthetic oligonucleotide
guuaucagcauugaaccgu

SEQ ID NO: 1442764 - RNA, 19 nt, Artificial Sequence
  Description of Artificial Sequence: Synthetic oligonucleotide
uuagccggcacuucauauu

SEQ ID NO: 1442765 - RNA, 19 nt, Artificial Sequence
  Description of Artificial Sequence: Synthetic oligonucleotide
ugccugacaguuugagaca

SEQ ID NO: 1442766 - RNA, 19 nt, Artificial Sequence
  Description of Artificial Sequence: Synthetic oligonucleotide
ccaguuaggaaguguagac

SEQ ID NO: 1442767 - RNA, 19 nt, Artificial Sequence
  Description of Artificial Sequence: Synthetic oligonucleotide
guaucuugaauaucccugu

SEQ ID NO: 1442768 - RNA, 19 nt, Artificial Sequence
  Description of Artificial Sequence: Synthetic oligonucleotide
agccauuucgcuccgcuuu

SEQ ID NO: 1442769 - RNA, 19 nt, Artificial Sequence
  Description of Artificial Sequence: Synthetic oligonucleotide
aaugcacugaacagucuuu

SEQ ID NO: 1442770 - RNA, 19 nt, Artificial Sequence
  Description of Artificial Sequence: Synthetic oligonucleotide
ggugaagcauauguaaaac

SEQ ID NO: 1442771 - RNA, 19 nt, Artificial Sequence
  Description of Artificial Sequence: Synthetic oligonucleotide
cuuagaauucugccugaca

SEQ ID NO: 1442772 - RNA, 19 nt, Artificial Sequence
  Description of Artificial Sequence: Synthetic oligonucleotide
ccaaaauguaaagugaaca

SEQ ID NO: 1442773 - RNA, 19 nt, Artificial Sequence
  Description of Artificial Sequence: Synthetic oligonucleotide
aucuaugagaucacuucga

SEQ ID NO: 1442774 - RNA, 19 nt, Artificial Sequence
  Description of Artificial Sequence: Synthetic oligonucleotide
ugguaccaccucaucacuc

SEQ ID NO: 1442775 - RNA, 19 nt, Artificial Sequence
  Description of Artificial Sequence: Synthetic oligonucleotide
cuccgcuuuaaaacaaaca

SEQ ID NO: 1442776 - RNA, 19 nt, Artificial Sequence
  Description of Artificial Sequence: Synthetic oligonucleotide
uaguaguggaagagcuuuc

SEQ ID NO: 1442777 - RNA, 19 nt, Artificial Sequence
  Description of Artificial Sequence: Synthetic oligonucleotide
gacuuagaauucugccuga

SEQ ID NO: 1442778 - RNA, 19 nt, Artificial Sequence
  Description of Artificial Sequence: Synthetic oligonucleotide
cugauuagccggcacuuca

SEQ ID NO: 1442779 - RNA, 19 nt, Artificial Sequence
  Description of Artificial Sequence: Synthetic oligonucleotide
gagacaaccuaucuuuaau

SEQ ID NO: 1442780 - RNA, 19 nt, Artificial Sequence
  Description of Artificial Sequence: Synthetic oligonucleotide
uuucuacguuccugccggg

SEQ ID NO: 1442781 - RNA, 19 nt, Artificial Sequence
  Description of Artificial Sequence: Synthetic oligonucleotide
gaauucagccauccaguua

SEQ ID NO: 1442782 - RNA, 19 nt, Artificial Sequence
  Description of Artificial Sequence: Synthetic oligonucleotide
gaacaaucuagacgucaaa

SEQ ID NO: 1442783 - RNA, 19 nt, Artificial Sequence
  Description of Artificial Sequence: Synthetic oligonucleotide
gcuaccagaauggauauaa

SEQ ID NO: 1442784 - RNA, 19 nt, Artificial Sequence
  Description of Artificial Sequence: Synthetic oligonucleotide
uucucgcuuaggagggacu

SEQ ID NO: 1442785 - RNA, 19 nt, Artificial Sequence
  Description of Artificial Sequence: Synthetic oligonucleotide
aguaacaacucuaggucuu

SEQ ID NO: 1442786 - RNA, 19 nt, Artificial Sequence
  Description of Artificial Sequence: Synthetic oligonucleotide
aucugcuaaaaugccauua

SEQ ID NO: 1442787 - RNA, 19 nt, Artificial Sequence
  Description of Artificial Sequence: Synthetic oligonucleotide
gauugacuuaacccagacu

SEQ ID NO: 1442788 - RNA, 19 nt, Artificial Sequence
  Description of Artificial Sequence: Synthetic oligonucleotide
uucuuaauccuguguccuu

SEQ ID NO: 1442789 - RNA, 19 nt, Artificial Sequence
  Description of Artificial Sequence: Synthetic oligonucleotide
auccaguuaggaaguguag

SEQ ID NO: 1442790 - RNA, 19 nt, Artificial Sequence
  Description of Artificial Sequence: Synthetic oligonucleotide
augucaaaccaagacucaa

SEQ ID NO: 1442791 - RNA, 19 nt, Artificial Sequence
  Description of Artificial Sequence: Synthetic oligonucleotide
agugaacaaucuagacguc

SEQ ID NO: 1442792 - RNA, 19 nt, Artificial Sequence
  Description of Artificial Sequence: Synthetic oligonucleotide
acaauacuaguuacauuau

SEQ ID NO: 1442793 - RNA, 19 nt, Artificial Sequence
  Description of Artificial Sequence: Synthetic oligonucleotide
uauggaugauaagcuuuuc

SEQ ID NO: 1442794 - RNA, 19 nt, Artificial Sequence
  Description of Artificial Sequence: Synthetic oligonucleotide
agccaguagguaagcuacc

SEQ ID NO: 1442795 - RNA, 19 nt, Artificial Sequence
  Description of Artificial Sequence: Synthetic oligonucleotide
caauacuaguuacauuaua

SEQ ID NO: 1442796 - RNA, 19 nt, Artificial Sequence
  Description of Artificial Sequence: Synthetic oligonucleotide
accuaucuuuaaucauacu

SEQ ID NO: 1442797 - RNA, 19 nt, Artificial Sequence
  Description of Artificial Sequence: Synthetic oligonucleotide
ucgcuccgcuuuaaaacaa

SEQ ID NO: 1442798 - RNA, 19 nt, Artificial Sequence
  Description of Artificial Sequence: Synthetic oligonucleotide
cuacguuccugccggguuc

SEQ ID NO: 1442799 - RNA, 19 nt, Artificial Sequence
  Description of Artificial Sequence: Synthetic oligonucleotide
gcauugaaccguuuuaacu

SEQ ID NO: 1442800 - RNA, 19 nt, Artificial Sequence
  Description of Artificial Sequence: Synthetic oligonucleotide
aagccauuucgcuccgcuu

SEQ ID NO: 1442801 - RNA, 19 nt, Artificial Sequence
  Description of Artificial Sequence: Synthetic oligonucleotide
guuugagacaaccuaucuu

SEQ ID NO: 1442802 - RNA, 19 nt, Artificial Sequence
  Description of Artificial Sequence: Synthetic oligonucleotide
gugauuaccacaggaugaa

SEQ ID NO: 1442803 - RNA, 19 nt, Artificial Sequence
  Description of Artificial Sequence: Synthetic oligonucleotide
aggaucuaagaaauucuua

SEQ ID NO: 1442804 - RNA, 19 nt, Artificial Sequence
  Description of Artificial Sequence: Synthetic oligonucleotide
gguacuccccucugaauca

SEQ ID NO: 1442805 - RNA, 19 nt, Artificial Sequence
  Description of Artificial Sequence: Synthetic oligonucleotide
cuagacgucaaagccagua

SEQ ID NO: 1442806 - RNA, 19 nt, Artificial Sequence
  Description of Artificial Sequence: Synthetic oligonucleotide
acccagacugaccaccuuu

SEQ ID NO: 1442807 - RNA, 19 nt, Artificial Sequence
  Description of Artificial Sequence: Synthetic oligonucleotide
gauuagccggcacuucaua

SEQ ID NO: 1442808 - RNA, 19 nt, Artificial Sequence
  Description of Artificial Sequence: Synthetic oligonucleotide
ggucagguuguccauuaca

SEQ ID NO: 1442809 - RNA, 19 nt, Artificial Sequence
  Description of Artificial Sequence: Synthetic oligonucleotide
gacagacuagugaugucaa

SEQ ID NO: 1442810 - RNA, 19 nt, Artificial Sequence
  Description of Artificial Sequence: Synthetic oligonucleotide
gacgucaaagccaguaggu

SEQ ID NO: 1442811 - RNA, 19 nt, Artificial Sequence
  Description of Artificial Sequence: Synthetic oligonucleotide
gcaauuguagcaaugcacu

SEQ ID NO: 1442812 - RNA, 19 nt, Artificial Sequence
  Description of Artificial Sequence: Synthetic oligonucleotide
gaagcauauguaaaacguu

SEQ ID NO: 1442813 - RNA, 19 nt, Artificial Sequence
  Description of Artificial Sequence: Synthetic oligonucleotide
guuccaugauuacaacaua

SEQ ID NO: 1442814 - RNA, 19 nt, Artificial Sequence
  Description of Artificial Sequence: Synthetic oligonucleotide
auuaguaguggaagagcuu

SEQ ID NO: 1442815 - RNA, 19 nt, Artificial Sequence
  Description of Artificial Sequence: Synthetic oligonucleotide
agcaaugaccaaaguucug

SEQ ID NO: 1442816 - RNA, 19 nt, Artificial Sequence
  Description of Artificial Sequence: Synthetic oligonucleotide
acuccccucugaaucauca

SEQ ID NO: 1442817 - RNA, 19 nt, Artificial Sequence
  Description of Artificial Sequence: Synthetic oligonucleotide
uacguuccugccggguucc

SEQ ID NO: 1442818 - RNA, 19 nt, Artificial Sequence
  Description of Artificial Sequence: Synthetic oligonucleotide
gguuccaugauuacaacau

SEQ ID NO: 1442819 - RNA, 19 nt, Artificial Sequence
  Description of Artificial Sequence: Synthetic oligonucleotide
ugaccaccuuugaaaugau

SEQ ID NO: 1442820 - RNA, 19 nt, Artificial Sequence
  Description of Artificial Sequence: Synthetic oligonucleotide
ggaguaccagucaaaagaa

SEQ ID NO: 1442821 - RNA, 19 nt, Artificial Sequence
  Description of Artificial Sequence: Synthetic oligonucleotide
ugauuaccacaggaugaau

SEQ ID NO: 1442822 - RNA, 19 nt, Artificial Sequence
  Description of Artificial Sequence: Synthetic oligonucleotide
ucuagacgucaaagccagu

SEQ ID NO: 1442823 - RNA, 19 nt, Artificial Sequence
  Description of Artificial Sequence: Synthetic oligonucleotide
caagggaguaccagucaaa

SEQ ID NO: 1442824 - RNA, 19 nt, Artificial Sequence
  Description of Artificial Sequence: Synthetic oligonucleotide
guucucgcuuaggagggac

SEQ ID NO: 1442825 - RNA, 19 nt, Artificial Sequence
  Description of Artificial Sequence: Synthetic oligonucleotide
ccaguagguaagcuaccag

SEQ ID NO: 1442826 - RNA, 19 nt, Artificial Sequence
  Description of Artificial Sequence: Synthetic oligonucleotide
guuaggaaguguagacaaa

SEQ ID NO: 1442827 - RNA, 19 nt, Artificial Sequence
  Description of Artificial Sequence: Synthetic oligonucleotide
acgucaaagccaguaggua

SEQ ID NO: 1442828 - RNA, 19 nt, Artificial Sequence
  Description of Artificial Sequence: Synthetic oligonucleotide
cagucuuucccaaacccau

SEQ ID NO: 1442829 - RNA, 19 nt, Artificial Sequence
  Description of Artificial Sequence: Synthetic oligonucleotide
ccauuacauuuccgaaccg

SEQ ID NO: 1442830 - RNA, 19 nt, Artificial Sequence
  Description of Artificial Sequence: Synthetic oligonucleotide
guagguaagcuaccagaau

SEQ ID NO: 1442831 - RNA, 19 nt, Artificial Sequence
  Description of Artificial Sequence: Synthetic oligonucleotide
aucauacuauugaauccuu

SEQ ID NO: 1442832 - RNA, 19 nt, Artificial Sequence
  Description of Artificial Sequence: Synthetic oligonucleotide
uacuccccucugaaucauc

SEQ ID NO: 1442833 - RNA, 19 nt, Artificial Sequence
  Description of Artificial Sequence: Synthetic oligonucleotide
cuuucguaaucucuagauu

SEQ ID NO: 1442834 - RNA, 19 nt, Artificial Sequence
  Description of Artificial Sequence: Synthetic oligonucleotide
gcaagggaguaccagucaa

SEQ ID NO: 1442835 - RNA, 19 nt, Artificial Sequence
  Description of Artificial Sequence: Synthetic oligonucleotide
caaugcacugaacagucuu

SEQ ID NO: 1442836 - RNA, 19 nt, Artificial Sequence
  Description of Artificial Sequence: Synthetic oligonucleotide
guaccagucaaaagaaguu

SEQ ID NO: 1442837 - RNA, 19 nt, Artificial Sequence
  Description of Artificial Sequence: Synthetic oligonucleotide
cauggcuauuucaaaugau

SEQ ID NO: 1442838 - RNA, 19 nt, Artificial Sequence
  Description of Artificial Sequence: Synthetic oligonucleotide
gguaagcuaccagaaugga

SEQ ID NO: 1442839 - RNA, 19 nt, Artificial Sequence
  Description of Artificial Sequence: Synthetic oligonucleotide
gagaucacuucgaucuagu

SEQ ID NO: 1442840 - RNA, 19 nt, Artificial Sequence
  Description of Artificial Sequence: Synthetic oligonucleotide
acguucuguucucucucuu

SEQ ID NO: 1442841 - RNA, 19 nt, Artificial Sequence
  Description of Artificial Sequence: Synthetic oligonucleotide
ugccggguuccaugauuac

SEQ ID NO: 1442842 - RNA, 19 nt, Artificial Sequence
  Description of Artificial Sequence: Synthetic oligonucleotide
cugccggguuccaugauua

SEQ ID NO: 1442843 - RNA, 19 nt, Artificial Sequence
  Description of Artificial Sequence: Synthetic oligonucleotide
guaagcuaccagaauggau

SEQ ID NO: 1442844 - RNA, 19 nt, Artificial Sequence
  Description of Artificial Sequence: Synthetic oligonucleotide
ccggguuccaugauuacaa

SEQ ID NO: 1442845 - RNA, 19 nt, Artificial Sequence
  Description of Artificial Sequence: Synthetic oligonucleotide
cgaucuaguaacaacucua

SEQ ID NO: 1442846 - RNA, 19 nt, Artificial Sequence
  Description of Artificial Sequence: Synthetic oligonucleotide
guaaaacguucuguucucu

SEQ ID NO: 1442847 - RNA, 19 nt, Artificial Sequence
  Description of Artificial Sequence: Synthetic oligonucleotide
ccuuucguaaucucuagau

SEQ ID NO: 1442848 - RNA, 19 nt, Artificial Sequence
  Description of Artificial Sequence: Synthetic oligonucleotide
ggucucucauggcuauuuc

SEQ ID NO: 1442849 - RNA, 19 nt, Artificial Sequence
  Description of Artificial Sequence: Synthetic oligonucleotide
ccacaggaugaaucugcag

SEQ ID NO: 1442850 - RNA, 19 nt, Artificial Sequence
  Description of Artificial Sequence: Synthetic oligonucleotide
cucgcuuaggagggacuuc

SEQ ID NO: 1442851 - RNA, 19 nt, Artificial Sequence
  Description of Artificial Sequence: Synthetic oligonucleotide
agccacuccaugccuucua

SEQ ID NO: 1442852 - RNA, 19 nt, Artificial Sequence
  Description of Artificial Sequence: Synthetic oligonucleotide
gcuccgcuuuaaaacaaac

SEQ ID NO: 1442853 - RNA, 19 nt, Artificial Sequence
  Description of Artificial Sequence: Synthetic oligonucleotide
cauuucgcuccgcuuuaaa

SEQ ID NO: 1442854 - RNA, 19 nt, Artificial Sequence
  Description of Artificial Sequence: Synthetic oligonucleotide
aguucucgcuuaggaggga

SEQ ID NO: 1442855 - RNA, 19 nt, Artificial Sequence
  Description of Artificial Sequence: Synthetic oligonucleotide
cuacuugguaccaccucau

SEQ ID NO: 1442856 - RNA, 19 nt, Artificial Sequence
  Description of Artificial Sequence: Synthetic oligonucleotide
gccaguagguaagcuacca

SEQ ID NO: 1442857 - RNA, 19 nt, Artificial Sequence
  Description of Artificial Sequence: Synthetic oligonucleotide
acucccugauuagccggca

SEQ ID NO: 1442858 - RNA, 19 nt, Artificial Sequence
  Description of Artificial Sequence: Synthetic oligonucleotide
guaccaccucaucacuccu

SEQ ID NO: 1442859 - RNA, 19 nt, Artificial Sequence
  Description of Artificial Sequence: Synthetic oligonucleotide
ccagucaaaagaaguuugu

SEQ ID NO: 1442860 - RNA, 19 nt, Artificial Sequence
  Description of Artificial Sequence: Synthetic oligonucleotide
ccugacaguuugagacaac

SEQ ID NO: 1442861 - RNA, 19 nt, Artificial Sequence
  Description of Artificial Sequence: Synthetic oligonucleotide
cugaaucaucaaugcaauu

SEQ ID NO: 1442862 - RNA, 19 nt, Artificial Sequence
  Description of Artificial Sequence: Synthetic oligonucleotide
agcuaccagaauggauaua

SEQ ID NO: 1442863 - RNA, 19 nt, Artificial Sequence
  Description of Artificial Sequence: Synthetic oligonucleotide
gccugacaguuugagacaa

SEQ ID NO: 1442864 - RNA, 19 nt, Artificial Sequence
  Description of Artificial Sequence: Synthetic oligonucleotide
cccuuucguaaucucuaga

SEQ ID NO: 1442865 - RNA, 19 nt, Artificial Sequence
  Description of Artificial Sequence: Synthetic oligonucleotide
ccgcuuuaaaacaaacauu

SEQ ID NO: 1442866 - RNA, 19 nt, Artificial Sequence
  Description of Artificial Sequence: Synthetic oligonucleotide
ccugauuagccggcacuuc

SEQ ID NO: 1442867 - RNA, 19 nt, Artificial Sequence
  Description of Artificial Sequence: Synthetic oligonucleotide
cauuuccgaaccggaucaa

SEQ ID NO: 1442868 - RNA, 19 nt, Artificial Sequence
  Description of Artificial Sequence: Synthetic oligonucleotide
caucugcuaaaaugccauu

SEQ ID NO: 1442869 - RNA, 19 nt, Artificial Sequence
  Description of Artificial Sequence: Synthetic oligonucleotide
gccauuucgcuccgcuuua

SEQ ID NO: 1442870 - RNA, 19 nt, Artificial Sequence
  Description of Artificial Sequence: Synthetic oligonucleotide
ccuuaccaauuuucuacgu

SEQ ID NO: 1442871 - RNA, 19 nt, Artificial Sequence
  Description of Artificial Sequence: Synthetic oligonucleotide
gccggcacuucauauucuu

SEQ ID NO: 1442872 - RNA, 19 nt, Artificial Sequence
  Description of Artificial Sequence: Synthetic oligonucleotide
acguuccugccggguucca

SEQ ID NO: 1442873 - RNA, 19 nt, Artificial Sequence
  Description of Artificial Sequence: Synthetic oligonucleotide
ccggcacuucauauucuua

SEQ ID NO: 1442874 - RNA, 19 nt, Artificial Sequence
  Description of Artificial Sequence: Synthetic oligonucleotide
cgcuccgcuuuaaaacaaa

SEQ ID NO: 1442875 - RNA, 19 nt, Artificial Sequence
  Description of Artificial Sequence: Synthetic oligonucleotide
ccguuuuaacucccugauu

SEQ ID NO: 1442876 - RNA, 19 nt, Artificial Sequence
  Description of Artificial Sequence: Synthetic oligonucleotide
ccauuucgcuccgcuuuaa

SEQ ID NO: 1442877 - RNA, 19 nt, Artificial Sequence
  Description of Artificial Sequence: Synthetic oligonucleotide
cguuccugccggguuccau

SEQ ID NO: 1442878 - RNA, 19 nt, Artificial Sequence
  Description of Artificial Sequence: Synthetic oligonucleotide
aaaauuaggucuguuaggc

SEQ ID NO: 1442879 - RNA, 19 nt, Artificial Sequence
  Description of Artificial Sequence: Synthetic oligonucleotide
uucauuaaaguauacaugu

SEQ ID NO: 1442880 - RNA, 19 nt, Artificial Sequence
  Description of Artificial Sequence: Synthetic oligonucleotide
aaggguuuaagaaauuucc

SEQ ID NO: 1442881 - RNA, 19 nt, Artificial Sequence
  Description of Artificial Sequence: Synthetic oligonucleotide
  modified_base (4)..(4): a, c, u, g, unknown or other
aaanguuugggcugauuuc

SEQ ID NO: 1442882 - RNA, 19 nt, Artificial Sequence
  Description of Artificial Sequence: Synthetic oligonucleotide
aagaauguaagaauccugg

SEQ ID NO: 1442883 - RNA, 19 nt, Artificial Sequence
  Description of Artificial Sequence: Synthetic oligonucleotide
gugauaauaucuuacaaug

SEQ ID NO: 1442884 - RNA, 19 nt, Artificial Sequence
  Description of Artificial Sequence: Synthetic oligonucleotide
uuugaaucacauuuggacc

SEQ ID NO: 1442885 - RNA, 19 nt, Artificial Sequence
  Description of Artificial Sequence: Synthetic oligonucleotide
ucuuacaauguccuguggg

SEQ ID NO: 1442886 - RNA, 19 nt, Artificial Sequence
  Description of Artificial Sequence: Synthetic oligonucleotide
accgaggugacauaaaagg

SEQ ID NO: 1442887 - RNA, 19 nt, Artificial Sequence
  Description of Artificial Sequence: Synthetic oligonucleotide
  modified_base (5)..(5): a, c, u, g, unknown or other
aaaanguuugggcugauuu

SEQ ID NO: 1442888 - RNA, 19 nt, Artificial Sequence
  Description of Artificial Sequence: Synthetic oligonucleotide
uauaugugcauauggaucu

SEQ ID NO: 1442889 - RNA, 19 nt, Artificial Sequence
  Description of Artificial Sequence: Synthetic oligonucleotide
auaauaucuuacaaugucc

SEQ ID NO: 1442890 - RNA, 19 nt, Artificial Sequence
  Description of Artificial Sequence: Synthetic oligonucleotide
aaauuaggucuguuaggcc

SEQ ID NO: 1442891 - RNA, 19 nt, Artificial Sequence
  Description of Artificial Sequence: Synthetic oligonucleotide
gaaaauuaggucuguuagg

SEQ ID NO: 1442892 - RNA, 19 nt, Artificial Sequence
  Description of Artificial Sequence: Synthetic oligonucleotide
guuugaaucacauuuggac

SEQ ID NO: 1442893 - RNA, 19 nt, Artificial Sequence
  Description of Artificial Sequence: Synthetic oligonucleotide
uuucuucacaaaauagggg

SEQ ID NO: 1442894 - RNA, 19 nt, Artificial Sequence
  Description of Artificial Sequence: Synthetic oligonucleotide
ugcguauaugugcauaugg

SEQ ID NO: 1442895 - RNA, 19 nt, Artificial Sequence
  Description of Artificial Sequence: Synthetic oligonucleotide
ucucauugcaccuccauag

SEQ ID NO: 1442896 - RNA, 19 nt, Artificial Sequence
  Description of Artificial Sequence: Synthetic oligonucleotide
cagauauucauacacguag

SEQ ID NO: 1442897 - RNA, 19 nt, Artificial Sequence
  Description of Artificial Sequence: Synthetic oligonucleotide
uauggaucugcauauacga

SEQ ID NO: 1442898 - RNA, 19 nt, Artificial Sequence
  Description of Artificial Sequence: Synthetic oligonucleotide
aaaagucccuacuuacuuc

SEQ ID NO: 1442899 - RNA, 19 nt, Artificial Sequence
  Description of Artificial Sequence: Synthetic oligonucleotide
uaauaucuuacaauguccu

SEQ ID NO: 1442900 - RNA, 19 nt, Artificial Sequence
  Description of Artificial Sequence: Synthetic oligonucleotide
auugcaggcauuccggggc

SEQ ID NO: 1442901 - RNA, 19 nt, Artificial Sequence
  Description of Artificial Sequence: Synthetic oligonucleotide
auacgauacauucucguuc

SEQ ID NO: 1442902 - RNA, 19 nt, Artificial Sequence
  Description of Artificial Sequence: Synthetic oligonucleotide
auuagguauccucaguggg

SEQ ID NO: 1442903 - RNA, 19 nt, Artificial Sequence
  Description of Artificial Sequence: Synthetic oligonucleotide
ugauuagguauccucagug

SEQ ID NO: 1442904 - RNA, 19 nt, Artificial Sequence
  Description of Artificial Sequence: Synthetic oligonucleotide
uuuuagggcaauucuaaug

SEQ ID NO: 1442905 - RNA, 19 nt, Artificial Sequence
  Description of Artificial Sequence: Synthetic oligonucleotide
ucuacuuaagaugucaugu

SEQ ID NO: 1442906 - RNA, 19 nt, Artificial Sequence
  Description of Artificial Sequence: Synthetic oligonucleotide
uuagguauccucagugggg

SEQ ID NO: 1442907 - RNA, 19 nt, Artificial Sequence
  Description of Artificial Sequence: Synthetic oligonucleotide
agaauguaagaauccuggc

SEQ ID NO: 1442908 - RNA, 19 nt, Artificial Sequence
  Description of Artificial Sequence: Synthetic oligonucleotide
gauuagguauccucagugg

SEQ ID NO: 1442909 - RNA, 19 nt, Artificial Sequence
  Description of Artificial Sequence: Synthetic oligonucleotide
aaggauaaucauggaaggc

SEQ ID NO: 1442910 - RNA, 19 nt, Artificial Sequence
  Description of Artificial Sequence: Synthetic oligonucleotide
uacacagaugauuauuugc

SEQ ID NO: 1442911 - RNA, 19 nt, Artificial Sequence
  Description of Artificial Sequence: Synthetic oligonucleotide
uccuaauccacccauggga

SEQ ID NO: 1442912 - RNA, 19 nt, Artificial Sequence
  Description of Artificial Sequence: Synthetic oligonucleotide
ugcaguucauuuuagggca

SEQ ID NO: 1442913 - RNA, 19 nt, Artificial Sequence
  Description of Artificial Sequence: Synthetic oligonucleotide
uaauggaucacacacucau

SEQ ID NO: 1442914 - RNA, 19 nt, Artificial Sequence
  Description of Artificial Sequence: Synthetic oligonucleotide
uccuacauggagcagauau

SEQ ID NO: 1442915 - RNA, 19 nt, Artificial Sequence
  Description of Artificial Sequence: Synthetic oligonucleotide
auauucauacacguagagc

SEQ ID NO: 1442916 - RNA, 19 nt, Artificial Sequence
  Description of Artificial Sequence: Synthetic oligonucleotide
aguagagaucccaaaauac

SEQ ID NO: 1442917 - RNA, 19 nt, Artificial Sequence
  Description of Artificial Sequence: Synthetic oligonucleotide
guuacucuugccuuugccg

SEQ ID NO: 1442918 - RNA, 19 nt, Artificial Sequence
  Description of Artificial Sequence: Synthetic oligonucleotide
ucaugugauaauaucuuac

SEQ ID NO: 1442919 - RNA, 19 nt, Artificial Sequence
  Description of Artificial Sequence: Synthetic oligonucleotide
uugcaguucauuuuagggc

SEQ ID NO: 1442920 - RNA, 19 nt, Artificial Sequence
  Description of Artificial Sequence: Synthetic oligonucleotide
  modified_base (3)..(3): a, c, u, g, unknown or other
aanguuugggcugauuucu

SEQ ID NO: 1442921 - RNA, 19 nt, Artificial Sequence
  Description of Artificial Sequence: Synthetic oligonucleotide
ucaggcucauauuauuggg

SEQ ID NO: 1442922 - RNA, 19 nt, Artificial Sequence
  Description of Artificial Sequence: Synthetic oligonucleotide
ugaguguucacauguuucc

SEQ ID NO: 1442923 - RNA, 19 nt, Artificial Sequence
  Description of Artificial Sequence: Synthetic oligonucleotide
gucuguuaggcccaggagg

SEQ ID NO: 1442924 - RNA, 19 nt, Artificial Sequence
  Description of Artificial Sequence: Synthetic oligonucleotide
uacgauacauucucguucc

SEQ ID NO: 1442925 - RNA, 19 nt, Artificial Sequence
  Description of Artificial Sequence: Synthetic oligonucleotide
cauauuauugggagaauuc

SEQ ID NO: 1442926 - RNA, 19 nt, Artificial Sequence
  Description of Artificial Sequence: Synthetic oligonucleotide
cugcauauacgauacauuc

SEQ ID NO: 1442927 - RNA, 19 nt, Artificial Sequence
  Description of Artificial Sequence: Synthetic oligonucleotide
uauuuggauguccuuguug

SEQ ID NO: 1442928 - RNA, 19 nt, Artificial Sequence
  Description of Artificial Sequence: Synthetic oligonucleotide
cugucaacccaucacagcc

SEQ ID NO: 1442929 - RNA, 19 nt, Artificial Sequence
  Description of Artificial Sequence: Synthetic oligonucleotide
uccuggaggaccuacauaa

SEQ ID NO: 1442930 - RNA, 19 nt, Artificial Sequence
  Description of Artificial Sequence: Synthetic oligonucleotide
acuuacuucuacuuaagau

SEQ ID NO: 1442931 - RNA, 19 nt, Artificial Sequence
  Description of Artificial Sequence: Synthetic oligonucleotide
uucauaaggagacuuggua

SEQ ID NO: 1442932 - RNA, 19 nt, Artificial Sequence
  Description of Artificial Sequence: Synthetic oligonucleotide
uagggcaauucuaaugugc

SEQ ID NO: 1442933 - RNA, 19 nt, Artificial Sequence
  Description of Artificial Sequence: Synthetic oligonucleotide
uaucuuacaauguccugug

SEQ ID NO: 1442934 - RNA, 19 nt, Artificial Sequence
  Description of Artificial Sequence: Synthetic oligonucleotide
ucuguuaggcccaggaggu

SEQ ID NO: 1442935 - RNA, 19 nt, Artificial Sequence
  Description of Artificial Sequence: Synthetic oligonucleotide
auguaagaauccuggcggc

SEQ ID NO: 1442936 - RNA, 19 nt, Artificial Sequence
  Description of Artificial Sequence: Synthetic oligonucleotide
caaaauaggggagagagca

SEQ ID NO: 1442937 - RNA, 19 nt, Artificial Sequence
  Description of Artificial Sequence: Synthetic oligonucleotide
uacgguauugaauuggcau

SEQ ID NO: 1442938 - RNA, 19 nt, Artificial Sequence
  Description of Artificial Sequence: Synthetic oligonucleotide
uguccugugggucaaugca

SEQ ID NO: 1442939 - RNA, 19 nt, Artificial Sequence
  Description of Artificial Sequence: Synthetic oligonucleotide
acauaaaaggauaaucaug

SEQ ID NO: 1442940 - RNA, 19 nt, Artificial Sequence
  Description of Artificial Sequence: Synthetic oligonucleotide
uucucguucccacacauau

SEQ ID NO: 1442941 - RNA, 19 nt, Artificial Sequence
  Description of Artificial Sequence: Synthetic oligonucleotide
auauacgauacauucucgu

SEQ ID NO: 1442942 - RNA, 19 nt, Artificial Sequence
  Description of Artificial Sequence: Synthetic oligonucleotide
ucaacuguacacugaugag

SEQ ID NO: 1442943 - RNA, 19 nt, Artificial Sequence
  Description of Artificial Sequence: Synthetic oligonucleotide
acugcauucauuaaaguau

SEQ ID NO: 1442944 - RNA, 19 nt, Artificial Sequence
  Description of Artificial Sequence: Synthetic oligonucleotide
cauauacgauacauucucg

SEQ ID NO: 1442945 - RNA, 19 nt, Artificial Sequence
  Description of Artificial Sequence: Synthetic oligonucleotide
auaucuuacaauguccugu

SEQ ID NO: 1442946 - RNA, 19 nt, Artificial Sequence
  Description of Artificial Sequence: Synthetic oligonucleotide
cucguucccacacauauac

SEQ ID NO: 1442947 - RNA, 19 nt, Artificial Sequence
  Description of Artificial Sequence: Synthetic oligonucleotide
ugcauauacgauacauucu

SEQ ID NO: 1442948 - RNA, 19 nt, Artificial Sequence
  Description of Artificial Sequence: Synthetic oligonucleotide
aguacgguauugaauuggc

SEQ ID NO: 1442949 - RNA, 19 nt, Artificial Sequence
  Description of Artificial Sequence: Synthetic oligonucleotide
aggcucauauuauugggag

SEQ ID NO: 1442950 - RNA, 19 nt, Artificial Sequence
  Description of Artificial Sequence: Synthetic oligonucleotide
augugaugggacuccauuc

SEQ ID NO: 1442951 - RNA, 19 nt, Artificial Sequence
  Description of Artificial Sequence: Synthetic oligonucleotide
ugucaugugauaauaucuu

SEQ ID NO: 1442952 - RNA, 19 nt, Artificial Sequence
  Description of Artificial Sequence: Synthetic oligonucleotide
uacugcauucauuaaagua

SEQ ID NO: 1442953 - RNA, 19 nt, Artificial Sequence
  Description of Artificial Sequence: Synthetic oligonucleotide
aagggccgacuccugaugg

SEQ ID NO: 1442954 - RNA, 19 nt, Artificial Sequence
  Description of Artificial Sequence: Synthetic oligonucleotide
gaugggacuccauuccucc

SEQ ID NO: 1442955 - RNA, 19 nt, Artificial Sequence
  Description of Artificial Sequence: Synthetic oligonucleotide
aggauaaucauggaaggcu

SEQ ID NO: 1442956 - RNA, 19 nt, Artificial Sequence
  Description of Artificial Sequence: Synthetic oligonucleotide
auauuauugggagaauucu

SEQ ID NO: 1442957 - RNA, 19 nt, Artificial Sequence
  Description of Artificial Sequence: Synthetic oligonucleotide
uucuacuuaagaugucaug

SEQ ID NO: 1442958 - RNA, 19 nt, Artificial Sequence
  Description of Artificial Sequence: Synthetic oligonucleotide
uucacaaaauaggggagag

SEQ ID NO: 1442959 - RNA, 19 nt, Artificial Sequence
  Description of Artificial Sequence: Synthetic oligonucleotide
auauggaucugcauauacg

SEQ ID NO: 1442960 - RNA, 19 nt, Artificial Sequence
  Description of Artificial Sequence: Synthetic oligonucleotide
ugugggucaaugcauguau

SEQ ID NO: 1442961 - RNA, 19 nt, Artificial Sequence
  Description of Artificial Sequence: Synthetic oligonucleotide
gagacuugguaauggauca

SEQ ID NO: 1442962 - RNA, 19 nt, Artificial Sequence
  Description of Artificial Sequence: Synthetic oligonucleotide
uccguaguaguucugugaa

SEQ ID NO: 1442963 - RNA, 19 nt, Artificial Sequence
  Description of Artificial Sequence: Synthetic oligonucleotide
uugggcugauuucugagcu

SEQ ID NO: 1442964 - RNA, 19 nt, Artificial Sequence
  Description of Artificial Sequence: Synthetic oligonucleotide
ugggucaaugcauguaugc

SEQ ID NO: 1442965 - RNA, 19 nt, Artificial Sequence
  Description of Artificial Sequence: Synthetic oligonucleotide
guuggguccauuccacugg

SEQ ID NO: 1442966 - RNA, 19 nt, Artificial Sequence
  Description of Artificial Sequence: Synthetic oligonucleotide
uuuggacccgcuuucuuca

SEQ ID NO: 1442967 - RNA, 19 nt, Artificial Sequence
  Description of Artificial Sequence: Synthetic oligonucleotide
uuugggcugauuucugagc

SEQ ID NO: 1442968 - RNA, 19 nt, Artificial Sequence
  Description of Artificial Sequence: Synthetic oligonucleotide
gaguacgguauugaauugg

SEQ ID NO: 1442969 - RNA, 19 nt, Artificial Sequence
  Description of Artificial Sequence: Synthetic oligonucleotide
uaccgaggugacauaaaag

SEQ ID NO: 1442970 - RNA, 19 nt, Artificial Sequence
  Description of Artificial Sequence: Synthetic oligonucleotide
uagagcgcuaacuucuccc

SEQ ID NO: 1442971 - RNA, 19 nt, Artificial Sequence
  Description of Artificial Sequence: Synthetic oligonucleotide
auacacagaugauuauuug

SEQ ID NO: 1442972 - RNA, 19 nt, Artificial Sequence
  Description of Artificial Sequence: Synthetic oligonucleotide
agagcgcuaacuucucccg

SEQ ID NO: 1442973 - RNA, 19 nt, Artificial Sequence
  Description of Artificial Sequence: Synthetic oligonucleotide
gaauaaaagucccuacuua

SEQ ID NO: 1442974 - RNA, 19 nt, Artificial Sequence
  Description of Artificial Sequence: Synthetic oligonucleotide
cuacuuaagaugucaugug

SEQ ID NO: 1442975 - RNA, 19 nt, Artificial Sequence
  Description of Artificial Sequence: Synthetic oligonucleotide
guuacucaggcucauauua

SEQ ID NO: 1442976 - RNA, 19 nt, Artificial Sequence
  Description of Artificial Sequence: Synthetic oligonucleotide
uguuggguccauuccacug

SEQ ID NO: 1442977 - RNA, 19 nt, Artificial Sequence
  Description of Artificial Sequence: Synthetic oligonucleotide
caugugauaauaucuuaca

SEQ ID NO: 1442978 - RNA, 19 nt, Artificial Sequence
  Description of Artificial Sequence: Synthetic oligonucleotide
auucauacacguagagcgc

SEQ ID NO: 1442979 - RNA, 19 nt, Artificial Sequence
  Description of Artificial Sequence: Synthetic oligonucleotide
uacuuacuucuacuuaaga

SEQ ID NO: 1442980 - RNA, 19 nt, Artificial Sequence
  Description of Artificial Sequence: Synthetic oligonucleotide
ugccguacaugcuugugcc

SEQ ID NO: 1442981 - RNA, 19 nt, Artificial Sequence
  Description of Artificial Sequence: Synthetic oligonucleotide
uaugcguauaugugcauau

SEQ ID NO: 1442982 - RNA, 19 nt, Artificial Sequence
  Description of Artificial Sequence: Synthetic oligonucleotide
guauaugugcauauggauc

SEQ ID NO: 1442983 - RNA, 19 nt, Artificial Sequence
  Description of Artificial Sequence: Synthetic oligonucleotide
gguacugcauucauuaaag

SEQ ID NO: 1442984 - RNA, 19 nt, Artificial Sequence
  Description of Artificial Sequence: Synthetic oligonucleotide
ggaguaauggcugacuucc

SEQ ID NO: 1442985 - RNA, 19 nt, Artificial Sequence
  Description of Artificial Sequence: Synthetic oligonucleotide
acaaaauaggggagagagc

SEQ ID NO: 1442986 - RNA, 19 nt, Artificial Sequence
  Description of Artificial Sequence: Synthetic oligonucleotide
cauugcaccuccauaguuc

SEQ ID NO: 1442987 - RNA, 19 nt, Artificial Sequence
  Description of Artificial Sequence: Synthetic oligonucleotide
uacaugcuugugccgagag

SEQ ID NO: 1442988 - RNA, 19 nt, Artificial Sequence
  Description of Artificial Sequence: Synthetic oligonucleotide
auugcaccuccauaguucu

SEQ ID NO: 1442989 - RNA, 19 nt, Artificial Sequence
  Description of Artificial Sequence: Synthetic oligonucleotide
gagcuaaaggguugguuug

SEQ ID NO: 1442990 - RNA, 19 nt, Artificial Sequence
  Description of Artificial Sequence: Synthetic oligonucleotide
uauacgauacauucucguu

SEQ ID NO: 1442991 - RNA, 19 nt, Artificial Sequence
  Description of Artificial Sequence: Synthetic oligonucleotide
ucugcauauacgauacauu

SEQ ID NO: 1442992 - RNA, 19 nt, Artificial Sequence
  Description of Artificial Sequence: Synthetic oligonucleotide
cuaaagagccauucaugug

SEQ ID NO: 1442993 - RNA, 19 nt, Artificial Sequence
  Description of Artificial Sequence: Synthetic oligonucleotide
agcgcuaacuucucccggg

SEQ ID NO: 1442994 - RNA, 19 nt, Artificial Sequence
  Description of Artificial Sequence: Synthetic oligonucleotide
uuucuuccguaguaguucu

SEQ ID NO: 1442995 - RNA, 19 nt, Artificial Sequence
  Description of Artificial Sequence: Synthetic oligonucleotide
ucucacucugaaaaggguu

SEQ ID NO: 1442996 - RNA, 19 nt, Artificial Sequence
  Description of Artificial Sequence: Synthetic oligonucleotide
uuccguaguaguucuguga

SEQ ID NO: 1442997 - RNA, 19 nt, Artificial Sequence
  Description of Artificial Sequence: Synthetic oligonucleotide
aguuuucuuccguaguagu

SEQ ID NO: 1442998 - RNA, 19 nt, Artificial Sequence
  Description of Artificial Sequence: Synthetic oligonucleotide
ugccacuccguacaguugu

SEQ ID NO: 1442999 - RNA, 19 nt, Artificial Sequence
  Description of Artificial Sequence: Synthetic oligonucleotide
ugguuacucaggcucauau

SEQ ID NO: 1443000 - RNA, 19 nt, Artificial Sequence
  Description of Artificial Sequence: Synthetic oligonucleotide
cuacuuacuucuacuuaag

SEQ ID NO: 1443001 - RNA, 19 nt, Artificial Sequence
  Description of Artificial Sequence: Synthetic oligonucleotide
cauuuuagggcaauucuaa

SEQ ID NO: 1443002 - RNA, 19 nt, Artificial Sequence
  Description of Artificial Sequence: Synthetic oligonucleotide
agugccugauuagguaucc

SEQ ID NO: 1443003 - RNA, 19 nt, Artificial Sequence
  Description of Artificial Sequence: Synthetic oligonucleotide
gcauauacgauacauucuc

SEQ ID NO: 1443004 - RNA, 19 nt, Artificial Sequence
  Description of Artificial Sequence: Synthetic oligonucleotide
gguaauggaucacacacuc

SEQ ID NO: 1443005 - RNA, 19 nt, Artificial Sequence
  Description of Artificial Sequence: Synthetic oligonucleotide
cuacauggagcagauauuc

SEQ ID NO: 1443006 - RNA, 19 nt, Artificial Sequence
  Description of Artificial Sequence: Synthetic oligonucleotide
ucguguuggguccauucca

SEQ ID NO: 1443007 - RNA, 19 nt, Artificial Sequence
  Description of Artificial Sequence: Synthetic oligonucleotide
aacccaucacagccucccc

SEQ ID NO: 1443008 - RNA, 19 nt, Artificial Sequence
  Description of Artificial Sequence: Synthetic oligonucleotide
aagaugucaugugauaaua

SEQ ID NO: 1443009 - RNA, 19 nt, Artificial Sequence
  Description of Artificial Sequence: Synthetic oligonucleotide
  modified_base (14)..(14): a, c, u, g, unknown or other
caucuuaucucugnuaaaa

SEQ ID NO: 1443010 - RNA, 19 nt, Artificial Sequence
  Description of Artificial Sequence: Synthetic oligonucleotide
uaauccacccaugggacca

SEQ ID NO: 1443011 - RNA, 19 nt, Artificial Sequence
  Description of Artificial Sequence: Synthetic oligonucleotide
uacauggagcagauauuca

SEQ ID NO: 1443012 - RNA, 19 nt, Artificial Sequence
  Description of Artificial Sequence: Synthetic oligonucleotide
uuagggcaauucuaaugug

SEQ ID NO: 1443013 - RNA, 19 nt, Artificial Sequence
  Description of Artificial Sequence: Synthetic oligonucleotide
gcaccauuccucuuggagg

SEQ ID NO: 1443014 - RNA, 19 nt, Artificial Sequence
  Description of Artificial Sequence: Synthetic oligonucleotide
ugguccacccauauuugga

SEQ ID NO: 1443015 - RNA, 19 nt, Artificial Sequence
  Description of Artificial Sequence: Synthetic oligonucleotide
guagagaucccaaaauaca

SEQ ID NO: 1443016 - RNA, 19 nt, Artificial Sequence
  Description of Artificial Sequence: Synthetic oligonucleotide
agccuaaagagccauucau

SEQ ID NO: 1443017 - RNA, 19 nt, Artificial Sequence
  Description of Artificial Sequence: Synthetic oligonucleotide
uacacguagagcgcuaacu

SEQ ID NO: 1443018 - RNA, 19 nt, Artificial Sequence
  Description of Artificial Sequence: Synthetic oligonucleotide
gagcaguuuucuuccguag

SEQ ID NO: 1443019 - RNA, 19 nt, Artificial Sequence
  Description of Artificial Sequence: Synthetic oligonucleotide
caugcuugugccgagagca

SEQ ID NO: 1443020 - RNA, 19 nt, Artificial Sequence
  Description of Artificial Sequence: Synthetic oligonucleotide
ugggagaauucuuggaaau

SEQ ID NO: 1443021 - RNA, 19 nt, Artificial Sequence
  Description of Artificial Sequence: Synthetic oligonucleotide
auguuucccgucucucugg

SEQ ID NO: 1443022 - RNA, 19 nt, Artificial Sequence
  Description of Artificial Sequence: Synthetic oligonucleotide
cuaaugugccacuccguac

SEQ ID NO: 1443023 - RNA, 19 nt, Artificial Sequence
  Description of Artificial Sequence: Synthetic oligonucleotide
uuacucaggcucauauuau

SEQ ID NO: 1443024 - RNA, 19 nt, Artificial Sequence
  Description of Artificial Sequence: Synthetic oligonucleotide
ugugccgagagcagcuccc

SEQ ID NO: 1443025 - RNA, 19 nt, Artificial Sequence
  Description of Artificial Sequence: Synthetic oligonucleotide
ucacgcaccugucaaccca

SEQ ID NO: 1443026 - RNA, 19 nt, Artificial Sequence
  Description of Artificial Sequence: Synthetic oligonucleotide
uucauacacguagagcgcu

SEQ ID NO: 1443027 - RNA, 19 nt, Artificial Sequence
  Description of Artificial Sequence: Synthetic oligonucleotide
gaccuacauaauucccagg

SEQ ID NO: 1443028 - RNA, 19 nt, Artificial Sequence
  Description of Artificial Sequence: Synthetic oligonucleotide
gacuccauuccuccuaauc

SEQ ID NO: 1443029 - RNA, 19 nt, Artificial Sequence
  Description of Artificial Sequence: Synthetic oligonucleotide
ugagccuaaagagccauuc

SEQ ID NO: 1443030 - RNA, 19 nt, Artificial Sequence
  Description of Artificial Sequence: Synthetic oligonucleotide
auaaaagucccuacuuacu

SEQ ID NO: 1443031 - RNA, 19 nt, Artificial Sequence
  Description of Artificial Sequence: Synthetic oligonucleotide
aaggguugguuugguuggc

SEQ ID NO: 1443032 - RNA, 19 nt, Artificial Sequence
  Description of Artificial Sequence: Synthetic oligonucleotide
accgucaucccuuggggug

SEQ ID NO: 1443033 - RNA, 19 nt, Artificial Sequence
  Description of Artificial Sequence: Synthetic oligonucleotide
aucuuacaauguccugugg

SEQ ID NO: 1443034 - RNA, 19 nt, Artificial Sequence
  Description of Artificial Sequence: Synthetic oligonucleotide
accuccaagugccugauua

SEQ ID NO: 1443035 - RNA, 19 nt, Artificial Sequence
  Description of Artificial Sequence: Synthetic oligonucleotide
auacacguagagcgcuaac

SEQ ID NO: 1443036 - RNA, 19 nt, Artificial Sequence
  Description of Artificial Sequence: Synthetic oligonucleotide
cuaauccacccaugggacc

SEQ ID NO: 1443037 - RNA, 19 nt, Artificial Sequence
  Description of Artificial Sequence: Synthetic oligonucleotide
ugucaacccaucacagccu

SEQ ID NO: 1443038 - RNA, 19 nt, Artificial Sequence
  Description of Artificial Sequence: Synthetic oligonucleotide
ggagaauucuuggaaauac

SEQ ID NO: 1443039 - RNA, 19 nt, Artificial Sequence
  Description of Artificial Sequence: Synthetic oligonucleotide
ucuuccguaguaguucugu

SEQ ID NO: 1443040 - RNA, 19 nt, Artificial Sequence
  Description of Artificial Sequence: Synthetic oligonucleotide
ugcuuggggaguaacucuc

SEQ ID NO: 1443041 - RNA, 19 nt, Artificial Sequence
  Description of Artificial Sequence: Synthetic oligonucleotide
ggaggaccuacauaauucc

SEQ ID NO: 1443042 - RNA, 19 nt, Artificial Sequence
  Description of Artificial Sequence: Synthetic oligonucleotide
ugccugauuagguauccuc

SEQ ID NO: 1443043 - RNA, 19 nt, Artificial Sequence
  Description of Artificial Sequence: Synthetic oligonucleotide
aagugccugauuagguauc

SEQ ID NO: 1443044 - RNA, 19 nt, Artificial Sequence
  Description of Artificial Sequence: Synthetic oligonucleotide
ggaauggaauaaaaguccc

SEQ ID NO: 1443045 - RNA, 19 nt, Artificial Sequence
  Description of Artificial Sequence: Synthetic oligonucleotide
acgguauugaauuggcauu

SEQ ID NO: 1443046 - RNA, 19 nt, Artificial Sequence
  Description of Artificial Sequence: Synthetic oligonucleotide
uggccaaggucuaccacca

SEQ ID NO: 1443047 - RNA, 19 nt, Artificial Sequence
  Description of Artificial Sequence: Synthetic oligonucleotide
ugagcaguuuucuuccgua

SEQ ID NO: 1443048 - RNA, 19 nt, Artificial Sequence
  Description of Artificial Sequence: Synthetic oligonucleotide
ggaccuacauaauucccag

SEQ ID NO: 1443049 - RNA, 19 nt, Artificial Sequence
  Description of Artificial Sequence: Synthetic oligonucleotide
cauggucaugcuuggggag

SEQ ID NO: 1443050 - RNA, 19 nt, Artificial Sequence
  Description of Artificial Sequence: Synthetic oligonucleotide
aagaauccuggcggcuccc

SEQ ID NO: 1443051 - RNA, 19 nt, Artificial Sequence
  Description of Artificial Sequence: Synthetic oligonucleotide
cuccuaauccacccauggg

SEQ ID NO: 1443052 - RNA, 19 nt, Artificial Sequence
  Description of Artificial Sequence: Synthetic oligonucleotide
gagagagcaggagcuaaag

SEQ ID NO: 1443053 - RNA, 19 nt, Artificial Sequence
  Description of Artificial Sequence: Synthetic oligonucleotide
uggacccauguucauugca

SEQ ID NO: 1443054 - RNA, 19 nt, Artificial Sequence
  Description of Artificial Sequence: Synthetic oligonucleotide
ugucguguuggguccauuc

SEQ ID NO: 1443055 - RNA, 19 nt, Artificial Sequence
  Description of Artificial Sequence: Synthetic oligonucleotide
uuuggccaaggucuaccac

SEQ ID NO: 1443056 - RNA, 19 nt, Artificial Sequence
  Description of Artificial Sequence: Synthetic oligonucleotide
aggucuguuaggcccagga

SEQ ID NO: 1443057 - RNA, 19 nt, Artificial Sequence
  Description of Artificial Sequence: Synthetic oligonucleotide
ucacuugaguguucacaug

SEQ ID NO: 1443058 - RNA, 19 nt, Artificial Sequence
  Description of Artificial Sequence: Synthetic oligonucleotide
agcuaaaggguugguuugg

SEQ ID NO: 1443059 - RNA, 19 nt, Artificial Sequence
  Description of Artificial Sequence: Synthetic oligonucleotide
uguucauugcaggcauucc

SEQ ID NO: 1443060 - RNA, 19 nt, Artificial Sequence
  Description of Artificial Sequence: Synthetic oligonucleotide
agagaucccaaaauacaca

SEQ ID NO: 1443061 - RNA, 19 nt, Artificial Sequence
  Description of Artificial Sequence: Synthetic oligonucleotide
agauauucauacacguaga

SEQ ID NO: 1443062 - RNA, 19 nt, Artificial Sequence
  Description of Artificial Sequence: Synthetic oligonucleotide
cuccaagugccugauuagg

SEQ ID NO: 1443063 - RNA, 19 nt, Artificial Sequence
  Description of Artificial Sequence: Synthetic oligonucleotide
gaguguucacauguuuccc

SEQ ID NO: 1443064 - RNA, 19 nt, Artificial Sequence
  Description of Artificial Sequence: Synthetic oligonucleotide
ugaugggacuccauuccuc

SEQ ID NO: 1443065 - RNA, 19 nt, Artificial Sequence
  Description of Artificial Sequence: Synthetic oligonucleotide
uuacaauguccuguggguc

SEQ ID NO: 1443066 - RNA, 19 nt, Artificial Sequence
  Description of Artificial Sequence: Synthetic oligonucleotide
acgauacauucucguuccc

SEQ ID NO: 1443067 - RNA, 19 nt, Artificial Sequence
  Description of Artificial Sequence: Synthetic oligonucleotide
uguuucccgucucucugga

SEQ ID NO: 1443068 - RNA, 19 nt, Artificial Sequence
  Description of Artificial Sequence: Synthetic oligonucleotide
cuuaagaugucaugugaua

SEQ ID NO: 1443069 - RNA, 19 nt, Artificial Sequence
  Description of Artificial Sequence: Synthetic oligonucleotide
gcauuuguuggguuuggcc

SEQ ID NO: 1443070 - RNA, 19 nt, Artificial Sequence
  Description of Artificial Sequence: Synthetic oligonucleotide
acacguagagcgcuaacuu

SEQ ID NO: 1443071 - RNA, 19 nt, Artificial Sequence
  Description of Artificial Sequence: Synthetic oligonucleotide
uguaagaauccuggcggcu

SEQ ID NO: 1443072 - RNA, 19 nt, Artificial Sequence
  Description of Artificial Sequence: Synthetic oligonucleotide
guugguuugguuggcugag

SEQ ID NO: 1443073 - RNA, 19 nt, Artificial Sequence
  Description of Artificial Sequence: Synthetic oligonucleotide
gagcgcuaacuucucccgg

SEQ ID NO: 1443074 - RNA, 19 nt, Artificial Sequence
  Description of Artificial Sequence: Synthetic oligonucleotide
cguaguaguucugugaagg

SEQ ID NO: 1443075 - RNA, 19 nt, Artificial Sequence
  Description of Artificial Sequence: Synthetic oligonucleotide
auuucaccgucaucccuug

SEQ ID NO: 1443076 - RNA, 19 nt, Artificial Sequence
  Description of Artificial Sequence: Synthetic oligonucleotide
cacguagagcgcuaacuuc

SEQ ID NO: 1443077 - RNA, 19 nt, Artificial Sequence
  Description of Artificial Sequence: Synthetic oligonucleotide
ggaucugcauauacgauac

SEQ ID NO: 1443078 - RNA, 19 nt, Artificial Sequence
  Description of Artificial Sequence: Synthetic oligonucleotide
acguagagcgcuaacuucu

SEQ ID NO: 1443079 - RNA, 19 nt, Artificial Sequence
  Description of Artificial Sequence: Synthetic oligonucleotide
uuccuccuaauccacccau

SEQ ID NO: 1443080 - RNA, 19 nt, Artificial Sequence
  Description of Artificial Sequence: Synthetic oligonucleotide
agggcaccauuccucuugg

SEQ ID NO: 1443081 - RNA, 19 nt, Artificial Sequence
  Description of Artificial Sequence: Synthetic oligonucleotide
auuccggggccaccuaaag

SEQ ID NO: 1443082 - RNA, 19 nt, Artificial Sequence
  Description of Artificial Sequence: Synthetic oligonucleotide
aaagagccauucaugugau

SEQ ID NO: 1443083 - RNA, 19 nt, Artificial Sequence
  Description of Artificial Sequence: Synthetic oligonucleotide
gggucaaugcauguaugcg

SEQ ID NO: 1443084 - RNA, 19 nt, Artificial Sequence
  Description of Artificial Sequence: Synthetic oligonucleotide
agacuugguaauggaucac

SEQ ID NO: 1443085 - RNA, 19 nt, Artificial Sequence
  Description of Artificial Sequence: Synthetic oligonucleotide
uuuggauguccuuguuguc

SEQ ID NO: 1443086 - RNA, 19 nt, Artificial Sequence
  Description of Artificial Sequence: Synthetic oligonucleotide
ggagacuugguaauggauc

SEQ ID NO: 1443087 - RNA, 19 nt, Artificial Sequence
  Description of Artificial Sequence: Synthetic oligonucleotide
aagagccauucaugugaug

SEQ ID NO: 1443088 - RNA, 19 nt, Artificial Sequence
  Description of Artificial Sequence: Synthetic oligonucleotide
  modified_base (2)..(2): a, c, u, g, unknown or other
anguuugggcugauuucug

SEQ ID NO: 1443089 - RNA, 19 nt, Artificial Sequence
  Description of Artificial Sequence: Synthetic oligonucleotide
gaggugacauaaaaggaua

SEQ ID NO: 1443090 - RNA, 19 nt, Artificial Sequence
  Description of Artificial Sequence: Synthetic oligonucleotide
guaccgaggugacauaaaa

SEQ ID NO: 1443091 - RNA, 19 nt, Artificial Sequence
  Description of Artificial Sequence: Synthetic oligonucleotide
guagagcgcuaacuucucc

SEQ ID NO: 1443092 - RNA, 19 nt, Artificial Sequence
  Description of Artificial Sequence: Synthetic oligonucleotide
auuggaaaauuaggucugu

SEQ ID NO: 1443093 - RNA, 19 nt, Artificial Sequence
  Description of Artificial Sequence: Synthetic oligonucleotide
uugcaggcauuccggggcc

SEQ ID NO: 1443094 - RNA, 19 nt, Artificial Sequence
  Description of Artificial Sequence: Synthetic oligonucleotide
ucccuacuuacuucuacuu

SEQ ID NO: 1443095 - RNA, 19 nt, Artificial Sequence
  Description of Artificial Sequence: Synthetic oligonucleotide
ccuaauccacccaugggac

SEQ ID NO: 1443096 - RNA, 19 nt, Artificial Sequence
  Description of Artificial Sequence: Synthetic oligonucleotide
ugggacuccauuccuccua

SEQ ID NO: 1443097 - RNA, 19 nt, Artificial Sequence
  Description of Artificial Sequence: Synthetic oligonucleotide
aaucacauuuggacccgcu

SEQ ID NO: 1443098 - RNA, 19 nt, Artificial Sequence
  Description of Artificial Sequence: Synthetic oligonucleotide
acccgcuuucuucacaaaa

SEQ ID NO: 1443099 - RNA, 19 nt, Artificial Sequence
  Description of Artificial Sequence: Synthetic oligonucleotide
aucacauuuggacccgcuu

SEQ ID NO: 1443100 - RNA, 19 nt, Artificial Sequence
  Description of Artificial Sequence: Synthetic oligonucleotide
ccuccuaauccacccaugg

SEQ ID NO: 1443101 - RNA, 19 nt, Artificial Sequence
  Description of Artificial Sequence: Synthetic oligonucleotide
caggcucauauuauuggga

SEQ ID NO: 1443102 - RNA, 19 nt, Artificial Sequence
  Description of Artificial Sequence: Synthetic oligonucleotide
agaauccuggcggcucccc

SEQ ID NO: 1443103 - RNA, 19 nt, Artificial Sequence
  Description of Artificial Sequence: Synthetic oligonucleotide
ccauauuuggauguccuug

SEQ ID NO: 1443104 - RNA, 19 nt, Artificial Sequence
  Description of Artificial Sequence: Synthetic oligonucleotide
ugucggacgggacggcgcu

SEQ ID NO: 1443105 - RNA, 19 nt, Artificial Sequence
  Description of Artificial Sequence: Synthetic oligonucleotide
uguucacauguuucccguc

SEQ ID NO: 1443106 - RNA, 19 nt, Artificial Sequence
  Description of Artificial Sequence: Synthetic oligonucleotide
caguagagaucccaaaaua

SEQ ID NO: 1443107 - RNA, 19 nt, Artificial Sequence
  Description of Artificial Sequence: Synthetic oligonucleotide
guaagaauccuggcggcuc

SEQ ID NO: 1443108 - RNA, 19 nt, Artificial Sequence
  Description of Artificial Sequence: Synthetic oligonucleotide
acauucucguucccacaca

SEQ ID NO: 1443109 - RNA, 19 nt, Artificial Sequence
  Description of Artificial Sequence: Synthetic oligonucleotide
ucauacacguagagcgcua

SEQ ID NO: 1443110 - RNA, 19 nt, Artificial Sequence
  Description of Artificial Sequence: Synthetic oligonucleotide
auauacauacacagaugau

SEQ ID NO: 1443111 - RNA, 19 nt, Artificial Sequence
  Description of Artificial Sequence: Synthetic oligonucleotide
gcucauauuauugggagaa

SEQ ID NO: 1443112 - RNA, 19 nt, Artificial Sequence
  Description of Artificial Sequence: Synthetic oligonucleotide
ucaaugcauguaugcguau

SEQ ID NO: 1443113 - RNA, 19 nt, Artificial Sequence
  Description of Artificial Sequence: Synthetic oligonucleotide
uggcugacuuccugggaca

SEQ ID NO: 1443114 - RNA, 19 nt, Artificial Sequence
  Description of Artificial Sequence: Synthetic oligonucleotide
  modified_base (17)..(17): a, c, u, g, unknown or other
ucccaucuuaucucugnua

SEQ ID NO: 1443115 - RNA, 19 nt, Artificial Sequence
  Description of Artificial Sequence: Synthetic oligonucleotide
ccuggacccauguucauug

SEQ ID NO: 1443116 - RNA, 19 nt, Artificial Sequence
  Description of Artificial Sequence: Synthetic oligonucleotide
caccugucaacccaucaca

SEQ ID NO: 1443117 - RNA, 19 nt, Artificial Sequence
  Description of Artificial Sequence: Synthetic oligonucleotide
ucguucccacacauauaca

SEQ ID NO: 1443118 - RNA, 19 nt, Artificial Sequence
  Description of Artificial Sequence: Synthetic oligonucleotide
accugucaacccaucacag

SEQ ID NO: 1443119 - RNA, 19 nt, Artificial Sequence
  Description of Artificial Sequence: Synthetic oligonucleotide
ccuacuuacuucuacuuaa

SEQ ID NO: 1443120 - RNA, 19 nt, Artificial Sequence
  Description of Artificial Sequence: Synthetic oligonucleotide
cauggagcagauauucaua

SEQ ID NO: 1443121 - RNA, 19 nt, Artificial Sequence
  Description of Artificial Sequence: Synthetic oligonucleotide
uucuuccguaguaguucug

SEQ ID NO: 1443122 - RNA, 19 nt, Artificial Sequence
  Description of Artificial Sequence: Synthetic oligonucleotide
gaguaacucucacucugaa

SEQ ID NO: 1443123 - RNA, 19 nt, Artificial Sequence
  Description of Artificial Sequence: Synthetic oligonucleotide
caucccuuggggugcccgg

SEQ ID NO: 1443124 - RNA, 19 nt, Artificial Sequence
  Description of Artificial Sequence: Synthetic oligonucleotide
ugggcguuccugguggccc

SEQ ID NO: 1443125 - RNA, 19 nt, Artificial Sequence
  Description of Artificial Sequence: Synthetic oligonucleotide
  modified_base (16)..(16): a, c, u, g, unknown or other
cccaucuuaucucugnuaa

SEQ ID NO: 1443126 - RNA, 19 nt, Artificial Sequence
  Description of Artificial Sequence: Synthetic oligonucleotide
gcauucauuaaaguauaca

SEQ ID NO: 1443127 - RNA, 19 nt, Artificial Sequence
  Description of Artificial Sequence: Synthetic oligonucleotide
agaugucaugugauaauau

SEQ ID NO: 1443128 - RNA, 19 nt, Artificial Sequence
  Description of Artificial Sequence: Synthetic oligonucleotide
uuccucuuggaggagucau

SEQ ID NO: 1443129 - RNA, 19 nt, Artificial Sequence
  Description of Artificial Sequence: Synthetic oligonucleotide
cacccauauuuggaugucc

SEQ ID NO: 1443130 - RNA, 19 nt, Artificial Sequence
  Description of Artificial Sequence: Synthetic oligonucleotide
gucaaugcauguaugcgua

SEQ ID NO: 1443131 - RNA, 19 nt, Artificial Sequence
  Description of Artificial Sequence: Synthetic oligonucleotide
gguccuaagggcaccauuc

SEQ ID NO: 1443132 - RNA, 19 nt, Artificial Sequence
  Description of Artificial Sequence: Synthetic oligonucleotide
ccguacaguuguuugaauc

SEQ ID NO: 1443133 - RNA, 19 nt, Artificial Sequence
  Description of Artificial Sequence: Synthetic oligonucleotide
cugucggacgggacggcgc

SEQ ID NO: 1443134 - RNA, 19 nt, Artificial Sequence
  Description of Artificial Sequence: Synthetic oligonucleotide
ggaauaaaagucccuacuu

SEQ ID NO: 1443135 - RNA, 19 nt, Artificial Sequence
  Description of Artificial Sequence: Synthetic oligonucleotide
augauuauuugcaguucau

SEQ ID NO: 1443136 - RNA, 19 nt, Artificial Sequence
  Description of Artificial Sequence: Synthetic oligonucleotide
ggucaaugcauguaugcgu

SEQ ID NO: 1443137 - RNA, 19 nt, Artificial Sequence
  Description of Artificial Sequence: Synthetic oligonucleotide
gacggcgcugcuguuacuc

SEQ ID NO: 1443138 - RNA, 19 nt, Artificial Sequence
  Description of Artificial Sequence: Synthetic oligonucleotide
gucacgcaccugucaaccc

SEQ ID NO: 1443139 - RNA, 19 nt, Artificial Sequence
  Description of Artificial Sequence: Synthetic oligonucleotide
augcguauaugugcauaug

SEQ ID NO: 1443140 - RNA, 19 nt, Artificial Sequence
  Description of Artificial Sequence: Synthetic oligonucleotide
augugcauauggaucugca

SEQ ID NO: 1443141 - RNA, 19 nt, Artificial Sequence
  Description of Artificial Sequence: Synthetic oligonucleotide
gaugggcguuccugguggc

SEQ ID NO: 1443142 - RNA, 19 nt, Artificial Sequence
  Description of Artificial Sequence: Synthetic oligonucleotide
cuggacccauguucauugc

SEQ ID NO: 1443143 - RNA, 19 nt, Artificial Sequence
  Description of Artificial Sequence: Synthetic oligonucleotide
ccuaaagagccauucaugu

SEQ ID NO: 1443144 - RNA, 19 nt, Artificial Sequence
  Description of Artificial Sequence: Synthetic oligonucleotide
cugucacgcaccugucaac

SEQ ID NO: 1443145 - RNA, 19 nt, Artificial Sequence
  Description of Artificial Sequence: Synthetic oligonucleotide
ggagcuaaaggguugguuu

SEQ ID NO: 1443146 - RNA, 19 nt, Artificial Sequence
  Description of Artificial Sequence: Synthetic oligonucleotide
gaucugcauauacgauaca

SEQ ID NO: 1443147 - RNA, 19 nt, Artificial Sequence
  Description of Artificial Sequence: Synthetic oligonucleotide
uccguacaguuguuugaau

SEQ ID NO: 1443148 - RNA, 19 nt, Artificial Sequence
  Description of Artificial Sequence: Synthetic oligonucleotide
ccugucaacccaucacagc

SEQ ID NO: 1443149 - RNA, 19 nt, Artificial Sequence
  Description of Artificial Sequence: Synthetic oligonucleotide
gucucauugcaccuccaua

SEQ ID NO: 1443150 - RNA, 19 nt, Artificial Sequence
  Description of Artificial Sequence: Synthetic oligonucleotide
cuccccgggaacagccccg

SEQ ID NO: 1443151 - RNA, 19 nt, Artificial Sequence
  Description of Artificial Sequence: Synthetic oligonucleotide
ggguccauuccacugggga

SEQ ID NO: 1443152 - RNA, 19 nt, Artificial Sequence
  Description of Artificial Sequence: Synthetic oligonucleotide
acauuuggacccgcuuucu

SEQ ID NO: 1443153 - RNA, 19 nt, Artificial Sequence
  Description of Artificial Sequence: Synthetic oligonucleotide
aggagacuugguaauggau

SEQ ID NO: 1443154 - RNA, 19 nt, Artificial Sequence
  Description of Artificial Sequence: Synthetic oligonucleotide
guaauggaucacacacuca

SEQ ID NO: 1443155 - RNA, 19 nt, Artificial Sequence
  Description of Artificial Sequence: Synthetic oligonucleotide
ggccaccuaaagcauucag

SEQ ID NO: 1443156 - RNA, 19 nt, Artificial Sequence
  Description of Artificial Sequence: Synthetic oligonucleotide
guuucccgucucucuggag

SEQ ID NO: 1443157 - RNA, 19 nt, Artificial Sequence
  Description of Artificial Sequence: Synthetic oligonucleotide
gcaccugucaacccaucac

SEQ ID NO: 1443158 - RNA, 19 nt, Artificial Sequence
  Description of Artificial Sequence: Synthetic oligonucleotide
cacccaugggaccaucuga

SEQ ID NO: 1443159 - RNA, 19 nt, Artificial Sequence
  Description of Artificial Sequence: Synthetic oligonucleotide
gaauuggcauuuguugggu

SEQ ID NO: 1443160 - RNA, 19 nt, Artificial Sequence
  Description of Artificial Sequence: Synthetic oligonucleotide
gacgggacggcgcugcugu

SEQ ID NO: 1443161 - RNA, 19 nt, Artificial Sequence
  Description of Artificial Sequence: Synthetic oligonucleotide
gugggucaaugcauguaug

SEQ ID NO: 1443162 - RNA, 19 nt, Artificial Sequence
  Description of Artificial Sequence: Synthetic oligonucleotide
gggaguaauggcugacuuc

SEQ ID NO: 1443163 - RNA, 19 nt, Artificial Sequence
  Description of Artificial Sequence: Synthetic oligonucleotide
cauaguucugugguccuaa

SEQ ID NO: 1443164 - RNA, 19 nt, Artificial Sequence
  Description of Artificial Sequence: Synthetic oligonucleotide
ggggucucauugcaccucc

SEQ ID NO: 1443165 - RNA, 19 nt, Artificial Sequence
  Description of Artificial Sequence: Synthetic oligonucleotide
uucucccgggccuggcugu

SEQ ID NO: 1443166 - RNA, 19 nt, Artificial Sequence
  Description of Artificial Sequence: Synthetic oligonucleotide
ucggacgggacggcgcugc

SEQ ID NO: 1443167 - RNA, 19 nt, Artificial Sequence
  Description of Artificial Sequence: Synthetic oligonucleotide
guguucacauguuucccgu

SEQ ID NO: 1443168 - RNA, 19 nt, Artificial Sequence
  Description of Artificial Sequence: Synthetic oligonucleotide
guaugcguauaugugcaua

SEQ ID NO: 1443169 - RNA, 19 nt, Artificial Sequence
  Description of Artificial Sequence: Synthetic oligonucleotide
gucccuacuuacuucuacu

SEQ ID NO: 1443170 - RNA, 19 nt, Artificial Sequence
  Description of Artificial Sequence: Synthetic oligonucleotide
ggcucauauuauugggaga

SEQ ID NO: 1443171 - RNA, 19 nt, Artificial Sequence
  Description of Artificial Sequence: Synthetic oligonucleotide
gcguauaugugcauaugga

SEQ ID NO: 1443172 - RNA, 19 nt, Artificial Sequence
  Description of Artificial Sequence: Synthetic oligonucleotide
cuucuacuuaagaugucau

SEQ ID NO: 1443173 - RNA, 19 nt, Artificial Sequence
  Description of Artificial Sequence: Synthetic oligonucleotide
aggagcuaaaggguugguu

SEQ ID NO: 1443174 - RNA, 19 nt, Artificial Sequence
  Description of Artificial Sequence: Synthetic oligonucleotide
uuggacccgcuuucuucac

SEQ ID NO: 1443175 - RNA, 19 nt, Artificial Sequence
  Description of Artificial Sequence: Synthetic oligonucleotide
guacgguauugaauuggca

SEQ ID NO: 1443176 - RNA, 19 nt, Artificial Sequence
  Description of Artificial Sequence: Synthetic oligonucleotide
cuguacacugaugagcagu

SEQ ID NO: 1443177 - RNA, 19 nt, Artificial Sequence
  Description of Artificial Sequence: Synthetic oligonucleotide
gccguacaugcuugugccg

SEQ ID NO: 1443178 - RNA, 19 nt, Artificial Sequence
  Description of Artificial Sequence: Synthetic oligonucleotide
cuccguacaguuguuugaa

SEQ ID NO: 1443179 - RNA, 19 nt, Artificial Sequence
  Description of Artificial Sequence: Synthetic oligonucleotide
gaacagccccguccccaug

SEQ ID NO: 1443180 - RNA, 19 nt, Artificial Sequence
  Description of Artificial Sequence: Synthetic oligonucleotide
aauccacccaugggaccau

SEQ ID NO: 1443181 - RNA, 19 nt, Artificial Sequence
  Description of Artificial Sequence: Synthetic oligonucleotide
aggcauuccggggccaccu

SEQ ID NO: 1443182 - RNA, 19 nt, Artificial Sequence
  Description of Artificial Sequence: Synthetic oligonucleotide
caaugcauguaugcguaua

SEQ ID NO: 1443183 - RNA, 19 nt, Artificial Sequence
  Description of Artificial Sequence: Synthetic oligonucleotide
ccgggaacagccccguccc

SEQ ID NO: 1443184 - RNA, 19 nt, Artificial Sequence
  Description of Artificial Sequence: Synthetic oligonucleotide
uccauuccacuggggagua

SEQ ID NO: 1443185 - RNA, 19 nt, Artificial Sequence
  Description of Artificial Sequence: Synthetic oligonucleotide
cacugucacgcaccuguca

SEQ ID NO: 1443186 - RNA, 19 nt, Artificial Sequence
  Description of Artificial Sequence: Synthetic oligonucleotide
ggaguaacucucacucuga

SEQ ID NO: 1443187 - RNA, 19 nt, Artificial Sequence
  Description of Artificial Sequence: Synthetic oligonucleotide
uaagggcaccauuccucuu

SEQ ID NO: 1443188 - RNA, 19 nt, Artificial Sequence
  Description of Artificial Sequence: Synthetic oligonucleotide
cauucucguucccacacau

SEQ ID NO: 1443189 - RNA, 19 nt, Artificial Sequence
  Description of Artificial Sequence: Synthetic oligonucleotide
cauuccggggccaccuaaa

SEQ ID NO: 1443190 - RNA, 19 nt, Artificial Sequence
  Description of Artificial Sequence: Synthetic oligonucleotide
ggacccgcuuucuucacaa

SEQ ID NO: 1443191 - RNA, 19 nt, Artificial Sequence
  Description of Artificial Sequence: Synthetic oligonucleotide
gggacggcgcugcuguuac

SEQ ID NO: 1443192 - RNA, 19 nt, Artificial Sequence
  Description of Artificial Sequence: Synthetic oligonucleotide
cauacacguagagcgcuaa

SEQ ID NO: 1443193 - RNA, 19 nt, Artificial Sequence
  Description of Artificial Sequence: Synthetic oligonucleotide
ggcauuuguuggguuuggc

SEQ ID NO: 1443194 - RNA, 19 nt, Artificial Sequence
  Description of Artificial Sequence: Synthetic oligonucleotide
ccguaguaguucugugaag

SEQ ID NO: 1443195 - RNA, 19 nt, Artificial Sequence
  Description of Artificial Sequence: Synthetic oligonucleotide
aggagguacugcauucauu

SEQ ID NO: 1443196 - RNA, 19 nt, Artificial Sequence
  Description of Artificial Sequence: Synthetic oligonucleotide
caggguaccgaggugacau

SEQ ID NO: 1443197 - RNA, 19 nt, Artificial Sequence
  Description of Artificial Sequence: Synthetic oligonucleotide
guacaugcuugugccgaga

SEQ ID NO: 1443198 - RNA, 19 nt, Artificial Sequence
  Description of Artificial Sequence: Synthetic oligonucleotide
gcgcuaacuucucccgggc

SEQ ID NO: 1443199 - RNA, 19 nt, Artificial Sequence
  Description of Artificial Sequence: Synthetic oligonucleotide
accuggacccauguucauu

SEQ ID NO: 1443200 - RNA, 19 nt, Artificial Sequence
  Description of Artificial Sequence: Synthetic oligonucleotide
gugccacuccguacaguug

SEQ ID NO: 1443201 - RNA, 19 nt, Artificial Sequence
  Description of Artificial Sequence: Synthetic oligonucleotide
cugugaagggccgacuccu

SEQ ID NO: 1443202 - RNA, 19 nt, Artificial Sequence
  Description of Artificial Sequence: Synthetic oligonucleotide
caggcauuccggggccacc

SEQ ID NO: 1443203 - RNA, 19 nt, Artificial Sequence
  Description of Artificial Sequence: Synthetic oligonucleotide
ugcaggcauuccggggcca

SEQ ID NO: 1443204 - RNA, 19 nt, Artificial Sequence
  Description of Artificial Sequence: Synthetic oligonucleotide
cauuccacuggggaguaau

SEQ ID NO: 1443205 - RNA, 19 nt, Artificial Sequence
  Description of Artificial Sequence: Synthetic oligonucleotide
cuugggccuccaggguacc

SEQ ID NO: 1443206 - RNA, 19 nt, Artificial Sequence
  Description of Artificial Sequence: Synthetic oligonucleotide
cccauguucauugcaggca

SEQ ID NO: 1443207 - RNA, 19 nt, Artificial Sequence
  Description of Artificial Sequence: Synthetic oligonucleotide
cguacaugcuugugccgag

SEQ ID NO: 1443208 - RNA, 19 nt, Artificial Sequence
  Description of Artificial Sequence: Synthetic oligonucleotide
aggguaccgaggugacaua

SEQ ID NO: 1443209 - RNA, 19 nt, Artificial Sequence
  Description of Artificial Sequence: Synthetic oligonucleotide
auucucguucccacacaua

SEQ ID NO: 1443210 - RNA, 19 nt, Artificial Sequence
  Description of Artificial Sequence: Synthetic oligonucleotide
gacccgcuuucuucacaaa

SEQ ID NO: 1443211 - RNA, 19 nt, Artificial Sequence
  Description of Artificial Sequence: Synthetic oligonucleotide
cuuugccguacaugcuugu

SEQ ID NO: 1443212 - RNA, 19 nt, Artificial Sequence
  Description of Artificial Sequence: Synthetic oligonucleotide
ccuccccgggaacagcccc

SEQ ID NO: 1443213 - RNA, 19 nt, Artificial Sequence
  Description of Artificial Sequence: Synthetic oligonucleotide
cugcauugguccacccaua

SEQ ID NO: 1443214 - RNA, 19 nt, Artificial Sequence
  Description of Artificial Sequence: Synthetic oligonucleotide
cugugggucaaugcaugua

SEQ ID NO: 1443215 - RNA, 19 nt, Artificial Sequence
  Description of Artificial Sequence: Synthetic oligonucleotide
gggaacagccccgucccca

SEQ ID NO: 1443216 - RNA, 19 nt, Artificial Sequence
  Description of Artificial Sequence: Synthetic oligonucleotide
uccccgggaacagccccgu

SEQ ID NO: 1443217 - RNA, 19 nt, Artificial Sequence
  Description of Artificial Sequence: Synthetic oligonucleotide
acgcaccugucaacccauc

SEQ ID NO: 1443218 - RNA, 19 nt, Artificial Sequence
  Description of Artificial Sequence: Synthetic oligonucleotide
gaguaauggcugacuuccu

SEQ ID NO: 1443219 - RNA, 19 nt, Artificial Sequence
  Description of Artificial Sequence: Synthetic oligonucleotide
ccgucaucccuuggggugc

SEQ ID NO: 1443220 - RNA, 19 nt, Artificial Sequence
  Description of Artificial Sequence: Synthetic oligonucleotide
gggagagagcaggagcuaa

SEQ ID NO: 1443221 - RNA, 19 nt, Artificial Sequence
  Description of Artificial Sequence: Synthetic oligonucleotide
ggguaccgaggugacauaa

SEQ ID NO: 1443222 - RNA, 19 nt, Artificial Sequence
  Description of Artificial Sequence: Synthetic oligonucleotide
gguuacucaggcucauauu

SEQ ID NO: 1443223 - RNA, 19 nt, Artificial Sequence
  Description of Artificial Sequence: Synthetic oligonucleotide
ggagagagcaggagcuaaa

SEQ ID NO: 1443224 - RNA, 19 nt, Artificial Sequence
  Description of Artificial Sequence: Synthetic oligonucleotide
guuaggcccaggagguacu

SEQ ID NO: 1443225 - RNA, 19 nt, Artificial Sequence
  Description of Artificial Sequence: Synthetic oligonucleotide
  modified_base (15)..(15): a, c, u, g, unknown or other
ccaucuuaucucugnuaaa

SEQ ID NO: 1443226 - RNA, 19 nt, Artificial Sequence
  Description of Artificial Sequence: Synthetic oligonucleotide
ccguacaugcuugugccga

SEQ ID NO: 1443227 - RNA, 19 nt, Artificial Sequence
  Description of Artificial Sequence: Synthetic oligonucleotide
cguagagcgcuaacuucuc

SEQ ID NO: 1443228 - RNA, 19 nt, Artificial Sequence
  Description of Artificial Sequence: Synthetic oligonucleotide
gguaccgaggugacauaaa

SEQ ID NO: 1443229 - RNA, 19 nt, Artificial Sequence
  Description of Artificial Sequence: Synthetic oligonucleotide
cccuacuuacuucuacuua

SEQ ID NO: 1443230 - RNA, 19 nt, Artificial Sequence
  Description of Artificial Sequence: Synthetic oligonucleotide
caccgucaucccuuggggu

SEQ ID NO: 1443231 - RNA, 19 nt, Artificial Sequence
  Description of Artificial Sequence: Synthetic oligonucleotide
cccgucucucuggagcugc

SEQ ID NO: 1443232 - RNA, 19 nt, Artificial Sequence
  Description of Artificial Sequence: Synthetic oligonucleotide
guccugugggucaaugcau

SEQ ID NO: 1443233 - RNA, 19 nt, Artificial Sequence
  Description of Artificial Sequence: Synthetic oligonucleotide
gcauuccggggccaccuaa

SEQ ID NO: 1443234 - RNA, 19 nt, Artificial Sequence
  Description of Artificial Sequence: Synthetic oligonucleotide
gugccgagagcagcuccca

SEQ ID NO: 1443235 - RNA, 19 nt, Artificial Sequence
  Description of Artificial Sequence: Synthetic oligonucleotide
cacgcaccugucaacccau

SEQ ID NO: 1443236 - RNA, 19 nt, Artificial Sequence
  Description of Artificial Sequence: Synthetic oligonucleotide
ccacugucacgcaccuguc

SEQ ID NO: 1443237 - RNA, 19 nt, Artificial Sequence
  Description of Artificial Sequence: Synthetic oligonucleotide
ggguuuggccaaggucuac

SEQ ID NO: 1443238 - RNA, 19 nt, Artificial Sequence
  Description of Artificial Sequence: Synthetic oligonucleotide
gcauauggaucugcauaua

SEQ ID NO: 1443239 - RNA, 19 nt, Artificial Sequence
  Description of Artificial Sequence: Synthetic oligonucleotide
gucggacgggacggcgcug

SEQ ID NO: 1443240 - RNA, 19 nt, Artificial Sequence
  Description of Artificial Sequence: Synthetic oligonucleotide
ggacgggacggcgcugcug

SEQ ID NO: 1443241 - RNA, 19 nt, Artificial Sequence
  Description of Artificial Sequence: Synthetic oligonucleotide
cugguuacucaggcucaua

SEQ ID NO: 1443242 - RNA, 19 nt, Artificial Sequence
  Description of Artificial Sequence: Synthetic oligonucleotide
ccaucugaugcagggccca

SEQ ID NO: 1443243 - RNA, 19 nt, Artificial Sequence
  Description of Artificial Sequence: Synthetic oligonucleotide
ggaacagccccguccccau

SEQ ID NO: 1443244 - RNA, 19 nt, Artificial Sequence
  Description of Artificial Sequence: Synthetic oligonucleotide
caguucauuuuagggcaau

SEQ ID NO: 1443245 - RNA, 19 nt, Artificial Sequence
  Description of Artificial Sequence: Synthetic oligonucleotide
gcccggcugguuacucagg

SEQ ID NO: 1443246 - RNA, 19 nt, Artificial Sequence
  Description of Artificial Sequence: Synthetic oligonucleotide
ccauaucuccugagccuaa

SEQ ID NO: 1443247 - RNA, 19 nt, Artificial Sequence
  Description of Artificial Sequence: Synthetic oligonucleotide
cgcaccugucaacccauca

SEQ ID NO: 1443248 - RNA, 19 nt, Artificial Sequence
  Description of Artificial Sequence: Synthetic oligonucleotide
cuguuaggcccaggaggua

SEQ ID NO: 1443249 - RNA, 19 nt, Artificial Sequence
  Description of Artificial Sequence: Synthetic oligonucleotide
guacacugaugagcaguuu

SEQ ID NO: 1443250 - RNA, 19 nt, Artificial Sequence
  Description of Artificial Sequence: Synthetic oligonucleotide
acgggacggcgcugcuguu

SEQ ID NO: 1443251 - RNA, 19 nt, Artificial Sequence
  Description of Artificial Sequence: Synthetic oligonucleotide
cagcucccacugucacgca

SEQ ID NO: 1443252 - RNA, 19 nt, Artificial Sequence
  Description of Artificial Sequence: Synthetic oligonucleotide
ccgacuccugaugguuuuc

SEQ ID NO: 1443253 - RNA, 19 nt, Artificial Sequence
  Description of Artificial Sequence: Synthetic oligonucleotide
ggcauuccggggccaccua

SEQ ID NO: 1443254 - RNA, 19 nt, Artificial Sequence
  Description of Artificial Sequence: Synthetic oligonucleotide
cuccuacauggagcagaua

SEQ ID NO: 1443255 - RNA, 19 nt, Artificial Sequence
  Description of Artificial Sequence: Synthetic oligonucleotide
caucugaugcagggcccau

SEQ ID NO: 1443256 - RNA, 19 nt, Artificial Sequence
  Description of Artificial Sequence: Synthetic oligonucleotide
ccauaguucugugguccua

SEQ ID NO: 1443257 - RNA, 19 nt, Artificial Sequence
  Description of Artificial Sequence: Synthetic oligonucleotide
caccaccuggacccauguu

SEQ ID NO: 1443258 - RNA, 19 nt, Artificial Sequence
  Description of Artificial Sequence: Synthetic oligonucleotide
gggccgacuccugaugguu

SEQ ID NO: 1443259 - RNA, 19 nt, Artificial Sequence
  Description of Artificial Sequence: Synthetic oligonucleotide
ccaccaccuggacccaugu

SEQ ID NO: 1443260 - RNA, 19 nt, Artificial Sequence
  Description of Artificial Sequence: Synthetic oligonucleotide
ggccgacuccugaugguuu

SEQ ID NO: 1443261 - RNA, 19 nt, Artificial Sequence
  Description of Artificial Sequence: Synthetic oligonucleotide
ggacggcgcugcuguuacu

SEQ ID NO: 1443262 - RNA, 19 nt, Artificial Sequence
  Description of Artificial Sequence: Synthetic oligonucleotide
ccccgggaacagccccguc

SEQ ID NO: 1443263 - RNA, 19 nt, Artificial Sequence
  Description of Artificial Sequence: Synthetic oligonucleotide
cgggacggcgcugcuguua

SEQ ID NO: 1443264 - RNA, 19 nt, Artificial Sequence
  Description of Artificial Sequence: Synthetic oligonucleotide
auaacugagaauuagacac

SEQ ID NO: 1443265 - RNA, 19 nt, Artificial Sequence
  Description of Artificial Sequence: Synthetic oligonucleotide
uauaguuugaauuugacag

SEQ ID NO: 1443266 - RNA, 19 nt, Artificial Sequence
  Description of Artificial Sequence: Synthetic oligonucleotide
aagagcaucaaguuugagc

SEQ ID NO: 1443267 - RNA, 19 nt, Artificial Sequence
  Description of Artificial Sequence: Synthetic oligonucleotide
aauagaacacuguccagcc

SEQ ID NO: 1443268 - RNA, 19 nt, Artificial Sequence
  Description of Artificial Sequence: Synthetic oligonucleotide
gagaauuagacacauacag

SEQ ID NO: 1443269 - RNA, 19 nt, Artificial Sequence
  Description of Artificial Sequence: Synthetic oligonucleotide
ucugauuugacuaugggcu

SEQ ID NO: 1443270 - RNA, 19 nt, Artificial Sequence
  Description of Artificial Sequence: Synthetic oligonucleotide
aaucucauggcccaucuac

SEQ ID NO: 1443271 - RNA, 19 nt, Artificial Sequence
  Description of Artificial Sequence: Synthetic oligonucleotide
aguuauuuauaccagauga

SEQ ID NO: 1443272 - RNA, 19 nt, Artificial Sequence
  Description of Artificial Sequence: Synthetic oligonucleotide
auuaacacaagacaaagga

SEQ ID NO: 1443273 - RNA, 19 nt, Artificial Sequence
  Description of Artificial Sequence: Synthetic oligonucleotide
aaggcuacugugcauaugg

SEQ ID NO: 1443274 - RNA, 19 nt, Artificial Sequence
  Description of Artificial Sequence: Synthetic oligonucleotide
auugagugaaggcaaaggc

SEQ ID NO: 1443275 - RNA, 19 nt, Artificial Sequence
  Description of Artificial Sequence: Synthetic oligonucleotide
auuagacacauacagcagc

SEQ ID NO: 1443276 - RNA, 19 nt, Artificial Sequence
  Description of Artificial Sequence: Synthetic oligonucleotide
guaaauauccucucgacag

SEQ ID NO: 1443277 - RNA, 19 nt, Artificial Sequence
  Description of Artificial Sequence: Synthetic oligonucleotide
uuggcuacgauauugagca

SEQ ID NO: 1443278 - RNA, 19 nt, Artificial Sequence
  Description of Artificial Sequence: Synthetic oligonucleotide
gaauuagacacauacagca

SEQ ID NO: 1443279 - RNA, 19 nt, Artificial Sequence
  Description of Artificial Sequence: Synthetic oligonucleotide
aaaguuuaaaacaucaggu

SEQ ID NO: 1443280 - RNA, 19 nt, Artificial Sequence
  Description of Artificial Sequence: Synthetic oligonucleotide
aagacgacaacacagggga

SEQ ID NO: 1443281 - RNA, 19 nt, Artificial Sequence
  Description of Artificial Sequence: Synthetic oligonucleotide
agaaaguaaacaaaacagc

SEQ ID NO: 1443282 - RNA, 19 nt, Artificial Sequence
  Description of Artificial Sequence: Synthetic oligonucleotide
uuacauuggaguuccaggg

SEQ ID NO: 1443283 - RNA, 19 nt, Artificial Sequence
  Description of Artificial Sequence: Synthetic oligonucleotide
cuuaacaggagccuaaggc

SEQ ID NO: 1443284 - RNA, 19 nt, Artificial Sequence
  Description of Artificial Sequence: Synthetic oligonucleotide
ucuaaucuauuucaaauaa

SEQ ID NO: 1443285 - RNA, 19 nt, Artificial Sequence
  Description of Artificial Sequence: Synthetic oligonucleotide
uauuuauaccagaugagga

SEQ ID NO: 1443286 - RNA, 19 nt, Artificial Sequence
  Description of Artificial Sequence: Synthetic oligonucleotide
auucauuaaacucccuuac

SEQ ID NO: 1443287 - RNA, 19 nt, Artificial Sequence
  Description of Artificial Sequence: Synthetic oligonucleotide
uuaacauuguuuucguugc

SEQ ID NO: 1443288 - RNA, 19 nt, Artificial Sequence
  Description of Artificial Sequence: Synthetic oligonucleotide
guaauuucagcacuggaag

SEQ ID NO: 1443289 - RNA, 19 nt, Artificial Sequence
  Description of Artificial Sequence: Synthetic oligonucleotide
uucauguuaagaaacccug

SEQ ID NO: 1443290 - RNA, 19 nt, Artificial Sequence
  Description of Artificial Sequence: Synthetic oligonucleotide
guuaauagaacacugucca

SEQ ID NO: 1443291 - RNA, 19 nt, Artificial Sequence
  Description of Artificial Sequence: Synthetic oligonucleotide
aaaauguauaucuaaucua

SEQ ID NO: 1443292 - RNA, 19 nt, Artificial Sequence
  Description of Artificial Sequence: Synthetic oligonucleotide
uuuaguaaccugcugucgc

SEQ ID NO: 1443293 - RNA, 19 nt, Artificial Sequence
  Description of Artificial Sequence: Synthetic oligonucleotide
aauuacacaguacuauagu

SEQ ID NO: 1443294 - RNA, 19 nt, Artificial Sequence
  Description of Artificial Sequence: Synthetic oligonucleotide
aggacuauugagugaaggc

SEQ ID NO: 1443295 - RNA, 19 nt, Artificial Sequence
  Description of Artificial Sequence: Synthetic oligonucleotide
aguuaauagaacacugucc

SEQ ID NO: 1443296 - RNA, 19 nt, Artificial Sequence
  Description of Artificial Sequence: Synthetic oligonucleotide
ucuaucucagucauucucc

SEQ ID NO: 1443297 - RNA, 19 nt, Artificial Sequence
  Description of Artificial Sequence: Synthetic oligonucleotide
aaugaguuaauagaacacu

SEQ ID NO: 1443298 - RNA, 19 nt, Artificial Sequence
  Description of Artificial Sequence: Synthetic oligonucleotide
guuacauuggaguuccagg

SEQ ID NO: 1443299 - RNA, 19 nt, Artificial Sequence
  Description of Artificial Sequence: Synthetic oligonucleotide
uccaggagaacauuaagca

SEQ ID NO: 1443300 - RNA, 19 nt, Artificial Sequence
  Description of Artificial Sequence: Synthetic oligonucleotide
uaagucaggacuauugagu

SEQ ID NO: 1443301 - RNA, 19 nt, Artificial Sequence
  Description of Artificial Sequence: Synthetic oligonucleotide
aguacuauaguuugaauuu

SEQ ID NO: 1443302 - RNA, 19 nt, Artificial Sequence
  Description of Artificial Sequence: Synthetic oligonucleotide
ucauuaaacucccuuacaa

SEQ ID NO: 1443303 - RNA, 19 nt, Artificial Sequence
  Description of Artificial Sequence: Synthetic oligonucleotide
caggagaacauuaagcaag

SEQ ID NO: 1443304 - RNA, 19 nt, Artificial Sequence
  Description of Artificial Sequence: Synthetic oligonucleotide
aagucaggacuauugagug

SEQ ID NO: 1443305 - RNA, 19 nt, Artificial Sequence
  Description of Artificial Sequence: Synthetic oligonucleotide
aguuaggcaaguugauugc

SEQ ID NO: 1443306 - RNA, 19 nt, Artificial Sequence
  Description of Artificial Sequence: Synthetic oligonucleotide
acgauauugagcaccaugc

SEQ ID NO: 1443307 - RNA, 19 nt, Artificial Sequence
  Description of Artificial Sequence: Synthetic oligonucleotide
auguuuauaacugagaauu

SEQ ID NO: 1443308 - RNA, 19 nt, Artificial Sequence
  Description of Artificial Sequence: Synthetic oligonucleotide
uaagaaacccugcagaaua

SEQ ID NO: 1443309 - RNA, 19 nt, Artificial Sequence
  Description of Artificial Sequence: Synthetic oligonucleotide
uaaaauuccuggauauuca

SEQ ID NO: 1443310 - RNA, 19 nt, Artificial Sequence
  Description of Artificial Sequence: Synthetic oligonucleotide
uuuggcuacgauauugagc

SEQ ID NO: 1443311 - RNA, 19 nt, Artificial Sequence
  Description of Artificial Sequence: Synthetic oligonucleotide
aacauuaagcaagcacugc

SEQ ID NO: 1443312 - RNA, 19 nt, Artificial Sequence
  Description of Artificial Sequence: Synthetic oligonucleotide
uuaaaauuccuggauauuc

SEQ ID NO: 1443313 - RNA, 19 nt, Artificial Sequence
  Description of Artificial Sequence: Synthetic oligonucleotide
uaauagaacacuguccagc

SEQ ID NO: 1443314 - RNA, 19 nt, Artificial Sequence
  Description of Artificial Sequence: Synthetic oligonucleotide
acagauaucucuugccagg

SEQ ID NO: 1443315 - RNA, 19 nt, Artificial Sequence
  Description of Artificial Sequence: Synthetic oligonucleotide
agauguuuauaacugagaa

SEQ ID NO: 1443316 - RNA, 19 nt, Artificial Sequence
  Description of Artificial Sequence: Synthetic oligonucleotide
agaauuagacacauacagc

SEQ ID NO: 1443317 - RNA, 19 nt, Artificial Sequence
  Description of Artificial Sequence: Synthetic oligonucleotide
ugcuuuaguaaccugcugu

SEQ ID NO: 1443318 - RNA, 19 nt, Artificial Sequence
  Description of Artificial Sequence: Synthetic oligonucleotide
aauaccugccuacaguuaa

SEQ ID NO: 1443319 - RNA, 19 nt, Artificial Sequence
  Description of Artificial Sequence: Synthetic oligonucleotide
aaccugcugucgcagacgc

SEQ ID NO: 1443320 - RNA, 19 nt, Artificial Sequence
  Description of Artificial Sequence: Synthetic oligonucleotide
uuuucguugcaccacaaau

SEQ ID NO: 1443321 - RNA, 19 nt, Artificial Sequence
  Description of Artificial Sequence: Synthetic oligonucleotide
aaaacagcagaagcucagc

SEQ ID NO: 1443322 - RNA, 19 nt, Artificial Sequence
  Description of Artificial Sequence: Synthetic oligonucleotide
uacgauauugagcaccaug

SEQ ID NO: 1443323 - RNA, 19 nt, Artificial Sequence
  Description of Artificial Sequence: Synthetic oligonucleotide
uuauuuggcuacgauauug

SEQ ID NO: 1443324 - RNA, 19 nt, Artificial Sequence
  Description of Artificial Sequence: Synthetic oligonucleotide
aaagacgacaacacagggg

SEQ ID NO: 1443325 - RNA, 19 nt, Artificial Sequence
  Description of Artificial Sequence: Synthetic oligonucleotide
ugagaauuagacacauaca

SEQ ID NO: 1443326 - RNA, 19 nt, Artificial Sequence
  Description of Artificial Sequence: Synthetic oligonucleotide
uauaucuaaucuauuucaa

SEQ ID NO: 1443327 - RNA, 19 nt, Artificial Sequence
  Description of Artificial Sequence: Synthetic oligonucleotide
ccugccuacaguuaaaugg

SEQ ID NO: 1443328 - RNA, 19 nt, Artificial Sequence
  Description of Artificial Sequence: Synthetic oligonucleotide
uuaacacaagacaaaggaa

SEQ ID NO: 1443329 - RNA, 19 nt, Artificial Sequence
  Description of Artificial Sequence: Synthetic oligonucleotide
uccacacacacacacacac

SEQ ID NO: 1443330 - RNA, 19 nt, Artificial Sequence
  Description of Artificial Sequence: Synthetic oligonucleotide
uuugacagggguaaauauc

SEQ ID NO: 1443331 - RNA, 19 nt, Artificial Sequence
  Description of Artificial Sequence: Synthetic oligonucleotide
ugagugaaggcaaaggcua

SEQ ID NO: 1443332 - RNA, 19 nt, Artificial Sequence
  Description of Artificial Sequence: Synthetic oligonucleotide
uugagugaaggcaaaggcu

SEQ ID NO: 1443333 - RNA, 19 nt, Artificial Sequence
  Description of Artificial Sequence: Synthetic oligonucleotide
aguuaaauggcaaaauaca

SEQ ID NO: 1443334 - RNA, 19 nt, Artificial Sequence
  Description of Artificial Sequence: Synthetic oligonucleotide
auuuauaccagaugaggaa

SEQ ID NO: 1443335 - RNA, 19 nt, Artificial Sequence
  Description of Artificial Sequence: Synthetic oligonucleotide
ugaggagaggacuugguac

SEQ ID NO: 1443336 - RNA, 19 nt, Artificial Sequence
  Description of Artificial Sequence: Synthetic oligonucleotide
uggucagauguuuauaacu

SEQ ID NO: 1443337 - RNA, 19 nt, Artificial Sequence
  Description of Artificial Sequence: Synthetic oligonucleotide
gaguuaauagaacacuguc

SEQ ID NO: 1443338 - RNA, 19 nt, Artificial Sequence
  Description of Artificial Sequence: Synthetic oligonucleotide
gaagguugaggcaagagca

SEQ ID NO: 1443339 - RNA, 19 nt, Artificial Sequence
  Description of Artificial Sequence: Synthetic oligonucleotide
aggacaaaucucauggccc

SEQ ID NO: 1443340 - RNA, 19 nt, Artificial Sequence
  Description of Artificial Sequence: Synthetic oligonucleotide
uauuuggcuacgauauuga

SEQ ID NO: 1443341 - RNA, 19 nt, Artificial Sequence
  Description of Artificial Sequence: Synthetic oligonucleotide
ucauguuaagaaacccugc

SEQ ID NO: 1443342 - RNA, 19 nt, Artificial Sequence
  Description of Artificial Sequence: Synthetic oligonucleotide
ucugacauacuguuaacau

SEQ ID NO: 1443343 - RNA, 19 nt, Artificial Sequence
  Description of Artificial Sequence: Synthetic oligonucleotide
ucgacagaaaguaaacaaa

SEQ ID NO: 1443344 - RNA, 19 nt, Artificial Sequence
  Description of Artificial Sequence: Synthetic oligonucleotide
cuaagucaggacuauugag

SEQ ID NO: 1443345 - RNA, 19 nt, Artificial Sequence
  Description of Artificial Sequence: Synthetic oligonucleotide
uccuuaguugaguuaugcg

SEQ ID NO: 1443346 - RNA, 19 nt, Artificial Sequence
  Description of Artificial Sequence: Synthetic oligonucleotide
uuugaauuugacaggggua

SEQ ID NO: 1443347 - RNA, 19 nt, Artificial Sequence
  Description of Artificial Sequence: Synthetic oligonucleotide
aacuccccaaucuaucuca

SEQ ID NO: 1443348 - RNA, 19 nt, Artificial Sequence
  Description of Artificial Sequence: Synthetic oligonucleotide
gauauucaaggaaaguaac

SEQ ID NO: 1443349 - RNA, 19 nt, Artificial Sequence
  Description of Artificial Sequence: Synthetic oligonucleotide
augagaugaaggcuacgac

SEQ ID NO: 1443350 - RNA, 19 nt, Artificial Sequence
  Description of Artificial Sequence: Synthetic oligonucleotide
uggguuaucugauuugacu

SEQ ID NO: 1443351 - RNA, 19 nt, Artificial Sequence
  Description of Artificial Sequence: Synthetic oligonucleotide
agagaccuuaacaggagcc

SEQ ID NO: 1443352 - RNA, 19 nt, Artificial Sequence
  Description of Artificial Sequence: Synthetic oligonucleotide
uuaauagaacacuguccag

SEQ ID NO: 1443353 - RNA, 19 nt, Artificial Sequence
  Description of Artificial Sequence: Synthetic oligonucleotide
auguuaagaaacccugcag

SEQ ID NO: 1443354 - RNA, 19 nt, Artificial Sequence
  Description of Artificial Sequence: Synthetic oligonucleotide
acuuauuuggcuacgauau

SEQ ID NO: 1443355 - RNA, 19 nt, Artificial Sequence
  Description of Artificial Sequence: Synthetic oligonucleotide
cuuaguugaguuaugcgca

SEQ ID NO: 1443356 - RNA, 19 nt, Artificial Sequence
  Description of Artificial Sequence: Synthetic oligonucleotide
aguugaguuaugcgcacuc

SEQ ID NO: 1443357 - RNA, 19 nt, Artificial Sequence
  Description of Artificial Sequence: Synthetic oligonucleotide
auguauaucuaaucuauuu

SEQ ID NO: 1443358 - RNA, 19 nt, Artificial Sequence
  Description of Artificial Sequence: Synthetic oligonucleotide
uccuggauauucaaggaaa

SEQ ID NO: 1443359 - RNA, 19 nt, Artificial Sequence
  Description of Artificial Sequence: Synthetic oligonucleotide
cugccuacaguuaaauggc

SEQ ID NO: 1443360 - RNA, 19 nt, Artificial Sequence
  Description of Artificial Sequence: Synthetic oligonucleotide
ugugggacucagauuaccc

SEQ ID NO: 1443361 - RNA, 19 nt, Artificial Sequence
  Description of Artificial Sequence: Synthetic oligonucleotide
guuauuuauaccagaugag

SEQ ID NO: 1443362 - RNA, 19 nt, Artificial Sequence
  Description of Artificial Sequence: Synthetic oligonucleotide
uggauauucaaggaaagua

SEQ ID NO: 1443363 - RNA, 19 nt, Artificial Sequence
  Description of Artificial Sequence: Synthetic oligonucleotide
ugucgcagacgccagagcu

SEQ ID NO: 1443364 - RNA, 19 nt, Artificial Sequence
  Description of Artificial Sequence: Synthetic oligonucleotide
ccuuaguugaguuaugcgc

SEQ ID NO: 1443365 - RNA, 19 nt, Artificial Sequence
  Description of Artificial Sequence: Synthetic oligonucleotide
cacacacacacacacacac

SEQ ID NO: 1443366 - RNA, 19 nt, Artificial Sequence
  Description of Artificial Sequence: Synthetic oligonucleotide
acuauaguuugaauuugac

SEQ ID NO: 1443367 - RNA, 19 nt, Artificial Sequence
  Description of Artificial Sequence: Synthetic oligonucleotide
uuucguugcaccacaaauu

SEQ ID NO: 1443368 - RNA, 19 nt, Artificial Sequence
  Description of Artificial Sequence: Synthetic oligonucleotide
cacaggggaacacuaaggc

SEQ ID NO: 1443369 - RNA, 19 nt, Artificial Sequence
  Description of Artificial Sequence: Synthetic oligonucleotide
acaguuaaauggcaaaaua

SEQ ID NO: 1443370 - RNA, 19 nt, Artificial Sequence
  Description of Artificial Sequence: Synthetic oligonucleotide
uauugagcaccaugccugg

SEQ ID NO: 1443371 - RNA, 19 nt, Artificial Sequence
  Description of Artificial Sequence: Synthetic oligonucleotide
ucagauuaccccucaugug

SEQ ID NO: 1443372 - RNA, 19 nt, Artificial Sequence
  Description of Artificial Sequence: Synthetic oligonucleotide
agccuccacacacacacac

SEQ ID NO: 1443373 - RNA, 19 nt, Artificial Sequence
  Description of Artificial Sequence: Synthetic oligonucleotide
aucuaaucuauuucaaaua

SEQ ID NO: 1443374 - RNA, 19 nt, Artificial Sequence
  Description of Artificial Sequence: Synthetic oligonucleotide
uaggcaaguugauugcuug

SEQ ID NO: 1443375 - RNA, 19 nt, Artificial Sequence
  Description of Artificial Sequence: Synthetic oligonucleotide
cuauaguuugaauuugaca

SEQ ID NO: 1443376 - RNA, 19 nt, Artificial Sequence
  Description of Artificial Sequence: Synthetic oligonucleotide
agggguaaauauccucucg

SEQ ID NO: 1443377 - RNA, 19 nt, Artificial Sequence
  Description of Artificial Sequence: Synthetic oligonucleotide
uuauaccagaugaggaaaa

SEQ ID NO: 1443378 - RNA, 19 nt, Artificial Sequence
  Description of Artificial Sequence: Synthetic oligonucleotide
ugugcauauggagaacugc

SEQ ID NO: 1443379 - RNA, 19 nt, Artificial Sequence
  Description of Artificial Sequence: Synthetic oligonucleotide
aagaaacccugcagaauac

SEQ ID NO: 1443380 - RNA, 19 nt, Artificial Sequence
  Description of Artificial Sequence: Synthetic oligonucleotide
agcaucaaguuugagccuc

SEQ ID NO: 1443381 - RNA, 19 nt, Artificial Sequence
  Description of Artificial Sequence: Synthetic oligonucleotide
aggucugacauacuguuaa

SEQ ID NO: 1443382 - RNA, 19 nt, Artificial Sequence
  Description of Artificial Sequence: Synthetic oligonucleotide
guuucauguuaagaaaccc

SEQ ID NO: 1443383 - RNA, 19 nt, Artificial Sequence
  Description of Artificial Sequence: Synthetic oligonucleotide
uuaguaaccugcugucgca

SEQ ID NO: 1443384 - RNA, 19 nt, Artificial Sequence
  Description of Artificial Sequence: Synthetic oligonucleotide
auugcuugguuccuuaguu

SEQ ID NO: 1443385 - RNA, 19 nt, Artificial Sequence
  Description of Artificial Sequence: Synthetic oligonucleotide
agaaacccugcagaauacc

SEQ ID NO: 1443386 - RNA, 19 nt, Artificial Sequence
  Description of Artificial Sequence: Synthetic oligonucleotide
acgggagccaucuucacgu

SEQ ID NO: 1443387 - RNA, 19 nt, Artificial Sequence
  Description of Artificial Sequence: Synthetic oligonucleotide
acucagauuaccccucaug

SEQ ID NO: 1443388 - RNA, 19 nt, Artificial Sequence
  Description of Artificial Sequence: Synthetic oligonucleotide
uaugcgcacucuuauuuac

SEQ ID NO: 1443389 - RNA, 19 nt, Artificial Sequence
  Description of Artificial Sequence: Synthetic oligonucleotide
augaguuaauagaacacug

SEQ ID NO: 1443390 - RNA, 19 nt, Artificial Sequence
  Description of Artificial Sequence: Synthetic oligonucleotide
aguuacauuggaguuccag

SEQ ID NO: 1443391 - RNA, 19 nt, Artificial Sequence
  Description of Artificial Sequence: Synthetic oligonucleotide
uguuuauaacugagaauua

SEQ ID NO: 1443392 - RNA, 19 nt, Artificial Sequence
  Description of Artificial Sequence: Synthetic oligonucleotide
uauccucucgacagaaagu

SEQ ID NO: 1443393 - RNA, 19 nt, Artificial Sequence
  Description of Artificial Sequence: Synthetic oligonucleotide
gagccuaaggccucaggcc

SEQ ID NO: 1443394 - RNA, 19 nt, Artificial Sequence
  Description of Artificial Sequence: Synthetic oligonucleotide
ggcaagagcaucaaguuug

SEQ ID NO: 1443395 - RNA, 19 nt, Artificial Sequence
  Description of Artificial Sequence: Synthetic oligonucleotide
ugggacucagauuaccccu

SEQ ID NO: 1443396 - RNA, 19 nt, Artificial Sequence
  Description of Artificial Sequence: Synthetic oligonucleotide
cagauuaccccucauguga

SEQ ID NO: 1443397 - RNA, 19 nt, Artificial Sequence
  Description of Artificial Sequence: Synthetic oligonucleotide
ugaguuaugcgcacucuua

SEQ ID NO: 1443398 - RNA, 19 nt, Artificial Sequence
  Description of Artificial Sequence: Synthetic oligonucleotide
aaucuaucucagucauucu

SEQ ID NO: 1443399 - RNA, 19 nt, Artificial Sequence
  Description of Artificial Sequence: Synthetic oligonucleotide
cucgacagaaaguaaacaa

SEQ ID NO: 1443400 - RNA, 19 nt, Artificial Sequence
  Description of Artificial Sequence: Synthetic oligonucleotide
uggcccaucuacaccagcc

SEQ ID NO: 1443401 - RNA, 19 nt, Artificial Sequence
  Description of Artificial Sequence: Synthetic oligonucleotide
uggaguuccaggguaaggu

SEQ ID NO: 1443402 - RNA, 19 nt, Artificial Sequence
  Description of Artificial Sequence: Synthetic oligonucleotide
cauguuaagaaacccugca

SEQ ID NO: 1443403 - RNA, 19 nt, Artificial Sequence
  Description of Artificial Sequence: Synthetic oligonucleotide
ucgggcugcaguuaggcaa

SEQ ID NO: 1443404 - RNA, 19 nt, Artificial Sequence
  Description of Artificial Sequence: Synthetic oligonucleotide
ugcgcacucuuauuuacac

SEQ ID NO: 1443405 - RNA, 19 nt, Artificial Sequence
  Description of Artificial Sequence: Synthetic oligonucleotide
cucucgacagaaaguaaac

SEQ ID NO: 1443406 - RNA, 19 nt, Artificial Sequence
  Description of Artificial Sequence: Synthetic oligonucleotide
uaacuuauuuggcuacgau

SEQ ID NO: 1443407 - RNA, 19 nt, Artificial Sequence
  Description of Artificial Sequence: Synthetic oligonucleotide
gaaggcuacgacgggagcc

SEQ ID NO: 1443408 - RNA, 19 nt, Artificial Sequence
  Description of Artificial Sequence: Synthetic oligonucleotide
uacgacgggagccaucuuc

SEQ ID NO: 1443409 - RNA, 19 nt, Artificial Sequence
  Description of Artificial Sequence: Synthetic oligonucleotide
guuugaauuugacaggggu

SEQ ID NO: 1443410 - RNA, 19 nt, Artificial Sequence
  Description of Artificial Sequence: Synthetic oligonucleotide
ugguaguuucauguuaaga

SEQ ID NO: 1443411 - RNA, 19 nt, Artificial Sequence
  Description of Artificial Sequence: Synthetic oligonucleotide
ucucgacagaaaguaaaca

SEQ ID NO: 1443412 - RNA, 19 nt, Artificial Sequence
  Description of Artificial Sequence: Synthetic oligonucleotide
cauucugagggcucaggug

SEQ ID NO: 1443413 - RNA, 19 nt, Artificial Sequence
  Description of Artificial Sequence: Synthetic oligonucleotide
augcauguaacugcuuuag

SEQ ID NO: 1443414 - RNA, 19 nt, Artificial Sequence
  Description of Artificial Sequence: Synthetic oligonucleotide
cacugugggacucagauua

SEQ ID NO: 1443415 - RNA, 19 nt, Artificial Sequence
  Description of Artificial Sequence: Synthetic oligonucleotide
ugauugcuugguuccuuag

SEQ ID NO: 1443416 - RNA, 19 nt, Artificial Sequence
  Description of Artificial Sequence: Synthetic oligonucleotide
acaggggaacacuaaggca

SEQ ID NO: 1443417 - RNA, 19 nt, Artificial Sequence
  Description of Artificial Sequence: Synthetic oligonucleotide
caggacuauugagugaagg

SEQ ID NO: 1443418 - RNA, 19 nt, Artificial Sequence
  Description of Artificial Sequence: Synthetic oligonucleotide
cacacacacacacacacga

SEQ ID NO: 1443419 - RNA, 19 nt, Artificial Sequence
  Description of Artificial Sequence: Synthetic oligonucleotide
guuaucugauuugacuaug

SEQ ID NO: 1443420 - RNA, 19 nt, Artificial Sequence
  Description of Artificial Sequence: Synthetic oligonucleotide
uggcaaaauacaguacaga

SEQ ID NO: 1443421 - RNA, 19 nt, Artificial Sequence
  Description of Artificial Sequence: Synthetic oligonucleotide
ggucagauguuuauaacug

SEQ ID NO: 1443422 - RNA, 19 nt, Artificial Sequence
  Description of Artificial Sequence: Synthetic oligonucleotide
uucacaugucuuugcaguc

SEQ ID NO: 1443423 - RNA, 19 nt, Artificial Sequence
  Description of Artificial Sequence: Synthetic oligonucleotide
cauacuguuaacauuguuu

SEQ ID NO: 1443424 - RNA, 19 nt, Artificial Sequence
  Description of Artificial Sequence: Synthetic oligonucleotide
gaacuaaagugaggagagg

SEQ ID NO: 1443425 - RNA, 19 nt, Artificial Sequence
  Description of Artificial Sequence: Synthetic oligonucleotide
gaugcucuggguuuuacau

SEQ ID NO: 1443426 - RNA, 19 nt, Artificial Sequence
  Description of Artificial Sequence: Synthetic oligonucleotide
uugaguuaugcgcacucuu

SEQ ID NO: 1443427 - RNA, 19 nt, Artificial Sequence
  Description of Artificial Sequence: Synthetic oligonucleotide
ucguugcaccacaaauucc

SEQ ID NO: 1443428 - RNA, 19 nt, Artificial Sequence
  Description of Artificial Sequence: Synthetic oligonucleotide
auaccagaugaggaaaaug

SEQ ID NO: 1443429 - RNA, 19 nt, Artificial Sequence
  Description of Artificial Sequence: Synthetic oligonucleotide
cacucuuauuuacacgcug

SEQ ID NO: 1443430 - RNA, 19 nt, Artificial Sequence
  Description of Artificial Sequence: Synthetic oligonucleotide
gacgccagagcucaggucu

SEQ ID NO: 1443431 - RNA, 19 nt, Artificial Sequence
  Description of Artificial Sequence: Synthetic oligonucleotide
gacgacaacacaggggaac

SEQ ID NO: 1443432 - RNA, 19 nt, Artificial Sequence
  Description of Artificial Sequence: Synthetic oligonucleotide
gauguuuauaacugagaau

SEQ ID NO: 1443433 - RNA, 19 nt, Artificial Sequence
  Description of Artificial Sequence: Synthetic oligonucleotide
ggagccuaaggccucaggc

SEQ ID NO: 1443434 - RNA, 19 nt, Artificial Sequence
  Description of Artificial Sequence: Synthetic oligonucleotide
uuaggcaaguugauugcuu

SEQ ID NO: 1443435 - RNA, 19 nt, Artificial Sequence
  Description of Artificial Sequence: Synthetic oligonucleotide
gguaaauauccucucgaca

SEQ ID NO: 1443436 - RNA, 19 nt, Artificial Sequence
  Description of Artificial Sequence: Synthetic oligonucleotide
acacacacacacgagaaaa

SEQ ID NO: 1443437 - RNA, 19 nt, Artificial Sequence
  Description of Artificial Sequence: Synthetic oligonucleotide
cauuguuuucguugcacca

SEQ ID NO: 1443438 - RNA, 19 nt, Artificial Sequence
  Description of Artificial Sequence: Synthetic oligonucleotide
caugugaauucauuaaacu

SEQ ID NO: 1443439 - RNA, 19 nt, Artificial Sequence
  Description of Artificial Sequence: Synthetic oligonucleotide
gugggacucagauuacccc

SEQ ID NO: 1443440 - RNA, 19 nt, Artificial Sequence
  Description of Artificial Sequence: Synthetic oligonucleotide
ugaauucauuaaacucccu

SEQ ID NO: 1443441 - RNA, 19 nt, Artificial Sequence
  Description of Artificial Sequence: Synthetic oligonucleotide
ugcauguaacugcuuuagu

SEQ ID NO: 1443442 - RNA, 19 nt, Artificial Sequence
  Description of Artificial Sequence: Synthetic oligonucleotide
gacuauugagugaaggcaa

SEQ ID NO: 1443443 - RNA, 19 nt, Artificial Sequence
  Description of Artificial Sequence: Synthetic oligonucleotide
uuaugcgcacucuuauuua

SEQ ID NO: 1443444 - RNA, 19 nt, Artificial Sequence
  Description of Artificial Sequence: Synthetic oligonucleotide
cgcacucuuauuuacacgc

SEQ ID NO: 1443445 - RNA, 19 nt, Artificial Sequence
  Description of Artificial Sequence: Synthetic oligonucleotide
ugggaugguaugugugcag

SEQ ID NO: 1443446 - RNA, 19 nt, Artificial Sequence
  Description of Artificial Sequence: Synthetic oligonucleotide
cucauggcccaucuacacc

SEQ ID NO: 1443447 - RNA, 19 nt, Artificial Sequence
  Description of Artificial Sequence: Synthetic oligonucleotide
uaaccugcugucgcagacg

SEQ ID NO: 1443448 - RNA, 19 nt, Artificial Sequence
  Description of Artificial Sequence: Synthetic oligonucleotide
gucagauguuuauaacuga

SEQ ID NO: 1443449 - RNA, 19 nt, Artificial Sequence
  Description of Artificial Sequence: Synthetic oligonucleotide
agaauccacaggaugagau

SEQ ID NO: 1443450 - RNA, 19 nt, Artificial Sequence
  Description of Artificial Sequence: Synthetic oligonucleotide
aaggugguaaguccccauu

SEQ ID NO: 1443451 - RNA, 19 nt, Artificial Sequence
  Description of Artificial Sequence: Synthetic oligonucleotide
gcaagcacugcccaggaac

SEQ ID NO: 1443452 - RNA, 19 nt, Artificial Sequence
  Description of Artificial Sequence: Synthetic oligonucleotide
cauacagcagcucucacgu

SEQ ID NO: 1443453 - RNA, 19 nt, Artificial Sequence
  Description of Artificial Sequence: Synthetic oligonucleotide
cguugcaccacaaauuccc

SEQ ID NO: 1443454 - RNA, 19 nt, Artificial Sequence
  Description of Artificial Sequence: Synthetic oligonucleotide
uggcugguugcacaagccu

SEQ ID NO: 1443455 - RNA, 19 nt, Artificial Sequence
  Description of Artificial Sequence: Synthetic oligonucleotide
cagauguuuauaacugaga

SEQ ID NO: 1443456 - RNA, 19 nt, Artificial Sequence
  Description of Artificial Sequence: Synthetic oligonucleotide
aaggcuacgacgggagcca

SEQ ID NO: 1443457 - RNA, 19 nt, Artificial Sequence
  Description of Artificial Sequence: Synthetic oligonucleotide
ugccuacaguuaaauggca

SEQ ID NO: 1443458 - RNA, 19 nt, Artificial Sequence
  Description of Artificial Sequence: Synthetic oligonucleotide
gaugaaggcuacgacggga

SEQ ID NO: 1443459 - RNA, 19 nt, Artificial Sequence
  Description of Artificial Sequence: Synthetic oligonucleotide
cugcagaauaccugccuac

SEQ ID NO: 1443460 - RNA, 19 nt, Artificial Sequence
  Description of Artificial Sequence: Synthetic oligonucleotide
ggcuacugugcauauggag

SEQ ID NO: 1443461 - RNA, 19 nt, Artificial Sequence
  Description of Artificial Sequence: Synthetic oligonucleotide
acucuuauuuacacgcuga

SEQ ID NO: 1443462 - RNA, 19 nt, Artificial Sequence
  Description of Artificial Sequence: Synthetic oligonucleotide
cuacugugcauauggagaa

SEQ ID NO: 1443463 - RNA, 19 nt, Artificial Sequence
  Description of Artificial Sequence: Synthetic oligonucleotide
ucaggacuauugagugaag

SEQ ID NO: 1443464 - RNA, 19 nt, Artificial Sequence
  Description of Artificial Sequence: Synthetic oligonucleotide
caggaugagaugaaggcua

SEQ ID NO: 1443465 - RNA, 19 nt, Artificial Sequence
  Description of Artificial Sequence: Synthetic oligonucleotide
ugacagggguaaauauccu

SEQ ID NO: 1443466 - RNA, 19 nt, Artificial Sequence
  Description of Artificial Sequence: Synthetic oligonucleotide
agguugaggcaagagcauc

SEQ ID NO: 1443467 - RNA, 19 nt, Artificial Sequence
  Description of Artificial Sequence: Synthetic oligonucleotide
ggauauucaaggaaaguaa

SEQ ID NO: 1443468 - RNA, 19 nt, Artificial Sequence
  Description of Artificial Sequence: Synthetic oligonucleotide
agauaucucuugccaggug

SEQ ID NO: 1443469 - RNA, 19 nt, Artificial Sequence
  Description of Artificial Sequence: Synthetic oligonucleotide
cacacacacacacacgaga

SEQ ID NO: 1443470 - RNA, 19 nt, Artificial Sequence
  Description of Artificial Sequence: Synthetic oligonucleotide
uaacugcuuuaguaaccug

SEQ ID NO: 1443471 - RNA, 19 nt, Artificial Sequence
  Description of Artificial Sequence: Synthetic oligonucleotide
acguggguuaucugauuug

SEQ ID NO: 1443472 - RNA, 19 nt, Artificial Sequence
  Description of Artificial Sequence: Synthetic oligonucleotide
aggaugagaugaaggcuac

SEQ ID NO: 1443473 - RNA, 19 nt, Artificial Sequence
  Description of Artificial Sequence: Synthetic oligonucleotide
agucaggacuauugaguga

SEQ ID NO: 1443474 - RNA, 19 nt, Artificial Sequence
  Description of Artificial Sequence: Synthetic oligonucleotide
augaaggcuacgacgggag

SEQ ID NO: 1443475 - RNA, 19 nt, Artificial Sequence
  Description of Artificial Sequence: Synthetic oligonucleotide
acaguacuauaguuugaau

SEQ ID NO: 1443476 - RNA, 19 nt, Artificial Sequence
  Description of Artificial Sequence: Synthetic oligonucleotide
uugauugcuugguuccuua

SEQ ID NO: 1443477 - RNA, 19 nt, Artificial Sequence
  Description of Artificial Sequence: Synthetic oligonucleotide
augccuggggcagagaccu

SEQ ID NO: 1443478 - RNA, 19 nt, Artificial Sequence
  Description of Artificial Sequence: Synthetic oligonucleotide
uaguaaccugcugucgcag

SEQ ID NO: 1443479 - RNA, 19 nt, Artificial Sequence
  Description of Artificial Sequence: Synthetic oligonucleotide
cugugcauauggagaacug

SEQ ID NO: 1443480 - RNA, 19 nt, Artificial Sequence
  Description of Artificial Sequence: Synthetic oligonucleotide
uguuaacauuguuuucguu

SEQ ID NO: 1443481 - RNA, 19 nt, Artificial Sequence
  Description of Artificial Sequence: Synthetic oligonucleotide
ggacuauugagugaaggca

SEQ ID NO: 1443482 - RNA, 19 nt, Artificial Sequence
  Description of Artificial Sequence: Synthetic oligonucleotide
ugacuaugggcugacucaa

SEQ ID NO: 1443483 - RNA, 19 nt, Artificial Sequence
  Description of Artificial Sequence: Synthetic oligonucleotide
caguacuauaguuugaauu

SEQ ID NO: 1443484 - RNA, 19 nt, Artificial Sequence
  Description of Artificial Sequence: Synthetic oligonucleotide
accugccuacaguuaaaug

SEQ ID NO: 1443485 - RNA, 19 nt, Artificial Sequence
  Description of Artificial Sequence: Synthetic oligonucleotide
auccucucgacagaaagua

SEQ ID NO: 1443486 - RNA, 19 nt, Artificial Sequence
  Description of Artificial Sequence: Synthetic oligonucleotide
guuaugcgcacucuuauuu

SEQ ID NO: 1443487 - RNA, 19 nt, Artificial Sequence
  Description of Artificial Sequence: Synthetic oligonucleotide
gauuugacuaugggcugac

SEQ ID NO: 1443488 - RNA, 19 nt, Artificial Sequence
  Description of Artificial Sequence: Synthetic oligonucleotide
ccuggauauucaaggaaag

SEQ ID NO: 1443489 - RNA, 19 nt, Artificial Sequence
  Description of Artificial Sequence: Synthetic oligonucleotide
aguaaccugcugucgcaga

SEQ ID NO: 1443490 - RNA, 19 nt, Artificial Sequence
  Description of Artificial Sequence: Synthetic oligonucleotide
aguuaugcgcacucuuauu

SEQ ID NO: 1443491 - RNA, 19 nt, Artificial Sequence
  Description of Artificial Sequence: Synthetic oligonucleotide
ggguaaauauccucucgac

SEQ ID NO: 1443492 - RNA, 19 nt, Artificial Sequence
  Description of Artificial Sequence: Synthetic oligonucleotide
gcauguaacugcuuuagua

SEQ ID NO: 1443493 - RNA, 19 nt, Artificial Sequence
  Description of Artificial Sequence: Synthetic oligonucleotide
ggcuacgauauugagcacc

SEQ ID NO: 1443494 - RNA, 19 nt, Artificial Sequence
  Description of Artificial Sequence: Synthetic oligonucleotide
gcuacugugcauauggaga

SEQ ID NO: 1443495 - RNA, 19 nt, Artificial Sequence
  Description of Artificial Sequence: Synthetic oligonucleotide
aggcaguuacauuggaguu

SEQ ID NO: 1443496 - RNA, 19 nt, Artificial Sequence
  Description of Artificial Sequence: Synthetic oligonucleotide
gcuuuaguaaccugcuguc

SEQ ID NO: 1443497 - RNA, 19 nt, Artificial Sequence
  Description of Artificial Sequence: Synthetic oligonucleotide
acacacacacacacacacg

SEQ ID NO: 1443498 - RNA, 19 nt, Artificial Sequence
  Description of Artificial Sequence: Synthetic oligonucleotide
aggagccuaaggccucagg

SEQ ID NO: 1443499 - RNA, 19 nt, Artificial Sequence
  Description of Artificial Sequence: Synthetic oligonucleotide
gggguaaauauccucucga

SEQ ID NO: 1443500 - RNA, 19 nt, Artificial Sequence
  Description of Artificial Sequence: Synthetic oligonucleotide
gauugcuugguuccuuagu

SEQ ID NO: 1443501 - RNA, 19 nt, Artificial Sequence
  Description of Artificial Sequence: Synthetic oligonucleotide
gcagaauaccugccuacag

SEQ ID NO: 1443502 - RNA, 19 nt, Artificial Sequence
  Description of Artificial Sequence: Synthetic oligonucleotide
ggacaaaucucauggccca

SEQ ID NO: 1443503 - RNA, 19 nt, Artificial Sequence
  Description of Artificial Sequence: Synthetic oligonucleotide
aggcaagagcaucaaguuu

SEQ ID NO: 1443504 - RNA, 19 nt, Artificial Sequence
  Description of Artificial Sequence: Synthetic oligonucleotide
uaccccucaugugaauuca

SEQ ID NO: 1443505 - RNA, 19 nt, Artificial Sequence
  Description of Artificial Sequence: Synthetic oligonucleotide
guaacuuauuuggcuacga

SEQ ID NO: 1443506 - RNA, 19 nt, Artificial Sequence
  Description of Artificial Sequence: Synthetic oligonucleotide
agugaaggcaaaggcuacu

SEQ ID NO: 1443507 - RNA, 19 nt, Artificial Sequence
  Description of Artificial Sequence: Synthetic oligonucleotide
acucccuuacaaaaguuua

SEQ ID NO: 1443508 - RNA, 19 nt, Artificial Sequence
  Description of Artificial Sequence: Synthetic oligonucleotide
acgacaacacaggggaaca

SEQ ID NO: 1443509 - RNA, 19 nt, Artificial Sequence
  Description of Artificial Sequence: Synthetic oligonucleotide
uugagccuccacacacaca

SEQ ID NO: 1443510 - RNA, 19 nt, Artificial Sequence
  Description of Artificial Sequence: Synthetic oligonucleotide
cacaguacuauaguuugaa

SEQ ID NO: 1443511 - RNA, 19 nt, Artificial Sequence
  Description of Artificial Sequence: Synthetic oligonucleotide
acacacacacacacgagaa

SEQ ID NO: 1443512 - RNA, 19 nt, Artificial Sequence
  Description of Artificial Sequence: Synthetic oligonucleotide
ugaauuugacagggguaaa

SEQ ID NO: 1443513 - RNA, 19 nt, Artificial Sequence
  Description of Artificial Sequence: Synthetic oligonucleotide
agccagauguuaaauuuaa

SEQ ID NO: 1443514 - RNA, 19 nt, Artificial Sequence
  Description of Artificial Sequence: Synthetic oligonucleotide
auuaccccucaugugaauu

SEQ ID NO: 1443515 - RNA, 19 nt, Artificial Sequence
  Description of Artificial Sequence: Synthetic oligonucleotide
ccuccacacacacacacac

SEQ ID NO: 1443516 - RNA, 19 nt, Artificial Sequence
  Description of Artificial Sequence: Synthetic oligonucleotide
gccuaagucaggacuauug

SEQ ID NO: 1443517 - RNA, 19 nt, Artificial Sequence
  Description of Artificial Sequence: Synthetic oligonucleotide
gagugaaggcaaaggcuac

SEQ ID NO: 1443518 - RNA, 19 nt, Artificial Sequence
  Description of Artificial Sequence: Synthetic oligonucleotide
gaggcaagagcaucaaguu

SEQ ID NO: 1443519 - RNA, 19 nt, Artificial Sequence
  Description of Artificial Sequence: Synthetic oligonucleotide
uaaguccccauugcuuuaa

SEQ ID NO: 1443520 - RNA, 19 nt, Artificial Sequence
  Description of Artificial Sequence: Synthetic oligonucleotide
gaguuaugcgcacucuuau

SEQ ID NO: 1443521 - RNA, 19 nt, Artificial Sequence
  Description of Artificial Sequence: Synthetic oligonucleotide
cacugcccaggaacuaaag

SEQ ID NO: 1443522 - RNA, 19 nt, Artificial Sequence
  Description of Artificial Sequence: Synthetic oligonucleotide
ugguuccuuaguugaguua

SEQ ID NO: 1443523 - RNA, 19 nt, Artificial Sequence
  Description of Artificial Sequence: Synthetic oligonucleotide
acuauugagugaaggcaaa

SEQ ID NO: 1443524 - RNA, 19 nt, Artificial Sequence
  Description of Artificial Sequence: Synthetic oligonucleotide
ucuucacgucagcugccaa

SEQ ID NO: 1443525 - RNA, 19 nt, Artificial Sequence
  Description of Artificial Sequence: Synthetic oligonucleotide
acacacacacacacacgag

SEQ ID NO: 1443526 - RNA, 19 nt, Artificial Sequence
  Description of Artificial Sequence: Synthetic oligonucleotide
aucucauggcccaucuaca

SEQ ID NO: 1443527 - RNA, 19 nt, Artificial Sequence
  Description of Artificial Sequence: Synthetic oligonucleotide
uaguugaguuaugcgcacu

SEQ ID NO: 1443528 - RNA, 19 nt, Artificial Sequence
  Description of Artificial Sequence: Synthetic oligonucleotide
ccuuaacaggagccuaagg

SEQ ID NO: 1443529 - RNA, 19 nt, Artificial Sequence
  Description of Artificial Sequence: Synthetic oligonucleotide
gaauuugacagggguaaau

SEQ ID NO: 1443530 - RNA, 19 nt, Artificial Sequence
  Description of Artificial Sequence: Synthetic oligonucleotide
cagaauaccugccuacagu

SEQ ID NO: 1443531 - RNA, 19 nt, Artificial Sequence
  Description of Artificial Sequence: Synthetic oligonucleotide
gcgcacucuuauuuacacg

SEQ ID NO: 1443532 - RNA, 19 nt, Artificial Sequence
  Description of Artificial Sequence: Synthetic oligonucleotide
uaccugccuacaguuaaau

SEQ ID NO: 1443533 - RNA, 19 nt, Artificial Sequence
  Description of Artificial Sequence: Synthetic oligonucleotide
gagaccuuaacaggagccu

SEQ ID NO: 1443534 - RNA, 19 nt, Artificial Sequence
  Description of Artificial Sequence: Synthetic oligonucleotide
agugaggagaggacuuggu

SEQ ID NO: 1443535 - RNA, 19 nt, Artificial Sequence
  Description of Artificial Sequence: Synthetic oligonucleotide
agauuaccccucaugugaa

SEQ ID NO: 1443536 - RNA, 19 nt, Artificial Sequence
  Description of Artificial Sequence: Synthetic oligonucleotide
ggcaguuacauuggaguuc

SEQ ID NO: 1443537 - RNA, 19 nt, Artificial Sequence
  Description of Artificial Sequence: Synthetic oligonucleotide
gugcaugggaugguaugug

SEQ ID NO: 1443538 - RNA, 19 nt, Artificial Sequence
  Description of Artificial Sequence: Synthetic oligonucleotide
ugcugucgcagacgccaga

SEQ ID NO: 1443539 - RNA, 19 nt, Artificial Sequence
  Description of Artificial Sequence: Synthetic oligonucleotide
ccuaagucaggacuauuga

SEQ ID NO: 1443540 - RNA, 19 nt, Artificial Sequence
  Description of Artificial Sequence: Synthetic oligonucleotide
guuccuuaguugaguuaug

SEQ ID NO: 1443541 - RNA, 19 nt, Artificial Sequence
  Description of Artificial Sequence: Synthetic oligonucleotide
ggcugguugcacaagccug

SEQ ID NO: 1443542 - RNA, 19 nt, Artificial Sequence
  Description of Artificial Sequence: Synthetic oligonucleotide
cucaagcuugguaguuuca

SEQ ID NO: 1443543 - RNA, 19 nt, Artificial Sequence
  Description of Artificial Sequence: Synthetic oligonucleotide
cuaugggcugacucaagcu

SEQ ID NO: 1443544 - RNA, 19 nt, Artificial Sequence
  Description of Artificial Sequence: Synthetic oligonucleotide
cagccagauguuaaauuua

SEQ ID NO: 1443545 - RNA, 19 nt, Artificial Sequence
  Description of Artificial Sequence: Synthetic oligonucleotide
cugucgcagacgccagagc

SEQ ID NO: 1443546 - RNA, 19 nt, Artificial Sequence
  Description of Artificial Sequence: Synthetic oligonucleotide
cuaucucagucauucuccu

SEQ ID NO: 1443547 - RNA, 19 nt, Artificial Sequence
  Description of Artificial Sequence: Synthetic oligonucleotide
acacaguacuauaguuuga

SEQ ID NO: 1443548 - RNA, 19 nt, Artificial Sequence
  Description of Artificial Sequence: Synthetic oligonucleotide
gcuacgauauugagcacca

SEQ ID NO: 1443549 - RNA, 19 nt, Artificial Sequence
  Description of Artificial Sequence: Synthetic oligonucleotide
ucacguggguuaucugauu

SEQ ID NO: 1443550 - RNA, 19 nt, Artificial Sequence
  Description of Artificial Sequence: Synthetic oligonucleotide
guggguuaucugauuugac

SEQ ID NO: 1443551 - RNA, 19 nt, Artificial Sequence
  Description of Artificial Sequence: Synthetic oligonucleotide
gaauaccugccuacaguua

SEQ ID NO: 1443552 - RNA, 19 nt, Artificial Sequence
  Description of Artificial Sequence: Synthetic oligonucleotide
acacacacacacacacaca

SEQ ID NO: 1443553 - RNA, 19 nt, Artificial Sequence
  Description of Artificial Sequence: Synthetic oligonucleotide
gcuugguaguuucauguua

SEQ ID NO: 1443554 - RNA, 19 nt, Artificial Sequence
  Description of Artificial Sequence: Synthetic oligonucleotide
caacacaggggaacacuaa

SEQ ID NO: 1443555 - RNA, 19 nt, Artificial Sequence
  Description of Artificial Sequence: Synthetic oligonucleotide
gccaaagguucacagauau

SEQ ID NO: 1443556 - RNA, 19 nt, Artificial Sequence
  Description of Artificial Sequence: Synthetic oligonucleotide
cucucacguggguuaucug

SEQ ID NO: 1443557 - RNA, 19 nt, Artificial Sequence
  Description of Artificial Sequence: Synthetic oligonucleotide
gugugcauggugggcauuc

SEQ ID NO: 1443558 - RNA, 19 nt, Artificial Sequence
  Description of Artificial Sequence: Synthetic oligonucleotide
gguuaucugauuugacuau

SEQ ID NO: 1443559 - RNA, 19 nt, Artificial Sequence
  Description of Artificial Sequence: Synthetic oligonucleotide
agaacacuguccagccaga

SEQ ID NO: 1443560 - RNA, 19 nt, Artificial Sequence
  Description of Artificial Sequence: Synthetic oligonucleotide
caggcccuugggauuccag

SEQ ID NO: 1443561 - RNA, 19 nt, Artificial Sequence
  Description of Artificial Sequence: Synthetic oligonucleotide
cuccacacacacacacaca

SEQ ID NO: 1443562 - RNA, 19 nt, Artificial Sequence
  Description of Artificial Sequence: Synthetic oligonucleotide
augcgcacucuuauuuaca

SEQ ID NO: 1443563 - RNA, 19 nt, Artificial Sequence
  Description of Artificial Sequence: Synthetic oligonucleotide
aggggaacacuaaggcagu

SEQ ID NO: 1443564 - RNA, 19 nt, Artificial Sequence
  Description of Artificial Sequence: Synthetic oligonucleotide
guugcacaagccuguaauu

SEQ ID NO: 1443565 - RNA, 19 nt, Artificial Sequence
  Description of Artificial Sequence: Synthetic oligonucleotide
cuugguuccuuaguugagu

SEQ ID NO: 1443566 - RNA, 19 nt, Artificial Sequence
  Description of Artificial Sequence: Synthetic oligonucleotide
cacacacacacacgagaaa

SEQ ID NO: 1443567 - RNA, 19 nt, Artificial Sequence
  Description of Artificial Sequence: Synthetic oligonucleotide
gagcaucaaguuugagccu

SEQ ID NO: 1443568 - RNA, 19 nt, Artificial Sequence
  Description of Artificial Sequence: Synthetic oligonucleotide
uggcuacgauauugagcac

SEQ ID NO: 1443569 - RNA, 19 nt, Artificial Sequence
  Description of Artificial Sequence: Synthetic oligonucleotide
cucacguggguuaucugau

SEQ ID NO: 1443570 - RNA, 19 nt, Artificial Sequence
  Description of Artificial Sequence: Synthetic oligonucleotide
guugaguuaugcgcacucu

SEQ ID NO: 1443571 - RNA, 19 nt, Artificial Sequence
  Description of Artificial Sequence: Synthetic oligonucleotide
aagcacugcccaggaacua

SEQ ID NO: 1443572 - RNA, 19 nt, Artificial Sequence
  Description of Artificial Sequence: Synthetic oligonucleotide
gcagcucucacguggguua

SEQ ID NO: 1443573 - RNA, 19 nt, Artificial Sequence
  Description of Artificial Sequence: Synthetic oligonucleotide
gauuaccccucaugugaau

SEQ ID NO: 1443574 - RNA, 19 nt, Artificial Sequence
  Description of Artificial Sequence: Synthetic oligonucleotide
auaccugccuacaguuaaa

SEQ ID NO: 1443575 - RNA, 19 nt, Artificial Sequence
  Description of Artificial Sequence: Synthetic oligonucleotide
agcucucacguggguuauc

SEQ ID NO: 1443576 - RNA, 19 nt, Artificial Sequence
  Description of Artificial Sequence: Synthetic oligonucleotide
cacgucagcugccaagccu

SEQ ID NO: 1443577 - RNA, 19 nt, Artificial Sequence
  Description of Artificial Sequence: Synthetic oligonucleotide
caccaugccuggggcagag

SEQ ID NO: 1443578 - RNA, 19 nt, Artificial Sequence
  Description of Artificial Sequence: Synthetic oligonucleotide
aggcuacugugcauaugga

SEQ ID NO: 1443579 - RNA, 19 nt, Artificial Sequence
  Description of Artificial Sequence: Synthetic oligonucleotide
gggagccaucuucacguca

SEQ ID NO: 1443580 - RNA, 19 nt, Artificial Sequence
  Description of Artificial Sequence: Synthetic oligonucleotide
cacguggguuaucugauuu

SEQ ID NO: 1443581 - RNA, 19 nt, Artificial Sequence
  Description of Artificial Sequence: Synthetic oligonucleotide
cuuauuuggcuacgauauu

SEQ ID NO: 1443582 - RNA, 19 nt, Artificial Sequence
  Description of Artificial Sequence: Synthetic oligonucleotide
cagguguggcugguugcac

SEQ ID NO: 1443583 - RNA, 19 nt, Artificial Sequence
  Description of Artificial Sequence: Synthetic oligonucleotide
gcuacgacgggagccaucu

SEQ ID NO: 1443584 - RNA, 19 nt, Artificial Sequence
  Description of Artificial Sequence: Synthetic oligonucleotide
gcaagagcaucaaguuuga

SEQ ID NO: 1443585 - RNA, 19 nt, Artificial Sequence
  Description of Artificial Sequence: Synthetic oligonucleotide
cagauaucucuugccaggu

SEQ ID NO: 1443586 - RNA, 19 nt, Artificial Sequence
  Description of Artificial Sequence: Synthetic oligonucleotide
gggacucagauuaccccuc

SEQ ID NO: 1443587 - RNA, 19 nt, Artificial Sequence
  Description of Artificial Sequence: Synthetic oligonucleotide
cgggcugcaguuaggcaag

SEQ ID NO: 1443588 - RNA, 19 nt, Artificial Sequence
  Description of Artificial Sequence: Synthetic oligonucleotide
gacucagauuaccccucau

SEQ ID NO: 1443589 - RNA, 19 nt, Artificial Sequence
  Description of Artificial Sequence: Synthetic oligonucleotide
acgccagagcucaggucug

SEQ ID NO: 1443590 - RNA, 19 nt, Artificial Sequence
  Description of Artificial Sequence: Synthetic oligonucleotide
agccuaagucaggacuauu

SEQ ID NO: 1443591 - RNA, 19 nt, Artificial Sequence
  Description of Artificial Sequence: Synthetic oligonucleotide
cagacgccagagcucaggu

SEQ ID NO: 1443592 - RNA, 19 nt, Artificial Sequence
  Description of Artificial Sequence: Synthetic oligonucleotide
acuugguacuggggagaau

SEQ ID NO: 1443593 - RNA, 19 nt, Artificial Sequence
  Description of Artificial Sequence: Synthetic oligonucleotide
agacgacaacacaggggaa

SEQ ID NO: 1443594 - RNA, 19 nt, Artificial Sequence
  Description of Artificial Sequence: Synthetic oligonucleotide
gggaacacuaaggcaguua

SEQ ID NO: 1443595 - RNA, 19 nt, Artificial Sequence
  Description of Artificial Sequence: Synthetic oligonucleotide
gaacacuguccagccagau

SEQ ID NO: 1443596 - RNA, 19 nt, Artificial Sequence
  Description of Artificial Sequence: Synthetic oligonucleotide
gaagcacuggucagauguu

SEQ ID NO: 1443597 - RNA, 19 nt, Artificial Sequence
  Description of Artificial Sequence: Synthetic oligonucleotide
cguggguuaucugauuuga

SEQ ID NO: 1443598 - RNA, 19 nt, Artificial Sequence
  Description of Artificial Sequence: Synthetic oligonucleotide
gagccuccacacacacaca

SEQ ID NO: 1443599 - RNA, 19 nt, Artificial Sequence
  Description of Artificial Sequence: Synthetic oligonucleotide
ccacacacacacacacaca

SEQ ID NO: 1443600 - RNA, 19 nt, Artificial Sequence
  Description of Artificial Sequence: Synthetic oligonucleotide
gcugguugcacaagccugu

SEQ ID NO: 1443601 - RNA, 19 nt, Artificial Sequence
  Description of Artificial Sequence: Synthetic oligonucleotide
cccaaucuaucucagucau

SEQ ID NO: 1443602 - RNA, 19 nt, Artificial Sequence
  Description of Artificial Sequence: Synthetic oligonucleotide
caucuacaccagccuaagu

SEQ ID NO: 1443603 - RNA, 19 nt, Artificial Sequence
  Description of Artificial Sequence: Synthetic oligonucleotide
gcccaucuacaccagccua

SEQ ID NO: 1443604 - RNA, 19 nt, Artificial Sequence
  Description of Artificial Sequence: Synthetic oligonucleotide
cagcagaagcucagcuacu

SEQ ID NO: 1443605 - RNA, 19 nt, Artificial Sequence
  Description of Artificial Sequence: Synthetic oligonucleotide
cuccccaaucuaucucagu

SEQ ID NO: 1443606 - RNA, 19 nt, Artificial Sequence
  Description of Artificial Sequence: Synthetic oligonucleotide
caguuacauuggaguucca

SEQ ID NO: 1443607 - RNA, 19 nt, Artificial Sequence
  Description of Artificial Sequence: Synthetic oligonucleotide
caggugcaugggaugguau

SEQ ID NO: 1443608 - RNA, 19 nt, Artificial Sequence
  Description of Artificial Sequence: Synthetic oligonucleotide
gcucagcuacucgggcugc

SEQ ID NO: 1443609 - RNA, 19 nt, Artificial Sequence
  Description of Artificial Sequence: Synthetic oligonucleotide
gccuccacacacacacaca

SEQ ID NO: 1443610 - RNA, 19 nt, Artificial Sequence
  Description of Artificial Sequence: Synthetic oligonucleotide
gcuacucgggcugcaguua

SEQ ID NO: 1443611 - RNA, 19 nt, Artificial Sequence
  Description of Artificial Sequence: Synthetic oligonucleotide
ggccaaagguucacagaua

SEQ ID NO: 1443612 - RNA, 19 nt, Artificial Sequence
  Description of Artificial Sequence: Synthetic oligonucleotide
aggcuacgacgggagccau

SEQ ID NO: 1443613 - RNA, 19 nt, Artificial Sequence
  Description of Artificial Sequence: Synthetic oligonucleotide
gcacugcccaggaacuaaa

SEQ ID NO: 1443614 - RNA, 19 nt, Artificial Sequence
  Description of Artificial Sequence: Synthetic oligonucleotide
ggcuacgacgggagccauc

SEQ ID NO: 1443615 - RNA, 19 nt, Artificial Sequence
  Description of Artificial Sequence: Synthetic oligonucleotide
cgacgggagccaucuucac

SEQ ID NO: 1443616 - RNA, 19 nt, Artificial Sequence
  Description of Artificial Sequence: Synthetic oligonucleotide
cacuguccagccagauguu

SEQ ID NO: 1443617 - RNA, 19 nt, Artificial Sequence
  Description of Artificial Sequence: Synthetic oligonucleotide
cagccuaagucaggacuau

SEQ ID NO: 1443618 - RNA, 19 nt, Artificial Sequence
  Description of Artificial Sequence: Synthetic oligonucleotide
cuacgauauugagcaccau

SEQ ID NO: 1443619 - RNA, 19 nt, Artificial Sequence
  Description of Artificial Sequence: Synthetic oligonucleotide
ccaggguaaggugguaagu

SEQ ID NO: 1443620 - RNA, 19 nt, Artificial Sequence
  Description of Artificial Sequence: Synthetic oligonucleotide
gcaccaugccuggggcaga

SEQ ID NO: 1443621 - RNA, 19 nt, Artificial Sequence
  Description of Artificial Sequence: Synthetic oligonucleotide
ccaaucuaucucagucauu

SEQ ID NO: 1443622 - RNA, 19 nt, Artificial Sequence
  Description of Artificial Sequence: Synthetic oligonucleotide
ccccucaugugaauucauu

SEQ ID NO: 1443623 - RNA, 19 nt, Artificial Sequence
  Description of Artificial Sequence: Synthetic oligonucleotide
cgcagacgccagagcucag

SEQ ID NO: 1443624 - RNA, 19 nt, Artificial Sequence
  Description of Artificial Sequence: Synthetic oligonucleotide
ggggaacacuaaggcaguu

SEQ ID NO: 1443625 - RNA, 19 nt, Artificial Sequence
  Description of Artificial Sequence: Synthetic oligonucleotide
cuacgacgggagccaucuu

SEQ ID NO: 1443626 - RNA, 19 nt, Artificial Sequence
  Description of Artificial Sequence: Synthetic oligonucleotide
cgccagagcucaggucuga

SEQ ID NO: 1443627 - RNA, 19 nt, Artificial Sequence
  Description of Artificial Sequence: Synthetic oligonucleotide
aauguuagauauuagaaag

SEQ ID NO: 1443628 - RNA, 19 nt, Artificial Sequence
  Description of Artificial Sequence: Synthetic oligonucleotide
uuagauauuagaaagucag

SEQ ID NO: 1443629 - RNA, 19 nt, Artificial Sequence
  Description of Artificial Sequence: Synthetic oligonucleotide
uuuauggcaauaaagaucu

SEQ ID NO: 1443630 - RNA, 19 nt, Artificial Sequence
  Description of Artificial Sequence: Synthetic oligonucleotide
aaucgauuacuucugauuc

SEQ ID NO: 1443631 - RNA, 19 nt, Artificial Sequence
  Description of Artificial Sequence: Synthetic oligonucleotide
auaaagaucuuugagggcc

SEQ ID NO: 1443632 - RNA, 19 nt, Artificial Sequence
  Description of Artificial Sequence: Synthetic oligonucleotide
aaagugacgauuauaaauc

SEQ ID NO: 1443633 - RNA, 19 nt, Artificial Sequence
  Description of Artificial Sequence: Synthetic oligonucleotide
caugcuauugacaauagag

SEQ ID NO: 1443634 - RNA, 19 nt, Artificial Sequence
  Description of Artificial Sequence: Synthetic oligonucleotide
aauaaagaucuuugagggc

SEQ ID NO: 1443635 - RNA, 19 nt, Artificial Sequence
  Description of Artificial Sequence: Synthetic oligonucleotide
aauuucucuacguuuauga

SEQ ID NO: 1443636 - RNA, 19 nt, Artificial Sequence
  Description of Artificial Sequence: Synthetic oligonucleotide
aagucuuacaaauauuuca

SEQ ID NO: 1443637 - RNA, 19 nt, Artificial Sequence
  Description of Artificial Sequence: Synthetic oligonucleotide
aaugauucuuaaaaccugc

SEQ ID NO: 1443638 - RNA, 19 nt, Artificial Sequence
  Description of Artificial Sequence: Synthetic oligonucleotide
ucuacguuuaugagaaucg

SEQ ID NO: 1443639 - RNA, 19 nt, Artificial Sequence
  Description of Artificial Sequence: Synthetic oligonucleotide
aauauuucuacuaaucugu

SEQ ID NO: 1443640 - RNA, 19 nt, Artificial Sequence
  Description of Artificial Sequence: Synthetic oligonucleotide
aaagucagaugaaugauac

SEQ ID NO: 1443641 - RNA, 19 nt, Artificial Sequence
  Description of Artificial Sequence: Synthetic oligonucleotide
guaagagcuacuuaaauac

SEQ ID NO: 1443642 - RNA, 19 nt, Artificial Sequence
  Description of Artificial Sequence: Synthetic oligonucleotide
ugacaauagagcaagcuug

SEQ ID NO: 1443643 - RNA, 19 nt, Artificial Sequence
  Description of Artificial Sequence: Synthetic oligonucleotide
uugcauaggacacuauucg

SEQ ID NO: 1443644 - RNA, 19 nt, Artificial Sequence
  Description of Artificial Sequence: Synthetic oligonucleotide
agaccuuagagguaagagc

SEQ ID NO: 1443645 - RNA, 19 nt, Artificial Sequence
  Description of Artificial Sequence: Synthetic oligonucleotide
uuuauuguacugcuggaug

SEQ ID NO: 1443646 - RNA, 19 nt, Artificial Sequence
  Description of Artificial Sequence: Synthetic oligonucleotide
aaacaagucuuacaaauau

SEQ ID NO: 1443647 - RNA, 19 nt, Artificial Sequence
  Description of Artificial Sequence: Synthetic oligonucleotide
ucuauaagcuucuuguucu

SEQ ID NO: 1443648 - RNA, 19 nt, Artificial Sequence
  Description of Artificial Sequence: Synthetic oligonucleotide
augagaaucgauuacuucu

SEQ ID NO: 1443649 - RNA, 19 nt, Artificial Sequence
  Description of Artificial Sequence: Synthetic oligonucleotide
ucuacuaaucuguuuuggg

SEQ ID NO: 1443650 - RNA, 19 nt, Artificial Sequence
  Description of Artificial Sequence: Synthetic oligonucleotide
cuauucuucucacauagcc

SEQ ID NO: 1443651 - RNA, 19 nt, Artificial Sequence
  Description of Artificial Sequence: Synthetic oligonucleotide
uucuauaugagggucuucg

SEQ ID NO: 1443652 - RNA, 19 nt, Artificial Sequence
  Description of Artificial Sequence: Synthetic oligonucleotide
uucucuacguuuaugagaa

SEQ ID NO: 1443653 - RNA, 19 nt, Artificial Sequence
  Description of Artificial Sequence: Synthetic oligonucleotide
uauauauuguauugcauuc

SEQ ID NO: 1443654 - RNA, 19 nt, Artificial Sequence
  Description of Artificial Sequence: Synthetic oligonucleotide
aguagagcugcauugcaac

SEQ ID NO: 1443655 - RNA, 19 nt, Artificial Sequence
  Description of Artificial Sequence: Synthetic oligonucleotide
uauaugagggucuucguga

SEQ ID NO: 1443656 - RNA, 19 nt, Artificial Sequence
  Description of Artificial Sequence: Synthetic oligonucleotide
aauaccaggcacaucagag

SEQ ID NO: 1443657 - RNA, 19 nt, Artificial Sequence
  Description of Artificial Sequence: Synthetic oligonucleotide
ucuacaaguccacauggcc

SEQ ID NO: 1443658 - RNA, 19 nt, Artificial Sequence
  Description of Artificial Sequence: Synthetic oligonucleotide
gaguucacaguaaacaagg

SEQ ID NO: 1443659 - RNA, 19 nt, Artificial Sequence
  Description of Artificial Sequence: Synthetic oligonucleotide
cuugguaacaugaguagag

SEQ ID NO: 1443660 - RNA, 19 nt, Artificial Sequence
  Description of Artificial Sequence: Synthetic oligonucleotide
cauauucuuucuuucgacg

SEQ ID NO: 1443661 - RNA, 19 nt, Artificial Sequence
  Description of Artificial Sequence: Synthetic oligonucleotide
gacacuauucgugacagag

SEQ ID NO: 1443662 - RNA, 19 nt, Artificial Sequence
  Description of Artificial Sequence: Synthetic oligonucleotide
ucgauuagaguucacagua

SEQ ID NO: 1443663 - RNA, 19 nt, Artificial Sequence
  Description of Artificial Sequence: Synthetic oligonucleotide
cuauucgugacagagagac

SEQ ID NO: 1443664 - RNA, 19 nt, Artificial Sequence
  Description of Artificial Sequence: Synthetic oligonucleotide
ugcaauuugugcuaccuga

SEQ ID NO: 1443665 - RNA, 19 nt, Artificial Sequence
  Description of Artificial Sequence: Synthetic oligonucleotide
uuuacaguuugucucuucu

SEQ ID NO: 1443666 - RNA, 19 nt, Artificial Sequence
  Description of Artificial Sequence: Synthetic oligonucleotide
ucauaguuaaauauuucua

SEQ ID NO: 1443667 - RNA, 19 nt, Artificial Sequence
  Description of Artificial Sequence: Synthetic oligonucleotide
augauacaaaggaaaaggc

SEQ ID NO: 1443668 - RNA, 19 nt, Artificial Sequence
  Description of Artificial Sequence: Synthetic oligonucleotide
aggaauguuagauauuaga

SEQ ID NO: 1443669 - RNA, 19 nt, Artificial Sequence
  Description of Artificial Sequence: Synthetic oligonucleotide
uuucucuacguuuaugaga

SEQ ID NO: 1443670 - RNA, 19 nt, Artificial Sequence
  Description of Artificial Sequence: Synthetic oligonucleotide
augguagcaauguuaggcg

SEQ ID NO: 1443671 - RNA, 19 nt, Artificial Sequence
  Description of Artificial Sequence: Synthetic oligonucleotide
guaaacaagguccaaguca

SEQ ID NO: 1443672 - RNA, 19 nt, Artificial Sequence
  Description of Artificial Sequence: Synthetic oligonucleotide
ugagaaucgauuacuucug

SEQ ID NO: 1443673 - RNA, 19 nt, Artificial Sequence
  Description of Artificial Sequence: Synthetic oligonucleotide
cacuauucgugacagagag

SEQ ID NO: 1443674 - RNA, 19 nt, Artificial Sequence
  Description of Artificial Sequence: Synthetic oligonucleotide
cagaugaaugauacaaagg

SEQ ID NO: 1443675 - RNA, 19 nt, Artificial Sequence
  Description of Artificial Sequence: Synthetic oligonucleotide
uguuagauauuagaaaguc

SEQ ID NO: 1443676 - RNA, 19 nt, Artificial Sequence
  Description of Artificial Sequence: Synthetic oligonucleotide
uauucuucucacauagcca

SEQ ID NO: 1443677 - RNA, 19 nt, Artificial Sequence
  Description of Artificial Sequence: Synthetic oligonucleotide
aaauagaccuuagagguaa

SEQ ID NO: 1443678 - RNA, 19 nt, Artificial Sequence
  Description of Artificial Sequence: Synthetic oligonucleotide
ucuucgugaaagaauuucu

SEQ ID NO: 1443679 - RNA, 19 nt, Artificial Sequence
  Description of Artificial Sequence: Synthetic oligonucleotide
auucgugacagagagacug

SEQ ID NO: 1443680 - RNA, 19 nt, Artificial Sequence
  Description of Artificial Sequence: Synthetic oligonucleotide
uauguugcaugcuauugac

SEQ ID NO: 1443681 - RNA, 19 nt, Artificial Sequence
  Description of Artificial Sequence: Synthetic oligonucleotide
auauucuuucuuucgacgu

SEQ ID NO: 1443682 - RNA, 19 nt, Artificial Sequence
  Description of Artificial Sequence: Synthetic oligonucleotide
ugcacaaguucauuucuag

SEQ ID NO: 1443683 - RNA, 19 nt, Artificial Sequence
  Description of Artificial Sequence: Synthetic oligonucleotide
auucaaaagcaacuguaca

SEQ ID NO: 1443684 - RNA, 19 nt, Artificial Sequence
  Description of Artificial Sequence: Synthetic oligonucleotide
caugaguagagcugcauug

SEQ ID NO: 1443685 - RNA, 19 nt, Artificial Sequence
  Description of Artificial Sequence: Synthetic oligonucleotide
auugcauaggacacuauuc

SEQ ID NO: 1443686 - RNA, 19 nt, Artificial Sequence
  Description of Artificial Sequence: Synthetic oligonucleotide
agccacacgauuuucaaga

SEQ ID NO: 1443687 - RNA, 19 nt, Artificial Sequence
  Description of Artificial Sequence: Synthetic oligonucleotide
aagugacgauuauaaaucu

SEQ ID NO: 1443688 - RNA, 19 nt, Artificial Sequence
  Description of Artificial Sequence: Synthetic oligonucleotide
uucgugaaagaauuucucu

SEQ ID NO: 1443689 - RNA, 19 nt, Artificial Sequence
  Description of Artificial Sequence: Synthetic oligonucleotide
uaugcuaguugguacugcc

SEQ ID NO: 1443690 - RNA, 19 nt, Artificial Sequence
  Description of Artificial Sequence: Synthetic oligonucleotide
ucaucaagauacacauucc

SEQ ID NO: 1443691 - RNA, 19 nt, Artificial Sequence
  Description of Artificial Sequence: Synthetic oligonucleotide
gacaauagagcaagcuugg

SEQ ID NO: 1443692 - RNA, 19 nt, Artificial Sequence
  Description of Artificial Sequence: Synthetic oligonucleotide
gucgacauucuuuagcagc

SEQ ID NO: 1443693 - RNA, 19 nt, Artificial Sequence
  Description of Artificial Sequence: Synthetic oligonucleotide
auggccauuaggaggaugc

SEQ ID NO: 1443694 - RNA, 19 nt, Artificial Sequence
  Description of Artificial Sequence: Synthetic oligonucleotide
uucaagacauuugacauau

SEQ ID NO: 1443695 - RNA, 19 nt, Artificial Sequence
  Description of Artificial Sequence: Synthetic oligonucleotide
acaaguucauuucuaggcu

SEQ ID NO: 1443696 - RNA, 19 nt, Artificial Sequence
  Description of Artificial Sequence: Synthetic oligonucleotide
gguuaagugacccaucuac

SEQ ID NO: 1443697 - RNA, 19 nt, Artificial Sequence
  Description of Artificial Sequence: Synthetic oligonucleotide
uuaagugacccaucuacaa

SEQ ID NO: 1443698 - RNA, 19 nt, Artificial Sequence
  Description of Artificial Sequence: Synthetic oligonucleotide
uagaccuuagagguaagag

SEQ ID NO: 1443699 - RNA, 19 nt, Artificial Sequence
  Description of Artificial Sequence: Synthetic oligonucleotide
auauguugcaugcuauuga

SEQ ID NO: 1443700 - RNA, 19 nt, Artificial Sequence
  Description of Artificial Sequence: Synthetic oligonucleotide
gauuacuucugauucugca

SEQ ID NO: 1443701 - RNA, 19 nt, Artificial Sequence
  Description of Artificial Sequence: Synthetic oligonucleotide
aaucaucugucucugcaau

SEQ ID NO: 1443702 - RNA, 19 nt, Artificial Sequence
  Description of Artificial Sequence: Synthetic oligonucleotide
uauugcauaggacacuauu

SEQ ID NO: 1443703 - RNA, 19 nt, Artificial Sequence
  Description of Artificial Sequence: Synthetic oligonucleotide
caagguccaagucaaacac

SEQ ID NO: 1443704 - RNA, 19 nt, Artificial Sequence
  Description of Artificial Sequence: Synthetic oligonucleotide
cuaguugguacugccaugg

SEQ ID NO: 1443705 - RNA, 19 nt, Artificial Sequence
  Description of Artificial Sequence: Synthetic oligonucleotide
guuuaugagaaucgauuac

SEQ ID NO: 1443706 - RNA, 19 nt, Artificial Sequence
  Description of Artificial Sequence: Synthetic oligonucleotide
aacccauggaacaguauuc

SEQ ID NO: 1443707 - RNA, 19 nt, Artificial Sequence
  Description of Artificial Sequence: Synthetic oligonucleotide
gacgucgacauucuuuagc

SEQ ID NO: 1443708 - RNA, 19 nt, Artificial Sequence
  Description of Artificial Sequence: Synthetic oligonucleotide
auagagcaagcuugguaac

SEQ ID NO: 1443709 - RNA, 19 nt, Artificial Sequence
  Description of Artificial Sequence: Synthetic oligonucleotide
ugguagcaauguuaggcgg

SEQ ID NO: 1443710 - RNA, 19 nt, Artificial Sequence
  Description of Artificial Sequence: Synthetic oligonucleotide
cuuaagcaaggguuaagug

SEQ ID NO: 1443711 - RNA, 19 nt, Artificial Sequence
  Description of Artificial Sequence: Synthetic oligonucleotide
agcuugguaacaugaguag

SEQ ID NO: 1443712 - RNA, 19 nt, Artificial Sequence
  Description of Artificial Sequence: Synthetic oligonucleotide
gggaauaccaggcacauca

SEQ ID NO: 1443713 - RNA, 19 nt, Artificial Sequence
  Description of Artificial Sequence: Synthetic oligonucleotide
uguaaucaguucauaguua

SEQ ID NO: 1443714 - RNA, 19 nt, Artificial Sequence
  Description of Artificial Sequence: Synthetic oligonucleotide
ugguaaguuggcaugucac

SEQ ID NO: 1443715 - RNA, 19 nt, Artificial Sequence
  Description of Artificial Sequence: Synthetic oligonucleotide
uaugagaaucgauuacuuc

SEQ ID NO: 1443716 - RNA, 19 nt, Artificial Sequence
  Description of Artificial Sequence: Synthetic oligonucleotide
agcaaggguuaagugaccc

SEQ ID NO: 1443717 - RNA, 19 nt, Artificial Sequence
  Description of Artificial Sequence: Synthetic oligonucleotide
ugguaacaugaguagagcu

SEQ ID NO: 1443718 - RNA, 19 nt, Artificial Sequence
  Description of Artificial Sequence: Synthetic oligonucleotide
ugcgaguugcuucuucugc

SEQ ID NO: 1443719 - RNA, 19 nt, Artificial Sequence
  Description of Artificial Sequence: Synthetic oligonucleotide
cuauaugagggucuucgug

SEQ ID NO: 1443720 - RNA, 19 nt, Artificial Sequence
  Description of Artificial Sequence: Synthetic oligonucleotide
auaggacacuauucgugac

SEQ ID NO: 1443721 - RNA, 19 nt, Artificial Sequence
  Description of Artificial Sequence: Synthetic oligonucleotide
aggccauaauucuugccgg

SEQ ID NO: 1443722 - RNA, 19 nt, Artificial Sequence
  Description of Artificial Sequence: Synthetic oligonucleotide
ucgugaaagaauuucucua

SEQ ID NO: 1443723 - RNA, 19 nt, Artificial Sequence
  Description of Artificial Sequence: Synthetic oligonucleotide
ugaucugguaaguuggcau

SEQ ID NO: 1443724 - RNA, 19 nt, Artificial Sequence
  Description of Artificial Sequence: Synthetic oligonucleotide
uuaugagaaucgauuacuu

SEQ ID NO: 1443725 - RNA, 19 nt, Artificial Sequence
  Description of Artificial Sequence: Synthetic oligonucleotide
uguuuugggagagcaaaug

SEQ ID NO: 1443726 - RNA, 19 nt, Artificial Sequence
  Description of Artificial Sequence: Synthetic oligonucleotide
uucgugacagagagacugg

SEQ ID NO: 1443727 - RNA, 19 nt, Artificial Sequence
  Description of Artificial Sequence: Synthetic oligonucleotide
ucuuucgacgucgacauuc

SEQ ID NO: 1443728 - RNA, 19 nt, Artificial Sequence
  Description of Artificial Sequence: Synthetic oligonucleotide
acgucgacauucuuuagca

SEQ ID NO: 1443729 - RNA, 19 nt, Artificial Sequence
  Description of Artificial Sequence: Synthetic oligonucleotide
acuaaucuguuuugggaga

SEQ ID NO: 1443730 - RNA, 19 nt, Artificial Sequence
  Description of Artificial Sequence: Synthetic oligonucleotide
cuguacaugcuguaaucag

SEQ ID NO: 1443731 - RNA, 19 nt, Artificial Sequence
  Description of Artificial Sequence: Synthetic oligonucleotide
uaggacacuauucgugaca

SEQ ID NO: 1443732 - RNA, 19 nt, Artificial Sequence
  Description of Artificial Sequence: Synthetic oligonucleotide
gauuagaguucacaguaaa

SEQ ID NO: 1443733 - RNA, 19 nt, Artificial Sequence
  Description of Artificial Sequence: Synthetic oligonucleotide
cacacccuaagccaaacug

SEQ ID NO: 1443734 - RNA, 19 nt, Artificial Sequence
  Description of Artificial Sequence: Synthetic oligonucleotide
agucaaacacaguuacucu

SEQ ID NO: 1443735 - RNA, 19 nt, Artificial Sequence
  Description of Artificial Sequence: Synthetic oligonucleotide
cuacuaaucuguuuuggga

SEQ ID NO: 1443736 - RNA, 19 nt, Artificial Sequence
  Description of Artificial Sequence: Synthetic oligonucleotide
aagagcuacuuaaauacaa

SEQ ID NO: 1443737 - RNA, 19 nt, Artificial Sequence
  Description of Artificial Sequence: Synthetic oligonucleotide
caagucuuacaaauauuuc

SEQ ID NO: 1443738 - RNA, 19 nt, Artificial Sequence
  Description of Artificial Sequence: Synthetic oligonucleotide
aaguuggcaugucaccugu

SEQ ID NO: 1443739 - RNA, 19 nt, Artificial Sequence
  Description of Artificial Sequence: Synthetic oligonucleotide
uaaguuggcaugucaccug

SEQ ID NO: 1443740 - RNA, 19 nt, Artificial Sequence
  Description of Artificial Sequence: Synthetic oligonucleotide
ucuugccggcuauauauug

SEQ ID NO: 1443741 - RNA, 19 nt, Artificial Sequence
  Description of Artificial Sequence: Synthetic oligonucleotide
caauguuaggcgguguucc

SEQ ID NO: 1443742 - RNA, 19 nt, Artificial Sequence
  Description of Artificial Sequence: Synthetic oligonucleotide
aauguuaggcgguguuccu

SEQ ID NO: 1443743 - RNA, 19 nt, Artificial Sequence
  Description of Artificial Sequence: Synthetic oligonucleotide
uugaucauccuuccugaaa

SEQ ID NO: 1443744 - RNA, 19 nt, Artificial Sequence
  Description of Artificial Sequence: Synthetic oligonucleotide
cuucgugaaagaauuucuc

SEQ ID NO: 1443745 - RNA, 19 nt, Artificial Sequence
  Description of Artificial Sequence: Synthetic oligonucleotide
uggaacaguauucccaauu

SEQ ID NO: 1443746 - RNA, 19 nt, Artificial Sequence
  Description of Artificial Sequence: Synthetic oligonucleotide
ugcuagucugauauaugcu

SEQ ID NO: 1443747 - RNA, 19 nt, Artificial Sequence
  Description of Artificial Sequence: Synthetic oligonucleotide
accuguggcaguguauugc

SEQ ID NO: 1443748 - RNA, 19 nt, Artificial Sequence
  Description of Artificial Sequence: Synthetic oligonucleotide
uuucaagcacagccacacg

SEQ ID NO: 1443749 - RNA, 19 nt, Artificial Sequence
  Description of Artificial Sequence: Synthetic oligonucleotide
auugcaacccauggaacag

SEQ ID NO: 1443750 - RNA, 19 nt, Artificial Sequence
  Description of Artificial Sequence: Synthetic oligonucleotide
uggcaauaaagaucuuuga

SEQ ID NO: 1443751 - RNA, 19 nt, Artificial Sequence
  Description of Artificial Sequence: Synthetic oligonucleotide
ugcuaguugguacugccau

SEQ ID NO: 1443752 - RNA, 19 nt, Artificial Sequence
  Description of Artificial Sequence: Synthetic oligonucleotide
uuggcaugucaccuguggc

SEQ ID NO: 1443753 - RNA, 19 nt, Artificial Sequence
  Description of Artificial Sequence: Synthetic oligonucleotide
uacguuuaugagaaucgau

SEQ ID NO: 1443754 - RNA, 19 nt, Artificial Sequence
  Description of Artificial Sequence: Synthetic oligonucleotide
uacaaguccacauggccau

SEQ ID NO: 1443755 - RNA, 19 nt, Artificial Sequence
  Description of Artificial Sequence: Synthetic oligonucleotide
uuuuauuguacugcuggau

SEQ ID NO: 1443756 - RNA, 19 nt, Artificial Sequence
  Description of Artificial Sequence: Synthetic oligonucleotide
ucugcaauuugugcuaccu

SEQ ID NO: 1443757 - RNA, 19 nt, Artificial Sequence
  Description of Artificial Sequence: Synthetic oligonucleotide
aggguuaagugacccaucu

SEQ ID NO: 1443758 - RNA, 19 nt, Artificial Sequence
  Description of Artificial Sequence: Synthetic oligonucleotide
ucgacgucgacauucuuua

SEQ ID NO: 1443759 - RNA, 19 nt, Artificial Sequence
  Description of Artificial Sequence: Synthetic oligonucleotide
uauaugcuaguugguacug

SEQ ID NO: 1443760 - RNA, 19 nt, Artificial Sequence
  Description of Artificial Sequence: Synthetic oligonucleotide
cauaggacacuauucguga

SEQ ID NO: 1443761 - RNA, 19 nt, Artificial Sequence
  Description of Artificial Sequence: Synthetic oligonucleotide
ugcauaggacacuauucgu

SEQ ID NO: 1443762 - RNA, 19 nt, Artificial Sequence
  Description of Artificial Sequence: Synthetic oligonucleotide
ucgccugccucgauuagag

SEQ ID NO: 1443763 - RNA, 19 nt, Artificial Sequence
  Description of Artificial Sequence: Synthetic oligonucleotide
aagcuugguaacaugagua

SEQ ID NO: 1443764 - RNA, 19 nt, Artificial Sequence
  Description of Artificial Sequence: Synthetic oligonucleotide
acacccuaagccaaacugg

SEQ ID NO: 1443765 - RNA, 19 nt, Artificial Sequence
  Description of Artificial Sequence: Synthetic oligonucleotide
cauucuuuagcagcuuccc

SEQ ID NO: 1443766 - RNA, 19 nt, Artificial Sequence
  Description of Artificial Sequence: Synthetic oligonucleotide
aagucagaugaaugauaca

SEQ ID NO: 1443767 - RNA, 19 nt, Artificial Sequence
  Description of Artificial Sequence: Synthetic oligonucleotide
ucauccuuccugaaaugau

SEQ ID NO: 1443768 - RNA, 19 nt, Artificial Sequence
  Description of Artificial Sequence: Synthetic oligonucleotide
aucuacaaguccacauggc

SEQ ID NO: 1443769 - RNA, 19 nt, Artificial Sequence
  Description of Artificial Sequence: Synthetic oligonucleotide
aggacacuauucgugacag

SEQ ID NO: 1443770 - RNA, 19 nt, Artificial Sequence
  Description of Artificial Sequence: Synthetic oligonucleotide
aucgauuacuucugauucu

SEQ ID NO: 1443771 - RNA, 19 nt, Artificial Sequence
  Description of Artificial Sequence: Synthetic oligonucleotide
uucgacgucgacauucuuu

SEQ ID NO: 1443772 - RNA, 19 nt, Artificial Sequence
  Description of Artificial Sequence: Synthetic oligonucleotide
cuuugaucauccuuccuga

SEQ ID NO: 1443773 - RNA, 19 nt, Artificial Sequence
  Description of Artificial Sequence: Synthetic oligonucleotide
gaccuuagagguaagagcu

SEQ ID NO: 1443774 - RNA, 19 nt, Artificial Sequence
  Description of Artificial Sequence: Synthetic oligonucleotide
aguccacauggccauuagg

SEQ ID NO: 1443775 - RNA, 19 nt, Artificial Sequence
  Description of Artificial Sequence: Synthetic oligonucleotide
ucuauaugagggucuucgu

SEQ ID NO: 1443776 - RNA, 19 nt, Artificial Sequence
  Description of Artificial Sequence: Synthetic oligonucleotide
ugacgauuauaaaucuaua

SEQ ID NO: 1443777 - RNA, 19 nt, Artificial Sequence
  Description of Artificial Sequence: Synthetic oligonucleotide
aauucuugccggcuauaua

SEQ ID NO: 1443778 - RNA, 19 nt, Artificial Sequence
  Description of Artificial Sequence: Synthetic oligonucleotide
cucuacguuuaugagaauc

SEQ ID NO: 1443779 - RNA, 19 nt, Artificial Sequence
  Description of Artificial Sequence: Synthetic oligonucleotide
aacauauguugcaugcuau

SEQ ID NO: 1443780 - RNA, 19 nt, Artificial Sequence
  Description of Artificial Sequence: Synthetic oligonucleotide
guuagauauuagaaaguca

SEQ ID NO: 1443781 - RNA, 19 nt, Artificial Sequence
  Description of Artificial Sequence: Synthetic oligonucleotide
gguaacaugaguagagcug

SEQ ID NO: 1443782 - RNA, 19 nt, Artificial Sequence
  Description of Artificial Sequence: Synthetic oligonucleotide
gguaaguuggcaugucacc

SEQ ID NO: 1443783 - RNA, 19 nt, Artificial Sequence
  Description of Artificial Sequence: Synthetic oligonucleotide
cacauggccauuaggagga

SEQ ID NO: 1443784 - RNA, 19 nt, Artificial Sequence
  Description of Artificial Sequence: Synthetic oligonucleotide
ucuaggcuauucuucucac

SEQ ID NO: 1443785 - RNA, 19 nt, Artificial Sequence
  Description of Artificial Sequence: Synthetic oligonucleotide
cuaaucuguuuugggagag

SEQ ID NO: 1443786 - RNA, 19 nt, Artificial Sequence
  Description of Artificial Sequence: Synthetic oligonucleotide
uuagagguaagagcuacuu

SEQ ID NO: 1443787 - RNA, 19 nt, Artificial Sequence
  Description of Artificial Sequence: Synthetic oligonucleotide
uguuaggcgguguuccuuc

SEQ ID NO: 1443788 - RNA, 19 nt, Artificial Sequence
  Description of Artificial Sequence: Synthetic oligonucleotide
guagagcugcauugcaacc

SEQ ID NO: 1443789 - RNA, 19 nt, Artificial Sequence
  Description of Artificial Sequence: Synthetic oligonucleotide
agaaucgauuacuucugau

SEQ ID NO: 1443790 - RNA, 19 nt, Artificial Sequence
  Description of Artificial Sequence: Synthetic oligonucleotide
uucuuaagcaaggguuaag

SEQ ID NO: 1443791 - RNA, 19 nt, Artificial Sequence
  Description of Artificial Sequence: Synthetic oligonucleotide
auugccccgugcuagucug

SEQ ID NO: 1443792 - RNA, 19 nt, Artificial Sequence
  Description of Artificial Sequence: Synthetic oligonucleotide
ccaagucaaacacaguuac

SEQ ID NO: 1443793 - RNA, 19 nt, Artificial Sequence
  Description of Artificial Sequence: Synthetic oligonucleotide
gaauaccaggcacaucaga

SEQ ID NO: 1443794 - RNA, 19 nt, Artificial Sequence
  Description of Artificial Sequence: Synthetic oligonucleotide
ggcuauauauuguauugca

SEQ ID NO: 1443795 - RNA, 19 nt, Artificial Sequence
  Description of Artificial Sequence: Synthetic oligonucleotide
acaaagugacgauuauaaa

SEQ ID NO: 1443796 - RNA, 19 nt, Artificial Sequence
  Description of Artificial Sequence: Synthetic oligonucleotide
aggcgguguuccuucuucc

SEQ ID NO: 1443797 - RNA, 19 nt, Artificial Sequence
  Description of Artificial Sequence: Synthetic oligonucleotide
aagcaaggguuaagugacc

SEQ ID NO: 1443798 - RNA, 19 nt, Artificial Sequence
  Description of Artificial Sequence: Synthetic oligonucleotide
ggaacaguauucccaauuc

SEQ ID NO: 1443799 - RNA, 19 nt, Artificial Sequence
  Description of Artificial Sequence: Synthetic oligonucleotide
gguaagagcuacuuaaaua

SEQ ID NO: 1443800 - RNA, 19 nt, Artificial Sequence
  Description of Artificial Sequence: Synthetic oligonucleotide
gaaucgauuacuucugauu

SEQ ID NO: 1443801 - RNA, 19 nt, Artificial Sequence
  Description of Artificial Sequence: Synthetic oligonucleotide
uuacaaagugacgauuaua

SEQ ID NO: 1443802 - RNA, 19 nt, Artificial Sequence
  Description of Artificial Sequence: Synthetic oligonucleotide
cuggauucuuaagcaaggg

SEQ ID NO: 1443803 - RNA, 19 nt, Artificial Sequence
  Description of Artificial Sequence: Synthetic oligonucleotide
cuauaagcuucuuguucug

SEQ ID NO: 1443804 - RNA, 19 nt, Artificial Sequence
  Description of Artificial Sequence: Synthetic oligonucleotide
agcaagcuugguaacauga

SEQ ID NO: 1443805 - RNA, 19 nt, Artificial Sequence
  Description of Artificial Sequence: Synthetic oligonucleotide
ccuuugaucauccuuccug

SEQ ID NO: 1443806 - RNA, 19 nt, Artificial Sequence
  Description of Artificial Sequence: Synthetic oligonucleotide
ucgugacagagagacuggg

SEQ ID NO: 1443807 - RNA, 19 nt, Artificial Sequence
  Description of Artificial Sequence: Synthetic oligonucleotide
cauggaacaguauucccaa

SEQ ID NO: 1443808 - RNA, 19 nt, Artificial Sequence
  Description of Artificial Sequence: Synthetic oligonucleotide
acguuuaugagaaucgauu

SEQ ID NO: 1443809 - RNA, 19 nt, Artificial Sequence
  Description of Artificial Sequence: Synthetic oligonucleotide
uauugccccgugcuagucu

SEQ ID NO: 1443810 - RNA, 19 nt, Artificial Sequence
  Description of Artificial Sequence: Synthetic oligonucleotide
guguauugccccgugcuag

SEQ ID NO: 1443811 - RNA, 19 nt, Artificial Sequence
  Description of Artificial Sequence: Synthetic oligonucleotide
uuuucuauaugagggucuu

SEQ ID NO: 1443812 - RNA, 19 nt, Artificial Sequence
  Description of Artificial Sequence: Synthetic oligonucleotide
cacacgauuuucaagacau

SEQ ID NO: 1443813 - RNA, 19 nt, Artificial Sequence
  Description of Artificial Sequence: Synthetic oligonucleotide
ccucgauuagaguucacag

SEQ ID NO: 1443814 - RNA, 19 nt, Artificial Sequence
  Description of Artificial Sequence: Synthetic oligonucleotide
uaacaugaguagagcugca

SEQ ID NO: 1443815 - RNA, 19 nt, Artificial Sequence
  Description of Artificial Sequence: Synthetic oligonucleotide
uguauugccccgugcuagu

SEQ ID NO: 1443816 - RNA, 19 nt, Artificial Sequence
  Description of Artificial Sequence: Synthetic oligonucleotide
gaaagucagaugaaugaua

SEQ ID NO: 1443817 - RNA, 19 nt, Artificial Sequence
  Description of Artificial Sequence: Synthetic oligonucleotide
guggcaguguauugccccg

SEQ ID NO: 1443818 - RNA, 19 nt, Artificial Sequence
  Description of Artificial Sequence: Synthetic oligonucleotide
agggcaaacaaaacauaug

SEQ ID NO: 1443819 - RNA, 19 nt, Artificial Sequence
  Description of Artificial Sequence: Synthetic oligonucleotide
uuacaguuugucucuucua

SEQ ID NO: 1443820 - RNA, 19 nt, Artificial Sequence
  Description of Artificial Sequence: Synthetic oligonucleotide
uucccaauucacacccuaa

SEQ ID NO: 1443821 - RNA, 19 nt, Artificial Sequence
  Description of Artificial Sequence: Synthetic oligonucleotide
gucuucgugaaagaauuuc

SEQ ID NO: 1443822 - RNA, 19 nt, Artificial Sequence
  Description of Artificial Sequence: Synthetic oligonucleotide
uuugaucauccuuccugaa

SEQ ID NO: 1443823 - RNA, 19 nt, Artificial Sequence
  Description of Artificial Sequence: Synthetic oligonucleotide
uugguacugccaugguagc

SEQ ID NO: 1443824 - RNA, 19 nt, Artificial Sequence
  Description of Artificial Sequence: Synthetic oligonucleotide
aguugguacugccauggua

SEQ ID NO: 1443825 - RNA, 19 nt, Artificial Sequence
  Description of Artificial Sequence: Synthetic oligonucleotide
uugcgaguugcuucuucug

SEQ ID NO: 1443826 - RNA, 19 nt, Artificial Sequence
  Description of Artificial Sequence: Synthetic oligonucleotide
gagaaucgauuacuucuga

SEQ ID NO: 1443827 - RNA, 19 nt, Artificial Sequence
  Description of Artificial Sequence: Synthetic oligonucleotide
agaucuuugagggccuuga

SEQ ID NO: 1443828 - RNA, 19 nt, Artificial Sequence
  Description of Artificial Sequence: Synthetic oligonucleotide
gccauuaggaggaugcugc

SEQ ID NO: 1443829 - RNA, 19 nt, Artificial Sequence
  Description of Artificial Sequence: Synthetic oligonucleotide
guuaagugacccaucuaca

SEQ ID NO: 1443830 - RNA, 19 nt, Artificial Sequence
  Description of Artificial Sequence: Synthetic oligonucleotide
uucuuucuuucgacgucga

SEQ ID NO: 1443831 - RNA, 19 nt, Artificial Sequence
  Description of Artificial Sequence: Synthetic oligonucleotide
uguagguaugucugugguu

SEQ ID NO: 1443832 - RNA, 19 nt, Artificial Sequence
  Description of Artificial Sequence: Synthetic oligonucleotide
aagaucuuugagggccuug

SEQ ID NO: 1443833 - RNA, 19 nt, Artificial Sequence
  Description of Artificial Sequence: Synthetic oligonucleotide
ccggcuauauauuguauug

SEQ ID NO: 1443834 - RNA, 19 nt, Artificial Sequence
  Description of Artificial Sequence: Synthetic oligonucleotide
ccuaagccaaacuggauuc

SEQ ID NO: 1443835 - RNA, 19 nt, Artificial Sequence
  Description of Artificial Sequence: Synthetic oligonucleotide
gacagagagacugggaacu

SEQ ID NO: 1443836 - RNA, 19 nt, Artificial Sequence
  Description of Artificial Sequence: Synthetic oligonucleotide
uugccggcuauauauugua

SEQ ID NO: 1443837 - RNA, 19 nt, Artificial Sequence
  Description of Artificial Sequence: Synthetic oligonucleotide
ugcaacccauggaacagua

SEQ ID NO: 1443838 - RNA, 19 nt, Artificial Sequence
  Description of Artificial Sequence: Synthetic oligonucleotide
auucccaauucacacccua

SEQ ID NO: 1443839 - RNA, 19 nt, Artificial Sequence
  Description of Artificial Sequence: Synthetic oligonucleotide
ucacacccuaagccaaacu

SEQ ID NO: 1443840 - RNA, 19 nt, Artificial Sequence
  Description of Artificial Sequence: Synthetic oligonucleotide
agcaauguuaggcgguguu

SEQ ID NO: 1443841 - RNA, 19 nt, Artificial Sequence
  Description of Artificial Sequence: Synthetic oligonucleotide
uaaucuguuuugggagagc

SEQ ID NO: 1443842 - RNA, 19 nt, Artificial Sequence
  Description of Artificial Sequence: Synthetic oligonucleotide
uagguaugucugugguuug

SEQ ID NO: 1443843 - RNA, 19 nt, Artificial Sequence
  Description of Artificial Sequence: Synthetic oligonucleotide
guagcaauguuaggcggug

SEQ ID NO: 1443844 - RNA, 19 nt, Artificial Sequence
  Description of Artificial Sequence: Synthetic oligonucleotide
gagacugggaacugcaaau

SEQ ID NO: 1443845 - RNA, 19 nt, Artificial Sequence
  Description of Artificial Sequence: Synthetic oligonucleotide
cuuuccuguagguaugucu

SEQ ID NO: 1443846 - RNA, 19 nt, Artificial Sequence
  Description of Artificial Sequence: Synthetic oligonucleotide
caauagagcaagcuuggua

SEQ ID NO: 1443847 - RNA, 19 nt, Artificial Sequence
  Description of Artificial Sequence: Synthetic oligonucleotide
gcauaggacacuauucgug

SEQ ID NO: 1443848 - RNA, 19 nt, Artificial Sequence
  Description of Artificial Sequence: Synthetic oligonucleotide
cacugcaacucgacucucc

SEQ ID NO: 1443849 - RNA, 19 nt, Artificial Sequence
  Description of Artificial Sequence: Synthetic oligonucleotide
gcaaagcaguaguaggagc

SEQ ID NO: 1443850 - RNA, 19 nt, Artificial Sequence
  Description of Artificial Sequence: Synthetic oligonucleotide
uauucccaauucacacccu

SEQ ID NO: 1443851 - RNA, 19 nt, Artificial Sequence
  Description of Artificial Sequence: Synthetic oligonucleotide
ggaugcacugccuuugauc

SEQ ID NO: 1443852 - RNA, 19 nt, Artificial Sequence
  Description of Artificial Sequence: Synthetic oligonucleotide
cugcaauuugugcuaccug

SEQ ID NO: 1443853 - RNA, 19 nt, Artificial Sequence
  Description of Artificial Sequence: Synthetic oligonucleotide
agagcuacuuaaauacaau

SEQ ID NO: 1443854 - RNA, 19 nt, Artificial Sequence
  Description of Artificial Sequence: Synthetic oligonucleotide
gugacgauuauaaaucuau

SEQ ID NO: 1443855 - RNA, 19 nt, Artificial Sequence
  Description of Artificial Sequence: Synthetic oligonucleotide
cacccuaagccaaacugga

SEQ ID NO: 1443856 - RNA, 19 nt, Artificial Sequence
  Description of Artificial Sequence: Synthetic oligonucleotide
auagaccuuagagguaaga

SEQ ID NO: 1443857 - RNA, 19 nt, Artificial Sequence
  Description of Artificial Sequence: Synthetic oligonucleotide
cagccacacgauuuucaag

SEQ ID NO: 1443858 - RNA, 19 nt, Artificial Sequence
  Description of Artificial Sequence: Synthetic oligonucleotide
uuguggcaaagcaguagua

SEQ ID NO: 1443859 - RNA, 19 nt, Artificial Sequence
  Description of Artificial Sequence: Synthetic oligonucleotide
cuuguggcaaagcaguagu

SEQ ID NO: 1443860 - RNA, 19 nt, Artificial Sequence
  Description of Artificial Sequence: Synthetic oligonucleotide
ccaucuacaaguccacaug

SEQ ID NO: 1443861 - RNA, 19 nt, Artificial Sequence
  Description of Artificial Sequence: Synthetic oligonucleotide
cuaguugcuggggacugug

SEQ ID NO: 1443862 - RNA, 19 nt, Artificial Sequence
  Description of Artificial Sequence: Synthetic oligonucleotide
guaaguuggcaugucaccu

SEQ ID NO: 1443863 - RNA, 19 nt, Artificial Sequence
  Description of Artificial Sequence: Synthetic oligonucleotide
uucuugccggcuauauauu

SEQ ID NO: 1443864 - RNA, 19 nt, Artificial Sequence
  Description of Artificial Sequence: Synthetic oligonucleotide
agggucuuguuuugguuuu

SEQ ID NO: 1443865 - RNA, 19 nt, Artificial Sequence
  Description of Artificial Sequence: Synthetic oligonucleotide
ugcaucgccugccucgauu

SEQ ID NO: 1443866 - RNA, 19 nt, Artificial Sequence
  Description of Artificial Sequence: Synthetic oligonucleotide
gccaucaccacaccuugug

SEQ ID NO: 1443867 - RNA, 19 nt, Artificial Sequence
  Description of Artificial Sequence: Synthetic oligonucleotide
aucugucucugcaauuugu

SEQ ID NO: 1443868 - RNA, 19 nt, Artificial Sequence
  Description of Artificial Sequence: Synthetic oligonucleotide
uucacacccuaagccaaac

SEQ ID NO: 1443869 - RNA, 19 nt, Artificial Sequence
  Description of Artificial Sequence: Synthetic oligonucleotide
aguucacaguaaacaaggu

SEQ ID NO: 1443870 - RNA, 19 nt, Artificial Sequence
  Description of Artificial Sequence: Synthetic oligonucleotide
cuucugcuaguugcugggg

SEQ ID NO: 1443871 - RNA, 19 nt, Artificial Sequence
  Description of Artificial Sequence: Synthetic oligonucleotide
auauuguauugcauucaaa

SEQ ID NO: 1443872 - RNA, 19 nt, Artificial Sequence
  Description of Artificial Sequence: Synthetic oligonucleotide
uaguugguacugccauggu

SEQ ID NO: 1443873 - RNA, 19 nt, Artificial Sequence
  Description of Artificial Sequence: Synthetic oligonucleotide
ccauggaacaguauuccca

SEQ ID NO: 1443874 - RNA, 19 nt, Artificial Sequence
  Description of Artificial Sequence: Synthetic oligonucleotide
cuaggcuauucuucucaca

SEQ ID NO: 1443875 - RNA, 19 nt, Artificial Sequence
  Description of Artificial Sequence: Synthetic oligonucleotide
acaauagagcaagcuuggu

SEQ ID NO: 1443876 - RNA, 19 nt, Artificial Sequence
  Description of Artificial Sequence: Synthetic oligonucleotide
ucugguaaguuggcauguc

SEQ ID NO: 1443877 - RNA, 19 nt, Artificial Sequence
  Description of Artificial Sequence: Synthetic oligonucleotide
acacuauucgugacagaga

SEQ ID NO: 1443878 - RNA, 19 nt, Artificial Sequence
  Description of Artificial Sequence: Synthetic oligonucleotide
acacaguuacucugcuuua

SEQ ID NO: 1443879 - RNA, 19 nt, Artificial Sequence
  Description of Artificial Sequence: Synthetic oligonucleotide
gaguagagcugcauugcaa

SEQ ID NO: 1443880 - RNA, 19 nt, Artificial Sequence
  Description of Artificial Sequence: Synthetic oligonucleotide
gacucuccagacacuuuac

SEQ ID NO: 1443881 - RNA, 19 nt, Artificial Sequence
  Description of Artificial Sequence: Synthetic oligonucleotide
caagcuugguaacaugagu

SEQ ID NO: 1443882 - RNA, 19 nt, Artificial Sequence
  Description of Artificial Sequence: Synthetic oligonucleotide
uugcaacccauggaacagu

SEQ ID NO: 1443883 - RNA, 19 nt, Artificial Sequence
  Description of Artificial Sequence: Synthetic oligonucleotide
agugacgauuauaaaucua

SEQ ID NO: 1443884 - RNA, 19 nt, Artificial Sequence
  Description of Artificial Sequence: Synthetic oligonucleotide
uucuucucacauagccauu

SEQ ID NO: 1443885 - RNA, 19 nt, Artificial Sequence
  Description of Artificial Sequence: Synthetic oligonucleotide
ggauucuuaagcaaggguu

SEQ ID NO: 1443886 - RNA, 19 nt, Artificial Sequence
  Description of Artificial Sequence: Synthetic oligonucleotide
ccuuagagguaagagcuac

SEQ ID NO: 1443887 - RNA, 19 nt, Artificial Sequence
  Description of Artificial Sequence: Synthetic oligonucleotide
uuucuauaugagggucuuc

SEQ ID NO: 1443888 - RNA, 19 nt, Artificial Sequence
  Description of Artificial Sequence: Synthetic oligonucleotide
ugcuggaugcacugccuuu

SEQ ID NO: 1443889 - RNA, 19 nt, Artificial Sequence
  Description of Artificial Sequence: Synthetic oligonucleotide
gcuauugacaauagagcaa

SEQ ID NO: 1443890 - RNA, 19 nt, Artificial Sequence
  Description of Artificial Sequence: Synthetic oligonucleotide
gcuaguugguacugccaug

SEQ ID NO: 1443891 - RNA, 19 nt, Artificial Sequence
  Description of Artificial Sequence: Synthetic oligonucleotide
agcugcauugcaacccaug

SEQ ID NO: 1443892 - RNA, 19 nt, Artificial Sequence
  Description of Artificial Sequence: Synthetic oligonucleotide
agguaugucugugguuuga

SEQ ID NO: 1443893 - RNA, 19 nt, Artificial Sequence
  Description of Artificial Sequence: Synthetic oligonucleotide
auguugcaugcuauugaca

SEQ ID NO: 1443894 - RNA, 19 nt, Artificial Sequence
  Description of Artificial Sequence: Synthetic oligonucleotide
aggcuauucuucucacaua

SEQ ID NO: 1443895 - RNA, 19 nt, Artificial Sequence
  Description of Artificial Sequence: Synthetic oligonucleotide
gguacugccaugguagcaa

SEQ ID NO: 1443896 - RNA, 19 nt, Artificial Sequence
  Description of Artificial Sequence: Synthetic oligonucleotide
cuugccggcuauauauugu

SEQ ID NO: 1443897 - RNA, 19 nt, Artificial Sequence
  Description of Artificial Sequence: Synthetic oligonucleotide
gcaacucgacucuccagac

SEQ ID NO: 1443898 - RNA, 19 nt, Artificial Sequence
  Description of Artificial Sequence: Synthetic oligonucleotide
uccagacacuuuacauauu

SEQ ID NO: 1443899 - RNA, 19 nt, Artificial Sequence
  Description of Artificial Sequence: Synthetic oligonucleotide
cuauucuuuccuguaggua

SEQ ID NO: 1443900 - RNA, 19 nt, Artificial Sequence
  Description of Artificial Sequence: Synthetic oligonucleotide
acuauucgugacagagaga

SEQ ID NO: 1443901 - RNA, 19 nt, Artificial Sequence
  Description of Artificial Sequence: Synthetic oligonucleotide
caguguauugccccgugcu

SEQ ID NO: 1443902 - RNA, 19 nt, Artificial Sequence
  Description of Artificial Sequence: Synthetic oligonucleotide
aucgccugccucgauuaga

SEQ ID NO: 1443903 - RNA, 19 nt, Artificial Sequence
  Description of Artificial Sequence: Synthetic oligonucleotide
cauaauucuugccggcuau

SEQ ID NO: 1443904 - RNA, 19 nt, Artificial Sequence
  Description of Artificial Sequence: Synthetic oligonucleotide
cuguagguaugucuguggu

SEQ ID NO: 1443905 - RNA, 19 nt, Artificial Sequence
  Description of Artificial Sequence: Synthetic oligonucleotide
ggaauaccaggcacaucag

SEQ ID NO: 1443906 - RNA, 19 nt, Artificial Sequence
  Description of Artificial Sequence: Synthetic oligonucleotide
auaauucuugccggcuaua

SEQ ID NO: 1443907 - RNA, 19 nt, Artificial Sequence
  Description of Artificial Sequence: Synthetic oligonucleotide
uuucgacgucgacauucuu

SEQ ID NO: 1443908 - RNA, 19 nt, Artificial Sequence
  Description of Artificial Sequence: Synthetic oligonucleotide
cugaucugguaaguuggca

SEQ ID NO: 1443909 - RNA, 19 nt, Artificial Sequence
  Description of Artificial Sequence: Synthetic oligonucleotide
uggccauuaggaggaugcu

SEQ ID NO: 1443910 - RNA, 19 nt, Artificial Sequence
  Description of Artificial Sequence: Synthetic oligonucleotide
uagcaauguuaggcggugu

SEQ ID NO: 1443911 - RNA, 19 nt, Artificial Sequence
  Description of Artificial Sequence: Synthetic oligonucleotide
ggccauuaggaggaugcug

SEQ ID NO: 1443912 - RNA, 19 nt, Artificial Sequence
  Description of Artificial Sequence: Synthetic oligonucleotide
cuuagagguaagagcuacu

SEQ ID NO: 1443913 - RNA, 19 nt, Artificial Sequence
  Description of Artificial Sequence: Synthetic oligonucleotide
cauccuuccugaaaugauu

SEQ ID NO: 1443914 - RNA, 19 nt, Artificial Sequence
  Description of Artificial Sequence: Synthetic oligonucleotide
cuuucgacgucgacauucu

SEQ ID NO: 1443915 - RNA, 19 nt, Artificial Sequence
  Description of Artificial Sequence: Synthetic oligonucleotide
gcaguguauugccccgugc

SEQ ID NO: 1443916 - RNA, 19 nt, Artificial Sequence
  Description of Artificial Sequence: Synthetic oligonucleotide
caacucgacucuccagaca

SEQ ID NO: 1443917 - RNA, 19 nt, Artificial Sequence
  Description of Artificial Sequence: Synthetic oligonucleotide
caucgccugccucgauuag

SEQ ID NO: 1443918 - RNA, 19 nt, Artificial Sequence
  Description of Artificial Sequence: Synthetic oligonucleotide
cccgcuugcgaguugcuuc

SEQ ID NO: 1443919 - RNA, 19 nt, Artificial Sequence
  Description of Artificial Sequence: Synthetic oligonucleotide
caaggguuaagugacccau

SEQ ID NO: 1443920 - RNA, 19 nt, Artificial Sequence
  Description of Artificial Sequence: Synthetic oligonucleotide
augcacaaguucauuucua

SEQ ID NO: 1443921 - RNA, 19 nt, Artificial Sequence
  Description of Artificial Sequence: Synthetic oligonucleotide
gccacacgauuuucaagac

SEQ ID NO: 1443922 - RNA, 19 nt, Artificial Sequence
  Description of Artificial Sequence: Synthetic oligonucleotide
uggggacugugcagacuuc

SEQ ID NO: 1443923 - RNA, 19 nt, Artificial Sequence
  Description of Artificial Sequence: Synthetic oligonucleotide
gcaugcuauugacaauaga

SEQ ID NO: 1443924 - RNA, 19 nt, Artificial Sequence
  Description of Artificial Sequence: Synthetic oligonucleotide
ggcaguguauugccccgug

SEQ ID NO: 1443925 - RNA, 19 nt, Artificial Sequence
  Description of Artificial Sequence: Synthetic oligonucleotide
ucucuacguuuaugagaau

SEQ ID NO: 1443926 - RNA, 19 nt, Artificial Sequence
  Description of Artificial Sequence: Synthetic oligonucleotide
gcaaggguuaagugaccca

SEQ ID NO: 1443927 - RNA, 19 nt, Artificial Sequence
  Description of Artificial Sequence: Synthetic oligonucleotide
guugcaugcuauugacaau

SEQ ID NO: 1443928 - RNA, 19 nt, Artificial Sequence
  Description of Artificial Sequence: Synthetic oligonucleotide
auguuaggcgguguuccuu

SEQ ID NO: 1443929 - RNA, 19 nt, Artificial Sequence
  Description of Artificial Sequence: Synthetic oligonucleotide
gcaauguuaggcgguguuc

SEQ ID NO: 1443930 - RNA, 19 nt, Artificial Sequence
  Description of Artificial Sequence: Synthetic oligonucleotide
acccaucuacaaguccaca

SEQ ID NO: 1443931 - RNA, 19 nt, Artificial Sequence
  Description of Artificial Sequence: Synthetic oligonucleotide
gccucgauuagaguucaca

SEQ ID NO: 1443932 - RNA, 19 nt, Artificial Sequence
  Description of Artificial Sequence: Synthetic oligonucleotide
uggcaguguauugccccgu

SEQ ID NO: 1443933 - RNA, 19 nt, Artificial Sequence
  Description of Artificial Sequence: Synthetic oligonucleotide
uugccccgugcuagucuga

SEQ ID NO: 1443934 - RNA, 19 nt, Artificial Sequence
  Description of Artificial Sequence: Synthetic oligonucleotide
cgauuacuucugauucugc

SEQ ID NO: 1443935 - RNA, 19 nt, Artificial Sequence
  Description of Artificial Sequence: Synthetic oligonucleotide
uucuuucgacgucgacauu

SEQ ID NO: 1443936 - RNA, 19 nt, Artificial Sequence
  Description of Artificial Sequence: Synthetic oligonucleotide
guauugccccgugcuaguc

SEQ ID NO: 1443937 - RNA, 19 nt, Artificial Sequence
  Description of Artificial Sequence: Synthetic oligonucleotide
gguagcaauguuaggcggu

SEQ ID NO: 1443938 - RNA, 19 nt, Artificial Sequence
  Description of Artificial Sequence: Synthetic oligonucleotide
gcuauauauuguauugcau

SEQ ID NO: 1443939 - RNA, 19 nt, Artificial Sequence
  Description of Artificial Sequence: Synthetic oligonucleotide
gggucuucgugaaagaauu

SEQ ID NO: 1443940 - RNA, 19 nt, Artificial Sequence
  Description of Artificial Sequence: Synthetic oligonucleotide
cugccucgauuagaguuca

SEQ ID NO: 1443941 - RNA, 19 nt, Artificial Sequence
  Description of Artificial Sequence: Synthetic oligonucleotide
ugccccgugcuagucugau

SEQ ID NO: 1443942 - RNA, 19 nt, Artificial Sequence
  Description of Artificial Sequence: Synthetic oligonucleotide
cuaagccaaacuggauucu

SEQ ID NO: 1443943 - RNA, 19 nt, Artificial Sequence
  Description of Artificial Sequence: Synthetic oligonucleotide
ccacacgauuuucaagaca

SEQ ID NO: 1443944 - RNA, 19 nt, Artificial Sequence
  Description of Artificial Sequence: Synthetic oligonucleotide
gcgaguugcuucuucugcu

SEQ ID NO: 1443945 - RNA, 19 nt, Artificial Sequence
  Description of Artificial Sequence: Synthetic oligonucleotide
gccugccucgauuagaguu

SEQ ID NO: 1443946 - RNA, 19 nt, Artificial Sequence
  Description of Artificial Sequence: Synthetic oligonucleotide
guuaggcgguguuccuucu

SEQ ID NO: 1443947 - RNA, 19 nt, Artificial Sequence
  Description of Artificial Sequence: Synthetic oligonucleotide
ccuggugaggcagccauca

SEQ ID NO: 1443948 - RNA, 19 nt, Artificial Sequence
  Description of Artificial Sequence: Synthetic oligonucleotide
ucccgcuugcgaguugcuu

SEQ ID NO: 1443949 - RNA, 19 nt, Artificial Sequence
  Description of Artificial Sequence: Synthetic oligonucleotide
agcucccgcuugcgaguug

SEQ ID NO: 1443950 - RNA, 19 nt, Artificial Sequence
  Description of Artificial Sequence: Synthetic oligonucleotide
guaggagcccugaucuggu

SEQ ID NO: 1443951 - RNA, 19 nt, Artificial Sequence
  Description of Artificial Sequence: Synthetic oligonucleotide
ccugcgacacucccgggca

SEQ ID NO: 1443952 - RNA, 19 nt, Artificial Sequence
  Description of Artificial Sequence: Synthetic oligonucleotide
ccauaauucuugccggcua

SEQ ID NO: 1443953 - RNA, 19 nt, Artificial Sequence
  Description of Artificial Sequence: Synthetic oligonucleotide
ggacacuauucgugacaga

SEQ ID NO: 1443954 - RNA, 19 nt, Artificial Sequence
  Description of Artificial Sequence: Synthetic oligonucleotide
gccggcuauauauuguauu

SEQ ID NO: 1443955 - RNA, 19 nt, Artificial Sequence
  Description of Artificial Sequence: Synthetic oligonucleotide
ggguuaagugacccaucua

SEQ ID NO: 1443956 - RNA, 19 nt, Artificial Sequence
  Description of Artificial Sequence: Synthetic oligonucleotide
cauuaggaggaugcugcau

SEQ ID NO: 1443957 - RNA, 19 nt, Artificial Sequence
  Description of Artificial Sequence: Synthetic oligonucleotide
cucgacucuccagacacuu

SEQ ID NO: 1443958 - RNA, 19 nt, Artificial Sequence
  Description of Artificial Sequence: Synthetic oligonucleotide
cccaucuacaaguccacau

SEQ ID NO: 1443959 - RNA, 19 nt, Artificial Sequence
  Description of Artificial Sequence: Synthetic oligonucleotide
cgauuagaguucacaguaa

SEQ ID NO: 1443960 - RNA, 19 nt, Artificial Sequence
  Description of Artificial Sequence: Synthetic oligonucleotide
cgugacagagagacuggga

SEQ ID NO: 1443961 - RNA, 19 nt, Artificial Sequence
  Description of Artificial Sequence: Synthetic oligonucleotide
ggcgguguuccuucuuccu

SEQ ID NO: 1443962 - RNA, 19 nt, Artificial Sequence
  Description of Artificial Sequence: Synthetic oligonucleotide
gguaugucugugguuugau

SEQ ID NO: 1443963 - RNA, 19 nt, Artificial Sequence
  Description of Artificial Sequence: Synthetic oligonucleotide
cgacgucgacauucuuuag

SEQ ID NO: 1443964 - RNA, 19 nt, Artificial Sequence
  Description of Artificial Sequence: Synthetic oligonucleotide
caguaguaggagcccugau

SEQ ID NO: 1443965 - RNA, 19 nt, Artificial Sequence
  Description of Artificial Sequence: Synthetic oligonucleotide
ccgugcuagucugauauau

SEQ ID NO: 1443966 - RNA, 19 nt, Artificial Sequence
  Description of Artificial Sequence: Synthetic oligonucleotide
ccgcuugcgaguugcuucu

SEQ ID NO: 1443967 - RNA, 19 nt, Artificial Sequence
  Description of Artificial Sequence: Synthetic oligonucleotide
ggucuucgugaaagaauuu

SEQ ID NO: 1443968 - RNA, 19 nt, Artificial Sequence
  Description of Artificial Sequence: Synthetic oligonucleotide
gcuaguugcuggggacugu

SEQ ID NO: 1443969 - RNA, 19 nt, Artificial Sequence
  Description of Artificial Sequence: Synthetic oligonucleotide
cucccgcuugcgaguugcu

SEQ ID NO: 1443970 - RNA, 19 nt, Artificial Sequence
  Description of Artificial Sequence: Synthetic oligonucleotide
gcaacccauggaacaguau

SEQ ID NO: 1443971 - RNA, 19 nt, Artificial Sequence
  Description of Artificial Sequence: Synthetic oligonucleotide
cgcuugcgaguugcuucuu

SEQ ID NO: 1443972 - RNA, 19 nt, Artificial Sequence
  Description of Artificial Sequence: Synthetic oligonucleotide
aagucuucgacuuaaaugg

SEQ ID NO: 1443973 - RNA, 19 nt, Artificial Sequence
  Description of Artificial Sequence: Synthetic oligonucleotide
aaucgaucuacacugauac

SEQ ID NO: 1443974 - RNA, 19 nt, Artificial Sequence
  Description of Artificial Sequence: Synthetic oligonucleotide
aacacaauuggauaucagc

SEQ ID NO: 1443975 - RNA, 19 nt, Artificial Sequence
  Description of Artificial Sequence: Synthetic oligonucleotide
uauaucgcaacacaauugg

SEQ ID NO: 1443976 - RNA, 19 nt, Artificial Sequence
  Description of Artificial Sequence: Synthetic oligonucleotide
acugauacagguuaagaac

SEQ ID NO: 1443977 - RNA, 19 nt, Artificial Sequence
  Description of Artificial Sequence: Synthetic oligonucleotide
uuaacugacagaaauucag

SEQ ID NO: 1443978 - RNA, 19 nt, Artificial Sequence
  Description of Artificial Sequence: Synthetic oligonucleotide
uguuauagggcacaaaaca

SEQ ID NO: 1443979 - RNA, 19 nt, Artificial Sequence
  Description of Artificial Sequence: Synthetic oligonucleotide
uacaaaguguacuuaaagg

SEQ ID NO: 1443980 - RNA, 19 nt, Artificial Sequence
  Description of Artificial Sequence: Synthetic oligonucleotide
ugacguucaaaauuaaggg

SEQ ID NO: 1443981 - RNA, 19 nt, Artificial Sequence
  Description of Artificial Sequence: Synthetic oligonucleotide
agaguauaaaauaagauug

SEQ ID NO: 1443982 - RNA, 19 nt, Artificial Sequence
  Description of Artificial Sequence: Synthetic oligonucleotide
acucuuuaaaguuuguagg

SEQ ID NO: 1443983 - RNA, 19 nt, Artificial Sequence
  Description of Artificial Sequence: Synthetic oligonucleotide
ugaacuucagagaaccugg

SEQ ID NO: 1443984 - RNA, 19 nt, Artificial Sequence
  Description of Artificial Sequence: Synthetic oligonucleotide
aaaugguaaaguaaagacg

SEQ ID NO: 1443985 - RNA, 19 nt, Artificial Sequence
  Description of Artificial Sequence: Synthetic oligonucleotide
gaauuuaguuaacugacag

SEQ ID NO: 1443986 - RNA, 19 nt, Artificial Sequence
  Description of Artificial Sequence: Synthetic oligonucleotide
uguaaaacagcauuacuga

SEQ ID NO: 1443987 - RNA, 19 nt, Artificial Sequence
  Description of Artificial Sequence: Synthetic oligonucleotide
ugaacaugcacccauacaa

SEQ ID NO: 1443988 - RNA, 19 nt, Artificial Sequence
  Description of Artificial Sequence: Synthetic oligonucleotide
acaaaguguacuuaaagga

SEQ ID NO: 1443989 - RNA, 19 nt, Artificial Sequence
  Description of Artificial Sequence: Synthetic oligonucleotide
uuucaaguugaacacagca

SEQ ID NO: 1443990 - RNA, 19 nt, Artificial Sequence
  Description of Artificial Sequence: Synthetic oligonucleotide
aaacaauggggucaaagca

SEQ ID NO: 1443991 - RNA, 19 nt, Artificial Sequence
  Description of Artificial Sequence: Synthetic oligonucleotide
ugaaaucuuacagagaaga

SEQ ID NO: 1443992 - RNA, 19 nt, Artificial Sequence
  Description of Artificial Sequence: Synthetic oligonucleotide
aagauugauguuauagggc

SEQ ID NO: 1443993 - RNA, 19 nt, Artificial Sequence
  Description of Artificial Sequence: Synthetic oligonucleotide
aaggagucaucguaagggc

SEQ ID NO: 1443994 - RNA, 19 nt, Artificial Sequence
  Description of Artificial Sequence: Synthetic oligonucleotide
aaauguauaucgcaacaca

SEQ ID NO: 1443995 - RNA, 19 nt, Artificial Sequence
  Description of Artificial Sequence: Synthetic oligonucleotide
ugagagaguauaaaauaag

SEQ ID NO: 1443996 - RNA, 19 nt, Artificial Sequence
  Description of Artificial Sequence: Synthetic oligonucleotide
cauacuagaacaagugacg

SEQ ID NO: 1443997 - RNA, 19 nt, Artificial Sequence
  Description of Artificial Sequence: Synthetic oligonucleotide
ucuaguagauucuucagga

SEQ ID NO: 1443998 - RNA, 19 nt, Artificial Sequence
  Description of Artificial Sequence: Synthetic oligonucleotide
cagaaaucgaucuacacug

SEQ ID NO: 1443999 - RNA, 19 nt, Artificial Sequence
  Description of Artificial Sequence: Synthetic oligonucleotide
gacguucaaaauuaagggg

SEQ ID NO: 1444000 - RNA, 19 nt, Artificial Sequence
  Description of Artificial Sequence: Synthetic oligonucleotide
uuauucgaaaauuauuugu

SEQ ID NO: 1444001 - RNA, 19 nt, Artificial Sequence
  Description of Artificial Sequence: Synthetic oligonucleotide
auuucuaugaaaaucacga

SEQ ID NO: 1444002 - RNA, 19 nt, Artificial Sequence
  Description of Artificial Sequence: Synthetic oligonucleotide
aaauggguagacgauugcc

SEQ ID NO: 1444003 - RNA, 19 nt, Artificial Sequence
  Description of Artificial Sequence: Synthetic oligonucleotide
acacaauuggauaucagcc

SEQ ID NO: 1444004 - RNA, 19 nt, Artificial Sequence
  Description of Artificial Sequence: Synthetic oligonucleotide
aaacaaucuuugcauuucg

SEQ ID NO: 1444005 - RNA, 19 nt, Artificial Sequence
  Description of Artificial Sequence: Synthetic oligonucleotide
aauaugaccaaguguacaa

SEQ ID NO: 1444006 - RNA, 19 nt, Artificial Sequence
  Description of Artificial Sequence: Synthetic oligonucleotide
uuuauucgaaaauuauuug

SEQ ID NO: 1444007 - RNA, 19 nt, Artificial Sequence
  Description of Artificial Sequence: Synthetic oligonucleotide
aacagaauaugaccaagug

SEQ ID NO: 1444008 - RNA, 19 nt, Artificial Sequence
  Description of Artificial Sequence: Synthetic oligonucleotide
acuagaacaagugacguuc

SEQ ID NO: 1444009 - RNA, 19 nt, Artificial Sequence
  Description of Artificial Sequence: Synthetic oligonucleotide
agaaauucagucaaggaag

SEQ ID NO: 1444010 - RNA, 19 nt, Artificial Sequence
  Description of Artificial Sequence: Synthetic oligonucleotide
aaguugaacacagcagucc

SEQ ID NO: 1444011 - RNA, 19 nt, Artificial Sequence
  Description of Artificial Sequence: Synthetic oligonucleotide
cauuacugaaaucuuacag

SEQ ID NO: 1444012 - RNA, 19 nt, Artificial Sequence
  Description of Artificial Sequence: Synthetic oligonucleotide
uucaaguugaacacagcag

SEQ ID NO: 1444013 - RNA, 19 nt, Artificial Sequence
  Description of Artificial Sequence: Synthetic oligonucleotide
uacauguugguguaaaaca

SEQ ID NO: 1444014 - RNA, 19 nt, Artificial Sequence
  Description of Artificial Sequence: Synthetic oligonucleotide
uucacaguugaacacggag

SEQ ID NO: 1444015 - RNA, 19 nt, Artificial Sequence
  Description of Artificial Sequence: Synthetic oligonucleotide
agauugauguuauagggca

SEQ ID NO: 1444016 - RNA, 19 nt, Artificial Sequence
  Description of Artificial Sequence: Synthetic oligonucleotide
gugacguucaaaauuaagg

SEQ ID NO: 1444017 - RNA, 19 nt, Artificial Sequence
  Description of Artificial Sequence: Synthetic oligonucleotide
ucgaucuacacugauacag

SEQ ID NO: 1444018 - RNA, 19 nt, Artificial Sequence
  Description of Artificial Sequence: Synthetic oligonucleotide
aacaugcacccauacaaag

SEQ ID NO: 1444019 - RNA, 19 nt, Artificial Sequence
  Description of Artificial Sequence: Synthetic oligonucleotide
cagaauuuaguuaacugac

SEQ ID NO: 1444020 - RNA, 19 nt, Artificial Sequence
  Description of Artificial Sequence: Synthetic oligonucleotide
uccgaaaugguaaaguaaa

SEQ ID NO: 1444021 - RNA, 19 nt, Artificial Sequence
  Description of Artificial Sequence: Synthetic oligonucleotide
auuuaguuaacugacagaa

SEQ ID NO: 1444022 - RNA, 19 nt, Artificial Sequence
  Description of Artificial Sequence: Synthetic oligonucleotide
uuauagggcacaaaacaga

SEQ ID NO: 1444023 - RNA, 19 nt, Artificial Sequence
  Description of Artificial Sequence: Synthetic oligonucleotide
uuuguggucuuacaaauau

SEQ ID NO: 1444024 - RNA, 19 nt, Artificial Sequence
  Description of Artificial Sequence: Synthetic oligonucleotide
guacuuaaaggagucaucg

SEQ ID NO: 1444025 - RNA, 19 nt, Artificial Sequence
  Description of Artificial Sequence: Synthetic oligonucleotide
ucuucuaacagaccaauuu

SEQ ID NO: 1444026 - RNA, 19 nt, Artificial Sequence
  Description of Artificial Sequence: Synthetic oligonucleotide
ucaugagagaguauaaaau

SEQ ID NO: 1444027 - RNA, 19 nt, Artificial Sequence
  Description of Artificial Sequence: Synthetic oligonucleotide
ucaucguaagggcaguggg

SEQ ID NO: 1444028 - RNA, 19 nt, Artificial Sequence
  Description of Artificial Sequence: Synthetic oligonucleotide
ucgaaaauuauuuguuucu

SEQ ID NO: 1444029 - RNA, 19 nt, Artificial Sequence
  Description of Artificial Sequence: Synthetic oligonucleotide
aauucagucaaggaagcca

SEQ ID NO: 1444030 - RNA, 19 nt, Artificial Sequence
  Description of Artificial Sequence: Synthetic oligonucleotide
uuaguucuuaaagucuucg

SEQ ID NO: 1444031 - RNA, 19 nt, Artificial Sequence
  Description of Artificial Sequence: Synthetic oligonucleotide
uccagaauuuaguuaacug

SEQ ID NO: 1444032 - RNA, 19 nt, Artificial Sequence
  Description of Artificial Sequence: Synthetic oligonucleotide
uuuaaaguuuguagguugu

SEQ ID NO: 1444033 - RNA, 19 nt, Artificial Sequence
  Description of Artificial Sequence: Synthetic oligonucleotide
uucguuuaguucuuaaagu

SEQ ID NO: 1444034 - RNA, 19 nt, Artificial Sequence
  Description of Artificial Sequence: Synthetic oligonucleotide
auacauguugguguaaaac

SEQ ID NO: 1444035 - RNA, 19 nt, Artificial Sequence
  Description of Artificial Sequence: Synthetic oligonucleotide
uggucuuacaaauauuuuc

SEQ ID NO: 1444036 - RNA, 19 nt, Artificial Sequence
  Description of Artificial Sequence: Synthetic oligonucleotide
gacagaaauucagucaagg

SEQ ID NO: 1444037 - RNA, 19 nt, Artificial Sequence
  Description of Artificial Sequence: Synthetic oligonucleotide
uucgaaaauuauuuguuuc

SEQ ID NO: 1444038 - RNA, 19 nt, Artificial Sequence
  Description of Artificial Sequence: Synthetic oligonucleotide
gaagcaugaaacguguugc

SEQ ID NO: 1444039 - RNA, 19 nt, Artificial Sequence
  Description of Artificial Sequence: Synthetic oligonucleotide
aauggggucaaagcaacag

SEQ ID NO: 1444040 - RNA, 19 nt, Artificial Sequence
  Description of Artificial Sequence: Synthetic oligonucleotide
cagaauaugaccaagugua

SEQ ID NO: 1444041 - RNA, 19 nt, Artificial Sequence
  Description of Artificial Sequence: Synthetic oligonucleotide
aaaguuuguagguuguguu

SEQ ID NO: 1444042 - RNA, 19 nt, Artificial Sequence
  Description of Artificial Sequence: Synthetic oligonucleotide
uugaacacagcaguccucg

SEQ ID NO: 1444043 - RNA, 19 nt, Artificial Sequence
  Description of Artificial Sequence: Synthetic oligonucleotide
uauagggcacaaaacagaa

SEQ ID NO: 1444044 - RNA, 19 nt, Artificial Sequence
  Description of Artificial Sequence: Synthetic oligonucleotide
uauugcagauucacuauca

SEQ ID NO: 1444045 - RNA, 19 nt, Artificial Sequence
  Description of Artificial Sequence: Synthetic oligonucleotide
uaaucauguacguuguagu

SEQ ID NO: 1444046 - RNA, 19 nt, Artificial Sequence
  Description of Artificial Sequence: Synthetic oligonucleotide
cuucagagaaccuggauuc

SEQ ID NO: 1444047 - RNA, 19 nt, Artificial Sequence
  Description of Artificial Sequence: Synthetic oligonucleotide
acugacagaaauucaguca

SEQ ID NO: 1444048 - RNA, 19 nt, Artificial Sequence
  Description of Artificial Sequence: Synthetic oligonucleotide
ucguuuaguucuuaaaguc

SEQ ID NO: 1444049 - RNA, 19 nt, Artificial Sequence
  Description of Artificial Sequence: Synthetic oligonucleotide
ugauacagguuaagaacag

SEQ ID NO: 1444050 - RNA, 19 nt, Artificial Sequence
  Description of Artificial Sequence: Synthetic oligonucleotide
agauucuucaggacaaucg

SEQ ID NO: 1444051 - RNA, 19 nt, Artificial Sequence
  Description of Artificial Sequence: Synthetic oligonucleotide
auuggauaucagcccaagc

SEQ ID NO: 1444052 - RNA, 19 nt, Artificial Sequence
  Description of Artificial Sequence: Synthetic oligonucleotide
agacgauugccagaaaucg

SEQ ID NO: 1444053 - RNA, 19 nt, Artificial Sequence
  Description of Artificial Sequence: Synthetic oligonucleotide
aaaguguacuuaaaggagu

SEQ ID NO: 1444054 - RNA, 19 nt, Artificial Sequence
  Description of Artificial Sequence: Synthetic oligonucleotide
aauccgaaaugguaaagua

SEQ ID NO: 1444055 - RNA, 19 nt, Artificial Sequence
  Description of Artificial Sequence: Synthetic oligonucleotide
acaagugacguucaaaauu

SEQ ID NO: 1444056 - RNA, 19 nt, Artificial Sequence
  Description of Artificial Sequence: Synthetic oligonucleotide
cacaauuggauaucagccc

SEQ ID NO: 1444057 - RNA, 19 nt, Artificial Sequence
  Description of Artificial Sequence: Synthetic oligonucleotide
ucauguacguuguaguuuc

SEQ ID NO: 1444058 - RNA, 19 nt, Artificial Sequence
  Description of Artificial Sequence: Synthetic oligonucleotide
aaauccgaaaugguaaagu

SEQ ID NO: 1444059 - RNA, 19 nt, Artificial Sequence
  Description of Artificial Sequence: Synthetic oligonucleotide
uaucgcaacacaauuggau

SEQ ID NO: 1444060 - RNA, 19 nt, Artificial Sequence
  Description of Artificial Sequence: Synthetic oligonucleotide
caaacguaaggaaaagcug

SEQ ID NO: 1444061 - RNA, 19 nt, Artificial Sequence
  Description of Artificial Sequence: Synthetic oligonucleotide
ucuuacagagaagaucucc

SEQ ID NO: 1444062 - RNA, 19 nt, Artificial Sequence
  Description of Artificial Sequence: Synthetic oligonucleotide
gagagauagguuuuccaug

SEQ ID NO: 1444063 - RNA, 19 nt, Artificial Sequence
  Description of Artificial Sequence: Synthetic oligonucleotide
gauagguuuuccauguggc

SEQ ID NO: 1444064 - RNA, 19 nt, Artificial Sequence
  Description of Artificial Sequence: Synthetic oligonucleotide
acaauuggauaucagccca

SEQ ID NO: 1444065 - RNA, 19 nt, Artificial Sequence
  Description of Artificial Sequence: Synthetic oligonucleotide
ugaaacguguugcuuaaaa

SEQ ID NO: 1444066 - RNA, 19 nt, Artificial Sequence
  Description of Artificial Sequence: Synthetic oligonucleotide
uuaacgaaagucuguguuc

SEQ ID NO: 1444067 - RNA, 19 nt, Artificial Sequence
  Description of Artificial Sequence: Synthetic oligonucleotide
uggagcuuaccauugucag

SEQ ID NO: 1444068 - RNA, 19 nt, Artificial Sequence
  Description of Artificial Sequence: Synthetic oligonucleotide
gucgacugaaagaaaaccg

SEQ ID NO: 1444069 - RNA, 19 nt, Artificial Sequence
  Description of Artificial Sequence: Synthetic oligonucleotide
uauauugcagauucacuau

SEQ ID NO: 1444070 - RNA, 19 nt, Artificial Sequence
  Description of Artificial Sequence: Synthetic oligonucleotide
aagaacagaaugcuuccau

SEQ ID NO: 1444071 - RNA, 19 nt, Artificial Sequence
  Description of Artificial Sequence: Synthetic oligonucleotide
aauguauaucgcaacacaa

SEQ ID NO: 1444072 - RNA, 19 nt, Artificial Sequence
  Description of Artificial Sequence: Synthetic oligonucleotide
aaaauccgaaaugguaaag

SEQ ID NO: 1444073 - RNA, 19 nt, Artificial Sequence
  Description of Artificial Sequence: Synthetic oligonucleotide
acuuaaaggagucaucgua

SEQ ID NO: 1444074 - RNA, 19 nt, Artificial Sequence
  Description of Artificial Sequence: Synthetic oligonucleotide
aaucauguacguuguaguu

SEQ ID NO: 1444075 - RNA, 19 nt, Artificial Sequence
  Description of Artificial Sequence: Synthetic oligonucleotide
uaccacagagcaguuaacg

SEQ ID NO: 1444076 - RNA, 19 nt, Artificial Sequence
  Description of Artificial Sequence: Synthetic oligonucleotide
ggaaaguucucaaagcagg

SEQ ID NO: 1444077 - RNA, 19 nt, Artificial Sequence
  Description of Artificial Sequence: Synthetic oligonucleotide
acccauagagccccaaacg

SEQ ID NO: 1444078 - RNA, 19 nt, Artificial Sequence
  Description of Artificial Sequence: Synthetic oligonucleotide
uuggagcuuaccauuguca

SEQ ID NO: 1444079 - RNA, 19 nt, Artificial Sequence
  Description of Artificial Sequence: Synthetic oligonucleotide
ugauuggguacauuguccu

SEQ ID NO: 1444080 - RNA, 19 nt, Artificial Sequence
  Description of Artificial Sequence: Synthetic oligonucleotide
aguucuuagcaccauacua

SEQ ID NO: 1444081 - RNA, 19 nt, Artificial Sequence
  Description of Artificial Sequence: Synthetic oligonucleotide
cagugguuuagucaggcag

SEQ ID NO: 1444082 - RNA, 19 nt, Artificial Sequence
  Description of Artificial Sequence: Synthetic oligonucleotide
aagaaaaccgcgggugcac

SEQ ID NO: 1444083 - RNA, 19 nt, Artificial Sequence
  Description of Artificial Sequence: Synthetic oligonucleotide
uucugaauugugucugaag

SEQ ID NO: 1444084 - RNA, 19 nt, Artificial Sequence
  Description of Artificial Sequence: Synthetic oligonucleotide
caaucgucucauuuucugg

SEQ ID NO: 1444085 - RNA, 19 nt, Artificial Sequence
  Description of Artificial Sequence: Synthetic oligonucleotide
cugauacagguuaagaaca

SEQ ID NO: 1444086 - RNA, 19 nt, Artificial Sequence
  Description of Artificial Sequence: Synthetic oligonucleotide
uagacgauugccagaaauc

SEQ ID NO: 1444087 - RNA, 19 nt, Artificial Sequence
  Description of Artificial Sequence: Synthetic oligonucleotide
aaaccgcgggugcacuucc

SEQ ID NO: 1444088 - RNA, 19 nt, Artificial Sequence
  Description of Artificial Sequence: Synthetic oligonucleotide
gaaauucagucaaggaagc

SEQ ID NO: 1444089 - RNA, 19 nt, Artificial Sequence
  Description of Artificial Sequence: Synthetic oligonucleotide
uuagucaggcagcuuauau

SEQ ID NO: 1444090 - RNA, 19 nt, Artificial Sequence
  Description of Artificial Sequence: Synthetic oligonucleotide
gucccagugguuuagucag

SEQ ID NO: 1444091 - RNA, 19 nt, Artificial Sequence
  Description of Artificial Sequence: Synthetic oligonucleotide
uucugagguauuguuaccc

SEQ ID NO: 1444092 - RNA, 19 nt, Artificial Sequence
  Description of Artificial Sequence: Synthetic oligonucleotide
aguugaacacagcaguccu

SEQ ID NO: 1444093 - RNA, 19 nt, Artificial Sequence
  Description of Artificial Sequence: Synthetic oligonucleotide
acguucaaaauuaagggga

SEQ ID NO: 1444094 - RNA, 19 nt, Artificial Sequence
  Description of Artificial Sequence: Synthetic oligonucleotide
uaaaguuuguagguugugu

SEQ ID NO: 1444095 - RNA, 19 nt, Artificial Sequence
  Description of Artificial Sequence: Synthetic oligonucleotide
aauggguagacgauugcca

SEQ ID NO: 1444096 - RNA, 19 nt, Artificial Sequence
  Description of Artificial Sequence: Synthetic oligonucleotide
uagagccccaaacguaagg

SEQ ID NO: 1444097 - RNA, 19 nt, Artificial Sequence
  Description of Artificial Sequence: Synthetic oligonucleotide
uguguuggauaaaauucuc

SEQ ID NO: 1444098 - RNA, 19 nt, Artificial Sequence
  Description of Artificial Sequence: Synthetic oligonucleotide
uaaauggguagacgauugc

SEQ ID NO: 1444099 - RNA, 19 nt, Artificial Sequence
  Description of Artificial Sequence: Synthetic oligonucleotide
uaaagucuucgacuuaaau

SEQ ID NO: 1444100 - RNA, 19 nt, Artificial Sequence
  Description of Artificial Sequence: Synthetic oligonucleotide
aauuggauaucagcccaag

SEQ ID NO: 1444101 - RNA, 19 nt, Artificial Sequence
  Description of Artificial Sequence: Synthetic oligonucleotide
caccauacuagaacaagug

SEQ ID NO: 1444102 - RNA, 19 nt, Artificial Sequence
  Description of Artificial Sequence: Synthetic oligonucleotide
uuacccugagagugggucg

SEQ ID NO: 1444103 - RNA, 19 nt, Artificial Sequence
  Description of Artificial Sequence: Synthetic oligonucleotide
uucuuagcaccauacuaga

SEQ ID NO: 1444104 - RNA, 19 nt, Artificial Sequence
  Description of Artificial Sequence: Synthetic oligonucleotide
ucuucgacuuaaaugggua

SEQ ID NO: 1444105 - RNA, 19 nt, Artificial Sequence
  Description of Artificial Sequence: Synthetic oligonucleotide
cuguacagcuuacagggag

SEQ ID NO: 1444106 - RNA, 19 nt, Artificial Sequence
  Description of Artificial Sequence: Synthetic oligonucleotide
auggguagacgauugccag

SEQ ID NO: 1444107 - RNA, 19 nt, Artificial Sequence
  Description of Artificial Sequence: Synthetic oligonucleotide
uuuaguuaacugacagaaa

SEQ ID NO: 1444108 - RNA, 19 nt, Artificial Sequence
  Description of Artificial Sequence: Synthetic oligonucleotide
accauacuagaacaaguga

SEQ ID NO: 1444109 - RNA, 19 nt, Artificial Sequence
  Description of Artificial Sequence: Synthetic oligonucleotide
uuccguguugcaaaguaaa

SEQ ID NO: 1444110 - RNA, 19 nt, Artificial Sequence
  Description of Artificial Sequence: Synthetic oligonucleotide
auggccaauuccguguugc

SEQ ID NO: 1444111 - RNA, 19 nt, Artificial Sequence
  Description of Artificial Sequence: Synthetic oligonucleotide
ugggucgacugaaagaaaa

SEQ ID NO: 1444112 - RNA, 19 nt, Artificial Sequence
  Description of Artificial Sequence: Synthetic oligonucleotide
auguuauagggcacaaaac

SEQ ID NO: 1444113 - RNA, 19 nt, Artificial Sequence
  Description of Artificial Sequence: Synthetic oligonucleotide
uaacgaaagucuguguucu

SEQ ID NO: 1444114 - RNA, 19 nt, Artificial Sequence
  Description of Artificial Sequence: Synthetic oligonucleotide
cuuacagagaagaucucca

SEQ ID NO: 1444115 - RNA, 19 nt, Artificial Sequence
  Description of Artificial Sequence: Synthetic oligonucleotide
ucagucaaggaagccaacc

SEQ ID NO: 1444116 - RNA, 19 nt, Artificial Sequence
  Description of Artificial Sequence: Synthetic oligonucleotide
uugguauucagaugugguc

SEQ ID NO: 1444117 - RNA, 19 nt, Artificial Sequence
  Description of Artificial Sequence: Synthetic oligonucleotide
ucgccuuugguauucagau

SEQ ID NO: 1444118 - RNA, 19 nt, Artificial Sequence
  Description of Artificial Sequence: Synthetic oligonucleotide
auucgaaaauuauuuguuu

SEQ ID NO: 1444119 - RNA, 19 nt, Artificial Sequence
  Description of Artificial Sequence: Synthetic oligonucleotide
aagcaugaaacguguugcu

SEQ ID NO: 1444120 - RNA, 19 nt, Artificial Sequence
  Description of Artificial Sequence: Synthetic oligonucleotide
agagaguauaaaauaagau

SEQ ID NO: 1444121 - RNA, 19 nt, Artificial Sequence
  Description of Artificial Sequence: Synthetic oligonucleotide
uuguaguuucauuucucac

SEQ ID NO: 1444122 - RNA, 19 nt, Artificial Sequence
  Description of Artificial Sequence: Synthetic oligonucleotide
aacgaaagucuguguucuc

SEQ ID NO: 1444123 - RNA, 19 nt, Artificial Sequence
  Description of Artificial Sequence: Synthetic oligonucleotide
guauaucgcaacacaauug

SEQ ID NO: 1444124 - RNA, 19 nt, Artificial Sequence
  Description of Artificial Sequence: Synthetic oligonucleotide
cuucgacuuaaauggguag

SEQ ID NO: 1444125 - RNA, 19 nt, Artificial Sequence
  Description of Artificial Sequence: Synthetic oligonucleotide
aaagaaaaccgcgggugca

SEQ ID NO: 1444126 - RNA, 19 nt, Artificial Sequence
  Description of Artificial Sequence: Synthetic oligonucleotide
aucguaagggcagugggag

SEQ ID NO: 1444127 - RNA, 19 nt, Artificial Sequence
  Description of Artificial Sequence: Synthetic oligonucleotide
aaaaccgcgggugcacuuc

SEQ ID NO: 1444128 - RNA, 19 nt, Artificial Sequence
  Description of Artificial Sequence: Synthetic oligonucleotide
gaguccuuuugucugcagc

SEQ ID NO: 1444129 - RNA, 19 nt, Artificial Sequence
  Description of Artificial Sequence: Synthetic oligonucleotide
agggaguccuuuugucugc

SEQ ID NO: 1444130 - RNA, 19 nt, Artificial Sequence
  Description of Artificial Sequence: Synthetic oligonucleotide
ugaguccagaauuuaguua

SEQ ID NO: 1444131 - RNA, 19 nt, Artificial Sequence
  Description of Artificial Sequence: Synthetic oligonucleotide
agaauaugaccaaguguac

SEQ ID NO: 1444132 - RNA, 19 nt, Artificial Sequence
  Description of Artificial Sequence: Synthetic oligonucleotide
uaguucuuaaagucuucga

SEQ ID NO: 1444133 - RNA, 19 nt, Artificial Sequence
  Description of Artificial Sequence: Synthetic oligonucleotide
agugggucgacugaaagaa

SEQ ID NO: 1444134 - RNA, 19 nt, Artificial Sequence
  Description of Artificial Sequence: Synthetic oligonucleotide
uucgacuuaaauggguaga

SEQ ID NO: 1444135 - RNA, 19 nt, Artificial Sequence
  Description of Artificial Sequence: Synthetic oligonucleotide
uccaaauggccaauuccgu

SEQ ID NO: 1444136 - RNA, 19 nt, Artificial Sequence
  Description of Artificial Sequence: Synthetic oligonucleotide
auuggguacauuguccuca

SEQ ID NO: 1444137 - RNA, 19 nt, Artificial Sequence
  Description of Artificial Sequence: Synthetic oligonucleotide
ugguaaaguaaagacgaaa

SEQ ID NO: 1444138 - RNA, 19 nt, Artificial Sequence
  Description of Artificial Sequence: Synthetic oligonucleotide
uggagagauagguuuucca

SEQ ID NO: 1444139 - RNA, 19 nt, Artificial Sequence
  Description of Artificial Sequence: Synthetic oligonucleotide
aauccacugaguccagaau

SEQ ID NO: 1444140 - RNA, 19 nt, Artificial Sequence
  Description of Artificial Sequence: Synthetic oligonucleotide
caagugacguucaaaauua

SEQ ID NO: 1444141 - RNA, 19 nt, Artificial Sequence
  Description of Artificial Sequence: Synthetic oligonucleotide
aucgucucauuuucugguc

SEQ ID NO: 1444142 - RNA, 19 nt, Artificial Sequence
  Description of Artificial Sequence: Synthetic oligonucleotide
gaauaugaccaaguguaca

SEQ ID NO: 1444143 - RNA, 19 nt, Artificial Sequence
  Description of Artificial Sequence: Synthetic oligonucleotide
cuuuugucugcagcggucg

SEQ ID NO: 1444144 - RNA, 19 nt, Artificial Sequence
  Description of Artificial Sequence: Synthetic oligonucleotide
auagguuuuccauguggcu

SEQ ID NO: 1444145 - RNA, 19 nt, Artificial Sequence
  Description of Artificial Sequence: Synthetic oligonucleotide
aucgcaacacaauuggaua

SEQ ID NO: 1444146 - RNA, 19 nt, Artificial Sequence
  Description of Artificial Sequence: Synthetic oligonucleotide
uucucaugagagaguauaa

SEQ ID NO: 1444147 - RNA, 19 nt, Artificial Sequence
  Description of Artificial Sequence: Synthetic oligonucleotide
cauuucucacuuugagggc

SEQ ID NO: 1444148 - RNA, 19 nt, Artificial Sequence
  Description of Artificial Sequence: Synthetic oligonucleotide
aaguaaagacgaaaagcaa

SEQ ID NO: 1444149 - RNA, 19 nt, Artificial Sequence
  Description of Artificial Sequence: Synthetic oligonucleotide
uuacagagaagaucuccaa

SEQ ID NO: 1444150 - RNA, 19 nt, Artificial Sequence
  Description of Artificial Sequence: Synthetic oligonucleotide
cuaguagauucuucaggac

SEQ ID NO: 1444151 - RNA, 19 nt, Artificial Sequence
  Description of Artificial Sequence: Synthetic oligonucleotide
gauugccagaaaucgaucu

SEQ ID NO: 1444152 - RNA, 19 nt, Artificial Sequence
  Description of Artificial Sequence: Synthetic oligonucleotide
aucacgauccuggagagau

SEQ ID NO: 1444153 - RNA, 19 nt, Artificial Sequence
  Description of Artificial Sequence: Synthetic oligonucleotide
gacgaaaagcaaaucugac

SEQ ID NO: 1444154 - RNA, 19 nt, Artificial Sequence
  Description of Artificial Sequence: Synthetic oligonucleotide
aggacaaucgucucauuuu

SEQ ID NO: 1444155 - RNA, 19 nt, Artificial Sequence
  Description of Artificial Sequence: Synthetic oligonucleotide
ucgacuuaaauggguagac

SEQ ID NO: 1444156 - RNA, 19 nt, Artificial Sequence
  Description of Artificial Sequence: Synthetic oligonucleotide
auacuagaacaagugacgu

SEQ ID NO: 1444157 - RNA, 19 nt, Artificial Sequence
  Description of Artificial Sequence: Synthetic oligonucleotide
ugcacccauacaaagugua

SEQ ID NO: 1444158 - RNA, 19 nt, Artificial Sequence
  Description of Artificial Sequence: Synthetic oligonucleotide
cugaaaucuuacagagaag

SEQ ID NO: 1444159 - RNA, 19 nt, Artificial Sequence
  Description of Artificial Sequence: Synthetic oligonucleotide
caaugcagagagugauugg

SEQ ID NO: 1444160 - RNA, 19 nt, Artificial Sequence
  Description of Artificial Sequence: Synthetic oligonucleotide
caguccucguguuagcuug

SEQ ID NO: 1444161 - RNA, 19 nt, Artificial Sequence
  Description of Artificial Sequence: Synthetic oligonucleotide
aguagauucuucaggacaa

SEQ ID NO: 1444162 - RNA, 19 nt, Artificial Sequence
  Description of Artificial Sequence: Synthetic oligonucleotide
acacggagcagucccagug

SEQ ID NO: 1444163 - RNA, 19 nt, Artificial Sequence
  Description of Artificial Sequence: Synthetic oligonucleotide
ucgucucauuuucuggucu

SEQ ID NO: 1444164 - RNA, 19 nt, Artificial Sequence
  Description of Artificial Sequence: Synthetic oligonucleotide
ggguacauuguccucacug

SEQ ID NO: 1444165 - RNA, 19 nt, Artificial Sequence
  Description of Artificial Sequence: Synthetic oligonucleotide
agugacguucaaaauuaag

SEQ ID NO: 1444166 - RNA, 19 nt, Artificial Sequence
  Description of Artificial Sequence: Synthetic oligonucleotide
ucgcaacacaauuggauau

SEQ ID NO: 1444167 - RNA, 19 nt, Artificial Sequence
  Description of Artificial Sequence: Synthetic oligonucleotide
auacagguuaagaacagaa

SEQ ID NO: 1444168 - RNA, 19 nt, Artificial Sequence
  Description of Artificial Sequence: Synthetic oligonucleotide
uugccagaaaucgaucuac

SEQ ID NO: 1444169 - RNA, 19 nt, Artificial Sequence
  Description of Artificial Sequence: Synthetic oligonucleotide
aguuaacgaaagucugugu

SEQ ID NO: 1444170 - RNA, 19 nt, Artificial Sequence
  Description of Artificial Sequence: Synthetic oligonucleotide
uguacguuguaguuucauu

SEQ ID NO: 1444171 - RNA, 19 nt, Artificial Sequence
  Description of Artificial Sequence: Synthetic oligonucleotide
agcaacaguuggaaacagc

SEQ ID NO: 1444172 - RNA, 19 nt, Artificial Sequence
  Description of Artificial Sequence: Synthetic oligonucleotide
uuguagguuguguuggaua

SEQ ID NO: 1444173 - RNA, 19 nt, Artificial Sequence
  Description of Artificial Sequence: Synthetic oligonucleotide
caguuaacgaaagucugug

SEQ ID NO: 1444174 - RNA, 19 nt, Artificial Sequence
  Description of Artificial Sequence: Synthetic oligonucleotide
gugauuggguacauugucc

SEQ ID NO: 1444175 - RNA, 19 nt, Artificial Sequence
  Description of Artificial Sequence: Synthetic oligonucleotide
cagggaguccuuuugucug

SEQ ID NO: 1444176 - RNA, 19 nt, Artificial Sequence
  Description of Artificial Sequence: Synthetic oligonucleotide
cacgauccuggagagauag

SEQ ID NO: 1444177 - RNA, 19 nt, Artificial Sequence
  Description of Artificial Sequence: Synthetic oligonucleotide
caguuggaaacagcaaugc

SEQ ID NO: 1444178 - RNA, 19 nt, Artificial Sequence
  Description of Artificial Sequence: Synthetic oligonucleotide
ucucaugagagaguauaaa

SEQ ID NO: 1444179 - RNA, 19 nt, Artificial Sequence
  Description of Artificial Sequence: Synthetic oligonucleotide
aaauggccaauuccguguu

SEQ ID NO: 1444180 - RNA, 19 nt, Artificial Sequence
  Description of Artificial Sequence: Synthetic oligonucleotide
agaauuuaguuaacugaca

SEQ ID NO: 1444181 - RNA, 19 nt, Artificial Sequence
  Description of Artificial Sequence: Synthetic oligonucleotide
cauagagccccaaacguaa

SEQ ID NO: 1444182 - RNA, 19 nt, Artificial Sequence
  Description of Artificial Sequence: Synthetic oligonucleotide
uccuuuugucugcagcggu

SEQ ID NO: 1444183 - RNA, 19 nt, Artificial Sequence
  Description of Artificial Sequence: Synthetic oligonucleotide
ugcaaacaaucuuugcauu

SEQ ID NO: 1444184 - RNA, 19 nt, Artificial Sequence
  Description of Artificial Sequence: Synthetic oligonucleotide
uaaagacgaaaagcaaauc

SEQ ID NO: 1444185 - RNA, 19 nt, Artificial Sequence
  Description of Artificial Sequence: Synthetic oligonucleotide
aaaucgaucuacacugaua

SEQ ID NO: 1444186 - RNA, 19 nt, Artificial Sequence
  Description of Artificial Sequence: Synthetic oligonucleotide
agcaaaucugacauugcca

SEQ ID NO: 1444187 - RNA, 19 nt, Artificial Sequence
  Description of Artificial Sequence: Synthetic oligonucleotide
agauucacuaucaaauauu

SEQ ID NO: 1444188 - RNA, 19 nt, Artificial Sequence
  Description of Artificial Sequence: Synthetic oligonucleotide
cugagguauuguuacccug

SEQ ID NO: 1444189 - RNA, 19 nt, Artificial Sequence
  Description of Artificial Sequence: Synthetic oligonucleotide
caacacaauuggauaucag

SEQ ID NO: 1444190 - RNA, 19 nt, Artificial Sequence
  Description of Artificial Sequence: Synthetic oligonucleotide
gcuuauauugcagauucac

SEQ ID NO: 1444191 - RNA, 19 nt, Artificial Sequence
  Description of Artificial Sequence: Synthetic oligonucleotide
uccguguugcaaaguaaaa

SEQ ID NO: 1444192 - RNA, 19 nt, Artificial Sequence
  Description of Artificial Sequence: Synthetic oligonucleotide
guuaacgaaagucuguguu

SEQ ID NO: 1444193 - RNA, 19 nt, Artificial Sequence
  Description of Artificial Sequence: Synthetic oligonucleotide
ggagcuuaccauugucagg

SEQ ID NO: 1444194 - RNA, 19 nt, Artificial Sequence
  Description of Artificial Sequence: Synthetic oligonucleotide
uagucaggcagcuuauauu

SEQ ID NO: 1444195 - RNA, 19 nt, Artificial Sequence
  Description of Artificial Sequence: Synthetic oligonucleotide
guuggauaaaauucucggu

SEQ ID NO: 1444196 - RNA, 19 nt, Artificial Sequence
  Description of Artificial Sequence: Synthetic oligonucleotide
aguugaacacggagcaguc

SEQ ID NO: 1444197 - RNA, 19 nt, Artificial Sequence
  Description of Artificial Sequence: Synthetic oligonucleotide
ggucgacugaaagaaaacc

SEQ ID NO: 1444198 - RNA, 19 nt, Artificial Sequence
  Description of Artificial Sequence: Synthetic oligonucleotide
guacauuguccucacugca

SEQ ID NO: 1444199 - RNA, 19 nt, Artificial Sequence
  Description of Artificial Sequence: Synthetic oligonucleotide
caagagcacaguuuucaca

SEQ ID NO: 1444200 - RNA, 19 nt, Artificial Sequence
  Description of Artificial Sequence: Synthetic oligonucleotide
gguuuagucaggcagcuua

SEQ ID NO: 1444201 - RNA, 19 nt, Artificial Sequence
  Description of Artificial Sequence: Synthetic oligonucleotide
gaucuacacugauacaggu

SEQ ID NO: 1444202 - RNA, 19 nt, Artificial Sequence
  Description of Artificial Sequence: Synthetic oligonucleotide
guucucaugagagaguaua

SEQ ID NO: 1444203 - RNA, 19 nt, Artificial Sequence
  Description of Artificial Sequence: Synthetic oligonucleotide
auucagucaaggaagccaa

SEQ ID NO: 1444204 - RNA, 19 nt, Artificial Sequence
  Description of Artificial Sequence: Synthetic oligonucleotide
cccacuauuucuaugaaaa

SEQ ID NO: 1444205 - RNA, 19 nt, Artificial Sequence
  Description of Artificial Sequence: Synthetic oligonucleotide
uuaaaguucuuagcaccau

SEQ ID NO: 1444206 - RNA, 19 nt, Artificial Sequence
  Description of Artificial Sequence: Synthetic oligonucleotide
gcaacaguuggaaacagca

SEQ ID NO: 1444207 - RNA, 19 nt, Artificial Sequence
  Description of Artificial Sequence: Synthetic oligonucleotide
uacuagaacaagugacguu

SEQ ID NO: 1444208 - RNA, 19 nt, Artificial Sequence
  Description of Artificial Sequence: Synthetic oligonucleotide
cacagagcaguuaacgaaa

SEQ ID NO: 1444209 - RNA, 19 nt, Artificial Sequence
  Description of Artificial Sequence: Synthetic oligonucleotide
acgaaagucuguguucuca

SEQ ID NO: 1444210 - RNA, 19 nt, Artificial Sequence
  Description of Artificial Sequence: Synthetic oligonucleotide
accuggauucaguucuucu

SEQ ID NO: 1444211 - RNA, 19 nt, Artificial Sequence
  Description of Artificial Sequence: Synthetic oligonucleotide
agucuucgacuuaaauggg

SEQ ID NO: 1444212 - RNA, 19 nt, Artificial Sequence
  Description of Artificial Sequence: Synthetic oligonucleotide
aaguuucuaguagauucuu

SEQ ID NO: 1444213 - RNA, 19 nt, Artificial Sequence
  Description of Artificial Sequence: Synthetic oligonucleotide
gagauagguuuuccaugug

SEQ ID NO: 1444214 - RNA, 19 nt, Artificial Sequence
  Description of Artificial Sequence: Synthetic oligonucleotide
cuuaccauugucaggcugu

SEQ ID NO: 1444215 - RNA, 19 nt, Artificial Sequence
  Description of Artificial Sequence: Synthetic oligonucleotide
gucaaagcaacaguuggaa

SEQ ID NO: 1444216 - RNA, 19 nt, Artificial Sequence
  Description of Artificial Sequence: Synthetic oligonucleotide
auguauaucgcaacacaau

SEQ ID NO: 1444217 - RNA, 19 nt, Artificial Sequence
  Description of Artificial Sequence: Synthetic oligonucleotide
uggguagacgauugccaga

SEQ ID NO: 1444218 - RNA, 19 nt, Artificial Sequence
  Description of Artificial Sequence: Synthetic oligonucleotide
cacggagcagucccagugg

SEQ ID NO: 1444219 - RNA, 19 nt, Artificial Sequence
  Description of Artificial Sequence: Synthetic oligonucleotide
acuuaaauggguagacgau

SEQ ID NO: 1444220 - RNA, 19 nt, Artificial Sequence
  Description of Artificial Sequence: Synthetic oligonucleotide
ugagagugggucgacugaa

SEQ ID NO: 1444221 - RNA, 19 nt, Artificial Sequence
  Description of Artificial Sequence: Synthetic oligonucleotide
guaaagacgaaaagcaaau

SEQ ID NO: 1444222 - RNA, 19 nt, Artificial Sequence
  Description of Artificial Sequence: Synthetic oligonucleotide
guacguuguaguuucauuu

SEQ ID NO: 1444223 - RNA, 19 nt, Artificial Sequence
  Description of Artificial Sequence: Synthetic oligonucleotide
aucauguacguuguaguuu

SEQ ID NO: 1444224 - RNA, 19 nt, Artificial Sequence
  Description of Artificial Sequence: Synthetic oligonucleotide
ggacaaucgucucauuuuc

SEQ ID NO: 1444225 - RNA, 19 nt, Artificial Sequence
  Description of Artificial Sequence: Synthetic oligonucleotide
uuguggucuuacaaauauu

SEQ ID NO: 1444226 - RNA, 19 nt, Artificial Sequence
  Description of Artificial Sequence: Synthetic oligonucleotide
auccgaaaugguaaaguaa

SEQ ID NO: 1444227 - RNA, 19 nt, Artificial Sequence
  Description of Artificial Sequence: Synthetic oligonucleotide
gcuaccacagagcaguuaa

SEQ ID NO: 1444228 - RNA, 19 nt, Artificial Sequence
  Description of Artificial Sequence: Synthetic oligonucleotide
guccuuuugucugcagcgg

SEQ ID NO: 1444229 - RNA, 19 nt, Artificial Sequence
  Description of Artificial Sequence: Synthetic oligonucleotide
guagacgauugccagaaau

SEQ ID NO: 1444230 - RNA, 19 nt, Artificial Sequence
  Description of Artificial Sequence: Synthetic oligonucleotide
cgacugaaagaaaaccgcg

SEQ ID NO: 1444231 - RNA, 19 nt, Artificial Sequence
  Description of Artificial Sequence: Synthetic oligonucleotide
aguguacuuaaaggaguca

SEQ ID NO: 1444232 - RNA, 19 nt, Artificial Sequence
  Description of Artificial Sequence: Synthetic oligonucleotide
gaacacggagcagucccag

SEQ ID NO: 1444233 - RNA, 19 nt, Artificial Sequence
  Description of Artificial Sequence: Synthetic oligonucleotide
aucgaucuacacugauaca

SEQ ID NO: 1444234 - RNA, 19 nt, Artificial Sequence
  Description of Artificial Sequence: Synthetic oligonucleotide
guuucaaguugaacacagc

SEQ ID NO: 1444235 - RNA, 19 nt, Artificial Sequence
  Description of Artificial Sequence: Synthetic oligonucleotide
uccuggagagauagguuuu

SEQ ID NO: 1444236 - RNA, 19 nt, Artificial Sequence
  Description of Artificial Sequence: Synthetic oligonucleotide
cuagaacaagugacguuca

SEQ ID NO: 1444237 - RNA, 19 nt, Artificial Sequence
  Description of Artificial Sequence: Synthetic oligonucleotide
uucagagaaccuggauuca

SEQ ID NO: 1444238 - RNA, 19 nt, Artificial Sequence
  Description of Artificial Sequence: Synthetic oligonucleotide
uccucguguuagcuuguac

SEQ ID NO: 1444239 - RNA, 19 nt, Artificial Sequence
  Description of Artificial Sequence: Synthetic oligonucleotide
cugugaaccacacagcaau

SEQ ID NO: 1444240 - RNA, 19 nt, Artificial Sequence
  Description of Artificial Sequence: Synthetic oligonucleotide
ucguaagggcagugggagc

SEQ ID NO: 1444241 - RNA, 19 nt, Artificial Sequence
  Description of Artificial Sequence: Synthetic oligonucleotide
uguucucaugagagaguau

SEQ ID NO: 1444242 - RNA, 19 nt, Artificial Sequence
  Description of Artificial Sequence: Synthetic oligonucleotide
cuggagagauagguuuucc

SEQ ID NO: 1444243 - RNA, 19 nt, Artificial Sequence
  Description of Artificial Sequence: Synthetic oligonucleotide
uugauguuauagggcacaa

SEQ ID NO: 1444244 - RNA, 19 nt, Artificial Sequence
  Description of Artificial Sequence: Synthetic oligonucleotide
gacgauugccagaaaucga

SEQ ID NO: 1444245 - RNA, 19 nt, Artificial Sequence
  Description of Artificial Sequence: Synthetic oligonucleotide
cccugaacuucagagaacc

SEQ ID NO: 1444246 - RNA, 19 nt, Artificial Sequence
  Description of Artificial Sequence: Synthetic oligonucleotide
cugaacaugcacccauaca

SEQ ID NO: 1444247 - RNA, 19 nt, Artificial Sequence
  Description of Artificial Sequence: Synthetic oligonucleotide
ucguguuagcuuguacuuc

SEQ ID NO: 1444248 - RNA, 19 nt, Artificial Sequence
  Description of Artificial Sequence: Synthetic oligonucleotide
caucguaagggcaguggga

SEQ ID NO: 1444249 - RNA, 19 nt, Artificial Sequence
  Description of Artificial Sequence: Synthetic oligonucleotide
cuaccacagagcaguuaac

SEQ ID NO: 1444250 - RNA, 19 nt, Artificial Sequence
  Description of Artificial Sequence: Synthetic oligonucleotide
aguucuucuaacagaccaa

SEQ ID NO: 1444251 - RNA, 19 nt, Artificial Sequence
  Description of Artificial Sequence: Synthetic oligonucleotide
gaaaucgaucuacacugau

SEQ ID NO: 1444252 - RNA, 19 nt, Artificial Sequence
  Description of Artificial Sequence: Synthetic oligonucleotide
gguauucagauguggucuc

SEQ ID NO: 1444253 - RNA, 19 nt, Artificial Sequence
  Description of Artificial Sequence: Synthetic oligonucleotide
aucugacauugccagguua

SEQ ID NO: 1444254 - RNA, 19 nt, Artificial Sequence
  Description of Artificial Sequence: Synthetic oligonucleotide
cgaucuacacugauacagg

SEQ ID NO: 1444255 - RNA, 19 nt, Artificial Sequence
  Description of Artificial Sequence: Synthetic oligonucleotide
uacccugagagugggucga

SEQ ID NO: 1444256 - RNA, 19 nt, Artificial Sequence
  Description of Artificial Sequence: Synthetic oligonucleotide
acguaaggaaaagcugugu

SEQ ID NO: 1444257 - RNA, 19 nt, Artificial Sequence
  Description of Artificial Sequence: Synthetic oligonucleotide
acagcaaugcagagaguga

SEQ ID NO: 1444258 - RNA, 19 nt, Artificial Sequence
  Description of Artificial Sequence: Synthetic oligonucleotide
accgcgggugcacuuccuc

SEQ ID NO: 1444259 - RNA, 19 nt, Artificial Sequence
  Description of Artificial Sequence: Synthetic oligonucleotide
cuucuaacagaccaauuuu

SEQ ID NO: 1444260 - RNA, 19 nt, Artificial Sequence
  Description of Artificial Sequence: Synthetic oligonucleotide
caguuuauucgaaaauuau

SEQ ID NO: 1444261 - RNA, 19 nt, Artificial Sequence
  Description of Artificial Sequence: Synthetic oligonucleotide
aucuuacagagaagaucuc

SEQ ID NO: 1444262 - RNA, 19 nt, Artificial Sequence
  Description of Artificial Sequence: Synthetic oligonucleotide
aaucacgauccuggagaga

SEQ ID NO: 1444263 - RNA, 19 nt, Artificial Sequence
  Description of Artificial Sequence: Synthetic oligonucleotide
gcaugaaacguguugcuua

SEQ ID NO: 1444264 - RNA, 19 nt, Artificial Sequence
  Description of Artificial Sequence: Synthetic oligonucleotide
agaaaucgaucuacacuga

SEQ ID NO: 1444265 - RNA, 19 nt, Artificial Sequence
  Description of Artificial Sequence: Synthetic oligonucleotide
ccgaaaugguaaaguaaag

SEQ ID NO: 1444266 - RNA, 19 nt, Artificial Sequence
  Description of Artificial Sequence: Synthetic oligonucleotide
uggccaauuccguguugca

SEQ ID NO: 1444267 - RNA, 19 nt, Artificial Sequence
  Description of Artificial Sequence: Synthetic oligonucleotide
auaucgcaacacaauugga

SEQ ID NO: 1444268 - RNA, 19 nt, Artificial Sequence
  Description of Artificial Sequence: Synthetic oligonucleotide
uuuagucaggcagcuuaua

SEQ ID NO: 1444269 - RNA, 19 nt, Artificial Sequence
  Description of Artificial Sequence: Synthetic oligonucleotide
gccagaaaucgaucuacac

SEQ ID NO: 1444270 - RNA, 19 nt, Artificial Sequence
  Description of Artificial Sequence: Synthetic oligonucleotide
cagagagugauuggguaca

SEQ ID NO: 1444271 - RNA, 19 nt, Artificial Sequence
  Description of Artificial Sequence: Synthetic oligonucleotide
guauuguuacccugagagu

SEQ ID NO: 1444272 - RNA, 19 nt, Artificial Sequence
  Description of Artificial Sequence: Synthetic oligonucleotide
gccaauuccguguugcaaa

SEQ ID NO: 1444273 - RNA, 19 nt, Artificial Sequence
  Description of Artificial Sequence: Synthetic oligonucleotide
cguguugcuuaaaaguuuc

SEQ ID NO: 1444274 - RNA, 19 nt, Artificial Sequence
  Description of Artificial Sequence: Synthetic oligonucleotide
ccaauuccguguugcaaag

SEQ ID NO: 1444275 - RNA, 19 nt, Artificial Sequence
  Description of Artificial Sequence: Synthetic oligonucleotide
gcuuaccauugucaggcug

SEQ ID NO: 1444276 - RNA, 19 nt, Artificial Sequence
  Description of Artificial Sequence: Synthetic oligonucleotide
cucggugcccugaacuuca

SEQ ID NO: 1444277 - RNA, 19 nt, Artificial Sequence
  Description of Artificial Sequence: Synthetic oligonucleotide
ggagagauagguuuuccau

SEQ ID NO: 1444278 - RNA, 19 nt, Artificial Sequence
  Description of Artificial Sequence: Synthetic oligonucleotide
gaacuucagagaaccugga

SEQ ID NO: 1444279 - RNA, 19 nt, Artificial Sequence
  Description of Artificial Sequence: Synthetic oligonucleotide
agccccaaacguaaggaaa

SEQ ID NO: 1444280 - RNA, 19 nt, Artificial Sequence
  Description of Artificial Sequence: Synthetic oligonucleotide
auagagccccaaacguaag

SEQ ID NO: 1444281 - RNA, 19 nt, Artificial Sequence
  Description of Artificial Sequence: Synthetic oligonucleotide
ggauaucagcccaagcaca

SEQ ID NO: 1444282 - RNA, 19 nt, Artificial Sequence
  Description of Artificial Sequence: Synthetic oligonucleotide
aagugacguucaaaauuaa

SEQ ID NO: 1444283 - RNA, 19 nt, Artificial Sequence
  Description of Artificial Sequence: Synthetic oligonucleotide
ucucggugcccugaacuuc

SEQ ID NO: 1444284 - RNA, 19 nt, Artificial Sequence
  Description of Artificial Sequence: Synthetic oligonucleotide
gucgccuuugguauucaga

SEQ ID NO: 1444285 - RNA, 19 nt, Artificial Sequence
  Description of Artificial Sequence: Synthetic oligonucleotide
agaaaaccgcgggugcacu

SEQ ID NO: 1444286 - RNA, 19 nt, Artificial Sequence
  Description of Artificial Sequence: Synthetic oligonucleotide
auguacguuguaguuucau

SEQ ID NO: 1444287 - RNA, 19 nt, Artificial Sequence
  Description of Artificial Sequence: Synthetic oligonucleotide
agauguggucucagcaaca

SEQ ID NO: 1444288 - RNA, 19 nt, Artificial Sequence
  Description of Artificial Sequence: Synthetic oligonucleotide
augcagagagugauugggu

SEQ ID NO: 1444289 - RNA, 19 nt, Artificial Sequence
  Description of Artificial Sequence: Synthetic oligonucleotide
caauuggauaucagcccaa

SEQ ID NO: 1444290 - RNA, 19 nt, Artificial Sequence
  Description of Artificial Sequence: Synthetic oligonucleotide
acguguugcuuaaaaguuu

SEQ ID NO: 1444291 - RNA, 19 nt, Artificial Sequence
  Description of Artificial Sequence: Synthetic oligonucleotide
agucaucguaagggcagug

SEQ ID NO: 1444292 - RNA, 19 nt, Artificial Sequence
  Description of Artificial Sequence: Synthetic oligonucleotide
cuuaaauggguagacgauu

SEQ ID NO: 1444293 - RNA, 19 nt, Artificial Sequence
  Description of Artificial Sequence: Synthetic oligonucleotide
guguuagcuuguacuucag

SEQ ID NO: 1444294 - RNA, 19 nt, Artificial Sequence
  Description of Artificial Sequence: Synthetic oligonucleotide
ccaagagcacaguuuucac

SEQ ID NO: 1444295 - RNA, 19 nt, Artificial Sequence
  Description of Artificial Sequence: Synthetic oligonucleotide
agcuuaccauugucaggcu

SEQ ID NO: 1444296 - RNA, 19 nt, Artificial Sequence
  Description of Artificial Sequence: Synthetic oligonucleotide
gcaacacaauuggauauca

SEQ ID NO: 1444297 - RNA, 19 nt, Artificial Sequence
  Description of Artificial Sequence: Synthetic oligonucleotide
uccauacauguugguguaa

SEQ ID NO: 1444298 - RNA, 19 nt, Artificial Sequence
  Description of Artificial Sequence: Synthetic oligonucleotide
ucggugcccugaacuucag

SEQ ID NO: 1444299 - RNA, 19 nt, Artificial Sequence
  Description of Artificial Sequence: Synthetic oligonucleotide
accccacuauuucuaugaa

SEQ ID NO: 1444300 - RNA, 19 nt, Artificial Sequence
  Description of Artificial Sequence: Synthetic oligonucleotide
ccagaaaucgaucuacacu

SEQ ID NO: 1444301 - RNA, 19 nt, Artificial Sequence
  Description of Artificial Sequence: Synthetic oligonucleotide
uggguacauuguccucacu

SEQ ID NO: 1444302 - RNA, 19 nt, Artificial Sequence
  Description of Artificial Sequence: Synthetic oligonucleotide
cuaugaaaaucacgauccu

SEQ ID NO: 1444303 - RNA, 19 nt, Artificial Sequence
  Description of Artificial Sequence: Synthetic oligonucleotide
cugaguccagaauuuaguu

SEQ ID NO: 1444304 - RNA, 19 nt, Artificial Sequence
  Description of Artificial Sequence: Synthetic oligonucleotide
augguaaaguaaagacgaa

SEQ ID NO: 1444305 - RNA, 19 nt, Artificial Sequence
  Description of Artificial Sequence: Synthetic oligonucleotide
caguugaacacggagcagu

SEQ ID NO: 1444306 - RNA, 19 nt, Artificial Sequence
  Description of Artificial Sequence: Synthetic oligonucleotide
uuuguucauuuugcuucua

SEQ ID NO: 1444307 - RNA, 19 nt, Artificial Sequence
  Description of Artificial Sequence: Synthetic oligonucleotide
agaucuccaaauggccaau

SEQ ID NO: 1444308 - RNA, 19 nt, Artificial Sequence
  Description of Artificial Sequence: Synthetic oligonucleotide
auagggcacaaaacagaaa

SEQ ID NO: 1444309 - RNA, 19 nt, Artificial Sequence
  Description of Artificial Sequence: Synthetic oligonucleotide
cucccaucacugugaacca

SEQ ID NO: 1444310 - RNA, 19 nt, Artificial Sequence
  Description of Artificial Sequence: Synthetic oligonucleotide
augcacccauacaaagugu

SEQ ID NO: 1444311 - RNA, 19 nt, Artificial Sequence
  Description of Artificial Sequence: Synthetic oligonucleotide
gacaaucgucucauuuucu

SEQ ID NO: 1444312 - RNA, 19 nt, Artificial Sequence
  Description of Artificial Sequence: Synthetic oligonucleotide
ggguagacgauugccagaa

SEQ ID NO: 1444313 - RNA, 19 nt, Artificial Sequence
  Description of Artificial Sequence: Synthetic oligonucleotide
cacccauacaaaguguacu

SEQ ID NO: 1444314 - RNA, 19 nt, Artificial Sequence
  Description of Artificial Sequence: Synthetic oligonucleotide
guccagaauuuaguuaacu

SEQ ID NO: 1444315 - RNA, 19 nt, Artificial Sequence
  Description of Artificial Sequence: Synthetic oligonucleotide
acgauccuggagagauagg

SEQ ID NO: 1444316 - RNA, 19 nt, Artificial Sequence
  Description of Artificial Sequence: Synthetic oligonucleotide
uaccauugucaggcuguac

SEQ ID NO: 1444317 - RNA, 19 nt, Artificial Sequence
  Description of Artificial Sequence: Synthetic oligonucleotide
gggucgacugaaagaaaac

SEQ ID NO: 1444318 - RNA, 19 nt, Artificial Sequence
  Description of Artificial Sequence: Synthetic oligonucleotide
gucuucgacuuaaaugggu

SEQ ID NO: 1444319 - RNA, 19 nt, Artificial Sequence
  Description of Artificial Sequence: Synthetic oligonucleotide
cauguacguuguaguuuca

SEQ ID NO: 1444320 - RNA, 19 nt, Artificial Sequence
  Description of Artificial Sequence: Synthetic oligonucleotide
gggcagugggagccguugg

SEQ ID NO: 1444321 - RNA, 19 nt, Artificial Sequence
  Description of Artificial Sequence: Synthetic oligonucleotide
cgacuuaaauggguagacg

SEQ ID NO: 1444322 - RNA, 19 nt, Artificial Sequence
  Description of Artificial Sequence: Synthetic oligonucleotide
agcaaugcagagagugauu

SEQ ID NO: 1444323 - RNA, 19 nt, Artificial Sequence
  Description of Artificial Sequence: Synthetic oligonucleotide
ccguuggagcuuaccauug

SEQ ID NO: 1444324 - RNA, 19 nt, Artificial Sequence
  Description of Artificial Sequence: Synthetic oligonucleotide
ggucgccuuugguauucag

SEQ ID NO: 1444325 - RNA, 19 nt, Artificial Sequence
  Description of Artificial Sequence: Synthetic oligonucleotide
acccugagagugggucgac

SEQ ID NO: 1444326 - RNA, 19 nt, Artificial Sequence
  Description of Artificial Sequence: Synthetic oligonucleotide
cguuuaguucuuaaagucu

SEQ ID NO: 1444327 - RNA, 19 nt, Artificial Sequence
  Description of Artificial Sequence: Synthetic oligonucleotide
guuuagucaggcagcuuau

SEQ ID NO: 1444328 - RNA, 19 nt, Artificial Sequence
  Description of Artificial Sequence: Synthetic oligonucleotide
augaaacguguugcuuaaa

SEQ ID NO: 1444329 - RNA, 19 nt, Artificial Sequence
  Description of Artificial Sequence: Synthetic oligonucleotide
gaaaaccgcgggugcacuu

SEQ ID NO: 1444330 - RNA, 19 nt, Artificial Sequence
  Description of Artificial Sequence: Synthetic oligonucleotide
gccaguuuauucgaaaauu

SEQ ID NO: 1444331 - RNA, 19 nt, Artificial Sequence
  Description of Artificial Sequence: Synthetic oligonucleotide
ccauagagccccaaacgua

SEQ ID NO: 1444332 - RNA, 19 nt, Artificial Sequence
  Description of Artificial Sequence: Synthetic oligonucleotide
ugggagccguuggagcuua

SEQ ID NO: 1444333 - RNA, 19 nt, Artificial Sequence
  Description of Artificial Sequence: Synthetic oligonucleotide
agcuaccacagagcaguua

SEQ ID NO: 1444334 - RNA, 19 nt, Artificial Sequence
  Description of Artificial Sequence: Synthetic oligonucleotide
ugguuuagucaggcagcuu

SEQ ID NO: 1444335 - RNA, 19 nt, Artificial Sequence
  Description of Artificial Sequence: Synthetic oligonucleotide
aguccucguguuagcuugu

SEQ ID NO: 1444336 - RNA, 19 nt, Artificial Sequence
  Description of Artificial Sequence: Synthetic oligonucleotide
agcggucgccuuugguauu

SEQ ID NO: 1444337 - RNA, 19 nt, Artificial Sequence
  Description of Artificial Sequence: Synthetic oligonucleotide
cccauagagccccaaacgu

SEQ ID NO: 1444338 - RNA, 19 nt, Artificial Sequence
  Description of Artificial Sequence: Synthetic oligonucleotide
gagucaucguaagggcagu

SEQ ID NO: 1444339 - RNA, 19 nt, Artificial Sequence
  Description of Artificial Sequence: Synthetic oligonucleotide
ccgcgggugcacuuccucc

SEQ ID NO: 1444340 - RNA, 19 nt, Artificial Sequence
  Description of Artificial Sequence: Synthetic oligonucleotide
aaccgcgggugcacuuccu

SEQ ID NO: 1444341 - RNA, 19 nt, Artificial Sequence
  Description of Artificial Sequence: Synthetic oligonucleotide
cgcgggugcacuuccuccc

SEQ ID NO: 1444342 - RNA, 19 nt, Artificial Sequence
  Description of Artificial Sequence: Synthetic oligonucleotide
gguuaagaacagaaugcuu

SEQ ID NO: 1444343 - RNA, 19 nt, Artificial Sequence
  Description of Artificial Sequence: Synthetic oligonucleotide
ggccaauuccguguugcaa

SEQ ID NO: 1444344 - RNA, 19 nt, Artificial Sequence
  Description of Artificial Sequence: Synthetic oligonucleotide
guguugcuuaaaaguuucu

SEQ ID NO: 1444345 - RNA, 19 nt, Artificial Sequence
  Description of Artificial Sequence: Synthetic oligonucleotide
cgcaacacaauuggauauc

SEQ ID NO: 1444346 - RNA, 19 nt, Artificial Sequence
  Description of Artificial Sequence: Synthetic oligonucleotide
guagauucuucaggacaau

SEQ ID NO: 1444347 - RNA, 19 nt, Artificial Sequence
  Description of Artificial Sequence: Synthetic oligonucleotide
ccccacuauuucuaugaaa

SEQ ID NO: 1444348 - RNA, 19 nt, Artificial Sequence
  Description of Artificial Sequence: Synthetic oligonucleotide
gccguuggagcuuaccauu

SEQ ID NO: 1444349 - RNA, 19 nt, Artificial Sequence
  Description of Artificial Sequence: Synthetic oligonucleotide
gugggucgacugaaagaaa

SEQ ID NO: 1444350 - RNA, 19 nt, Artificial Sequence
  Description of Artificial Sequence: Synthetic oligonucleotide
ccagugguuuagucaggca

SEQ ID NO: 1444351 - RNA, 19 nt, Artificial Sequence
  Description of Artificial Sequence: Synthetic oligonucleotide
gguagacgauugccagaaa

SEQ ID NO: 1444352 - RNA, 19 nt, Artificial Sequence
  Description of Artificial Sequence: Synthetic oligonucleotide
gagagugauuggguacauu

SEQ ID NO: 1444353 - RNA, 19 nt, Artificial Sequence
  Description of Artificial Sequence: Synthetic oligonucleotide
gcccugaacuucagagaac

SEQ ID NO: 1444354 - RNA, 19 nt, Artificial Sequence
  Description of Artificial Sequence: Synthetic oligonucleotide
gcagcuuauauugcagauu

SEQ ID NO: 1444355 - RNA, 19 nt, Artificial Sequence
  Description of Artificial Sequence: Synthetic oligonucleotide
gcuuacagggaguccuuuu

SEQ ID NO: 1444356 - RNA, 19 nt, Artificial Sequence
  Description of Artificial Sequence: Synthetic oligonucleotide
cguucaaaauuaaggggau

SEQ ID NO: 1444357 - RNA, 19 nt, Artificial Sequence
  Description of Artificial Sequence: Synthetic oligonucleotide
cguaaggaaaagcuguguu

SEQ ID NO: 1444358 - RNA, 19 nt, Artificial Sequence
  Description of Artificial Sequence: Synthetic oligonucleotide
gcggucgccuuugguauuc

SEQ ID NO: 1444359 - RNA, 19 nt, Artificial Sequence
  Description of Artificial Sequence: Synthetic oligonucleotide
gcgggugcacuuccuccca

SEQ ID NO: 1444360 - RNA, 19 nt, Artificial Sequence
  Description of Artificial Sequence: Synthetic oligonucleotide
cagcuuacagggaguccuu

SEQ ID NO: 1444361 - RNA, 19 nt, Artificial Sequence
  Description of Artificial Sequence: Synthetic oligonucleotide
guccucguguuagcuugua

SEQ ID NO: 1444362 - RNA, 19 nt, Artificial Sequence
  Description of Artificial Sequence: Synthetic oligonucleotide
cagcuaccacagagcaguu

SEQ ID NO: 1444363 - RNA, 19 nt, Artificial Sequence
  Description of Artificial Sequence: Synthetic oligonucleotide
cccugagagugggucgacu

SEQ ID NO: 1444364 - RNA, 19 nt, Artificial Sequence
  Description of Artificial Sequence: Synthetic oligonucleotide
cggucgccuuugguauuca

SEQ ID NO: 1444365 - RNA, 19 nt, Artificial Sequence
  Description of Artificial Sequence: Synthetic oligonucleotide
cgggugcacuuccucccau

SEQ ID NO: 1444366 - RNA, 19 nt, Artificial Sequence
  Description of Artificial Sequence: Synthetic oligonucleotide
agcuuaaggacuuugaucc

SEQ ID NO: 1444367 - RNA, 19 nt, Artificial Sequence
  Description of Artificial Sequence: Synthetic oligonucleotide
aagacgaucacccuuguac

SEQ ID NO: 1444368 - RNA, 19 nt, Artificial Sequence
  Description of Artificial Sequence: Synthetic oligonucleotide
aaucuuagcaauguucacc

SEQ ID NO: 1444369 - RNA, 19 nt, Artificial Sequence
  Description of Artificial Sequence: Synthetic oligonucleotide
uuguacuaguccaugaugg

SEQ ID NO: 1444370 - RNA, 19 nt, Artificial Sequence
  Description of Artificial Sequence: Synthetic oligonucleotide
aauacccaaccuuuucucc

SEQ ID NO: 1444371 - RNA, 19 nt, Artificial Sequence
  Description of Artificial Sequence: Synthetic oligonucleotide
ucagaauaccgauugaaag

SEQ ID NO: 1444372 - RNA, 19 nt, Artificial Sequence
  Description of Artificial Sequence: Synthetic oligonucleotide
  modified_base (7)..(7): a, c, u, g, unknown or other
gauggunacguuuauguuc

SEQ ID NO: 1444373 - RNA, 19 nt, Artificial Sequence
  Description of Artificial Sequence: Synthetic oligonucleotide
ucuccuuuguccaagacga

SEQ ID NO: 1444374 - RNA, 19 nt, Artificial Sequence
  Description of Artificial Sequence: Synthetic oligonucleotide
aagcgcaagauauugaaca

SEQ ID NO: 1444375 - RNA, 19 nt, Artificial Sequence
  Description of Artificial Sequence: Synthetic oligonucleotide
auugaacagggcuagggac

SEQ ID NO: 1444376 - RNA, 19 nt, Artificial Sequence
  Description of Artificial Sequence: Synthetic oligonucleotide
cagaauaccgauugaaagg

SEQ ID NO: 1444377 - RNA, 19 nt, Artificial Sequence
  Description of Artificial Sequence: Synthetic oligonucleotide
gaaccugagaacaaaacag

SEQ ID NO: 1444378 - RNA, 19 nt, Artificial Sequence
  Description of Artificial Sequence: Synthetic oligonucleotide
aucgacaaccucucaaugc

SEQ ID NO: 1444379 - RNA, 19 nt, Artificial Sequence
  Description of Artificial Sequence: Synthetic oligonucleotide
agugaugcuauuccauccc

SEQ ID NO: 1444380 - RNA, 19 nt, Artificial Sequence
  Description of Artificial Sequence: Synthetic oligonucleotide
uguacggcccacaauaccc

SEQ ID NO: 1444381 - RNA, 19 nt, Artificial Sequence
  Description of Artificial Sequence: Synthetic oligonucleotide
agaauaccgauugaaaggg

SEQ ID NO: 1444382 - RNA, 19 nt, Artificial Sequence
  Description of Artificial Sequence: Synthetic oligonucleotide
cuccucaugagacagaaag

SEQ ID NO: 1444383 - RNA, 19 nt, Artificial Sequence
  Description of Artificial Sequence: Synthetic oligonucleotide
  modified_base (9)..(9): a, c, u, g, unknown or other
ucgauggunacguuuaugu

SEQ ID NO: 1444384 - RNA, 19 nt, Artificial Sequence
  Description of Artificial Sequence: Synthetic oligonucleotide
uacaguacaccccauguga

SEQ ID NO: 1444385 - RNA, 19 nt, Artificial Sequence
  Description of Artificial Sequence: Synthetic oligonucleotide
aauaccgauugaaaggguc

SEQ ID NO: 1444386 - RNA, 19 nt, Artificial Sequence
  Description of Artificial Sequence: Synthetic oligonucleotide
ucauugauccggaacaaac

SEQ ID NO: 1444387 - RNA, 19 nt, Artificial Sequence
  Description of Artificial Sequence: Synthetic oligonucleotide
gaagagguagaugucagag

SEQ ID NO: 1444388 - RNA, 19 nt, Artificial Sequence
  Description of Artificial Sequence: Synthetic oligonucleotide
uuaaaguggaguacaucug

SEQ ID NO: 1444389 - RNA, 19 nt, Artificial Sequence
  Description of Artificial Sequence: Synthetic oligonucleotide
ugauccggaacaaacccag

SEQ ID NO: 1444390 - RNA, 19 nt, Artificial Sequence
  Description of Artificial Sequence: Synthetic oligonucleotide
agacgcuugagggagacgc

SEQ ID NO: 1444391 - RNA, 19 nt, Artificial Sequence
  Description of Artificial Sequence: Synthetic oligonucleotide
uccuugaucgacaaccucu

SEQ ID NO: 1444392 - RNA, 19 nt, Artificial Sequence
  Description of Artificial Sequence: Synthetic oligonucleotide
ucguccaacacuagaaucu

SEQ ID NO: 1444393 - RNA, 19 nt, Artificial Sequence
  Description of Artificial Sequence: Synthetic oligonucleotide
aguggaguacaucugucuc

SEQ ID NO: 1444394 - RNA, 19 nt, Artificial Sequence
  Description of Artificial Sequence: Synthetic oligonucleotide
agacucauugauccggaac

SEQ ID NO: 1444395 - RNA, 19 nt, Artificial Sequence
  Description of Artificial Sequence: Synthetic oligonucleotide
ugcggagagaaccugagaa

SEQ ID NO: 1444396 - RNA, 19 nt, Artificial Sequence
  Description of Artificial Sequence: Synthetic oligonucleotide
auccugagacgcuugaggg

SEQ ID NO: 1444397 - RNA, 19 nt, Artificial Sequence
  Description of Artificial Sequence: Synthetic oligonucleotide
ucgacaaccucucaaugcu

SEQ ID NO: 1444398 - RNA, 19 nt, Artificial Sequence
  Description of Artificial Sequence: Synthetic oligonucleotide
uaguucuuaccagauaugc

SEQ ID NO: 1444399 - RNA, 19 nt, Artificial Sequence
  Description of Artificial Sequence: Synthetic oligonucleotide
cauugauccggaacaaacc

SEQ ID NO: 1444400 - RNA, 19 nt, Artificial Sequence
  Description of Artificial Sequence: Synthetic oligonucleotide
agguagaugucagaguuac

SEQ ID NO: 1444401 - RNA, 19 nt, Artificial Sequence
  Description of Artificial Sequence: Synthetic oligonucleotide
acacucaugauucagcuua

SEQ ID NO: 1444402 - RNA, 19 nt, Artificial Sequence
  Description of Artificial Sequence: Synthetic oligonucleotide
auauugaacagggcuaggg

SEQ ID NO: 1444403 - RNA, 19 nt, Artificial Sequence
  Description of Artificial Sequence: Synthetic oligonucleotide
uucuuaccagauaugccag

SEQ ID NO: 1444404 - RNA, 19 nt, Artificial Sequence
  Description of Artificial Sequence: Synthetic oligonucleotide
uacuaguccaugaugguau

SEQ ID NO: 1444405 - RNA, 19 nt, Artificial Sequence
  Description of Artificial Sequence: Synthetic oligonucleotide
cuuuucuccacccucgaug

SEQ ID NO: 1444406 - RNA, 19 nt, Artificial Sequence
  Description of Artificial Sequence: Synthetic oligonucleotide
uccuguacggcccacaaua

SEQ ID NO: 1444407 - RNA, 19 nt, Artificial Sequence
  Description of Artificial Sequence: Synthetic oligonucleotide
gagacagaaagauccugag

SEQ ID NO: 1444408 - RNA, 19 nt, Artificial Sequence
  Description of Artificial Sequence: Synthetic oligonucleotide
aaguggaguacaucugucu

SEQ ID NO: 1444409 - RNA, 19 nt, Artificial Sequence
  Description of Artificial Sequence: Synthetic oligonucleotide
  modified_base (2)..(2): a, c, u, g, unknown or other
unacguuuauguucuugag

SEQ ID NO: 1444410 - RNA, 19 nt, Artificial Sequence
  Description of Artificial Sequence: Synthetic oligonucleotide
auaccgauugaaagggucc

SEQ ID NO: 1444411 - RNA, 19 nt, Artificial Sequence
  Description of Artificial Sequence: Synthetic oligonucleotide
  modified_base (3)..(3): a, c, u, g, unknown or other
gunacguuuauguucuuga

SEQ ID NO: 1444412 - RNA, 19 nt, Artificial Sequence
  Description of Artificial Sequence: Synthetic oligonucleotide
acaauacccaaccuuuucu

SEQ ID NO: 1444413 - RNA, 19 nt, Artificial Sequence
  Description of Artificial Sequence: Synthetic oligonucleotide
aguucuuaccagauaugcc

SEQ ID NO: 1444414 - RNA, 19 nt, Artificial Sequence
  Description of Artificial Sequence: Synthetic oligonucleotide
uuuugaagcgcaagcugug

SEQ ID NO: 1444415 - RNA, 19 nt, Artificial Sequence
  Description of Artificial Sequence: Synthetic oligonucleotide
ugcagacucauugauccgg

SEQ ID NO: 1444416 - RNA, 19 nt, Artificial Sequence
  Description of Artificial Sequence: Synthetic oligonucleotide
aagcgcaagcugugcaggc

SEQ ID NO: 1444417 - RNA, 19 nt, Artificial Sequence
  Description of Artificial Sequence: Synthetic oligonucleotide
agagcucggagggugaacc

SEQ ID NO: 1444418 - RNA, 19 nt, Artificial Sequence
  Description of Artificial Sequence: Synthetic oligonucleotide
cuucaggugagcgagcucc

SEQ ID NO: 1444419 - RNA, 19 nt, Artificial Sequence
  Description of Artificial Sequence: Synthetic oligonucleotide
cuuccugauguccaugacc

SEQ ID NO: 1444420 - RNA, 19 nt, Artificial Sequence
  Description of Artificial Sequence: Synthetic oligonucleotide
guuguucucauccacgguc

SEQ ID NO: 1444421 - RNA, 19 nt, Artificial Sequence
  Description of Artificial Sequence: Synthetic oligonucleotide
ugauuuugaagcgcaagcu

SEQ ID NO: 1444422 - RNA, 19 nt, Artificial Sequence
  Description of Artificial Sequence: Synthetic oligonucleotide
ucgaugaugaugucgccac

SEQ ID NO: 1444423 - RNA, 19 nt, Artificial Sequence
  Description of Artificial Sequence: Synthetic oligonucleotide
uugaucgacaaccucucaa

SEQ ID NO: 1444424 - RNA, 19 nt, Artificial Sequence
  Description of Artificial Sequence: Synthetic oligonucleotide
ugggaugcuggcccuauag

SEQ ID NO: 1444425 - RNA, 19 nt, Artificial Sequence
  Description of Artificial Sequence: Synthetic oligonucleotide
ugaaugaugcguucuucac

SEQ ID NO: 1444426 - RNA, 19 nt, Artificial Sequence
  Description of Artificial Sequence: Synthetic oligonucleotide
uguguuuaaaguggaguac

SEQ ID NO: 1444427 - RNA, 19 nt, Artificial Sequence
  Description of Artificial Sequence: Synthetic oligonucleotide
aaccuuuucuccacccucg

SEQ ID NO: 1444428 - RNA, 19 nt, Artificial Sequence
  Description of Artificial Sequence: Synthetic oligonucleotide
caagauauugaacagggcu

SEQ ID NO: 1444429 - RNA, 19 nt, Artificial Sequence
  Description of Artificial Sequence: Synthetic oligonucleotide
aagauauugaacagggcua

SEQ ID NO: 1444430 - RNA, 19 nt, Artificial Sequence
  Description of Artificial Sequence: Synthetic oligonucleotide
uggauaccugggaugcugg

SEQ ID NO: 1444431 - RNA, 19 nt, Artificial Sequence
  Description of Artificial Sequence: Synthetic oligonucleotide
gaugguauuaaggcgguga

SEQ ID NO: 1444432 - RNA, 19 nt, Artificial Sequence
  Description of Artificial Sequence: Synthetic oligonucleotide
uguagccucguccaacacu

SEQ ID NO: 1444433 - RNA, 19 nt, Artificial Sequence
  Description of Artificial Sequence: Synthetic oligonucleotide
uggaacgccagcucccagg

SEQ ID NO: 1444434 - RNA, 19 nt, Artificial Sequence
  Description of Artificial Sequence: Synthetic oligonucleotide
aguacagucuucaaacugu

SEQ ID NO: 1444435 - RNA, 19 nt, Artificial Sequence
  Description of Artificial Sequence: Synthetic oligonucleotide
gaaugaugcguucuucaca

SEQ ID NO: 1444436 - RNA, 19 nt, Artificial Sequence
  Description of Artificial Sequence: Synthetic oligonucleotide
uuagcaauguucaccccau

SEQ ID NO: 1444437 - RNA, 19 nt, Artificial Sequence
  Description of Artificial Sequence: Synthetic oligonucleotide
uguuuaaaguggaguacau

SEQ ID NO: 1444438 - RNA, 19 nt, Artificial Sequence
  Description of Artificial Sequence: Synthetic oligonucleotide
gauggugauuuugaagcgc

SEQ ID NO: 1444439 - RNA, 19 nt, Artificial Sequence
  Description of Artificial Sequence: Synthetic oligonucleotide
ugaucgacaaccucucaau

SEQ ID NO: 1444440 - RNA, 19 nt, Artificial Sequence
  Description of Artificial Sequence: Synthetic oligonucleotide
uccuuagccaugcuauaga

SEQ ID NO: 1444441 - RNA, 19 nt, Artificial Sequence
  Description of Artificial Sequence: Synthetic oligonucleotide
uugagugggaagcgcaaga

SEQ ID NO: 1444442 - RNA, 19 nt, Artificial Sequence
  Description of Artificial Sequence: Synthetic oligonucleotide
uccucaugagacagaaaga

SEQ ID NO: 1444443 - RNA, 19 nt, Artificial Sequence
  Description of Artificial Sequence: Synthetic oligonucleotide
gguauuaaggcggugagca

SEQ ID NO: 1444444 - RNA, 19 nt, Artificial Sequence
  Description of Artificial Sequence: Synthetic oligonucleotide
uucagcuuaucuggcaaag

SEQ ID NO: 1444445 - RNA, 19 nt, Artificial Sequence
  Description of Artificial Sequence: Synthetic oligonucleotide
caggcguguguuuaaagug

SEQ ID NO: 1444446 - RNA, 19 nt, Artificial Sequence
  Description of Artificial Sequence: Synthetic oligonucleotide
gaucgacaaccucucaaug

SEQ ID NO: 1444447 - RNA, 19 nt, Artificial Sequence
  Description of Artificial Sequence: Synthetic oligonucleotide
ugggaagcgcaagauauug

SEQ ID NO: 1444448 - RNA, 19 nt, Artificial Sequence
  Description of Artificial Sequence: Synthetic oligonucleotide
uggaguacaucugucuccc

SEQ ID NO: 1444449 - RNA, 19 nt, Artificial Sequence
  Description of Artificial Sequence: Synthetic oligonucleotide
aguacaccccaugugaaug

SEQ ID NO: 1444450 - RNA, 19 nt, Artificial Sequence
  Description of Artificial Sequence: Synthetic oligonucleotide
uguacuaguccaugauggu

SEQ ID NO: 1444451 - RNA, 19 nt, Artificial Sequence
  Description of Artificial Sequence: Synthetic oligonucleotide
uauuaaggcggugagcaau

SEQ ID NO: 1444452 - RNA, 19 nt, Artificial Sequence
  Description of Artificial Sequence: Synthetic oligonucleotide
cuuagcaauguucacccca

SEQ ID NO: 1444453 - RNA, 19 nt, Artificial Sequence
  Description of Artificial Sequence: Synthetic oligonucleotide
uuaccagauaugccaguac

SEQ ID NO: 1444454 - RNA, 19 nt, Artificial Sequence
  Description of Artificial Sequence: Synthetic oligonucleotide
  modified_base (6)..(6): a, c, u, g, unknown or other
auggunacguuuauguucu

SEQ ID NO: 1444455 - RNA, 19 nt, Artificial Sequence
  Description of Artificial Sequence: Synthetic oligonucleotide
agugggaagcgcaagauau

SEQ ID NO: 1444456 - RNA, 19 nt, Artificial Sequence
  Description of Artificial Sequence: Synthetic oligonucleotide
augaccaugggcaggaugu

SEQ ID NO: 1444457 - RNA, 19 nt, Artificial Sequence
  Description of Artificial Sequence: Synthetic oligonucleotide
gaagcgcaagcugugcagg

SEQ ID NO: 1444458 - RNA, 19 nt, Artificial Sequence
  Description of Artificial Sequence: Synthetic oligonucleotide
aagauccugagacgcuuga

SEQ ID NO: 1444459 - RNA, 19 nt, Artificial Sequence
  Description of Artificial Sequence: Synthetic oligonucleotide
ugucagaguuacaguacac

SEQ ID NO: 1444460 - RNA, 19 nt, Artificial Sequence
  Description of Artificial Sequence: Synthetic oligonucleotide
auacacagcaaagguugac

SEQ ID NO: 1444461 - RNA, 19 nt, Artificial Sequence
  Description of Artificial Sequence: Synthetic oligonucleotide
ugugcauccacagccgaga

SEQ ID NO: 1444462 - RNA, 19 nt, Artificial Sequence
  Description of Artificial Sequence: Synthetic oligonucleotide
ugagcgagcuccagggcca

SEQ ID NO: 1444463 - RNA, 19 nt, Artificial Sequence
  Description of Artificial Sequence: Synthetic oligonucleotide
cgcaagauauugaacaggg

SEQ ID NO: 1444464 - RNA, 19 nt, Artificial Sequence
  Description of Artificial Sequence: Synthetic oligonucleotide
cagauaugccaguacccag

SEQ ID NO: 1444465 - RNA, 19 nt, Artificial Sequence
  Description of Artificial Sequence: Synthetic oligonucleotide
ugaaccgcacucccggacu

SEQ ID NO: 1444466 - RNA, 19 nt, Artificial Sequence
  Description of Artificial Sequence: Synthetic oligonucleotide
gugaaugaugcguucuuca

SEQ ID NO: 1444467 - RNA, 19 nt, Artificial Sequence
  Description of Artificial Sequence: Synthetic oligonucleotide
cagacccaggugaaggugc

SEQ ID NO: 1444468 - RNA, 19 nt, Artificial Sequence
  Description of Artificial Sequence: Synthetic oligonucleotide
aucgaagagguagauguca

SEQ ID NO: 1444469 - RNA, 19 nt, Artificial Sequence
  Description of Artificial Sequence: Synthetic oligonucleotide
cucaugagacagaaagauc

SEQ ID NO: 1444470 - RNA, 19 nt, Artificial Sequence
  Description of Artificial Sequence: Synthetic oligonucleotide
guguguuuaaaguggagua

SEQ ID NO: 1444471 - RNA, 19 nt, Artificial Sequence
  Description of Artificial Sequence: Synthetic oligonucleotide
uuugaagcgcaagcugugc

SEQ ID NO: 1444472 - RNA, 19 nt, Artificial Sequence
  Description of Artificial Sequence: Synthetic oligonucleotide
  modified_base (16)..(16): a, c, u, g, unknown or other
uccacccucgauggunacg

SEQ ID NO: 1444473 - RNA, 19 nt, Artificial Sequence
  Description of Artificial Sequence: Synthetic oligonucleotide
caugcggagagaaccugag

SEQ ID NO: 1444474 - RNA, 19 nt, Artificial Sequence
  Description of Artificial Sequence: Synthetic oligonucleotide
gugagcgagcuccagggcc

SEQ ID NO: 1444475 - RNA, 19 nt, Artificial Sequence
  Description of Artificial Sequence: Synthetic oligonucleotide
aacccagggugagagaaga

SEQ ID NO: 1444476 - RNA, 19 nt, Artificial Sequence
  Description of Artificial Sequence: Synthetic oligonucleotide
guacccagcucacaccaag

SEQ ID NO: 1444477 - RNA, 19 nt, Artificial Sequence
  Description of Artificial Sequence: Synthetic oligonucleotide
aacagggcuagggacacaa

SEQ ID NO: 1444478 - RNA, 19 nt, Artificial Sequence
  Description of Artificial Sequence: Synthetic oligonucleotide
cacaauacccaaccuuuuc

SEQ ID NO: 1444479 - RNA, 19 nt, Artificial Sequence
  Description of Artificial Sequence: Synthetic oligonucleotide
auccuuagccaugcuauag

SEQ ID NO: 1444480 - RNA, 19 nt, Artificial Sequence
  Description of Artificial Sequence: Synthetic oligonucleotide
aagcccuucaggugagcga

SEQ ID NO: 1444481 - RNA, 19 nt, Artificial Sequence
  Description of Artificial Sequence: Synthetic oligonucleotide
ucccaguuucuucaagguc

SEQ ID NO: 1444482 - RNA, 19 nt, Artificial Sequence
  Description of Artificial Sequence: Synthetic oligonucleotide
ugaugucgccaccugcaga

SEQ ID NO: 1444483 - RNA, 19 nt, Artificial Sequence
  Description of Artificial Sequence: Synthetic oligonucleotide
guuacaguacaccccaugu

SEQ ID NO: 1444484 - RNA, 19 nt, Artificial Sequence
  Description of Artificial Sequence: Synthetic oligonucleotide
ucaccccuggauaccuggg

SEQ ID NO: 1444485 - RNA, 19 nt, Artificial Sequence
  Description of Artificial Sequence: Synthetic oligonucleotide
aaagauccugagacgcuug

SEQ ID NO: 1444486 - RNA, 19 nt, Artificial Sequence
  Description of Artificial Sequence: Synthetic oligonucleotide
ugcuuugugcguuuugcuu

SEQ ID NO: 1444487 - RNA, 19 nt, Artificial Sequence
  Description of Artificial Sequence: Synthetic oligonucleotide
gguaugcagacuucuugag

SEQ ID NO: 1444488 - RNA, 19 nt, Artificial Sequence
  Description of Artificial Sequence: Synthetic oligonucleotide
cacggucacauacacagca

SEQ ID NO: 1444489 - RNA, 19 nt, Artificial Sequence
  Description of Artificial Sequence: Synthetic oligonucleotide
agcucggagggugaaccgc

SEQ ID NO: 1444490 - RNA, 19 nt, Artificial Sequence
  Description of Artificial Sequence: Synthetic oligonucleotide
ugugaaugaugcguucuuc

SEQ ID NO: 1444491 - RNA, 19 nt, Artificial Sequence
  Description of Artificial Sequence: Synthetic oligonucleotide
ucuuaccagauaugccagu

SEQ ID NO: 1444492 - RNA, 19 nt, Artificial Sequence
  Description of Artificial Sequence: Synthetic oligonucleotide
gaagcgcaagauauugaac

SEQ ID NO: 1444493 - RNA, 19 nt, Artificial Sequence
  Description of Artificial Sequence: Synthetic oligonucleotide
ucuuagcaauguucacccc

SEQ ID NO: 1444494 - RNA, 19 nt, Artificial Sequence
  Description of Artificial Sequence: Synthetic oligonucleotide
aagagcucggagggugaac

SEQ ID NO: 1444495 - RNA, 19 nt, Artificial Sequence
  Description of Artificial Sequence: Synthetic oligonucleotide
agcccuucaggugagcgag

SEQ ID NO: 1444496 - RNA, 19 nt, Artificial Sequence
  Description of Artificial Sequence: Synthetic oligonucleotide
uaaggcggugagcaauagu

SEQ ID NO: 1444497 - RNA, 19 nt, Artificial Sequence
  Description of Artificial Sequence: Synthetic oligonucleotide
uccugagacgcuugaggga

SEQ ID NO: 1444498 - RNA, 19 nt, Artificial Sequence
  Description of Artificial Sequence: Synthetic oligonucleotide
caaccuuuucuccacccuc

SEQ ID NO: 1444499 - RNA, 19 nt, Artificial Sequence
  Description of Artificial Sequence: Synthetic oligonucleotide
agcuuaucuggcaaagcug

SEQ ID NO: 1444500 - RNA, 19 nt, Artificial Sequence
  Description of Artificial Sequence: Synthetic oligonucleotide
ggcggugagcaauagugag

SEQ ID NO: 1444501 - RNA, 19 nt, Artificial Sequence
  Description of Artificial Sequence: Synthetic oligonucleotide
acaugugcauccacagccg

SEQ ID NO: 1444502 - RNA, 19 nt, Artificial Sequence
  Description of Artificial Sequence: Synthetic oligonucleotide
ggugauuuugaagcgcaag

SEQ ID NO: 1444503 - RNA, 19 nt, Artificial Sequence
  Description of Artificial Sequence: Synthetic oligonucleotide
cuguacggcccacaauacc

SEQ ID NO: 1444504 - RNA, 19 nt, Artificial Sequence
  Description of Artificial Sequence: Synthetic oligonucleotide
  modified_base (10)..(10): a, c, u, g, unknown or other
cucgauggunacguuuaug

SEQ ID NO: 1444505 - RNA, 19 nt, Artificial Sequence
  Description of Artificial Sequence: Synthetic oligonucleotide
ugguauuaaggcggugagc

SEQ ID NO: 1444506 - RNA, 19 nt, Artificial Sequence
  Description of Artificial Sequence: Synthetic oligonucleotide
aucagaauaccgauugaaa

SEQ ID NO: 1444507 - RNA, 19 nt, Artificial Sequence
  Description of Artificial Sequence: Synthetic oligonucleotide
uaccgauugaaagggucca

SEQ ID NO: 1444508 - RNA, 19 nt, Artificial Sequence
  Description of Artificial Sequence: Synthetic oligonucleotide
agcgcaagcugugcaggcc

SEQ ID NO: 1444509 - RNA, 19 nt, Artificial Sequence
  Description of Artificial Sequence: Synthetic oligonucleotide
gggugaaccgcacucccgg

SEQ ID NO: 1444510 - RNA, 19 nt, Artificial Sequence
  Description of Artificial Sequence: Synthetic oligonucleotide
auggugauuuugaagcgca

SEQ ID NO: 1444511 - RNA, 19 nt, Artificial Sequence
  Description of Artificial Sequence: Synthetic oligonucleotide
cacuuagguucucuccacc

SEQ ID NO: 1444512 - RNA, 19 nt, Artificial Sequence
  Description of Artificial Sequence: Synthetic oligonucleotide
accauccuugaucgacaac

SEQ ID NO: 1444513 - RNA, 19 nt, Artificial Sequence
  Description of Artificial Sequence: Synthetic oligonucleotide
augguggacugaaugaggu

SEQ ID NO: 1444514 - RNA, 19 nt, Artificial Sequence
  Description of Artificial Sequence: Synthetic oligonucleotide
auucagcuuaucuggcaaa

SEQ ID NO: 1444515 - RNA, 19 nt, Artificial Sequence
  Description of Artificial Sequence: Synthetic oligonucleotide
  modified_base (4)..(4): a, c, u, g, unknown or other
ggunacguuuauguucuug

SEQ ID NO: 1444516 - RNA, 19 nt, Artificial Sequence
  Description of Artificial Sequence: Synthetic oligonucleotide
caggccaaucuuagcaaug

SEQ ID NO: 1444517 - RNA, 19 nt, Artificial Sequence
  Description of Artificial Sequence: Synthetic oligonucleotide
gacuuugaucccauugaga

SEQ ID NO: 1444518 - RNA, 19 nt, Artificial Sequence
  Description of Artificial Sequence: Synthetic oligonucleotide
uuaaggcggugagcaauag

SEQ ID NO: 1444519 - RNA, 19 nt, Artificial Sequence
  Description of Artificial Sequence: Synthetic oligonucleotide
ggaagcgcaagauauugaa

SEQ ID NO: 1444520 - RNA, 19 nt, Artificial Sequence
  Description of Artificial Sequence: Synthetic oligonucleotide
gagcucggagggugaaccg

SEQ ID NO: 1444521 - RNA, 19 nt, Artificial Sequence
  Description of Artificial Sequence: Synthetic oligonucleotide
ggaccaaccaccuucucaa

SEQ ID NO: 1444522 - RNA, 19 nt, Artificial Sequence
  Description of Artificial Sequence: Synthetic oligonucleotide
ccggacuucuccuuugucc

SEQ ID NO: 1444523 - RNA, 19 nt, Artificial Sequence
  Description of Artificial Sequence: Synthetic oligonucleotide
caggguugccggcucaccc

SEQ ID NO: 1444524 - RNA, 19 nt, Artificial Sequence
  Description of Artificial Sequence: Synthetic oligonucleotide
augugaaugaugcguucuu

SEQ ID NO: 1444525 - RNA, 19 nt, Artificial Sequence
  Description of Artificial Sequence: Synthetic oligonucleotide
caucgaagagguagauguc

SEQ ID NO: 1444526 - RNA, 19 nt, Artificial Sequence
  Description of Artificial Sequence: Synthetic oligonucleotide
gauccggaacaaacccagg

SEQ ID NO: 1444527 - RNA, 19 nt, Artificial Sequence
  Description of Artificial Sequence: Synthetic oligonucleotide
agaaagauccugagacgcu

SEQ ID NO: 1444528 - RNA, 19 nt, Artificial Sequence
  Description of Artificial Sequence: Synthetic oligonucleotide
cagggugagagaagacuuc

SEQ ID NO: 1444529 - RNA, 19 nt, Artificial Sequence
  Description of Artificial Sequence: Synthetic oligonucleotide
gccaugcuauagaagaugc

SEQ ID NO: 1444530 - RNA, 19 nt, Artificial Sequence
  Description of Artificial Sequence: Synthetic oligonucleotide
ugagacgcuugagggagac

SEQ ID NO: 1444531 - RNA, 19 nt, Artificial Sequence
  Description of Artificial Sequence: Synthetic oligonucleotide
guagccucguccaacacua

SEQ ID NO: 1444532 - RNA, 19 nt, Artificial Sequence
  Description of Artificial Sequence: Synthetic oligonucleotide
caucuagaauguuguucuc

SEQ ID NO: 1444533 - RNA, 19 nt, Artificial Sequence
  Description of Artificial Sequence: Synthetic oligonucleotide
agcugugcaggccaaucuu

SEQ ID NO: 1444534 - RNA, 19 nt, Artificial Sequence
  Description of Artificial Sequence: Synthetic oligonucleotide
uggugauuuugaagcgcaa

SEQ ID NO: 1444535 - RNA, 19 nt, Artificial Sequence
  Description of Artificial Sequence: Synthetic oligonucleotide
guacaccccaugugaauga

SEQ ID NO: 1444536 - RNA, 19 nt, Artificial Sequence
  Description of Artificial Sequence: Synthetic oligonucleotide
cugacacgaagcccuucag

SEQ ID NO: 1444537 - RNA, 19 nt, Artificial Sequence
  Description of Artificial Sequence: Synthetic oligonucleotide
ugcuguagccucguccaac

SEQ ID NO: 1444538 - RNA, 19 nt, Artificial Sequence
  Description of Artificial Sequence: Synthetic oligonucleotide
aagcuggcgcugcccaaca

SEQ ID NO: 1444539 - RNA, 19 nt, Artificial Sequence
  Description of Artificial Sequence: Synthetic oligonucleotide
acgcuggccugcacaaugc

SEQ ID NO: 1444540 - RNA, 19 nt, Artificial Sequence
  Description of Artificial Sequence: Synthetic oligonucleotide
ugguggacugaaugagguc

SEQ ID NO: 1444541 - RNA, 19 nt, Artificial Sequence
  Description of Artificial Sequence: Synthetic oligonucleotide
cugcacacucaugauucag

SEQ ID NO: 1444542 - RNA, 19 nt, Artificial Sequence
  Description of Artificial Sequence: Synthetic oligonucleotide
cagcuuaucuggcaaagcu

SEQ ID NO: 1444543 - RNA, 19 nt, Artificial Sequence
  Description of Artificial Sequence: Synthetic oligonucleotide
gcgcaagauauugaacagg

SEQ ID NO: 1444544 - RNA, 19 nt, Artificial Sequence
  Description of Artificial Sequence: Synthetic oligonucleotide
cuauagaagaugccccucu

SEQ ID NO: 1444545 - RNA, 19 nt, Artificial Sequence
  Description of Artificial Sequence: Synthetic oligonucleotide
ccggaacaaacccagggug

SEQ ID NO: 1444546 - RNA, 19 nt, Artificial Sequence
  Description of Artificial Sequence: Synthetic oligonucleotide
gacgaucacccuuguacua

SEQ ID NO: 1444547 - RNA, 19 nt, Artificial Sequence
  Description of Artificial Sequence: Synthetic oligonucleotide
cuggcccuauaguucuuac

SEQ ID NO: 1444548 - RNA, 19 nt, Artificial Sequence
  Description of Artificial Sequence: Synthetic oligonucleotide
ucggagggugaaccgcacu

SEQ ID NO: 1444549 - RNA, 19 nt, Artificial Sequence
  Description of Artificial Sequence: Synthetic oligonucleotide
accccuggauaccugggau

SEQ ID NO: 1444550 - RNA, 19 nt, Artificial Sequence
  Description of Artificial Sequence: Synthetic oligonucleotide
gugaaccgcacucccggac

SEQ ID NO: 1444551 - RNA, 19 nt, Artificial Sequence
  Description of Artificial Sequence: Synthetic oligonucleotide
augaugguauuaaggcggu

SEQ ID NO: 1444552 - RNA, 19 nt, Artificial Sequence
  Description of Artificial Sequence: Synthetic oligonucleotide
auuaaggcggugagcaaua

SEQ ID NO: 1444553 - RNA, 19 nt, Artificial Sequence
  Description of Artificial Sequence: Synthetic oligonucleotide
ugaugguauuaaggcggug

SEQ ID NO: 1444554 - RNA, 19 nt, Artificial Sequence
  Description of Artificial Sequence: Synthetic oligonucleotide
caagcugugcaggccaauc

SEQ ID NO: 1444555 - RNA, 19 nt, Artificial Sequence
  Description of Artificial Sequence: Synthetic oligonucleotide
acuaguccaugaugguauu

SEQ ID NO: 1444556 - RNA, 19 nt, Artificial Sequence
  Description of Artificial Sequence: Synthetic oligonucleotide
gcccuauaguucuuaccag

SEQ ID NO: 1444557 - RNA, 19 nt, Artificial Sequence
  Description of Artificial Sequence: Synthetic oligonucleotide
ucccggacuucuccuuugu

SEQ ID NO: 1444558 - RNA, 19 nt, Artificial Sequence
  Description of Artificial Sequence: Synthetic oligonucleotide
aaccgcacucccggacuuc

SEQ ID NO: 1444559 - RNA, 19 nt, Artificial Sequence
  Description of Artificial Sequence: Synthetic oligonucleotide
augugcauccacagccgag

SEQ ID NO: 1444560 - RNA, 19 nt, Artificial Sequence
  Description of Artificial Sequence: Synthetic oligonucleotide
gagugggaagcgcaagaua

SEQ ID NO: 1444561 - RNA, 19 nt, Artificial Sequence
  Description of Artificial Sequence: Synthetic oligonucleotide
augcggagagaaccugaga

SEQ ID NO: 1444562 - RNA, 19 nt, Artificial Sequence
  Description of Artificial Sequence: Synthetic oligonucleotide
agggugaaccgcacucccg

SEQ ID NO: 1444563 - RNA, 19 nt, Artificial Sequence
  Description of Artificial Sequence: Synthetic oligonucleotide
acgcuugagggagacgcug

SEQ ID NO: 1444564 - RNA, 19 nt, Artificial Sequence
  Description of Artificial Sequence: Synthetic oligonucleotide
agcuggcgcugcccaacac

SEQ ID NO: 1444565 - RNA, 19 nt, Artificial Sequence
  Description of Artificial Sequence: Synthetic oligonucleotide
caccaagccagcauccuua

SEQ ID NO: 1444566 - RNA, 19 nt, Artificial Sequence
  Description of Artificial Sequence: Synthetic oligonucleotide
acccaggugaaggugccca

SEQ ID NO: 1444567 - RNA, 19 nt, Artificial Sequence
  Description of Artificial Sequence: Synthetic oligonucleotide
cagcucacaccaagccagc

SEQ ID NO: 1444568 - RNA, 19 nt, Artificial Sequence
  Description of Artificial Sequence: Synthetic oligonucleotide
ugccagguaugcagacuuc

SEQ ID NO: 1444569 - RNA, 19 nt, Artificial Sequence
  Description of Artificial Sequence: Synthetic oligonucleotide
uacggcccacaauacccaa

SEQ ID NO: 1444570 - RNA, 19 nt, Artificial Sequence
  Description of Artificial Sequence: Synthetic oligonucleotide
gaaagauccugagacgcuu

SEQ ID NO: 1444571 - RNA, 19 nt, Artificial Sequence
  Description of Artificial Sequence: Synthetic oligonucleotide
acggcccacaauacccaac

SEQ ID NO: 1444572 - RNA, 19 nt, Artificial Sequence
  Description of Artificial Sequence: Synthetic oligonucleotide
ggagacgcuggccugcaca

SEQ ID NO: 1444573 - RNA, 19 nt, Artificial Sequence
  Description of Artificial Sequence: Synthetic oligonucleotide
ccgauugaaaggguccagg

SEQ ID NO: 1444574 - RNA, 19 nt, Artificial Sequence
  Description of Artificial Sequence: Synthetic oligonucleotide
gggccauccagacuucuuc

SEQ ID NO: 1444575 - RNA, 19 nt, Artificial Sequence
  Description of Artificial Sequence: Synthetic oligonucleotide
gcccaugggaccaaccacc

SEQ ID NO: 1444576 - RNA, 19 nt, Artificial Sequence
  Description of Artificial Sequence: Synthetic oligonucleotide
cuuugugcguuuugcuucu

SEQ ID NO: 1444577 - RNA, 19 nt, Artificial Sequence
  Description of Artificial Sequence: Synthetic oligonucleotide
gcaagauauugaacagggc

SEQ ID NO: 1444578 - RNA, 19 nt, Artificial Sequence
  Description of Artificial Sequence: Synthetic oligonucleotide
cuugaucgacaaccucuca

SEQ ID NO: 1444579 - RNA, 19 nt, Artificial Sequence
  Description of Artificial Sequence: Synthetic oligonucleotide
cccuauaguucuuaccaga

SEQ ID NO: 1444580 - RNA, 19 nt, Artificial Sequence
  Description of Artificial Sequence: Synthetic oligonucleotide
uacaccccaugugaaugau

SEQ ID NO: 1444581 - RNA, 19 nt, Artificial Sequence
  Description of Artificial Sequence: Synthetic oligonucleotide
augggaccaaccaccuucu

SEQ ID NO: 1444582 - RNA, 19 nt, Artificial Sequence
  Description of Artificial Sequence: Synthetic oligonucleotide
cucggagggugaaccgcac

SEQ ID NO: 1444583 - RNA, 19 nt, Artificial Sequence
  Description of Artificial Sequence: Synthetic oligonucleotide
ugccggcucaccccuggau

SEQ ID NO: 1444584 - RNA, 19 nt, Artificial Sequence
  Description of Artificial Sequence: Synthetic oligonucleotide
aggcggugagcaauaguga

SEQ ID NO: 1444585 - RNA, 19 nt, Artificial Sequence
  Description of Artificial Sequence: Synthetic oligonucleotide
cuguagccucguccaacac

SEQ ID NO: 1444586 - RNA, 19 nt, Artificial Sequence
  Description of Artificial Sequence: Synthetic oligonucleotide
gccaggcguguguuuaaag

SEQ ID NO: 1444587 - RNA, 19 nt, Artificial Sequence
  Description of Artificial Sequence: Synthetic oligonucleotide
gcggugagcaauagugagc

SEQ ID NO: 1444588 - RNA, 19 nt, Artificial Sequence
  Description of Artificial Sequence: Synthetic oligonucleotide
guacggcccacaauaccca

SEQ ID NO: 1444589 - RNA, 19 nt, Artificial Sequence
  Description of Artificial Sequence: Synthetic oligonucleotide
ccuguacggcccacaauac

SEQ ID NO: 1444590 - RNA, 19 nt, Artificial Sequence
  Description of Artificial Sequence: Synthetic oligonucleotide
gaauaccgauugaaagggu

SEQ ID NO: 1444591 - RNA, 19 nt, Artificial Sequence
  Description of Artificial Sequence: Synthetic oligonucleotide
ccagauaugccaguaccca

SEQ ID NO: 1444592 - RNA, 19 nt, Artificial Sequence
  Description of Artificial Sequence: Synthetic oligonucleotide
cauccuuagccaugcuaua

SEQ ID NO: 1444593 - RNA, 19 nt, Artificial Sequence
  Description of Artificial Sequence: Synthetic oligonucleotide
ccaugugaaugaugcguuc

SEQ ID NO: 1444594 - RNA, 19 nt, Artificial Sequence
  Description of Artificial Sequence: Synthetic oligonucleotide
cggcccacaauacccaacc

SEQ ID NO: 1444595 - RNA, 19 nt, Artificial Sequence
  Description of Artificial Sequence: Synthetic oligonucleotide
gaccaaccaccuucucaaa

SEQ ID NO: 1444596 - RNA, 19 nt, Artificial Sequence
  Description of Artificial Sequence: Synthetic oligonucleotide
accgcacucccggacuucu

SEQ ID NO: 1444597 - RNA, 19 nt, Artificial Sequence
  Description of Artificial Sequence: Synthetic oligonucleotide
gcauccuuagccaugcuau

SEQ ID NO: 1444598 - RNA, 19 nt, Artificial Sequence
  Description of Artificial Sequence: Synthetic oligonucleotide
acggucacauacacagcaa

SEQ ID NO: 1444599 - RNA, 19 nt, Artificial Sequence
  Description of Artificial Sequence: Synthetic oligonucleotide
ccggcucaccccuggauac

SEQ ID NO: 1444600 - RNA, 19 nt, Artificial Sequence
  Description of Artificial Sequence: Synthetic oligonucleotide
cgcuugagggagacgcugg

SEQ ID NO: 1444601 - RNA, 19 nt, Artificial Sequence
  Description of Artificial Sequence: Synthetic oligonucleotide
ggcguguguuuaaagugga

SEQ ID NO: 1444602 - RNA, 19 nt, Artificial Sequence
  Description of Artificial Sequence: Synthetic oligonucleotide
caccccuggauaccuggga

SEQ ID NO: 1444603 - RNA, 19 nt, Artificial Sequence
  Description of Artificial Sequence: Synthetic oligonucleotide
ccuuguccuggaacgccag

SEQ ID NO: 1444604 - RNA, 19 nt, Artificial Sequence
  Description of Artificial Sequence: Synthetic oligonucleotide
agaggccaggcguguguuu

SEQ ID NO: 1444605 - RNA, 19 nt, Artificial Sequence
  Description of Artificial Sequence: Synthetic oligonucleotide
cuuagguucucuccaccuu

SEQ ID NO: 1444606 - RNA, 19 nt, Artificial Sequence
  Description of Artificial Sequence: Synthetic oligonucleotide
uuugugcguuuugcuucuc

SEQ ID NO: 1444607 - RNA, 19 nt, Artificial Sequence
  Description of Artificial Sequence: Synthetic oligonucleotide
ccucaugagacagaaagau

SEQ ID NO: 1444608 - RNA, 19 nt, Artificial Sequence
  Description of Artificial Sequence: Synthetic oligonucleotide
gcgcaagcugugcaggcca

SEQ ID NO: 1444609 - RNA, 19 nt, Artificial Sequence
  Description of Artificial Sequence: Synthetic oligonucleotide
gcguguguuuaaaguggag

SEQ ID NO: 1444610 - RNA, 19 nt, Artificial Sequence
  Description of Artificial Sequence: Synthetic oligonucleotide
cagacucauugauccggaa

SEQ ID NO: 1444611 - RNA, 19 nt, Artificial Sequence
  Description of Artificial Sequence: Synthetic oligonucleotide
  modified_base (5)..(5): a, c, u, g, unknown or other
uggunacguuuauguucuu

SEQ ID NO: 1444612 - RNA, 19 nt, Artificial Sequence
  Description of Artificial Sequence: Synthetic oligonucleotide
ccacggucacauacacagc

SEQ ID NO: 1444613 - RNA, 19 nt, Artificial Sequence
  Description of Artificial Sequence: Synthetic oligonucleotide
cgcacucccggacuucucc

SEQ ID NO: 1444614 - RNA, 19 nt, Artificial Sequence
  Description of Artificial Sequence: Synthetic oligonucleotide
cccacaauacccaaccuuu

SEQ ID NO: 1444615 - RNA, 19 nt, Artificial Sequence
  Description of Artificial Sequence: Synthetic oligonucleotide
ccaggcguguguuuaaagu

SEQ ID NO: 1444616 - RNA, 19 nt, Artificial Sequence
  Description of Artificial Sequence: Synthetic oligonucleotide
cugagacgcuugagggaga

SEQ ID NO: 1444617 - RNA, 19 nt, Artificial Sequence
  Description of Artificial Sequence: Synthetic oligonucleotide
  modified_base (12)..(12): a, c, u, g, unknown or other
cccucgauggunacguuua

SEQ ID NO: 1444618 - RNA, 19 nt, Artificial Sequence
  Description of Artificial Sequence: Synthetic oligonucleotide
cugucgggaggcuuggguu

SEQ ID NO: 1444619 - RNA, 19 nt, Artificial Sequence
  Description of Artificial Sequence: Synthetic oligonucleotide
caguacaccccaugugaau

SEQ ID NO: 1444620 - RNA, 19 nt, Artificial Sequence
  Description of Artificial Sequence: Synthetic oligonucleotide
cgacaaccucucaaugcug

SEQ ID NO: 1444621 - RNA, 19 nt, Artificial Sequence
  Description of Artificial Sequence: Synthetic oligonucleotide
gaaccgcacucccggacuu

SEQ ID NO: 1444622 - RNA, 19 nt, Artificial Sequence
  Description of Artificial Sequence: Synthetic oligonucleotide
gacgcuugagggagacgcu

SEQ ID NO: 1444623 - RNA, 19 nt, Artificial Sequence
  Description of Artificial Sequence: Synthetic oligonucleotide
cacucaugauucagcuuau

SEQ ID NO: 1444624 - RNA, 19 nt, Artificial Sequence
  Description of Artificial Sequence: Synthetic oligonucleotide
cacacucaugauucagcuu

SEQ ID NO: 1444625 - RNA, 19 nt, Artificial Sequence
  Description of Artificial Sequence: Synthetic oligonucleotide
gcucggagggugaaccgca

SEQ ID NO: 1444626 - RNA, 19 nt, Artificial Sequence
  Description of Artificial Sequence: Synthetic oligonucleotide
gagcccgggccaggcacac

SEQ ID NO: 1444627 - RNA, 19 nt, Artificial Sequence
  Description of Artificial Sequence: Synthetic oligonucleotide
cguguguuuaaaguggagu

SEQ ID NO: 1444628 - RNA, 19 nt, Artificial Sequence
  Description of Artificial Sequence: Synthetic oligonucleotide
gccggcucaccccuggaua

SEQ ID NO: 1444629 - RNA, 19 nt, Artificial Sequence
  Description of Artificial Sequence: Synthetic oligonucleotide
gccagguaugcagacuucu

SEQ ID NO: 1444630 - RNA, 19 nt, Artificial Sequence
  Description of Artificial Sequence: Synthetic oligonucleotide
agacgcuggccugcacaau

SEQ ID NO: 1444631 - RNA, 19 nt, Artificial Sequence
  Description of Artificial Sequence: Synthetic oligonucleotide
cgauugaaaggguccaggu

SEQ ID NO: 1444632 - RNA, 19 nt, Artificial Sequence
  Description of Artificial Sequence: Synthetic oligonucleotide
ccaggguugccggcucacc

SEQ ID NO: 1444633 - RNA, 19 nt, Artificial Sequence
  Description of Artificial Sequence: Synthetic oligonucleotide
gugggaagcgcaagauauu

SEQ ID NO: 1444634 - RNA, 19 nt, Artificial Sequence
  Description of Artificial Sequence: Synthetic oligonucleotide
cccggacuucuccuuuguc

SEQ ID NO: 1444635 - RNA, 19 nt, Artificial Sequence
  Description of Artificial Sequence: Synthetic oligonucleotide
  modified_base (15)..(15): a, c, u, g, unknown or other
ccacccucgauggunacgu

SEQ ID NO: 1444636 - RNA, 19 nt, Artificial Sequence
  Description of Artificial Sequence: Synthetic oligonucleotide
gcucaccccuggauaccug

SEQ ID NO: 1444637 - RNA, 19 nt, Artificial Sequence
  Description of Artificial Sequence: Synthetic oligonucleotide
ccagggccauccagacuuc

SEQ ID NO: 1444638 - RNA, 19 nt, Artificial Sequence
  Description of Artificial Sequence: Synthetic oligonucleotide
accugggaugcuggcccua

SEQ ID NO: 1444639 - RNA, 19 nt, Artificial Sequence
  Description of Artificial Sequence: Synthetic oligonucleotide
gggagacgcuggccugcac

SEQ ID NO: 1444640 - RNA, 19 nt, Artificial Sequence
  Description of Artificial Sequence: Synthetic oligonucleotide
ggcucaccccuggauaccu

SEQ ID NO: 1444641 - RNA, 19 nt, Artificial Sequence
  Description of Artificial Sequence: Synthetic oligonucleotide
cacucccggacuucuccuu

SEQ ID NO: 1444642 - RNA, 19 nt, Artificial Sequence
  Description of Artificial Sequence: Synthetic oligonucleotide
ggccaggcguguguuuaaa

SEQ ID NO: 1444643 - RNA, 19 nt, Artificial Sequence
  Description of Artificial Sequence: Synthetic oligonucleotide
cugcaagagcucggagggu

SEQ ID NO: 1444644 - RNA, 19 nt, Artificial Sequence
  Description of Artificial Sequence: Synthetic oligonucleotide
cagggccauccagacuucu

SEQ ID NO: 1444645 - RNA, 19 nt, Artificial Sequence
  Description of Artificial Sequence: Synthetic oligonucleotide
  modified_base (8)..(8): a, c, u, g, unknown or other
cgauggunacguuuauguu

SEQ ID NO: 1444646 - RNA, 19 nt, Artificial Sequence
  Description of Artificial Sequence: Synthetic oligonucleotide
cggcucaccccuggauacc

SEQ ID NO: 1444647 - RNA, 19 nt, Artificial Sequence
  Description of Artificial Sequence: Synthetic oligonucleotide
  modified_base (11)..(11): a, c, u, g, unknown or other
ccucgauggunacguuuau

SEQ ID NO: 1444648 - RNA, 19 nt, Artificial Sequence
  Description of Artificial Sequence: Synthetic oligonucleotide
gcccaacacuuagguucuc

SEQ ID NO: 1444649 - RNA, 19 nt, Artificial Sequence
  Description of Artificial Sequence: Synthetic oligonucleotide
auaucaaagacucggaagg

SEQ ID NO: 1444650 - RNA, 19 nt, Artificial Sequence
  Description of Artificial Sequence: Synthetic oligonucleotide
uggaauuuagguuugcugg

SEQ ID NO: 1444651 - RNA, 19 nt, Artificial Sequence
  Description of Artificial Sequence: Synthetic oligonucleotide
cuuaaagucaccugguugc

SEQ ID NO: 1444652 - RNA, 19 nt, Artificial Sequence
  Description of Artificial Sequence: Synthetic oligonucleotide
uuuccuuagguuauugagg

SEQ ID NO: 1444653 - RNA, 19 nt, Artificial Sequence
  Description of Artificial Sequence: Synthetic oligonucleotide
uacaaauuggaccaagagc

SEQ ID NO: 1444654 - RNA, 19 nt, Artificial Sequence
  Description of Artificial Sequence: Synthetic oligonucleotide
auccgauacaaauuggacc

SEQ ID NO: 1444655 - RNA, 19 nt, Artificial Sequence
  Description of Artificial Sequence: Synthetic oligonucleotide
ugagauccgauacaaauug

SEQ ID NO: 1444656 - RNA, 19 nt, Artificial Sequence
  Description of Artificial Sequence: Synthetic oligonucleotide
uuuuccuuagguuauugag

SEQ ID NO: 1444657 - RNA, 19 nt, Artificial Sequence
  Description of Artificial Sequence: Synthetic oligonucleotide
uccgauacaaauuggacca

SEQ ID NO: 1444658 - RNA, 19 nt, Artificial Sequence
  Description of Artificial Sequence: Synthetic oligonucleotide
guaaacaccaaggagacug

SEQ ID NO: 1444659 - RNA, 19 nt, Artificial Sequence
  Description of Artificial Sequence: Synthetic oligonucleotide
uucccuucggaagagaugg

SEQ ID NO: 1444660 - RNA, 19 nt, Artificial Sequence
  Description of Artificial Sequence: Synthetic oligonucleotide
cauaucaaagacucggaag

SEQ ID NO: 1444661 - RNA, 19 nt, Artificial Sequence
  Description of Artificial Sequence: Synthetic oligonucleotide
gacagagucauaucggcag

SEQ ID NO: 1444662 - RNA, 19 nt, Artificial Sequence
  Description of Artificial Sequence: Synthetic oligonucleotide
ucugcggugacacugagau

SEQ ID NO: 1444663 - RNA, 19 nt, Artificial Sequence
  Description of Artificial Sequence: Synthetic oligonucleotide
ugacuuugggcccaguucc

SEQ ID NO: 1444664 - RNA, 19 nt, Artificial Sequence
  Description of Artificial Sequence: Synthetic oligonucleotide
aaaccucagguuucucugc

SEQ ID NO: 1444665 - RNA, 19 nt, Artificial Sequence
  Description of Artificial Sequence: Synthetic oligonucleotide
ucugcaaggugccuagccg

SEQ ID NO: 1444666 - RNA, 19 nt, Artificial Sequence
  Description of Artificial Sequence: Synthetic oligonucleotide
accacuagacuacuggcac

SEQ ID NO: 1444667 - RNA, 19 nt, Artificial Sequence
  Description of Artificial Sequence: Synthetic oligonucleotide
ucaacagauagcuggcucc

SEQ ID NO: 1444668 - RNA, 19 nt, Artificial Sequence
  Description of Artificial Sequence: Synthetic oligonucleotide
cacagaagcguccaagucg

SEQ ID NO: 1444669 - RNA, 19 nt, Artificial Sequence
  Description of Artificial Sequence: Synthetic oligonucleotide
acugagauccgauacaaau

SEQ ID NO: 1444670 - RNA, 19 nt, Artificial Sequence
  Description of Artificial Sequence: Synthetic oligonucleotide
agcuccauaucaaagacuc

SEQ ID NO: 1444671 - RNA, 19 nt, Artificial Sequence
  Description of Artificial Sequence: Synthetic oligonucleotide
aauuuagguuugcugggug

SEQ ID NO: 1444672 - RNA, 19 nt, Artificial Sequence
  Description of Artificial Sequence: Synthetic oligonucleotide
aagguuagcaugaucaccu

SEQ ID NO: 1444673 - RNA, 19 nt, Artificial Sequence
  Description of Artificial Sequence: Synthetic oligonucleotide
uccgacucaggccaauugg

SEQ ID NO: 1444674 - RNA, 19 nt, Artificial Sequence
  Description of Artificial Sequence: Synthetic oligonucleotide
gaaaccucagguuucucug

SEQ ID NO: 1444675 - RNA, 19 nt, Artificial Sequence
  Description of Artificial Sequence: Synthetic oligonucleotide
aaaguugcucugcaaggug

SEQ ID NO: 1444676 - RNA, 19 nt, Artificial Sequence
  Description of Artificial Sequence: Synthetic oligonucleotide
cuggguaucaggagaaacc

SEQ ID NO: 1444677 - RNA, 19 nt, Artificial Sequence
  Description of Artificial Sequence: Synthetic oligonucleotide
ucaggcaccgugauugucc

SEQ ID NO: 1444678 - RNA, 19 nt, Artificial Sequence
  Description of Artificial Sequence: Synthetic oligonucleotide
acagaagcguccaagucgc

SEQ ID NO: 1444679 - RNA, 19 nt, Artificial Sequence
  Description of Artificial Sequence: Synthetic oligonucleotide
uggaccaagagcucauucc

SEQ ID NO: 1444680 - RNA, 19 nt, Artificial Sequence
  Description of Artificial Sequence: Synthetic oligonucleotide
uggggaaacccucacuugc

SEQ ID NO: 1444681 - RNA, 19 nt, Artificial Sequence
  Description of Artificial Sequence: Synthetic oligonucleotide
uucccaaagguuagcauga

SEQ ID NO: 1444682 - RNA, 19 nt, Artificial Sequence
  Description of Artificial Sequence: Synthetic oligonucleotide
ugacacugagauccgauac

SEQ ID NO: 1444683 - RNA, 19 nt, Artificial Sequence
  Description of Artificial Sequence: Synthetic oligonucleotide
cucuagagcgucauagcgg

SEQ ID NO: 1444684 - RNA, 19 nt, Artificial Sequence
  Description of Artificial Sequence: Synthetic oligonucleotide
cuggccucgggcaagaggc

SEQ ID NO: 1444685 - RNA, 19 nt, Artificial Sequence
  Description of Artificial Sequence: Synthetic oligonucleotide
aaaaguugcucugcaaggu

SEQ ID NO: 1444686 - RNA, 19 nt, Artificial Sequence
  Description of Artificial Sequence: Synthetic oligonucleotide
gaaccaggaagcucucugg

SEQ ID NO: 1444687 - RNA, 19 nt, Artificial Sequence
  Description of Artificial Sequence: Synthetic oligonucleotide
cuugucuccgcaaaauuuc

SEQ ID NO: 1444688 - RNA, 19 nt, Artificial Sequence
  Description of Artificial Sequence: Synthetic oligonucleotide
aaauuggaccaagagcuca

SEQ ID NO: 1444689 - RNA, 19 nt, Artificial Sequence
  Description of Artificial Sequence: Synthetic oligonucleotide
ugagggugcaaugaugugc

SEQ ID NO: 1444690 - RNA, 19 nt, Artificial Sequence
  Description of Artificial Sequence: Synthetic oligonucleotide
ugaacacgcugacagaguc

SEQ ID NO: 1444691 - RNA, 19 nt, Artificial Sequence
  Description of Artificial Sequence: Synthetic oligonucleotide
agcucauucccuucggaag

SEQ ID NO: 1444692 - RNA, 19 nt, Artificial Sequence
  Description of Artificial Sequence: Synthetic oligonucleotide
uccacaucgaacuucccaa

SEQ ID NO: 1444693 - RNA, 19 nt, Artificial Sequence
  Description of Artificial Sequence: Synthetic oligonucleotide
cauagcggcaggaagggug

SEQ ID NO: 1444694 - RNA, 19 nt, Artificial Sequence
  Description of Artificial Sequence: Synthetic oligonucleotide
agacuacuggcacaaaagu

SEQ ID NO: 1444695 - RNA, 19 nt, Artificial Sequence
  Description of Artificial Sequence: Synthetic oligonucleotide
uucacuguuccagucacca

SEQ ID NO: 1444696 - RNA, 19 nt, Artificial Sequence
  Description of Artificial Sequence: Synthetic oligonucleotide
gaccucuagagcgucauag

SEQ ID NO: 1444697 - RNA, 19 nt, Artificial Sequence
  Description of Artificial Sequence: Synthetic oligonucleotide
acgggucugguguaguugg

SEQ ID NO: 1444698 - RNA, 19 nt, Artificial Sequence
  Description of Artificial Sequence: Synthetic oligonucleotide
uugucuccgcaaaauuucc

SEQ ID NO: 1444699 - RNA, 19 nt, Artificial Sequence
  Description of Artificial Sequence: Synthetic oligonucleotide
gguaauccgacucaggcca

SEQ ID NO: 1444700 - RNA, 19 nt, Artificial Sequence
  Description of Artificial Sequence: Synthetic oligonucleotide
aaagacucggaaggacagg

SEQ ID NO: 1444701 - RNA, 19 nt, Artificial Sequence
  Description of Artificial Sequence: Synthetic oligonucleotide
uaguccuccgcuuuuguaa

SEQ ID NO: 1444702 - RNA, 19 nt, Artificial Sequence
  Description of Artificial Sequence: Synthetic oligonucleotide
uggagcuagcuccuuuucc

SEQ ID NO: 1444703 - RNA, 19 nt, Artificial Sequence
  Description of Artificial Sequence: Synthetic oligonucleotide
caaaacuggugcucagugc

SEQ ID NO: 1444704 - RNA, 19 nt, Artificial Sequence
  Description of Artificial Sequence: Synthetic oligonucleotide
ccaaagguuagcaugauca

SEQ ID NO: 1444705 - RNA, 19 nt, Artificial Sequence
  Description of Artificial Sequence: Synthetic oligonucleotide
uccagucaccacuagacua

SEQ ID NO: 1444706 - RNA, 19 nt, Artificial Sequence
  Description of Artificial Sequence: Synthetic oligonucleotide
gagggugcaaugaugugcc

SEQ ID NO: 1444707 - RNA, 19 nt, Artificial Sequence
  Description of Artificial Sequence: Synthetic oligonucleotide
cauaucggcaguacguguc

SEQ ID NO: 1444708 - RNA, 19 nt, Artificial Sequence
  Description of Artificial Sequence: Synthetic oligonucleotide
aacccgacucucccgucac

SEQ ID NO: 1444709 - RNA, 19 nt, Artificial Sequence
  Description of Artificial Sequence: Synthetic oligonucleotide
caaagguuagcaugaucac

SEQ ID NO: 1444710 - RNA, 19 nt, Artificial Sequence
  Description of Artificial Sequence: Synthetic oligonucleotide
ugggugguuugacuuuggg

SEQ ID NO: 1444711 - RNA, 19 nt, Artificial Sequence
  Description of Artificial Sequence: Synthetic oligonucleotide
gaagcucucuggaggaagg

SEQ ID NO: 1444712 - RNA, 19 nt, Artificial Sequence
  Description of Artificial Sequence: Synthetic oligonucleotide
gcaaugaugugccaggaac

SEQ ID NO: 1444713 - RNA, 19 nt, Artificial Sequence
  Description of Artificial Sequence: Synthetic oligonucleotide
ugucuccgcaaaauuuccc

SEQ ID NO: 1444714 - RNA, 19 nt, Artificial Sequence
  Description of Artificial Sequence: Synthetic oligonucleotide
uccgcaaaauuuccccagc

SEQ ID NO: 1444715 - RNA, 19 nt, Artificial Sequence
  Description of Artificial Sequence: Synthetic oligonucleotide
gugacagugagucccuccc

SEQ ID NO: 1444716 - RNA, 19 nt, Artificial Sequence
  Description of Artificial Sequence: Synthetic oligonucleotide
aguuucagagaggugucag

SEQ ID NO: 1444717 - RNA, 19 nt, Artificial Sequence
  Description of Artificial Sequence: Synthetic oligonucleotide
ucuccgcaaaauuucccca

SEQ ID NO: 1444718 - RNA, 19 nt, Artificial Sequence
  Description of Artificial Sequence: Synthetic oligonucleotide
uuaaagucaccugguugcc

SEQ ID NO: 1444719 - RNA, 19 nt, Artificial Sequence
  Description of Artificial Sequence: Synthetic oligonucleotide
uuuagguuugcuggguggu

SEQ ID NO: 1444720 - RNA, 19 nt, Artificial Sequence
  Description of Artificial Sequence: Synthetic oligonucleotide
caguacccaggccacaagg

SEQ ID NO: 1444721 - RNA, 19 nt, Artificial Sequence
  Description of Artificial Sequence: Synthetic oligonucleotide
cugcaaggugccuagccgc

SEQ ID NO: 1444722 - RNA, 19 nt, Artificial Sequence
  Description of Artificial Sequence: Synthetic oligonucleotide
uuagcaugaucaccugguc

SEQ ID NO: 1444723 - RNA, 19 nt, Artificial Sequence
  Description of Artificial Sequence: Synthetic oligonucleotide
gagauccgauacaaauugg

SEQ ID NO: 1444724 - RNA, 19 nt, Artificial Sequence
  Description of Artificial Sequence: Synthetic oligonucleotide
aguugcucugcaaggugcc

SEQ ID NO: 1444725 - RNA, 19 nt, Artificial Sequence
  Description of Artificial Sequence: Synthetic oligonucleotide
gggguaauccgacucaggc

SEQ ID NO: 1444726 - RNA, 19 nt, Artificial Sequence
  Description of Artificial Sequence: Synthetic oligonucleotide
agguuaggacagcaggcag

SEQ ID NO: 1444727 - RNA, 19 nt, Artificial Sequence
  Description of Artificial Sequence: Synthetic oligonucleotide
ucauaucggcaguacgugu

SEQ ID NO: 1444728 - RNA, 19 nt, Artificial Sequence
  Description of Artificial Sequence: Synthetic oligonucleotide
ggaccaagagcucauuccc

SEQ ID NO: 1444729 - RNA, 19 nt, Artificial Sequence
  Description of Artificial Sequence: Synthetic oligonucleotide
ucggcaguacgugucaggc

SEQ ID NO: 1444730 - RNA, 19 nt, Artificial Sequence
  Description of Artificial Sequence: Synthetic oligonucleotide
ugccuagccgcuuguacug

SEQ ID NO: 1444731 - RNA, 19 nt, Artificial Sequence
  Description of Artificial Sequence: Synthetic oligonucleotide
agagaggugucagugggug

SEQ ID NO: 1444732 - RNA, 19 nt, Artificial Sequence
  Description of Artificial Sequence: Synthetic oligonucleotide
gguuagcaugaucaccugg

SEQ ID NO: 1444733 - RNA, 19 nt, Artificial Sequence
  Description of Artificial Sequence: Synthetic oligonucleotide
agauccgauacaaauugga

SEQ ID NO: 1444734 - RNA, 19 nt, Artificial Sequence
  Description of Artificial Sequence: Synthetic oligonucleotide
cacaucgaacuucccaaag

SEQ ID NO: 1444735 - RNA, 19 nt, Artificial Sequence
  Description of Artificial Sequence: Synthetic oligonucleotide
aagucgcuggcccgagguc

SEQ ID NO: 1444736 - RNA, 19 nt, Artificial Sequence
  Description of Artificial Sequence: Synthetic oligonucleotide
agaguuucagagagguguc

SEQ ID NO: 1444737 - RNA, 19 nt, Artificial Sequence
  Description of Artificial Sequence: Synthetic oligonucleotide
cacguaacccgacucuccc

SEQ ID NO: 1444738 - RNA, 19 nt, Artificial Sequence
  Description of Artificial Sequence: Synthetic oligonucleotide
gugguuugacuuugggccc

SEQ ID NO: 1444739 - RNA, 19 nt, Artificial Sequence
  Description of Artificial Sequence: Synthetic oligonucleotide
aucggcaguacgugucagg

SEQ ID NO: 1444740 - RNA, 19 nt, Artificial Sequence
  Description of Artificial Sequence: Synthetic oligonucleotide
uaacccgacucucccguca

SEQ ID NO: 1444741 - RNA, 19 nt, Artificial Sequence
  Description of Artificial Sequence: Synthetic oligonucleotide
agacccagcaaagaccucu

SEQ ID NO: 1444742 - RNA, 19 nt, Artificial Sequence
  Description of Artificial Sequence: Synthetic oligonucleotide
auagcggcaggaagggugg

SEQ ID NO: 1444743 - RNA, 19 nt, Artificial Sequence
  Description of Artificial Sequence: Synthetic oligonucleotide
agguuggggaaacccucac

SEQ ID NO: 1444744 - RNA, 19 nt, Artificial Sequence
  Description of Artificial Sequence: Synthetic oligonucleotide
ucuaguccuccgcuuuugu

SEQ ID NO: 1444745 - RNA, 19 nt, Artificial Sequence
  Description of Artificial Sequence: Synthetic oligonucleotide
agagcgucauagcggcagg

SEQ ID NO: 1444746 - RNA, 19 nt, Artificial Sequence
  Description of Artificial Sequence: Synthetic oligonucleotide
uuuccacggcaucccgagg

SEQ ID NO: 1444747 - RNA, 19 nt, Artificial Sequence
  Description of Artificial Sequence: Synthetic oligonucleotide
uacccaggccacaaggaau

SEQ ID NO: 1444748 - RNA, 19 nt, Artificial Sequence
  Description of Artificial Sequence: Synthetic oligonucleotide
cuuugggucagagcgggac

SEQ ID NO: 1444749 - RNA, 19 nt, Artificial Sequence
  Description of Artificial Sequence: Synthetic oligonucleotide
cuucgagucaucacucaca

SEQ ID NO: 1444750 - RNA, 19 nt, Artificial Sequence
  Description of Artificial Sequence: Synthetic oligonucleotide
caaauuggaccaagagcuc

SEQ ID NO: 1444751 - RNA, 19 nt, Artificial Sequence
  Description of Artificial Sequence: Synthetic oligonucleotide
uugggcguggucaggguuc

SEQ ID NO: 1444752 - RNA, 19 nt, Artificial Sequence
  Description of Artificial Sequence: Synthetic oligonucleotide
aauuggaccaagagcucau

SEQ ID NO: 1444753 - RNA, 19 nt, Artificial Sequence
  Description of Artificial Sequence: Synthetic oligonucleotide
ccuuaaagucaccugguug

SEQ ID NO: 1444754 - RNA, 19 nt, Artificial Sequence
  Description of Artificial Sequence: Synthetic oligonucleotide
acguaacccgacucucccg

SEQ ID NO: 1444755 - RNA, 19 nt, Artificial Sequence
  Description of Artificial Sequence: Synthetic oligonucleotide
uccuuaaagucaccugguu

SEQ ID NO: 1444756 - RNA, 19 nt, Artificial Sequence
  Description of Artificial Sequence: Synthetic oligonucleotide
aaacccucacuugccacgu

SEQ ID NO: 1444757 - RNA, 19 nt, Artificial Sequence
  Description of Artificial Sequence: Synthetic oligonucleotide
ugcaaggugccuagccgcu

SEQ ID NO: 1444758 - RNA, 19 nt, Artificial Sequence
  Description of Artificial Sequence: Synthetic oligonucleotide
auccgacucaggccaauug

SEQ ID NO: 1444759 - RNA, 19 nt, Artificial Sequence
  Description of Artificial Sequence: Synthetic oligonucleotide
gagguuaggacagcaggca

SEQ ID NO: 1444760 - RNA, 19 nt, Artificial Sequence
  Description of Artificial Sequence: Synthetic oligonucleotide
agucaccugguugccaggg

SEQ ID NO: 1444761 - RNA, 19 nt, Artificial Sequence
  Description of Artificial Sequence: Synthetic oligonucleotide
cuuuggacagguggcacug

SEQ ID NO: 1444762 - RNA, 19 nt, Artificial Sequence
  Description of Artificial Sequence: Synthetic oligonucleotide
gucagagcgggacugggga

SEQ ID NO: 1444763 - RNA, 19 nt, Artificial Sequence
  Description of Artificial Sequence: Synthetic oligonucleotide
ugucaggcuccacaucgaa

SEQ ID NO: 1444764 - RNA, 19 nt, Artificial Sequence
  Description of Artificial Sequence: Synthetic oligonucleotide
acauagaguuucagagagg

SEQ ID NO: 1444765 - RNA, 19 nt, Artificial Sequence
  Description of Artificial Sequence: Synthetic oligonucleotide
ucgaccgcuguaccagagc

SEQ ID NO: 1444766 - RNA, 19 nt, Artificial Sequence
  Description of Artificial Sequence: Synthetic oligonucleotide
ucguccguugucauccuua

SEQ ID NO: 1444767 - RNA, 19 nt, Artificial Sequence
  Description of Artificial Sequence: Synthetic oligonucleotide
agaagcguccaagucgcug

SEQ ID NO: 1444768 - RNA, 19 nt, Artificial Sequence
  Description of Artificial Sequence: Synthetic oligonucleotide
cgucauagcggcaggaagg

SEQ ID NO: 1444769 - RNA, 19 nt, Artificial Sequence
  Description of Artificial Sequence: Synthetic oligonucleotide
ggguaauccgacucaggcc

SEQ ID NO: 1444770 - RNA, 19 nt, Artificial Sequence
  Description of Artificial Sequence: Synthetic oligonucleotide
agugcccucguccguuguc

SEQ ID NO: 1444771 - RNA, 19 nt, Artificial Sequence
  Description of Artificial Sequence: Synthetic oligonucleotide
uccuccgcuuuuguaaaca

SEQ ID NO: 1444772 - RNA, 19 nt, Artificial Sequence
  Description of Artificial Sequence: Synthetic oligonucleotide
guaucaggagaaaccucag

SEQ ID NO: 1444773 - RNA, 19 nt, Artificial Sequence
  Description of Artificial Sequence: Synthetic oligonucleotide
cugcacauccuccccuggg

SEQ ID NO: 1444774 - RNA, 19 nt, Artificial Sequence
  Description of Artificial Sequence: Synthetic oligonucleotide
ccuuagguuauugaggauc

SEQ ID NO: 1444775 - RNA, 19 nt, Artificial Sequence
  Description of Artificial Sequence: Synthetic oligonucleotide
auccggggccacuggaguc

SEQ ID NO: 1444776 - RNA, 19 nt, Artificial Sequence
  Description of Artificial Sequence: Synthetic oligonucleotide
guuagcaugaucaccuggu

SEQ ID NO: 1444777 - RNA, 19 nt, Artificial Sequence
  Description of Artificial Sequence: Synthetic oligonucleotide
ccuucggaagagauggggc

SEQ ID NO: 1444778 - RNA, 19 nt, Artificial Sequence
  Description of Artificial Sequence: Synthetic oligonucleotide
ucccuucggaagagauggg

SEQ ID NO: 1444779 - RNA, 19 nt, Artificial Sequence
  Description of Artificial Sequence: Synthetic oligonucleotide
cggaccauggucuucacug

SEQ ID NO: 1444780 - RNA, 19 nt, Artificial Sequence
  Description of Artificial Sequence: Synthetic oligonucleotide
cgcugacagagucauaucg

SEQ ID NO: 1444781 - RNA, 19 nt, Artificial Sequence
  Description of Artificial Sequence: Synthetic oligonucleotide
uuagguuauugaggaucug

SEQ ID NO: 1444782 - RNA, 19 nt, Artificial Sequence
  Description of Artificial Sequence: Synthetic oligonucleotide
cuggggaccaagcugcaca

SEQ ID NO: 1444783 - RNA, 19 nt, Artificial Sequence
  Description of Artificial Sequence: Synthetic oligonucleotide
caccacuagacuacuggca

SEQ ID NO: 1444784 - RNA, 19 nt, Artificial Sequence
  Description of Artificial Sequence: Synthetic oligonucleotide
uacaggcgcaggccugaag

SEQ ID NO: 1444785 - RNA, 19 nt, Artificial Sequence
  Description of Artificial Sequence: Synthetic oligonucleotide
agguuagcaugaucaccug

SEQ ID NO: 1444786 - RNA, 19 nt, Artificial Sequence
  Description of Artificial Sequence: Synthetic oligonucleotide
ugguugggcuuguaaggaa

SEQ ID NO: 1444787 - RNA, 19 nt, Artificial Sequence
  Description of Artificial Sequence: Synthetic oligonucleotide
ucucccgucacguccccuc

SEQ ID NO: 1444788 - RNA, 19 nt, Artificial Sequence
  Description of Artificial Sequence: Synthetic oligonucleotide
uguaaacaccaaggagacu

SEQ ID NO: 1444789 - RNA, 19 nt, Artificial Sequence
  Description of Artificial Sequence: Synthetic oligonucleotide
acccaggccacaaggaaug

SEQ ID NO: 1444790 - RNA, 19 nt, Artificial Sequence
  Description of Artificial Sequence: Synthetic oligonucleotide
ccgacucaggccaauuggg

SEQ ID NO: 1444791 - RNA, 19 nt, Artificial Sequence
  Description of Artificial Sequence: Synthetic oligonucleotide
aaacuggugcucagugccu

SEQ ID NO: 1444792 - RNA, 19 nt, Artificial Sequence
  Description of Artificial Sequence: Synthetic oligonucleotide
cauugaacacgcugacaga

SEQ ID NO: 1444793 - RNA, 19 nt, Artificial Sequence
  Description of Artificial Sequence: Synthetic oligonucleotide
gguuaggacagcaggcagc

SEQ ID NO: 1444794 - RNA, 19 nt, Artificial Sequence
  Description of Artificial Sequence: Synthetic oligonucleotide
aggauggggccucuguuuu

SEQ ID NO: 1444795 - RNA, 19 nt, Artificial Sequence
  Description of Artificial Sequence: Synthetic oligonucleotide
gaagccaucugcggugaca

SEQ ID NO: 1444796 - RNA, 19 nt, Artificial Sequence
  Description of Artificial Sequence: Synthetic oligonucleotide
cucauucccuucggaagag

SEQ ID NO: 1444797 - RNA, 19 nt, Artificial Sequence
  Description of Artificial Sequence: Synthetic oligonucleotide
cugagggugcaaugaugug

SEQ ID NO: 1444798 - RNA, 19 nt, Artificial Sequence
  Description of Artificial Sequence: Synthetic oligonucleotide
cugggugguuugacuuugg

SEQ ID NO: 1444799 - RNA, 19 nt, Artificial Sequence
  Description of Artificial Sequence: Synthetic oligonucleotide
auugggcguggucaggguu

SEQ ID NO: 1444800 - RNA, 19 nt, Artificial Sequence
  Description of Artificial Sequence: Synthetic oligonucleotide
acccucacuugccacguaa

SEQ ID NO: 1444801 - RNA, 19 nt, Artificial Sequence
  Description of Artificial Sequence: Synthetic oligonucleotide
gcacauagaguuucagaga

SEQ ID NO: 1444802 - RNA, 19 nt, Artificial Sequence
  Description of Artificial Sequence: Synthetic oligonucleotide
ccaggggcgacuacaggcg

SEQ ID NO: 1444803 - RNA, 19 nt, Artificial Sequence
  Description of Artificial Sequence: Synthetic oligonucleotide
uggggaccaagcugcacau

SEQ ID NO: 1444804 - RNA, 19 nt, Artificial Sequence
  Description of Artificial Sequence: Synthetic oligonucleotide
cagagcgggacuggggacc

SEQ ID NO: 1444805 - RNA, 19 nt, Artificial Sequence
  Description of Artificial Sequence: Synthetic oligonucleotide
gaauuuagguuugcugggu

SEQ ID NO: 1444806 - RNA, 19 nt, Artificial Sequence
  Description of Artificial Sequence: Synthetic oligonucleotide
aggucuaguccuccgcuuu

SEQ ID NO: 1444807 - RNA, 19 nt, Artificial Sequence
  Description of Artificial Sequence: Synthetic oligonucleotide
cucgaccgcuguaccagag

SEQ ID NO: 1444808 - RNA, 19 nt, Artificial Sequence
  Description of Artificial Sequence: Synthetic oligonucleotide
ggaacagcugaugccuggg

SEQ ID NO: 1444809 - RNA, 19 nt, Artificial Sequence
  Description of Artificial Sequence: Synthetic oligonucleotide
uuucuuccaccugacccau

SEQ ID NO: 1444810 - RNA, 19 nt, Artificial Sequence
  Description of Artificial Sequence: Synthetic oligonucleotide
gcgucauagcggcaggaag

SEQ ID NO: 1444811 - RNA, 19 nt, Artificial Sequence
  Description of Artificial Sequence: Synthetic oligonucleotide
gcucauucccuucggaaga

SEQ ID NO: 1444812 - RNA, 19 nt, Artificial Sequence
  Description of Artificial Sequence: Synthetic oligonucleotide
ggcgacuacaggcgcaggc

SEQ ID NO: 1444813 - RNA, 19 nt, Artificial Sequence
  Description of Artificial Sequence: Synthetic oligonucleotide
gaggcaguacccaggccac

SEQ ID NO: 1444814 - RNA, 19 nt, Artificial Sequence
  Description of Artificial Sequence: Synthetic oligonucleotide
agcguccaagucgcuggcc

SEQ ID NO: 1444815 - RNA, 19 nt, Artificial Sequence
  Description of Artificial Sequence: Synthetic oligonucleotide
uagguuugcugggugguuu

SEQ ID NO: 1444816 - RNA, 19 nt, Artificial Sequence
  Description of Artificial Sequence: Synthetic oligonucleotide
ggagagggcaggucuaguc

SEQ ID NO: 1444817 - RNA, 19 nt, Artificial Sequence
  Description of Artificial Sequence: Synthetic oligonucleotide
agggcacauagaguuucag

SEQ ID NO: 1444818 - RNA, 19 nt, Artificial Sequence
  Description of Artificial Sequence: Synthetic oligonucleotide
cuaggggccuugucuccgc

SEQ ID NO: 1444819 - RNA, 19 nt, Artificial Sequence
  Description of Artificial Sequence: Synthetic oligonucleotide
gacuacaggcgcaggccug

SEQ ID NO: 1444820 - RNA, 19 nt, Artificial Sequence
  Description of Artificial Sequence: Synthetic oligonucleotide
caaagaccucuagagcguc

SEQ ID NO: 1444821 - RNA, 19 nt, Artificial Sequence
  Description of Artificial Sequence: Synthetic oligonucleotide
ggugccuagccgcuuguac

SEQ ID NO: 1444822 - RNA, 19 nt, Artificial Sequence
  Description of Artificial Sequence: Synthetic oligonucleotide
aguacgugucaggcuccac

SEQ ID NO: 1444823 - RNA, 19 nt, Artificial Sequence
  Description of Artificial Sequence: Synthetic oligonucleotide
agguuggaauuuagguuug

SEQ ID NO: 1444824 - RNA, 19 nt, Artificial Sequence
  Description of Artificial Sequence: Synthetic oligonucleotide
gggugcaaugaugugccag

SEQ ID NO: 1444825 - RNA, 19 nt, Artificial Sequence
  Description of Artificial Sequence: Synthetic oligonucleotide
ccucacuugccacguaacc

SEQ ID NO: 1444826 - RNA, 19 nt, Artificial Sequence
  Description of Artificial Sequence: Synthetic oligonucleotide
aauccgacucaggccaauu

SEQ ID NO: 1444827 - RNA, 19 nt, Artificial Sequence
  Description of Artificial Sequence: Synthetic oligonucleotide
gagguuggggaaacccuca

SEQ ID NO: 1444828 - RNA, 19 nt, Artificial Sequence
  Description of Artificial Sequence: Synthetic oligonucleotide
acuugccacguaacccgac

SEQ ID NO: 1444829 - RNA, 19 nt, Artificial Sequence
  Description of Artificial Sequence: Synthetic oligonucleotide
ucauucccuucggaagaga

SEQ ID NO: 1444830 - RNA, 19 nt, Artificial Sequence
  Description of Artificial Sequence: Synthetic oligonucleotide
gugauuguccagaugcacu

SEQ ID NO: 1444831 - RNA, 19 nt, Artificial Sequence
  Description of Artificial Sequence: Synthetic oligonucleotide
cugguugggcuuguaagga

SEQ ID NO: 1444832 - RNA, 19 nt, Artificial Sequence
  Description of Artificial Sequence: Synthetic oligonucleotide
gggcacauagaguuucaga

SEQ ID NO: 1444833 - RNA, 19 nt, Artificial Sequence
  Description of Artificial Sequence: Synthetic oligonucleotide
cccucguccguugucaucc

SEQ ID NO: 1444834 - RNA, 19 nt, Artificial Sequence
  Description of Artificial Sequence: Synthetic oligonucleotide
gcguccaagucgcuggccc

SEQ ID NO: 1444835 - RNA, 19 nt, Artificial Sequence
  Description of Artificial Sequence: Synthetic oligonucleotide
caucugcggugacacugag

SEQ ID NO: 1444836 - RNA, 19 nt, Artificial Sequence
  Description of Artificial Sequence: Synthetic oligonucleotide
ggccaauugggcgugguca

SEQ ID NO: 1444837 - RNA, 19 nt, Artificial Sequence
  Description of Artificial Sequence: Synthetic oligonucleotide
gccgcuuguacugcuuugg

SEQ ID NO: 1444838 - RNA, 19 nt, Artificial Sequence
  Description of Artificial Sequence: Synthetic oligonucleotide
gggucugguguaguugggg

SEQ ID NO: 1444839 - RNA, 19 nt, Artificial Sequence
  Description of Artificial Sequence: Synthetic oligonucleotide
ggcucgaccgcuguaccag

SEQ ID NO: 1444840 - RNA, 19 nt, Artificial Sequence
  Description of Artificial Sequence: Synthetic oligonucleotide
gucuaguccuccgcuuuug

SEQ ID NO: 1444841 - RNA, 19 nt, Artificial Sequence
  Description of Artificial Sequence: Synthetic oligonucleotide
caggggcgacuacaggcgc

SEQ ID NO: 1444842 - RNA, 19 nt, Artificial Sequence
  Description of Artificial Sequence: Synthetic oligonucleotide
gugccuagccgcuuguacu

SEQ ID NO: 1444843 - RNA, 19 nt, Artificial Sequence
  Description of Artificial Sequence: Synthetic oligonucleotide
gagaagccaucugcgguga

SEQ ID NO: 1444844 - RNA, 19 nt, Artificial Sequence
  Description of Artificial Sequence: Synthetic oligonucleotide
agcgggacuggggaccaag

SEQ ID NO: 1444845 - RNA, 19 nt, Artificial Sequence
  Description of Artificial Sequence: Synthetic oligonucleotide
gguggagcuccauaucaaa

SEQ ID NO: 1444846 - RNA, 19 nt, Artificial Sequence
  Description of Artificial Sequence: Synthetic oligonucleotide
uaggggccuugucuccgca

SEQ ID NO: 1444847 - RNA, 19 nt, Artificial Sequence
  Description of Artificial Sequence: Synthetic oligonucleotide
gaaggauggggccucuguu

SEQ ID NO: 1444848 - RNA, 19 nt, Artificial Sequence
  Description of Artificial Sequence: Synthetic oligonucleotide
acccgacucucccgucacg

SEQ ID NO: 1444849 - RNA, 19 nt, Artificial Sequence
  Description of Artificial Sequence: Synthetic oligonucleotide
gauggggccucuguuuucu

SEQ ID NO: 1444850 - RNA, 19 nt, Artificial Sequence
  Description of Artificial Sequence: Synthetic oligonucleotide
gauccggggccacuggagu

SEQ ID NO: 1444851 - RNA, 19 nt, Artificial Sequence
  Description of Artificial Sequence: Synthetic oligonucleotide
ugggcguggucaggguucc

SEQ ID NO: 1444852 - RNA, 19 nt, Artificial Sequence
  Description of Artificial Sequence: Synthetic oligonucleotide
cacgcugacagagucauau

SEQ ID NO: 1444853 - RNA, 19 nt, Artificial Sequence
  Description of Artificial Sequence: Synthetic oligonucleotide
ggcaccgugauuguccaga

SEQ ID NO: 1444854 - RNA, 19 nt, Artificial Sequence
  Description of Artificial Sequence: Synthetic oligonucleotide
ucauagcggcaggaagggu

SEQ ID NO: 1444855 - RNA, 19 nt, Artificial Sequence
  Description of Artificial Sequence: Synthetic oligonucleotide
cucccgucacguccccucc

SEQ ID NO: 1444856 - RNA, 19 nt, Artificial Sequence
  Description of Artificial Sequence: Synthetic oligonucleotide
gccugaaggugccacagaa

SEQ ID NO: 1444857 - RNA, 19 nt, Artificial Sequence
  Description of Artificial Sequence: Synthetic oligonucleotide
gaucaccuggucugagggu

SEQ ID NO: 1444858 - RNA, 19 nt, Artificial Sequence
  Description of Artificial Sequence: Synthetic oligonucleotide
ccacguaacccgacucucc

SEQ ID NO: 1444859 - RNA, 19 nt, Artificial Sequence
  Description of Artificial Sequence: Synthetic oligonucleotide
cuggugcucagugccugag

SEQ ID NO: 1444860 - RNA, 19 nt, Artificial Sequence
  Description of Artificial Sequence: Synthetic oligonucleotide
aacagauagcuggcuccuu

SEQ ID NO: 1444861 - RNA, 19 nt, Artificial Sequence
  Description of Artificial Sequence: Synthetic oligonucleotide
cccuucggaagagaugggg

SEQ ID NO: 1444862 - RNA, 19 nt, Artificial Sequence
  Description of Artificial Sequence: Synthetic oligonucleotide
ggcgcaggccugaaggugc

SEQ ID NO: 1444863 - RNA, 19 nt, Artificial Sequence
  Description of Artificial Sequence: Synthetic oligonucleotide
gcuccauaucaaagacucg

SEQ ID NO: 1444864 - RNA, 19 nt, Artificial Sequence
  Description of Artificial Sequence: Synthetic oligonucleotide
cuaguccuccgcuuuugua

SEQ ID NO: 1444865 - RNA, 19 nt, Artificial Sequence
  Description of Artificial Sequence: Synthetic oligonucleotide
caggcaccgugauugucca

SEQ ID NO: 1444866 - RNA, 19 nt, Artificial Sequence
  Description of Artificial Sequence: Synthetic oligonucleotide
agcgucauagcggcaggaa

SEQ ID NO: 1444867 - RNA, 19 nt, Artificial Sequence
  Description of Artificial Sequence: Synthetic oligonucleotide
gcgacuacaggcgcaggcc

SEQ ID NO: 1444868 - RNA, 19 nt, Artificial Sequence
  Description of Artificial Sequence: Synthetic oligonucleotide
ucccgaggcagggucuugu

SEQ ID NO: 1444869 - RNA, 19 nt, Artificial Sequence
  Description of Artificial Sequence: Synthetic oligonucleotide
uaauccgacucaggccaau

SEQ ID NO: 1444870 - RNA, 19 nt, Artificial Sequence
  Description of Artificial Sequence: Synthetic oligonucleotide
gguuggaauuuagguuugc

SEQ ID NO: 1444871 - RNA, 19 nt, Artificial Sequence
  Description of Artificial Sequence: Synthetic oligonucleotide
agucaccacuagacuacug

SEQ ID NO: 1444872 - RNA, 19 nt, Artificial Sequence
  Description of Artificial Sequence: Synthetic oligonucleotide
caccgugauuguccagaug

SEQ ID NO: 1444873 - RNA, 19 nt, Artificial Sequence
  Description of Artificial Sequence: Synthetic oligonucleotide
acacgggucugguguaguu

SEQ ID NO: 1444874 - RNA, 19 nt, Artificial Sequence
  Description of Artificial Sequence: Synthetic oligonucleotide
ccugagguggcucgaccgc

SEQ ID NO: 1444875 - RNA, 19 nt, Artificial Sequence
  Description of Artificial Sequence: Synthetic oligonucleotide
gggcuaggggccuugucuc

SEQ ID NO: 1444876 - RNA, 19 nt, Artificial Sequence
  Description of Artificial Sequence: Synthetic oligonucleotide
cuggcccgaggucccagac

SEQ ID NO: 1444877 - RNA, 19 nt, Artificial Sequence
  Description of Artificial Sequence: Synthetic oligonucleotide
uggggcuaggggccuuguc

SEQ ID NO: 1444878 - RNA, 19 nt, Artificial Sequence
  Description of Artificial Sequence: Synthetic oligonucleotide
guaacccgacucucccguc

SEQ ID NO: 1444879 - RNA, 19 nt, Artificial Sequence
  Description of Artificial Sequence: Synthetic oligonucleotide
caagucgcuggcccgaggu

SEQ ID NO: 1444880 - RNA, 19 nt, Artificial Sequence
  Description of Artificial Sequence: Synthetic oligonucleotide
cgacucaggccaauugggc

SEQ ID NO: 1444881 - RNA, 19 nt, Artificial Sequence
  Description of Artificial Sequence: Synthetic oligonucleotide
ggcuuguaaggaaccagga

SEQ ID NO: 1444882 - RNA, 19 nt, Artificial Sequence
  Description of Artificial Sequence: Synthetic oligonucleotide
cuugccacguaacccgacu

SEQ ID NO: 1444883 - RNA, 19 nt, Artificial Sequence
  Description of Artificial Sequence: Synthetic oligonucleotide
ggggaaagugcuggaagca

SEQ ID NO: 1444884 - RNA, 19 nt, Artificial Sequence
  Description of Artificial Sequence: Synthetic oligonucleotide
gguggauccggggccacug

SEQ ID NO: 1444885 - RNA, 19 nt, Artificial Sequence
  Description of Artificial Sequence: Synthetic oligonucleotide
agggugcaaugaugugcca

SEQ ID NO: 1444886 - RNA, 19 nt, Artificial Sequence
  Description of Artificial Sequence: Synthetic oligonucleotide
cacuugccacguaacccga

SEQ ID NO: 1444887 - RNA, 19 nt, Artificial Sequence
  Description of Artificial Sequence: Synthetic oligonucleotide
cgauacaaauuggaccaag

SEQ ID NO: 1444888 - RNA, 19 nt, Artificial Sequence
  Description of Artificial Sequence: Synthetic oligonucleotide
gucaguggguggagagggc

SEQ ID NO: 1444889 - RNA, 19 nt, Artificial Sequence
  Description of Artificial Sequence: Synthetic oligonucleotide
aggcaccgugauuguccag

SEQ ID NO: 1444890 - RNA, 19 nt, Artificial Sequence
  Description of Artificial Sequence: Synthetic oligonucleotide
gagcgucauagcggcagga

SEQ ID NO: 1444891 - RNA, 19 nt, Artificial Sequence
  Description of Artificial Sequence: Synthetic oligonucleotide
gugcccucguccguuguca

SEQ ID NO: 1444892 - RNA, 19 nt, Artificial Sequence
  Description of Artificial Sequence: Synthetic oligonucleotide
ugcccucguccguugucau

SEQ ID NO: 1444893 - RNA, 19 nt, Artificial Sequence
  Description of Artificial Sequence: Synthetic oligonucleotide
agccaucugcggugacacu

SEQ ID NO: 1444894 - RNA, 19 nt, Artificial Sequence
  Description of Artificial Sequence: Synthetic oligonucleotide
ggggcgacuacaggcgcag

SEQ ID NO: 1444895 - RNA, 19 nt, Artificial Sequence
  Description of Artificial Sequence: Synthetic oligonucleotide
cucggaccauggucuucac

SEQ ID NO: 1444896 - RNA, 19 nt, Artificial Sequence
  Description of Artificial Sequence: Synthetic oligonucleotide
cccucacuugccacguaac

SEQ ID NO: 1444897 - RNA, 19 nt, Artificial Sequence
  Description of Artificial Sequence: Synthetic oligonucleotide
ucggaaggacagggacaca

SEQ ID NO: 1444898 - RNA, 19 nt, Artificial Sequence
  Description of Artificial Sequence: Synthetic oligonucleotide
cguccaagucgcuggcccg

SEQ ID NO: 1444899 - RNA, 19 nt, Artificial Sequence
  Description of Artificial Sequence: Synthetic oligonucleotide
ggcuaggaccucaggcagc

SEQ ID NO: 1444900 - RNA, 19 nt, Artificial Sequence
  Description of Artificial Sequence: Synthetic oligonucleotide
ccaauugggcguggucagg

SEQ ID NO: 1444901 - RNA, 19 nt, Artificial Sequence
  Description of Artificial Sequence: Synthetic oligonucleotide
gguuugacuuugggcccag

SEQ ID NO: 1444902 - RNA, 19 nt, Artificial Sequence
  Description of Artificial Sequence: Synthetic oligonucleotide
gcaguacgugucaggcucc

SEQ ID NO: 1444903 - RNA, 19 nt, Artificial Sequence
  Description of Artificial Sequence: Synthetic oligonucleotide
ggaacacgggucuggugua

SEQ ID NO: 1444904 - RNA, 19 nt, Artificial Sequence
  Description of Artificial Sequence: Synthetic oligonucleotide
ggauggggccucuguuuuc

SEQ ID NO: 1444905 - RNA, 19 nt, Artificial Sequence
  Description of Artificial Sequence: Synthetic oligonucleotide
ggccucgggcaagaggcag

SEQ ID NO: 1444906 - RNA, 19 nt, Artificial Sequence
  Description of Artificial Sequence: Synthetic oligonucleotide
ggggccuugucuccgcaaa

SEQ ID NO: 1444907 - RNA, 19 nt, Artificial Sequence
  Description of Artificial Sequence: Synthetic oligonucleotide
gggucuuguaggaggcuga

SEQ ID NO: 1444908 - RNA, 19 nt, Artificial Sequence
  Description of Artificial Sequence: Synthetic oligonucleotide
aggggcgacuacaggcgca

SEQ ID NO: 1444909 - RNA, 19 nt, Artificial Sequence
  Description of Artificial Sequence: Synthetic oligonucleotide
gguuggggaaacccucacu

SEQ ID NO: 1444910 - RNA, 19 nt, Artificial Sequence
  Description of Artificial Sequence: Synthetic oligonucleotide
ugguugccaggggcgacua

SEQ ID NO: 1444911 - RNA, 19 nt, Artificial Sequence
  Description of Artificial Sequence: Synthetic oligonucleotide
gccacguaacccgacucuc

SEQ ID NO: 1444912 - RNA, 19 nt, Artificial Sequence
  Description of Artificial Sequence: Synthetic oligonucleotide
gcaggucuaguccuccgcu

SEQ ID NO: 1444913 - RNA, 19 nt, Artificial Sequence
  Description of Artificial Sequence: Synthetic oligonucleotide
gacuggggaccaagcugca

SEQ ID NO: 1444914 - RNA, 19 nt, Artificial Sequence
  Description of Artificial Sequence: Synthetic oligonucleotide
ccacuagacuacuggcaca

SEQ ID NO: 1444915 - RNA, 19 nt, Artificial Sequence
  Description of Artificial Sequence: Synthetic oligonucleotide
guaauccgacucaggccaa

SEQ ID NO: 1444916 - RNA, 19 nt, Artificial Sequence
  Description of Artificial Sequence: Synthetic oligonucleotide
ccaucugcggugacacuga

SEQ ID NO: 1444917 - RNA, 19 nt, Artificial Sequence
  Description of Artificial Sequence: Synthetic oligonucleotide
ccgcaaaacuggugcucag

SEQ ID NO: 1444918 - RNA, 19 nt, Artificial Sequence
  Description of Artificial Sequence: Synthetic oligonucleotide
ggucugagggugcaaugau

SEQ ID NO: 1444919 - RNA, 19 nt, Artificial Sequence
  Description of Artificial Sequence: Synthetic oligonucleotide
cgaccgcuguaccagagca

SEQ ID NO: 1444920 - RNA, 19 nt, Artificial Sequence
  Description of Artificial Sequence: Synthetic oligonucleotide
cucgggcaagaggcaguac

SEQ ID NO: 1444921 - RNA, 19 nt, Artificial Sequence
  Description of Artificial Sequence: Synthetic oligonucleotide
caguacgugucaggcucca

SEQ ID NO: 1444922 - RNA, 19 nt, Artificial Sequence
  Description of Artificial Sequence: Synthetic oligonucleotide
ccgugauuguccagaugca

SEQ ID NO: 1444923 - RNA, 19 nt, Artificial Sequence
  Description of Artificial Sequence: Synthetic oligonucleotide
ccucggaccauggucuuca

SEQ ID NO: 1444924 - RNA, 19 nt, Artificial Sequence
  Description of Artificial Sequence: Synthetic oligonucleotide
uggguggauccggggccac

SEQ ID NO: 1444925 - RNA, 19 nt, Artificial Sequence
  Description of Artificial Sequence: Synthetic oligonucleotide
cccgcaaaacuggugcuca

SEQ ID NO: 1444926 - RNA, 19 nt, Artificial Sequence
  Description of Artificial Sequence: Synthetic oligonucleotide
ggccugaaggugccacaga

SEQ ID NO: 1444927 - RNA, 19 nt, Artificial Sequence
  Description of Artificial Sequence: Synthetic oligonucleotide
ccacaaggaauggccccag

SEQ ID NO: 1444928 - RNA, 19 nt, Artificial Sequence
  Description of Artificial Sequence: Synthetic oligonucleotide
gggccucggaccauggucu

SEQ ID NO: 1444929 - RNA, 19 nt, Artificial Sequence
  Description of Artificial Sequence: Synthetic oligonucleotide
ccgaggucccagacccagc

SEQ ID NO: 1444930 - RNA, 19 nt, Artificial Sequence
  Description of Artificial Sequence: Synthetic oligonucleotide
auggggcuaggggccuugu

SEQ ID NO: 1444931 - RNA, 19 nt, Artificial Sequence
  Description of Artificial Sequence: Synthetic oligonucleotide
gccuagccgcuuguacugc

SEQ ID NO: 1444932 - RNA, 19 nt, Artificial Sequence
  Description of Artificial Sequence: Synthetic oligonucleotide
gcucgaccgcuguaccaga

SEQ ID NO: 1444933 - RNA, 19 nt, Artificial Sequence
  Description of Artificial Sequence: Synthetic oligonucleotide
caggucuaguccuccgcuu

SEQ ID NO: 1444934 - RNA, 19 nt, Artificial Sequence
  Description of Artificial Sequence: Synthetic oligonucleotide
ccgacucucccgucacguc

SEQ ID NO: 1444935 - RNA, 19 nt, Artificial Sequence
  Description of Artificial Sequence: Synthetic oligonucleotide
cuagguugggagggacacu

SEQ ID NO: 1444936 - RNA, 19 nt, Artificial Sequence
  Description of Artificial Sequence: Synthetic oligonucleotide
ucgcuggcccgagguccca

SEQ ID NO: 1444937 - RNA, 19 nt, Artificial Sequence
  Description of Artificial Sequence: Synthetic oligonucleotide
aggugccuagccgcuugua

SEQ ID NO: 1444938 - RNA, 19 nt, Artificial Sequence
  Description of Artificial Sequence: Synthetic oligonucleotide
cagcuggccuagguuggga

SEQ ID NO: 1444939 - RNA, 19 nt, Artificial Sequence
  Description of Artificial Sequence: Synthetic oligonucleotide
gccuugucuccgcaaaauu

SEQ ID NO: 1444940 - RNA, 19 nt, Artificial Sequence
  Description of Artificial Sequence: Synthetic oligonucleotide
ggagacugauggugacagu

SEQ ID NO: 1444941 - RNA, 19 nt, Artificial Sequence
  Description of Artificial Sequence: Synthetic oligonucleotide
ccgcuuuuguaaacaccaa

SEQ ID NO: 1444942 - RNA, 19 nt, Artificial Sequence
  Description of Artificial Sequence: Synthetic oligonucleotide
ccgcuuguacugcuuugga

SEQ ID NO: 1444943 - RNA, 19 nt, Artificial Sequence
  Description of Artificial Sequence: Synthetic oligonucleotide
ggcguggucaggguucccu

SEQ ID NO: 1444944 - RNA, 19 nt, Artificial Sequence
  Description of Artificial Sequence: Synthetic oligonucleotide
ggucuaguccuccgcuuuu

SEQ ID NO: 1444945 - RNA, 19 nt, Artificial Sequence
  Description of Artificial Sequence: Synthetic oligonucleotide
gggcgacuacaggcgcagg

SEQ ID NO: 1444946 - RNA, 19 nt, Artificial Sequence
  Description of Artificial Sequence: Synthetic oligonucleotide
gcccucguccguugucauc

SEQ ID NO: 1444947 - RNA, 19 nt, Artificial Sequence
  Description of Artificial Sequence: Synthetic oligonucleotide
ggaccaagcugcacauccu

SEQ ID NO: 1444948 - RNA, 19 nt, Artificial Sequence
  Description of Artificial Sequence: Synthetic oligonucleotide
cguaacccgacucucccgu

SEQ ID NO: 1444949 - RNA, 19 nt, Artificial Sequence
  Description of Artificial Sequence: Synthetic oligonucleotide
ggccuugucuccgcaaaau

SEQ ID NO: 1444950 - RNA, 19 nt, Artificial Sequence
  Description of Artificial Sequence: Synthetic oligonucleotide
gcaccgugauuguccagau

SEQ ID NO: 1444951 - RNA, 19 nt, Artificial Sequence
  Description of Artificial Sequence: Synthetic oligonucleotide
ggggaccaagcugcacauc

SEQ ID NO: 1444952 - RNA, 19 nt, Artificial Sequence
  Description of Artificial Sequence: Synthetic oligonucleotide
cagaagcguccaagucgcu

SEQ ID NO: 1444953 - RNA, 19 nt, Artificial Sequence
  Description of Artificial Sequence: Synthetic oligonucleotide
cuacaggcgcaggccugaa

SEQ ID NO: 1444954 - RNA, 19 nt, Artificial Sequence
  Description of Artificial Sequence: Synthetic oligonucleotide
acacgcugacagagucaua

SEQ ID NO: 1444955 - RNA, 19 nt, Artificial Sequence
  Description of Artificial Sequence: Synthetic oligonucleotide
ccuagccgcuuguacugcu

SEQ ID NO: 1444956 - RNA, 19 nt, Artificial Sequence
  Description of Artificial Sequence: Synthetic oligonucleotide
cccugggccucggaccaug

SEQ ID NO: 1444957 - RNA, 19 nt, Artificial Sequence
  Description of Artificial Sequence: Synthetic oligonucleotide
ccgauacaaauuggaccaa

SEQ ID NO: 1444958 - RNA, 19 nt, Artificial Sequence
  Description of Artificial Sequence: Synthetic oligonucleotide
gccucggaccauggucuuc

SEQ ID NO: 1444959 - RNA, 19 nt, Artificial Sequence
  Description of Artificial Sequence: Synthetic oligonucleotide
cucguccguugucauccuu

SEQ ID NO: 1444960 - RNA, 19 nt, Artificial Sequence
  Description of Artificial Sequence: Synthetic oligonucleotide
cagugcccucguccguugu

SEQ ID NO: 1444961 - RNA, 19 nt, Artificial Sequence
  Description of Artificial Sequence: Synthetic oligonucleotide
gggcuuggagcuagcuccu

SEQ ID NO: 1444962 - RNA, 19 nt, Artificial Sequence
  Description of Artificial Sequence: Synthetic oligonucleotide
cagcaccauugaacacgcu

SEQ ID NO: 1444963 - RNA, 19 nt, Artificial Sequence
  Description of Artificial Sequence: Synthetic oligonucleotide
cgacuacaggcgcaggccu

SEQ ID NO: 1444964 - RNA, 19 nt, Artificial Sequence
  Description of Artificial Sequence: Synthetic oligonucleotide
ccucgggcaagaggcagua

SEQ ID NO: 1444965 - RNA, 19 nt, Artificial Sequence
  Description of Artificial Sequence: Synthetic oligonucleotide
ccgucacguccccuccaca

SEQ ID NO: 1444966 - RNA, 19 nt, Artificial Sequence
  Description of Artificial Sequence: Synthetic oligonucleotide
gagcgggacuggggaccaa

SEQ ID NO: 1444967 - RNA, 19 nt, Artificial Sequence
  Description of Artificial Sequence: Synthetic oligonucleotide
gggcguggucaggguuccc

SEQ ID NO: 1444968 - RNA, 19 nt, Artificial Sequence
  Description of Artificial Sequence: Synthetic oligonucleotide
cucucccgucacguccccu

SEQ ID NO: 1444969 - RNA, 19 nt, Artificial Sequence
  Description of Artificial Sequence: Synthetic oligonucleotide
ggccucggaccauggucuu

SEQ ID NO: 1444970 - RNA, 19 nt, Artificial Sequence
  Description of Artificial Sequence: Synthetic oligonucleotide
ggguggauccggggccacu

SEQ ID NO: 1444971 - RNA, 19 nt, Artificial Sequence
  Description of Artificial Sequence: Synthetic oligonucleotide
cccagugcccucguccguu

SEQ ID NO: 1444972 - RNA, 19 nt, Artificial Sequence
  Description of Artificial Sequence: Synthetic oligonucleotide
cccuccccugggccucgga

SEQ ID NO: 1444973 - RNA, 19 nt, Artificial Sequence
  Description of Artificial Sequence: Synthetic oligonucleotide
ccccagugcccucguccgu

SEQ ID NO: 1444974 - RNA, 19 nt, Artificial Sequence
  Description of Artificial Sequence: Synthetic oligonucleotide
aacgaaguaacucacguca

SEQ ID NO: 1444975 - RNA, 19 nt, Artificial Sequence
  Description of Artificial Sequence: Synthetic oligonucleotide
ucugaaagugguaggaucg

SEQ ID NO: 1444976 - RNA, 19 nt, Artificial Sequence
  Description of Artificial Sequence: Synthetic oligonucleotide
uuuucgaucaugcucuggg

SEQ ID NO: 1444977 - RNA, 19 nt, Artificial Sequence
  Description of Artificial Sequence: Synthetic oligonucleotide
aggcauuccaguuucaugg

SEQ ID NO: 1444978 - RNA, 19 nt, Artificial Sequence
  Description of Artificial Sequence: Synthetic oligonucleotide
auagcacuguacuugaggg

SEQ ID NO: 1444979 - RNA, 19 nt, Artificial Sequence
  Description of Artificial Sequence: Synthetic oligonucleotide
agaugugacauccuugagg

SEQ ID NO: 1444980 - RNA, 19 nt, Artificial Sequence
  Description of Artificial Sequence: Synthetic oligonucleotide
cuuuuguaggguaucaggc

SEQ ID NO: 1444981 - RNA, 19 nt, Artificial Sequence
  Description of Artificial Sequence: Synthetic oligonucleotide
uaugacgucagcgaagcgg

SEQ ID NO: 1444982 - RNA, 19 nt, Artificial Sequence
  Description of Artificial Sequence: Synthetic oligonucleotide
aacugaucuaaacggagug

SEQ ID NO: 1444983 - RNA, 19 nt, Artificial Sequence
  Description of Artificial Sequence: Synthetic oligonucleotide
ucaacugaucuaaacggag

SEQ ID NO: 1444984 - RNA, 19 nt, Artificial Sequence
  Description of Artificial Sequence: Synthetic oligonucleotide
uggauuuucgaucaugcuc

SEQ ID NO: 1444985 - RNA, 19 nt, Artificial Sequence
  Description of Artificial Sequence: Synthetic oligonucleotide
uuuauugagagccccugca

SEQ ID NO: 1444986 - RNA, 19 nt, Artificial Sequence
  Description of Artificial Sequence: Synthetic oligonucleotide
gaaguaacucacgucagcg

SEQ ID NO: 1444987 - RNA, 19 nt, Artificial Sequence
  Description of Artificial Sequence: Synthetic oligonucleotide
aacggagugcaccauccac

SEQ ID NO: 1444988 - RNA, 19 nt, Artificial Sequence
  Description of Artificial Sequence: Synthetic oligonucleotide
auagaugugacauccuuga

SEQ ID NO: 1444989 - RNA, 19 nt, Artificial Sequence
  Description of Artificial Sequence: Synthetic oligonucleotide
acuaugacgucagcgaagc

SEQ ID NO: 1444990 - RNA, 19 nt, Artificial Sequence
  Description of Artificial Sequence: Synthetic oligonucleotide
aagugguaggaucgaaggg

SEQ ID NO: 1444991 - RNA, 19 nt, Artificial Sequence
  Description of Artificial Sequence: Synthetic oligonucleotide
ucaguuggauuuucgauca

SEQ ID NO: 1444992 - RNA, 19 nt, Artificial Sequence
  Description of Artificial Sequence: Synthetic oligonucleotide
ucuacaagcuuguugcugu

SEQ ID NO: 1444993 - RNA, 19 nt, Artificial Sequence
  Description of Artificial Sequence: Synthetic oligonucleotide
gagaguacuugucaucucc

SEQ ID NO: 1444994 - RNA, 19 nt, Artificial Sequence
  Description of Artificial Sequence: Synthetic oligonucleotide
uaaacggagugcaccaucc

SEQ ID NO: 1444995 - RNA, 19 nt, Artificial Sequence
  Description of Artificial Sequence: Synthetic oligonucleotide
caguuccucacacagaagc

SEQ ID NO: 1444996 - RNA, 19 nt, Artificial Sequence
  Description of Artificial Sequence: Synthetic oligonucleotide
gaucuugugggccacugcc

SEQ ID NO: 1444997 - RNA, 19 nt, Artificial Sequence
  Description of Artificial Sequence: Synthetic oligonucleotide
cuuaggaagccaucggcgg

SEQ ID NO: 1444998 - RNA, 19 nt, Artificial Sequence
  Description of Artificial Sequence: Synthetic oligonucleotide
aaguagacacuuguggcuc

SEQ ID NO: 1444999 - RNA, 19 nt, Artificial Sequence
  Description of Artificial Sequence: Synthetic oligonucleotide
uuauugagagccccugcag

SEQ ID NO: 1445000 - RNA, 19 nt, Artificial Sequence
  Description of Artificial Sequence: Synthetic oligonucleotide
acgucagcgauguggacgc

SEQ ID NO: 1445001 - RNA, 19 nt, Artificial Sequence
  Description of Artificial Sequence: Synthetic oligonucleotide
guaaaagcaagcuucaacu

SEQ ID NO: 1445002 - RNA, 19 nt, Artificial Sequence
  Description of Artificial Sequence: Synthetic oligonucleotide
aagggcgucaucaaggucu

SEQ ID NO: 1445003 - RNA, 19 nt, Artificial Sequence
  Description of Artificial Sequence: Synthetic oligonucleotide
agugcggccaaaccacucc

SEQ ID NO: 1445004 - RNA, 19 nt, Artificial Sequence
  Description of Artificial Sequence: Synthetic oligonucleotide
uccggaacgaaguaacuca

SEQ ID NO: 1445005 - RNA, 19 nt, Artificial Sequence
  Description of Artificial Sequence: Synthetic oligonucleotide
auagugccggaacugcgcc

SEQ ID NO: 1445006 - RNA, 19 nt, Artificial Sequence
  Description of Artificial Sequence: Synthetic oligonucleotide
uuuuguaggguaucaggcu

SEQ ID NO: 1445007 - RNA, 19 nt, Artificial Sequence
  Description of Artificial Sequence: Synthetic oligonucleotide
agaggaucccuccggaacg

SEQ ID NO: 1445008 - RNA, 19 nt, Artificial Sequence
  Description of Artificial Sequence: Synthetic oligonucleotide
gaggccaaugcuaaguucc

SEQ ID NO: 1445009 - RNA, 19 nt, Artificial Sequence
  Description of Artificial Sequence: Synthetic oligonucleotide
auugagagccccugcagag

SEQ ID NO: 1445010 - RNA, 19 nt, Artificial Sequence
  Description of Artificial Sequence: Synthetic oligonucleotide
gugcggaagaucuuguggg

SEQ ID NO: 1445011 - RNA, 19 nt, Artificial Sequence
  Description of Artificial Sequence: Synthetic oligonucleotide
gaggcggugcacuaugacg

SEQ ID NO: 1445012 - RNA, 19 nt, Artificial Sequence
  Description of Artificial Sequence: Synthetic oligonucleotide
ugacagugcggccaaacca

SEQ ID NO: 1445013 - RNA, 19 nt, Artificial Sequence
  Description of Artificial Sequence: Synthetic oligonucleotide
uucagagaggaucccuccg

SEQ ID NO: 1445014 - RNA, 19 nt, Artificial Sequence
  Description of Artificial Sequence: Synthetic oligonucleotide
cucaguuggauuuucgauc

SEQ ID NO: 1445015 - RNA, 19 nt, Artificial Sequence
  Description of Artificial Sequence: Synthetic oligonucleotide
caugguccagcguaaaagc

SEQ ID NO: 1445016 - RNA, 19 nt, Artificial Sequence
  Description of Artificial Sequence: Synthetic oligonucleotide
uauugagagccccugcaga

SEQ ID NO: 1445017 - RNA, 19 nt, Artificial Sequence
  Description of Artificial Sequence: Synthetic oligonucleotide
cagcguaaaagcaagcuuc

SEQ ID NO: 1445018 - RNA, 19 nt, Artificial Sequence
  Description of Artificial Sequence: Synthetic oligonucleotide
gaucuaaacggagugcacc

SEQ ID NO: 1445019 - RNA, 19 nt, Artificial Sequence
  Description of Artificial Sequence: Synthetic oligonucleotide
ugucucgguacucauagau

SEQ ID NO: 1445020 - RNA, 19 nt, Artificial Sequence
  Description of Artificial Sequence: Synthetic oligonucleotide
ugugcucaggggaaacggg

SEQ ID NO: 1445021 - RNA, 19 nt, Artificial Sequence
  Description of Artificial Sequence: Synthetic oligonucleotide
gaacggaugacagugcggc

SEQ ID NO: 1445022 - RNA, 19 nt, Artificial Sequence
  Description of Artificial Sequence: Synthetic oligonucleotide
cauagaugugacauccuug

SEQ ID NO: 1445023 - RNA, 19 nt, Artificial Sequence
  Description of Artificial Sequence: Synthetic oligonucleotide
cuuguugcugucucgguac

SEQ ID NO: 1445024 - RNA, 19 nt, Artificial Sequence
  Description of Artificial Sequence: Synthetic oligonucleotide
gucaucaaggucucgagca

SEQ ID NO: 1445025 - RNA, 19 nt, Artificial Sequence
  Description of Artificial Sequence: Synthetic oligonucleotide
aggaacggaugacagugcg

SEQ ID NO: 1445026 - RNA, 19 nt, Artificial Sequence
  Description of Artificial Sequence: Synthetic oligonucleotide
aacggaugacagugcggcc

SEQ ID NO: 1445027 - RNA, 19 nt, Artificial Sequence
  Description of Artificial Sequence: Synthetic oligonucleotide
augacgucagcgaagcggc

SEQ ID NO: 1445028 - RNA, 19 nt, Artificial Sequence
  Description of Artificial Sequence: Synthetic oligonucleotide
cuucaagacccucagguuc

SEQ ID NO: 1445029 - RNA, 19 nt, Artificial Sequence
  Description of Artificial Sequence: Synthetic oligonucleotide
aguaacucacgucagcgau

SEQ ID NO: 1445030 - RNA, 19 nt, Artificial Sequence
  Description of Artificial Sequence: Synthetic oligonucleotide
aaagcgcaguaccagcaca

SEQ ID NO: 1445031 - RNA, 19 nt, Artificial Sequence
  Description of Artificial Sequence: Synthetic oligonucleotide
aagcuuguugcugucucgg

SEQ ID NO: 1445032 - RNA, 19 nt, Artificial Sequence
  Description of Artificial Sequence: Synthetic oligonucleotide
gauguggacgcccacuuca

SEQ ID NO: 1445033 - RNA, 19 nt, Artificial Sequence
  Description of Artificial Sequence: Synthetic oligonucleotide
aaagaagaggccaaugcua

SEQ ID NO: 1445034 - RNA, 19 nt, Artificial Sequence
  Description of Artificial Sequence: Synthetic oligonucleotide
aaguaacucacgucagcga

SEQ ID NO: 1445035 - RNA, 19 nt, Artificial Sequence
  Description of Artificial Sequence: Synthetic oligonucleotide
gcuuuuguaggguaucagg

SEQ ID NO: 1445036 - RNA, 19 nt, Artificial Sequence
  Description of Artificial Sequence: Synthetic oligonucleotide
cauugcaguggucagcuug

SEQ ID NO: 1445037 - RNA, 19 nt, Artificial Sequence
  Description of Artificial Sequence: Synthetic oligonucleotide
agcauagugccggaacugc

SEQ ID NO: 1445038 - RNA, 19 nt, Artificial Sequence
  Description of Artificial Sequence: Synthetic oligonucleotide
aaagggcgucaucaagguc

SEQ ID NO: 1445039 - RNA, 19 nt, Artificial Sequence
  Description of Artificial Sequence: Synthetic oligonucleotide
uucaggacggcuuggugca

SEQ ID NO: 1445040 - RNA, 19 nt, Artificial Sequence
  Description of Artificial Sequence: Synthetic oligonucleotide
uuugcgaugcugugcaggu

SEQ ID NO: 1445041 - RNA, 19 nt, Artificial Sequence
  Description of Artificial Sequence: Synthetic oligonucleotide
aucuaaacggagugcacca

SEQ ID NO: 1445042 - RNA, 19 nt, Artificial Sequence
  Description of Artificial Sequence: Synthetic oligonucleotide
ucucaguuggauuuucgau

SEQ ID NO: 1445043 - RNA, 19 nt, Artificial Sequence
  Description of Artificial Sequence: Synthetic oligonucleotide
aaagcaagcuucaacugau

SEQ ID NO: 1445044 - RNA, 19 nt, Artificial Sequence
  Description of Artificial Sequence: Synthetic oligonucleotide
cacaucgaaggcuugguuc

SEQ ID NO: 1445045 - RNA, 19 nt, Artificial Sequence
  Description of Artificial Sequence: Synthetic oligonucleotide
uccucaaggaucuugccuu

SEQ ID NO: 1445046 - RNA, 19 nt, Artificial Sequence
  Description of Artificial Sequence: Synthetic oligonucleotide
agagcauagugccggaacu

SEQ ID NO: 1445047 - RNA, 19 nt, Artificial Sequence
  Description of Artificial Sequence: Synthetic oligonucleotide
ggaucgaaggggcagugcg

SEQ ID NO: 1445048 - RNA, 19 nt, Artificial Sequence
  Description of Artificial Sequence: Synthetic oligonucleotide
ggugcggaagaucuugugg

SEQ ID NO: 1445049 - RNA, 19 nt, Artificial Sequence
  Description of Artificial Sequence: Synthetic oligonucleotide
caggauagcacuguacuug

SEQ ID NO: 1445050 - RNA, 19 nt, Artificial Sequence
  Description of Artificial Sequence: Synthetic oligonucleotide
agcacuguacuugagggcu

SEQ ID NO: 1445051 - RNA, 19 nt, Artificial Sequence
  Description of Artificial Sequence: Synthetic oligonucleotide
aguacauguuggugagcac

SEQ ID NO: 1445052 - RNA, 19 nt, Artificial Sequence
  Description of Artificial Sequence: Synthetic oligonucleotide
accuucugaaagugguagg

SEQ ID NO: 1445053 - RNA, 19 nt, Artificial Sequence
  Description of Artificial Sequence: Synthetic oligonucleotide
uuucgaucaugcucugggc

SEQ ID NO: 1445054 - RNA, 19 nt, Artificial Sequence
  Description of Artificial Sequence: Synthetic oligonucleotide
gacggcuuggugcaccucc

SEQ ID NO: 1445055 - RNA, 19 nt, Artificial Sequence
  Description of Artificial Sequence: Synthetic oligonucleotide
gagagcauagugccggaac

SEQ ID NO: 1445056 - RNA, 19 nt, Artificial Sequence
  Description of Artificial Sequence: Synthetic oligonucleotide
uucuacaagcuuguugcug

SEQ ID NO: 1445057 - RNA, 19 nt, Artificial Sequence
  Description of Artificial Sequence: Synthetic oligonucleotide
cacgcuuaggaagccaucg

SEQ ID NO: 1445058 - RNA, 19 nt, Artificial Sequence
  Description of Artificial Sequence: Synthetic oligonucleotide
ucgguacucauagauguga

SEQ ID NO: 1445059 - RNA, 19 nt, Artificial Sequence
  Description of Artificial Sequence: Synthetic oligonucleotide
uagaugugacauccuugag

SEQ ID NO: 1445060 - RNA, 19 nt, Artificial Sequence
  Description of Artificial Sequence: Synthetic oligonucleotide
acgcccacuucaaaggugc

SEQ ID NO: 1445061 - RNA, 19 nt, Artificial Sequence
  Description of Artificial Sequence: Synthetic oligonucleotide
cuagaacagcaaagaagag

SEQ ID NO: 1445062 - RNA, 19 nt, Artificial Sequence
  Description of Artificial Sequence: Synthetic oligonucleotide
cacgucagcgauguggacg

SEQ ID NO: 1445063 - RNA, 19 nt, Artificial Sequence
  Description of Artificial Sequence: Synthetic oligonucleotide
cugcacacgcuuaggaagc

SEQ ID NO: 1445064 - RNA, 19 nt, Artificial Sequence
  Description of Artificial Sequence: Synthetic oligonucleotide
cuuugcgaugcugugcagg

SEQ ID NO: 1445065 - RNA, 19 nt, Artificial Sequence
  Description of Artificial Sequence: Synthetic oligonucleotide
uaacucacgucagcgaugu

SEQ ID NO: 1445066 - RNA, 19 nt, Artificial Sequence
  Description of Artificial Sequence: Synthetic oligonucleotide
uccagcguaaaagcaagcu

SEQ ID NO: 1445067 - RNA, 19 nt, Artificial Sequence
  Description of Artificial Sequence: Synthetic oligonucleotide
uuccugcacacgcuuagga

SEQ ID NO: 1445068 - RNA, 19 nt, Artificial Sequence
  Description of Artificial Sequence: Synthetic oligonucleotide
agagaguacuugucaucuc

SEQ ID NO: 1445069 - RNA, 19 nt, Artificial Sequence
  Description of Artificial Sequence: Synthetic oligonucleotide
ugcguugcaguagaugcgc

SEQ ID NO: 1445070 - RNA, 19 nt, Artificial Sequence
  Description of Artificial Sequence: Synthetic oligonucleotide
gaacgaaguaacucacguc

SEQ ID NO: 1445071 - RNA, 19 nt, Artificial Sequence
  Description of Artificial Sequence: Synthetic oligonucleotide
gaagcggcggaugggagag

SEQ ID NO: 1445072 - RNA, 19 nt, Artificial Sequence
  Description of Artificial Sequence: Synthetic oligonucleotide
cuuuuauugagagccccug

SEQ ID NO: 1445073 - RNA, 19 nt, Artificial Sequence
  Description of Artificial Sequence: Synthetic oligonucleotide
aguuggauuuucgaucaug

SEQ ID NO: 1445074 - RNA, 19 nt, Artificial Sequence
  Description of Artificial Sequence: Synthetic oligonucleotide
gacagugcggccaaaccac

SEQ ID NO: 1445075 - RNA, 19 nt, Artificial Sequence
  Description of Artificial Sequence: Synthetic oligonucleotide
cacuaugacgucagcgaag

SEQ ID NO: 1445076 - RNA, 19 nt, Artificial Sequence
  Description of Artificial Sequence: Synthetic oligonucleotide
cuugcuccgggaaggugcg

SEQ ID NO: 1445077 - RNA, 19 nt, Artificial Sequence
  Description of Artificial Sequence: Synthetic oligonucleotide
ucgaaggcuugguucagga

SEQ ID NO: 1445078 - RNA, 19 nt, Artificial Sequence
  Description of Artificial Sequence: Synthetic oligonucleotide
accauccacaaagcgcugc

SEQ ID NO: 1445079 - RNA, 19 nt, Artificial Sequence
  Description of Artificial Sequence: Synthetic oligonucleotide
cucacuagaacagcaaaga

SEQ ID NO: 1445080 - RNA, 19 nt, Artificial Sequence
  Description of Artificial Sequence: Synthetic oligonucleotide
uagcacuguacuugagggc

SEQ ID NO: 1445081 - RNA, 19 nt, Artificial Sequence
  Description of Artificial Sequence: Synthetic oligonucleotide
uggugagcaccuccuuccg

SEQ ID NO: 1445082 - RNA, 19 nt, Artificial Sequence
  Description of Artificial Sequence: Synthetic oligonucleotide
ucgggaagcuucucaguug

SEQ ID NO: 1445083 - RNA, 19 nt, Artificial Sequence
  Description of Artificial Sequence: Synthetic oligonucleotide
ucgaucaugcucugggcau

SEQ ID NO: 1445084 - RNA, 19 nt, Artificial Sequence
  Description of Artificial Sequence: Synthetic oligonucleotide
ugcuuuuguaggguaucag

SEQ ID NO: 1445085 - RNA, 19 nt, Artificial Sequence
  Description of Artificial Sequence: Synthetic oligonucleotide
acgcuuaggaagccaucgg

SEQ ID NO: 1445086 - RNA, 19 nt, Artificial Sequence
  Description of Artificial Sequence: Synthetic oligonucleotide
aaacggagugcaccaucca

SEQ ID NO: 1445087 - RNA, 19 nt, Artificial Sequence
  Description of Artificial Sequence: Synthetic oligonucleotide
aggagcaugaacucuucua

SEQ ID NO: 1445088 - RNA, 19 nt, Artificial Sequence
  Description of Artificial Sequence: Synthetic oligonucleotide
cuaaacggagugcaccauc

SEQ ID NO: 1445089 - RNA, 19 nt, Artificial Sequence
  Description of Artificial Sequence: Synthetic oligonucleotide
uacucauagaugugacauc

SEQ ID NO: 1445090 - RNA, 19 nt, Artificial Sequence
  Description of Artificial Sequence: Synthetic oligonucleotide
gaucaugcucugggcaugg

SEQ ID NO: 1445091 - RNA, 19 nt, Artificial Sequence
  Description of Artificial Sequence: Synthetic oligonucleotide
cuucugcaccccaaagcgc

SEQ ID NO: 1445092 - RNA, 19 nt, Artificial Sequence
  Description of Artificial Sequence: Synthetic oligonucleotide
gacgucagcgaagcggcgg

SEQ ID NO: 1445093 - RNA, 19 nt, Artificial Sequence
  Description of Artificial Sequence: Synthetic oligonucleotide
caucccagagcagaaguac

SEQ ID NO: 1445094 - RNA, 19 nt, Artificial Sequence
  Description of Artificial Sequence: Synthetic oligonucleotide
ggacguugagagcauagug

SEQ ID NO: 1445095 - RNA, 19 nt, Artificial Sequence
  Description of Artificial Sequence: Synthetic oligonucleotide
gcaggaacggaugacagug

SEQ ID NO: 1445096 - RNA, 19 nt, Artificial Sequence
  Description of Artificial Sequence: Synthetic oligonucleotide
auuuucgaucaugcucugg

SEQ ID NO: 1445097 - RNA, 19 nt, Artificial Sequence
  Description of Artificial Sequence: Synthetic oligonucleotide
gucacugagcaucuuuguc

SEQ ID NO: 1445098 - RNA, 19 nt, Artificial Sequence
  Description of Artificial Sequence: Synthetic oligonucleotide
uugcuuuuguaggguauca

SEQ ID NO: 1445099 - RNA, 19 nt, Artificial Sequence
  Description of Artificial Sequence: Synthetic oligonucleotide
ugcaggaacggaugacagu

SEQ ID NO: 1445100 - RNA, 19 nt, Artificial Sequence
  Description of Artificial Sequence: Synthetic oligonucleotide
ucggcgggcggucauugca

SEQ ID NO: 1445101 - RNA, 19 nt, Artificial Sequence
  Description of Artificial Sequence: Synthetic oligonucleotide
aguagacacuuguggcucu

SEQ ID NO: 1445102 - RNA, 19 nt, Artificial Sequence
  Description of Artificial Sequence: Synthetic oligonucleotide
ucucccucacuagaacagc

SEQ ID NO: 1445103 - RNA, 19 nt, Artificial Sequence
  Description of Artificial Sequence: Synthetic oligonucleotide
ccaguuucaugguccagcg

SEQ ID NO: 1445104 - RNA, 19 nt, Artificial Sequence
  Description of Artificial Sequence: Synthetic oligonucleotide
guacucauagaugugacau

SEQ ID NO: 1445105 - RNA, 19 nt, Artificial Sequence
  Description of Artificial Sequence: Synthetic oligonucleotide
gguaggaucgaaggggcag

SEQ ID NO: 1445106 - RNA, 19 nt, Artificial Sequence
  Description of Artificial Sequence: Synthetic oligonucleotide
gaaagggcgucaucaaggu

SEQ ID NO: 1445107 - RNA, 19 nt, Artificial Sequence
  Description of Artificial Sequence: Synthetic oligonucleotide
caaagcgcaguaccagcac

SEQ ID NO: 1445108 - RNA, 19 nt, Artificial Sequence
  Description of Artificial Sequence: Synthetic oligonucleotide
aggaucgaaggggcagugc

SEQ ID NO: 1445109 - RNA, 19 nt, Artificial Sequence
  Description of Artificial Sequence: Synthetic oligonucleotide
cguaaaagcaagcuucaac

SEQ ID NO: 1445110 - RNA, 19 nt, Artificial Sequence
  Description of Artificial Sequence: Synthetic oligonucleotide
ccaaauguuuuggucaggc

SEQ ID NO: 1445111 - RNA, 19 nt, Artificial Sequence
  Description of Artificial Sequence: Synthetic oligonucleotide
ugacgucagcgaagcggcg

SEQ ID NO: 1445112 - RNA, 19 nt, Artificial Sequence
  Description of Artificial Sequence: Synthetic oligonucleotide
uuccgggccagagaguacu

SEQ ID NO: 1445113 - RNA, 19 nt, Artificial Sequence
  Description of Artificial Sequence: Synthetic oligonucleotide
cucgguacucauagaugug

SEQ ID NO: 1445114 - RNA, 19 nt, Artificial Sequence
  Description of Artificial Sequence: Synthetic oligonucleotide
acggaugacagugcggcca

SEQ ID NO: 1445115 - RNA, 19 nt, Artificial Sequence
  Description of Artificial Sequence: Synthetic oligonucleotide
caggaacggaugacagugc

SEQ ID NO: 1445116 - RNA, 19 nt, Artificial Sequence
  Description of Artificial Sequence: Synthetic oligonucleotide
augggccgggaguacaugu

SEQ ID NO: 1445117 - RNA, 19 nt, Artificial Sequence
  Description of Artificial Sequence: Synthetic oligonucleotide
gcgcaguaccagcacaucg

SEQ ID NO: 1445118 - RNA, 19 nt, Artificial Sequence
  Description of Artificial Sequence: Synthetic oligonucleotide
acgaaguaacucacgucag

SEQ ID NO: 1445119 - RNA, 19 nt, Artificial Sequence
  Description of Artificial Sequence: Synthetic oligonucleotide
ugguaggaucgaaggggca

SEQ ID NO: 1445120 - RNA, 19 nt, Artificial Sequence
  Description of Artificial Sequence: Synthetic oligonucleotide
guaacucacgucagcgaug

SEQ ID NO: 1445121 - RNA, 19 nt, Artificial Sequence
  Description of Artificial Sequence: Synthetic oligonucleotide
caguaccagcacaucgaag

SEQ ID NO: 1445122 - RNA, 19 nt, Artificial Sequence
  Description of Artificial Sequence: Synthetic oligonucleotide
ggaacgaaguaacucacgu

SEQ ID NO: 1445123 - RNA, 19 nt, Artificial Sequence
  Description of Artificial Sequence: Synthetic oligonucleotide
aggggcagugcguugcagu

SEQ ID NO: 1445124 - RNA, 19 nt, Artificial Sequence
  Description of Artificial Sequence: Synthetic oligonucleotide
cuugucagucaugggguug

SEQ ID NO: 1445125 - RNA, 19 nt, Artificial Sequence
  Description of Artificial Sequence: Synthetic oligonucleotide
uggcccgguggcuucagga

SEQ ID NO: 1445126 - RNA, 19 nt, Artificial Sequence
  Description of Artificial Sequence: Synthetic oligonucleotide
ugcgcuucugcaccccaaa

SEQ ID NO: 1445127 - RNA, 19 nt, Artificial Sequence
  Description of Artificial Sequence: Synthetic oligonucleotide
uugagagcauagugccgga

SEQ ID NO: 1445128 - RNA, 19 nt, Artificial Sequence
  Description of Artificial Sequence: Synthetic oligonucleotide
agugccggaacugcgccug

SEQ ID NO: 1445129 - RNA, 19 nt, Artificial Sequence
  Description of Artificial Sequence: Synthetic oligonucleotide
cuccggaacgaaguaacuc

SEQ ID NO: 1445130 - RNA, 19 nt, Artificial Sequence
  Description of Artificial Sequence: Synthetic oligonucleotide
gcaggaaagggcgucauca

SEQ ID NO: 1445131 - RNA, 19 nt, Artificial Sequence
  Description of Artificial Sequence: Synthetic oligonucleotide
aucggcgggcggucauugc

SEQ ID NO: 1445132 - RNA, 19 nt, Artificial Sequence
  Description of Artificial Sequence: Synthetic oligonucleotide
gacgcccacuucaaaggug

SEQ ID NO: 1445133 - RNA, 19 nt, Artificial Sequence
  Description of Artificial Sequence: Synthetic oligonucleotide
acggagugcaccauccaca

SEQ ID NO: 1445134 - RNA, 19 nt, Artificial Sequence
  Description of Artificial Sequence: Synthetic oligonucleotide
gguacucauagaugugaca

SEQ ID NO: 1445135 - RNA, 19 nt, Artificial Sequence
  Description of Artificial Sequence: Synthetic oligonucleotide
cuaugacgucagcgaagcg

SEQ ID NO: 1445136 - RNA, 19 nt, Artificial Sequence
  Description of Artificial Sequence: Synthetic oligonucleotide
ggcuuuuauugagagcccc

SEQ ID NO: 1445137 - RNA, 19 nt, Artificial Sequence
  Description of Artificial Sequence: Synthetic oligonucleotide
gcuugcuccgggaaggugc

SEQ ID NO: 1445138 - RNA, 19 nt, Artificial Sequence
  Description of Artificial Sequence: Synthetic oligonucleotide
ucuaaacggagugcaccau

SEQ ID NO: 1445139 - RNA, 19 nt, Artificial Sequence
  Description of Artificial Sequence: Synthetic oligonucleotide
uaggaucgaaggggcagug

SEQ ID NO: 1445140 - RNA, 19 nt, Artificial Sequence
  Description of Artificial Sequence: Synthetic oligonucleotide
augguccagcguaaaagca

SEQ ID NO: 1445141 - RNA, 19 nt, Artificial Sequence
  Description of Artificial Sequence: Synthetic oligonucleotide
uccggccgcucacuguagc

SEQ ID NO: 1445142 - RNA, 19 nt, Artificial Sequence
  Description of Artificial Sequence: Synthetic oligonucleotide
aagccaucggcgggcgguc

SEQ ID NO: 1445143 - RNA, 19 nt, Artificial Sequence
  Description of Artificial Sequence: Synthetic oligonucleotide
cucccucacuagaacagca

SEQ ID NO: 1445144 - RNA, 19 nt, Artificial Sequence
  Description of Artificial Sequence: Synthetic oligonucleotide
acgucagcgaagcggcgga

SEQ ID NO: 1445145 - RNA, 19 nt, Artificial Sequence
  Description of Artificial Sequence: Synthetic oligonucleotide
agcacaucgaaggcuuggu

SEQ ID NO: 1445146 - RNA, 19 nt, Artificial Sequence
  Description of Artificial Sequence: Synthetic oligonucleotide
ucgaaggggcagugcguug

SEQ ID NO: 1445147 - RNA, 19 nt, Artificial Sequence
  Description of Artificial Sequence: Synthetic oligonucleotide
ggaacggaugacagugcgg

SEQ ID NO: 1445148 - RNA, 19 nt, Artificial Sequence
  Description of Artificial Sequence: Synthetic oligonucleotide
ugcacacgcuuaggaagcc

SEQ ID NO: 1445149 - RNA, 19 nt, Artificial Sequence
  Description of Artificial Sequence: Synthetic oligonucleotide
ugcaugggccgggaguaca

SEQ ID NO: 1445150 - RNA, 19 nt, Artificial Sequence
  Description of Artificial Sequence: Synthetic oligonucleotide
gaugcgcuucugcacccca

SEQ ID NO: 1445151 - RNA, 19 nt, Artificial Sequence
  Description of Artificial Sequence: Synthetic oligonucleotide
ugcugucucgguacucaua

SEQ ID NO: 1445152 - RNA, 19 nt, Artificial Sequence
  Description of Artificial Sequence: Synthetic oligonucleotide
agcgcaguaccagcacauc

SEQ ID NO: 1445153 - RNA, 19 nt, Artificial Sequence
  Description of Artificial Sequence: Synthetic oligonucleotide
gucagcgauguggacgccc

SEQ ID NO: 1445154 - RNA, 19 nt, Artificial Sequence
  Description of Artificial Sequence: Synthetic oligonucleotide
gugagaggccugcaggaaa

SEQ ID NO: 1445155 - RNA, 19 nt, Artificial Sequence
  Description of Artificial Sequence: Synthetic oligonucleotide
agagccccugcagagcuga

SEQ ID NO: 1445156 - RNA, 19 nt, Artificial Sequence
  Description of Artificial Sequence: Synthetic oligonucleotide
cagagaguacuugucaucu

SEQ ID NO: 1445157 - RNA, 19 nt, Artificial Sequence
  Description of Artificial Sequence: Synthetic oligonucleotide
cccaaagcgcaguaccagc

SEQ ID NO: 1445158 - RNA, 19 nt, Artificial Sequence
  Description of Artificial Sequence: Synthetic oligonucleotide
ggugcaggaacggaugaca

SEQ ID NO: 1445159 - RNA, 19 nt, Artificial Sequence
  Description of Artificial Sequence: Synthetic oligonucleotide
cagugcguugcaguagaug

SEQ ID NO: 1445160 - RNA, 19 nt, Artificial Sequence
  Description of Artificial Sequence: Synthetic oligonucleotide
gcgucaucaaggucucgag

SEQ ID NO: 1445161 - RNA, 19 nt, Artificial Sequence
  Description of Artificial Sequence: Synthetic oligonucleotide
gcuguguuggcuccucuuc

SEQ ID NO: 1445162 - RNA, 19 nt, Artificial Sequence
  Description of Artificial Sequence: Synthetic oligonucleotide
gcauagugccggaacugcg

SEQ ID NO: 1445163 - RNA, 19 nt, Artificial Sequence
  Description of Artificial Sequence: Synthetic oligonucleotide
cagcuuggugcaggaacgg

SEQ ID NO: 1445164 - RNA, 19 nt, Artificial Sequence
  Description of Artificial Sequence: Synthetic oligonucleotide
ugagagcauagugccggaa

SEQ ID NO: 1445165 - RNA, 19 nt, Artificial Sequence
  Description of Artificial Sequence: Synthetic oligonucleotide
uagugccggaacugcgccu

SEQ ID NO: 1445166 - RNA, 19 nt, Artificial Sequence
  Description of Artificial Sequence: Synthetic oligonucleotide
aucgaaggggcagugcguu

SEQ ID NO: 1445167 - RNA, 19 nt, Artificial Sequence
  Description of Artificial Sequence: Synthetic oligonucleotide
ggcagugcguugcaguaga

SEQ ID NO: 1445168 - RNA, 19 nt, Artificial Sequence
  Description of Artificial Sequence: Synthetic oligonucleotide
acaguuccucacacagaag

SEQ ID NO: 1445169 - RNA, 19 nt, Artificial Sequence
  Description of Artificial Sequence: Synthetic oligonucleotide
guuucaugguccagcguaa

SEQ ID NO: 1445170 - RNA, 19 nt, Artificial Sequence
  Description of Artificial Sequence: Synthetic oligonucleotide
gcgccaucugcaugggccg

SEQ ID NO: 1445171 - RNA, 19 nt, Artificial Sequence
  Description of Artificial Sequence: Synthetic oligonucleotide
ugcugugcucaggggaaac

SEQ ID NO: 1445172 - RNA, 19 nt, Artificial Sequence
  Description of Artificial Sequence: Synthetic oligonucleotide
cucugggcauggucauagc

SEQ ID NO: 1445173 - RNA, 19 nt, Artificial Sequence
  Description of Artificial Sequence: Synthetic oligonucleotide
gcaagcuucaacugaucua

SEQ ID NO: 1445174 - RNA, 19 nt, Artificial Sequence
  Description of Artificial Sequence: Synthetic oligonucleotide
aucuugugggccacugcca

SEQ ID NO: 1445175 - RNA, 19 nt, Artificial Sequence
  Description of Artificial Sequence: Synthetic oligonucleotide
cacauccggccgcucacug

SEQ ID NO: 1445176 - RNA, 19 nt, Artificial Sequence
  Description of Artificial Sequence: Synthetic oligonucleotide
aacucacgucagcgaugug

SEQ ID NO: 1445177 - RNA, 19 nt, Artificial Sequence
  Description of Artificial Sequence: Synthetic oligonucleotide
ugggccgggaguacauguu

SEQ ID NO: 1445178 - RNA, 19 nt, Artificial Sequence
  Description of Artificial Sequence: Synthetic oligonucleotide
caaauguuuuggucaggcu

SEQ ID NO: 1445179 - RNA, 19 nt, Artificial Sequence
  Description of Artificial Sequence: Synthetic oligonucleotide
cucacacagaagccuggga

SEQ ID NO: 1445180 - RNA, 19 nt, Artificial Sequence
  Description of Artificial Sequence: Synthetic oligonucleotide
cccgguggcuucaggauag

SEQ ID NO: 1445181 - RNA, 19 nt, Artificial Sequence
  Description of Artificial Sequence: Synthetic oligonucleotide
caucgaaggcuugguucag

SEQ ID NO: 1445182 - RNA, 19 nt, Artificial Sequence
  Description of Artificial Sequence: Synthetic oligonucleotide
gcugugcucaggggaaacg

SEQ ID NO: 1445183 - RNA, 19 nt, Artificial Sequence
  Description of Artificial Sequence: Synthetic oligonucleotide
gaagccaucggcgggcggu

SEQ ID NO: 1445184 - RNA, 19 nt, Artificial Sequence
  Description of Artificial Sequence: Synthetic oligonucleotide
ccggaacgaaguaacucac

SEQ ID NO: 1445185 - RNA, 19 nt, Artificial Sequence
  Description of Artificial Sequence: Synthetic oligonucleotide
aggcuugguucaggacacc

SEQ ID NO: 1445186 - RNA, 19 nt, Artificial Sequence
  Description of Artificial Sequence: Synthetic oligonucleotide
agcggcggaugggagaggu

SEQ ID NO: 1445187 - RNA, 19 nt, Artificial Sequence
  Description of Artificial Sequence: Synthetic oligonucleotide
gagcagaaguacagcgcca

SEQ ID NO: 1445188 - RNA, 19 nt, Artificial Sequence
  Description of Artificial Sequence: Synthetic oligonucleotide
cagugcggccaaaccacuc

SEQ ID NO: 1445189 - RNA, 19 nt, Artificial Sequence
  Description of Artificial Sequence: Synthetic oligonucleotide
ggggacguugagagcauag

SEQ ID NO: 1445190 - RNA, 19 nt, Artificial Sequence
  Description of Artificial Sequence: Synthetic oligonucleotide
cuuccgggccagagaguac

SEQ ID NO: 1445191 - RNA, 19 nt, Artificial Sequence
  Description of Artificial Sequence: Synthetic oligonucleotide
aaguuccugcacacgcuua

SEQ ID NO: 1445192 - RNA, 19 nt, Artificial Sequence
  Description of Artificial Sequence: Synthetic oligonucleotide
gggccgggaguacauguug

SEQ ID NO: 1445193 - RNA, 19 nt, Artificial Sequence
  Description of Artificial Sequence: Synthetic oligonucleotide
ccggaacugcgccuggucc

SEQ ID NO: 1445194 - RNA, 19 nt, Artificial Sequence
  Description of Artificial Sequence: Synthetic oligonucleotide
cguugagagcauagugccg

SEQ ID NO: 1445195 - RNA, 19 nt, Artificial Sequence
  Description of Artificial Sequence: Synthetic oligonucleotide
gcauuccaguuucaugguc

SEQ ID NO: 1445196 - RNA, 19 nt, Artificial Sequence
  Description of Artificial Sequence: Synthetic oligonucleotide
ggcgucaucaaggucucga

SEQ ID NO: 1445197 - RNA, 19 nt, Artificial Sequence
  Description of Artificial Sequence: Synthetic oligonucleotide
cggaacgaaguaacucacg

SEQ ID NO: 1445198 - RNA, 19 nt, Artificial Sequence
  Description of Artificial Sequence: Synthetic oligonucleotide
guccagcguaaaagcaagc

SEQ ID NO: 1445199 - RNA, 19 nt, Artificial Sequence
  Description of Artificial Sequence: Synthetic oligonucleotide
gugccaucagugagaggcc

SEQ ID NO: 1445200 - RNA, 19 nt, Artificial Sequence
  Description of Artificial Sequence: Synthetic oligonucleotide
cauccggccgcucacugua

SEQ ID NO: 1445201 - RNA, 19 nt, Artificial Sequence
  Description of Artificial Sequence: Synthetic oligonucleotide
ggaggcggugcacuaugac

SEQ ID NO: 1445202 - RNA, 19 nt, Artificial Sequence
  Description of Artificial Sequence: Synthetic oligonucleotide
ggugcacuaugacgucagc

SEQ ID NO: 1445203 - RNA, 19 nt, Artificial Sequence
  Description of Artificial Sequence: Synthetic oligonucleotide
aucccuccggaacgaagua

SEQ ID NO: 1445204 - RNA, 19 nt, Artificial Sequence
  Description of Artificial Sequence: Synthetic oligonucleotide
cgggaguacauguugguga

SEQ ID NO: 1445205 - RNA, 19 nt, Artificial Sequence
  Description of Artificial Sequence: Synthetic oligonucleotide
caugggguugaggcugcac

SEQ ID NO: 1445206 - RNA, 19 nt, Artificial Sequence
  Description of Artificial Sequence: Synthetic oligonucleotide
cuccgggaaggugcggaag

SEQ ID NO: 1445207 - RNA, 19 nt, Artificial Sequence
  Description of Artificial Sequence: Synthetic oligonucleotide
guagacacuuguggcucuc

SEQ ID NO: 1445208 - RNA, 19 nt, Artificial Sequence
  Description of Artificial Sequence: Synthetic oligonucleotide
aagcggcggaugggagagg

SEQ ID NO: 1445209 - RNA, 19 nt, Artificial Sequence
  Description of Artificial Sequence: Synthetic oligonucleotide
gcaguaccagcacaucgaa

SEQ ID NO: 1445210 - RNA, 19 nt, Artificial Sequence
  Description of Artificial Sequence: Synthetic oligonucleotide
cagcgaagcggcggauggg

SEQ ID NO: 1445211 - RNA, 19 nt, Artificial Sequence
  Description of Artificial Sequence: Synthetic oligonucleotide
cacuuggcccgguggcuuc

SEQ ID NO: 1445212 - RNA, 19 nt, Artificial Sequence
  Description of Artificial Sequence: Synthetic oligonucleotide
acagugcggccaaaccacu

SEQ ID NO: 1445213 - RNA, 19 nt, Artificial Sequence
  Description of Artificial Sequence: Synthetic oligonucleotide
caucggcgggcggucauug

SEQ ID NO: 1445214 - RNA, 19 nt, Artificial Sequence
  Description of Artificial Sequence: Synthetic oligonucleotide
gaucgaaggggcagugcgu

SEQ ID NO: 1445215 - RNA, 19 nt, Artificial Sequence
  Description of Artificial Sequence: Synthetic oligonucleotide
cacacgcuuaggaagccau

SEQ ID NO: 1445216 - RNA, 19 nt, Artificial Sequence
  Description of Artificial Sequence: Synthetic oligonucleotide
cuuggugcaccuccucacu

SEQ ID NO: 1445217 - RNA, 19 nt, Artificial Sequence
  Description of Artificial Sequence: Synthetic oligonucleotide
cagucccaucuggucacag

SEQ ID NO: 1445218 - RNA, 19 nt, Artificial Sequence
  Description of Artificial Sequence: Synthetic oligonucleotide
guaggaucgaaggggcagu

SEQ ID NO: 1445219 - RNA, 19 nt, Artificial Sequence
  Description of Artificial Sequence: Synthetic oligonucleotide
cgguacucauagaugugac

SEQ ID NO: 1445220 - RNA, 19 nt, Artificial Sequence
  Description of Artificial Sequence: Synthetic oligonucleotide
uccgggccagagaguacuu

SEQ ID NO: 1445221 - RNA, 19 nt, Artificial Sequence
  Description of Artificial Sequence: Synthetic oligonucleotide
gcgaagcugcuuugcgaug

SEQ ID NO: 1445222 - RNA, 19 nt, Artificial Sequence
  Description of Artificial Sequence: Synthetic oligonucleotide
auguggacgcccacuucaa

SEQ ID NO: 1445223 - RNA, 19 nt, Artificial Sequence
  Description of Artificial Sequence: Synthetic oligonucleotide
ucaugggguugaggcugca

SEQ ID NO: 1445224 - RNA, 19 nt, Artificial Sequence
  Description of Artificial Sequence: Synthetic oligonucleotide
gcuuugcgaugcugugcag

SEQ ID NO: 1445225 - RNA, 19 nt, Artificial Sequence
  Description of Artificial Sequence: Synthetic oligonucleotide
cggugcacuaugacgucag

SEQ ID NO: 1445226 - RNA, 19 nt, Artificial Sequence
  Description of Artificial Sequence: Synthetic oligonucleotide
acggcuuggugcaccuccu

SEQ ID NO: 1445227 - RNA, 19 nt, Artificial Sequence
  Description of Artificial Sequence: Synthetic oligonucleotide
gcagaaguacagcgccauc

SEQ ID NO: 1445228 - RNA, 19 nt, Artificial Sequence
  Description of Artificial Sequence: Synthetic oligonucleotide
gggcagugcguugcaguag

SEQ ID NO: 1445229 - RNA, 19 nt, Artificial Sequence
  Description of Artificial Sequence: Synthetic oligonucleotide
ggggcagugcguugcagua

SEQ ID NO: 1445230 - RNA, 19 nt, Artificial Sequence
  Description of Artificial Sequence: Synthetic oligonucleotide
cccacucucccucacuaga

SEQ ID NO: 1445231 - RNA, 19 nt, Artificial Sequence
  Description of Artificial Sequence: Synthetic oligonucleotide
ggcauuccaguuucauggu

SEQ ID NO: 1445232 - RNA, 19 nt, Artificial Sequence
  Description of Artificial Sequence: Synthetic oligonucleotide
cgggcggucauugcagugg

SEQ ID NO: 1445233 - RNA, 19 nt, Artificial Sequence
  Description of Artificial Sequence: Synthetic oligonucleotide
ccggccgcucacuguagcc

SEQ ID NO: 1445234 - RNA, 19 nt, Artificial Sequence
  Description of Artificial Sequence: Synthetic oligonucleotide
ugcucugggcauggucaua

SEQ ID NO: 1445235 - RNA, 19 nt, Artificial Sequence
  Description of Artificial Sequence: Synthetic oligonucleotide
ccgggaguacauguuggug

SEQ ID NO: 1445236 - RNA, 19 nt, Artificial Sequence
  Description of Artificial Sequence: Synthetic oligonucleotide
cccucacuagaacagcaaa

SEQ ID NO: 1445237 - RNA, 19 nt, Artificial Sequence
  Description of Artificial Sequence: Synthetic oligonucleotide
cuuggcccgguggcuucag

SEQ ID NO: 1445238 - RNA, 19 nt, Artificial Sequence
  Description of Artificial Sequence: Synthetic oligonucleotide
cagcgauguggacgcccac

SEQ ID NO: 1445239 - RNA, 19 nt, Artificial Sequence
  Description of Artificial Sequence: Synthetic oligonucleotide
gcuuuuauugagagccccu

SEQ ID NO: 1445240 - RNA, 19 nt, Artificial Sequence
  Description of Artificial Sequence: Synthetic oligonucleotide
aggcuugcuccgggaaggu

SEQ ID NO: 1445241 - RNA, 19 nt, Artificial Sequence
  Description of Artificial Sequence: Synthetic oligonucleotide
caucagugagaggccugca

SEQ ID NO: 1445242 - RNA, 19 nt, Artificial Sequence
  Description of Artificial Sequence: Synthetic oligonucleotide
ggacgcccacuucaaaggu

SEQ ID NO: 1445243 - RNA, 19 nt, Artificial Sequence
  Description of Artificial Sequence: Synthetic oligonucleotide
cugcaugggccgggaguac

SEQ ID NO: 1445244 - RNA, 19 nt, Artificial Sequence
  Description of Artificial Sequence: Synthetic oligonucleotide
gguucccagaggagaguga

SEQ ID NO: 1445245 - RNA, 19 nt, Artificial Sequence
  Description of Artificial Sequence: Synthetic oligonucleotide
gcgggcggucauugcagug

SEQ ID NO: 1445246 - RNA, 19 nt, Artificial Sequence
  Description of Artificial Sequence: Synthetic oligonucleotide
augcgcuucugcaccccaa

SEQ ID NO: 1445247 - RNA, 19 nt, Artificial Sequence
  Description of Artificial Sequence: Synthetic oligonucleotide
gcgaagcggcggaugggag

SEQ ID NO: 1445248 - RNA, 19 nt, Artificial Sequence
  Description of Artificial Sequence: Synthetic oligonucleotide
gccggcgcagcaaggcuug

SEQ ID NO: 1445249 - RNA, 19 nt, Artificial Sequence
  Description of Artificial Sequence: Synthetic oligonucleotide
caguuucaugguccagcgu

SEQ ID NO: 1445250 - RNA, 19 nt, Artificial Sequence
  Description of Artificial Sequence: Synthetic oligonucleotide
ccagcguaaaagcaagcuu

SEQ ID NO: 1445251 - RNA, 19 nt, Artificial Sequence
  Description of Artificial Sequence: Synthetic oligonucleotide
ccuuccgggccagagagua

SEQ ID NO: 1445252 - RNA, 19 nt, Artificial Sequence
  Description of Artificial Sequence: Synthetic oligonucleotide
gcaucccagagcagaagua

SEQ ID NO: 1445253 - RNA, 19 nt, Artificial Sequence
  Description of Artificial Sequence: Synthetic oligonucleotide
cagcuugcuuuuguagggu

SEQ ID NO: 1445254 - RNA, 19 nt, Artificial Sequence
  Description of Artificial Sequence: Synthetic oligonucleotide
gcggugcacuaugacguca

SEQ ID NO: 1445255 - RNA, 19 nt, Artificial Sequence
  Description of Artificial Sequence: Synthetic oligonucleotide
cgaucaugcucugggcaug

SEQ ID NO: 1445256 - RNA, 19 nt, Artificial Sequence
  Description of Artificial Sequence: Synthetic oligonucleotide
gcguaaaagcaagcuucaa

SEQ ID NO: 1445257 - RNA, 19 nt, Artificial Sequence
  Description of Artificial Sequence: Synthetic oligonucleotide
cggcgggcggucauugcag

SEQ ID NO: 1445258 - RNA, 19 nt, Artificial Sequence
  Description of Artificial Sequence: Synthetic oligonucleotide
gccgggaguacauguuggu

SEQ ID NO: 1445259 - RNA, 19 nt, Artificial Sequence
  Description of Artificial Sequence: Synthetic oligonucleotide
gcccgguggcuucaggaua

SEQ ID NO: 1445260 - RNA, 19 nt, Artificial Sequence
  Description of Artificial Sequence: Synthetic oligonucleotide
cgaagcggcggaugggaga

SEQ ID NO: 1445261 - RNA, 19 nt, Artificial Sequence
  Description of Artificial Sequence: Synthetic oligonucleotide
gcgauguggacgcccacuu

SEQ ID NO: 1445262 - RNA, 19 nt, Artificial Sequence
  Description of Artificial Sequence: Synthetic oligonucleotide
gcuccgggaaggugcggaa

SEQ ID NO: 1445263 - RNA, 19 nt, Artificial Sequence
  Description of Artificial Sequence: Synthetic oligonucleotide
cggcggaugggagagguga

SEQ ID NO: 1445264 - RNA, 19 nt, Artificial Sequence
  Description of Artificial Sequence: Synthetic oligonucleotide
gggcgucaucaaggucucg

SEQ ID NO: 1445265 - RNA, 19 nt, Artificial Sequence
  Description of Artificial Sequence: Synthetic oligonucleotide
ggcccgguggcuucaggau

SEQ ID NO: 1445266 - RNA, 19 nt, Artificial Sequence
  Description of Artificial Sequence: Synthetic oligonucleotide
ggcggaugggagaggugaa

SEQ ID NO: 1445267 - RNA, 19 nt, Artificial Sequence
  Description of Artificial Sequence: Synthetic oligonucleotide
ccuccggaacgaaguaacu

SEQ ID NO: 1445268 - RNA, 19 nt, Artificial Sequence
  Description of Artificial Sequence: Synthetic oligonucleotide
cgggccagagaguacuugu

SEQ ID NO: 1445269 - RNA, 19 nt, Artificial Sequence
  Description of Artificial Sequence: Synthetic oligonucleotide
ccgguggcuucaggauagc

SEQ ID NO: 1445270 - RNA, 19 nt, Artificial Sequence
  Description of Artificial Sequence: Synthetic oligonucleotide
gcaugggccgggaguacau

SEQ ID NO: 1445271 - RNA, 19 nt, Artificial Sequence
  Description of Artificial Sequence: Synthetic oligonucleotide
gccaucggcgggcggucau

SEQ ID NO: 1445272 - RNA, 19 nt, Artificial Sequence
  Description of Artificial Sequence: Synthetic oligonucleotide
cgucagcgauguggacgcc

SEQ ID NO: 1445273 - RNA, 19 nt, Artificial Sequence
  Description of Artificial Sequence: Synthetic oligonucleotide
gcagugcguugcaguagau

SEQ ID NO: 1445274 - RNA, 19 nt, Artificial Sequence
  Description of Artificial Sequence: Synthetic oligonucleotide
ccacauccggccgcucacu

SEQ ID NO: 1445275 - RNA, 19 nt, Artificial Sequence
  Description of Artificial Sequence: Synthetic oligonucleotide
ccgggaaggugcggaagau

SEQ ID NO: 1445276 - RNA, 19 nt, Artificial Sequence
  Description of Artificial Sequence: Synthetic oligonucleotide
gcgccugguccugcagcau

SEQ ID NO: 1445277 - RNA, 19 nt, Artificial Sequence
  Description of Artificial Sequence: Synthetic oligonucleotide
ccaucggcgggcggucauu

SEQ ID NO: 1445278 - RNA, 19 nt, Artificial Sequence
  Description of Artificial Sequence: Synthetic oligonucleotide
ugaauaauuccuaaaauca

SEQ ID NO: 1445279 - RNA, 19 nt, Artificial Sequence
  Description of Artificial Sequence: Synthetic oligonucleotide
ucuaaaacauuuuagcuag

SEQ ID NO: 1445280 - RNA, 19 nt, Artificial Sequence
  Description of Artificial Sequence: Synthetic oligonucleotide
aaaucucuaagccggaugg

SEQ ID NO: 1445281 - RNA, 19 nt, Artificial Sequence
  Description of Artificial Sequence: Synthetic oligonucleotide
cauaaggcaaucaacaagg

SEQ ID NO: 1445282 - RNA, 19 nt, Artificial Sequence
  Description of Artificial Sequence: Synthetic oligonucleotide
aauauucccagagugacac

SEQ ID NO: 1445283 - RNA, 19 nt, Artificial Sequence
  Description of Artificial Sequence: Synthetic oligonucleotide
aauucaacccagugaaggc

SEQ ID NO: 1445284 - RNA, 19 nt, Artificial Sequence
  Description of Artificial Sequence: Synthetic oligonucleotide
aaaccaaugaaauuucugu

SEQ ID NO: 1445285 - RNA, 19 nt, Artificial Sequence
  Description of Artificial Sequence: Synthetic oligonucleotide
aauagucaaaacugcaaag

SEQ ID NO: 1445286 - RNA, 19 nt, Artificial Sequence
  Description of Artificial Sequence: Synthetic oligonucleotide
uuuaauguaacguuggcau

SEQ ID NO: 1445287 - RNA, 19 nt, Artificial Sequence
  Description of Artificial Sequence: Synthetic oligonucleotide
ucauuacugaacuuggagg

SEQ ID NO: 1445288 - RNA, 19 nt, Artificial Sequence
  Description of Artificial Sequence: Synthetic oligonucleotide
uuaaugaacucaaucagga

SEQ ID NO: 1445289 - RNA, 19 nt, Artificial Sequence
  Description of Artificial Sequence: Synthetic oligonucleotide
aaagaaaccucuuccucac

SEQ ID NO: 1445290 - RNA, 19 nt, Artificial Sequence
  Description of Artificial Sequence: Synthetic oligonucleotide
guuaaauauucccagagug

SEQ ID NO: 1445291 - RNA, 19 nt, Artificial Sequence
  Description of Artificial Sequence: Synthetic oligonucleotide
auuuggcugaaucauaagg

SEQ ID NO: 1445292 - RNA, 19 nt, Artificial Sequence
  Description of Artificial Sequence: Synthetic oligonucleotide
aaggcaaucaacaagggug

SEQ ID NO: 1445293 - RNA, 19 nt, Artificial Sequence
  Description of Artificial Sequence: Synthetic oligonucleotide
uuuggcugaaucauaaggc

SEQ ID NO: 1445294 - RNA, 19 nt, Artificial Sequence
  Description of Artificial Sequence: Synthetic oligonucleotide
agaaaguccuuccaugacc

SEQ ID NO: 1445295 - RNA, 19 nt, Artificial Sequence
  Description of Artificial Sequence: Synthetic oligonucleotide
aagauagcagagcaugaac

SEQ ID NO: 1445296 - RNA, 19 nt, Artificial Sequence
  Description of Artificial Sequence: Synthetic oligonucleotide
aaagcaccaucuuauguuc

SEQ ID NO: 1445297 - RNA, 19 nt, Artificial Sequence
  Description of Artificial Sequence: Synthetic oligonucleotide
uguaacaugauaguucucc

SEQ ID NO: 1445298 - RNA, 19 nt, Artificial Sequence
  Description of Artificial Sequence: Synthetic oligonucleotide
uccauaaaucucuaagccg

SEQ ID NO: 1445299 - RNA, 19 nt, Artificial Sequence
  Description of Artificial Sequence: Synthetic oligonucleotide
cuuauguuccucuucagag

SEQ ID NO: 1445300 - RNA, 19 nt, Artificial Sequence
  Description of Artificial Sequence: Synthetic oligonucleotide
aaagccucagguaggaugc

SEQ ID NO: 1445301 - RNA, 19 nt, Artificial Sequence
  Description of Artificial Sequence: Synthetic oligonucleotide
aaucauaaggcaaucaaca

SEQ ID NO: 1445302 - RNA, 19 nt, Artificial Sequence
  Description of Artificial Sequence: Synthetic oligonucleotide
aaauagucaaaacugcaaa

SEQ ID NO: 1445303 - RNA, 19 nt, Artificial Sequence
  Description of Artificial Sequence: Synthetic oligonucleotide
ugguuaaauauucccagag

SEQ ID NO: 1445304 - RNA, 19 nt, Artificial Sequence
  Description of Artificial Sequence: Synthetic oligonucleotide
uucaacaugaggagaggcg

SEQ ID NO: 1445305 - RNA, 19 nt, Artificial Sequence
  Description of Artificial Sequence: Synthetic oligonucleotide
aaccaaugaaauuucugug

SEQ ID NO: 1445306 - RNA, 19 nt, Artificial Sequence
  Description of Artificial Sequence: Synthetic oligonucleotide
aaugccaaaaggguagggg

SEQ ID NO: 1445307 - RNA, 19 nt, Artificial Sequence
  Description of Artificial Sequence: Synthetic oligonucleotide
uccaaauagggucaaugcc

SEQ ID NO: 1445308 - RNA, 19 nt, Artificial Sequence
  Description of Artificial Sequence: Synthetic oligonucleotide
agcaagaccccguaggugg

SEQ ID NO: 1445309 - RNA, 19 nt, Artificial Sequence
  Description of Artificial Sequence: Synthetic oligonucleotide
cuaagaagagcacagggac

SEQ ID NO: 1445310 - RNA, 19 nt, Artificial Sequence
  Description of Artificial Sequence: Synthetic oligonucleotide
accaacguagaauuuguuc

SEQ ID NO: 1445311 - RNA, 19 nt, Artificial Sequence
  Description of Artificial Sequence: Synthetic oligonucleotide
acaaauuuggugccugcac

SEQ ID NO: 1445312 - RNA, 19 nt, Artificial Sequence
  Description of Artificial Sequence: Synthetic oligonucleotide
cuccauaaaucucuaagcc

SEQ ID NO: 1445313 - RNA, 19 nt, Artificial Sequence
  Description of Artificial Sequence: Synthetic oligonucleotide
auggcagacacguuccacc

SEQ ID NO: 1445314 - RNA, 19 nt, Artificial Sequence
  Description of Artificial Sequence: Synthetic oligonucleotide
aaaacuccagggauguucg

SEQ ID NO: 1445315 - RNA, 19 nt, Artificial Sequence
  Description of Artificial Sequence: Synthetic oligonucleotide
uguaacguuggcauaauuu

SEQ ID NO: 1445316 - RNA, 19 nt, Artificial Sequence
  Description of Artificial Sequence: Synthetic oligonucleotide
uuagcuagccauccaacug

SEQ ID NO: 1445317 - RNA, 19 nt, Artificial Sequence
  Description of Artificial Sequence: Synthetic oligonucleotide
ucuaaucuuacacuuuaaa

SEQ ID NO: 1445318 - RNA, 19 nt, Artificial Sequence
  Description of Artificial Sequence: Synthetic oligonucleotide
cuuacaaguguguaaccgc

SEQ ID NO: 1445319 - RNA, 19 nt, Artificial Sequence
  Description of Artificial Sequence: Synthetic oligonucleotide
uguggaucaugcuauguug

SEQ ID NO: 1445320 - RNA, 19 nt, Artificial Sequence
  Description of Artificial Sequence: Synthetic oligonucleotide
aaugcagaaaguccuucca

SEQ ID NO: 1445321 - RNA, 19 nt, Artificial Sequence
  Description of Artificial Sequence: Synthetic oligonucleotide
uuccaaauagggucaaugc

SEQ ID NO: 1445322 - RNA, 19 nt, Artificial Sequence
  Description of Artificial Sequence: Synthetic oligonucleotide
aucuaaaacauuuuagcua

SEQ ID NO: 1445323 - RNA, 19 nt, Artificial Sequence
  Description of Artificial Sequence: Synthetic oligonucleotide
ucaugccaaagcaacugcg

SEQ ID NO: 1445324 - RNA, 19 nt, Artificial Sequence
  Description of Artificial Sequence: Synthetic oligonucleotide
aaaaccaaugaaauuucug

SEQ ID NO: 1445325 - RNA, 19 nt, Artificial Sequence
  Description of Artificial Sequence: Synthetic oligonucleotide
aacaugauaguucuccaua

SEQ ID NO: 1445326 - RNA, 19 nt, Artificial Sequence
  Description of Artificial Sequence: Synthetic oligonucleotide
ccauaaaucucuaagccgg

SEQ ID NO: 1445327 - RNA, 19 nt, Artificial Sequence
  Description of Artificial Sequence: Synthetic oligonucleotide
augccaaagcaacugcgcc

SEQ ID NO: 1445328 - RNA, 19 nt, Artificial Sequence
  Description of Artificial Sequence: Synthetic oligonucleotide
aaggguggaauauuccugu

SEQ ID NO: 1445329 - RNA, 19 nt, Artificial Sequence
  Description of Artificial Sequence: Synthetic oligonucleotide
aacaaggguggaauauucc

SEQ ID NO: 1445330 - RNA, 19 nt, Artificial Sequence
  Description of Artificial Sequence: Synthetic oligonucleotide
guggcuagguuccaaauag

SEQ ID NO: 1445331 - RNA, 19 nt, Artificial Sequence
  Description of Artificial Sequence: Synthetic oligonucleotide
ucuuauguuccucuucaga

SEQ ID NO: 1445332 - RNA, 19 nt, Artificial Sequence
  Description of Artificial Sequence: Synthetic oligonucleotide
accaaugaaauuucugugu

SEQ ID NO: 1445333 - RNA, 19 nt, Artificial Sequence
  Description of Artificial Sequence: Synthetic oligonucleotide
uuccuaaaaugcaaguggu

SEQ ID NO: 1445334 - RNA, 19 nt, Artificial Sequence
  Description of Artificial Sequence: Synthetic oligonucleotide
aaucauuuggcugaaucau

SEQ ID NO: 1445335 - RNA, 19 nt, Artificial Sequence
  Description of Artificial Sequence: Synthetic oligonucleotide
uuacaaguguguaaccgcu

SEQ ID NO: 1445336 - RNA, 19 nt, Artificial Sequence
  Description of Artificial Sequence: Synthetic oligonucleotide
aggagaaaggaacaaauuu

SEQ ID NO: 1445337 - RNA, 19 nt, Artificial Sequence
  Description of Artificial Sequence: Synthetic oligonucleotide
uagucaaaacugcaaagaa

SEQ ID NO: 1445338 - RNA, 19 nt, Artificial Sequence
  Description of Artificial Sequence: Synthetic oligonucleotide
agaucagguacccaaagau

SEQ ID NO: 1445339 - RNA, 19 nt, Artificial Sequence
  Description of Artificial Sequence: Synthetic oligonucleotide
ugcgucaucaggaucuccc

SEQ ID NO: 1445340 - RNA, 19 nt, Artificial Sequence
  Description of Artificial Sequence: Synthetic oligonucleotide
auaauuuauauuugcucau

SEQ ID NO: 1445341 - RNA, 19 nt, Artificial Sequence
  Description of Artificial Sequence: Synthetic oligonucleotide
gauguucggguccagcugc

SEQ ID NO: 1445342 - RNA, 19 nt, Artificial Sequence
  Description of Artificial Sequence: Synthetic oligonucleotide
uuggcugaaucauaaggca

SEQ ID NO: 1445343 - RNA, 19 nt, Artificial Sequence
  Description of Artificial Sequence: Synthetic oligonucleotide
guaaaggccaugugucucg

SEQ ID NO: 1445344 - RNA, 19 nt, Artificial Sequence
  Description of Artificial Sequence: Synthetic oligonucleotide
uguguaaccgcuccggcuc

SEQ ID NO: 1445345 - RNA, 19 nt, Artificial Sequence
  Description of Artificial Sequence: Synthetic oligonucleotide
uggguaaaggccauguguc

SEQ ID NO: 1445346 - RNA, 19 nt, Artificial Sequence
  Description of Artificial Sequence: Synthetic oligonucleotide
ucucugccgaguaugcuag

SEQ ID NO: 1445347 - RNA, 19 nt, Artificial Sequence
  Description of Artificial Sequence: Synthetic oligonucleotide
aaguguguaaccgcuccgg

SEQ ID NO: 1445348 - RNA, 19 nt, Artificial Sequence
  Description of Artificial Sequence: Synthetic oligonucleotide
acaaggguggaauauuccu

SEQ ID NO: 1445349 - RNA, 19 nt, Artificial Sequence
  Description of Artificial Sequence: Synthetic oligonucleotide
ucucuagaggucucugccg

SEQ ID NO: 1445350 - RNA, 19 nt, Artificial Sequence
  Description of Artificial Sequence: Synthetic oligonucleotide
uaaggcaaucaacaagggu

SEQ ID NO: 1445351 - RNA, 19 nt, Artificial Sequence
  Description of Artificial Sequence: Synthetic oligonucleotide
aggggaaucaaguaucuaa

SEQ ID NO: 1445352 - RNA, 19 nt, Artificial Sequence
  Description of Artificial Sequence: Synthetic oligonucleotide
ucagggacggacaccgagg

SEQ ID NO: 1445353 - RNA, 19 nt, Artificial Sequence
  Description of Artificial Sequence: Synthetic oligonucleotide
agucaugugaauaauuccu

SEQ ID NO: 1445354 - RNA, 19 nt, Artificial Sequence
  Description of Artificial Sequence: Synthetic oligonucleotide
aguguguaaccgcuccggc

SEQ ID NO: 1445355 - RNA, 19 nt, Artificial Sequence
  Description of Artificial Sequence: Synthetic oligonucleotide
acaggaaucucagggacgg

SEQ ID NO: 1445356 - RNA, 19 nt, Artificial Sequence
  Description of Artificial Sequence: Synthetic oligonucleotide
aaucucuaagccggauggc

SEQ ID NO: 1445357 - RNA, 19 nt, Artificial Sequence
  Description of Artificial Sequence: Synthetic oligonucleotide
auucaacccagugaaggcg

SEQ ID NO: 1445358 - RNA, 19 nt, Artificial Sequence
  Description of Artificial Sequence: Synthetic oligonucleotide
uaauguaacguuggcauaa

SEQ ID NO: 1445359 - RNA, 19 nt, Artificial Sequence
  Description of Artificial Sequence: Synthetic oligonucleotide
agcaaagaaaccucuuccu

SEQ ID NO: 1445360 - RNA, 19 nt, Artificial Sequence
  Description of Artificial Sequence: Synthetic oligonucleotide
guaggugguguccacacgc

SEQ ID NO: 1445361 - RNA, 19 nt, Artificial Sequence
  Description of Artificial Sequence: Synthetic oligonucleotide
ugaugguacugucauucca

SEQ ID NO: 1445362 - RNA, 19 nt, Artificial Sequence
  Description of Artificial Sequence: Synthetic oligonucleotide
ucaugcuauguugucauca

SEQ ID NO: 1445363 - RNA, 19 nt, Artificial Sequence
  Description of Artificial Sequence: Synthetic oligonucleotide
agcaauguggaucaugcua

SEQ ID NO: 1445364 - RNA, 19 nt, Artificial Sequence
  Description of Artificial Sequence: Synthetic oligonucleotide
ggagaaaggaacaaauuug

SEQ ID NO: 1445365 - RNA, 19 nt, Artificial Sequence
  Description of Artificial Sequence: Synthetic oligonucleotide
aaccgcuccggcucaugcc

SEQ ID NO: 1445366 - RNA, 19 nt, Artificial Sequence
  Description of Artificial Sequence: Synthetic oligonucleotide
ugcaccaacguagaauuug

SEQ ID NO: 1445367 - RNA, 19 nt, Artificial Sequence
  Description of Artificial Sequence: Synthetic oligonucleotide
ucucuaagccggauggcug

SEQ ID NO: 1445368 - RNA, 19 nt, Artificial Sequence
  Description of Artificial Sequence: Synthetic oligonucleotide
aaagauagcagagcaugaa

SEQ ID NO: 1445369 - RNA, 19 nt, Artificial Sequence
  Description of Artificial Sequence: Synthetic oligonucleotide
gaauggauggucugcguca

SEQ ID NO: 1445370 - RNA, 19 nt, Artificial Sequence
  Description of Artificial Sequence: Synthetic oligonucleotide
guccuacugugccugaugg

SEQ ID NO: 1445371 - RNA, 19 nt, Artificial Sequence
  Description of Artificial Sequence: Synthetic oligonucleotide
cugaaauucaacccaguga

SEQ ID NO: 1445372 - RNA, 19 nt, Artificial Sequence
  Description of Artificial Sequence: Synthetic oligonucleotide
gaaggcguauggcauggag

SEQ ID NO: 1445373 - RNA, 19 nt, Artificial Sequence
  Description of Artificial Sequence: Synthetic oligonucleotide
ugucagaaaucugacuuga

SEQ ID NO: 1445374 - RNA, 19 nt, Artificial Sequence
  Description of Artificial Sequence: Synthetic oligonucleotide
agcaacugcgcccauugug

SEQ ID NO: 1445375 - RNA, 19 nt, Artificial Sequence
  Description of Artificial Sequence: Synthetic oligonucleotide
auuuggugccugcaccaac

SEQ ID NO: 1445376 - RNA, 19 nt, Artificial Sequence
  Description of Artificial Sequence: Synthetic oligonucleotide
uaacguuggcauaauuuau

SEQ ID NO: 1445377 - RNA, 19 nt, Artificial Sequence
  Description of Artificial Sequence: Synthetic oligonucleotide
auuccuaaaaucacagaca

SEQ ID NO: 1445378 - RNA, 19 nt, Artificial Sequence
  Description of Artificial Sequence: Synthetic oligonucleotide
uucaacccagugaaggcgu

SEQ ID NO: 1445379 - RNA, 19 nt, Artificial Sequence
  Description of Artificial Sequence: Synthetic oligonucleotide
agauagcagagcaugaaca

SEQ ID NO: 1445380 - RNA, 19 nt, Artificial Sequence
  Description of Artificial Sequence: Synthetic oligonucleotide
uauuccugucagaaaucug

SEQ ID NO: 1445381 - RNA, 19 nt, Artificial Sequence
  Description of Artificial Sequence: Synthetic oligonucleotide
aacaaauuuggugccugca

SEQ ID NO: 1445382 - RNA, 19 nt, Artificial Sequence
  Description of Artificial Sequence: Synthetic oligonucleotide
ugccaaagcaacugcgccc

SEQ ID NO: 1445383 - RNA, 19 nt, Artificial Sequence
  Description of Artificial Sequence: Synthetic oligonucleotide
ugacuugagugaauucugu

SEQ ID NO: 1445384 - RNA, 19 nt, Artificial Sequence
  Description of Artificial Sequence: Synthetic oligonucleotide
gaacaaauuuggugccugc

SEQ ID NO: 1445385 - RNA, 19 nt, Artificial Sequence
  Description of Artificial Sequence: Synthetic oligonucleotide
aaguggugagcuuuacaaa

SEQ ID NO: 1445386 - RNA, 19 nt, Artificial Sequence
  Description of Artificial Sequence: Synthetic oligonucleotide
gaaaguccuuccaugacca

SEQ ID NO: 1445387 - RNA, 19 nt, Artificial Sequence
  Description of Artificial Sequence: Synthetic oligonucleotide
cacuuguagaugaucauga

SEQ ID NO: 1445388 - RNA, 19 nt, Artificial Sequence
  Description of Artificial Sequence: Synthetic oligonucleotide
acugcgcccauugugcagc

SEQ ID NO: 1445389 - RNA, 19 nt, Artificial Sequence
  Description of Artificial Sequence: Synthetic oligonucleotide
uggcuagguuccaaauagg

SEQ ID NO: 1445390 - RNA, 19 nt, Artificial Sequence
  Description of Artificial Sequence: Synthetic oligonucleotide
caacguagaauuuguucug

SEQ ID NO: 1445391 - RNA, 19 nt, Artificial Sequence
  Description of Artificial Sequence: Synthetic oligonucleotide
aauguggaucaugcuaugu

SEQ ID NO: 1445392 - RNA, 19 nt, Artificial Sequence
  Description of Artificial Sequence: Synthetic oligonucleotide
auauuccugucagaaaucu

SEQ ID NO: 1445393 - RNA, 19 nt, Artificial Sequence
  Description of Artificial Sequence: Synthetic oligonucleotide
aggcaaucaacaagggugg

SEQ ID NO: 1445394 - RNA, 19 nt, Artificial Sequence
  Description of Artificial Sequence: Synthetic oligonucleotide
ugguacugucauuccaaag

SEQ ID NO: 1445395 - RNA, 19 nt, Artificial Sequence
  Description of Artificial Sequence: Synthetic oligonucleotide
agcaugaacaggaaucuca

SEQ ID NO: 1445396 - RNA, 19 nt, Artificial Sequence
  Description of Artificial Sequence: Synthetic oligonucleotide
aaucugacuugagugaauu

SEQ ID NO: 1445397 - RNA, 19 nt, Artificial Sequence
  Description of Artificial Sequence: Synthetic oligonucleotide
uggugagcuuuacaaaauc

SEQ ID NO: 1445398 - RNA, 19 nt, Artificial Sequence
  Description of Artificial Sequence: Synthetic oligonucleotide
ugagugaauucuguaacau

SEQ ID NO: 1445399 - RNA, 19 nt, Artificial Sequence
  Description of Artificial Sequence: Synthetic oligonucleotide
uguggcuagguuccaaaua

SEQ ID NO: 1445400 - RNA, 19 nt, Artificial Sequence
  Description of Artificial Sequence: Synthetic oligonucleotide
aacguagaauuuguucuga

SEQ ID NO: 1445401 - RNA, 19 nt, Artificial Sequence
  Description of Artificial Sequence: Synthetic oligonucleotide
agagugacaccaaaaguca

SEQ ID NO: 1445402 - RNA, 19 nt, Artificial Sequence
  Description of Artificial Sequence: Synthetic oligonucleotide
auggaauggauggucugcg

SEQ ID NO: 1445403 - RNA, 19 nt, Artificial Sequence
  Description of Artificial Sequence: Synthetic oligonucleotide
uuaauguaacguuggcaua

SEQ ID NO: 1445404 - RNA, 19 nt, Artificial Sequence
  Description of Artificial Sequence: Synthetic oligonucleotide
uggcugaaucauaaggcaa

SEQ ID NO: 1445405 - RNA, 19 nt, Artificial Sequence
  Description of Artificial Sequence: Synthetic oligonucleotide
auauucccagagugacacc

SEQ ID NO: 1445406 - RNA, 19 nt, Artificial Sequence
  Description of Artificial Sequence: Synthetic oligonucleotide
aaaaggguaggggccucgg

SEQ ID NO: 1445407 - RNA, 19 nt, Artificial Sequence
  Description of Artificial Sequence: Synthetic oligonucleotide
aaaggggaaucaaguaucu

SEQ ID NO: 1445408 - RNA, 19 nt, Artificial Sequence
  Description of Artificial Sequence: Synthetic oligonucleotide
gacaccgagguagauguug

SEQ ID NO: 1445409 - RNA, 19 nt, Artificial Sequence
  Description of Artificial Sequence: Synthetic oligonucleotide
caacaaggguggaauauuc

SEQ ID NO: 1445410 - RNA, 19 nt, Artificial Sequence
  Description of Artificial Sequence: Synthetic oligonucleotide
aaacuccagggauguucgg

SEQ ID NO: 1445411 - RNA, 19 nt, Artificial Sequence
  Description of Artificial Sequence: Synthetic oligonucleotide
cucuaagccggauggcugc

SEQ ID NO: 1445412 - RNA, 19 nt, Artificial Sequence
  Description of Artificial Sequence: Synthetic oligonucleotide
cugucagaaaucugacuug

SEQ ID NO: 1445413 - RNA, 19 nt, Artificial Sequence
  Description of Artificial Sequence: Synthetic oligonucleotide
uuccugucagaaaucugac

SEQ ID NO: 1445414 - RNA, 19 nt, Artificial Sequence
  Description of Artificial Sequence: Synthetic oligonucleotide
ugccugaugguacugucau

SEQ ID NO: 1445415 - RNA, 19 nt, Artificial Sequence
  Description of Artificial Sequence: Synthetic oligonucleotide
ggcaauacucgauggaaug

SEQ ID NO: 1445416 - RNA, 19 nt, Artificial Sequence
  Description of Artificial Sequence: Synthetic oligonucleotide
ggugccugcaccaacguag

SEQ ID NO: 1445417 - RNA, 19 nt, Artificial Sequence
  Description of Artificial Sequence: Synthetic oligonucleotide
ggagaggcguaucuuacag

SEQ ID NO: 1445418 - RNA, 19 nt, Artificial Sequence
  Description of Artificial Sequence: Synthetic oligonucleotide
augcuagccacuuguagau

SEQ ID NO: 1445419 - RNA, 19 nt, Artificial Sequence
  Description of Artificial Sequence: Synthetic oligonucleotide
agacacguuccacccagag

SEQ ID NO: 1445420 - RNA, 19 nt, Artificial Sequence
  Description of Artificial Sequence: Synthetic oligonucleotide
caucagacagcugugcaug

SEQ ID NO: 1445421 - RNA, 19 nt, Artificial Sequence
  Description of Artificial Sequence: Synthetic oligonucleotide
uggcagacacguuccaccc

SEQ ID NO: 1445422 - RNA, 19 nt, Artificial Sequence
  Description of Artificial Sequence: Synthetic oligonucleotide
ugccgaguaugcuagccac

SEQ ID NO: 1445423 - RNA, 19 nt, Artificial Sequence
  Description of Artificial Sequence: Synthetic oligonucleotide
uaaccgcuccggcucaugc

SEQ ID NO: 1445424 - RNA, 19 nt, Artificial Sequence
  Description of Artificial Sequence: Synthetic oligonucleotide
uaagccggauggcugcagc

SEQ ID NO: 1445425 - RNA, 19 nt, Artificial Sequence
  Description of Artificial Sequence: Synthetic oligonucleotide
aaggcguauggcauggaga

SEQ ID NO: 1445426 - RNA, 19 nt, Artificial Sequence
  Description of Artificial Sequence: Synthetic oligonucleotide
agugacaccaaaagucaug

SEQ ID NO: 1445427 - RNA, 19 nt, Artificial Sequence
  Description of Artificial Sequence: Synthetic oligonucleotide
cauuuggcugaaucauaag

SEQ ID NO: 1445428 - RNA, 19 nt, Artificial Sequence
  Description of Artificial Sequence: Synthetic oligonucleotide
caaguguguaaccgcuccg

SEQ ID NO: 1445429 - RNA, 19 nt, Artificial Sequence
  Description of Artificial Sequence: Synthetic oligonucleotide
caguacaucagacagcugu

SEQ ID NO: 1445430 - RNA, 19 nt, Artificial Sequence
  Description of Artificial Sequence: Synthetic oligonucleotide
caaaguccuacugugccug

SEQ ID NO: 1445431 - RNA, 19 nt, Artificial Sequence
  Description of Artificial Sequence: Synthetic oligonucleotide
cuuacagaaucauuuggcu

SEQ ID NO: 1445432 - RNA, 19 nt, Artificial Sequence
  Description of Artificial Sequence: Synthetic oligonucleotide
ggcuagguuccaaauaggg

SEQ ID NO: 1445433 - RNA, 19 nt, Artificial Sequence
  Description of Artificial Sequence: Synthetic oligonucleotide
gaugguacugucauuccaa

SEQ ID NO: 1445434 - RNA, 19 nt, Artificial Sequence
  Description of Artificial Sequence: Synthetic oligonucleotide
auguggaucaugcuauguu

SEQ ID NO: 1445435 - RNA, 19 nt, Artificial Sequence
  Description of Artificial Sequence: Synthetic oligonucleotide
ccaaauagggucaaugcca

SEQ ID NO: 1445436 - RNA, 19 nt, Artificial Sequence
  Description of Artificial Sequence: Synthetic oligonucleotide
ccaaagauagcagagcaug

SEQ ID NO: 1445437 - RNA, 19 nt, Artificial Sequence
  Description of Artificial Sequence: Synthetic oligonucleotide
ucugccgaguaugcuagcc

SEQ ID NO: 1445438 - RNA, 19 nt, Artificial Sequence
  Description of Artificial Sequence: Synthetic oligonucleotide
caugugaauaauuccuaaa

SEQ ID NO: 1445439 - RNA, 19 nt, Artificial Sequence
  Description of Artificial Sequence: Synthetic oligonucleotide
accaaaagucaugugaaua

SEQ ID NO: 1445440 - RNA, 19 nt, Artificial Sequence
  Description of Artificial Sequence: Synthetic oligonucleotide
gggacggacaccgagguag

SEQ ID NO: 1445441 - RNA, 19 nt, Artificial Sequence
  Description of Artificial Sequence: Synthetic oligonucleotide
ccuuacaaguguguaaccg

SEQ ID NO: 1445442 - RNA, 19 nt, Artificial Sequence
  Description of Artificial Sequence: Synthetic oligonucleotide
caugucacuucccggcagc

SEQ ID NO: 1445443 - RNA, 19 nt, Artificial Sequence
  Description of Artificial Sequence: Synthetic oligonucleotide
aacaugaggagaggcguau

SEQ ID NO: 1445444 - RNA, 19 nt, Artificial Sequence
  Description of Artificial Sequence: Synthetic oligonucleotide
aacccagugaaggcguaug

SEQ ID NO: 1445445 - RNA, 19 nt, Artificial Sequence
  Description of Artificial Sequence: Synthetic oligonucleotide
aguccuacugugccugaug

SEQ ID NO: 1445446 - RNA, 19 nt, Artificial Sequence
  Description of Artificial Sequence: Synthetic oligonucleotide
aauacucgauggaauggau

SEQ ID NO: 1445447 - RNA, 19 nt, Artificial Sequence
  Description of Artificial Sequence: Synthetic oligonucleotide
caaagauagcagagcauga

SEQ ID NO: 1445448 - RNA, 19 nt, Artificial Sequence
  Description of Artificial Sequence: Synthetic oligonucleotide
cuuccaugcgguugcuccc

SEQ ID NO: 1445449 - RNA, 19 nt, Artificial Sequence
  Description of Artificial Sequence: Synthetic oligonucleotide
aucaugcuauguugucauc

SEQ ID NO: 1445450 - RNA, 19 nt, Artificial Sequence
  Description of Artificial Sequence: Synthetic oligonucleotide
aaaggguaggggccucgga

SEQ ID NO: 1445451 - RNA, 19 nt, Artificial Sequence
  Description of Artificial Sequence: Synthetic oligonucleotide
gaaggugaggcgguuugug

SEQ ID NO: 1445452 - RNA, 19 nt, Artificial Sequence
  Description of Artificial Sequence: Synthetic oligonucleotide
uacaaguguguaaccgcuc

SEQ ID NO: 1445453 - RNA, 19 nt, Artificial Sequence
  Description of Artificial Sequence: Synthetic oligonucleotide
uggaucaugcuauguuguc

SEQ ID NO: 1445454 - RNA, 19 nt, Artificial Sequence
  Description of Artificial Sequence: Synthetic oligonucleotide
ucaacaaggguggaauauu

SEQ ID NO: 1445455 - RNA, 19 nt, Artificial Sequence
  Description of Artificial Sequence: Synthetic oligonucleotide
aucucuaagccggauggcu

SEQ ID NO: 1445456 - RNA, 19 nt, Artificial Sequence
  Description of Artificial Sequence: Synthetic oligonucleotide
gugguuaaauauucccaga

SEQ ID NO: 1445457 - RNA, 19 nt, Artificial Sequence
  Description of Artificial Sequence: Synthetic oligonucleotide
uccuuccuuacaagugugu

SEQ ID NO: 1445458 - RNA, 19 nt, Artificial Sequence
  Description of Artificial Sequence: Synthetic oligonucleotide
ugaaggaauugaggaaggu

SEQ ID NO: 1445459 - RNA, 19 nt, Artificial Sequence
  Description of Artificial Sequence: Synthetic oligonucleotide
gcaauacucgauggaaugg

SEQ ID NO: 1445460 - RNA, 19 nt, Artificial Sequence
  Description of Artificial Sequence: Synthetic oligonucleotide
guauggcauggagaaaugc

SEQ ID NO: 1445461 - RNA, 19 nt, Artificial Sequence
  Description of Artificial Sequence: Synthetic oligonucleotide
aggguggaauauuccuguc

SEQ ID NO: 1445462 - RNA, 19 nt, Artificial Sequence
  Description of Artificial Sequence: Synthetic oligonucleotide
aaaguccuacugugccuga

SEQ ID NO: 1445463 - RNA, 19 nt, Artificial Sequence
  Description of Artificial Sequence: Synthetic oligonucleotide
ugugccugaugguacuguc

SEQ ID NO: 1445464 - RNA, 19 nt, Artificial Sequence
  Description of Artificial Sequence: Synthetic oligonucleotide
gcugcagcaauguggauca

SEQ ID NO: 1445465 - RNA, 19 nt, Artificial Sequence
  Description of Artificial Sequence: Synthetic oligonucleotide
aauguaacguuggcauaau

SEQ ID NO: 1445466 - RNA, 19 nt, Artificial Sequence
  Description of Artificial Sequence: Synthetic oligonucleotide
uaggugguguccacacgca

SEQ ID NO: 1445467 - RNA, 19 nt, Artificial Sequence
  Description of Artificial Sequence: Synthetic oligonucleotide
uccucuaaucuuacacuuu

SEQ ID NO: 1445468 - RNA, 19 nt, Artificial Sequence
  Description of Artificial Sequence: Synthetic oligonucleotide
aauggauggucugcgucau

SEQ ID NO: 1445469 - RNA, 19 nt, Artificial Sequence
  Description of Artificial Sequence: Synthetic oligonucleotide
aggggccucggaaaacucc

SEQ ID NO: 1445470 - RNA, 19 nt, Artificial Sequence
  Description of Artificial Sequence: Synthetic oligonucleotide
uuucuccucuaaucuuaca

SEQ ID NO: 1445471 - RNA, 19 nt, Artificial Sequence
  Description of Artificial Sequence: Synthetic oligonucleotide
uggacaugugccugcccug

SEQ ID NO: 1445472 - RNA, 19 nt, Artificial Sequence
  Description of Artificial Sequence: Synthetic oligonucleotide
ugucauuccaaagcaccau

SEQ ID NO: 1445473 - RNA, 19 nt, Artificial Sequence
  Description of Artificial Sequence: Synthetic oligonucleotide
ggaauugaggaaggugagg

SEQ ID NO: 1445474 - RNA, 19 nt, Artificial Sequence
  Description of Artificial Sequence: Synthetic oligonucleotide
ugugucucgcuggauggga

SEQ ID NO: 1445475 - RNA, 19 nt, Artificial Sequence
  Description of Artificial Sequence: Synthetic oligonucleotide
gcuauguugucaucauuac

SEQ ID NO: 1445476 - RNA, 19 nt, Artificial Sequence
  Description of Artificial Sequence: Synthetic oligonucleotide
gaggagaggcguaucuuac

SEQ ID NO: 1445477 - RNA, 19 nt, Artificial Sequence
  Description of Artificial Sequence: Synthetic oligonucleotide
gcaaagaaaccucuuccuc

SEQ ID NO: 1445478 - RNA, 19 nt, Artificial Sequence
  Description of Artificial Sequence: Synthetic oligonucleotide
aggaagaguggcuuuccua

SEQ ID NO: 1445479 - RNA, 19 nt, Artificial Sequence
  Description of Artificial Sequence: Synthetic oligonucleotide
caaagcaccaucuuauguu

SEQ ID NO: 1445480 - RNA, 19 nt, Artificial Sequence
  Description of Artificial Sequence: Synthetic oligonucleotide
ccucacaugucacuucccg

SEQ ID NO: 1445481 - RNA, 19 nt, Artificial Sequence
  Description of Artificial Sequence: Synthetic oligonucleotide
cauaaaucucuaagccgga

SEQ ID NO: 1445482 - RNA, 19 nt, Artificial Sequence
  Description of Artificial Sequence: Synthetic oligonucleotide
caauacucgauggaaugga

SEQ ID NO: 1445483 - RNA, 19 nt, Artificial Sequence
  Description of Artificial Sequence: Synthetic oligonucleotide
aggagaggcguaucuuaca

SEQ ID NO: 1445484 - RNA, 19 nt, Artificial Sequence
  Description of Artificial Sequence: Synthetic oligonucleotide
aaaucugacuugagugaau

SEQ ID NO: 1445485 - RNA, 19 nt, Artificial Sequence
  Description of Artificial Sequence: Synthetic oligonucleotide
ucucgcuggaugggaacag

SEQ ID NO: 1445486 - RNA, 19 nt, Artificial Sequence
  Description of Artificial Sequence: Synthetic oligonucleotide
uggaauggauggucugcgu

SEQ ID NO: 1445487 - RNA, 19 nt, Artificial Sequence
  Description of Artificial Sequence: Synthetic oligonucleotide
cuguguccgaaguggugag

SEQ ID NO: 1445488 - RNA, 19 nt, Artificial Sequence
  Description of Artificial Sequence: Synthetic oligonucleotide
cucuagaggucucugccga

SEQ ID NO: 1445489 - RNA, 19 nt, Artificial Sequence
  Description of Artificial Sequence: Synthetic oligonucleotide
ggaacaaauuuggugccug

SEQ ID NO: 1445490 - RNA, 19 nt, Artificial Sequence
  Description of Artificial Sequence: Synthetic oligonucleotide
ggaacauguuaaugaacuc

SEQ ID NO: 1445491 - RNA, 19 nt, Artificial Sequence
  Description of Artificial Sequence: Synthetic oligonucleotide
ggaauggauggucugcguc

SEQ ID NO: 1445492 - RNA, 19 nt, Artificial Sequence
  Description of Artificial Sequence: Synthetic oligonucleotide
gcuagccacuuguagauga

SEQ ID NO: 1445493 - RNA, 19 nt, Artificial Sequence
  Description of Artificial Sequence: Synthetic oligonucleotide
gcaacugcgcccauugugc

SEQ ID NO: 1445494 - RNA, 19 nt, Artificial Sequence
  Description of Artificial Sequence: Synthetic oligonucleotide
acguagaauuuguucugaa

SEQ ID NO: 1445495 - RNA, 19 nt, Artificial Sequence
  Description of Artificial Sequence: Synthetic oligonucleotide
aagcaacugcgcccauugu

SEQ ID NO: 1445496 - RNA, 19 nt, Artificial Sequence
  Description of Artificial Sequence: Synthetic oligonucleotide
ugaggcgguuuguggcuag

SEQ ID NO: 1445497 - RNA, 19 nt, Artificial Sequence
  Description of Artificial Sequence: Synthetic oligonucleotide
auaaaucucuaagccggau

SEQ ID NO: 1445498 - RNA, 19 nt, Artificial Sequence
  Description of Artificial Sequence: Synthetic oligonucleotide
caaaaggguaggggccucg

SEQ ID NO: 1445499 - RNA, 19 nt, Artificial Sequence
  Description of Artificial Sequence: Synthetic oligonucleotide
uccgaaguggugagcuuua

SEQ ID NO: 1445500 - RNA, 19 nt, Artificial Sequence
  Description of Artificial Sequence: Synthetic oligonucleotide
ggacugacagcacggugag

SEQ ID NO: 1445501 - RNA, 19 nt, Artificial Sequence
  Description of Artificial Sequence: Synthetic oligonucleotide
aacacucucuggacaugug

SEQ ID NO: 1445502 - RNA, 19 nt, Artificial Sequence
  Description of Artificial Sequence: Synthetic oligonucleotide
ggauguucggguccagcug

SEQ ID NO: 1445503 - RNA, 19 nt, Artificial Sequence
  Description of Artificial Sequence: Synthetic oligonucleotide
uuccaugcgguugcucccc

SEQ ID NO: 1445504 - RNA, 19 nt, Artificial Sequence
  Description of Artificial Sequence: Synthetic oligonucleotide
aggaacaaauuuggugccu

SEQ ID NO: 1445505 - RNA, 19 nt, Artificial Sequence
  Description of Artificial Sequence: Synthetic oligonucleotide
accaucuuauguuccucuu

SEQ ID NO: 1445506 - RNA, 19 nt, Artificial Sequence
  Description of Artificial Sequence: Synthetic oligonucleotide
uggucugcgucaucaggau

SEQ ID NO: 1445507 - RNA, 19 nt, Artificial Sequence
  Description of Artificial Sequence: Synthetic oligonucleotide
cauuuuagcuagccaucca

SEQ ID NO: 1445508 - RNA, 19 nt, Artificial Sequence
  Description of Artificial Sequence: Synthetic oligonucleotide
acaugaggagaggcguauc

SEQ ID NO: 1445509 - RNA, 19 nt, Artificial Sequence
  Description of Artificial Sequence: Synthetic oligonucleotide
gucucugccgaguaugcua

SEQ ID NO: 1445510 - RNA, 19 nt, Artificial Sequence
  Description of Artificial Sequence: Synthetic oligonucleotide
ugcgguugcuccccucuuc

SEQ ID NO: 1445511 - RNA, 19 nt, Artificial Sequence
  Description of Artificial Sequence: Synthetic oligonucleotide
acggacaccgagguagaug

SEQ ID NO: 1445512 - RNA, 19 nt, Artificial Sequence
  Description of Artificial Sequence: Synthetic oligonucleotide
cugaaucauaaggcaauca

SEQ ID NO: 1445513 - RNA, 19 nt, Artificial Sequence
  Description of Artificial Sequence: Synthetic oligonucleotide
cuagccauccaacugguuu

SEQ ID NO: 1445514 - RNA, 19 nt, Artificial Sequence
  Description of Artificial Sequence: Synthetic oligonucleotide
ggccucggaaaacuccagg

SEQ ID NO: 1445515 - RNA, 19 nt, Artificial Sequence
  Description of Artificial Sequence: Synthetic oligonucleotide
gcucaugccaaagcaacug

SEQ ID NO: 1445516 - RNA, 19 nt, Artificial Sequence
  Description of Artificial Sequence: Synthetic oligonucleotide
cacgcaucagcauggccca

SEQ ID NO: 1445517 - RNA, 19 nt, Artificial Sequence
  Description of Artificial Sequence: Synthetic oligonucleotide
cacacgcaucagcauggcc

SEQ ID NO: 1445518 - RNA, 19 nt, Artificial Sequence
  Description of Artificial Sequence: Synthetic oligonucleotide
cuccggcucaugccaaagc

SEQ ID NO: 1445519 - RNA, 19 nt, Artificial Sequence
  Description of Artificial Sequence: Synthetic oligonucleotide
gguaaaggccaugugucuc

SEQ ID NO: 1445520 - RNA, 19 nt, Artificial Sequence
  Description of Artificial Sequence: Synthetic oligonucleotide
gggacugacagcacgguga

SEQ ID NO: 1445521 - RNA, 19 nt, Artificial Sequence
  Description of Artificial Sequence: Synthetic oligonucleotide
ucuaagccggauggcugca

SEQ ID NO: 1445522 - RNA, 19 nt, Artificial Sequence
  Description of Artificial Sequence: Synthetic oligonucleotide
caggcaauacucgauggaa

SEQ ID NO: 1445523 - RNA, 19 nt, Artificial Sequence
  Description of Artificial Sequence: Synthetic oligonucleotide
ggguggaauauuccuguca

SEQ ID NO: 1445524 - RNA, 19 nt, Artificial Sequence
  Description of Artificial Sequence: Synthetic oligonucleotide
cucuaaucuuacacuuuaa

SEQ ID NO: 1445525 - RNA, 19 nt, Artificial Sequence
  Description of Artificial Sequence: Synthetic oligonucleotide
ccacaguacaucagacagc

SEQ ID NO: 1445526 - RNA, 19 nt, Artificial Sequence
  Description of Artificial Sequence: Synthetic oligonucleotide
auguaacguuggcauaauu

SEQ ID NO: 1445527 - RNA, 19 nt, Artificial Sequence
  Description of Artificial Sequence: Synthetic oligonucleotide
caaucaacaaggguggaau

SEQ ID NO: 1445528 - RNA, 19 nt, Artificial Sequence
  Description of Artificial Sequence: Synthetic oligonucleotide
ggaucaugcuauguuguca

SEQ ID NO: 1445529 - RNA, 19 nt, Artificial Sequence
  Description of Artificial Sequence: Synthetic oligonucleotide
ugcuagccacuuguagaug

SEQ ID NO: 1445530 - RNA, 19 nt, Artificial Sequence
  Description of Artificial Sequence: Synthetic oligonucleotide
aaggggaaucaaguaucua

SEQ ID NO: 1445531 - RNA, 19 nt, Artificial Sequence
  Description of Artificial Sequence: Synthetic oligonucleotide
ucaacccagugaaggcgua

SEQ ID NO: 1445532 - RNA, 19 nt, Artificial Sequence
  Description of Artificial Sequence: Synthetic oligonucleotide
cuguaacaugauaguucuc

SEQ ID NO: 1445533 - RNA, 19 nt, Artificial Sequence
  Description of Artificial Sequence: Synthetic oligonucleotide
caugaggagaggcguaucu

SEQ ID NO: 1445534 - RNA, 19 nt, Artificial Sequence
  Description of Artificial Sequence: Synthetic oligonucleotide
gaccccguagguggugucc

SEQ ID NO: 1445535 - RNA, 19 nt, Artificial Sequence
  Description of Artificial Sequence: Synthetic oligonucleotide
agaccccguaggugguguc

SEQ ID NO: 1445536 - RNA, 19 nt, Artificial Sequence
  Description of Artificial Sequence: Synthetic oligonucleotide
uagccacuuguagaugauc

SEQ ID NO: 1445537 - RNA, 19 nt, Artificial Sequence
  Description of Artificial Sequence: Synthetic oligonucleotide
aggcaauacucgauggaau

SEQ ID NO: 1445538 - RNA, 19 nt, Artificial Sequence
  Description of Artificial Sequence: Synthetic oligonucleotide
uaggggccucggaaaacuc

SEQ ID NO: 1445539 - RNA, 19 nt, Artificial Sequence
  Description of Artificial Sequence: Synthetic oligonucleotide
ugucacuucccggcagccu

SEQ ID NO: 1445540 - RNA, 19 nt, Artificial Sequence
  Description of Artificial Sequence: Synthetic oligonucleotide
ucggguccagcugcaaagu

SEQ ID NO: 1445541 - RNA, 19 nt, Artificial Sequence
  Description of Artificial Sequence: Synthetic oligonucleotide
cuggacaugugccugcccu

SEQ ID NO: 1445542 - RNA, 19 nt, Artificial Sequence
  Description of Artificial Sequence: Synthetic oligonucleotide
cuccucuaaucuuacacuu

SEQ ID NO: 1445543 - RNA, 19 nt, Artificial Sequence
  Description of Artificial Sequence: Synthetic oligonucleotide
cugccgaguaugcuagcca

SEQ ID NO: 1445544 - RNA, 19 nt, Artificial Sequence
  Description of Artificial Sequence: Synthetic oligonucleotide
guggaucaugcuauguugu

SEQ ID NO: 1445545 - RNA, 19 nt, Artificial Sequence
  Description of Artificial Sequence: Synthetic oligonucleotide
ugcuccccucuucuauguc

SEQ ID NO: 1445546 - RNA, 19 nt, Artificial Sequence
  Description of Artificial Sequence: Synthetic oligonucleotide
aguaugcuagccacuugua

SEQ ID NO: 1445547 - RNA, 19 nt, Artificial Sequence
  Description of Artificial Sequence: Synthetic oligonucleotide
guucggguccagcugcaaa

SEQ ID NO: 1445548 - RNA, 19 nt, Artificial Sequence
  Description of Artificial Sequence: Synthetic oligonucleotide
ccugucagaaaucugacuu

SEQ ID NO: 1445549 - RNA, 19 nt, Artificial Sequence
  Description of Artificial Sequence: Synthetic oligonucleotide
cuaagccggauggcugcag

SEQ ID NO: 1445550 - RNA, 19 nt, Artificial Sequence
  Description of Artificial Sequence: Synthetic oligonucleotide
gagcuguacauggcagaca

SEQ ID NO: 1445551 - RNA, 19 nt, Artificial Sequence
  Description of Artificial Sequence: Synthetic oligonucleotide
ccgagguagauguugaacu

SEQ ID NO: 1445552 - RNA, 19 nt, Artificial Sequence
  Description of Artificial Sequence: Synthetic oligonucleotide
caacugcgcccauugugca

SEQ ID NO: 1445553 - RNA, 19 nt, Artificial Sequence
  Description of Artificial Sequence: Synthetic oligonucleotide
gucucgcuggaugggaaca

SEQ ID NO: 1445554 - RNA, 19 nt, Artificial Sequence
  Description of Artificial Sequence: Synthetic oligonucleotide
ccucuaaucuuacacuuua

SEQ ID NO: 1445555 - RNA, 19 nt, Artificial Sequence
  Description of Artificial Sequence: Synthetic oligonucleotide
caaaagucaugugaauaau

SEQ ID NO: 1445556 - RNA, 19 nt, Artificial Sequence
  Description of Artificial Sequence: Synthetic oligonucleotide
caacaugaggagaggcgua

SEQ ID NO: 1445557 - RNA, 19 nt, Artificial Sequence
  Description of Artificial Sequence: Synthetic oligonucleotide
gcugaaucauaaggcaauc

SEQ ID NO: 1445558 - RNA, 19 nt, Artificial Sequence
  Description of Artificial Sequence: Synthetic oligonucleotide
gccaaagcaacugcgccca

SEQ ID NO: 1445559 - RNA, 19 nt, Artificial Sequence
  Description of Artificial Sequence: Synthetic oligonucleotide
ugccugcaccaacguagaa

SEQ ID NO: 1445560 - RNA, 19 nt, Artificial Sequence
  Description of Artificial Sequence: Synthetic oligonucleotide
ugaaggcguauggcaugga

SEQ ID NO: 1445561 - RNA, 19 nt, Artificial Sequence
  Description of Artificial Sequence: Synthetic oligonucleotide
gugccugaugguacuguca

SEQ ID NO: 1445562 - RNA, 19 nt, Artificial Sequence
  Description of Artificial Sequence: Synthetic oligonucleotide
guguaaccgcuccggcuca

SEQ ID NO: 1445563 - RNA, 19 nt, Artificial Sequence
  Description of Artificial Sequence: Synthetic oligonucleotide
accccguagguggugucca

SEQ ID NO: 1445564 - RNA, 19 nt, Artificial Sequence
  Description of Artificial Sequence: Synthetic oligonucleotide
ccucggaaaacuccaggga

SEQ ID NO: 1445565 - RNA, 19 nt, Artificial Sequence
  Description of Artificial Sequence: Synthetic oligonucleotide
ggaugggaacaggaacaug

SEQ ID NO: 1445566 - RNA, 19 nt, Artificial Sequence
  Description of Artificial Sequence: Synthetic oligonucleotide
guuuguggcuagguuccaa

SEQ ID NO: 1445567 - RNA, 19 nt, Artificial Sequence
  Description of Artificial Sequence: Synthetic oligonucleotide
auucccagagugacaccaa

SEQ ID NO: 1445568 - RNA, 19 nt, Artificial Sequence
  Description of Artificial Sequence: Synthetic oligonucleotide
uguucggguccagcugcaa

SEQ ID NO: 1445569 - RNA, 19 nt, Artificial Sequence
  Description of Artificial Sequence: Synthetic oligonucleotide
gcaaucaacaaggguggaa

SEQ ID NO: 1445570 - RNA, 19 nt, Artificial Sequence
  Description of Artificial Sequence: Synthetic oligonucleotide
gcuagguuccaaauagggu

SEQ ID NO: 1445571 - RNA, 19 nt, Artificial Sequence
  Description of Artificial Sequence: Synthetic oligonucleotide
agccggauggcugcagcaa

SEQ ID NO: 1445572 - RNA, 19 nt, Artificial Sequence
  Description of Artificial Sequence: Synthetic oligonucleotide
guaaccgcuccggcucaug

SEQ ID NO: 1445573 - RNA, 19 nt, Artificial Sequence
  Description of Artificial Sequence: Synthetic oligonucleotide
acaguacaucagacagcug

SEQ ID NO: 1445574 - RNA, 19 nt, Artificial Sequence
  Description of Artificial Sequence: Synthetic oligonucleotide
aggcgguuuguggcuaggu

SEQ ID NO: 1445575 - RNA, 19 nt, Artificial Sequence
  Description of Artificial Sequence: Synthetic oligonucleotide
ccuacugugccugauggua

SEQ ID NO: 1445576 - RNA, 19 nt, Artificial Sequence
  Description of Artificial Sequence: Synthetic oligonucleotide
ggguaaaggccaugugucu

SEQ ID NO: 1445577 - RNA, 19 nt, Artificial Sequence
  Description of Artificial Sequence: Synthetic oligonucleotide
cacguuccacccagagcca

SEQ ID NO: 1445578 - RNA, 19 nt, Artificial Sequence
  Description of Artificial Sequence: Synthetic oligonucleotide
ggugaggcgguuuguggcu

SEQ ID NO: 1445579 - RNA, 19 nt, Artificial Sequence
  Description of Artificial Sequence: Synthetic oligonucleotide
ggcugaaucauaaggcaau

SEQ ID NO: 1445580 - RNA, 19 nt, Artificial Sequence
  Description of Artificial Sequence: Synthetic oligonucleotide
gguaggggccucggaaaac

SEQ ID NO: 1445581 - RNA, 19 nt, Artificial Sequence
  Description of Artificial Sequence: Synthetic oligonucleotide
uguaaccgcuccggcucau

SEQ ID NO: 1445582 - RNA, 19 nt, Artificial Sequence
  Description of Artificial Sequence: Synthetic oligonucleotide
acgcaucagcauggcccac

SEQ ID NO: 1445583 - RNA, 19 nt, Artificial Sequence
  Description of Artificial Sequence: Synthetic oligonucleotide
cagggacggacaccgaggu

SEQ ID NO: 1445584 - RNA, 19 nt, Artificial Sequence
  Description of Artificial Sequence: Synthetic oligonucleotide
ggccaugugucucgcugga

SEQ ID NO: 1445585 - RNA, 19 nt, Artificial Sequence
  Description of Artificial Sequence: Synthetic oligonucleotide
agggacggacaccgaggua

SEQ ID NO: 1445586 - RNA, 19 nt, Artificial Sequence
  Description of Artificial Sequence: Synthetic oligonucleotide
ggcagacacguuccaccca

SEQ ID NO: 1445587 - RNA, 19 nt, Artificial Sequence
  Description of Artificial Sequence: Synthetic oligonucleotide
caccgagguagauguugaa

SEQ ID NO: 1445588 - RNA, 19 nt, Artificial Sequence
  Description of Artificial Sequence: Synthetic oligonucleotide
gugucucgcuggaugggaa

SEQ ID NO: 1445589 - RNA, 19 nt, Artificial Sequence
  Description of Artificial Sequence: Synthetic oligonucleotide
gcaccaacguagaauuugu

SEQ ID NO: 1445590 - RNA, 19 nt, Artificial Sequence
  Description of Artificial Sequence: Synthetic oligonucleotide
cagcaauguggaucaugcu

SEQ ID NO: 1445591 - RNA, 19 nt, Artificial Sequence
  Description of Artificial Sequence: Synthetic oligonucleotide
gaggcguaucuuacagaau

SEQ ID NO: 1445592 - RNA, 19 nt, Artificial Sequence
  Description of Artificial Sequence: Synthetic oligonucleotide
ggcaaucaacaagggugga

SEQ ID NO: 1445593 - RNA, 19 nt, Artificial Sequence
  Description of Artificial Sequence: Synthetic oligonucleotide
cgaguaugcuagccacuug

SEQ ID NO: 1445594 - RNA, 19 nt, Artificial Sequence
  Description of Artificial Sequence: Synthetic oligonucleotide
gccaaaaggguaggggccu

SEQ ID NO: 1445595 - RNA, 19 nt, Artificial Sequence
  Description of Artificial Sequence: Synthetic oligonucleotide
gugaggcgguuuguggcua

SEQ ID NO: 1445596 - RNA, 19 nt, Artificial Sequence
  Description of Artificial Sequence: Synthetic oligonucleotide
gccugcaccaacguagaau

SEQ ID NO: 1445597 - RNA, 19 nt, Artificial Sequence
  Description of Artificial Sequence: Synthetic oligonucleotide
ggcucaugccaaagcaacu

SEQ ID NO: 1445598 - RNA, 19 nt, Artificial Sequence
  Description of Artificial Sequence: Synthetic oligonucleotide
cagaguggcuggagcugua

SEQ ID NO: 1445599 - RNA, 19 nt, Artificial Sequence
  Description of Artificial Sequence: Synthetic oligonucleotide
ggacggacaccgagguaga

SEQ ID NO: 1445600 - RNA, 19 nt, Artificial Sequence
  Description of Artificial Sequence: Synthetic oligonucleotide
ggcgguuuguggcuagguu

SEQ ID NO: 1445601 - RNA, 19 nt, Artificial Sequence
  Description of Artificial Sequence: Synthetic oligonucleotide
ccaaaaggguaggggccuc

SEQ ID NO: 1445602 - RNA, 19 nt, Artificial Sequence
  Description of Artificial Sequence: Synthetic oligonucleotide
caggaaucucagggacgga

SEQ ID NO: 1445603 - RNA, 19 nt, Artificial Sequence
  Description of Artificial Sequence: Synthetic oligonucleotide
gacggacaccgagguagau

SEQ ID NO: 1445604 - RNA, 19 nt, Artificial Sequence
  Description of Artificial Sequence: Synthetic oligonucleotide
ccccguaggugguguccac

SEQ ID NO: 1445605 - RNA, 19 nt, Artificial Sequence
  Description of Artificial Sequence: Synthetic oligonucleotide
caacccagugaaggcguau

SEQ ID NO: 1445606 - RNA, 19 nt, Artificial Sequence
  Description of Artificial Sequence: Synthetic oligonucleotide
gccgaguaugcuagccacu

SEQ ID NO: 1445607 - RNA, 19 nt, Artificial Sequence
  Description of Artificial Sequence: Synthetic oligonucleotide
cccuggguaaaggccaugu

SEQ ID NO: 1445608 - RNA, 19 nt, Artificial Sequence
  Description of Artificial Sequence: Synthetic oligonucleotide
cguuggcauaauuuauauu

SEQ ID NO: 1445609 - RNA, 19 nt, Artificial Sequence
  Description of Artificial Sequence: Synthetic oligonucleotide
ccgaguaugcuagccacuu

SEQ ID NO: 1445610 - RNA, 19 nt, Artificial Sequence
  Description of Artificial Sequence: Synthetic oligonucleotide
cagaaucauuuggcugaau

SEQ ID NO: 1445611 - RNA, 19 nt, Artificial Sequence
  Description of Artificial Sequence: Synthetic oligonucleotide
ggaaaacuccagggauguu

SEQ ID NO: 1445612 - RNA, 19 nt, Artificial Sequence
  Description of Artificial Sequence: Synthetic oligonucleotide
ccgcuccggcucaugccaa

SEQ ID NO: 1445613 - RNA, 19 nt, Artificial Sequence
  Description of Artificial Sequence: Synthetic oligonucleotide
gcuagccauccaacugguu

SEQ ID NO: 1445614 - RNA, 19 nt, Artificial Sequence
  Description of Artificial Sequence: Synthetic oligonucleotide
cgguugcuccccucuucua

SEQ ID NO: 1445615 - RNA, 19 nt, Artificial Sequence
  Description of Artificial Sequence: Synthetic oligonucleotide
cugcagcaauguggaucau

SEQ ID NO: 1445616 - RNA, 19 nt, Artificial Sequence
  Description of Artificial Sequence: Synthetic oligonucleotide
ugggaaaucaccaagaacg

SEQ ID NO: 1445617 - RNA, 19 nt, Artificial Sequence
  Description of Artificial Sequence: Synthetic oligonucleotide
aagaugaucgaccucaugc

SEQ ID NO: 1445618 - RNA, 19 nt, Artificial Sequence
  Description of Artificial Sequence: Synthetic oligonucleotide
auaaaggccgucuugaagc

SEQ ID NO: 1445619 - RNA, 19 nt, Artificial Sequence
  Description of Artificial Sequence: Synthetic oligonucleotide
aaccagaacacacacacac

SEQ ID NO: 1445620 - RNA, 19 nt, Artificial Sequence
  Description of Artificial Sequence: Synthetic oligonucleotide
aacacacacacacacacac

SEQ ID NO: 1445621 - RNA, 19 nt, Artificial Sequence
  Description of Artificial Sequence: Synthetic oligonucleotide
caacuuuucauaaaggccg

SEQ ID NO: 1445622 - RNA, 19 nt, Artificial Sequence
  Description of Artificial Sequence: Synthetic oligonucleotide
uuuacugcagcucagcuug

SEQ ID NO: 1445623 - RNA, 19 nt, Artificial Sequence
  Description of Artificial Sequence: Synthetic oligonucleotide
accaacuuuucauaaaggc

SEQ ID NO: 1445624 - RNA, 19 nt, Artificial Sequence
  Description of Artificial Sequence: Synthetic oligonucleotide
gaugagaugggauaguaag

SEQ ID NO: 1445625 - RNA, 19 nt, Artificial Sequence
  Description of Artificial Sequence: Synthetic oligonucleotide
aaaccaccuacuuuagugc

SEQ ID NO: 1445626 - RNA, 19 nt, Artificial Sequence
  Description of Artificial Sequence: Synthetic oligonucleotide
uaucuugcugauaaaauag

SEQ ID NO: 1445627 - RNA, 19 nt, Artificial Sequence
  Description of Artificial Sequence: Synthetic oligonucleotide
aagauaacugcuuuaauau

SEQ ID NO: 1445628 - RNA, 19 nt, Artificial Sequence
  Description of Artificial Sequence: Synthetic oligonucleotide
aaaacaggcgcacuccagc

SEQ ID NO: 1445629 - RNA, 19 nt, Artificial Sequence
  Description of Artificial Sequence: Synthetic oligonucleotide
gaucugauaauacagaaga

SEQ ID NO: 1445630 - RNA, 19 nt, Artificial Sequence
  Description of Artificial Sequence: Synthetic oligonucleotide
agaacacacacacacacac

SEQ ID NO: 1445631 - RNA, 19 nt, Artificial Sequence
  Description of Artificial Sequence: Synthetic oligonucleotide
uuuaaguugcuaauaauaa

SEQ ID NO: 1445632 - RNA, 19 nt, Artificial Sequence
  Description of Artificial Sequence: Synthetic oligonucleotide
uuuuaaguugcuaauaaua

SEQ ID NO: 1445633 - RNA, 19 nt, Artificial Sequence
  Description of Artificial Sequence: Synthetic oligonucleotide
aguacauagcguccaaugc

SEQ ID NO: 1445634 - RNA, 19 nt, Artificial Sequence
  Description of Artificial Sequence: Synthetic oligonucleotide
uccaaugcuaacacuaggg

SEQ ID NO: 1445635 - RNA, 19 nt, Artificial Sequence
  Description of Artificial Sequence: Synthetic oligonucleotide
aaagaagcggccaauuuac

SEQ ID NO: 1445636 - RNA, 19 nt, Artificial Sequence
  Description of Artificial Sequence: Synthetic oligonucleotide
ugauagacgaugcuggacc

SEQ ID NO: 1445637 - RNA, 19 nt, Artificial Sequence
  Description of Artificial Sequence: Synthetic oligonucleotide
ucacauacguguuugaugu

SEQ ID NO: 1445638 - RNA, 19 nt, Artificial Sequence
  Description of Artificial Sequence: Synthetic oligonucleotide
uggacguucgaaaacaggc

SEQ ID NO: 1445639 - RNA, 19 nt, Artificial Sequence
  Description of Artificial Sequence: Synthetic oligonucleotide
uauaucagaaccuccacgu

SEQ ID NO: 1445640 - RNA, 19 nt, Artificial Sequence
  Description of Artificial Sequence: Synthetic oligonucleotide
uaaccagguaaccagaaca

SEQ ID NO: 1445641 - RNA, 19 nt, Artificial Sequence
  Description of Artificial Sequence: Synthetic oligonucleotide
uuacgaauguugaucagag

SEQ ID NO: 1445642 - RNA, 19 nt, Artificial Sequence
  Description of Artificial Sequence: Synthetic oligonucleotide
acgucaaacacguauauca

SEQ ID NO: 1445643 - RNA, 19 nt, Artificial Sequence
  Description of Artificial Sequence: Synthetic oligonucleotide
aaguaauucggcauuuuac

SEQ ID NO: 1445644 - RNA, 19 nt, Artificial Sequence
  Description of Artificial Sequence: Synthetic oligonucleotide
ucagccucaauaaucuggg

SEQ ID NO: 1445645 - RNA, 19 nt, Artificial Sequence
  Description of Artificial Sequence: Synthetic oligonucleotide
ucaaacacguauaucagaa

SEQ ID NO: 1445646 - RNA, 19 nt, Artificial Sequence
  Description of Artificial Sequence: Synthetic oligonucleotide
cauuuugugcacuaggcag

SEQ ID NO: 1445647 - RNA, 19 nt, Artificial Sequence
  Description of Artificial Sequence: Synthetic oligonucleotide
aaagcggugcacaucacgc

SEQ ID NO: 1445648 - RNA, 19 nt, Artificial Sequence
  Description of Artificial Sequence: Synthetic oligonucleotide
uugcugauaaaauaguaac

SEQ ID NO: 1445649 - RNA, 19 nt, Artificial Sequence
  Description of Artificial Sequence: Synthetic oligonucleotide
agcgucucaucccagaugg

SEQ ID NO: 1445650 - RNA, 19 nt, Artificial Sequence
  Description of Artificial Sequence: Synthetic oligonucleotide
aguaauucggcauuuuacu

SEQ ID NO: 1445651 - RNA, 19 nt, Artificial Sequence
  Description of Artificial Sequence: Synthetic oligonucleotide
gaauuccucacuuccaugc

SEQ ID NO: 1445652 - RNA, 19 nt, Artificial Sequence
  Description of Artificial Sequence: Synthetic oligonucleotide
ugaucugauaauacagaag

SEQ ID NO: 1445653 - RNA, 19 nt, Artificial Sequence
  Description of Artificial Sequence: Synthetic oligonucleotide
cauuacucaacgcaugagg

SEQ ID NO: 1445654 - RNA, 19 nt, Artificial Sequence
  Description of Artificial Sequence: Synthetic oligonucleotide
acugcuuuaauauucuuau

SEQ ID NO: 1445655 - RNA, 19 nt, Artificial Sequence
  Description of Artificial Sequence: Synthetic oligonucleotide
aguugcuaauaauaaaugu

SEQ ID NO: 1445656 - RNA, 19 nt, Artificial Sequence
  Description of Artificial Sequence: Synthetic oligonucleotide
uaagcacacgacauuauga

SEQ ID NO: 1445657 - RNA, 19 nt, Artificial Sequence
  Description of Artificial Sequence: Synthetic oligonucleotide
ucuuaucuauuauaaccag

SEQ ID NO: 1445658 - RNA, 19 nt, Artificial Sequence
  Description of Artificial Sequence: Synthetic oligonucleotide
gaagcggccaauuuacugc

SEQ ID NO: 1445659 - RNA, 19 nt, Artificial Sequence
  Description of Artificial Sequence: Synthetic oligonucleotide
uuuagugcuacaccacacc

SEQ ID NO: 1445660 - RNA, 19 nt, Artificial Sequence
  Description of Artificial Sequence: Synthetic oligonucleotide
uuacggaagauguuguccc

SEQ ID NO: 1445661 - RNA, 19 nt, Artificial Sequence
  Description of Artificial Sequence: Synthetic oligonucleotide
gaagauaacugcuuuaaua

SEQ ID NO: 1445662 - RNA, 19 nt, Artificial Sequence
  Description of Artificial Sequence: Synthetic oligonucleotide
aaacaggcgcacuccagcg

SEQ ID NO: 1445663 - RNA, 19 nt, Artificial Sequence
  Description of Artificial Sequence: Synthetic oligonucleotide
uccacguuacggaagaugu

SEQ ID NO: 1445664 - RNA, 19 nt, Artificial Sequence
  Description of Artificial Sequence: Synthetic oligonucleotide
uacucaacgcaugaggagg

SEQ ID NO: 1445665 - RNA, 19 nt, Artificial Sequence
  Description of Artificial Sequence: Synthetic oligonucleotide
agacaaacgccucaggucu

SEQ ID NO: 1445666 - RNA, 19 nt, Artificial Sequence
  Description of Artificial Sequence: Synthetic oligonucleotide
agaagauuuuggcaucagg

SEQ ID NO: 1445667 - RNA, 19 nt, Artificial Sequence
  Description of Artificial Sequence: Synthetic oligonucleotide
uuuggcaucaggugaauuc

SEQ ID NO: 1445668 - RNA, 19 nt, Artificial Sequence
  Description of Artificial Sequence: Synthetic oligonucleotide
uuaaguugcuaauaauaaa

SEQ ID NO: 1445669 - RNA, 19 nt, Artificial Sequence
  Description of Artificial Sequence: Synthetic oligonucleotide
aagaacgucgcucucucga

SEQ ID NO: 1445670 - RNA, 19 nt, Artificial Sequence
  Description of Artificial Sequence: Synthetic oligonucleotide
aucuacucucucuagcuuc

SEQ ID NO: 1445671 - RNA, 19 nt, Artificial Sequence
  Description of Artificial Sequence: Synthetic oligonucleotide
cacgacauuaugaauauca

SEQ ID NO: 1445672 - RNA, 19 nt, Artificial Sequence
  Description of Artificial Sequence: Synthetic oligonucleotide
agguaaccagaacacacac

SEQ ID NO: 1445673 - RNA, 19 nt, Artificial Sequence
  Description of Artificial Sequence: Synthetic oligonucleotide
ucugauaauacagaagaua

SEQ ID NO: 1445674 - RNA, 19 nt, Artificial Sequence
  Description of Artificial Sequence: Synthetic oligonucleotide
uggguagcugaguacauag

SEQ ID NO: 1445675 - RNA, 19 nt, Artificial Sequence
  Description of Artificial Sequence: Synthetic oligonucleotide
gacacgacugguaauaaug

SEQ ID NO: 1445676 - RNA, 19 nt, Artificial Sequence
  Description of Artificial Sequence: Synthetic oligonucleotide
auugaaaccgaggauuuag

SEQ ID NO: 1445677 - RNA, 19 nt, Artificial Sequence
  Description of Artificial Sequence: Synthetic oligonucleotide
cauuuggcauuacucaacg

SEQ ID NO: 1445678 - RNA, 19 nt, Artificial Sequence
  Description of Artificial Sequence: Synthetic oligonucleotide
ugauaauacagaagauaac

SEQ ID NO: 1445679 - RNA, 19 nt, Artificial Sequence
  Description of Artificial Sequence: Synthetic oligonucleotide
ugcacuaggcagaagauuu

SEQ ID NO: 1445680 - RNA, 19 nt, Artificial Sequence
  Description of Artificial Sequence: Synthetic oligonucleotide
ugggauaguaagcacacau

SEQ ID NO: 1445681 - RNA, 19 nt, Artificial Sequence
  Description of Artificial Sequence: Synthetic oligonucleotide
uauucuuaucuauuauaac

SEQ ID NO: 1445682 - RNA, 19 nt, Artificial Sequence
  Description of Artificial Sequence: Synthetic oligonucleotide
uuauaaccagguaaccaga

SEQ ID NO: 1445683 - RNA, 19 nt, Artificial Sequence
  Description of Artificial Sequence: Synthetic oligonucleotide
gaguacauagcguccaaug

SEQ ID NO: 1445684 - RNA, 19 nt, Artificial Sequence
  Description of Artificial Sequence: Synthetic oligonucleotide
uaauucggcauuuuacuaa

SEQ ID NO: 1445685 - RNA, 19 nt, Artificial Sequence
  Description of Artificial Sequence: Synthetic oligonucleotide
auaaccagguaaccagaac

SEQ ID NO: 1445686 - RNA, 19 nt, Artificial Sequence
  Description of Artificial Sequence: Synthetic oligonucleotide
aauaucuugcugauaaaau

SEQ ID NO: 1445687 - RNA, 19 nt, Artificial Sequence
  Description of Artificial Sequence: Synthetic oligonucleotide
gaccaggcuuuguagagcg

SEQ ID NO: 1445688 - RNA, 19 nt, Artificial Sequence
  Description of Artificial Sequence: Synthetic oligonucleotide
aucacauacguguuugaug

SEQ ID NO: 1445689 - RNA, 19 nt, Artificial Sequence
  Description of Artificial Sequence: Synthetic oligonucleotide
ugugcuuggggccaucuac

SEQ ID NO: 1445690 - RNA, 19 nt, Artificial Sequence
  Description of Artificial Sequence: Synthetic oligonucleotide
gacguucgaaaacaggcgc

SEQ ID NO: 1445691 - RNA, 19 nt, Artificial Sequence
  Description of Artificial Sequence: Synthetic oligonucleotide
uucauaaaggccgucuuga

SEQ ID NO: 1445692 - RNA, 19 nt, Artificial Sequence
  Description of Artificial Sequence: Synthetic oligonucleotide
cacacacacacacacaaac

SEQ ID NO: 1445693 - RNA, 19 nt, Artificial Sequence
  Description of Artificial Sequence: Synthetic oligonucleotide
uuacucaacgcaugaggag

SEQ ID NO: 1445694 - RNA, 19 nt, Artificial Sequence
  Description of Artificial Sequence: Synthetic oligonucleotide
guagugggaaaucaccaag

SEQ ID NO: 1445695 - RNA, 19 nt, Artificial Sequence
  Description of Artificial Sequence: Synthetic oligonucleotide
cuuugugaucugauaauac

SEQ ID NO: 1445696 - RNA, 19 nt, Artificial Sequence
  Description of Artificial Sequence: Synthetic oligonucleotide
cacacacacacaaaccacc

SEQ ID NO: 1445697 - RNA, 19 nt, Artificial Sequence
  Description of Artificial Sequence: Synthetic oligonucleotide
uacguguuugaugugaaga

SEQ ID NO: 1445698 - RNA, 19 nt, Artificial Sequence
  Description of Artificial Sequence: Synthetic oligonucleotide
ucuacgucaaacacguaua

SEQ ID NO: 1445699 - RNA, 19 nt, Artificial Sequence
  Description of Artificial Sequence: Synthetic oligonucleotide
ugguagugggaaaucacca

SEQ ID NO: 1445700 - RNA, 19 nt, Artificial Sequence
  Description of Artificial Sequence: Synthetic oligonucleotide
ucuacuggguagcugagua

SEQ ID NO: 1445701 - RNA, 19 nt, Artificial Sequence
  Description of Artificial Sequence: Synthetic oligonucleotide
uuuuaagcacacgacauua

SEQ ID NO: 1445702 - RNA, 19 nt, Artificial Sequence
  Description of Artificial Sequence: Synthetic oligonucleotide
agaaccuccacguuacgga

SEQ ID NO: 1445703 - RNA, 19 nt, Artificial Sequence
  Description of Artificial Sequence: Synthetic oligonucleotide
cugguagugggaaaucacc

SEQ ID NO: 1445704 - RNA, 19 nt, Artificial Sequence
  Description of Artificial Sequence: Synthetic oligonucleotide
acacgacugguaauaaugc

SEQ ID NO: 1445705 - RNA, 19 nt, Artificial Sequence
  Description of Artificial Sequence: Synthetic oligonucleotide
uucgaaaacaggcgcacuc

SEQ ID NO: 1445706 - RNA, 19 nt, Artificial Sequence
  Description of Artificial Sequence: Synthetic oligonucleotide
cuacuuuagugcuacacca

SEQ ID NO: 1445707 - RNA, 19 nt, Artificial Sequence
  Description of Artificial Sequence: Synthetic oligonucleotide
uagugggaaaucaccaaga

SEQ ID NO: 1445708 - RNA, 19 nt, Artificial Sequence
  Description of Artificial Sequence: Synthetic oligonucleotide
aaccaccuacuuuagugcu

SEQ ID NO: 1445709 - RNA, 19 nt, Artificial Sequence
  Description of Artificial Sequence: Synthetic oligonucleotide
cauaaaggccgucuugaag

SEQ ID NO: 1445710 - RNA, 19 nt, Artificial Sequence
  Description of Artificial Sequence: Synthetic oligonucleotide
gaaaccgaggauuuagaaa

SEQ ID NO: 1445711 - RNA, 19 nt, Artificial Sequence
  Description of Artificial Sequence: Synthetic oligonucleotide
uauaaccagguaaccagaa

SEQ ID NO: 1445712 - RNA, 19 nt, Artificial Sequence
  Description of Artificial Sequence: Synthetic oligonucleotide
gaugaucgaccucaugcug

SEQ ID NO: 1445713 - RNA, 19 nt, Artificial Sequence
  Description of Artificial Sequence: Synthetic oligonucleotide
aacacguauaucagaaccu

SEQ ID NO: 1445714 - RNA, 19 nt, Artificial Sequence
  Description of Artificial Sequence: Synthetic oligonucleotide
agaugaucgaccucaugcu

SEQ ID NO: 1445715 - RNA, 19 nt, Artificial Sequence
  Description of Artificial Sequence: Synthetic oligonucleotide
gaaagaagcggccaauuua

SEQ ID NO: 1445716 - RNA, 19 nt, Artificial Sequence
  Description of Artificial Sequence: Synthetic oligonucleotide
agcucuacuggguagcuga

SEQ ID NO: 1445717 - RNA, 19 nt, Artificial Sequence
  Description of Artificial Sequence: Synthetic oligonucleotide
gagacaaacgccucagguc

SEQ ID NO: 1445718 - RNA, 19 nt, Artificial Sequence
  Description of Artificial Sequence: Synthetic oligonucleotide
auuacgaauguugaucaga

SEQ ID NO: 1445719 - RNA, 19 nt, Artificial Sequence
  Description of Artificial Sequence: Synthetic oligonucleotide
guuacggaagauguugucc

SEQ ID NO: 1445720 - RNA, 19 nt, Artificial Sequence
  Description of Artificial Sequence: Synthetic oligonucleotide
accuacuuuagugcuacac

SEQ ID NO: 1445721 - RNA, 19 nt, Artificial Sequence
  Description of Artificial Sequence: Synthetic oligonucleotide
acacacacacacacaaacc

SEQ ID NO: 1445722 - RNA, 19 nt, Artificial Sequence
  Description of Artificial Sequence: Synthetic oligonucleotide
aacaggcgcacuccagcgg

SEQ ID NO: 1445723 - RNA, 19 nt, Artificial Sequence
  Description of Artificial Sequence: Synthetic oligonucleotide
ugaaaccgaggauuuagaa

SEQ ID NO: 1445724 - RNA, 19 nt, Artificial Sequence
  Description of Artificial Sequence: Synthetic oligonucleotide
uccauaaagguguccuggc

SEQ ID NO: 1445725 - RNA, 19 nt, Artificial Sequence
  Description of Artificial Sequence: Synthetic oligonucleotide
gaugggauaguaagcacac

SEQ ID NO: 1445726 - RNA, 19 nt, Artificial Sequence
  Description of Artificial Sequence: Synthetic oligonucleotide
aacgucgcucucucgaaca

SEQ ID NO: 1445727 - RNA, 19 nt, Artificial Sequence
  Description of Artificial Sequence: Synthetic oligonucleotide
uugaaaccgaggauuuaga

SEQ ID NO: 1445728 - RNA, 19 nt, Artificial Sequence
  Description of Artificial Sequence: Synthetic oligonucleotide
gugggagugcuccacgucg

SEQ ID NO: 1445729 - RNA, 19 nt, Artificial Sequence
  Description of Artificial Sequence: Synthetic oligonucleotide
auuacucaacgcaugagga

SEQ ID NO: 1445730 - RNA, 19 nt, Artificial Sequence
  Description of Artificial Sequence: Synthetic oligonucleotide
ugucgaugaaggcagcgaa

SEQ ID NO: 1445731 - RNA, 19 nt, Artificial Sequence
  Description of Artificial Sequence: Synthetic oligonucleotide
acacguauaucagaaccuc

SEQ ID NO: 1445732 - RNA, 19 nt, Artificial Sequence
  Description of Artificial Sequence: Synthetic oligonucleotide
acauuuggcauuacucaac

SEQ ID NO: 1445733 - RNA, 19 nt, Artificial Sequence
  Description of Artificial Sequence: Synthetic oligonucleotide
cuuuagugcuacaccacac

SEQ ID NO: 1445734 - RNA, 19 nt, Artificial Sequence
  Description of Artificial Sequence: Synthetic oligonucleotide
caaagcggugcacaucacg

SEQ ID NO: 1445735 - RNA, 19 nt, Artificial Sequence
  Description of Artificial Sequence: Synthetic oligonucleotide
uagacgaugcuggaccagg

SEQ ID NO: 1445736 - RNA, 19 nt, Artificial Sequence
  Description of Artificial Sequence: Synthetic oligonucleotide
uacuuuagugcuacaccac

SEQ ID NO: 1445737 - RNA, 19 nt, Artificial Sequence
  Description of Artificial Sequence: Synthetic oligonucleotide
guuccccaggaaucgaacg

SEQ ID NO: 1445738 - RNA, 19 nt, Artificial Sequence
  Description of Artificial Sequence: Synthetic oligonucleotide
ugaggcgcggccuaacggc

SEQ ID NO: 1445739 - RNA, 19 nt, Artificial Sequence
  Description of Artificial Sequence: Synthetic oligonucleotide
acaggcgcacuccagcggg

SEQ ID NO: 1445740 - RNA, 19 nt, Artificial Sequence
  Description of Artificial Sequence: Synthetic oligonucleotide
accgaggauuuagaaauac

SEQ ID NO: 1445741 - RNA, 19 nt, Artificial Sequence
  Description of Artificial Sequence: Synthetic oligonucleotide
gaugucgaugaaggcagcg

SEQ ID NO: 1445742 - RNA, 19 nt, Artificial Sequence
  Description of Artificial Sequence: Synthetic oligonucleotide
uggaauuccucacuuccau

SEQ ID NO: 1445743 - RNA, 19 nt, Artificial Sequence
  Description of Artificial Sequence: Synthetic oligonucleotide
gaaccagauccauuuugug

SEQ ID NO: 1445744 - RNA, 19 nt, Artificial Sequence
  Description of Artificial Sequence: Synthetic oligonucleotide
uacggaagauguugucccg

SEQ ID NO: 1445745 - RNA, 19 nt, Artificial Sequence
  Description of Artificial Sequence: Synthetic oligonucleotide
ucgaacgugggagugcucc

SEQ ID NO: 1445746 - RNA, 19 nt, Artificial Sequence
  Description of Artificial Sequence: Synthetic oligonucleotide
cacacacacacacaaacca

SEQ ID NO: 1445747 - RNA, 19 nt, Artificial Sequence
  Description of Artificial Sequence: Synthetic oligonucleotide
uacuggguagcugaguaca

SEQ ID NO: 1445748 - RNA, 19 nt, Artificial Sequence
  Description of Artificial Sequence: Synthetic oligonucleotide
aaucgaacgugggagugcu

SEQ ID NO: 1445749 - RNA, 19 nt, Artificial Sequence
  Description of Artificial Sequence: Synthetic oligonucleotide
auagcguccaaugcuaaca

SEQ ID NO: 1445750 - RNA, 19 nt, Artificial Sequence
  Description of Artificial Sequence: Synthetic oligonucleotide
cacguuacggaagauguug

SEQ ID NO: 1445751 - RNA, 19 nt, Artificial Sequence
  Description of Artificial Sequence: Synthetic oligonucleotide
agauggacguucgaaaaca

SEQ ID NO: 1445752 - RNA, 19 nt, Artificial Sequence
  Description of Artificial Sequence: Synthetic oligonucleotide
guccaaugcuaacacuagg

SEQ ID NO: 1445753 - RNA, 19 nt, Artificial Sequence
  Description of Artificial Sequence: Synthetic oligonucleotide
aacugcuuuaauauucuua

SEQ ID NO: 1445754 - RNA, 19 nt, Artificial Sequence
  Description of Artificial Sequence: Synthetic oligonucleotide
acugguagugggaaaucac

SEQ ID NO: 1445755 - RNA, 19 nt, Artificial Sequence
  Description of Artificial Sequence: Synthetic oligonucleotide
acacacacacacaaaccac

SEQ ID NO: 1445756 - RNA, 19 nt, Artificial Sequence
  Description of Artificial Sequence: Synthetic oligonucleotide
uggcauuacucaacgcaug

SEQ ID NO: 1445757 - RNA, 19 nt, Artificial Sequence
  Description of Artificial Sequence: Synthetic oligonucleotide
ucgaaaacaggcgcacucc

SEQ ID NO: 1445758 - RNA, 19 nt, Artificial Sequence
  Description of Artificial Sequence: Synthetic oligonucleotide
acguguuugaugugaagau

SEQ ID NO: 1445759 - RNA, 19 nt, Artificial Sequence
  Description of Artificial Sequence: Synthetic oligonucleotide
cacggacugggccugaggc

SEQ ID NO: 1445760 - RNA, 19 nt, Artificial Sequence
  Description of Artificial Sequence: Synthetic oligonucleotide
acucaacgcaugaggaggc

SEQ ID NO: 1445761 - RNA, 19 nt, Artificial Sequence
  Description of Artificial Sequence: Synthetic oligonucleotide
acauacguguuugauguga

SEQ ID NO: 1445762 - RNA, 19 nt, Artificial Sequence
  Description of Artificial Sequence: Synthetic oligonucleotide
agaugggauaguaagcaca

SEQ ID NO: 1445763 - RNA, 19 nt, Artificial Sequence
  Description of Artificial Sequence: Synthetic oligonucleotide
gauagacgaugcuggacca

SEQ ID NO: 1445764 - RNA, 19 nt, Artificial Sequence
  Description of Artificial Sequence: Synthetic oligonucleotide
gagaugggauaguaagcac

SEQ ID NO: 1445765 - RNA, 19 nt, Artificial Sequence
  Description of Artificial Sequence: Synthetic oligonucleotide
auacguguuugaugugaag

SEQ ID NO: 1445766 - RNA, 19 nt, Artificial Sequence
  Description of Artificial Sequence: Synthetic oligonucleotide
ccuacuuuagugcuacacc

SEQ ID NO: 1445767 - RNA, 19 nt, Artificial Sequence
  Description of Artificial Sequence: Synthetic oligonucleotide
uagcguccaaugcuaacac

SEQ ID NO: 1445768 - RNA, 19 nt, Artificial Sequence
  Description of Artificial Sequence: Synthetic oligonucleotide
gaaaacaggcgcacuccag

SEQ ID NO: 1445769 - RNA, 19 nt, Artificial Sequence
  Description of Artificial Sequence: Synthetic oligonucleotide
uaaaggccgucuugaagcu

SEQ ID NO: 1445770 - RNA, 19 nt, Artificial Sequence
  Description of Artificial Sequence: Synthetic oligonucleotide
aaggccgucuugaagcucu

SEQ ID NO: 1445771 - RNA, 19 nt, Artificial Sequence
  Description of Artificial Sequence: Synthetic oligonucleotide
agaagauaacugcuuuaau

SEQ ID NO: 1445772 - RNA, 19 nt, Artificial Sequence
  Description of Artificial Sequence: Synthetic oligonucleotide
cauuacgaauguugaucag

SEQ ID NO: 1445773 - RNA, 19 nt, Artificial Sequence
  Description of Artificial Sequence: Synthetic oligonucleotide
caauuuacugcagcucagc

SEQ ID NO: 1445774 - RNA, 19 nt, Artificial Sequence
  Description of Artificial Sequence: Synthetic oligonucleotide
ucgcgcgcaauguaauuug

SEQ ID NO: 1445775 - RNA, 19 nt, Artificial Sequence
  Description of Artificial Sequence: Synthetic oligonucleotide
gcauuacgaauguugauca

SEQ ID NO: 1445776 - RNA, 19 nt, Artificial Sequence
  Description of Artificial Sequence: Synthetic oligonucleotide
agcggugcacaucacgcug

SEQ ID NO: 1445777 - RNA, 19 nt, Artificial Sequence
  Description of Artificial Sequence: Synthetic oligonucleotide
cucucuacgucaaacacgu

SEQ ID NO: 1445778 - RNA, 19 nt, Artificial Sequence
  Description of Artificial Sequence: Synthetic oligonucleotide
aagcggugcacaucacgcu

SEQ ID NO: 1445779 - RNA, 19 nt, Artificial Sequence
  Description of Artificial Sequence: Synthetic oligonucleotide
uccaccuuugugaucugau

SEQ ID NO: 1445780 - RNA, 19 nt, Artificial Sequence
  Description of Artificial Sequence: Synthetic oligonucleotide
cagcgggcgagacaaacgc

SEQ ID NO: 1445781 - RNA, 19 nt, Artificial Sequence
  Description of Artificial Sequence: Synthetic oligonucleotide
cacacacacacacacacaa

SEQ ID NO: 1445782 - RNA, 19 nt, Artificial Sequence
  Description of Artificial Sequence: Synthetic oligonucleotide
cagauggacguucgaaaac

SEQ ID NO: 1445783 - RNA, 19 nt, Artificial Sequence
  Description of Artificial Sequence: Synthetic oligonucleotide
guaauucggcauuuuacua

SEQ ID NO: 1445784 - RNA, 19 nt, Artificial Sequence
  Description of Artificial Sequence: Synthetic oligonucleotide
ccagaacacacacacacac

SEQ ID NO: 1445785 - RNA, 19 nt, Artificial Sequence
  Description of Artificial Sequence: Synthetic oligonucleotide
ugaucgaccucaugcuggu

SEQ ID NO: 1445786 - RNA, 19 nt, Artificial Sequence
  Description of Artificial Sequence: Synthetic oligonucleotide
uggaucugacaugaccacc

SEQ ID NO: 1445787 - RNA, 19 nt, Artificial Sequence
  Description of Artificial Sequence: Synthetic oligonucleotide
cagaaccuccacguuacgg

SEQ ID NO: 1445788 - RNA, 19 nt, Artificial Sequence
  Description of Artificial Sequence: Synthetic oligonucleotide
cauggcuguauuuggcauc

SEQ ID NO: 1445789 - RNA, 19 nt, Artificial Sequence
  Description of Artificial Sequence: Synthetic oligonucleotide
guacauagcguccaaugcu

SEQ ID NO: 1445790 - RNA, 19 nt, Artificial Sequence
  Description of Artificial Sequence: Synthetic oligonucleotide
gaaucgaacgugggagugc

SEQ ID NO: 1445791 - RNA, 19 nt, Artificial Sequence
  Description of Artificial Sequence: Synthetic oligonucleotide
agcgaaguuggaauuccuc

SEQ ID NO: 1445792 - RNA, 19 nt, Artificial Sequence
  Description of Artificial Sequence: Synthetic oligonucleotide
aggaaucgaacgugggagu

SEQ ID NO: 1445793 - RNA, 19 nt, Artificial Sequence
  Description of Artificial Sequence: Synthetic oligonucleotide
cacaaaccaccuacuuuag

SEQ ID NO: 1445794 - RNA, 19 nt, Artificial Sequence
  Description of Artificial Sequence: Synthetic oligonucleotide
accuccacguuacggaaga

SEQ ID NO: 1445795 - RNA, 19 nt, Artificial Sequence
  Description of Artificial Sequence: Synthetic oligonucleotide
cuagggaugagaugggaua

SEQ ID NO: 1445796 - RNA, 19 nt, Artificial Sequence
  Description of Artificial Sequence: Synthetic oligonucleotide
auggacguucgaaaacagg

SEQ ID NO: 1445797 - RNA, 19 nt, Artificial Sequence
  Description of Artificial Sequence: Synthetic oligonucleotide
ggcggaccgaccgagaacg

SEQ ID NO: 1445798 - RNA, 19 nt, Artificial Sequence
  Description of Artificial Sequence: Synthetic oligonucleotide
caccuuugugaucugauaa

SEQ ID NO: 1445799 - RNA, 19 nt, Artificial Sequence
  Description of Artificial Sequence: Synthetic oligonucleotide
acaaaccaccuacuuuagu

SEQ ID NO: 1445800 - RNA, 19 nt, Artificial Sequence
  Description of Artificial Sequence: Synthetic oligonucleotide
aaaggccgucuugaagcuc

SEQ ID NO: 1445801 - RNA, 19 nt, Artificial Sequence
  Description of Artificial Sequence: Synthetic oligonucleotide
ugcugaacguuggggauca

SEQ ID NO: 1445802 - RNA, 19 nt, Artificial Sequence
  Description of Artificial Sequence: Synthetic oligonucleotide
ucaacgcaugaggaggcug

SEQ ID NO: 1445803 - RNA, 19 nt, Artificial Sequence
  Description of Artificial Sequence: Synthetic oligonucleotide
ggacguucgaaaacaggcg

SEQ ID NO: 1445804 - RNA, 19 nt, Artificial Sequence
  Description of Artificial Sequence: Synthetic oligonucleotide
uacgaauguugaucagagu

SEQ ID NO: 1445805 - RNA, 19 nt, Artificial Sequence
  Description of Artificial Sequence: Synthetic oligonucleotide
acgacugguaauaaugcau

SEQ ID NO: 1445806 - RNA, 19 nt, Artificial Sequence
  Description of Artificial Sequence: Synthetic oligonucleotide
agauccauuuugugcacua

SEQ ID NO: 1445807 - RNA, 19 nt, Artificial Sequence
  Description of Artificial Sequence: Synthetic oligonucleotide
ucaggucacguugaucuuc

SEQ ID NO: 1445808 - RNA, 19 nt, Artificial Sequence
  Description of Artificial Sequence: Synthetic oligonucleotide
cugaggcgcggccuaacgg

SEQ ID NO: 1445809 - RNA, 19 nt, Artificial Sequence
  Description of Artificial Sequence: Synthetic oligonucleotide
agcacacgacauuaugaau

SEQ ID NO: 1445810 - RNA, 19 nt, Artificial Sequence
  Description of Artificial Sequence: Synthetic oligonucleotide
uccccaggaaucgaacgug

SEQ ID NO: 1445811 - RNA, 19 nt, Artificial Sequence
  Description of Artificial Sequence: Synthetic oligonucleotide
ccuaacggcggaccgaccg

SEQ ID NO: 1445812 - RNA, 19 nt, Artificial Sequence
  Description of Artificial Sequence: Synthetic oligonucleotide
agacgaugcuggaccaggc

SEQ ID NO: 1445813 - RNA, 19 nt, Artificial Sequence
  Description of Artificial Sequence: Synthetic oligonucleotide
caagaacgucgcucucucg

SEQ ID NO: 1445814 - RNA, 19 nt, Artificial Sequence
  Description of Artificial Sequence: Synthetic oligonucleotide
cugaacguuggggaucagc

SEQ ID NO: 1445815 - RNA, 19 nt, Artificial Sequence
  Description of Artificial Sequence: Synthetic oligonucleotide
aucaccugccggcgucgcc

SEQ ID NO: 1445816 - RNA, 19 nt, Artificial Sequence
  Description of Artificial Sequence: Synthetic oligonucleotide
gaaccuccacguuacggaa

SEQ ID NO: 1445817 - RNA, 19 nt, Artificial Sequence
  Description of Artificial Sequence: Synthetic oligonucleotide
gaacgucgcucucucgaac

SEQ ID NO: 1445818 - RNA, 19 nt, Artificial Sequence
  Description of Artificial Sequence: Synthetic oligonucleotide
aaccuccacguuacggaag

SEQ ID NO: 1445819 - RNA, 19 nt, Artificial Sequence
  Description of Artificial Sequence: Synthetic oligonucleotide
agaacgucgcucucucgaa

SEQ ID NO: 1445820 - RNA, 19 nt, Artificial Sequence
  Description of Artificial Sequence: Synthetic oligonucleotide
cacgacugguaauaaugca

SEQ ID NO: 1445821 - RNA, 19 nt, Artificial Sequence
  Description of Artificial Sequence: Synthetic oligonucleotide
gucgaugaaggcagcgaag

SEQ ID NO: 1445822 - RNA, 19 nt, Artificial Sequence
  Description of Artificial Sequence: Synthetic oligonucleotide
cucuacgucaaacacguau

SEQ ID NO: 1445823 - RNA, 19 nt, Artificial Sequence
  Description of Artificial Sequence: Synthetic oligonucleotide
ucaccugccggcgucgcca

SEQ ID NO: 1445824 - RNA, 19 nt, Artificial Sequence
  Description of Artificial Sequence: Synthetic oligonucleotide
ucccagauggacguucgaa

SEQ ID NO: 1445825 - RNA, 19 nt, Artificial Sequence
  Description of Artificial Sequence: Synthetic oligonucleotide
ggaccgaccgagaacgggg

SEQ ID NO: 1445826 - RNA, 19 nt, Artificial Sequence
  Description of Artificial Sequence: Synthetic oligonucleotide
cuccacguuacggaagaug

SEQ ID NO: 1445827 - RNA, 19 nt, Artificial Sequence
  Description of Artificial Sequence: Synthetic oligonucleotide
uaacggcggaccgaccgag

SEQ ID NO: 1445828 - RNA, 19 nt, Artificial Sequence
  Description of Artificial Sequence: Synthetic oligonucleotide
ggcauuacucaacgcauga

SEQ ID NO: 1445829 - RNA, 19 nt, Artificial Sequence
  Description of Artificial Sequence: Synthetic oligonucleotide
acgucgcucucucgaacag

SEQ ID NO: 1445830 - RNA, 19 nt, Artificial Sequence
  Description of Artificial Sequence: Synthetic oligonucleotide
gacugguaauaaugcaugu

SEQ ID NO: 1445831 - RNA, 19 nt, Artificial Sequence
  Description of Artificial Sequence: Synthetic oligonucleotide
guaauaaugcaugucuuuu

SEQ ID NO: 1445832 - RNA, 19 nt, Artificial Sequence
  Description of Artificial Sequence: Synthetic oligonucleotide
auagacgaugcuggaccag

SEQ ID NO: 1445833 - RNA, 19 nt, Artificial Sequence
  Description of Artificial Sequence: Synthetic oligonucleotide
accgaccgagaacggggac

SEQ ID NO: 1445834 - RNA, 19 nt, Artificial Sequence
  Description of Artificial Sequence: Synthetic oligonucleotide
cauacguguuugaugugaa

SEQ ID NO: 1445835 - RNA, 19 nt, Artificial Sequence
  Description of Artificial Sequence: Synthetic oligonucleotide
aacgcaugaggaggcugug

SEQ ID NO: 1445836 - RNA, 19 nt, Artificial Sequence
  Description of Artificial Sequence: Synthetic oligonucleotide
acgacauuaugaauaucaa

SEQ ID NO: 1445837 - RNA, 19 nt, Artificial Sequence
  Description of Artificial Sequence: Synthetic oligonucleotide
cagaacacacacacacaca

SEQ ID NO: 1445838 - RNA, 19 nt, Artificial Sequence
  Description of Artificial Sequence: Synthetic oligonucleotide
gaacacacacacacacaca

SEQ ID NO: 1445839 - RNA, 19 nt, Artificial Sequence
  Description of Artificial Sequence: Synthetic oligonucleotide
acuagggaugagaugggau

SEQ ID NO: 1445840 - RNA, 19 nt, Artificial Sequence
  Description of Artificial Sequence: Synthetic oligonucleotide
uccagacacgacugguaau

SEQ ID NO: 1445841 - RNA, 19 nt, Artificial Sequence
  Description of Artificial Sequence: Synthetic oligonucleotide
uccagcgggcgagacaaac

SEQ ID NO: 1445842 - RNA, 19 nt, Artificial Sequence
  Description of Artificial Sequence: Synthetic oligonucleotide
agcgggcgagacaaacgcc

SEQ ID NO: 1445843 - RNA, 19 nt, Artificial Sequence
  Description of Artificial Sequence: Synthetic oligonucleotide
gucgcucucucgaacagca

SEQ ID NO: 1445844 - RNA, 19 nt, Artificial Sequence
  Description of Artificial Sequence: Synthetic oligonucleotide
ccaauuuacugcagcucag

SEQ ID NO: 1445845 - RNA, 19 nt, Artificial Sequence
  Description of Artificial Sequence: Synthetic oligonucleotide
gaggauuuagaaauacauu

SEQ ID NO: 1445846 - RNA, 19 nt, Artificial Sequence
  Description of Artificial Sequence: Synthetic oligonucleotide
uccaguucgcggcucucua

SEQ ID NO: 1445847 - RNA, 19 nt, Artificial Sequence
  Description of Artificial Sequence: Synthetic oligonucleotide
uggaaagaagcggccaauu

SEQ ID NO: 1445848 - RNA, 19 nt, Artificial Sequence
  Description of Artificial Sequence: Synthetic oligonucleotide
cgacugguaauaaugcaug

SEQ ID NO: 1445849 - RNA, 19 nt, Artificial Sequence
  Description of Artificial Sequence: Synthetic oligonucleotide
ggaaucgaacgugggagug

SEQ ID NO: 1445850 - RNA, 19 nt, Artificial Sequence
  Description of Artificial Sequence: Synthetic oligonucleotide
ucgcucucucgaacagcag

SEQ ID NO: 1445851 - RNA, 19 nt, Artificial Sequence
  Description of Artificial Sequence: Synthetic oligonucleotide
gcacacgacauuaugaaua

SEQ ID NO: 1445852 - RNA, 19 nt, Artificial Sequence
  Description of Artificial Sequence: Synthetic oligonucleotide
cgucaaacacguauaucag

SEQ ID NO: 1445853 - RNA, 19 nt, Artificial Sequence
  Description of Artificial Sequence: Synthetic oligonucleotide
ccuuagguucaucuccagc

SEQ ID NO: 1445854 - RNA, 19 nt, Artificial Sequence
  Description of Artificial Sequence: Synthetic oligonucleotide
cgaaguuggaauuccucac

SEQ ID NO: 1445855 - RNA, 19 nt, Artificial Sequence
  Description of Artificial Sequence: Synthetic oligonucleotide
cacauacguguuugaugug

SEQ ID NO: 1445856 - RNA, 19 nt, Artificial Sequence
  Description of Artificial Sequence: Synthetic oligonucleotide
cugauaaaauaguaacauu

SEQ ID NO: 1445857 - RNA, 19 nt, Artificial Sequence
  Description of Artificial Sequence: Synthetic oligonucleotide
cagaagauuuuggcaucag

SEQ ID NO: 1445858 - RNA, 19 nt, Artificial Sequence
  Description of Artificial Sequence: Synthetic oligonucleotide
acguucgaaaacaggcgca

SEQ ID NO: 1445859 - RNA, 19 nt, Artificial Sequence
  Description of Artificial Sequence: Synthetic oligonucleotide
cagccucaauaaucugggc

SEQ ID NO: 1445860 - RNA, 19 nt, Artificial Sequence
  Description of Artificial Sequence: Synthetic oligonucleotide
accagaacacacacacaca

SEQ ID NO: 1445861 - RNA, 19 nt, Artificial Sequence
  Description of Artificial Sequence: Synthetic oligonucleotide
acguuacggaagauguugu

SEQ ID NO: 1445862 - RNA, 19 nt, Artificial Sequence
  Description of Artificial Sequence: Synthetic oligonucleotide
uuuuggcaucaggugaauu

SEQ ID NO: 1445863 - RNA, 19 nt, Artificial Sequence
  Description of Artificial Sequence: Synthetic oligonucleotide
guagcugaguacauagcgu

SEQ ID NO: 1445864 - RNA, 19 nt, Artificial Sequence
  Description of Artificial Sequence: Synthetic oligonucleotide
gcuguauuuggcaucaccu

SEQ ID NO: 1445865 - RNA, 19 nt, Artificial Sequence
  Description of Artificial Sequence: Synthetic oligonucleotide
gcggccaauuuacugcagc

SEQ ID NO: 1445866 - RNA, 19 nt, Artificial Sequence
  Description of Artificial Sequence: Synthetic oligonucleotide
gcagcgaaguuggaauucc

SEQ ID NO: 1445867 - RNA, 19 nt, Artificial Sequence
  Description of Artificial Sequence: Synthetic oligonucleotide
gauugaaaccgaggauuua

SEQ ID NO: 1445868 - RNA, 19 nt, Artificial Sequence
  Description of Artificial Sequence: Synthetic oligonucleotide
gcauuacucaacgcaugag

SEQ ID NO: 1445869 - RNA, 19 nt, Artificial Sequence
  Description of Artificial Sequence: Synthetic oligonucleotide
ugucgcgcgcaauguaauu

SEQ ID NO: 1445870 - RNA, 19 nt, Artificial Sequence
  Description of Artificial Sequence: Synthetic oligonucleotide
aggauggcuuccagacacg

SEQ ID NO: 1445871 - RNA, 19 nt, Artificial Sequence
  Description of Artificial Sequence: Synthetic oligonucleotide
ggcgagacaaacgccucag

SEQ ID NO: 1445872 - RNA, 19 nt, Artificial Sequence
  Description of Artificial Sequence: Synthetic oligonucleotide
cucucucgaacagcagaac

SEQ ID NO: 1445873 - RNA, 19 nt, Artificial Sequence
  Description of Artificial Sequence: Synthetic oligonucleotide
ggcgucgccacggacuggg

SEQ ID NO: 1445874 - RNA, 19 nt, Artificial Sequence
  Description of Artificial Sequence: Synthetic oligonucleotide
acacacacacacacacaca

SEQ ID NO: 1445875 - RNA, 19 nt, Artificial Sequence
  Description of Artificial Sequence: Synthetic oligonucleotide
ucuuccccgacccgcucuu

SEQ ID NO: 1445876 - RNA, 19 nt, Artificial Sequence
  Description of Artificial Sequence: Synthetic oligonucleotide
acggcggaccgaccgagaa

SEQ ID NO: 1445877 - RNA, 19 nt, Artificial Sequence
  Description of Artificial Sequence: Synthetic oligonucleotide
aggcgccuggugucgcgcg

SEQ ID NO: 1445878 - RNA, 19 nt, Artificial Sequence
  Description of Artificial Sequence: Synthetic oligonucleotide
aaccgaggauuuagaaaua

SEQ ID NO: 1445879 - RNA, 19 nt, Artificial Sequence
  Description of Artificial Sequence: Synthetic oligonucleotide
guagagcgucucaucccag

SEQ ID NO: 1445880 - RNA, 19 nt, Artificial Sequence
  Description of Artificial Sequence: Synthetic oligonucleotide
cuaacggcggaccgaccga

SEQ ID NO: 1445881 - RNA, 19 nt, Artificial Sequence
  Description of Artificial Sequence: Synthetic oligonucleotide
gcgagacaaacgccucagg

SEQ ID NO: 1445882 - RNA, 19 nt, Artificial Sequence
  Description of Artificial Sequence: Synthetic oligonucleotide
gucgccacggacugggccu

SEQ ID NO: 1445883 - RNA, 19 nt, Artificial Sequence
  Description of Artificial Sequence: Synthetic oligonucleotide
ccaccuacuuuagugcuac

SEQ ID NO: 1445884 - RNA, 19 nt, Artificial Sequence
  Description of Artificial Sequence: Synthetic oligonucleotide
cuacgucaaacacguauau

SEQ ID NO: 1445885 - RNA, 19 nt, Artificial Sequence
  Description of Artificial Sequence: Synthetic oligonucleotide
ccagauggacguucgaaaa

SEQ ID NO: 1445886 - RNA, 19 nt, Artificial Sequence
  Description of Artificial Sequence: Synthetic oligonucleotide
gcggccuaacggcggaccg

SEQ ID NO: 1445887 - RNA, 19 nt, Artificial Sequence
  Description of Artificial Sequence: Synthetic oligonucleotide
acauagcguccaaugcuaa

SEQ ID NO: 1445888 - RNA, 19 nt, Artificial Sequence
  Description of Artificial Sequence: Synthetic oligonucleotide
uuuccaguucgcggcucuc

SEQ ID NO: 1445889 - RNA, 19 nt, Artificial Sequence
  Description of Artificial Sequence: Synthetic oligonucleotide
acacacacacacacacaaa

SEQ ID NO: 1445890 - RNA, 19 nt, Artificial Sequence
  Description of Artificial Sequence: Synthetic oligonucleotide
acccaggcgccuggugucg

SEQ ID NO: 1445891 - RNA, 19 nt, Artificial Sequence
  Description of Artificial Sequence: Synthetic oligonucleotide
gaccgaccgagaacgggga

SEQ ID NO: 1445892 - RNA, 19 nt, Artificial Sequence
  Description of Artificial Sequence: Synthetic oligonucleotide
ggguagcugaguacauagc

SEQ ID NO: 1445893 - RNA, 19 nt, Artificial Sequence
  Description of Artificial Sequence: Synthetic oligonucleotide
ccgaggauuuagaaauaca

SEQ ID NO: 1445894 - RNA, 19 nt, Artificial Sequence
  Description of Artificial Sequence: Synthetic oligonucleotide
ucucuacgucaaacacgua

SEQ ID NO: 1445895 - RNA, 19 nt, Artificial Sequence
  Description of Artificial Sequence: Synthetic oligonucleotide
caggcgcacuccagcgggc

SEQ ID NO: 1445896 - RNA, 19 nt, Artificial Sequence
  Description of Artificial Sequence: Synthetic oligonucleotide
ggugucgcgcgcaauguaa

SEQ ID NO: 1445897 - RNA, 19 nt, Artificial Sequence
  Description of Artificial Sequence: Synthetic oligonucleotide
ggaugagaugggauaguaa

SEQ ID NO: 1445898 - RNA, 19 nt, Artificial Sequence
  Description of Artificial Sequence: Synthetic oligonucleotide
ccgcucuuccccaucaaca

SEQ ID NO: 1445899 - RNA, 19 nt, Artificial Sequence
  Description of Artificial Sequence: Synthetic oligonucleotide
caggcuuuguagagcgucu

SEQ ID NO: 1445900 - RNA, 19 nt, Artificial Sequence
  Description of Artificial Sequence: Synthetic oligonucleotide
cccagauggacguucgaaa

SEQ ID NO: 1445901 - RNA, 19 nt, Artificial Sequence
  Description of Artificial Sequence: Synthetic oligonucleotide
ggagugcuccacgucgaug

SEQ ID NO: 1445902 - RNA, 19 nt, Artificial Sequence
  Description of Artificial Sequence: Synthetic oligonucleotide
ucgccacggacugggccug

SEQ ID NO: 1445903 - RNA, 19 nt, Artificial Sequence
  Description of Artificial Sequence: Synthetic oligonucleotide
aacggcggaccgaccgaga

SEQ ID NO: 1445904 - RNA, 19 nt, Artificial Sequence
  Description of Artificial Sequence: Synthetic oligonucleotide
agcggccaauuuacugcag

SEQ ID NO: 1445905 - RNA, 19 nt, Artificial Sequence
  Description of Artificial Sequence: Synthetic oligonucleotide
caucaccugccggcgucgc

SEQ ID NO: 1445906 - RNA, 19 nt, Artificial Sequence
  Description of Artificial Sequence: Synthetic oligonucleotide
ggccuaacggcggaccgac

SEQ ID NO: 1445907 - RNA, 19 nt, Artificial Sequence
  Description of Artificial Sequence: Synthetic oligonucleotide
aucgaacgugggagugcuc

SEQ ID NO: 1445908 - RNA, 19 nt, Artificial Sequence
  Description of Artificial Sequence: Synthetic oligonucleotide
cguucgaaaacaggcgcac

SEQ ID NO: 1445909 - RNA, 19 nt, Artificial Sequence
  Description of Artificial Sequence: Synthetic oligonucleotide
cguuacggaagauguuguc

SEQ ID NO: 1445910 - RNA, 19 nt, Artificial Sequence
  Description of Artificial Sequence: Synthetic oligonucleotide
gcaucaccugccggcgucg

SEQ ID NO: 1445911 - RNA, 19 nt, Artificial Sequence
  Description of Artificial Sequence: Synthetic oligonucleotide
ccuuugugaucugauaaua

SEQ ID NO: 1445912 - RNA, 19 nt, Artificial Sequence
  Description of Artificial Sequence: Synthetic oligonucleotide
gcggugcacaucacgcugc

SEQ ID NO: 1445913 - RNA, 19 nt, Artificial Sequence
  Description of Artificial Sequence: Synthetic oligonucleotide
gggcgagacaaacgccuca

SEQ ID NO: 1445914 - RNA, 19 nt, Artificial Sequence
  Description of Artificial Sequence: Synthetic oligonucleotide
ccagacacgacugguaaua

SEQ ID NO: 1445915 - RNA, 19 nt, Artificial Sequence
  Description of Artificial Sequence: Synthetic oligonucleotide
caggcgccuggugucgcgc

SEQ ID NO: 1445916 - RNA, 19 nt, Artificial Sequence
  Description of Artificial Sequence: Synthetic oligonucleotide
cacuccagcgggcgagaca

SEQ ID NO: 1445917 - RNA, 19 nt, Artificial Sequence
  Description of Artificial Sequence: Synthetic oligonucleotide
ccugccggcgucgccacgg

SEQ ID NO: 1445918 - RNA, 19 nt, Artificial Sequence
  Description of Artificial Sequence: Synthetic oligonucleotide
guucgaaaacaggcgcacu

SEQ ID NO: 1445919 - RNA, 19 nt, Artificial Sequence
  Description of Artificial Sequence: Synthetic oligonucleotide
accugccggcgucgccacg

SEQ ID NO: 1445920 - RNA, 19 nt, Artificial Sequence
  Description of Artificial Sequence: Synthetic oligonucleotide
cgcgcgcaauguaauuugc

SEQ ID NO: 1445921 - RNA, 19 nt, Artificial Sequence
  Description of Artificial Sequence: Synthetic oligonucleotide
acguuggggaucagcugau

SEQ ID NO: 1445922 - RNA, 19 nt, Artificial Sequence
  Description of Artificial Sequence: Synthetic oligonucleotide
caccugccggcgucgccac

SEQ ID NO: 1445923 - RNA, 19 nt, Artificial Sequence
  Description of Artificial Sequence: Synthetic oligonucleotide
gucgcgcgcaauguaauuu

SEQ ID NO: 1445924 - RNA, 19 nt, Artificial Sequence
  Description of Artificial Sequence: Synthetic oligonucleotide
cgaaaacaggcgcacucca

SEQ ID NO: 1445925 - RNA, 19 nt, Artificial Sequence
  Description of Artificial Sequence: Synthetic oligonucleotide
cagcgaaguuggaauuccu

SEQ ID NO: 1445926 - RNA, 19 nt, Artificial Sequence
  Description of Artificial Sequence: Synthetic oligonucleotide
gguggcacccaggcgccug

SEQ ID NO: 1445927 - RNA, 19 nt, Artificial Sequence
  Description of Artificial Sequence: Synthetic oligonucleotide
gugcacuaggcagaagauu

SEQ ID NO: 1445928 - RNA, 19 nt, Artificial Sequence
  Description of Artificial Sequence: Synthetic oligonucleotide
cgagacaaacgccucaggu

SEQ ID NO: 1445929 - RNA, 19 nt, Artificial Sequence
  Description of Artificial Sequence: Synthetic oligonucleotide
ccggcgucgccacggacug

SEQ ID NO: 1445930 - RNA, 19 nt, Artificial Sequence
  Description of Artificial Sequence: Synthetic oligonucleotide
gcgcacuccagcgggcgag

SEQ ID NO: 1445931 - RNA, 19 nt, Artificial Sequence
  Description of Artificial Sequence: Synthetic oligonucleotide
gggauaguaagcacacauu

SEQ ID NO: 1445932 - RNA, 19 nt, Artificial Sequence
  Description of Artificial Sequence: Synthetic oligonucleotide
cgucgccacggacugggcc

SEQ ID NO: 1445933 - RNA, 19 nt, Artificial Sequence
  Description of Artificial Sequence: Synthetic oligonucleotide
caccuacuuuagugcuaca

SEQ ID NO: 1445934 - RNA, 19 nt, Artificial Sequence
  Description of Artificial Sequence: Synthetic oligonucleotide
ccaggcgccuggugucgcg

SEQ ID NO: 1445935 - RNA, 19 nt, Artificial Sequence
  Description of Artificial Sequence: Synthetic oligonucleotide
gcacugguagugggaaauc

SEQ ID NO: 1445936 - RNA, 19 nt, Artificial Sequence
  Description of Artificial Sequence: Synthetic oligonucleotide
cuggaaagaagcggccaau

SEQ ID NO: 1445937 - RNA, 19 nt, Artificial Sequence
  Description of Artificial Sequence: Synthetic oligonucleotide
gcgggcgagacaaacgccu

SEQ ID NO: 1445938 - RNA, 19 nt, Artificial Sequence
  Description of Artificial Sequence: Synthetic oligonucleotide
cggaccgaccgagaacggg

SEQ ID NO: 1445939 - RNA, 19 nt, Artificial Sequence
  Description of Artificial Sequence: Synthetic oligonucleotide
cuggugucgcgcgcaaugu

SEQ ID NO: 1445940 - RNA, 19 nt, Artificial Sequence
  Description of Artificial Sequence: Synthetic oligonucleotide
gacaaacgccucaggucuu

SEQ ID NO: 1445941 - RNA, 19 nt, Artificial Sequence
  Description of Artificial Sequence: Synthetic oligonucleotide
gugucgcgcgcaauguaau

SEQ ID NO: 1445942 - RNA, 19 nt, Artificial Sequence
  Description of Artificial Sequence: Synthetic oligonucleotide
cucaacgcaugaggaggcu

SEQ ID NO: 1445943 - RNA, 19 nt, Artificial Sequence
  Description of Artificial Sequence: Synthetic oligonucleotide
ccucaauaaucugggcaaa

SEQ ID NO: 1445944 - RNA, 19 nt, Artificial Sequence
  Description of Artificial Sequence: Synthetic oligonucleotide
cgucgcucucucgaacagc

SEQ ID NO: 1445945 - RNA, 19 nt, Artificial Sequence
  Description of Artificial Sequence: Synthetic oligonucleotide
ggcgcacuccagcgggcga

SEQ ID NO: 1445946 - RNA, 19 nt, Artificial Sequence
  Description of Artificial Sequence: Synthetic oligonucleotide
gcggaccgaccgagaacgg

SEQ ID NO: 1445947 - RNA, 19 nt, Artificial Sequence
  Description of Artificial Sequence: Synthetic oligonucleotide
cgggcgagacaaacgccuc

SEQ ID NO: 1445948 - RNA, 19 nt, Artificial Sequence
  Description of Artificial Sequence: Synthetic oligonucleotide
cugccggcgucgccacgga

SEQ ID NO: 1445949 - RNA, 19 nt, Artificial Sequence
  Description of Artificial Sequence: Synthetic oligonucleotide
cgcggccuaacggcggacc

SEQ ID NO: 1445950 - RNA, 19 nt, Artificial Sequence
  Description of Artificial Sequence: Synthetic oligonucleotide
gcugaacguuggggaucag

SEQ ID NO: 1445951 - RNA, 19 nt, Artificial Sequence
  Description of Artificial Sequence: Synthetic oligonucleotide
gcacuccagcgggcgagac

SEQ ID NO: 1445952 - RNA, 19 nt, Artificial Sequence
  Description of Artificial Sequence: Synthetic oligonucleotide
cccgacccgcucuucccca

SEQ ID NO: 1445953 - RNA, 19 nt, Artificial Sequence
  Description of Artificial Sequence: Synthetic oligonucleotide
gccuaacggcggaccgacc

SEQ ID NO: 1445954 - RNA, 19 nt, Artificial Sequence
  Description of Artificial Sequence: Synthetic oligonucleotide
cggcggaccgaccgagaac

SEQ ID NO: 1445955 - RNA, 19 nt, Artificial Sequence
  Description of Artificial Sequence: Synthetic oligonucleotide
cuccagcgggcgagacaaa

SEQ ID NO: 1445956 - RNA, 19 nt, Artificial Sequence
  Description of Artificial Sequence: Synthetic oligonucleotide
aggccgucuugaagcucua

SEQ ID NO: 1445957 - RNA, 19 nt, Artificial Sequence
  Description of Artificial Sequence: Synthetic oligonucleotide
ccgccacagucccacaggu

SEQ ID NO: 1445958 - RNA, 19 nt, Artificial Sequence
  Description of Artificial Sequence: Synthetic oligonucleotide
cccaggcgccuggugucgc

SEQ ID NO: 1445959 - RNA, 19 nt, Artificial Sequence
  Description of Artificial Sequence: Synthetic oligonucleotide
cgaugcuggaccaggcuuu

SEQ ID NO: 1445960 - RNA, 19 nt, Artificial Sequence
  Description of Artificial Sequence: Synthetic oligonucleotide
gcgucucaucccagaugga

SEQ ID NO: 1445961 - RNA, 19 nt, Artificial Sequence
  Description of Artificial Sequence: Synthetic oligonucleotide
ccacguuacggaagauguu

SEQ ID NO: 1445962 - RNA, 19 nt, Artificial Sequence
  Description of Artificial Sequence: Synthetic oligonucleotide
gcgucgccacggacugggc

SEQ ID NO: 1445963 - RNA, 19 nt, Artificial Sequence
  Description of Artificial Sequence: Synthetic oligonucleotide
gcgcggccuaacggcggac

SEQ ID NO: 1445964 - RNA, 19 nt, Artificial Sequence
  Description of Artificial Sequence: Synthetic oligonucleotide
cggccuaacggcggaccga

SEQ ID NO: 1445965 - RNA, 19 nt, Artificial Sequence
  Description of Artificial Sequence: Synthetic oligonucleotide
cguuggggaucagcugaua

SEQ ID NO: 1445966 - RNA, 19 nt, Artificial Sequence
  Description of Artificial Sequence: Synthetic oligonucleotide
cgcacuccagcgggcgaga

SEQ ID NO: 1445967 - RNA, 19 nt, Artificial Sequence
  Description of Artificial Sequence: Synthetic oligonucleotide
cggcgucgccacggacugg

SEQ ID NO: 1445968 - RNA, 19 nt, Artificial Sequence
  Description of Artificial Sequence: Synthetic oligonucleotide
ccuccacguuacggaagau

SEQ ID NO: 1445969 - RNA, 19 nt, Artificial Sequence
  Description of Artificial Sequence: Synthetic oligonucleotide
aacauuuaaaguuauuugc

SEQ ID NO: 1445970 - RNA, 19 nt, Artificial Sequence
  Description of Artificial Sequence: Synthetic oligonucleotide
aacauaaagugcuagaguc

SEQ ID NO: 1445971 - RNA, 19 nt, Artificial Sequence
  Description of Artificial Sequence: Synthetic oligonucleotide
aaaauuauagacuaauuga

SEQ ID NO: 1445972 - RNA, 19 nt, Artificial Sequence
  Description of Artificial Sequence: Synthetic oligonucleotide
auauauacuacacauuugc

SEQ ID NO: 1445973 - RNA, 19 nt, Artificial Sequence
  Description of Artificial Sequence: Synthetic oligonucleotide
aaaucacuuacacucaggc

SEQ ID NO: 1445974 - RNA, 19 nt, Artificial Sequence
  Description of Artificial Sequence: Synthetic oligonucleotide
aauggagugaaauagagau

SEQ ID NO: 1445975 - RNA, 19 nt, Artificial Sequence
  Description of Artificial Sequence: Synthetic oligonucleotide
aggucuuaaacuuugaagg

SEQ ID NO: 1445976 - RNA, 19 nt, Artificial Sequence
  Description of Artificial Sequence: Synthetic oligonucleotide
aacauuaaggguuaaccag

SEQ ID NO: 1445977 - RNA, 19 nt, Artificial Sequence
  Description of Artificial Sequence: Synthetic oligonucleotide
uuaaggcaaacucauaggg

SEQ ID NO: 1445978 - RNA, 19 nt, Artificial Sequence
  Description of Artificial Sequence: Synthetic oligonucleotide
aacauacuuauuuggaguc

SEQ ID NO: 1445979 - RNA, 19 nt, Artificial Sequence
  Description of Artificial Sequence: Synthetic oligonucleotide
uacacuuucgguuaaaugu

SEQ ID NO: 1445980 - RNA, 19 nt, Artificial Sequence
  Description of Artificial Sequence: Synthetic oligonucleotide
aaaaucauguccuuggaaa

SEQ ID NO: 1445981 - RNA, 19 nt, Artificial Sequence
  Description of Artificial Sequence: Synthetic oligonucleotide
uccuuuagaauuuucaagc

SEQ ID NO: 1445982 - RNA, 19 nt, Artificial Sequence
  Description of Artificial Sequence: Synthetic oligonucleotide
cuuaaguggagguagagag

SEQ ID NO: 1445983 - RNA, 19 nt, Artificial Sequence
  Description of Artificial Sequence: Synthetic oligonucleotide
aagauuuccuuccacuaac

SEQ ID NO: 1445984 - RNA, 19 nt, Artificial Sequence
  Description of Artificial Sequence: Synthetic oligonucleotide
aaguuauuugcacaacagg

SEQ ID NO: 1445985 - RNA, 19 nt, Artificial Sequence
  Description of Artificial Sequence: Synthetic oligonucleotide
uguuaauggagugaaauag

SEQ ID NO: 1445986 - RNA, 19 nt, Artificial Sequence
  Description of Artificial Sequence: Synthetic oligonucleotide
uuaauggagugaaauagag

SEQ ID NO: 1445987 - RNA, 19 nt, Artificial Sequence
  Description of Artificial Sequence: Synthetic oligonucleotide
ucuaugacgaaucacaaua

SEQ ID NO: 1445988 - RNA, 19 nt, Artificial Sequence
  Description of Artificial Sequence: Synthetic oligonucleotide
ucauguucuaaguauagcc

SEQ ID NO: 1445989 - RNA, 19 nt, Artificial Sequence
  Description of Artificial Sequence: Synthetic oligonucleotide
ucgaacaucucuaugacga

SEQ ID NO: 1445990 - RNA, 19 nt, Artificial Sequence
  Description of Artificial Sequence: Synthetic oligonucleotide
uacuaaguuuacaaaaugc

SEQ ID NO: 1445991 - RNA, 19 nt, Artificial Sequence
  Description of Artificial Sequence: Synthetic oligonucleotide
auauacuacacauuugcag

SEQ ID NO: 1445992 - RNA, 19 nt, Artificial Sequence
  Description of Artificial Sequence: Synthetic oligonucleotide
ugugauaagaccuaagaua

SEQ ID NO: 1445993 - RNA, 19 nt, Artificial Sequence
  Description of Artificial Sequence: Synthetic oligonucleotide
ugagugauacaaaauagac

SEQ ID NO: 1445994 - RNA, 19 nt, Artificial Sequence
  Description of Artificial Sequence: Synthetic oligonucleotide
uauacuacacauuugcagu

SEQ ID NO: 1445995 - RNA, 19 nt, Artificial Sequence
  Description of Artificial Sequence: Synthetic oligonucleotide
aucugcguaaaauaucagc

SEQ ID NO: 1445996 - RNA, 19 nt, Artificial Sequence
  Description of Artificial Sequence: Synthetic oligonucleotide
ucuuaaacuuugaaggacc

SEQ ID NO: 1445997 - RNA, 19 nt, Artificial Sequence
  Description of Artificial Sequence: Synthetic oligonucleotide
acaguuagcaaacuagguc

SEQ ID NO: 1445998 - RNA, 19 nt, Artificial Sequence
  Description of Artificial Sequence: Synthetic oligonucleotide
ucuaaguauagccauugug

SEQ ID NO: 1445999 - RNA, 19 nt, Artificial Sequence
  Description of Artificial Sequence: Synthetic oligonucleotide
uuaagauaaauuuccuuca

SEQ ID NO: 1446000 - RNA, 19 nt, Artificial Sequence
  Description of Artificial Sequence: Synthetic oligonucleotide
uaucacaccauagugacag

SEQ ID NO: 1446001 - RNA, 19 nt, Artificial Sequence
  Description of Artificial Sequence: Synthetic oligonucleotide
ugcguaaaauaucagcucc

SEQ ID NO: 1446002 - RNA, 19 nt, Artificial Sequence
  Description of Artificial Sequence: Synthetic oligonucleotide
ucaucugcguaaaauauca

SEQ ID NO: 1446003 - RNA, 19 nt, Artificial Sequence
  Description of Artificial Sequence: Synthetic oligonucleotide
caguuagcaaacuaggucc

SEQ ID NO: 1446004 - RNA, 19 nt, Artificial Sequence
  Description of Artificial Sequence: Synthetic oligonucleotide
uuuggagucguacauaaaa

SEQ ID NO: 1446005 - RNA, 19 nt, Artificial Sequence
  Description of Artificial Sequence: Synthetic oligonucleotide
agagauaaaaggcagucca

SEQ ID NO: 1446006 - RNA, 19 nt, Artificial Sequence
  Description of Artificial Sequence: Synthetic oligonucleotide
uaggucuuaaacuuugaag

SEQ ID NO: 1446007 - RNA, 19 nt, Artificial Sequence
  Description of Artificial Sequence: Synthetic oligonucleotide
aauaacauuaaggguuaac

SEQ ID NO: 1446008 - RNA, 19 nt, Artificial Sequence
  Description of Artificial Sequence: Synthetic oligonucleotide
uuuuaauccuuguucaugu

SEQ ID NO: 1446009 - RNA, 19 nt, Artificial Sequence
  Description of Artificial Sequence: Synthetic oligonucleotide
auagggauuguacagcguc

SEQ ID NO: 1446010 - RNA, 19 nt, Artificial Sequence
  Description of Artificial Sequence: Synthetic oligonucleotide
aucacuuacacucaggcaa

SEQ ID NO: 1446011 - RNA, 19 nt, Artificial Sequence
  Description of Artificial Sequence: Synthetic oligonucleotide
agugaaauagagauaaaag

SEQ ID NO: 1446012 - RNA, 19 nt, Artificial Sequence
  Description of Artificial Sequence: Synthetic oligonucleotide
aagacaguuagcaaacuag

SEQ ID NO: 1446013 - RNA, 19 nt, Artificial Sequence
  Description of Artificial Sequence: Synthetic oligonucleotide
uguaguguguuaauggagu

SEQ ID NO: 1446014 - RNA, 19 nt, Artificial Sequence
  Description of Artificial Sequence: Synthetic oligonucleotide
agauaaauuuccuucagaa

SEQ ID NO: 1446015 - RNA, 19 nt, Artificial Sequence
  Description of Artificial Sequence: Synthetic oligonucleotide
aaauuauagacuaauugaa

SEQ ID NO: 1446016 - RNA, 19 nt, Artificial Sequence
  Description of Artificial Sequence: Synthetic oligonucleotide
aaggcaaacucauagggau

SEQ ID NO: 1446017 - RNA, 19 nt, Artificial Sequence
  Description of Artificial Sequence: Synthetic oligonucleotide
cuaaguauagccauuguga

SEQ ID NO: 1446018 - RNA, 19 nt, Artificial Sequence
  Description of Artificial Sequence: Synthetic oligonucleotide
ucuauuuuggacuuucuua

SEQ ID NO: 1446019 - RNA, 19 nt, Artificial Sequence
  Description of Artificial Sequence: Synthetic oligonucleotide
gaaacuaacugucaucuga

SEQ ID NO: 1446020 - RNA, 19 nt, Artificial Sequence
  Description of Artificial Sequence: Synthetic oligonucleotide
ugucuaucacaccauagug

SEQ ID NO: 1446021 - RNA, 19 nt, Artificial Sequence
  Description of Artificial Sequence: Synthetic oligonucleotide
ucauagggauuguacagcg

SEQ ID NO: 1446022 - RNA, 19 nt, Artificial Sequence
  Description of Artificial Sequence: Synthetic oligonucleotide
agguauagauuuuaaaaga

SEQ ID NO: 1446023 - RNA, 19 nt, Artificial Sequence
  Description of Artificial Sequence: Synthetic oligonucleotide
guuaaccagagguaaagcc

SEQ ID NO: 1446024 - RNA, 19 nt, Artificial Sequence
  Description of Artificial Sequence: Synthetic oligonucleotide
uuauuugcacaacagguau

SEQ ID NO: 1446025 - RNA, 19 nt, Artificial Sequence
  Description of Artificial Sequence: Synthetic oligonucleotide
ugcggcgucaacaacaaca

SEQ ID NO: 1446026 - RNA, 19 nt, Artificial Sequence
  Description of Artificial Sequence: Synthetic oligonucleotide
auagagauaaaaggcaguc

SEQ ID NO: 1446027 - RNA, 19 nt, Artificial Sequence
  Description of Artificial Sequence: Synthetic oligonucleotide
aaacuaacugucaucugac

SEQ ID NO: 1446028 - RNA, 19 nt, Artificial Sequence
  Description of Artificial Sequence: Synthetic oligonucleotide
aguauagccauugugauaa

SEQ ID NO: 1446029 - RNA, 19 nt, Artificial Sequence
  Description of Artificial Sequence: Synthetic oligonucleotide
uuugcaguuauuugaaauc

SEQ ID NO: 1446030 - RNA, 19 nt, Artificial Sequence
  Description of Artificial Sequence: Synthetic oligonucleotide
uccuaaucagggcaaauca

SEQ ID NO: 1446031 - RNA, 19 nt, Artificial Sequence
  Description of Artificial Sequence: Synthetic oligonucleotide
guagcgauaaccucuuucc

SEQ ID NO: 1446032 - RNA, 19 nt, Artificial Sequence
  Description of Artificial Sequence: Synthetic oligonucleotide
caacaacauacuuauuugg

SEQ ID NO: 1446033 - RNA, 19 nt, Artificial Sequence
  Description of Artificial Sequence: Synthetic oligonucleotide
aguagcgauaaccucuuuc

SEQ ID NO: 1446034 - RNA, 19 nt, Artificial Sequence
  Description of Artificial Sequence: Synthetic oligonucleotide
aagauaaauuuccuucaga

SEQ ID NO: 1446035 - RNA, 19 nt, Artificial Sequence
  Description of Artificial Sequence: Synthetic oligonucleotide
ucacaauauccacacagca

SEQ ID NO: 1446036 - RNA, 19 nt, Artificial Sequence
  Description of Artificial Sequence: Synthetic oligonucleotide
aguaagacaguuagcaaac

SEQ ID NO: 1446037 - RNA, 19 nt, Artificial Sequence
  Description of Artificial Sequence: Synthetic oligonucleotide
ucaucugacauuccuaauc

SEQ ID NO: 1446038 - RNA, 19 nt, Artificial Sequence
  Description of Artificial Sequence: Synthetic oligonucleotide
ucaacacuugcuuaugugu

SEQ ID NO: 1446039 - RNA, 19 nt, Artificial Sequence
  Description of Artificial Sequence: Synthetic oligonucleotide
uggucaguugcucauuuag

SEQ ID NO: 1446040 - RNA, 19 nt, Artificial Sequence
  Description of Artificial Sequence: Synthetic oligonucleotide
uucucuacuuggcuuagag

SEQ ID NO: 1446041 - RNA, 19 nt, Artificial Sequence
  Description of Artificial Sequence: Synthetic oligonucleotide
uauauacuacacauuugca

SEQ ID NO: 1446042 - RNA, 19 nt, Artificial Sequence
  Description of Artificial Sequence: Synthetic oligonucleotide
auacuaaguuuacaaaaug

SEQ ID NO: 1446043 - RNA, 19 nt, Artificial Sequence
  Description of Artificial Sequence: Synthetic oligonucleotide
auagccauugugauaagac

SEQ ID NO: 1446044 - RNA, 19 nt, Artificial Sequence
  Description of Artificial Sequence: Synthetic oligonucleotide
aagaccuaagauauaagca

SEQ ID NO: 1446045 - RNA, 19 nt, Artificial Sequence
  Description of Artificial Sequence: Synthetic oligonucleotide
aauacauaccacucccagu

SEQ ID NO: 1446046 - RNA, 19 nt, Artificial Sequence
  Description of Artificial Sequence: Synthetic oligonucleotide
gauuguacagcgucaacac

SEQ ID NO: 1446047 - RNA, 19 nt, Artificial Sequence
  Description of Artificial Sequence: Synthetic oligonucleotide
uuguaguguguuaauggag

SEQ ID NO: 1446048 - RNA, 19 nt, Artificial Sequence
  Description of Artificial Sequence: Synthetic oligonucleotide
uaacauaaagugcuagagu

SEQ ID NO: 1446049 - RNA, 19 nt, Artificial Sequence
  Description of Artificial Sequence: Synthetic oligonucleotide
guaacauaaagugcuagag

SEQ ID NO: 1446050 - RNA, 19 nt, Artificial Sequence
  Description of Artificial Sequence: Synthetic oligonucleotide
uugucuaucacaccauagu

SEQ ID NO: 1446051 - RNA, 19 nt, Artificial Sequence
  Description of Artificial Sequence: Synthetic oligonucleotide
aacuuugaaggacccauga

SEQ ID NO: 1446052 - RNA, 19 nt, Artificial Sequence
  Description of Artificial Sequence: Synthetic oligonucleotide
aguuauuugcacaacaggu

SEQ ID NO: 1446053 - RNA, 19 nt, Artificial Sequence
  Description of Artificial Sequence: Synthetic oligonucleotide
ucguacauaaaacuuugaa

SEQ ID NO: 1446054 - RNA, 19 nt, Artificial Sequence
  Description of Artificial Sequence: Synthetic oligonucleotide
aagaguagcgauaaccucu

SEQ ID NO: 1446055 - RNA, 19 nt, Artificial Sequence
  Description of Artificial Sequence: Synthetic oligonucleotide
auagacacagauaucuagg

SEQ ID NO: 1446056 - RNA, 19 nt, Artificial Sequence
  Description of Artificial Sequence: Synthetic oligonucleotide
cuuaaacuuugaaggaccc

SEQ ID NO: 1446057 - RNA, 19 nt, Artificial Sequence
  Description of Artificial Sequence: Synthetic oligonucleotide
uauuuggagucguacauaa

SEQ ID NO: 1446058 - RNA, 19 nt, Artificial Sequence
  Description of Artificial Sequence: Synthetic oligonucleotide
gauaagaccuaagauauaa

SEQ ID NO: 1446059 - RNA, 19 nt, Artificial Sequence
  Description of Artificial Sequence: Synthetic oligonucleotide
aucucaguaacaguggcuc

SEQ ID NO: 1446060 - RNA, 19 nt, Artificial Sequence
  Description of Artificial Sequence: Synthetic oligonucleotide
uguguuaauggagugaaau

SEQ ID NO: 1446061 - RNA, 19 nt, Artificial Sequence
  Description of Artificial Sequence: Synthetic oligonucleotide
caccauagugacaggaucg

SEQ ID NO: 1446062 - RNA, 19 nt, Artificial Sequence
  Description of Artificial Sequence: Synthetic oligonucleotide
cauagugacaggaucgaac

SEQ ID NO: 1446063 - RNA, 19 nt, Artificial Sequence
  Description of Artificial Sequence: Synthetic oligonucleotide
uugugauaagaccuaagau

SEQ ID NO: 1446064 - RNA, 19 nt, Artificial Sequence
  Description of Artificial Sequence: Synthetic oligonucleotide
aaucacuuacacucaggca

SEQ ID NO: 1446065 - RNA, 19 nt, Artificial Sequence
  Description of Artificial Sequence: Synthetic oligonucleotide
auacauaccacucccagua

SEQ ID NO: 1446066 - RNA, 19 nt, Artificial Sequence
  Description of Artificial Sequence: Synthetic oligonucleotide
gacauuccuaaucagggca

SEQ ID NO: 1446067 - RNA, 19 nt, Artificial Sequence
  Description of Artificial Sequence: Synthetic oligonucleotide
agugagugauacaaaauag

SEQ ID NO: 1446068 - RNA, 19 nt, Artificial Sequence
  Description of Artificial Sequence: Synthetic oligonucleotide
cuuccacuaacucugguug

SEQ ID NO: 1446069 - RNA, 19 nt, Artificial Sequence
  Description of Artificial Sequence: Synthetic oligonucleotide
acuuugaaggacccaugac

SEQ ID NO: 1446070 - RNA, 19 nt, Artificial Sequence
  Description of Artificial Sequence: Synthetic oligonucleotide
acaccauagugacaggauc

SEQ ID NO: 1446071 - RNA, 19 nt, Artificial Sequence
  Description of Artificial Sequence: Synthetic oligonucleotide
uaauggagugaaauagaga

SEQ ID NO: 1446072 - RNA, 19 nt, Artificial Sequence
  Description of Artificial Sequence: Synthetic oligonucleotide
uauguguugacugaucauc

SEQ ID NO: 1446073 - RNA, 19 nt, Artificial Sequence
  Description of Artificial Sequence: Synthetic oligonucleotide
acuuauuuggagucguaca

SEQ ID NO: 1446074 - RNA, 19 nt, Artificial Sequence
  Description of Artificial Sequence: Synthetic oligonucleotide
uaaguauagccauugugau

SEQ ID NO: 1446075 - RNA, 19 nt, Artificial Sequence
  Description of Artificial Sequence: Synthetic oligonucleotide
uggagucguacauaaaacu

SEQ ID NO: 1446076 - RNA, 19 nt, Artificial Sequence
  Description of Artificial Sequence: Synthetic oligonucleotide
aucacaauauccacacagc

SEQ ID NO: 1446077 - RNA, 19 nt, Artificial Sequence
  Description of Artificial Sequence: Synthetic oligonucleotide
agugacaggaucgaacauc

SEQ ID NO: 1446078 - RNA, 19 nt, Artificial Sequence
  Description of Artificial Sequence: Synthetic oligonucleotide
uaaacuuugaaggacccau

SEQ ID NO: 1446079 - RNA, 19 nt, Artificial Sequence
  Description of Artificial Sequence: Synthetic oligonucleotide
gggcaaaucacuuacacuc

SEQ ID NO: 1446080 - RNA, 19 nt, Artificial Sequence
  Description of Artificial Sequence: Synthetic oligonucleotide
aauaucagcuccgugggaa

SEQ ID NO: 1446081 - RNA, 19 nt, Artificial Sequence
  Description of Artificial Sequence: Synthetic oligonucleotide
uagccauugugauaagacc

SEQ ID NO: 1446082 - RNA, 19 nt, Artificial Sequence
  Description of Artificial Sequence: Synthetic oligonucleotide
aauagagauaaaaggcagu

SEQ ID NO: 1446083 - RNA, 19 nt, Artificial Sequence
  Description of Artificial Sequence: Synthetic oligonucleotide
uguucuuucgcggauggga

SEQ ID NO: 1446084 - RNA, 19 nt, Artificial Sequence
  Description of Artificial Sequence: Synthetic oligonucleotide
aguccuucaaauaaaauua

SEQ ID NO: 1446085 - RNA, 19 nt, Artificial Sequence
  Description of Artificial Sequence: Synthetic oligonucleotide
uugcaguuauuugaaauca

SEQ ID NO: 1446086 - RNA, 19 nt, Artificial Sequence
  Description of Artificial Sequence: Synthetic oligonucleotide
uguucauguucuaaguaua

SEQ ID NO: 1446087 - RNA, 19 nt, Artificial Sequence
  Description of Artificial Sequence: Synthetic oligonucleotide
cucuuuccuuccuaaagcc

SEQ ID NO: 1446088 - RNA, 19 nt, Artificial Sequence
  Description of Artificial Sequence: Synthetic oligonucleotide
caauacauaccacucccag

SEQ ID NO: 1446089 - RNA, 19 nt, Artificial Sequence
  Description of Artificial Sequence: Synthetic oligonucleotide
acuaacugucaucugacau

SEQ ID NO: 1446090 - RNA, 19 nt, Artificial Sequence
  Description of Artificial Sequence: Synthetic oligonucleotide
uaugacgaaucacaauauc

SEQ ID NO: 1446091 - RNA, 19 nt, Artificial Sequence
  Description of Artificial Sequence: Synthetic oligonucleotide
aucgaacaucucuaugacg

SEQ ID NO: 1446092 - RNA, 19 nt, Artificial Sequence
  Description of Artificial Sequence: Synthetic oligonucleotide
agacaguuagcaaacuagg

SEQ ID NO: 1446093 - RNA, 19 nt, Artificial Sequence
  Description of Artificial Sequence: Synthetic oligonucleotide
uagacuaauugaaaauaua

SEQ ID NO: 1446094 - RNA, 19 nt, Artificial Sequence
  Description of Artificial Sequence: Synthetic oligonucleotide
uucacacuuaaguggaggu

SEQ ID NO: 1446095 - RNA, 19 nt, Artificial Sequence
  Description of Artificial Sequence: Synthetic oligonucleotide
ucaaaucuauuuuggacuu

SEQ ID NO: 1446096 - RNA, 19 nt, Artificial Sequence
  Description of Artificial Sequence: Synthetic oligonucleotide
uauguuucacucagaagua

SEQ ID NO: 1446097 - RNA, 19 nt, Artificial Sequence
  Description of Artificial Sequence: Synthetic oligonucleotide
caaaucacuuacacucagg

SEQ ID NO: 1446098 - RNA, 19 nt, Artificial Sequence
  Description of Artificial Sequence: Synthetic oligonucleotide
cacacuuaaguggagguag

SEQ ID NO: 1446099 - RNA, 19 nt, Artificial Sequence
  Description of Artificial Sequence: Synthetic oligonucleotide
gaucgaacaucucuaugac

SEQ ID NO: 1446100 - RNA, 19 nt, Artificial Sequence
  Description of Artificial Sequence: Synthetic oligonucleotide
uguuucacucagaaguauc

SEQ ID NO: 1446101 - RNA, 19 nt, Artificial Sequence
  Description of Artificial Sequence: Synthetic oligonucleotide
ugacugaucaucugcguaa

SEQ ID NO: 1446102 - RNA, 19 nt, Artificial Sequence
  Description of Artificial Sequence: Synthetic oligonucleotide
uaagacaguuagcaaacua

SEQ ID NO: 1446103 - RNA, 19 nt, Artificial Sequence
  Description of Artificial Sequence: Synthetic oligonucleotide
cauuaaggguuaaccagag

SEQ ID NO: 1446104 - RNA, 19 nt, Artificial Sequence
  Description of Artificial Sequence: Synthetic oligonucleotide
guaacaguggcucuuucca

SEQ ID NO: 1446105 - RNA, 19 nt, Artificial Sequence
  Description of Artificial Sequence: Synthetic oligonucleotide
auucacacuuaaguggagg

SEQ ID NO: 1446106 - RNA, 19 nt, Artificial Sequence
  Description of Artificial Sequence: Synthetic oligonucleotide
guuguucuuucgcggaugg

SEQ ID NO: 1446107 - RNA, 19 nt, Artificial Sequence
  Description of Artificial Sequence: Synthetic oligonucleotide
agauaucuagggcuuucuc

SEQ ID NO: 1446108 - RNA, 19 nt, Artificial Sequence
  Description of Artificial Sequence: Synthetic oligonucleotide
guuuuaauccuuguucaug

SEQ ID NO: 1446109 - RNA, 19 nt, Artificial Sequence
  Description of Artificial Sequence: Synthetic oligonucleotide
aaaaugucucagugaguga

SEQ ID NO: 1446110 - RNA, 19 nt, Artificial Sequence
  Description of Artificial Sequence: Synthetic oligonucleotide
agggccgcaauacauacca

SEQ ID NO: 1446111 - RNA, 19 nt, Artificial Sequence
  Description of Artificial Sequence: Synthetic oligonucleotide
augcauuggcacugagucc

SEQ ID NO: 1446112 - RNA, 19 nt, Artificial Sequence
  Description of Artificial Sequence: Synthetic oligonucleotide
ucaguauuuuguagugugu

SEQ ID NO: 1446113 - RNA, 19 nt, Artificial Sequence
  Description of Artificial Sequence: Synthetic oligonucleotide
agaagaguagcgauaaccu

SEQ ID NO: 1446114 - RNA, 19 nt, Artificial Sequence
  Description of Artificial Sequence: Synthetic oligonucleotide
cuucacugcaccugcggcg

SEQ ID NO: 1446115 - RNA, 19 nt, Artificial Sequence
  Description of Artificial Sequence: Synthetic oligonucleotide
gaacuuuaaggcaaacuca

SEQ ID NO: 1446116 - RNA, 19 nt, Artificial Sequence
  Description of Artificial Sequence: Synthetic oligonucleotide
gaccuaagauauaagcagc

SEQ ID NO: 1446117 - RNA, 19 nt, Artificial Sequence
  Description of Artificial Sequence: Synthetic oligonucleotide
uacagcgucaacacuugcu

SEQ ID NO: 1446118 - RNA, 19 nt, Artificial Sequence
  Description of Artificial Sequence: Synthetic oligonucleotide
uuuaggucuuaaacuuuga

SEQ ID NO: 1446119 - RNA, 19 nt, Artificial Sequence
  Description of Artificial Sequence: Synthetic oligonucleotide
aggcaguccacauucauau

SEQ ID NO: 1446120 - RNA, 19 nt, Artificial Sequence
  Description of Artificial Sequence: Synthetic oligonucleotide
cucaaaucuauuuuggacu

SEQ ID NO: 1446121 - RNA, 19 nt, Artificial Sequence
  Description of Artificial Sequence: Synthetic oligonucleotide
auguucuaaguauagccau

SEQ ID NO: 1446122 - RNA, 19 nt, Artificial Sequence
  Description of Artificial Sequence: Synthetic oligonucleotide
auaauucccuauguuucac

SEQ ID NO: 1446123 - RNA, 19 nt, Artificial Sequence
  Description of Artificial Sequence: Synthetic oligonucleotide
gauaucuagggcuuucucu

SEQ ID NO: 1446124 - RNA, 19 nt, Artificial Sequence
  Description of Artificial Sequence: Synthetic oligonucleotide
ggacccaugacccuuauca

SEQ ID NO: 1446125 - RNA, 19 nt, Artificial Sequence
  Description of Artificial Sequence: Synthetic oligonucleotide
aacuaacugucaucugaca

SEQ ID NO: 1446126 - RNA, 19 nt, Artificial Sequence
  Description of Artificial Sequence: Synthetic oligonucleotide
uauuuuggacuuucuuaga

SEQ ID NO: 1446127 - RNA, 19 nt, Artificial Sequence
  Description of Artificial Sequence: Synthetic oligonucleotide
agcaucagggccgcaauac

SEQ ID NO: 1446128 - RNA, 19 nt, Artificial Sequence
  Description of Artificial Sequence: Synthetic oligonucleotide
ggaucgaacaucucuauga

SEQ ID NO: 1446129 - RNA, 19 nt, Artificial Sequence
  Description of Artificial Sequence: Synthetic oligonucleotide
gaagaguagcgauaaccuc

SEQ ID NO: 1446130 - RNA, 19 nt, Artificial Sequence
  Description of Artificial Sequence: Synthetic oligonucleotide
acagucucaaaucuauuuu

SEQ ID NO: 1446131 - RNA, 19 nt, Artificial Sequence
  Description of Artificial Sequence: Synthetic oligonucleotide
aaaggcaguccacauucau

SEQ ID NO: 1446132 - RNA, 19 nt, Artificial Sequence
  Description of Artificial Sequence: Synthetic oligonucleotide
ucaguugcucauuuagguc

SEQ ID NO: 1446133 - RNA, 19 nt, Artificial Sequence
  Description of Artificial Sequence: Synthetic oligonucleotide
uaaucagggcaaaucacuu

SEQ ID NO: 1446134 - RNA, 19 nt, Artificial Sequence
  Description of Artificial Sequence: Synthetic oligonucleotide
uucgguuaaauguuccuuu

SEQ ID NO: 1446135 - RNA, 19 nt, Artificial Sequence
  Description of Artificial Sequence: Synthetic oligonucleotide
ggcgucaacaacaacauac

SEQ ID NO: 1446136 - RNA, 19 nt, Artificial Sequence
  Description of Artificial Sequence: Synthetic oligonucleotide
uaaagugcuagaguccuuc

SEQ ID NO: 1446137 - RNA, 19 nt, Artificial Sequence
  Description of Artificial Sequence: Synthetic oligonucleotide
caguaagacaguuagcaaa

SEQ ID NO: 1446138 - RNA, 19 nt, Artificial Sequence
  Description of Artificial Sequence: Synthetic oligonucleotide
aaagugcuagaguccuuca

SEQ ID NO: 1446139 - RNA, 19 nt, Artificial Sequence
  Description of Artificial Sequence: Synthetic oligonucleotide
cauugugauaagaccuaag

SEQ ID NO: 1446140 - RNA, 19 nt, Artificial Sequence
  Description of Artificial Sequence: Synthetic oligonucleotide
uugacugaucaucugcgua

SEQ ID NO: 1446141 - RNA, 19 nt, Artificial Sequence
  Description of Artificial Sequence: Synthetic oligonucleotide
uacuuauuuggagucguac

SEQ ID NO: 1446142 - RNA, 19 nt, Artificial Sequence
  Description of Artificial Sequence: Synthetic oligonucleotide
gacaggaucgaacaucucu

SEQ ID NO: 1446143 - RNA, 19 nt, Artificial Sequence
  Description of Artificial Sequence: Synthetic oligonucleotide
auaccacucccaguaagac

SEQ ID NO: 1446144 - RNA, 19 nt, Artificial Sequence
  Description of Artificial Sequence: Synthetic oligonucleotide
aguguguuaauggagugaa

SEQ ID NO: 1446145 - RNA, 19 nt, Artificial Sequence
  Description of Artificial Sequence: Synthetic oligonucleotide
gcaaacuagguccugaaga

SEQ ID NO: 1446146 - RNA, 19 nt, Artificial Sequence
  Description of Artificial Sequence: Synthetic oligonucleotide
uugcuuauguguugacuga

SEQ ID NO: 1446147 - RNA, 19 nt, Artificial Sequence
  Description of Artificial Sequence: Synthetic oligonucleotide
cguacauaaaacuuugaac

SEQ ID NO: 1446148 - RNA, 19 nt, Artificial Sequence
  Description of Artificial Sequence: Synthetic oligonucleotide
aguauuuuguaguguguua

SEQ ID NO: 1446149 - RNA, 19 nt, Artificial Sequence
  Description of Artificial Sequence: Synthetic oligonucleotide
agcuuccgccuuuacaguc

SEQ ID NO: 1446150 - RNA, 19 nt, Artificial Sequence
  Description of Artificial Sequence: Synthetic oligonucleotide
caugacugcucaaagaaua

SEQ ID NO: 1446151 - RNA, 19 nt, Artificial Sequence
  Description of Artificial Sequence: Synthetic oligonucleotide
agccauugugauaagaccu

SEQ ID NO: 1446152 - RNA, 19 nt, Artificial Sequence
  Description of Artificial Sequence: Synthetic oligonucleotide
agucguacauaaaacuuug

SEQ ID NO: 1446153 - RNA, 19 nt, Artificial Sequence
  Description of Artificial Sequence: Synthetic oligonucleotide
cucauagggauuguacagc

SEQ ID NO: 1446154 - RNA, 19 nt, Artificial Sequence
  Description of Artificial Sequence: Synthetic oligonucleotide
guaguguguuaauggagug

SEQ ID NO: 1446155 - RNA, 19 nt, Artificial Sequence
  Description of Artificial Sequence: Synthetic oligonucleotide
agcaaacuagguccugaag

SEQ ID NO: 1446156 - RNA, 19 nt, Artificial Sequence
  Description of Artificial Sequence: Synthetic oligonucleotide
uagggauuguacagcguca

SEQ ID NO: 1446157 - RNA, 19 nt, Artificial Sequence
  Description of Artificial Sequence: Synthetic oligonucleotide
gauuuccuuccacuaacuc

SEQ ID NO: 1446158 - RNA, 19 nt, Artificial Sequence
  Description of Artificial Sequence: Synthetic oligonucleotide
ucuguaacauaaagugcua

SEQ ID NO: 1446159 - RNA, 19 nt, Artificial Sequence
  Description of Artificial Sequence: Synthetic oligonucleotide
agggcuuucucuacuuggc

SEQ ID NO: 1446160 - RNA, 19 nt, Artificial Sequence
  Description of Artificial Sequence: Synthetic oligonucleotide
uuaaacuuugaaggaccca

SEQ ID NO: 1446161 - RNA, 19 nt, Artificial Sequence
  Description of Artificial Sequence: Synthetic oligonucleotide
caugacccuuaucaaagug

SEQ ID NO: 1446162 - RNA, 19 nt, Artificial Sequence
  Description of Artificial Sequence: Synthetic oligonucleotide
auaaaaggcaguccacauu

SEQ ID NO: 1446163 - RNA, 19 nt, Artificial Sequence
  Description of Artificial Sequence: Synthetic oligonucleotide
uguucuaaguauagccauu

SEQ ID NO: 1446164 - RNA, 19 nt, Artificial Sequence
  Description of Artificial Sequence: Synthetic oligonucleotide
auuguacagcgucaacacu

SEQ ID NO: 1446165 - RNA, 19 nt, Artificial Sequence
  Description of Artificial Sequence: Synthetic oligonucleotide
ucuacuuggcuuagaguuu

SEQ ID NO: 1446166 - RNA, 19 nt, Artificial Sequence
  Description of Artificial Sequence: Synthetic oligonucleotide
cugcguaaaauaucagcuc

SEQ ID NO: 1446167 - RNA, 19 nt, Artificial Sequence
  Description of Artificial Sequence: Synthetic oligonucleotide
uuauguguugacugaucau

SEQ ID NO: 1446168 - RNA, 19 nt, Artificial Sequence
  Description of Artificial Sequence: Synthetic oligonucleotide
agggcaaaucacuuacacu

SEQ ID NO: 1446169 - RNA, 19 nt, Artificial Sequence
  Description of Artificial Sequence: Synthetic oligonucleotide
acagauaucuagggcuuuc

SEQ ID NO: 1446170 - RNA, 19 nt, Artificial Sequence
  Description of Artificial Sequence: Synthetic oligonucleotide
agcgucaacacuugcuuau

SEQ ID NO: 1446171 - RNA, 19 nt, Artificial Sequence
  Description of Artificial Sequence: Synthetic oligonucleotide
aaacuuugaaggacccaug

SEQ ID NO: 1446172 - RNA, 19 nt, Artificial Sequence
  Description of Artificial Sequence: Synthetic oligonucleotide
aagugcuagaguccuucaa

SEQ ID NO: 1446173 - RNA, 19 nt, Artificial Sequence
  Description of Artificial Sequence: Synthetic oligonucleotide
aauuugucuaucacaccau

SEQ ID NO: 1446174 - RNA, 19 nt, Artificial Sequence
  Description of Artificial Sequence: Synthetic oligonucleotide
cuguaacauaaagugcuag

SEQ ID NO: 1446175 - RNA, 19 nt, Artificial Sequence
  Description of Artificial Sequence: Synthetic oligonucleotide
uuccuaaucagggcaaauc

SEQ ID NO: 1446176 - RNA, 19 nt, Artificial Sequence
  Description of Artificial Sequence: Synthetic oligonucleotide
gucucagugagugauacaa

SEQ ID NO: 1446177 - RNA, 19 nt, Artificial Sequence
  Description of Artificial Sequence: Synthetic oligonucleotide
auaagaccuaagauauaag

SEQ ID NO: 1446178 - RNA, 19 nt, Artificial Sequence
  Description of Artificial Sequence: Synthetic oligonucleotide
gugagugauacaaaauaga

SEQ ID NO: 1446179 - RNA, 19 nt, Artificial Sequence
  Description of Artificial Sequence: Synthetic oligonucleotide
cagugagugauacaaaaua

SEQ ID NO: 1446180 - RNA, 19 nt, Artificial Sequence
  Description of Artificial Sequence: Synthetic oligonucleotide
agcgauaaccucuuuccuu

SEQ ID NO: 1446181 - RNA, 19 nt, Artificial Sequence
  Description of Artificial Sequence: Synthetic oligonucleotide
uagcgauaaccucuuuccu

SEQ ID NO: 1446182 - RNA, 19 nt, Artificial Sequence
  Description of Artificial Sequence: Synthetic oligonucleotide
cauacuaaguuuacaaaau

SEQ ID NO: 1446183 - RNA, 19 nt, Artificial Sequence
  Description of Artificial Sequence: Synthetic oligonucleotide
ugacugcucaaagaauaca

SEQ ID NO: 1446184 - RNA, 19 nt, Artificial Sequence
  Description of Artificial Sequence: Synthetic oligonucleotide
ugggagaagaguagcgaua

SEQ ID NO: 1446185 - RNA, 19 nt, Artificial Sequence
  Description of Artificial Sequence: Synthetic oligonucleotide
gauaaaaggcaguccacau

SEQ ID NO: 1446186 - RNA, 19 nt, Artificial Sequence
  Description of Artificial Sequence: Synthetic oligonucleotide
augacccuuaucaaaguga

SEQ ID NO: 1446187 - RNA, 19 nt, Artificial Sequence
  Description of Artificial Sequence: Synthetic oligonucleotide
cauaccacucccaguaaga

SEQ ID NO: 1446188 - RNA, 19 nt, Artificial Sequence
  Description of Artificial Sequence: Synthetic oligonucleotide
ugcaccugcggcgucaaca

SEQ ID NO: 1446189 - RNA, 19 nt, Artificial Sequence
  Description of Artificial Sequence: Synthetic oligonucleotide
uuucgguuaaauguuccuu

SEQ ID NO: 1446190 - RNA, 19 nt, Artificial Sequence
  Description of Artificial Sequence: Synthetic oligonucleotide
uucgcggaugggagaagag

SEQ ID NO: 1446191 - RNA, 19 nt, Artificial Sequence
  Description of Artificial Sequence: Synthetic oligonucleotide
uuccuuccacuaacucugg

SEQ ID NO: 1446192 - RNA, 19 nt, Artificial Sequence
  Description of Artificial Sequence: Synthetic oligonucleotide
cccaugacccuuaucaaag

SEQ ID NO: 1446193 - RNA, 19 nt, Artificial Sequence
  Description of Artificial Sequence: Synthetic oligonucleotide
caacauacuuauuuggagu

SEQ ID NO: 1446194 - RNA, 19 nt, Artificial Sequence
  Description of Artificial Sequence: Synthetic oligonucleotide
ucgguuaaauguuccuuua

SEQ ID NO: 1446195 - RNA, 19 nt, Artificial Sequence
  Description of Artificial Sequence: Synthetic oligonucleotide
gguauagauuuuaaaagaa

SEQ ID NO: 1446196 - RNA, 19 nt, Artificial Sequence
  Description of Artificial Sequence: Synthetic oligonucleotide
aaucuauuuuggacuuucu

SEQ ID NO: 1446197 - RNA, 19 nt, Artificial Sequence
  Description of Artificial Sequence: Synthetic oligonucleotide
ucuuucgcggaugggagaa

SEQ ID NO: 1446198 - RNA, 19 nt, Artificial Sequence
  Description of Artificial Sequence: Synthetic oligonucleotide
ucccaguaagacaguuagc

SEQ ID NO: 1446199 - RNA, 19 nt, Artificial Sequence
  Description of Artificial Sequence: Synthetic oligonucleotide
gcaaaucacuuacacucag

SEQ ID NO: 1446200 - RNA, 19 nt, Artificial Sequence
  Description of Artificial Sequence: Synthetic oligonucleotide
aaaugccuaccuuccuuua

SEQ ID NO: 1446201 - RNA, 19 nt, Artificial Sequence
  Description of Artificial Sequence: Synthetic oligonucleotide
uuccacuaacucugguugu

SEQ ID NO: 1446202 - RNA, 19 nt, Artificial Sequence
  Description of Artificial Sequence: Synthetic oligonucleotide
cucugagacuuggaggcgg

SEQ ID NO: 1446203 - RNA, 19 nt, Artificial Sequence
  Description of Artificial Sequence: Synthetic oligonucleotide
agaauacacuuucgguuaa

SEQ ID NO: 1446204 - RNA, 19 nt, Artificial Sequence
  Description of Artificial Sequence: Synthetic oligonucleotide
ucucaguaacaguggcucu

SEQ ID NO: 1446205 - RNA, 19 nt, Artificial Sequence
  Description of Artificial Sequence: Synthetic oligonucleotide
caucugcguaaaauaucag

SEQ ID NO: 1446206 - RNA, 19 nt, Artificial Sequence
  Description of Artificial Sequence: Synthetic oligonucleotide
auaaccucuuuccuuccua

SEQ ID NO: 1446207 - RNA, 19 nt, Artificial Sequence
  Description of Artificial Sequence: Synthetic oligonucleotide
auguccuuggaaacuaacu

SEQ ID NO: 1446208 - RNA, 19 nt, Artificial Sequence
  Description of Artificial Sequence: Synthetic oligonucleotide
acccaugacccuuaucaaa

SEQ ID NO: 1446209 - RNA, 19 nt, Artificial Sequence
  Description of Artificial Sequence: Synthetic oligonucleotide
uuucgcggaugggagaaga

SEQ ID NO: 1446210 - RNA, 19 nt, Artificial Sequence
  Description of Artificial Sequence: Synthetic oligonucleotide
uuuaauccuuguucauguu

SEQ ID NO: 1446211 - RNA, 19 nt, Artificial Sequence
  Description of Artificial Sequence: Synthetic oligonucleotide
gauucacacuuaaguggag

SEQ ID NO: 1446212 - RNA, 19 nt, Artificial Sequence
  Description of Artificial Sequence: Synthetic oligonucleotide
ggauuguacagcgucaaca

SEQ ID NO: 1446213 - RNA, 19 nt, Artificial Sequence
  Description of Artificial Sequence: Synthetic oligonucleotide
uuacagucucaaaucuauu

SEQ ID NO: 1446214 - RNA, 19 nt, Artificial Sequence
  Description of Artificial Sequence: Synthetic oligonucleotide
uucuuucgcggaugggaga

SEQ ID NO: 1446215 - RNA, 19 nt, Artificial Sequence
  Description of Artificial Sequence: Synthetic oligonucleotide
ggucaguugcucauuuagg

SEQ ID NO: 1446216 - RNA, 19 nt, Artificial Sequence
  Description of Artificial Sequence: Synthetic oligonucleotide
gacuuggaggcggaauuug

SEQ ID NO: 1446217 - RNA, 19 nt, Artificial Sequence
  Description of Artificial Sequence: Synthetic oligonucleotide
uugaaggacccaugacccu

SEQ ID NO: 1446218 - RNA, 19 nt, Artificial Sequence
  Description of Artificial Sequence: Synthetic oligonucleotide
ccuaaucagggcaaaucac

SEQ ID NO: 1446219 - RNA, 19 nt, Artificial Sequence
  Description of Artificial Sequence: Synthetic oligonucleotide
uacauaccacucccaguaa

SEQ ID NO: 1446220 - RNA, 19 nt, Artificial Sequence
  Description of Artificial Sequence: Synthetic oligonucleotide
gcgauaaccucuuuccuuc

SEQ ID NO: 1446221 - RNA, 19 nt, Artificial Sequence
  Description of Artificial Sequence: Synthetic oligonucleotide
uggaggcggaauuugucua

SEQ ID NO: 1446222 - RNA, 19 nt, Artificial Sequence
  Description of Artificial Sequence: Synthetic oligonucleotide
cuuuacagucucaaaucua

SEQ ID NO: 1446223 - RNA, 19 nt, Artificial Sequence
  Description of Artificial Sequence: Synthetic oligonucleotide
aguuagcaaacuagguccu

SEQ ID NO: 1446224 - RNA, 19 nt, Artificial Sequence
  Description of Artificial Sequence: Synthetic oligonucleotide
aaaaggcaguccacauuca

SEQ ID NO: 1446225 - RNA, 19 nt, Artificial Sequence
  Description of Artificial Sequence: Synthetic oligonucleotide
ugaaggacccaugacccuu

SEQ ID NO: 1446226 - RNA, 19 nt, Artificial Sequence
  Description of Artificial Sequence: Synthetic oligonucleotide
uccgccuuuacagucucaa

SEQ ID NO: 1446227 - RNA, 19 nt, Artificial Sequence
  Description of Artificial Sequence: Synthetic oligonucleotide
cgcaauacauaccacuccc

SEQ ID NO: 1446228 - RNA, 19 nt, Artificial Sequence
  Description of Artificial Sequence: Synthetic oligonucleotide
ugccuaccuuccuuuagaa

SEQ ID NO: 1446229 - RNA, 19 nt, Artificial Sequence
  Description of Artificial Sequence: Synthetic oligonucleotide
gcggaauuugucuaucaca

SEQ ID NO: 1446230 - RNA, 19 nt, Artificial Sequence
  Description of Artificial Sequence: Synthetic oligonucleotide
uccacuaacucugguuguc

SEQ ID NO: 1446231 - RNA, 19 nt, Artificial Sequence
  Description of Artificial Sequence: Synthetic oligonucleotide
ugcuuauguguugacugau

SEQ ID NO: 1446232 - RNA, 19 nt, Artificial Sequence
  Description of Artificial Sequence: Synthetic oligonucleotide
uagugacaggaucgaacau

SEQ ID NO: 1446233 - RNA, 19 nt, Artificial Sequence
  Description of Artificial Sequence: Synthetic oligonucleotide
acacuuucgguuaaauguu

SEQ ID NO: 1446234 - RNA, 19 nt, Artificial Sequence
  Description of Artificial Sequence: Synthetic oligonucleotide
uuguucuuucgcggauggg

SEQ ID NO: 1446235 - RNA, 19 nt, Artificial Sequence
  Description of Artificial Sequence: Synthetic oligonucleotide
ccuauguuucacucagaag

SEQ ID NO: 1446236 - RNA, 19 nt, Artificial Sequence
  Description of Artificial Sequence: Synthetic oligonucleotide
ucacacuuaaguggaggua

SEQ ID NO: 1446237 - RNA, 19 nt, Artificial Sequence
  Description of Artificial Sequence: Synthetic oligonucleotide
acaggaucgaacaucucua

SEQ ID NO: 1446238 - RNA, 19 nt, Artificial Sequence
  Description of Artificial Sequence: Synthetic oligonucleotide
accauagugacaggaucga

SEQ ID NO: 1446239 - RNA, 19 nt, Artificial Sequence
  Description of Artificial Sequence: Synthetic oligonucleotide
auaucagcuccgugggaaa

SEQ ID NO: 1446240 - RNA, 19 nt, Artificial Sequence
  Description of Artificial Sequence: Synthetic oligonucleotide
agcuccgugggaaacacaa

SEQ ID NO: 1446241 - RNA, 19 nt, Artificial Sequence
  Description of Artificial Sequence: Synthetic oligonucleotide
gguuaaccagagguaaagc

SEQ ID NO: 1446242 - RNA, 19 nt, Artificial Sequence
  Description of Artificial Sequence: Synthetic oligonucleotide
ggaagauuuccuuccacua

SEQ ID NO: 1446243 - RNA, 19 nt, Artificial Sequence
  Description of Artificial Sequence: Synthetic oligonucleotide
cuuucucuacuuggcuuag

SEQ ID NO: 1446244 - RNA, 19 nt, Artificial Sequence
  Description of Artificial Sequence: Synthetic oligonucleotide
aucauguccuuggaaacua

SEQ ID NO: 1446245 - RNA, 19 nt, Artificial Sequence
  Description of Artificial Sequence: Synthetic oligonucleotide
ucgcggaugggagaagagu

SEQ ID NO: 1446246 - RNA, 19 nt, Artificial Sequence
  Description of Artificial Sequence: Synthetic oligonucleotide
ggaaacuaacugucaucug

SEQ ID NO: 1446247 - RNA, 19 nt, Artificial Sequence
  Description of Artificial Sequence: Synthetic oligonucleotide
uacuacacauuugcaguua

SEQ ID NO: 1446248 - RNA, 19 nt, Artificial Sequence
  Description of Artificial Sequence: Synthetic oligonucleotide
cccaguaagacaguuagca

SEQ ID NO: 1446249 - RNA, 19 nt, Artificial Sequence
  Description of Artificial Sequence: Synthetic oligonucleotide
gacaguuagcaaacuaggu

SEQ ID NO: 1446250 - RNA, 19 nt, Artificial Sequence
  Description of Artificial Sequence: Synthetic oligonucleotide
uaucagcuccgugggaaac

SEQ ID NO: 1446251 - RNA, 19 nt, Artificial Sequence
  Description of Artificial Sequence: Synthetic oligonucleotide
cuaacugucaucugacauu

SEQ ID NO: 1446252 - RNA, 19 nt, Artificial Sequence
  Description of Artificial Sequence: Synthetic oligonucleotide
aaugucucagugagugaua

SEQ ID NO: 1446253 - RNA, 19 nt, Artificial Sequence
  Description of Artificial Sequence: Synthetic oligonucleotide
uccuuccacuaacucuggu

SEQ ID NO: 1446254 - RNA, 19 nt, Artificial Sequence
  Description of Artificial Sequence: Synthetic oligonucleotide
accugcggcgucaacaaca

SEQ ID NO: 1446255 - RNA, 19 nt, Artificial Sequence
  Description of Artificial Sequence: Synthetic oligonucleotide
uaauaacauuaaggguuaa

SEQ ID NO: 1446256 - RNA, 19 nt, Artificial Sequence
  Description of Artificial Sequence: Synthetic oligonucleotide
aggacccaugacccuuauc

SEQ ID NO: 1446257 - RNA, 19 nt, Artificial Sequence
  Description of Artificial Sequence: Synthetic oligonucleotide
ggcggaauuugucuaucac

SEQ ID NO: 1446258 - RNA, 19 nt, Artificial Sequence
  Description of Artificial Sequence: Synthetic oligonucleotide
gagacuuggaggcggaauu

SEQ ID NO: 1446259 - RNA, 19 nt, Artificial Sequence
  Description of Artificial Sequence: Synthetic oligonucleotide
auguuucacucagaaguau

SEQ ID NO: 1446260 - RNA, 19 nt, Artificial Sequence
  Description of Artificial Sequence: Synthetic oligonucleotide
ucaguaacaguggcucuuu

SEQ ID NO: 1446261 - RNA, 19 nt, Artificial Sequence
  Description of Artificial Sequence: Synthetic oligonucleotide
guacagcgucaacacuugc

SEQ ID NO: 1446262 - RNA, 19 nt, Artificial Sequence
  Description of Artificial Sequence: Synthetic oligonucleotide
ggaugaacauacuaaguuu

SEQ ID NO: 1446263 - RNA, 19 nt, Artificial Sequence
  Description of Artificial Sequence: Synthetic oligonucleotide
cuuucgguuaaauguuccu

SEQ ID NO: 1446264 - RNA, 19 nt, Artificial Sequence
  Description of Artificial Sequence: Synthetic oligonucleotide
acauuccuaaucagggcaa

SEQ ID NO: 1446265 - RNA, 19 nt, Artificial Sequence
  Description of Artificial Sequence: Synthetic oligonucleotide
cauuugcaguuauuugaaa

SEQ ID NO: 1446266 - RNA, 19 nt, Artificial Sequence
  Description of Artificial Sequence: Synthetic oligonucleotide
cagggccgcaauacauacc

SEQ ID NO: 1446267 - RNA, 19 nt, Artificial Sequence
  Description of Artificial Sequence: Synthetic oligonucleotide
acaugacugcucaaagaau

SEQ ID NO: 1446268 - RNA, 19 nt, Artificial Sequence
  Description of Artificial Sequence: Synthetic oligonucleotide
agggauuguacagcgucaa

SEQ ID NO: 1446269 - RNA, 19 nt, Artificial Sequence
  Description of Artificial Sequence: Synthetic oligonucleotide
cuaucacaccauagugaca

SEQ ID NO: 1446270 - RNA, 19 nt, Artificial Sequence
  Description of Artificial Sequence: Synthetic oligonucleotide
cuaugacgaaucacaauau

SEQ ID NO: 1446271 - RNA, 19 nt, Artificial Sequence
  Description of Artificial Sequence: Synthetic oligonucleotide
uuucucuacuuggcuuaga

SEQ ID NO: 1446272 - RNA, 19 nt, Artificial Sequence
  Description of Artificial Sequence: Synthetic oligonucleotide
auuccuaaucagggcaaau

SEQ ID NO: 1446273 - RNA, 19 nt, Artificial Sequence
  Description of Artificial Sequence: Synthetic oligonucleotide
ccuuaauaacauuaagggu

SEQ ID NO: 1446274 - RNA, 19 nt, Artificial Sequence
  Description of Artificial Sequence: Synthetic oligonucleotide
cauacuuauuuggagucgu

SEQ ID NO: 1446275 - RNA, 19 nt, Artificial Sequence
  Description of Artificial Sequence: Synthetic oligonucleotide
caagggacuugggagaaaa

SEQ ID NO: 1446276 - RNA, 19 nt, Artificial Sequence
  Description of Artificial Sequence: Synthetic oligonucleotide
agaaaaccaaaagguuauu

SEQ ID NO: 1446277 - RNA, 19 nt, Artificial Sequence
  Description of Artificial Sequence: Synthetic oligonucleotide
ccgcaauacauaccacucc

SEQ ID NO: 1446278 - RNA, 19 nt, Artificial Sequence
  Description of Artificial Sequence: Synthetic oligonucleotide
agaguagcgauaaccucuu

SEQ ID NO: 1446279 - RNA, 19 nt, Artificial Sequence
  Description of Artificial Sequence: Synthetic oligonucleotide
guugacugaucaucugcgu

SEQ ID NO: 1446280 - RNA, 19 nt, Artificial Sequence
  Description of Artificial Sequence: Synthetic oligonucleotide
gaauacacuuucgguuaaa

SEQ ID NO: 1446281 - RNA, 19 nt, Artificial Sequence
  Description of Artificial Sequence: Synthetic oligonucleotide
gaacaucucuaugacgaau

SEQ ID NO: 1446282 - RNA, 19 nt, Artificial Sequence
  Description of Artificial Sequence: Synthetic oligonucleotide
acuuggcuuagaguuuaaa

SEQ ID NO: 1446283 - RNA, 19 nt, Artificial Sequence
  Description of Artificial Sequence: Synthetic oligonucleotide
uuccgccuuuacagucuca

SEQ ID NO: 1446284 - RNA, 19 nt, Artificial Sequence
  Description of Artificial Sequence: Synthetic oligonucleotide
ggcaaaucacuuacacuca

SEQ ID NO: 1446285 - RNA, 19 nt, Artificial Sequence
  Description of Artificial Sequence: Synthetic oligonucleotide
gccgcaauacauaccacuc

SEQ ID NO: 1446286 - RNA, 19 nt, Artificial Sequence
  Description of Artificial Sequence: Synthetic oligonucleotide
caguaacaguggcucuuuc

SEQ ID NO: 1446287 - RNA, 19 nt, Artificial Sequence
  Description of Artificial Sequence: Synthetic oligonucleotide
caucagggccgcaauacau

SEQ ID NO: 1446288 - RNA, 19 nt, Artificial Sequence
  Description of Artificial Sequence: Synthetic oligonucleotide
gagguaaagccaggaugaa

SEQ ID NO: 1446289 - RNA, 19 nt, Artificial Sequence
  Description of Artificial Sequence: Synthetic oligonucleotide
auuuggagucguacauaaa

SEQ ID NO: 1446290 - RNA, 19 nt, Artificial Sequence
  Description of Artificial Sequence: Synthetic oligonucleotide
cucuaugacgaaucacaau

SEQ ID NO: 1446291 - RNA, 19 nt, Artificial Sequence
  Description of Artificial Sequence: Synthetic oligonucleotide
gcacugaggcuucacugca

SEQ ID NO: 1446292 - RNA, 19 nt, Artificial Sequence
  Description of Artificial Sequence: Synthetic oligonucleotide
ggccgcaauacauaccacu

SEQ ID NO: 1446293 - RNA, 19 nt, Artificial Sequence
  Description of Artificial Sequence: Synthetic oligonucleotide
cuuucgcggaugggagaag

SEQ ID NO: 1446294 - RNA, 19 nt, Artificial Sequence
  Description of Artificial Sequence: Synthetic oligonucleotide
gggauuguacagcgucaac

SEQ ID NO: 1446295 - RNA, 19 nt, Artificial Sequence
  Description of Artificial Sequence: Synthetic oligonucleotide
cccuauguuucacucagaa

SEQ ID NO: 1446296 - RNA, 19 nt, Artificial Sequence
  Description of Artificial Sequence: Synthetic oligonucleotide
auacuuauuuggagucgua

SEQ ID NO: 1446297 - RNA, 19 nt, Artificial Sequence
  Description of Artificial Sequence: Synthetic oligonucleotide
ccuuaucaaagugaauuaa

SEQ ID NO: 1446298 - RNA, 19 nt, Artificial Sequence
  Description of Artificial Sequence: Synthetic oligonucleotide
ggagucguacauaaaacuu

SEQ ID NO: 1446299 - RNA, 19 nt, Artificial Sequence
  Description of Artificial Sequence: Synthetic oligonucleotide
cauagggauuguacagcgu

SEQ ID NO: 1446300 - RNA, 19 nt, Artificial Sequence
  Description of Artificial Sequence: Synthetic oligonucleotide
gcaucagggccgcaauaca

SEQ ID NO: 1446301 - RNA, 19 nt, Artificial Sequence
  Description of Artificial Sequence: Synthetic oligonucleotide
cagcgacugcuccuugcuc

SEQ ID NO: 1446302 - RNA, 19 nt, Artificial Sequence
  Description of Artificial Sequence: Synthetic oligonucleotide
cauuccuaaucagggcaaa

SEQ ID NO: 1446303 - RNA, 19 nt, Artificial Sequence
  Description of Artificial Sequence: Synthetic oligonucleotide
gcucugagacuuggaggcg

SEQ ID NO: 1446304 - RNA, 19 nt, Artificial Sequence
  Description of Artificial Sequence: Synthetic oligonucleotide
ccaguaagacaguuagcaa

SEQ ID NO: 1446305 - RNA, 19 nt, Artificial Sequence
  Description of Artificial Sequence: Synthetic oligonucleotide
gucaucugacauuccuaau

SEQ ID NO: 1446306 - RNA, 19 nt, Artificial Sequence
  Description of Artificial Sequence: Synthetic oligonucleotide
cagcgucaacacuugcuua

SEQ ID NO: 1446307 - RNA, 19 nt, Artificial Sequence
  Description of Artificial Sequence: Synthetic oligonucleotide
cuggucaguugcucauuua

SEQ ID NO: 1446308 - RNA, 19 nt, Artificial Sequence
  Description of Artificial Sequence: Synthetic oligonucleotide
gcaguuauuugaaaucauu

SEQ ID NO: 1446309 - RNA, 19 nt, Artificial Sequence
  Description of Artificial Sequence: Synthetic oligonucleotide
gcaccugcggcgucaacaa

SEQ ID NO: 1446310 - RNA, 19 nt, Artificial Sequence
  Description of Artificial Sequence: Synthetic oligonucleotide
caccugcggcgucaacaac

SEQ ID NO: 1446311 - RNA, 19 nt, Artificial Sequence
  Description of Artificial Sequence: Synthetic oligonucleotide
gccauugugauaagaccua

SEQ ID NO: 1446312 - RNA, 19 nt, Artificial Sequence
  Description of Artificial Sequence: Synthetic oligonucleotide
gcgucaacacuugcuuaug

SEQ ID NO: 1446313 - RNA, 19 nt, Artificial Sequence
  Description of Artificial Sequence: Synthetic oligonucleotide
guguguuaauggagugaaa

SEQ ID NO: 1446314 - RNA, 19 nt, Artificial Sequence
  Description of Artificial Sequence: Synthetic oligonucleotide
cagauaucuagggcuuucu

SEQ ID NO: 1446315 - RNA, 19 nt, Artificial Sequence
  Description of Artificial Sequence: Synthetic oligonucleotide
cucaguaacaguggcucuu

SEQ ID NO: 1446316 - RNA, 19 nt, Artificial Sequence
  Description of Artificial Sequence: Synthetic oligonucleotide
gcgucaacaacaacauacu

SEQ ID NO: 1446317 - RNA, 19 nt, Artificial Sequence
  Description of Artificial Sequence: Synthetic oligonucleotide
cugcggcgucaacaacaac

SEQ ID NO: 1446318 - RNA, 19 nt, Artificial Sequence
  Description of Artificial Sequence: Synthetic oligonucleotide
ggaggcggaauuugucuau

SEQ ID NO: 1446319 - RNA, 19 nt, Artificial Sequence
  Description of Artificial Sequence: Synthetic oligonucleotide
cgcggaugggagaagagua

SEQ ID NO: 1446320 - RNA, 19 nt, Artificial Sequence
  Description of Artificial Sequence: Synthetic oligonucleotide
ccugcggcgucaacaacaa

SEQ ID NO: 1446321 - RNA, 19 nt, Artificial Sequence
  Description of Artificial Sequence: Synthetic oligonucleotide
cagcuuccgccuuuacagu

SEQ ID NO: 1446322 - RNA, 19 nt, Artificial Sequence
  Description of Artificial Sequence: Synthetic oligonucleotide
gacccuuaucaaagugaau

SEQ ID NO: 1446323 - RNA, 19 nt, Artificial Sequence
  Description of Artificial Sequence: Synthetic oligonucleotide
cagcaucagggccgcaaua

SEQ ID NO: 1446324 - RNA, 19 nt, Artificial Sequence
  Description of Artificial Sequence: Synthetic oligonucleotide
cgccuuuacagucucaaau

SEQ ID NO: 1446325 - RNA, 19 nt, Artificial Sequence
  Description of Artificial Sequence: Synthetic oligonucleotide
ccauugugauaagaccuaa

SEQ ID NO: 1446326 - RNA, 19 nt, Artificial Sequence
  Description of Artificial Sequence: Synthetic oligonucleotide
gcauuggcacugagucccc

SEQ ID NO: 1446327 - RNA, 19 nt, Artificial Sequence
  Description of Artificial Sequence: Synthetic oligonucleotide
gcuuccgccuuuacagucu

SEQ ID NO: 1446328 - RNA, 19 nt, Artificial Sequence
  Description of Artificial Sequence: Synthetic oligonucleotide
gcggcgucaacaacaacau

SEQ ID NO: 1446329 - RNA, 19 nt, Artificial Sequence
  Description of Artificial Sequence: Synthetic oligonucleotide
cugagacuuggaggcggaa

SEQ ID NO: 1446330 - RNA, 19 nt, Artificial Sequence
  Description of Artificial Sequence: Synthetic oligonucleotide
cguaaaauaucagcuccgu

SEQ ID NO: 1446331 - RNA, 19 nt, Artificial Sequence
  Description of Artificial Sequence: Synthetic oligonucleotide
gaguagcgauaaccucuuu

SEQ ID NO: 1446332 - RNA, 19 nt, Artificial Sequence
  Description of Artificial Sequence: Synthetic oligonucleotide
ccaugacccuuaucaaagu

SEQ ID NO: 1446333 - RNA, 19 nt, Artificial Sequence
  Description of Artificial Sequence: Synthetic oligonucleotide
cacagauaucuagggcuuu

SEQ ID NO: 1446334 - RNA, 19 nt, Artificial Sequence
  Description of Artificial Sequence: Synthetic oligonucleotide
ccauagugacaggaucgaa

SEQ ID NO: 1446335 - RNA, 19 nt, Artificial Sequence
  Description of Artificial Sequence: Synthetic oligonucleotide
ccgccuuuacagucucaaa

SEQ ID NO: 1446336 - RNA, 19 nt, Artificial Sequence
  Description of Artificial Sequence: Synthetic oligonucleotide
ggcaguccacauucauauu

SEQ ID NO: 1446337 - RNA, 19 nt, Artificial Sequence
  Description of Artificial Sequence: Synthetic oligonucleotide
ccacuaacucugguugucu

SEQ ID NO: 1446338 - RNA, 19 nt, Artificial Sequence
  Description of Artificial Sequence: Synthetic oligonucleotide
aaauguuaccagaagaccc

SEQ ID NO: 1446339 - RNA, 19 nt, Artificial Sequence
  Description of Artificial Sequence: Synthetic oligonucleotide
caggccauaaaguagaucc

SEQ ID NO: 1446340 - RNA, 19 nt, Artificial Sequence
  Description of Artificial Sequence: Synthetic oligonucleotide
caugacaacaaacacacag

SEQ ID NO: 1446341 - RNA, 19 nt, Artificial Sequence
  Description of Artificial Sequence: Synthetic oligonucleotide
acauuuacuggcuuggaac

SEQ ID NO: 1446342 - RNA, 19 nt, Artificial Sequence
  Description of Artificial Sequence: Synthetic oligonucleotide
uuaugcauggccaauuccc

SEQ ID NO: 1446343 - RNA, 19 nt, Artificial Sequence
  Description of Artificial Sequence: Synthetic oligonucleotide
ugugaguggacacagguca

SEQ ID NO: 1446344 - RNA, 19 nt, Artificial Sequence
  Description of Artificial Sequence: Synthetic oligonucleotide
ggaacagugacccacaggg

SEQ ID NO: 1446345 - RNA, 19 nt, Artificial Sequence
  Description of Artificial Sequence: Synthetic oligonucleotide
gaagacgaagaagacaucg

SEQ ID NO: 1446346 - RNA, 19 nt, Artificial Sequence
  Description of Artificial Sequence: Synthetic oligonucleotide
uaggcaaugguacaggcca

SEQ ID NO: 1446347 - RNA, 19 nt, Artificial Sequence
  Description of Artificial Sequence: Synthetic oligonucleotide
uuuacaucgcggcugccgg

SEQ ID NO: 1446348 - RNA, 19 nt, Artificial Sequence
  Description of Artificial Sequence: Synthetic oligonucleotide
guagaugucucgcaggucc

SEQ ID NO: 1446349 - RNA, 19 nt, Artificial Sequence
  Description of Artificial Sequence: Synthetic oligonucleotide
gaugcuuaucuccucauac

SEQ ID NO: 1446350 - RNA, 19 nt, Artificial Sequence
  Description of Artificial Sequence: Synthetic oligonucleotide
uggaugucgaaccuguggc

SEQ ID NO: 1446351 - RNA, 19 nt, Artificial Sequence
  Description of Artificial Sequence: Synthetic oligonucleotide
acauccuucgcaaagccgc

SEQ ID NO: 1446352 - RNA, 19 nt, Artificial Sequence
  Description of Artificial Sequence: Synthetic oligonucleotide
ugcacauccgagcugagga

SEQ ID NO: 1446353 - RNA, 19 nt, Artificial Sequence
  Description of Artificial Sequence: Synthetic oligonucleotide
ucguagaagguacaauugc

SEQ ID NO: 1446354 - RNA, 19 nt, Artificial Sequence
  Description of Artificial Sequence: Synthetic oligonucleotide
aagguaggcaggcggauag

SEQ ID NO: 1446355 - RNA, 19 nt, Artificial Sequence
  Description of Artificial Sequence: Synthetic oligonucleotide
gacauggccccauuuaugc

SEQ ID NO: 1446356 - RNA, 19 nt, Artificial Sequence
  Description of Artificial Sequence: Synthetic oligonucleotide
auuuaugcauggccaauuc

SEQ ID NO: 1446357 - RNA, 19 nt, Artificial Sequence
  Description of Artificial Sequence: Synthetic oligonucleotide
uuuaugcauggccaauucc

SEQ ID NO: 1446358 - RNA, 19 nt, Artificial Sequence
  Description of Artificial Sequence: Synthetic oligonucleotide
ucgagugugaggacugugg

SEQ ID NO: 1446359 - RNA, 19 nt, Artificial Sequence
  Description of Artificial Sequence: Synthetic oligonucleotide
guuaccagaagacccaggc

SEQ ID NO: 1446360 - RNA, 19 nt, Artificial Sequence
  Description of Artificial Sequence: Synthetic oligonucleotide
gaucucuuuacaucgcggc

SEQ ID NO: 1446361 - RNA, 19 nt, Artificial Sequence
  Description of Artificial Sequence: Synthetic oligonucleotide
uagaagguacaauugcccc

SEQ ID NO: 1446362 - RNA, 19 nt, Artificial Sequence
  Description of Artificial Sequence: Synthetic oligonucleotide
ugaucucuuuacaucgcgg

SEQ ID NO: 1446363 - RNA, 19 nt, Artificial Sequence
  Description of Artificial Sequence: Synthetic oligonucleotide
aucgugcaggccuugaagg

SEQ ID NO: 1446364 - RNA, 19 nt, Artificial Sequence
  Description of Artificial Sequence: Synthetic oligonucleotide
aaggcacaugacaacaaac

SEQ ID NO: 1446365 - RNA, 19 nt, Artificial Sequence
  Description of Artificial Sequence: Synthetic oligonucleotide
aagugccacaaauguuacc

SEQ ID NO: 1446366 - RNA, 19 nt, Artificial Sequence
  Description of Artificial Sequence: Synthetic oligonucleotide
auagucuucaacauguaca

SEQ ID NO: 1446367 - RNA, 19 nt, Artificial Sequence
  Description of Artificial Sequence: Synthetic oligonucleotide
uccaucucgagugugagga

SEQ ID NO: 1446368 - RNA, 19 nt, Artificial Sequence
  Description of Artificial Sequence: Synthetic oligonucleotide
agagacgacaugcagcaug

SEQ ID NO: 1446369 - RNA, 19 nt, Artificial Sequence
  Description of Artificial Sequence: Synthetic oligonucleotide
ucucgcuuaugcuucauga

SEQ ID NO: 1446370 - RNA, 19 nt, Artificial Sequence
  Description of Artificial Sequence: Synthetic oligonucleotide
gaagguacaauugccccgg

SEQ ID NO: 1446371 - RNA, 19 nt, Artificial Sequence
  Description of Artificial Sequence: Synthetic oligonucleotide
uguguuuuguugccuccgg

SEQ ID NO: 1446372 - RNA, 19 nt, Artificial Sequence
  Description of Artificial Sequence: Synthetic oligonucleotide
gaaccuguggcaguaagcc

SEQ ID NO: 1446373 - RNA, 19 nt, Artificial Sequence
  Description of Artificial Sequence: Synthetic oligonucleotide
ugcaccuggaugucgaacc

SEQ ID NO: 1446374 - RNA, 19 nt, Artificial Sequence
  Description of Artificial Sequence: Synthetic oligonucleotide
cuuguagaugucucgcagg

SEQ ID NO: 1446375 - RNA, 19 nt, Artificial Sequence
  Description of Artificial Sequence: Synthetic oligonucleotide
uguacaggcagaaggcaca

SEQ ID NO: 1446376 - RNA, 19 nt, Artificial Sequence
  Description of Artificial Sequence: Synthetic oligonucleotide
ucucguagaagguacaauu

SEQ ID NO: 1446377 - RNA, 19 nt, Artificial Sequence
  Description of Artificial Sequence: Synthetic oligonucleotide
ggguggaugaguucgaggg

SEQ ID NO: 1446378 - RNA, 19 nt, Artificial Sequence
  Description of Artificial Sequence: Synthetic oligonucleotide
cugacaaucagcagugcac

SEQ ID NO: 1446379 - RNA, 19 nt, Artificial Sequence
  Description of Artificial Sequence: Synthetic oligonucleotide
aguucgagggcccgguggc

SEQ ID NO: 1446380 - RNA, 19 nt, Artificial Sequence
  Description of Artificial Sequence: Synthetic oligonucleotide
gacgaagaagacaucguag

SEQ ID NO: 1446381 - RNA, 19 nt, Artificial Sequence
  Description of Artificial Sequence: Synthetic oligonucleotide
aucaccgguuccuugggcg

SEQ ID NO: 1446382 - RNA, 19 nt, Artificial Sequence
  Description of Artificial Sequence: Synthetic oligonucleotide
acugagguacauccuucgc

SEQ ID NO: 1446383 - RNA, 19 nt, Artificial Sequence
  Description of Artificial Sequence: Synthetic oligonucleotide
uccgucauggaguccagag

SEQ ID NO: 1446384 - RNA, 19 nt, Artificial Sequence
  Description of Artificial Sequence: Synthetic oligonucleotide
gcaagagacauuuacuggc

SEQ ID NO: 1446385 - RNA, 19 nt, Artificial Sequence
  Description of Artificial Sequence: Synthetic oligonucleotide
aggggcgagguguucagcc

SEQ ID NO: 1446386 - RNA, 19 nt, Artificial Sequence
  Description of Artificial Sequence: Synthetic oligonucleotide
uccuugggcgcauacagug

SEQ ID NO: 1446387 - RNA, 19 nt, Artificial Sequence
  Description of Artificial Sequence: Synthetic oligonucleotide
uguuguaguccaucaccgg

SEQ ID NO: 1446388 - RNA, 19 nt, Artificial Sequence
  Description of Artificial Sequence: Synthetic oligonucleotide
gacugagguacauccuucg

SEQ ID NO: 1446389 - RNA, 19 nt, Artificial Sequence
  Description of Artificial Sequence: Synthetic oligonucleotide
ucaccgcauggccaaagcg

SEQ ID NO: 1446390 - RNA, 19 nt, Artificial Sequence
  Description of Artificial Sequence: Synthetic oligonucleotide
uguguagugggcucccugc

SEQ ID NO: 1446391 - RNA, 19 nt, Artificial Sequence
  Description of Artificial Sequence: Synthetic oligonucleotide
ucucgggcccaucaucucg

SEQ ID NO: 1446392 - RNA, 19 nt, Artificial Sequence
  Description of Artificial Sequence: Synthetic oligonucleotide
gguacaauugccccgggcc

SEQ ID NO: 1446393 - RNA, 19 nt, Artificial Sequence
  Description of Artificial Sequence: Synthetic oligonucleotide
guuuuguugccuccgggag

SEQ ID NO: 1446394 - RNA, 19 nt, Artificial Sequence
  Description of Artificial Sequence: Synthetic oligonucleotide
guagaagguacaauugccc

SEQ ID NO: 1446395 - RNA, 19 nt, Artificial Sequence
  Description of Artificial Sequence: Synthetic oligonucleotide
aggcggauagucuucaaca

SEQ ID NO: 1446396 - RNA, 19 nt, Artificial Sequence
  Description of Artificial Sequence: Synthetic oligonucleotide
aagcucuaggaggacugcc

SEQ ID NO: 1446397 - RNA, 19 nt, Artificial Sequence
  Description of Artificial Sequence: Synthetic oligonucleotide
ucucuuuacaucgcggcug

SEQ ID NO: 1446398 - RNA, 19 nt, Artificial Sequence
  Description of Artificial Sequence: Synthetic oligonucleotide
acaugcagcauguguagug

SEQ ID NO: 1446399 - RNA, 19 nt, Artificial Sequence
  Description of Artificial Sequence: Synthetic oligonucleotide
cucguagaagguacaauug

SEQ ID NO: 1446400 - RNA, 19 nt, Artificial Sequence
  Description of Artificial Sequence: Synthetic oligonucleotide
auuggaguccaugaggacu

SEQ ID NO: 1446401 - RNA, 19 nt, Artificial Sequence
  Description of Artificial Sequence: Synthetic oligonucleotide
gaugucgaaccuguggcag

SEQ ID NO: 1446402 - RNA, 19 nt, Artificial Sequence
  Description of Artificial Sequence: Synthetic oligonucleotide
ggaagauugcaccuggaug

SEQ ID NO: 1446403 - RNA, 19 nt, Artificial Sequence
  Description of Artificial Sequence: Synthetic oligonucleotide
aggcagauccgucauggag

SEQ ID NO: 1446404 - RNA, 19 nt, Artificial Sequence
  Description of Artificial Sequence: Synthetic oligonucleotide
aucaccgcauggccaaagc

SEQ ID NO: 1446405 - RNA, 19 nt, Artificial Sequence
  Description of Artificial Sequence: Synthetic oligonucleotide
caccgcauggccaaagcgc

SEQ ID NO: 1446406 - RNA, 19 nt, Artificial Sequence
  Description of Artificial Sequence: Synthetic oligonucleotide
cuugggcgcauacagugcc

SEQ ID NO: 1446407 - RNA, 19 nt, Artificial Sequence
  Description of Artificial Sequence: Synthetic oligonucleotide
gaguucgagggcccggugg

SEQ ID NO: 1446408 - RNA, 19 nt, Artificial Sequence
  Description of Artificial Sequence: Synthetic oligonucleotide
acaagugccacaaauguua

SEQ ID NO: 1446409 - RNA, 19 nt, Artificial Sequence
  Description of Artificial Sequence: Synthetic oligonucleotide
cuuuacaucgcggcugccg

SEQ ID NO: 1446410 - RNA, 19 nt, Artificial Sequence
  Description of Artificial Sequence: Synthetic oligonucleotide
agguacaauugccccgggc

SEQ ID NO: 1446411 - RNA, 19 nt, Artificial Sequence
  Description of Artificial Sequence: Synthetic oligonucleotide
ucgaaccuguggcaguaag

SEQ ID NO: 1446412 - RNA, 19 nt, Artificial Sequence
  Description of Artificial Sequence: Synthetic oligonucleotide
auguacaggcagaaggcac

SEQ ID NO: 1446413 - RNA, 19 nt, Artificial Sequence
  Description of Artificial Sequence: Synthetic oligonucleotide
uggguggaugaguucgagg

SEQ ID NO: 1446414 - RNA, 19 nt, Artificial Sequence
  Description of Artificial Sequence: Synthetic oligonucleotide
uggacacaggucauaggcu

SEQ ID NO: 1446415 - RNA, 19 nt, Artificial Sequence
  Description of Artificial Sequence: Synthetic oligonucleotide
uccucaugcuucucgggcc

SEQ ID NO: 1446416 - RNA, 19 nt, Artificial Sequence
  Description of Artificial Sequence: Synthetic oligonucleotide
ugcagaccgcagaaccugg

SEQ ID NO: 1446417 - RNA, 19 nt, Artificial Sequence
  Description of Artificial Sequence: Synthetic oligonucleotide
uguaguccaucaccgguuc

SEQ ID NO: 1446418 - RNA, 19 nt, Artificial Sequence
  Description of Artificial Sequence: Synthetic oligonucleotide
uccuucgcaaagccgcugc

SEQ ID NO: 1446419 - RNA, 19 nt, Artificial Sequence
  Description of Artificial Sequence: Synthetic oligonucleotide
aucaugaccggcgucacgu

SEQ ID NO: 1446420 - RNA, 19 nt, Artificial Sequence
  Description of Artificial Sequence: Synthetic oligonucleotide
ugcaagugugaguggacac

SEQ ID NO: 1446421 - RNA, 19 nt, Artificial Sequence
  Description of Artificial Sequence: Synthetic oligonucleotide
gguacaggccauaaaguag

SEQ ID NO: 1446422 - RNA, 19 nt, Artificial Sequence
  Description of Artificial Sequence: Synthetic oligonucleotide
aagacgaagaagacaucgu

SEQ ID NO: 1446423 - RNA, 19 nt, Artificial Sequence
  Description of Artificial Sequence: Synthetic oligonucleotide
aucucuuuacaucgcggcu

SEQ ID NO: 1446424 - RNA, 19 nt, Artificial Sequence
  Description of Artificial Sequence: Synthetic oligonucleotide
caucgugcaggccuugaag

SEQ ID NO: 1446425 - RNA, 19 nt, Artificial Sequence
  Description of Artificial Sequence: Synthetic oligonucleotide
cuggccacguugcaugagg

SEQ ID NO: 1446426 - RNA, 19 nt, Artificial Sequence
  Description of Artificial Sequence: Synthetic oligonucleotide
uuguaguccaucaccgguu

SEQ ID NO: 1446427 - RNA, 19 nt, Artificial Sequence
  Description of Artificial Sequence: Synthetic oligonucleotide
aggccguaggcaaugguac

SEQ ID NO: 1446428 - RNA, 19 nt, Artificial Sequence
  Description of Artificial Sequence: Synthetic oligonucleotide
aggcacaugacaacaaaca

SEQ ID NO: 1446429 - RNA, 19 nt, Artificial Sequence
  Description of Artificial Sequence: Synthetic oligonucleotide
uacuguguuuuguugccuc

SEQ ID NO: 1446430 - RNA, 19 nt, Artificial Sequence
  Description of Artificial Sequence: Synthetic oligonucleotide
guacaggccauaaaguaga

SEQ ID NO: 1446431 - RNA, 19 nt, Artificial Sequence
  Description of Artificial Sequence: Synthetic oligonucleotide
aaaguagauccuggaagau

SEQ ID NO: 1446432 - RNA, 19 nt, Artificial Sequence
  Description of Artificial Sequence: Synthetic oligonucleotide
acccacaggggucucuuag

SEQ ID NO: 1446433 - RNA, 19 nt, Artificial Sequence
  Description of Artificial Sequence: Synthetic oligonucleotide
gcaguaagccaccagcagc

SEQ ID NO: 1446434 - RNA, 19 nt, Artificial Sequence
  Description of Artificial Sequence: Synthetic oligonucleotide
gaucaugaccggcgucacg

SEQ ID NO: 1446435 - RNA, 19 nt, Artificial Sequence
  Description of Artificial Sequence: Synthetic oligonucleotide
caagugccacaaauguuac

SEQ ID NO: 1446436 - RNA, 19 nt, Artificial Sequence
  Description of Artificial Sequence: Synthetic oligonucleotide
aaguagauccuggaagauu

SEQ ID NO: 1446437 - RNA, 19 nt, Artificial Sequence
  Description of Artificial Sequence: Synthetic oligonucleotide
gcuguugccacucuugguc

SEQ ID NO: 1446438 - RNA, 19 nt, Artificial Sequence
  Description of Artificial Sequence: Synthetic oligonucleotide
uaguccaucaccgguuccu

SEQ ID NO: 1446439 - RNA, 19 nt, Artificial Sequence
  Description of Artificial Sequence: Synthetic oligonucleotide
cguagaagguacaauugcc

SEQ ID NO: 1446440 - RNA, 19 nt, Artificial Sequence
  Description of Artificial Sequence: Synthetic oligonucleotide
caugaccggcgucacgucc

SEQ ID NO: 1446441 - RNA, 19 nt, Artificial Sequence
  Description of Artificial Sequence: Synthetic oligonucleotide
gccacucuuggucaggaag

SEQ ID NO: 1446442 - RNA, 19 nt, Artificial Sequence
  Description of Artificial Sequence: Synthetic oligonucleotide
ucaccgguuccuugggcgc

SEQ ID NO: 1446443 - RNA, 19 nt, Artificial Sequence
  Description of Artificial Sequence: Synthetic oligonucleotide
uuucucguagaagguacaa

SEQ ID NO: 1446444 - RNA, 19 nt, Artificial Sequence
  Description of Artificial Sequence: Synthetic oligonucleotide
guaggcaaugguacaggcc

SEQ ID NO: 1446445 - RNA, 19 nt, Artificial Sequence
  Description of Artificial Sequence: Synthetic oligonucleotide
acagugacccacagggguc

SEQ ID NO: 1446446 - RNA, 19 nt, Artificial Sequence
  Description of Artificial Sequence: Synthetic oligonucleotide
gaggacuauuugcugggga

SEQ ID NO: 1446447 - RNA, 19 nt, Artificial Sequence
  Description of Artificial Sequence: Synthetic oligonucleotide
cuaagcagggccacaggga

SEQ ID NO: 1446448 - RNA, 19 nt, Artificial Sequence
  Description of Artificial Sequence: Synthetic oligonucleotide
auguguagugggcucccug

SEQ ID NO: 1446449 - RNA, 19 nt, Artificial Sequence
  Description of Artificial Sequence: Synthetic oligonucleotide
guuguaguccaucaccggu

SEQ ID NO: 1446450 - RNA, 19 nt, Artificial Sequence
  Description of Artificial Sequence: Synthetic oligonucleotide
guacaauugccccgggcca

SEQ ID NO: 1446451 - RNA, 19 nt, Artificial Sequence
  Description of Artificial Sequence: Synthetic oligonucleotide
acaauugccccgggccacc

SEQ ID NO: 1446452 - RNA, 19 nt, Artificial Sequence
  Description of Artificial Sequence: Synthetic oligonucleotide
ugucucgcaggucccugug

SEQ ID NO: 1446453 - RNA, 19 nt, Artificial Sequence
  Description of Artificial Sequence: Synthetic oligonucleotide
gccauaaaguagauccugg

SEQ ID NO: 1446454 - RNA, 19 nt, Artificial Sequence
  Description of Artificial Sequence: Synthetic oligonucleotide
ucgugcaggccuugaaggu

SEQ ID NO: 1446455 - RNA, 19 nt, Artificial Sequence
  Description of Artificial Sequence: Synthetic oligonucleotide
acaggccauaaaguagauc

SEQ ID NO: 1446456 - RNA, 19 nt, Artificial Sequence
  Description of Artificial Sequence: Synthetic oligonucleotide
gcaggcagauccgucaugg

SEQ ID NO: 1446457 - RNA, 19 nt, Artificial Sequence
  Description of Artificial Sequence: Synthetic oligonucleotide
aauugccccgggccaccag

SEQ ID NO: 1446458 - RNA, 19 nt, Artificial Sequence
  Description of Artificial Sequence: Synthetic oligonucleotide
aggccccuccauuggaguc

SEQ ID NO: 1446459 - RNA, 19 nt, Artificial Sequence
  Description of Artificial Sequence: Synthetic oligonucleotide
cucgggcccaucaucucgc

SEQ ID NO: 1446460 - RNA, 19 nt, Artificial Sequence
  Description of Artificial Sequence: Synthetic oligonucleotide
cuuggaacagugacccaca

SEQ ID NO: 1446461 - RNA, 19 nt, Artificial Sequence
  Description of Artificial Sequence: Synthetic oligonucleotide
gcaucugagucccuucgag

SEQ ID NO: 1446462 - RNA, 19 nt, Artificial Sequence
  Description of Artificial Sequence: Synthetic oligonucleotide
cacuguuggggcagagggc

SEQ ID NO: 1446463 - RNA, 19 nt, Artificial Sequence
  Description of Artificial Sequence: Synthetic oligonucleotide
uggccacguugcaugagga

SEQ ID NO: 1446464 - RNA, 19 nt, Artificial Sequence
  Description of Artificial Sequence: Synthetic oligonucleotide
caggcggauagucuucaac

SEQ ID NO: 1446465 - RNA, 19 nt, Artificial Sequence
  Description of Artificial Sequence: Synthetic oligonucleotide
gacuugcacauccgagcug

SEQ ID NO: 1446466 - RNA, 19 nt, Artificial Sequence
  Description of Artificial Sequence: Synthetic oligonucleotide
uacaucgcggcugccggcc

SEQ ID NO: 1446467 - RNA, 19 nt, Artificial Sequence
  Description of Artificial Sequence: Synthetic oligonucleotide
cuggguaccuucagcacca

SEQ ID NO: 1446468 - RNA, 19 nt, Artificial Sequence
  Description of Artificial Sequence: Synthetic oligonucleotide
uccgagcugaggacuauuu

SEQ ID NO: 1446469 - RNA, 19 nt, Artificial Sequence
  Description of Artificial Sequence: Synthetic oligonucleotide
auguuaccagaagacccag

SEQ ID NO: 1446470 - RNA, 19 nt, Artificial Sequence
  Description of Artificial Sequence: Synthetic oligonucleotide
augcaagugugaguggaca

SEQ ID NO: 1446471 - RNA, 19 nt, Artificial Sequence
  Description of Artificial Sequence: Synthetic oligonucleotide
uuacaucgcggcugccggc

SEQ ID NO: 1446472 - RNA, 19 nt, Artificial Sequence
  Description of Artificial Sequence: Synthetic oligonucleotide
acgacaugcagcaugugua

SEQ ID NO: 1446473 - RNA, 19 nt, Artificial Sequence
  Description of Artificial Sequence: Synthetic oligonucleotide
uucucguagaagguacaau

SEQ ID NO: 1446474 - RNA, 19 nt, Artificial Sequence
  Description of Artificial Sequence: Synthetic oligonucleotide
cucccugcaggcagauccg

SEQ ID NO: 1446475 - RNA, 19 nt, Artificial Sequence
  Description of Artificial Sequence: Synthetic oligonucleotide
ugcuguugccacucuuggu

SEQ ID NO: 1446476 - RNA, 19 nt, Artificial Sequence
  Description of Artificial Sequence: Synthetic oligonucleotide
ggcgacggugcccacagcc

SEQ ID NO: 1446477 - RNA, 19 nt, Artificial Sequence
  Description of Artificial Sequence: Synthetic oligonucleotide
cuuucucguagaagguaca

SEQ ID NO: 1446478 - RNA, 19 nt, Artificial Sequence
  Description of Artificial Sequence: Synthetic oligonucleotide
uagccaccgagggcgacgg

SEQ ID NO: 1446479 - RNA, 19 nt, Artificial Sequence
  Description of Artificial Sequence: Synthetic oligonucleotide
augucgaaccuguggcagu

SEQ ID NO: 1446480 - RNA, 19 nt, Artificial Sequence
  Description of Artificial Sequence: Synthetic oligonucleotide
ugaguucgagggcccggug

SEQ ID NO: 1446481 - RNA, 19 nt, Artificial Sequence
  Description of Artificial Sequence: Synthetic oligonucleotide
cuucaugaucucuuuacau

SEQ ID NO: 1446482 - RNA, 19 nt, Artificial Sequence
  Description of Artificial Sequence: Synthetic oligonucleotide
ucaccgugcagcacacuuu

SEQ ID NO: 1446483 - RNA, 19 nt, Artificial Sequence
  Description of Artificial Sequence: Synthetic oligonucleotide
uacaggccauaaaguagau

SEQ ID NO: 1446484 - RNA, 19 nt, Artificial Sequence
  Description of Artificial Sequence: Synthetic oligonucleotide
cugagucccuucgaggcac

SEQ ID NO: 1446485 - RNA, 19 nt, Artificial Sequence
  Description of Artificial Sequence: Synthetic oligonucleotide
uugggcgcauacagugcca

SEQ ID NO: 1446486 - RNA, 19 nt, Artificial Sequence
  Description of Artificial Sequence: Synthetic oligonucleotide
cagugcacgggccccacug

SEQ ID NO: 1446487 - RNA, 19 nt, Artificial Sequence
  Description of Artificial Sequence: Synthetic oligonucleotide
guuccuggcgccacagagc

SEQ ID NO: 1446488 - RNA, 19 nt, Artificial Sequence
  Description of Artificial Sequence: Synthetic oligonucleotide
aucucgagugugaggacug

SEQ ID NO: 1446489 - RNA, 19 nt, Artificial Sequence
  Description of Artificial Sequence: Synthetic oligonucleotide
cugugacuaagcagggcca

SEQ ID NO: 1446490 - RNA, 19 nt, Artificial Sequence
  Description of Artificial Sequence: Synthetic oligonucleotide
gcggauagucuucaacaug

SEQ ID NO: 1446491 - RNA, 19 nt, Artificial Sequence
  Description of Artificial Sequence: Synthetic oligonucleotide
gcacacuuuuccaugcaag

SEQ ID NO: 1446492 - RNA, 19 nt, Artificial Sequence
  Description of Artificial Sequence: Synthetic oligonucleotide
ggaagacuugcacauccga

SEQ ID NO: 1446493 - RNA, 19 nt, Artificial Sequence
  Description of Artificial Sequence: Synthetic oligonucleotide
cacacuuuuccaugcaagu

SEQ ID NO: 1446494 - RNA, 19 nt, Artificial Sequence
  Description of Artificial Sequence: Synthetic oligonucleotide
agaagacacccaguuccug

SEQ ID NO: 1446495 - RNA, 19 nt, Artificial Sequence
  Description of Artificial Sequence: Synthetic oligonucleotide
ucgaggcacaggccccucc

SEQ ID NO: 1446496 - RNA, 19 nt, Artificial Sequence
  Description of Artificial Sequence: Synthetic oligonucleotide
accgcauggccaaagcgcu

SEQ ID NO: 1446497 - RNA, 19 nt, Artificial Sequence
  Description of Artificial Sequence: Synthetic oligonucleotide
caucaccgguuccuugggc

SEQ ID NO: 1446498 - RNA, 19 nt, Artificial Sequence
  Description of Artificial Sequence: Synthetic oligonucleotide
guaguccaucaccgguucc

SEQ ID NO: 1446499 - RNA, 19 nt, Artificial Sequence
  Description of Artificial Sequence: Synthetic oligonucleotide
auacuguguuuuguugccu

SEQ ID NO: 1446500 - RNA, 19 nt, Artificial Sequence
  Description of Artificial Sequence: Synthetic oligonucleotide
gagcugaggacuauuugcu

SEQ ID NO: 1446501 - RNA, 19 nt, Artificial Sequence
  Description of Artificial Sequence: Synthetic oligonucleotide
acggugcagcugcuuauca

SEQ ID NO: 1446502 - RNA, 19 nt, Artificial Sequence
  Description of Artificial Sequence: Synthetic oligonucleotide
ugaagguaggcaggcggau

SEQ ID NO: 1446503 - RNA, 19 nt, Artificial Sequence
  Description of Artificial Sequence: Synthetic oligonucleotide
cagcauguguagugggcuc

SEQ ID NO: 1446504 - RNA, 19 nt, Artificial Sequence
  Description of Artificial Sequence: Synthetic oligonucleotide
uugcaccuggaugucgaac

SEQ ID NO: 1446505 - RNA, 19 nt, Artificial Sequence
  Description of Artificial Sequence: Synthetic oligonucleotide
gucauaggcuccaucucga

SEQ ID NO: 1446506 - RNA, 19 nt, Artificial Sequence
  Description of Artificial Sequence: Synthetic oligonucleotide
cagaagacccaggccguag

SEQ ID NO: 1446507 - RNA, 19 nt, Artificial Sequence
  Description of Artificial Sequence: Synthetic oligonucleotide
gagugugaggacuguggcu

SEQ ID NO: 1446508 - RNA, 19 nt, Artificial Sequence
  Description of Artificial Sequence: Synthetic oligonucleotide
gagacgacaugcagcaugu

SEQ ID NO: 1446509 - RNA, 19 nt, Artificial Sequence
  Description of Artificial Sequence: Synthetic oligonucleotide
agacauuuacuggcuugga

SEQ ID NO: 1446510 - RNA, 19 nt, Artificial Sequence
  Description of Artificial Sequence: Synthetic oligonucleotide
agccgcacuuucucguaga

SEQ ID NO: 1446511 - RNA, 19 nt, Artificial Sequence
  Description of Artificial Sequence: Synthetic oligonucleotide
cuucucgggcccaucaucu

SEQ ID NO: 1446512 - RNA, 19 nt, Artificial Sequence
  Description of Artificial Sequence: Synthetic oligonucleotide
agaaggcacaugacaacaa

SEQ ID NO: 1446513 - RNA, 19 nt, Artificial Sequence
  Description of Artificial Sequence: Synthetic oligonucleotide
ugagucccuucgaggcaca

SEQ ID NO: 1446514 - RNA, 19 nt, Artificial Sequence
  Description of Artificial Sequence: Synthetic oligonucleotide
augaugcuguugccacucu

SEQ ID NO: 1446515 - RNA, 19 nt, Artificial Sequence
  Description of Artificial Sequence: Synthetic oligonucleotide
ugggcgcauacagugccac

SEQ ID NO: 1446516 - RNA, 19 nt, Artificial Sequence
  Description of Artificial Sequence: Synthetic oligonucleotide
aggccauaaaguagauccu

SEQ ID NO: 1446517 - RNA, 19 nt, Artificial Sequence
  Description of Artificial Sequence: Synthetic oligonucleotide
aguagccaccgagggcgac

SEQ ID NO: 1446518 - RNA, 19 nt, Artificial Sequence
  Description of Artificial Sequence: Synthetic oligonucleotide
gugcacgggccccacuggc

SEQ ID NO: 1446519 - RNA, 19 nt, Artificial Sequence
  Description of Artificial Sequence: Synthetic oligonucleotide
ggaugucgaaccuguggca

SEQ ID NO: 1446520 - RNA, 19 nt, Artificial Sequence
  Description of Artificial Sequence: Synthetic oligonucleotide
cucgagugugaggacugug

SEQ ID NO: 1446521 - RNA, 19 nt, Artificial Sequence
  Description of Artificial Sequence: Synthetic oligonucleotide
cuggguggaugaguucgag

SEQ ID NO: 1446522 - RNA, 19 nt, Artificial Sequence
  Description of Artificial Sequence: Synthetic oligonucleotide
cguaggcaaugguacaggc

SEQ ID NO: 1446523 - RNA, 19 nt, Artificial Sequence
  Description of Artificial Sequence: Synthetic oligonucleotide
uucucgggcccaucaucuc

SEQ ID NO: 1446524 - RNA, 19 nt, Artificial Sequence
  Description of Artificial Sequence: Synthetic oligonucleotide
gauccgucauggaguccag

SEQ ID NO: 1446525 - RNA, 19 nt, Artificial Sequence
  Description of Artificial Sequence: Synthetic oligonucleotide
cagggaugcuuaucuccuc

SEQ ID NO: 1446526 - RNA, 19 nt, Artificial Sequence
  Description of Artificial Sequence: Synthetic oligonucleotide
gccacguugcaugaggaca

SEQ ID NO: 1446527 - RNA, 19 nt, Artificial Sequence
  Description of Artificial Sequence: Synthetic oligonucleotide
augaccggcgucacgucca

SEQ ID NO: 1446528 - RNA, 19 nt, Artificial Sequence
  Description of Artificial Sequence: Synthetic oligonucleotide
ucuuuacaucgcggcugcc

SEQ ID NO: 1446529 - RNA, 19 nt, Artificial Sequence
  Description of Artificial Sequence: Synthetic oligonucleotide
ucucgagugugaggacugu

SEQ ID NO: 1446530 - RNA, 19 nt, Artificial Sequence
  Description of Artificial Sequence: Synthetic oligonucleotide
ugaccggcgucacguccac

SEQ ID NO: 1446531 - RNA, 19 nt, Artificial Sequence
  Description of Artificial Sequence: Synthetic oligonucleotide
cgaaccuguggcaguaagc

SEQ ID NO: 1446532 - RNA, 19 nt, Artificial Sequence
  Description of Artificial Sequence: Synthetic oligonucleotide
cacucugcugcagaccgca

SEQ ID NO: 1446533 - RNA, 19 nt, Artificial Sequence
  Description of Artificial Sequence: Synthetic oligonucleotide
ccgucauggaguccagagc

SEQ ID NO: 1446534 - RNA, 19 nt, Artificial Sequence
  Description of Artificial Sequence: Synthetic oligonucleotide
ccuugggcgcauacagugc

SEQ ID NO: 1446535 - RNA, 19 nt, Artificial Sequence
  Description of Artificial Sequence: Synthetic oligonucleotide
gggcgagguguucagccug

SEQ ID NO: 1446536 - RNA, 19 nt, Artificial Sequence
  Description of Artificial Sequence: Synthetic oligonucleotide
gcucuaggaggacugccca

SEQ ID NO: 1446537 - RNA, 19 nt, Artificial Sequence
  Description of Artificial Sequence: Synthetic oligonucleotide
gguaggcaggcggauaguc

SEQ ID NO: 1446538 - RNA, 19 nt, Artificial Sequence
  Description of Artificial Sequence: Synthetic oligonucleotide
gcuucucgggcccaucauc

SEQ ID NO: 1446539 - RNA, 19 nt, Artificial Sequence
  Description of Artificial Sequence: Synthetic oligonucleotide
cacagggcgaggggcgagg

SEQ ID NO: 1446540 - RNA, 19 nt, Artificial Sequence
  Description of Artificial Sequence: Synthetic oligonucleotide
gucaccgugcagcacacuu

SEQ ID NO: 1446541 - RNA, 19 nt, Artificial Sequence
  Description of Artificial Sequence: Synthetic oligonucleotide
cauaggcuccaucucgagu

SEQ ID NO: 1446542 - RNA, 19 nt, Artificial Sequence
  Description of Artificial Sequence: Synthetic oligonucleotide
ccaccgagggcgacggugc

SEQ ID NO: 1446543 - RNA, 19 nt, Artificial Sequence
  Description of Artificial Sequence: Synthetic oligonucleotide
auccuucgcaaagccgcug

SEQ ID NO: 1446544 - RNA, 19 nt, Artificial Sequence
  Description of Artificial Sequence: Synthetic oligonucleotide
cugccucagagacgacaug

SEQ ID NO: 1446545 - RNA, 19 nt, Artificial Sequence
  Description of Artificial Sequence: Synthetic oligonucleotide
guaagccaccagcagcccu

SEQ ID NO: 1446546 - RNA, 19 nt, Artificial Sequence
  Description of Artificial Sequence: Synthetic oligonucleotide
cacguugcaugaggacaag

SEQ ID NO: 1446547 - RNA, 19 nt, Artificial Sequence
  Description of Artificial Sequence: Synthetic oligonucleotide
gagucccuucgaggcacag

SEQ ID NO: 1446548 - RNA, 19 nt, Artificial Sequence
  Description of Artificial Sequence: Synthetic oligonucleotide
gcacauccgagcugaggac

SEQ ID NO: 1446549 - RNA, 19 nt, Artificial Sequence
  Description of Artificial Sequence: Synthetic oligonucleotide
cucgcuuaugcuucaugau

SEQ ID NO: 1446550 - RNA, 19 nt, Artificial Sequence
  Description of Artificial Sequence: Synthetic oligonucleotide
cacggugcagcugcuuauc

SEQ ID NO: 1446551 - RNA, 19 nt, Artificial Sequence
  Description of Artificial Sequence: Synthetic oligonucleotide
gcggcugccggcccaguag

SEQ ID NO: 1446552 - RNA, 19 nt, Artificial Sequence
  Description of Artificial Sequence: Synthetic oligonucleotide
ggacugagguacauccuuc

SEQ ID NO: 1446553 - RNA, 19 nt, Artificial Sequence
  Description of Artificial Sequence: Synthetic oligonucleotide
gaggggcgagguguucagc

SEQ ID NO: 1446554 - RNA, 19 nt, Artificial Sequence
  Description of Artificial Sequence: Synthetic oligonucleotide
gacaugcagcauguguagu

SEQ ID NO: 1446555 - RNA, 19 nt, Artificial Sequence
  Description of Artificial Sequence: Synthetic oligonucleotide
gcgccacagagccacggug

SEQ ID NO: 1446556 - RNA, 19 nt, Artificial Sequence
  Description of Artificial Sequence: Synthetic oligonucleotide
ccgagcugaggacuauuug

SEQ ID NO: 1446557 - RNA, 19 nt, Artificial Sequence
  Description of Artificial Sequence: Synthetic oligonucleotide
ggggacauggccccauuua

SEQ ID NO: 1446558 - RNA, 19 nt, Artificial Sequence
  Description of Artificial Sequence: Synthetic oligonucleotide
agcaucgugcaggccuuga

SEQ ID NO: 1446559 - RNA, 19 nt, Artificial Sequence
  Description of Artificial Sequence: Synthetic oligonucleotide
ccguaggcaaugguacagg

SEQ ID NO: 1446560 - RNA, 19 nt, Artificial Sequence
  Description of Artificial Sequence: Synthetic oligonucleotide
ggcaucugagucccuucga

SEQ ID NO: 1446561 - RNA, 19 nt, Artificial Sequence
  Description of Artificial Sequence: Synthetic oligonucleotide
cauuuaugcauggccaauu

SEQ ID NO: 1446562 - RNA, 19 nt, Artificial Sequence
  Description of Artificial Sequence: Synthetic oligonucleotide
ucgggcccaucaucucgcu

SEQ ID NO: 1446563 - RNA, 19 nt, Artificial Sequence
  Description of Artificial Sequence: Synthetic oligonucleotide
ggaugcuuaucuccucaua

SEQ ID NO: 1446564 - RNA, 19 nt, Artificial Sequence
  Description of Artificial Sequence: Synthetic oligonucleotide
accgugcagcacacuuuuc

SEQ ID NO: 1446565 - RNA, 19 nt, Artificial Sequence
  Description of Artificial Sequence: Synthetic oligonucleotide
guaggcaggcggauagucu

SEQ ID NO: 1446566 - RNA, 19 nt, Artificial Sequence
  Description of Artificial Sequence: Synthetic oligonucleotide
ccacguugcaugaggacaa

SEQ ID NO: 1446567 - RNA, 19 nt, Artificial Sequence
  Description of Artificial Sequence: Synthetic oligonucleotide
caccgagggcgacggugcc

SEQ ID NO: 1446568 - RNA, 19 nt, Artificial Sequence
  Description of Artificial Sequence: Synthetic oligonucleotide
agacgacaugcagcaugug

SEQ ID NO: 1446569 - RNA, 19 nt, Artificial Sequence
  Description of Artificial Sequence: Synthetic oligonucleotide
gcaaagccgcugccugucc

SEQ ID NO: 1446570 - RNA, 19 nt, Artificial Sequence
  Description of Artificial Sequence: Synthetic oligonucleotide
gccuggguaccuucagcac

SEQ ID NO: 1446571 - RNA, 19 nt, Artificial Sequence
  Description of Artificial Sequence: Synthetic oligonucleotide
cccauuuaugcauggccaa

SEQ ID NO: 1446572 - RNA, 19 nt, Artificial Sequence
  Description of Artificial Sequence: Synthetic oligonucleotide
ccuucgcaaagccgcugcc

SEQ ID NO: 1446573 - RNA, 19 nt, Artificial Sequence
  Description of Artificial Sequence: Synthetic oligonucleotide
gggacauggccccauuuau

SEQ ID NO: 1446574 - RNA, 19 nt, Artificial Sequence
  Description of Artificial Sequence: Synthetic oligonucleotide
gcauguguagugggcuccc

SEQ ID NO: 1446575 - RNA, 19 nt, Artificial Sequence
  Description of Artificial Sequence: Synthetic oligonucleotide
ggcggauagucuucaacau

SEQ ID NO: 1446576 - RNA, 19 nt, Artificial Sequence
  Description of Artificial Sequence: Synthetic oligonucleotide
caugcuucucgggcccauc

SEQ ID NO: 1446577 - RNA, 19 nt, Artificial Sequence
  Description of Artificial Sequence: Synthetic oligonucleotide
cauccuucgcaaagccgcu

SEQ ID NO: 1446578 - RNA, 19 nt, Artificial Sequence
  Description of Artificial Sequence: Synthetic oligonucleotide
gggucucuuagcuggcucu

SEQ ID NO: 1446579 - RNA, 19 nt, Artificial Sequence
  Description of Artificial Sequence: Synthetic oligonucleotide
caggcagauccgucaugga

SEQ ID NO: 1446580 - RNA, 19 nt, Artificial Sequence
  Description of Artificial Sequence: Synthetic oligonucleotide
gggcgcauacagugccacc

SEQ ID NO: 1446581 - RNA, 19 nt, Artificial Sequence
  Description of Artificial Sequence: Synthetic oligonucleotide
gagggcgacggugcccaca

SEQ ID NO: 1446582 - RNA, 19 nt, Artificial Sequence
  Description of Artificial Sequence: Synthetic oligonucleotide
cuucgcaaagccgcugccu

SEQ ID NO: 1446583 - RNA, 19 nt, Artificial Sequence
  Description of Artificial Sequence: Synthetic oligonucleotide
auccgagcugaggacuauu

SEQ ID NO: 1446584 - RNA, 19 nt, Artificial Sequence
  Description of Artificial Sequence: Synthetic oligonucleotide
ccaucucgagugugaggac

SEQ ID NO: 1446585 - RNA, 19 nt, Artificial Sequence
  Description of Artificial Sequence: Synthetic oligonucleotide
uucgaggcacaggccccuc

SEQ ID NO: 1446586 - RNA, 19 nt, Artificial Sequence
  Description of Artificial Sequence: Synthetic oligonucleotide
caccgugcagcacacuuuu

SEQ ID NO: 1446587 - RNA, 19 nt, Artificial Sequence
  Description of Artificial Sequence: Synthetic oligonucleotide
gcgcgggcuggccacguug

SEQ ID NO: 1446588 - RNA, 19 nt, Artificial Sequence
  Description of Artificial Sequence: Synthetic oligonucleotide
gcaucgugcaggccuugaa

SEQ ID NO: 1446589 - RNA, 19 nt, Artificial Sequence
  Description of Artificial Sequence: Synthetic oligonucleotide
cgcauggccaaagcgcuug

SEQ ID NO: 1446590 - RNA, 19 nt, Artificial Sequence
  Description of Artificial Sequence: Synthetic oligonucleotide
cggucacacagggcgaggg

SEQ ID NO: 1446591 - RNA, 19 nt, Artificial Sequence
  Description of Artificial Sequence: Synthetic oligonucleotide
cacacagggcgaggggcga

SEQ ID NO: 1446592 - RNA, 19 nt, Artificial Sequence
  Description of Artificial Sequence: Synthetic oligonucleotide
cucgcaggucccugugacu

SEQ ID NO: 1446593 - RNA, 19 nt, Artificial Sequence
  Description of Artificial Sequence: Synthetic oligonucleotide
caugaggacugagguacau

SEQ ID NO: 1446594 - RNA, 19 nt, Artificial Sequence
  Description of Artificial Sequence: Synthetic oligonucleotide
gaccggcgucacguccacc

SEQ ID NO: 1446595 - RNA, 19 nt, Artificial Sequence
  Description of Artificial Sequence: Synthetic oligonucleotide
uuguugccuccgggaggga

SEQ ID NO: 1446596 - RNA, 19 nt, Artificial Sequence
  Description of Artificial Sequence: Synthetic oligonucleotide
gccgcacuuucucguagaa

SEQ ID NO: 1446597 - RNA, 19 nt, Artificial Sequence
  Description of Artificial Sequence: Synthetic oligonucleotide
gcgagguguucagccuggg

SEQ ID NO: 1446598 - RNA, 19 nt, Artificial Sequence
  Description of Artificial Sequence: Synthetic oligonucleotide
uggguaccuucagcaccau

SEQ ID NO: 1446599 - RNA, 19 nt, Artificial Sequence
  Description of Artificial Sequence: Synthetic oligonucleotide
cauggccaauucccacucu

SEQ ID NO: 1446600 - RNA, 19 nt, Artificial Sequence
  Description of Artificial Sequence: Synthetic oligonucleotide
accgguuccuugggcgcau

SEQ ID NO: 1446601 - RNA, 19 nt, Artificial Sequence
  Description of Artificial Sequence: Synthetic oligonucleotide
ggcaaugguacaggccaua

SEQ ID NO: 1446602 - RNA, 19 nt, Artificial Sequence
  Description of Artificial Sequence: Synthetic oligonucleotide
caccgguuccuugggcgca

SEQ ID NO: 1446603 - RNA, 19 nt, Artificial Sequence
  Description of Artificial Sequence: Synthetic oligonucleotide
cgcgggcuggccacguugc

SEQ ID NO: 1446604 - RNA, 19 nt, Artificial Sequence
  Description of Artificial Sequence: Synthetic oligonucleotide
ccuggguggaugaguucga

SEQ ID NO: 1446605 - RNA, 19 nt, Artificial Sequence
  Description of Artificial Sequence: Synthetic oligonucleotide
cagcaucgugcaggccuug

SEQ ID NO: 1446606 - RNA, 19 nt, Artificial Sequence
  Description of Artificial Sequence: Synthetic oligonucleotide
cauggccaaagcgcuugua

SEQ ID NO: 1446607 - RNA, 19 nt, Artificial Sequence
  Description of Artificial Sequence: Synthetic oligonucleotide
caauugccccgggccacca

SEQ ID NO: 1446608 - RNA, 19 nt, Artificial Sequence
  Description of Artificial Sequence: Synthetic oligonucleotide
ggggcgagguguucagccu

SEQ ID NO: 1446609 - RNA, 19 nt, Artificial Sequence
  Description of Artificial Sequence: Synthetic oligonucleotide
agccaccgagggcgacggu

SEQ ID NO: 1446610 - RNA, 19 nt, Artificial Sequence
  Description of Artificial Sequence: Synthetic oligonucleotide
gcagcgcgggcuggccacg

SEQ ID NO: 1446611 - RNA, 19 nt, Artificial Sequence
  Description of Artificial Sequence: Synthetic oligonucleotide
agcgcgggcuggccacguu

SEQ ID NO: 1446612 - RNA, 19 nt, Artificial Sequence
  Description of Artificial Sequence: Synthetic oligonucleotide
ggcccaucaucucgcuuau

SEQ ID NO: 1446613 - RNA, 19 nt, Artificial Sequence
  Description of Artificial Sequence: Synthetic oligonucleotide
ccauuuaugcauggccaau

SEQ ID NO: 1446614 - RNA, 19 nt, Artificial Sequence
  Description of Artificial Sequence: Synthetic oligonucleotide
cgguuccuugggcgcauac

SEQ ID NO: 1446615 - RNA, 19 nt, Artificial Sequence
  Description of Artificial Sequence: Synthetic oligonucleotide
gggcgacggugcccacagc

SEQ ID NO: 1446616 - RNA, 19 nt, Artificial Sequence
  Description of Artificial Sequence: Synthetic oligonucleotide
gcgggcuggccacguugca

SEQ ID NO: 1446617 - RNA, 19 nt, Artificial Sequence
  Description of Artificial Sequence: Synthetic oligonucleotide
ucgcggcugccggcccagu

SEQ ID NO: 1446618 - RNA, 19 nt, Artificial Sequence
  Description of Artificial Sequence: Synthetic oligonucleotide
gcccgguggccaccuccac

SEQ ID NO: 1446619 - RNA, 19 nt, Artificial Sequence
  Description of Artificial Sequence: Synthetic oligonucleotide
gcagcaucgugcaggccuu

SEQ ID NO: 1446620 - RNA, 19 nt, Artificial Sequence
  Description of Artificial Sequence: Synthetic oligonucleotide
ccacggugcagcugcuuau

SEQ ID NO: 1446621 - RNA, 19 nt, Artificial Sequence
  Description of Artificial Sequence: Synthetic oligonucleotide
cagagacgacaugcagcau

SEQ ID NO: 1446622 - RNA, 19 nt, Artificial Sequence
  Description of Artificial Sequence: Synthetic oligonucleotide
gcagugcacgggccccacu

SEQ ID NO: 1446623 - RNA, 19 nt, Artificial Sequence
  Description of Artificial Sequence: Synthetic oligonucleotide
cgcaggucccugugacuaa

SEQ ID NO: 1446624 - RNA, 19 nt, Artificial Sequence
  Description of Artificial Sequence: Synthetic oligonucleotide
ccaucaccgcauggccaaa

SEQ ID NO: 1446625 - RNA, 19 nt, Artificial Sequence
  Description of Artificial Sequence: Synthetic oligonucleotide
cgagggcgacggugcccac

SEQ ID NO: 1446626 - RNA, 19 nt, Artificial Sequence
  Description of Artificial Sequence: Synthetic oligonucleotide
cagcgcgggcuggccacgu

SEQ ID NO: 1446627 - RNA, 19 nt, Artificial Sequence
  Description of Artificial Sequence: Synthetic oligonucleotide
ccgcauggccaaagcgcuu

SEQ ID NO: 1446628 - RNA, 19 nt, Artificial Sequence
  Description of Artificial Sequence: Synthetic oligonucleotide
gggcgaggggcgagguguu

SEQ ID NO: 1446629 - RNA, 19 nt, Artificial Sequence
  Description of Artificial Sequence: Synthetic oligonucleotide
cguccaccgccuccauccu

SEQ ID NO: 1446630 - RNA, 19 nt, Artificial Sequence
  Description of Artificial Sequence: Synthetic oligonucleotide
cgcggcugccggcccagua

SEQ ID NO: 1446631 - RNA, 19 nt, Artificial Sequence
  Description of Artificial Sequence: Synthetic oligonucleotide
ccgguuccuugggcgcaua

SEQ ID NO: 1446632 - RNA, 19 nt, Artificial Sequence
  Description of Artificial Sequence: Synthetic oligonucleotide
cgggcccaucaucucgcuu

SEQ ID NO: 1446633 - RNA, 19 nt, Artificial Sequence
  Description of Artificial Sequence: Synthetic oligonucleotide
aauaccaacgaaucgauuc

SEQ ID NO: 1446634 - RNA, 19 nt, Artificial Sequence
  Description of Artificial Sequence: Synthetic oligonucleotide
auagauacuaaacagcuac

SEQ ID NO: 1446635 - RNA, 19 nt, Artificial Sequence
  Description of Artificial Sequence: Synthetic oligonucleotide
aguaguugaugucagaugc

SEQ ID NO: 1446636 - RNA, 19 nt, Artificial Sequence
  Description of Artificial Sequence: Synthetic oligonucleotide
aaaauagauacuaaacagc

SEQ ID NO: 1446637 - RNA, 19 nt, Artificial Sequence
  Description of Artificial Sequence: Synthetic oligonucleotide
aacaggaucucucugcucc

SEQ ID NO: 1446638 - RNA, 19 nt, Artificial Sequence
  Description of Artificial Sequence: Synthetic oligonucleotide
uuuuauaggugaaagaccu

SEQ ID NO: 1446639 - RNA, 19 nt, Artificial Sequence
  Description of Artificial Sequence: Synthetic oligonucleotide
aauucauuaacacuauacu

SEQ ID NO: 1446640 - RNA, 19 nt, Artificial Sequence
  Description of Artificial Sequence: Synthetic oligonucleotide
aguacucuuaauugcaucc

SEQ ID NO: 1446641 - RNA, 19 nt, Artificial Sequence
  Description of Artificial Sequence: Synthetic oligonucleotide
uagugguucagaaagaacc

SEQ ID NO: 1446642 - RNA, 19 nt, Artificial Sequence
  Description of Artificial Sequence: Synthetic oligonucleotide
aacgaaucgauuccggacg

SEQ ID NO: 1446643 - RNA, 19 nt, Artificial Sequence
  Description of Artificial Sequence: Synthetic oligonucleotide
aaaauaaucugacaggcuu

SEQ ID NO: 1446644 - RNA, 19 nt, Artificial Sequence
  Description of Artificial Sequence: Synthetic oligonucleotide
uguacugaaacccaagacu

SEQ ID NO: 1446645 - RNA, 19 nt, Artificial Sequence
  Description of Artificial Sequence: Synthetic oligonucleotide
agagaacuuuuauugaggc

SEQ ID NO: 1446646 - RNA, 19 nt, Artificial Sequence
  Description of Artificial Sequence: Synthetic oligonucleotide
ucacggaugggucauagcg

SEQ ID NO: 1446647 - RNA, 19 nt, Artificial Sequence
  Description of Artificial Sequence: Synthetic oligonucleotide
agacucguagacuacaucg

SEQ ID NO: 1446648 - RNA, 19 nt, Artificial Sequence
  Description of Artificial Sequence: Synthetic oligonucleotide
ucaccuucaauuagaaagg

SEQ ID NO: 1446649 - RNA, 19 nt, Artificial Sequence
  Description of Artificial Sequence: Synthetic oligonucleotide
auacuaaacagcuacucag

SEQ ID NO: 1446650 - RNA, 19 nt, Artificial Sequence
  Description of Artificial Sequence: Synthetic oligonucleotide
uuauugagcacauuugaug

SEQ ID NO: 1446651 - RNA, 19 nt, Artificial Sequence
  Description of Artificial Sequence: Synthetic oligonucleotide
aaaaccuaugucaaagggg

SEQ ID NO: 1446652 - RNA, 19 nt, Artificial Sequence
  Description of Artificial Sequence: Synthetic oligonucleotide
aaaguugcacagcaaacug

SEQ ID NO: 1446653 - RNA, 19 nt, Artificial Sequence
  Description of Artificial Sequence: Synthetic oligonucleotide
uauugagcacauuugaugu

SEQ ID NO: 1446654 - RNA, 19 nt, Artificial Sequence
  Description of Artificial Sequence: Synthetic oligonucleotide
auaccaacgaaucgauucc

SEQ ID NO: 1446655 - RNA, 19 nt, Artificial Sequence
  Description of Artificial Sequence: Synthetic oligonucleotide
caauuauuaucaaacgccc

SEQ ID NO: 1446656 - RNA, 19 nt, Artificial Sequence
  Description of Artificial Sequence: Synthetic oligonucleotide
acaagaguacucuuaauug

SEQ ID NO: 1446657 - RNA, 19 nt, Artificial Sequence
  Description of Artificial Sequence: Synthetic oligonucleotide
aauucaaccacaaguuuuc

SEQ ID NO: 1446658 - RNA, 19 nt, Artificial Sequence
  Description of Artificial Sequence: Synthetic oligonucleotide
guagacuacaucgacaccg

SEQ ID NO: 1446659 - RNA, 19 nt, Artificial Sequence
  Description of Artificial Sequence: Synthetic oligonucleotide
ugauucugugacaaaagug

SEQ ID NO: 1446660 - RNA, 19 nt, Artificial Sequence
  Description of Artificial Sequence: Synthetic oligonucleotide
agagagaacuuuuauugag

SEQ ID NO: 1446661 - RNA, 19 nt, Artificial Sequence
  Description of Artificial Sequence: Synthetic oligonucleotide
uuaucaaacgcccuuuggu

SEQ ID NO: 1446662 - RNA, 19 nt, Artificial Sequence
  Description of Artificial Sequence: Synthetic oligonucleotide
uacaucgacaccgucaggg

SEQ ID NO: 1446663 - RNA, 19 nt, Artificial Sequence
  Description of Artificial Sequence: Synthetic oligonucleotide
augucagaugcguuaauac

SEQ ID NO: 1446664 - RNA, 19 nt, Artificial Sequence
  Description of Artificial Sequence: Synthetic oligonucleotide
ccaauuauuaucaaacgcc

SEQ ID NO: 1446665 - RNA, 19 nt, Artificial Sequence
  Description of Artificial Sequence: Synthetic oligonucleotide
aagggcaagcaguuuuacc

SEQ ID NO: 1446666 - RNA, 19 nt, Artificial Sequence
  Description of Artificial Sequence: Synthetic oligonucleotide
ucagguuucacugaaggca

SEQ ID NO: 1446667 - RNA, 19 nt, Artificial Sequence
  Description of Artificial Sequence: Synthetic oligonucleotide
uuacugcugacacagugag

SEQ ID NO: 1446668 - RNA, 19 nt, Artificial Sequence
  Description of Artificial Sequence: Synthetic oligonucleotide
cauauagucaacagcccgg

SEQ ID NO: 1446669 - RNA, 19 nt, Artificial Sequence
  Description of Artificial Sequence: Synthetic oligonucleotide
caaaaccuaugucaaaggg

SEQ ID NO: 1446670 - RNA, 19 nt, Artificial Sequence
  Description of Artificial Sequence: Synthetic oligonucleotide
agcauauagcucuagcaag

SEQ ID NO: 1446671 - RNA, 19 nt, Artificial Sequence
  Description of Artificial Sequence: Synthetic oligonucleotide
uaaucugacaggcuucacc

SEQ ID NO: 1446672 - RNA, 19 nt, Artificial Sequence
  Description of Artificial Sequence: Synthetic oligonucleotide
ugagcauauagcucuagca

SEQ ID NO: 1446673 - RNA, 19 nt, Artificial Sequence
  Description of Artificial Sequence: Synthetic oligonucleotide
cauuugauguacugaaacc

SEQ ID NO: 1446674 - RNA, 19 nt, Artificial Sequence
  Description of Artificial Sequence: Synthetic oligonucleotide
ugacaaaaguggcaggcag

SEQ ID NO: 1446675 - RNA, 19 nt, Artificial Sequence
  Description of Artificial Sequence: Synthetic oligonucleotide
ugcguuaauaccaacgaau

SEQ ID NO: 1446676 - RNA, 19 nt, Artificial Sequence
  Description of Artificial Sequence: Synthetic oligonucleotide
acaaaaguggcaggcagcc

SEQ ID NO: 1446677 - RNA, 19 nt, Artificial Sequence
  Description of Artificial Sequence: Synthetic oligonucleotide
ugucagaugcguuaauacc

SEQ ID NO: 1446678 - RNA, 19 nt, Artificial Sequence
  Description of Artificial Sequence: Synthetic oligonucleotide
uuuauugaggcacauuauu

SEQ ID NO: 1446679 - RNA, 19 nt, Artificial Sequence
  Description of Artificial Sequence: Synthetic oligonucleotide
uaucaaacgcccuuuggug

SEQ ID NO: 1446680 - RNA, 19 nt, Artificial Sequence
  Description of Artificial Sequence: Synthetic oligonucleotide
uguaccuagcacuagcaga

SEQ ID NO: 1446681 - RNA, 19 nt, Artificial Sequence
  Description of Artificial Sequence: Synthetic oligonucleotide
aaauaaucugacaggcuuc

SEQ ID NO: 1446682 - RNA, 19 nt, Artificial Sequence
  Description of Artificial Sequence: Synthetic oligonucleotide
augagcauauagcucuagc

SEQ ID NO: 1446683 - RNA, 19 nt, Artificial Sequence
  Description of Artificial Sequence: Synthetic oligonucleotide
aucaaacgcccuuuggugg

SEQ ID NO: 1446684 - RNA, 19 nt, Artificial Sequence
  Description of Artificial Sequence: Synthetic oligonucleotide
guuaauaccaacgaaucga

SEQ ID NO: 1446685 - RNA, 19 nt, Artificial Sequence
  Description of Artificial Sequence: Synthetic oligonucleotide
acggaugggucauagcggc

SEQ ID NO: 1446686 - RNA, 19 nt, Artificial Sequence
  Description of Artificial Sequence: Synthetic oligonucleotide
aguugcacagcaaacuggc

SEQ ID NO: 1446687 - RNA, 19 nt, Artificial Sequence
  Description of Artificial Sequence: Synthetic oligonucleotide
uugauucugugacaaaagu

SEQ ID NO: 1446688 - RNA, 19 nt, Artificial Sequence
  Description of Artificial Sequence: Synthetic oligonucleotide
uauagagagaacuuuuauu

SEQ ID NO: 1446689 - RNA, 19 nt, Artificial Sequence
  Description of Artificial Sequence: Synthetic oligonucleotide
acccaauuauuaucaaacg

SEQ ID NO: 1446690 - RNA, 19 nt, Artificial Sequence
  Description of Artificial Sequence: Synthetic oligonucleotide
ugaaaguugcacagcaaac

SEQ ID NO: 1446691 - RNA, 19 nt, Artificial Sequence
  Description of Artificial Sequence: Synthetic oligonucleotide
gaugcguuaauaccaacga

SEQ ID NO: 1446692 - RNA, 19 nt, Artificial Sequence
  Description of Artificial Sequence: Synthetic oligonucleotide
caccucacaaaccaguucc

SEQ ID NO: 1446693 - RNA, 19 nt, Artificial Sequence
  Description of Artificial Sequence: Synthetic oligonucleotide
auuauuaucaaacgcccuu

SEQ ID NO: 1446694 - RNA, 19 nt, Artificial Sequence
  Description of Artificial Sequence: Synthetic oligonucleotide
uuauugaggcacauuauuu

SEQ ID NO: 1446695 - RNA, 19 nt, Artificial Sequence
  Description of Artificial Sequence: Synthetic oligonucleotide
aacagcccggaauauggag

SEQ ID NO: 1446696 - RNA, 19 nt, Artificial Sequence
  Description of Artificial Sequence: Synthetic oligonucleotide
uuaauaccaacgaaucgau

SEQ ID NO: 1446697 - RNA, 19 nt, Artificial Sequence
  Description of Artificial Sequence: Synthetic oligonucleotide
agauacuaaacagcuacuc

SEQ ID NO: 1446698 - RNA, 19 nt, Artificial Sequence
  Description of Artificial Sequence: Synthetic oligonucleotide
ugguuugugucauuguucu

SEQ ID NO: 1446699 - RNA, 19 nt, Artificial Sequence
  Description of Artificial Sequence: Synthetic oligonucleotide
uguugucauagcuuacugc

SEQ ID NO: 1446700 - RNA, 19 nt, Artificial Sequence
  Description of Artificial Sequence: Synthetic oligonucleotide
uuagcuauagagagaacuu

SEQ ID NO: 1446701 - RNA, 19 nt, Artificial Sequence
  Description of Artificial Sequence: Synthetic oligonucleotide
aauaaucugacaggcuuca

SEQ ID NO: 1446702 - RNA, 19 nt, Artificial Sequence
  Description of Artificial Sequence: Synthetic oligonucleotide
cuagcacuagcagagaggc

SEQ ID NO: 1446703 - RNA, 19 nt, Artificial Sequence
  Description of Artificial Sequence: Synthetic oligonucleotide
agcccuuggacaccgaagg

SEQ ID NO: 1446704 - RNA, 19 nt, Artificial Sequence
  Description of Artificial Sequence: Synthetic oligonucleotide
uacuaaacagcuacucaga

SEQ ID NO: 1446705 - RNA, 19 nt, Artificial Sequence
  Description of Artificial Sequence: Synthetic oligonucleotide
ggaaaauaaucugacaggc

SEQ ID NO: 1446706 - RNA, 19 nt, Artificial Sequence
  Description of Artificial Sequence: Synthetic oligonucleotide
ucauuaacacuauacuuuu

SEQ ID NO: 1446707 - RNA, 19 nt, Artificial Sequence
  Description of Artificial Sequence: Synthetic oligonucleotide
ucuccuuugguuuguguca

SEQ ID NO: 1446708 - RNA, 19 nt, Artificial Sequence
  Description of Artificial Sequence: Synthetic oligonucleotide
guacugaaacccaagacug

SEQ ID NO: 1446709 - RNA, 19 nt, Artificial Sequence
  Description of Artificial Sequence: Synthetic oligonucleotide
agaugcguuaauaccaacg

SEQ ID NO: 1446710 - RNA, 19 nt, Artificial Sequence
  Description of Artificial Sequence: Synthetic oligonucleotide
aaguugcacagcaaacugg

SEQ ID NO: 1446711 - RNA, 19 nt, Artificial Sequence
  Description of Artificial Sequence: Synthetic oligonucleotide
auuguucuguugucauagc

SEQ ID NO: 1446712 - RNA, 19 nt, Artificial Sequence
  Description of Artificial Sequence: Synthetic oligonucleotide
cuagcagagaggccuaagg

SEQ ID NO: 1446713 - RNA, 19 nt, Artificial Sequence
  Description of Artificial Sequence: Synthetic oligonucleotide
uugguagccagagauaaac

SEQ ID NO: 1446714 - RNA, 19 nt, Artificial Sequence
  Description of Artificial Sequence: Synthetic oligonucleotide
ucuaagacauggagaauuc

SEQ ID NO: 1446715 - RNA, 19 nt, Artificial Sequence
  Description of Artificial Sequence: Synthetic oligonucleotide
uggacaccgaaggugaagg

SEQ ID NO: 1446716 - RNA, 19 nt, Artificial Sequence
  Description of Artificial Sequence: Synthetic oligonucleotide
uauugaggcacauuauuuu

SEQ ID NO: 1446717 - RNA, 19 nt, Artificial Sequence
  Description of Artificial Sequence: Synthetic oligonucleotide
cuugcuucaggacugcaug

SEQ ID NO: 1446718 - RNA, 19 nt, Artificial Sequence
  Description of Artificial Sequence: Synthetic oligonucleotide
uucugugacaaaaguggca

SEQ ID NO: 1446719 - RNA, 19 nt, Artificial Sequence
  Description of Artificial Sequence: Synthetic oligonucleotide
aaagaaccccuggagacug

SEQ ID NO: 1446720 - RNA, 19 nt, Artificial Sequence
  Description of Artificial Sequence: Synthetic oligonucleotide
uucuaagacauggagaauu

SEQ ID NO: 1446721 - RNA, 19 nt, Artificial Sequence
  Description of Artificial Sequence: Synthetic oligonucleotide
guaccuagcacuagcagag

SEQ ID NO: 1446722 - RNA, 19 nt, Artificial Sequence
  Description of Artificial Sequence: Synthetic oligonucleotide
auagucaacagcccggaau

SEQ ID NO: 1446723 - RNA, 19 nt, Artificial Sequence
  Description of Artificial Sequence: Synthetic oligonucleotide
uauaggugaaagaccugca

SEQ ID NO: 1446724 - RNA, 19 nt, Artificial Sequence
  Description of Artificial Sequence: Synthetic oligonucleotide
gaaucgauuccggacgagg

SEQ ID NO: 1446725 - RNA, 19 nt, Artificial Sequence
  Description of Artificial Sequence: Synthetic oligonucleotide
aauuauuaucaaacgcccu

SEQ ID NO: 1446726 - RNA, 19 nt, Artificial Sequence
  Description of Artificial Sequence: Synthetic oligonucleotide
agcacuagcagagaggccu

SEQ ID NO: 1446727 - RNA, 19 nt, Artificial Sequence
  Description of Artificial Sequence: Synthetic oligonucleotide
uuuauaggugaaagaccug

SEQ ID NO: 1446728 - RNA, 19 nt, Artificial Sequence
  Description of Artificial Sequence: Synthetic oligonucleotide
uugguuugugucauuguuc

SEQ ID NO: 1446729 - RNA, 19 nt, Artificial Sequence
  Description of Artificial Sequence: Synthetic oligonucleotide
acauuagguaccuggaaau

SEQ ID NO: 1446730 - RNA, 19 nt, Artificial Sequence
  Description of Artificial Sequence: Synthetic oligonucleotide
ugcacagcaaacuggccug

SEQ ID NO: 1446731 - RNA, 19 nt, Artificial Sequence
  Description of Artificial Sequence: Synthetic oligonucleotide
aaucccuucaaaaccuaug

SEQ ID NO: 1446732 - RNA, 19 nt, Artificial Sequence
  Description of Artificial Sequence: Synthetic oligonucleotide
uccccauuuauugagcaca

SEQ ID NO: 1446733 - RNA, 19 nt, Artificial Sequence
  Description of Artificial Sequence: Synthetic oligonucleotide
aaugaaccuucccucugga

SEQ ID NO: 1446734 - RNA, 19 nt, Artificial Sequence
  Description of Artificial Sequence: Synthetic oligonucleotide
aggguauucuugcuucagg

SEQ ID NO: 1446735 - RNA, 19 nt, Artificial Sequence
  Description of Artificial Sequence: Synthetic oligonucleotide
uuaauugcauccccauuua

SEQ ID NO: 1446736 - RNA, 19 nt, Artificial Sequence
  Description of Artificial Sequence: Synthetic oligonucleotide
cagguuucacugaaggcag

SEQ ID NO: 1446737 - RNA, 19 nt, Artificial Sequence
  Description of Artificial Sequence: Synthetic oligonucleotide
caacgaaucgauuccggac

SEQ ID NO: 1446738 - RNA, 19 nt, Artificial Sequence
  Description of Artificial Sequence: Synthetic oligonucleotide
aaacccaagacuggaaaau

SEQ ID NO: 1446739 - RNA, 19 nt, Artificial Sequence
  Description of Artificial Sequence: Synthetic oligonucleotide
uagauacuaaacagcuacu

SEQ ID NO: 1446740 - RNA, 19 nt, Artificial Sequence
  Description of Artificial Sequence: Synthetic oligonucleotide
ucaaacgcccuuugguggc

SEQ ID NO: 1446741 - RNA, 19 nt, Artificial Sequence
  Description of Artificial Sequence: Synthetic oligonucleotide
caaugaaccuucccucugg

SEQ ID NO: 1446742 - RNA, 19 nt, Artificial Sequence
  Description of Artificial Sequence: Synthetic oligonucleotide
ucaauuagaaaggcaccca

SEQ ID NO: 1446743 - RNA, 19 nt, Artificial Sequence
  Description of Artificial Sequence: Synthetic oligonucleotide
auuagguaccuggaaauga

SEQ ID NO: 1446744 - RNA, 19 nt, Artificial Sequence
  Description of Artificial Sequence: Synthetic oligonucleotide
ggaauggcaauguuagcag

SEQ ID NO: 1446745 - RNA, 19 nt, Artificial Sequence
  Description of Artificial Sequence: Synthetic oligonucleotide
gggguuuugauucugugac

SEQ ID NO: 1446746 - RNA, 19 nt, Artificial Sequence
  Description of Artificial Sequence: Synthetic oligonucleotide
aaggccaccaccucaccaa

SEQ ID NO: 1446747 - RNA, 19 nt, Artificial Sequence
  Description of Artificial Sequence: Synthetic oligonucleotide
ugacauggcacuuggcuau

SEQ ID NO: 1446748 - RNA, 19 nt, Artificial Sequence
  Description of Artificial Sequence: Synthetic oligonucleotide
gagguaauucaaccacaag

SEQ ID NO: 1446749 - RNA, 19 nt, Artificial Sequence
  Description of Artificial Sequence: Synthetic oligonucleotide
cccaauuauuaucaaacgc

SEQ ID NO: 1446750 - RNA, 19 nt, Artificial Sequence
  Description of Artificial Sequence: Synthetic oligonucleotide
cacggaugggucauagcgg

SEQ ID NO: 1446751 - RNA, 19 nt, Artificial Sequence
  Description of Artificial Sequence: Synthetic oligonucleotide
ggugccacuaacuagcaga

SEQ ID NO: 1446752 - RNA, 19 nt, Artificial Sequence
  Description of Artificial Sequence: Synthetic oligonucleotide
caccgugggguuuugauuc

SEQ ID NO: 1446753 - RNA, 19 nt, Artificial Sequence
  Description of Artificial Sequence: Synthetic oligonucleotide
guacuuggagaaguagugg

SEQ ID NO: 1446754 - RNA, 19 nt, Artificial Sequence
  Description of Artificial Sequence: Synthetic oligonucleotide
cugcuuuuauaggugaaag

SEQ ID NO: 1446755 - RNA, 19 nt, Artificial Sequence
  Description of Artificial Sequence: Synthetic oligonucleotide
auccccauuuauugagcac

SEQ ID NO: 1446756 - RNA, 19 nt, Artificial Sequence
  Description of Artificial Sequence: Synthetic oligonucleotide
auauagcucuagcaagugu

SEQ ID NO: 1446757 - RNA, 19 nt, Artificial Sequence
  Description of Artificial Sequence: Synthetic oligonucleotide
ggaauauggaguccaggcc

SEQ ID NO: 1446758 - RNA, 19 nt, Artificial Sequence
  Description of Artificial Sequence: Synthetic oligonucleotide
accuagcacuagcagagag

SEQ ID NO: 1446759 - RNA, 19 nt, Artificial Sequence
  Description of Artificial Sequence: Synthetic oligonucleotide
aacagacucguagacuaca

SEQ ID NO: 1446760 - RNA, 19 nt, Artificial Sequence
  Description of Artificial Sequence: Synthetic oligonucleotide
aaucgauuccggacgagga

SEQ ID NO: 1446761 - RNA, 19 nt, Artificial Sequence
  Description of Artificial Sequence: Synthetic oligonucleotide
cacccaauggauuucagaa

SEQ ID NO: 1446762 - RNA, 19 nt, Artificial Sequence
  Description of Artificial Sequence: Synthetic oligonucleotide
aucgauuccggacgaggag

SEQ ID NO: 1446763 - RNA, 19 nt, Artificial Sequence
  Description of Artificial Sequence: Synthetic oligonucleotide
agaguaguugaugucagau

SEQ ID NO: 1446764 - RNA, 19 nt, Artificial Sequence
  Description of Artificial Sequence: Synthetic oligonucleotide
uaccaacgaaucgauuccg

SEQ ID NO: 1446765 - RNA, 19 nt, Artificial Sequence
  Description of Artificial Sequence: Synthetic oligonucleotide
ugaaagaccugcagggcuu

SEQ ID NO: 1446766 - RNA, 19 nt, Artificial Sequence
  Description of Artificial Sequence: Synthetic oligonucleotide
gaguacucuuaauugcauc

SEQ ID NO: 1446767 - RNA, 19 nt, Artificial Sequence
  Description of Artificial Sequence: Synthetic oligonucleotide
gagaacuuuuauugaggca

SEQ ID NO: 1446768 - RNA, 19 nt, Artificial Sequence
  Description of Artificial Sequence: Synthetic oligonucleotide
uagacuacaucgacaccgu

SEQ ID NO: 1446769 - RNA, 19 nt, Artificial Sequence
  Description of Artificial Sequence: Synthetic oligonucleotide
guauucuugcuucaggacu

SEQ ID NO: 1446770 - RNA, 19 nt, Artificial Sequence
  Description of Artificial Sequence: Synthetic oligonucleotide
auagcuuacugcugacaca

SEQ ID NO: 1446771 - RNA, 19 nt, Artificial Sequence
  Description of Artificial Sequence: Synthetic oligonucleotide
ucuuaauugcauccccauu

SEQ ID NO: 1446772 - RNA, 19 nt, Artificial Sequence
  Description of Artificial Sequence: Synthetic oligonucleotide
cuaacuagcagagugagau

SEQ ID NO: 1446773 - RNA, 19 nt, Artificial Sequence
  Description of Artificial Sequence: Synthetic oligonucleotide
ggaaccuggagccacauaa

SEQ ID NO: 1446774 - RNA, 19 nt, Artificial Sequence
  Description of Artificial Sequence: Synthetic oligonucleotide
gaaaguugcacagcaaacu

SEQ ID NO: 1446775 - RNA, 19 nt, Artificial Sequence
  Description of Artificial Sequence: Synthetic oligonucleotide
gcuacucagaaacaggauc

SEQ ID NO: 1446776 - RNA, 19 nt, Artificial Sequence
  Description of Artificial Sequence: Synthetic oligonucleotide
guaguugaugucagaugcg

SEQ ID NO: 1446777 - RNA, 19 nt, Artificial Sequence
  Description of Artificial Sequence: Synthetic oligonucleotide
cuaagacauggagaauucc

SEQ ID NO: 1446778 - RNA, 19 nt, Artificial Sequence
  Description of Artificial Sequence: Synthetic oligonucleotide
aauagauacuaaacagcua

SEQ ID NO: 1446779 - RNA, 19 nt, Artificial Sequence
  Description of Artificial Sequence: Synthetic oligonucleotide
cacuaacuagcagagugag

SEQ ID NO: 1446780 - RNA, 19 nt, Artificial Sequence
  Description of Artificial Sequence: Synthetic oligonucleotide
aaaucuggccccaacuuuu

SEQ ID NO: 1446781 - RNA, 19 nt, Artificial Sequence
  Description of Artificial Sequence: Synthetic oligonucleotide
cauuaacacuauacuuuug

SEQ ID NO: 1446782 - RNA, 19 nt, Artificial Sequence
  Description of Artificial Sequence: Synthetic oligonucleotide
ggcaccacuguauacucag

SEQ ID NO: 1446783 - RNA, 19 nt, Artificial Sequence
  Description of Artificial Sequence: Synthetic oligonucleotide
agaauuaaaucuggcccca

SEQ ID NO: 1446784 - RNA, 19 nt, Artificial Sequence
  Description of Artificial Sequence: Synthetic oligonucleotide
aagcaguuuuaccuucuua

SEQ ID NO: 1446785 - RNA, 19 nt, Artificial Sequence
  Description of Artificial Sequence: Synthetic oligonucleotide
auacucagguuucacugaa

SEQ ID NO: 1446786 - RNA, 19 nt, Artificial Sequence
  Description of Artificial Sequence: Synthetic oligonucleotide
gucauagcggccagcagag

SEQ ID NO: 1446787 - RNA, 19 nt, Artificial Sequence
  Description of Artificial Sequence: Synthetic oligonucleotide
agcucuagcaaguguucca

SEQ ID NO: 1446788 - RNA, 19 nt, Artificial Sequence
  Description of Artificial Sequence: Synthetic oligonucleotide
ugagcacauuugauguacu

SEQ ID NO: 1446789 - RNA, 19 nt, Artificial Sequence
  Description of Artificial Sequence: Synthetic oligonucleotide
gagugagauacucagguuu

SEQ ID NO: 1446790 - RNA, 19 nt, Artificial Sequence
  Description of Artificial Sequence: Synthetic oligonucleotide
ggggcgaucacacccaaug

SEQ ID NO: 1446791 - RNA, 19 nt, Artificial Sequence
  Description of Artificial Sequence: Synthetic oligonucleotide
caguggugccacuaacuag

SEQ ID NO: 1446792 - RNA, 19 nt, Artificial Sequence
  Description of Artificial Sequence: Synthetic oligonucleotide
uggcaauguuagcaggcac

SEQ ID NO: 1446793 - RNA, 19 nt, Artificial Sequence
  Description of Artificial Sequence: Synthetic oligonucleotide
aaguguuccauggcagccu

SEQ ID NO: 1446794 - RNA, 19 nt, Artificial Sequence
  Description of Artificial Sequence: Synthetic oligonucleotide
uuggacaccgaaggugaag

SEQ ID NO: 1446795 - RNA, 19 nt, Artificial Sequence
  Description of Artificial Sequence: Synthetic oligonucleotide
cauuagguaccuggaaaug

SEQ ID NO: 1446796 - RNA, 19 nt, Artificial Sequence
  Description of Artificial Sequence: Synthetic oligonucleotide
agaauucauuaacacuaua

SEQ ID NO: 1446797 - RNA, 19 nt, Artificial Sequence
  Description of Artificial Sequence: Synthetic oligonucleotide
augaaccuucccucuggag

SEQ ID NO: 1446798 - RNA, 19 nt, Artificial Sequence
  Description of Artificial Sequence: Synthetic oligonucleotide
cauauagcucuagcaagug

SEQ ID NO: 1446799 - RNA, 19 nt, Artificial Sequence
  Description of Artificial Sequence: Synthetic oligonucleotide
gggaauggcaauguuagca

SEQ ID NO: 1446800 - RNA, 19 nt, Artificial Sequence
  Description of Artificial Sequence: Synthetic oligonucleotide
uucuguugucauagcuuac

SEQ ID NO: 1446801 - RNA, 19 nt, Artificial Sequence
  Description of Artificial Sequence: Synthetic oligonucleotide
uccaggccaaugaaccuuc

SEQ ID NO: 1446802 - RNA, 19 nt, Artificial Sequence
  Description of Artificial Sequence: Synthetic oligonucleotide
uagcucuagcaaguguucc

SEQ ID NO: 1446803 - RNA, 19 nt, Artificial Sequence
  Description of Artificial Sequence: Synthetic oligonucleotide
gaaccuggagccacauaag

SEQ ID NO: 1446804 - RNA, 19 nt, Artificial Sequence
  Description of Artificial Sequence: Synthetic oligonucleotide
gguuccaaugacauggcac

SEQ ID NO: 1446805 - RNA, 19 nt, Artificial Sequence
  Description of Artificial Sequence: Synthetic oligonucleotide
gaugggucauagcggccag

SEQ ID NO: 1446806 - RNA, 19 nt, Artificial Sequence
  Description of Artificial Sequence: Synthetic oligonucleotide
uaccuggaaaugaguaaau

SEQ ID NO: 1446807 - RNA, 19 nt, Artificial Sequence
  Description of Artificial Sequence: Synthetic oligonucleotide
aaguagugguucagaaaga

SEQ ID NO: 1446808 - RNA, 19 nt, Artificial Sequence
  Description of Artificial Sequence: Synthetic oligonucleotide
ccuagcacuagcagagagg

SEQ ID NO: 1446809 - RNA, 19 nt, Artificial Sequence
  Description of Artificial Sequence: Synthetic oligonucleotide
cagagugagauacucaggu

SEQ ID NO: 1446810 - RNA, 19 nt, Artificial Sequence
  Description of Artificial Sequence: Synthetic oligonucleotide
augcguuaauaccaacgaa

SEQ ID NO: 1446811 - RNA, 19 nt, Artificial Sequence
  Description of Artificial Sequence: Synthetic oligonucleotide
agaggccuaaggccaccac

SEQ ID NO: 1446812 - RNA, 19 nt, Artificial Sequence
  Description of Artificial Sequence: Synthetic oligonucleotide
guaccuggaaaugaguaaa

SEQ ID NO: 1446813 - RNA, 19 nt, Artificial Sequence
  Description of Artificial Sequence: Synthetic oligonucleotide
gugguucagaaagaacccc

SEQ ID NO: 1446814 - RNA, 19 nt, Artificial Sequence
  Description of Artificial Sequence: Synthetic oligonucleotide
uagcuauagagagaacuuu

SEQ ID NO: 1446815 - RNA, 19 nt, Artificial Sequence
  Description of Artificial Sequence: Synthetic oligonucleotide
accucacaaaccaguuccc

SEQ ID NO: 1446816 - RNA, 19 nt, Artificial Sequence
  Description of Artificial Sequence: Synthetic oligonucleotide
cucguagacuacaucgaca

SEQ ID NO: 1446817 - RNA, 19 nt, Artificial Sequence
  Description of Artificial Sequence: Synthetic oligonucleotide
uaguugauggggcgaucac

SEQ ID NO: 1446818 - RNA, 19 nt, Artificial Sequence
  Description of Artificial Sequence: Synthetic oligonucleotide
uaauaccaacgaaucgauu

SEQ ID NO: 1446819 - RNA, 19 nt, Artificial Sequence
  Description of Artificial Sequence: Synthetic oligonucleotide
cuucuuagcuauagagaga

SEQ ID NO: 1446820 - RNA, 19 nt, Artificial Sequence
  Description of Artificial Sequence: Synthetic oligonucleotide
cguuaauaccaacgaaucg

SEQ ID NO: 1446821 - RNA, 19 nt, Artificial Sequence
  Description of Artificial Sequence: Synthetic oligonucleotide
uucacggaugggucauagc

SEQ ID NO: 1446822 - RNA, 19 nt, Artificial Sequence
  Description of Artificial Sequence: Synthetic oligonucleotide
ggcaauguuagcaggcacc

SEQ ID NO: 1446823 - RNA, 19 nt, Artificial Sequence
  Description of Artificial Sequence: Synthetic oligonucleotide
aacccaagacuggaaaaua

SEQ ID NO: 1446824 - RNA, 19 nt, Artificial Sequence
  Description of Artificial Sequence: Synthetic oligonucleotide
accacaaguuuuccaguau

SEQ ID NO: 1446825 - RNA, 19 nt, Artificial Sequence
  Description of Artificial Sequence: Synthetic oligonucleotide
acgaaucgauuccggacga

SEQ ID NO: 1446826 - RNA, 19 nt, Artificial Sequence
  Description of Artificial Sequence: Synthetic oligonucleotide
uccugcuuuuauaggugaa

SEQ ID NO: 1446827 - RNA, 19 nt, Artificial Sequence
  Description of Artificial Sequence: Synthetic oligonucleotide
accaacgaaucgauuccgg

SEQ ID NO: 1446828 - RNA, 19 nt, Artificial Sequence
  Description of Artificial Sequence: Synthetic oligonucleotide
ucacaagaguacucuuaau

SEQ ID NO: 1446829 - RNA, 19 nt, Artificial Sequence
  Description of Artificial Sequence: Synthetic oligonucleotide
uugauggggcgaucacacc

SEQ ID NO: 1446830 - RNA, 19 nt, Artificial Sequence
  Description of Artificial Sequence: Synthetic oligonucleotide
guaguugauggggcgauca

SEQ ID NO: 1446831 - RNA, 19 nt, Artificial Sequence
  Description of Artificial Sequence: Synthetic oligonucleotide
agagugagauacucagguu

SEQ ID NO: 1446832 - RNA, 19 nt, Artificial Sequence
  Description of Artificial Sequence: Synthetic oligonucleotide
gacucguagacuacaucga

SEQ ID NO: 1446833 - RNA, 19 nt, Artificial Sequence
  Description of Artificial Sequence: Synthetic oligonucleotide
cauccccauuuauugagca

SEQ ID NO: 1446834 - RNA, 19 nt, Artificial Sequence
  Description of Artificial Sequence: Synthetic oligonucleotide
cagguuccaaugacauggc

SEQ ID NO: 1446835 - RNA, 19 nt, Artificial Sequence
  Description of Artificial Sequence: Synthetic oligonucleotide
cacggccucugcuuuguag

SEQ ID NO: 1446836 - RNA, 19 nt, Artificial Sequence
  Description of Artificial Sequence: Synthetic oligonucleotide
cacaagaguacucuuaauu

SEQ ID NO: 1446837 - RNA, 19 nt, Artificial Sequence
  Description of Artificial Sequence: Synthetic oligonucleotide
cucagaugcagggaaagaa

SEQ ID NO: 1446838 - RNA, 19 nt, Artificial Sequence
  Description of Artificial Sequence: Synthetic oligonucleotide
cuucacggaugggucauag

SEQ ID NO: 1446839 - RNA, 19 nt, Artificial Sequence
  Description of Artificial Sequence: Synthetic oligonucleotide
cagcccggaauauggaguc

SEQ ID NO: 1446840 - RNA, 19 nt, Artificial Sequence
  Description of Artificial Sequence: Synthetic oligonucleotide
gaggucuccgucccgggga

SEQ ID NO: 1446841 - RNA, 19 nt, Artificial Sequence
  Description of Artificial Sequence: Synthetic oligonucleotide
caacagacucguagacuac

SEQ ID NO: 1446842 - RNA, 19 nt, Artificial Sequence
  Description of Artificial Sequence: Synthetic oligonucleotide
guuuuaccuucuuagcuau

SEQ ID NO: 1446843 - RNA, 19 nt, Artificial Sequence
  Description of Artificial Sequence: Synthetic oligonucleotide
aggaucucucugcuccuca

SEQ ID NO: 1446844 - RNA, 19 nt, Artificial Sequence
  Description of Artificial Sequence: Synthetic oligonucleotide
ugguggcuaaggcauccaa

SEQ ID NO: 1446845 - RNA, 19 nt, Artificial Sequence
  Description of Artificial Sequence: Synthetic oligonucleotide
ccaguguacauauagucaa

SEQ ID NO: 1446846 - RNA, 19 nt, Artificial Sequence
  Description of Artificial Sequence: Synthetic oligonucleotide
acagcccggaauauggagu

SEQ ID NO: 1446847 - RNA, 19 nt, Artificial Sequence
  Description of Artificial Sequence: Synthetic oligonucleotide
uagcacuagcagagaggcc

SEQ ID NO: 1446848 - RNA, 19 nt, Artificial Sequence
  Description of Artificial Sequence: Synthetic oligonucleotide
gaagggcaagcaguuuuac

SEQ ID NO: 1446849 - RNA, 19 nt, Artificial Sequence
  Description of Artificial Sequence: Synthetic oligonucleotide
aggccuaaggccaccaccu

SEQ ID NO: 1446850 - RNA, 19 nt, Artificial Sequence
  Description of Artificial Sequence: Synthetic oligonucleotide
gguaccuggaaaugaguaa

SEQ ID NO: 1446851 - RNA, 19 nt, Artificial Sequence
  Description of Artificial Sequence: Synthetic oligonucleotide
agguuccaaugacauggca

SEQ ID NO: 1446852 - RNA, 19 nt, Artificial Sequence
  Description of Artificial Sequence: Synthetic oligonucleotide
accuucaauuagaaaggca

SEQ ID NO: 1446853 - RNA, 19 nt, Artificial Sequence
  Description of Artificial Sequence: Synthetic oligonucleotide
cuacauuagguaccuggaa

SEQ ID NO: 1446854 - RNA, 19 nt, Artificial Sequence
  Description of Artificial Sequence: Synthetic oligonucleotide
uucccucuggagccaggug

SEQ ID NO: 1446855 - RNA, 19 nt, Artificial Sequence
  Description of Artificial Sequence: Synthetic oligonucleotide
caugagcauauagcucuag

SEQ ID NO: 1446856 - RNA, 19 nt, Artificial Sequence
  Description of Artificial Sequence: Synthetic oligonucleotide
aucgacaccgucaggguau

SEQ ID NO: 1446857 - RNA, 19 nt, Artificial Sequence
  Description of Artificial Sequence: Synthetic oligonucleotide
gggcgaucacacccaaugg

SEQ ID NO: 1446858 - RNA, 19 nt, Artificial Sequence
  Description of Artificial Sequence: Synthetic oligonucleotide
uuccggacgaggaggucuc

SEQ ID NO: 1446859 - RNA, 19 nt, Artificial Sequence
  Description of Artificial Sequence: Synthetic oligonucleotide
cauagcggccagcagagua

SEQ ID NO: 1446860 - RNA, 19 nt, Artificial Sequence
  Description of Artificial Sequence: Synthetic oligonucleotide
ggcgaucacacccaaugga

SEQ ID NO: 1446861 - RNA, 19 nt, Artificial Sequence
  Description of Artificial Sequence: Synthetic oligonucleotide
agguaccuggaaaugagua

SEQ ID NO: 1446862 - RNA, 19 nt, Artificial Sequence
  Description of Artificial Sequence: Synthetic oligonucleotide
gcguuaauaccaacgaauc

SEQ ID NO: 1446863 - RNA, 19 nt, Artificial Sequence
  Description of Artificial Sequence: Synthetic oligonucleotide
gucuccgucccggggagcg

SEQ ID NO: 1446864 - RNA, 19 nt, Artificial Sequence
  Description of Artificial Sequence: Synthetic oligonucleotide
ggccaaugaaccuucccuc

SEQ ID NO: 1446865 - RNA, 19 nt, Artificial Sequence
  Description of Artificial Sequence: Synthetic oligonucleotide
cagaugcguuaauaccaac

SEQ ID NO: 1446866 - RNA, 19 nt, Artificial Sequence
  Description of Artificial Sequence: Synthetic oligonucleotide
agaguacucuuaauugcau

SEQ ID NO: 1446867 - RNA, 19 nt, Artificial Sequence
  Description of Artificial Sequence: Synthetic oligonucleotide
caccucaccaaucccuuca

SEQ ID NO: 1446868 - RNA, 19 nt, Artificial Sequence
  Description of Artificial Sequence: Synthetic oligonucleotide
agccuggcccaccguguac

SEQ ID NO: 1446869 - RNA, 19 nt, Artificial Sequence
  Description of Artificial Sequence: Synthetic oligonucleotide
agcccggaauauggagucc

SEQ ID NO: 1446870 - RNA, 19 nt, Artificial Sequence
  Description of Artificial Sequence: Synthetic oligonucleotide
ggugaaagaccugcagggc

SEQ ID NO: 1446871 - RNA, 19 nt, Artificial Sequence
  Description of Artificial Sequence: Synthetic oligonucleotide
caggguauucuugcuucag

SEQ ID NO: 1446872 - RNA, 19 nt, Artificial Sequence
  Description of Artificial Sequence: Synthetic oligonucleotide
ccaacagacucguagacua

SEQ ID NO: 1446873 - RNA, 19 nt, Artificial Sequence
  Description of Artificial Sequence: Synthetic oligonucleotide
gaaagaaccccuggagacu

SEQ ID NO: 1446874 - RNA, 19 nt, Artificial Sequence
  Description of Artificial Sequence: Synthetic oligonucleotide
agcccuccgagcucuuuca

SEQ ID NO: 1446875 - RNA, 19 nt, Artificial Sequence
  Description of Artificial Sequence: Synthetic oligonucleotide
ggcuuugguagccagagau

SEQ ID NO: 1446876 - RNA, 19 nt, Artificial Sequence
  Description of Artificial Sequence: Synthetic oligonucleotide
gcagaguaguugaugucag

SEQ ID NO: 1446877 - RNA, 19 nt, Artificial Sequence
  Description of Artificial Sequence: Synthetic oligonucleotide
gcagagugagauacucagg

SEQ ID NO: 1446878 - RNA, 19 nt, Artificial Sequence
  Description of Artificial Sequence: Synthetic oligonucleotide
aggacugcaugcacggccu

SEQ ID NO: 1446879 - RNA, 19 nt, Artificial Sequence
  Description of Artificial Sequence: Synthetic oligonucleotide
gcuacauuagguaccugga

SEQ ID NO: 1446880 - RNA, 19 nt, Artificial Sequence
  Description of Artificial Sequence: Synthetic oligonucleotide
auucuaagacauggagaau

SEQ ID NO: 1446881 - RNA, 19 nt, Artificial Sequence
  Description of Artificial Sequence: Synthetic oligonucleotide
cugaaacccaagacuggaa

SEQ ID NO: 1446882 - RNA, 19 nt, Artificial Sequence
  Description of Artificial Sequence: Synthetic oligonucleotide
aacgcccuuugguggcuaa

SEQ ID NO: 1446883 - RNA, 19 nt, Artificial Sequence
  Description of Artificial Sequence: Synthetic oligonucleotide
acagacucguagacuacau

SEQ ID NO: 1446884 - RNA, 19 nt, Artificial Sequence
  Description of Artificial Sequence: Synthetic oligonucleotide
ccguguaccuagcacuagc

SEQ ID NO: 1446885 - RNA, 19 nt, Artificial Sequence
  Description of Artificial Sequence: Synthetic oligonucleotide
augcagggaaagaauuaaa

SEQ ID NO: 1446886 - RNA, 19 nt, Artificial Sequence
  Description of Artificial Sequence: Synthetic oligonucleotide
agcuacucagaaacaggau

SEQ ID NO: 1446887 - RNA, 19 nt, Artificial Sequence
  Description of Artificial Sequence: Synthetic oligonucleotide
augcacggccucugcuuug

SEQ ID NO: 1446888 - RNA, 19 nt, Artificial Sequence
  Description of Artificial Sequence: Synthetic oligonucleotide
aaaguggcaggcagcccuu

SEQ ID NO: 1446889 - RNA, 19 nt, Artificial Sequence
  Description of Artificial Sequence: Synthetic oligonucleotide
ggcuucaccuucaauuaga

SEQ ID NO: 1446890 - RNA, 19 nt, Artificial Sequence
  Description of Artificial Sequence: Synthetic oligonucleotide
caauguuagcaggcaccac

SEQ ID NO: 1446891 - RNA, 19 nt, Artificial Sequence
  Description of Artificial Sequence: Synthetic oligonucleotide
uaccuagcacuagcagaga

SEQ ID NO: 1446892 - RNA, 19 nt, Artificial Sequence
  Description of Artificial Sequence: Synthetic oligonucleotide
gugagauacucagguuuca

SEQ ID NO: 1446893 - RNA, 19 nt, Artificial Sequence
  Description of Artificial Sequence: Synthetic oligonucleotide
cagaauucauuaacacuau

SEQ ID NO: 1446894 - RNA, 19 nt, Artificial Sequence
  Description of Artificial Sequence: Synthetic oligonucleotide
caacagcccggaauaugga

SEQ ID NO: 1446895 - RNA, 19 nt, Artificial Sequence
  Description of Artificial Sequence: Synthetic oligonucleotide
ggggaauggcaauguuagc

SEQ ID NO: 1446896 - RNA, 19 nt, Artificial Sequence
  Description of Artificial Sequence: Synthetic oligonucleotide
agcuuggccggcagagcuc

SEQ ID NO: 1446897 - RNA, 19 nt, Artificial Sequence
  Description of Artificial Sequence: Synthetic oligonucleotide
ggguuuugauucugugaca

SEQ ID NO: 1446898 - RNA, 19 nt, Artificial Sequence
  Description of Artificial Sequence: Synthetic oligonucleotide
ccacuaacuagcagaguga

SEQ ID NO: 1446899 - RNA, 19 nt, Artificial Sequence
  Description of Artificial Sequence: Synthetic oligonucleotide
gcggccagcagaguaguug

SEQ ID NO: 1446900 - RNA, 19 nt, Artificial Sequence
  Description of Artificial Sequence: Synthetic oligonucleotide
ugccacuaacuagcagagu

SEQ ID NO: 1446901 - RNA, 19 nt, Artificial Sequence
  Description of Artificial Sequence: Synthetic oligonucleotide
ccaacgaaucgauuccgga

SEQ ID NO: 1446902 - RNA, 19 nt, Artificial Sequence
  Description of Artificial Sequence: Synthetic oligonucleotide
cccaccguguaccuagcac

SEQ ID NO: 1446903 - RNA, 19 nt, Artificial Sequence
  Description of Artificial Sequence: Synthetic oligonucleotide
caucgacaccgucagggua

SEQ ID NO: 1446904 - RNA, 19 nt, Artificial Sequence
  Description of Artificial Sequence: Synthetic oligonucleotide
gcauauagcucuagcaagu

SEQ ID NO: 1446905 - RNA, 19 nt, Artificial Sequence
  Description of Artificial Sequence: Synthetic oligonucleotide
gcuuggccggcagagcucc

SEQ ID NO: 1446906 - RNA, 19 nt, Artificial Sequence
  Description of Artificial Sequence: Synthetic oligonucleotide
gagaggccuaaggccacca

SEQ ID NO: 1446907 - RNA, 19 nt, Artificial Sequence
  Description of Artificial Sequence: Synthetic oligonucleotide
cuuggacaccgaaggugaa

SEQ ID NO: 1446908 - RNA, 19 nt, Artificial Sequence
  Description of Artificial Sequence: Synthetic oligonucleotide
guaggcaguggugccacua

SEQ ID NO: 1446909 - RNA, 19 nt, Artificial Sequence
  Description of Artificial Sequence: Synthetic oligonucleotide
ccaccucacaaaccaguuc

SEQ ID NO: 1446910 - RNA, 19 nt, Artificial Sequence
  Description of Artificial Sequence: Synthetic oligonucleotide
acgcccuuugguggcuaag

SEQ ID NO: 1446911 - RNA, 19 nt, Artificial Sequence
  Description of Artificial Sequence: Synthetic oligonucleotide
aaacgcccuuugguggcua

SEQ ID NO: 1446912 - RNA, 19 nt, Artificial Sequence
  Description of Artificial Sequence: Synthetic oligonucleotide
aggcaccacuguauacuca

SEQ ID NO: 1446913 - RNA, 19 nt, Artificial Sequence
  Description of Artificial Sequence: Synthetic oligonucleotide
cccggaauauggaguccag

SEQ ID NO: 1446914 - RNA, 19 nt, Artificial Sequence
  Description of Artificial Sequence: Synthetic oligonucleotide
caccgaaggugaagggcaa

SEQ ID NO: 1446915 - RNA, 19 nt, Artificial Sequence
  Description of Artificial Sequence: Synthetic oligonucleotide
uccggacgaggaggucucc

SEQ ID NO: 1446916 - RNA, 19 nt, Artificial Sequence
  Description of Artificial Sequence: Synthetic oligonucleotide
cguagacuacaucgacacc

SEQ ID NO: 1446917 - RNA, 19 nt, Artificial Sequence
  Description of Artificial Sequence: Synthetic oligonucleotide
cguguaccuagcacuagca

SEQ ID NO: 1446918 - RNA, 19 nt, Artificial Sequence
  Description of Artificial Sequence: Synthetic oligonucleotide
gggcuucacggauggguca

SEQ ID NO: 1446919 - RNA, 19 nt, Artificial Sequence
  Description of Artificial Sequence: Synthetic oligonucleotide
ccaccguguaccuagcacu

SEQ ID NO: 1446920 - RNA, 19 nt, Artificial Sequence
  Description of Artificial Sequence: Synthetic oligonucleotide
gcccggaauauggagucca

SEQ ID NO: 1446921 - RNA, 19 nt, Artificial Sequence
  Description of Artificial Sequence: Synthetic oligonucleotide
gccagagauaaacccaauu

SEQ ID NO: 1446922 - RNA, 19 nt, Artificial Sequence
  Description of Artificial Sequence: Synthetic oligonucleotide
ucgacaccgucaggguauu

SEQ ID NO: 1446923 - RNA, 19 nt, Artificial Sequence
  Description of Artificial Sequence: Synthetic oligonucleotide
ggcaguggugccacuaacu

SEQ ID NO: 1446924 - RNA, 19 nt, Artificial Sequence
  Description of Artificial Sequence: Synthetic oligonucleotide
caugcacggccucugcuuu

SEQ ID NO: 1446925 - RNA, 19 nt, Artificial Sequence
  Description of Artificial Sequence: Synthetic oligonucleotide
gaaagaccugcagggcuuu

SEQ ID NO: 1446926 - RNA, 19 nt, Artificial Sequence
  Description of Artificial Sequence: Synthetic oligonucleotide
cccaagacuggaaaauaau

SEQ ID NO: 1446927 - RNA, 19 nt, Artificial Sequence
  Description of Artificial Sequence: Synthetic oligonucleotide
caggagcuuggccggcaga

SEQ ID NO: 1446928 - RNA, 19 nt, Artificial Sequence
  Description of Artificial Sequence: Synthetic oligonucleotide
guccaggccaaugaaccuu

SEQ ID NO: 1446929 - RNA, 19 nt, Artificial Sequence
  Description of Artificial Sequence: Synthetic oligonucleotide
ccggacgaggaggucuccg

SEQ ID NO: 1446930 - RNA, 19 nt, Artificial Sequence
  Description of Artificial Sequence: Synthetic oligonucleotide
cugcugacacagugaggua

SEQ ID NO: 1446931 - RNA, 19 nt, Artificial Sequence
  Description of Artificial Sequence: Synthetic oligonucleotide
ggccuaaggccaccaccuc

SEQ ID NO: 1446932 - RNA, 19 nt, Artificial Sequence
  Description of Artificial Sequence: Synthetic oligonucleotide
cuucccucuggagccaggu

SEQ ID NO: 1446933 - RNA, 19 nt, Artificial Sequence
  Description of Artificial Sequence: Synthetic oligonucleotide
gggcaagcaguuuuaccuu

SEQ ID NO: 1446934 - RNA, 19 nt, Artificial Sequence
  Description of Artificial Sequence: Synthetic oligonucleotide
gcggcacugggcagucccg

SEQ ID NO: 1446935 - RNA, 19 nt, Artificial Sequence
  Description of Artificial Sequence: Synthetic oligonucleotide
cuccgagcucuuucaggcu

SEQ ID NO: 1446936 - RNA, 19 nt, Artificial Sequence
  Description of Artificial Sequence: Synthetic oligonucleotide
cagucccggcgcaggguga

SEQ ID NO: 1446937 - RNA, 19 nt, Artificial Sequence
  Description of Artificial Sequence: Synthetic oligonucleotide
gcucuagcaaguguuccau

SEQ ID NO: 1446938 - RNA, 19 nt, Artificial Sequence
  Description of Artificial Sequence: Synthetic oligonucleotide
ggacugcaugcacggccuc

SEQ ID NO: 1446939 - RNA, 19 nt, Artificial Sequence
  Description of Artificial Sequence: Synthetic oligonucleotide
ccacaaguuuuccaguauu

SEQ ID NO: 1446940 - RNA, 19 nt, Artificial Sequence
  Description of Artificial Sequence: Synthetic oligonucleotide
aggcacccaccgugggguu

SEQ ID NO: 1446941 - RNA, 19 nt, Artificial Sequence
  Description of Artificial Sequence: Synthetic oligonucleotide
cacuagcagagaggccuaa

SEQ ID NO: 1446942 - RNA, 19 nt, Artificial Sequence
  Description of Artificial Sequence: Synthetic oligonucleotide
ggcgcagggugacggccuc

SEQ ID NO: 1446943 - RNA, 19 nt, Artificial Sequence
  Description of Artificial Sequence: Synthetic oligonucleotide
cgaaucgauuccggacgag

SEQ ID NO: 1446944 - RNA, 19 nt, Artificial Sequence
  Description of Artificial Sequence: Synthetic oligonucleotide
gacauggcacuuggcuauu

SEQ ID NO: 1446945 - RNA, 19 nt, Artificial Sequence
  Description of Artificial Sequence: Synthetic oligonucleotide
acccaccgugggguuuuga

SEQ ID NO: 1446946 - RNA, 19 nt, Artificial Sequence
  Description of Artificial Sequence: Synthetic oligonucleotide
ccaugagcauauagcucua

SEQ ID NO: 1446947 - RNA, 19 nt, Artificial Sequence
  Description of Artificial Sequence: Synthetic oligonucleotide
caaacgcccuuugguggcu

SEQ ID NO: 1446948 - RNA, 19 nt, Artificial Sequence
  Description of Artificial Sequence: Synthetic oligonucleotide
ccgugggguuuugauucug

SEQ ID NO: 1446949 - RNA, 19 nt, Artificial Sequence
  Description of Artificial Sequence: Synthetic oligonucleotide
ggcuucacggaugggucau

SEQ ID NO: 1446950 - RNA, 19 nt, Artificial Sequence
  Description of Artificial Sequence: Synthetic oligonucleotide
ccccauuuauugagcacau

SEQ ID NO: 1446951 - RNA, 19 nt, Artificial Sequence
  Description of Artificial Sequence: Synthetic oligonucleotide
agcggccagcagaguaguu

SEQ ID NO: 1446952 - RNA, 19 nt, Artificial Sequence
  Description of Artificial Sequence: Synthetic oligonucleotide
cgauuccggacgaggaggu

SEQ ID NO: 1446953 - RNA, 19 nt, Artificial Sequence
  Description of Artificial Sequence: Synthetic oligonucleotide
ccaccgugggguuuugauu

SEQ ID NO: 1446954 - RNA, 19 nt, Artificial Sequence
  Description of Artificial Sequence: Synthetic oligonucleotide
cgugggguuuugauucugu

SEQ ID NO: 1446955 - RNA, 19 nt, Artificial Sequence
  Description of Artificial Sequence: Synthetic oligonucleotide
cgaucacacccaauggauu

SEQ ID NO: 1446956 - RNA, 19 nt, Artificial Sequence
  Description of Artificial Sequence: Synthetic oligonucleotide
ggcacccaccgugggguuu

SEQ ID NO: 1446957 - RNA, 19 nt, Artificial Sequence
  Description of Artificial Sequence: Synthetic oligonucleotide
cgacaccgucaggguauuc

SEQ ID NO: 1446958 - RNA, 19 nt, Artificial Sequence
  Description of Artificial Sequence: Synthetic oligonucleotide
cggcgcagggugacggccu

SEQ ID NO: 1446959 - RNA, 19 nt, Artificial Sequence
  Description of Artificial Sequence: Synthetic oligonucleotide
auauauaaagaauaugacc

SEQ ID NO: 1446960 - RNA, 19 nt, Artificial Sequence
  Description of Artificial Sequence: Synthetic oligonucleotide
aagaauaugaccuccuggg

SEQ ID NO: 1446961 - RNA, 19 nt, Artificial Sequence
  Description of Artificial Sequence: Synthetic oligonucleotide
aagagguuucgguagaccc

SEQ ID NO: 1446962 - RNA, 19 nt, Artificial Sequence
  Description of Artificial Sequence: Synthetic oligonucleotide
cauauuuuggaaaagggug

SEQ ID NO: 1446963 - RNA, 19 nt, Artificial Sequence
  Description of Artificial Sequence: Synthetic oligonucleotide
aauauauaguuucucuaga

SEQ ID NO: 1446964 - RNA, 19 nt, Artificial Sequence
  Description of Artificial Sequence: Synthetic oligonucleotide
uuagcugguacacguaggg

SEQ ID NO: 1446965 - RNA, 19 nt, Artificial Sequence
  Description of Artificial Sequence: Synthetic oligonucleotide
auauauaguuucucuagag

SEQ ID NO: 1446966 - RNA, 19 nt, Artificial Sequence
  Description of Artificial Sequence: Synthetic oligonucleotide
uauaaagaauaugaccucc

SEQ ID NO: 1446967 - RNA, 19 nt, Artificial Sequence
  Description of Artificial Sequence: Synthetic oligonucleotide
aagcccuuaugacucauuc

SEQ ID NO: 1446968 - RNA, 19 nt, Artificial Sequence
  Description of Artificial Sequence: Synthetic oligonucleotide
uaaagcgugugaagcagcg

SEQ ID NO: 1446969 - RNA, 19 nt, Artificial Sequence
  Description of Artificial Sequence: Synthetic oligonucleotide
aauucaucgccccugcccu

SEQ ID NO: 1446970 - RNA, 19 nt, Artificial Sequence
  Description of Artificial Sequence: Synthetic oligonucleotide
agaauaugaccuccugggc

SEQ ID NO: 1446971 - RNA, 19 nt, Artificial Sequence
  Description of Artificial Sequence: Synthetic oligonucleotide
gcuaagaagagccaaaaug

SEQ ID NO: 1446972 - RNA, 19 nt, Artificial Sequence
  Description of Artificial Sequence: Synthetic oligonucleotide
  modified_base (3)..(3): a, c, u, g, unknown or other
uunagggagccacauguug

SEQ ID NO: 1446973 - RNA, 19 nt, Artificial Sequence
  Description of Artificial Sequence: Synthetic oligonucleotide
  modified_base (11)..(11): a, c, u, g, unknown or other
aaugggucuunagggagcc

SEQ ID NO: 1446974 - RNA, 19 nt, Artificial Sequence
  Description of Artificial Sequence: Synthetic oligonucleotide
uuuggaaaaggguggaaga

SEQ ID NO: 1446975 - RNA, 19 nt, Artificial Sequence
  Description of Artificial Sequence: Synthetic oligonucleotide
ugaggcuuggcccaacucc

SEQ ID NO: 1446976 - RNA, 19 nt, Artificial Sequence
  Description of Artificial Sequence: Synthetic oligonucleotide
uacacguagggacuggugc

SEQ ID NO: 1446977 - RNA, 19 nt, Artificial Sequence
  Description of Artificial Sequence: Synthetic oligonucleotide
uugguuuaggcagugaggc

SEQ ID NO: 1446978 - RNA, 19 nt, Artificial Sequence
  Description of Artificial Sequence: Synthetic oligonucleotide
uuagaauaauauauaguuu

SEQ ID NO: 1446979 - RNA, 19 nt, Artificial Sequence
  Description of Artificial Sequence: Synthetic oligonucleotide
aagaggggaauccucccgg

SEQ ID NO: 1446980 - RNA, 19 nt, Artificial Sequence
  Description of Artificial Sequence: Synthetic oligonucleotide
caacugauaccgaagcugg

SEQ ID NO: 1446981 - RNA, 19 nt, Artificial Sequence
  Description of Artificial Sequence: Synthetic oligonucleotide
ugauaccgaagcuggaggg

SEQ ID NO: 1446982 - RNA, 19 nt, Artificial Sequence
  Description of Artificial Sequence: Synthetic oligonucleotide
auaauauauaguuucucua

SEQ ID NO: 1446983 - RNA, 19 nt, Artificial Sequence
  Description of Artificial Sequence: Synthetic oligonucleotide
uguugaaccggacaccaga

SEQ ID NO: 1446984 - RNA, 19 nt, Artificial Sequence
  Description of Artificial Sequence: Synthetic oligonucleotide
  modified_base (12)..(12): a, c, u, g, unknown or other
aaaugggucuunagggagc

SEQ ID NO: 1446985 - RNA, 19 nt, Artificial Sequence
  Description of Artificial Sequence: Synthetic oligonucleotide
aaccggacaccagacaggc

SEQ ID NO: 1446986 - RNA, 19 nt, Artificial Sequence
  Description of Artificial Sequence: Synthetic oligonucleotide
agagccaaaaugucccugg

SEQ ID NO: 1446987 - RNA, 19 nt, Artificial Sequence
  Description of Artificial Sequence: Synthetic oligonucleotide
gauauaaggccuuggguga

SEQ ID NO: 1446988 - RNA, 19 nt, Artificial Sequence
  Description of Artificial Sequence: Synthetic oligonucleotide
aaaaggguggaagaguaga

SEQ ID NO: 1446989 - RNA, 19 nt, Artificial Sequence
  Description of Artificial Sequence: Synthetic oligonucleotide
aagugcuaaacugaggccu

SEQ ID NO: 1446990 - RNA, 19 nt, Artificial Sequence
  Description of Artificial Sequence: Synthetic oligonucleotide
uuccucaugcauugaaggg

SEQ ID NO: 1446991 - RNA, 19 nt, Artificial Sequence
  Description of Artificial Sequence: Synthetic oligonucleotide
uggaguguuguaccgcugg

SEQ ID NO: 1446992 - RNA, 19 nt, Artificial Sequence
  Description of Artificial Sequence: Synthetic oligonucleotide
  modified_base (2)..(2): a, c, u, g, unknown or other
unagggagccacauguuga

SEQ ID NO: 1446993 - RNA, 19 nt, Artificial Sequence
  Description of Artificial Sequence: Synthetic oligonucleotide
uguucugucaacgggaagu

SEQ ID NO: 1446994 - RNA, 19 nt, Artificial Sequence
  Description of Artificial Sequence: Synthetic oligonucleotide
agcgucucugagcagaggg

SEQ ID NO: 1446995 - RNA, 19 nt, Artificial Sequence
  Description of Artificial Sequence: Synthetic oligonucleotide
cuuuauuggaccugcucag

SEQ ID NO: 1446996 - RNA, 19 nt, Artificial Sequence
  Description of Artificial Sequence: Synthetic oligonucleotide
cuugggugaguccagcugg

SEQ ID NO: 1446997 - RNA, 19 nt, Artificial Sequence
  Description of Artificial Sequence: Synthetic oligonucleotide
acucauucagaccuggacu

SEQ ID NO: 1446998 - RNA, 19 nt, Artificial Sequence
  Description of Artificial Sequence: Synthetic oligonucleotide
aagcgugugaagcagcgga

SEQ ID NO: 1446999 - RNA, 19 nt, Artificial Sequence
  Description of Artificial Sequence: Synthetic oligonucleotide
acacguagggacuggugcc

SEQ ID NO: 1447000 - RNA, 19 nt, Artificial Sequence
  Description of Artificial Sequence: Synthetic oligonucleotide
cuaagaagagccaaaaugu

SEQ ID NO: 1447001 - RNA, 19 nt, Artificial Sequence
  Description of Artificial Sequence: Synthetic oligonucleotide
cauugguuuaggcagugag

SEQ ID NO: 1447002 - RNA, 19 nt, Artificial Sequence
  Description of Artificial Sequence: Synthetic oligonucleotide
cacauguugaaccggacac

SEQ ID NO: 1447003 - RNA, 19 nt, Artificial Sequence
  Description of Artificial Sequence: Synthetic oligonucleotide
agcggagguacuaaagugc

SEQ ID NO: 1447004 - RNA, 19 nt, Artificial Sequence
  Description of Artificial Sequence: Synthetic oligonucleotide
uaaacugaggccucuuggu

SEQ ID NO: 1447005 - RNA, 19 nt, Artificial Sequence
  Description of Artificial Sequence: Synthetic oligonucleotide
gagccugcuaagaagagcc

SEQ ID NO: 1447006 - RNA, 19 nt, Artificial Sequence
  Description of Artificial Sequence: Synthetic oligonucleotide
cacgauauaaggccuuggg

SEQ ID NO: 1447007 - RNA, 19 nt, Artificial Sequence
  Description of Artificial Sequence: Synthetic oligonucleotide
uccguuguuaaucccugcc

SEQ ID NO: 1447008 - RNA, 19 nt, Artificial Sequence
  Description of Artificial Sequence: Synthetic oligonucleotide
aaccuggaguguuguaccg

SEQ ID NO: 1447009 - RNA, 19 nt, Artificial Sequence
  Description of Artificial Sequence: Synthetic oligonucleotide
acuuagaggaguuggacuu

SEQ ID NO: 1447010 - RNA, 19 nt, Artificial Sequence
  Description of Artificial Sequence: Synthetic oligonucleotide
uuggcuaaagcgugugaag

SEQ ID NO: 1447011 - RNA, 19 nt, Artificial Sequence
  Description of Artificial Sequence: Synthetic oligonucleotide
uuauuggaccugcucaggu

SEQ ID NO: 1447012 - RNA, 19 nt, Artificial Sequence
  Description of Artificial Sequence: Synthetic oligonucleotide
agguacuaaagugcuaaac

SEQ ID NO: 1447013 - RNA, 19 nt, Artificial Sequence
  Description of Artificial Sequence: Synthetic oligonucleotide
ucugcuuuauuggaccugc

SEQ ID NO: 1447014 - RNA, 19 nt, Artificial Sequence
  Description of Artificial Sequence: Synthetic oligonucleotide
uuuauuggaccugcucagg

SEQ ID NO: 1447015 - RNA, 19 nt, Artificial Sequence
  Description of Artificial Sequence: Synthetic oligonucleotide
cucauucagaccuggacuc

SEQ ID NO: 1447016 - RNA, 19 nt, Artificial Sequence
  Description of Artificial Sequence: Synthetic oligonucleotide
ugagaaaccuggaguguug

SEQ ID NO: 1447017 - RNA, 19 nt, Artificial Sequence
  Description of Artificial Sequence: Synthetic oligonucleotide
ugggcaaacagcagcgucu

SEQ ID NO: 1447018 - RNA, 19 nt, Artificial Sequence
  Description of Artificial Sequence: Synthetic oligonucleotide
uuagaggaguuggacuugg

SEQ ID NO: 1447019 - RNA, 19 nt, Artificial Sequence
  Description of Artificial Sequence: Synthetic oligonucleotide
uuugcugccauggggcgcg

SEQ ID NO: 1447020 - RNA, 19 nt, Artificial Sequence
  Description of Artificial Sequence: Synthetic oligonucleotide
agaauaauauauaguuucu

SEQ ID NO: 1447021 - RNA, 19 nt, Artificial Sequence
  Description of Artificial Sequence: Synthetic oligonucleotide
acgauauaaggccuugggu

SEQ ID NO: 1447022 - RNA, 19 nt, Artificial Sequence
  Description of Artificial Sequence: Synthetic oligonucleotide
acauguugaaccggacacc

SEQ ID NO: 1447023 - RNA, 19 nt, Artificial Sequence
  Description of Artificial Sequence: Synthetic oligonucleotide
gaaggcgcuuaccacagac

SEQ ID NO: 1447024 - RNA, 19 nt, Artificial Sequence
  Description of Artificial Sequence: Synthetic oligonucleotide
uggcuaaagcgugugaagc

SEQ ID NO: 1447025 - RNA, 19 nt, Artificial Sequence
  Description of Artificial Sequence: Synthetic oligonucleotide
agagccugcuaagaagagc

SEQ ID NO: 1447026 - RNA, 19 nt, Artificial Sequence
  Description of Artificial Sequence: Synthetic oligonucleotide
uauuggaccugcucaggug

SEQ ID NO: 1447027 - RNA, 19 nt, Artificial Sequence
  Description of Artificial Sequence: Synthetic oligonucleotide
aacgggaaguaguccaccu

SEQ ID NO: 1447028 - RNA, 19 nt, Artificial Sequence
  Description of Artificial Sequence: Synthetic oligonucleotide
agcuaggcaaggugucugc

SEQ ID NO: 1447029 - RNA, 19 nt, Artificial Sequence
  Description of Artificial Sequence: Synthetic oligonucleotide
aguagagggcuagcuaggc

SEQ ID NO: 1447030 - RNA, 19 nt, Artificial Sequence
  Description of Artificial Sequence: Synthetic oligonucleotide
ugacuuugaguggaggccc

SEQ ID NO: 1447031 - RNA, 19 nt, Artificial Sequence
  Description of Artificial Sequence: Synthetic oligonucleotide
agccugagaaaccuggagu

SEQ ID NO: 1447032 - RNA, 19 nt, Artificial Sequence
  Description of Artificial Sequence: Synthetic oligonucleotide
cuaaagcgugugaagcagc

SEQ ID NO: 1447033 - RNA, 19 nt, Artificial Sequence
  Description of Artificial Sequence: Synthetic oligonucleotide
  modified_base (6)..(6): a, c, u, g, unknown or other
uuuccnguggggccggcca

SEQ ID NO: 1447034 - RNA, 19 nt, Artificial Sequence
  Description of Artificial Sequence: Synthetic oligonucleotide
ugcccaacugauaccgaag

SEQ ID NO: 1447035 - RNA, 19 nt, Artificial Sequence
  Description of Artificial Sequence: Synthetic oligonucleotide
ccuuaugacucauucagac

SEQ ID NO: 1447036 - RNA, 19 nt, Artificial Sequence
  Description of Artificial Sequence: Synthetic oligonucleotide
gucaacgggaaguagucca

SEQ ID NO: 1447037 - RNA, 19 nt, Artificial Sequence
  Description of Artificial Sequence: Synthetic oligonucleotide
gaauccucccggugaacag

SEQ ID NO: 1447038 - RNA, 19 nt, Artificial Sequence
  Description of Artificial Sequence: Synthetic oligonucleotide
caucugucccugcugacag

SEQ ID NO: 1447039 - RNA, 19 nt, Artificial Sequence
  Description of Artificial Sequence: Synthetic oligonucleotide
uaggcaaggugucugcauc

SEQ ID NO: 1447040 - RNA, 19 nt, Artificial Sequence
  Description of Artificial Sequence: Synthetic oligonucleotide
guuucgguagacccgugug

SEQ ID NO: 1447041 - RNA, 19 nt, Artificial Sequence
  Description of Artificial Sequence: Synthetic oligonucleotide
aaagcgugugaagcagcgg

SEQ ID NO: 1447042 - RNA, 19 nt, Artificial Sequence
  Description of Artificial Sequence: Synthetic oligonucleotide
agcagagagaacuucuguu

SEQ ID NO: 1447043 - RNA, 19 nt, Artificial Sequence
  Description of Artificial Sequence: Synthetic oligonucleotide
uuuauggcuuuggcuaaag

SEQ ID NO: 1447044 - RNA, 19 nt, Artificial Sequence
  Description of Artificial Sequence: Synthetic oligonucleotide
agagguuucgguagacccg

SEQ ID NO: 1447045 - RNA, 19 nt, Artificial Sequence
  Description of Artificial Sequence: Synthetic oligonucleotide
cauggaaggcgcuuaccac

SEQ ID NO: 1447046 - RNA, 19 nt, Artificial Sequence
  Description of Artificial Sequence: Synthetic oligonucleotide
gguuagcugguacacguag

SEQ ID NO: 1447047 - RNA, 19 nt, Artificial Sequence
  Description of Artificial Sequence: Synthetic oligonucleotide
aggacagcccacugaguuc

SEQ ID NO: 1447048 - RNA, 19 nt, Artificial Sequence
  Description of Artificial Sequence: Synthetic oligonucleotide
  modified_base (9)..(9): a, c, u, g, unknown or other
ugggucuunagggagccac

SEQ ID NO: 1447049 - RNA, 19 nt, Artificial Sequence
  Description of Artificial Sequence: Synthetic oligonucleotide
auaccgaagcuggaggguc

SEQ ID NO: 1447050 - RNA, 19 nt, Artificial Sequence
  Description of Artificial Sequence: Synthetic oligonucleotide
cugucaacgggaaguaguc

SEQ ID NO: 1447051 - RNA, 19 nt, Artificial Sequence
  Description of Artificial Sequence: Synthetic oligonucleotide
aaagggguaagcagggcau

SEQ ID NO: 1447052 - RNA, 19 nt, Artificial Sequence
  Description of Artificial Sequence: Synthetic oligonucleotide
guuagcugguacacguagg

SEQ ID NO: 1447053 - RNA, 19 nt, Artificial Sequence
  Description of Artificial Sequence: Synthetic oligonucleotide
cuauugcauauuuuggaaa

SEQ ID NO: 1447054 - RNA, 19 nt, Artificial Sequence
  Description of Artificial Sequence: Synthetic oligonucleotide
cacgccccacgauauaagg

SEQ ID NO: 1447055 - RNA, 19 nt, Artificial Sequence
  Description of Artificial Sequence: Synthetic oligonucleotide
augagcacagccauguagu

SEQ ID NO: 1447056 - RNA, 19 nt, Artificial Sequence
  Description of Artificial Sequence: Synthetic oligonucleotide
cagcggagguacuaaagug

SEQ ID NO: 1447057 - RNA, 19 nt, Artificial Sequence
  Description of Artificial Sequence: Synthetic oligonucleotide
agugguuagcugguacacg

SEQ ID NO: 1447058 - RNA, 19 nt, Artificial Sequence
  Description of Artificial Sequence: Synthetic oligonucleotide
ugaguggcuggcaggacuc

SEQ ID NO: 1447059 - RNA, 19 nt, Artificial Sequence
  Description of Artificial Sequence: Synthetic oligonucleotide
gaaccggacaccagacagg

SEQ ID NO: 1447060 - RNA, 19 nt, Artificial Sequence
  Description of Artificial Sequence: Synthetic oligonucleotide
ugcccuccguuguuaaucc

SEQ ID NO: 1447061 - RNA, 19 nt, Artificial Sequence
  Description of Artificial Sequence: Synthetic oligonucleotide
ggcuauugcauauuuugga

SEQ ID NO: 1447062 - RNA, 19 nt, Artificial Sequence
  Description of Artificial Sequence: Synthetic oligonucleotide
agugcuaaacugaggccuc

SEQ ID NO: 1447063 - RNA, 19 nt, Artificial Sequence
  Description of Artificial Sequence: Synthetic oligonucleotide
agaccuggacuccuccaag

SEQ ID NO: 1447064 - RNA, 19 nt, Artificial Sequence
  Description of Artificial Sequence: Synthetic oligonucleotide
gaacagagccugcuaagaa

SEQ ID NO: 1447065 - RNA, 19 nt, Artificial Sequence
  Description of Artificial Sequence: Synthetic oligonucleotide
aauccucccggugaacaga

SEQ ID NO: 1447066 - RNA, 19 nt, Artificial Sequence
  Description of Artificial Sequence: Synthetic oligonucleotide
ccugaagcccuuaugacuc

SEQ ID NO: 1447067 - RNA, 19 nt, Artificial Sequence
  Description of Artificial Sequence: Synthetic oligonucleotide
gucccgucuuccuugauga

SEQ ID NO: 1447068 - RNA, 19 nt, Artificial Sequence
  Description of Artificial Sequence: Synthetic oligonucleotide
ggaagcggguuccucaugc

SEQ ID NO: 1447069 - RNA, 19 nt, Artificial Sequence
  Description of Artificial Sequence: Synthetic oligonucleotide
agacccgugugauguugac

SEQ ID NO: 1447070 - RNA, 19 nt, Artificial Sequence
  Description of Artificial Sequence: Synthetic oligonucleotide
  modified_base (15)..(15): a, c, u, g, unknown or other
cauggggcuuuuccngugg

SEQ ID NO: 1447071 - RNA, 19 nt, Artificial Sequence
  Description of Artificial Sequence: Synthetic oligonucleotide
ugucaacgggaaguagucc

SEQ ID NO: 1447072 - RNA, 19 nt, Artificial Sequence
  Description of Artificial Sequence: Synthetic oligonucleotide
aagcggguuccucaugcau

SEQ ID NO: 1447073 - RNA, 19 nt, Artificial Sequence
  Description of Artificial Sequence: Synthetic oligonucleotide
caaaaugucccuggcagga

SEQ ID NO: 1447074 - RNA, 19 nt, Artificial Sequence
  Description of Artificial Sequence: Synthetic oligonucleotide
uagacccgugugauguuga

SEQ ID NO: 1447075 - RNA, 19 nt, Artificial Sequence
  Description of Artificial Sequence: Synthetic oligonucleotide
cagggcauugguuuaggca

SEQ ID NO: 1447076 - RNA, 19 nt, Artificial Sequence
  Description of Artificial Sequence: Synthetic oligonucleotide
agcccuuaugacucauuca

SEQ ID NO: 1447077 - RNA, 19 nt, Artificial Sequence
  Description of Artificial Sequence: Synthetic oligonucleotide
ugcccugacuuugagugga

SEQ ID NO: 1447078 - RNA, 19 nt, Artificial Sequence
  Description of Artificial Sequence: Synthetic oligonucleotide
acgccccacgauauaaggc

SEQ ID NO: 1447079 - RNA, 19 nt, Artificial Sequence
  Description of Artificial Sequence: Synthetic oligonucleotide
gcuauugcauauuuuggaa

SEQ ID NO: 1447080 - RNA, 19 nt, Artificial Sequence
  Description of Artificial Sequence: Synthetic oligonucleotide
cauguugaaccggacacca

SEQ ID NO: 1447081 - RNA, 19 nt, Artificial Sequence
  Description of Artificial Sequence: Synthetic oligonucleotide
ccggccaacagccaggagc

SEQ ID NO: 1447082 - RNA, 19 nt, Artificial Sequence
  Description of Artificial Sequence: Synthetic oligonucleotide
uucgguagacccgugugau

SEQ ID NO: 1447083 - RNA, 19 nt, Artificial Sequence
  Description of Artificial Sequence: Synthetic oligonucleotide
uagcuaggcaaggugucug

SEQ ID NO: 1447084 - RNA, 19 nt, Artificial Sequence
  Description of Artificial Sequence: Synthetic oligonucleotide
ucccggugaacagagccug

SEQ ID NO: 1447085 - RNA, 19 nt, Artificial Sequence
  Description of Artificial Sequence: Synthetic oligonucleotide
gcuaaagcgugugaagcag

SEQ ID NO: 1447086 - RNA, 19 nt, Artificial Sequence
  Description of Artificial Sequence: Synthetic oligonucleotide
uuuugcugccauggggcgc

SEQ ID NO: 1447087 - RNA, 19 nt, Artificial Sequence
  Description of Artificial Sequence: Synthetic oligonucleotide
guugaaccggacaccagac

SEQ ID NO: 1447088 - RNA, 19 nt, Artificial Sequence
  Description of Artificial Sequence: Synthetic oligonucleotide
uggugaguggcuggcagga

SEQ ID NO: 1447089 - RNA, 19 nt, Artificial Sequence
  Description of Artificial Sequence: Synthetic oligonucleotide
aggcaaggugucugcauca

SEQ ID NO: 1447090 - RNA, 19 nt, Artificial Sequence
  Description of Artificial Sequence: Synthetic oligonucleotide
  modified_base (7)..(7): a, c, u, g, unknown or other
uuuuccnguggggccggcc

SEQ ID NO: 1447091 - RNA, 19 nt, Artificial Sequence
  Description of Artificial Sequence: Synthetic oligonucleotide
ccaacugauaccgaagcug

SEQ ID NO: 1447092 - RNA, 19 nt, Artificial Sequence
  Description of Artificial Sequence: Synthetic oligonucleotide
  modified_base (6)..(6): a, c, u, g, unknown or other
gucuunagggagccacaug

SEQ ID NO: 1447093 - RNA, 19 nt, Artificial Sequence
  Description of Artificial Sequence: Synthetic oligonucleotide
caggcaccaaggcuauugc

SEQ ID NO: 1447094 - RNA, 19 nt, Artificial Sequence
  Description of Artificial Sequence: Synthetic oligonucleotide
uaccgcuggaucucugggu

SEQ ID NO: 1447095 - RNA, 19 nt, Artificial Sequence
  Description of Artificial Sequence: Synthetic oligonucleotide
ggagguacuaaagugcuaa

SEQ ID NO: 1447096 - RNA, 19 nt, Artificial Sequence
  Description of Artificial Sequence: Synthetic oligonucleotide
agggacuggugcccaacug

SEQ ID NO: 1447097 - RNA, 19 nt, Artificial Sequence
  Description of Artificial Sequence: Synthetic oligonucleotide
gagccacauguugaaccgg

SEQ ID NO: 1447098 - RNA, 19 nt, Artificial Sequence
  Description of Artificial Sequence: Synthetic oligonucleotide
gaccuggacuccuccaaga

SEQ ID NO: 1447099 - RNA, 19 nt, Artificial Sequence
  Description of Artificial Sequence: Synthetic oligonucleotide
cuuuugguccccaucugua

SEQ ID NO: 1447100 - RNA, 19 nt, Artificial Sequence
  Description of Artificial Sequence: Synthetic oligonucleotide
aaggcgcuuaccacagacu

SEQ ID NO: 1447101 - RNA, 19 nt, Artificial Sequence
  Description of Artificial Sequence: Synthetic oligonucleotide
ggcaagaggggaauccucc

SEQ ID NO: 1447102 - RNA, 19 nt, Artificial Sequence
  Description of Artificial Sequence: Synthetic oligonucleotide
gcauggaaggcgcuuacca

SEQ ID NO: 1447103 - RNA, 19 nt, Artificial Sequence
  Description of Artificial Sequence: Synthetic oligonucleotide
ccgaacuuggcaagagggg

SEQ ID NO: 1447104 - RNA, 19 nt, Artificial Sequence
  Description of Artificial Sequence: Synthetic oligonucleotide
gaagcuggagggucccguc

SEQ ID NO: 1447105 - RNA, 19 nt, Artificial Sequence
  Description of Artificial Sequence: Synthetic oligonucleotide
cuccaucacacgccccacg

SEQ ID NO: 1447106 - RNA, 19 nt, Artificial Sequence
  Description of Artificial Sequence: Synthetic oligonucleotide
ucccugcugacagugcaca

SEQ ID NO: 1447107 - RNA, 19 nt, Artificial Sequence
  Description of Artificial Sequence: Synthetic oligonucleotide
gcuaaacugaggccucuug

SEQ ID NO: 1447108 - RNA, 19 nt, Artificial Sequence
  Description of Artificial Sequence: Synthetic oligonucleotide
gaucucugggucaaugacu

SEQ ID NO: 1447109 - RNA, 19 nt, Artificial Sequence
  Description of Artificial Sequence: Synthetic oligonucleotide
guagacccgugugauguug

SEQ ID NO: 1447110 - RNA, 19 nt, Artificial Sequence
  Description of Artificial Sequence: Synthetic oligonucleotide
ucgguagacccgugugaug

SEQ ID NO: 1447111 - RNA, 19 nt, Artificial Sequence
  Description of Artificial Sequence: Synthetic oligonucleotide
ccucccggugaacagagcc

SEQ ID NO: 1447112 - RNA, 19 nt, Artificial Sequence
  Description of Artificial Sequence: Synthetic oligonucleotide
agaggggaauccucccggu

SEQ ID NO: 1447113 - RNA, 19 nt, Artificial Sequence
  Description of Artificial Sequence: Synthetic oligonucleotide
ggcuaaagcgugugaagca

SEQ ID NO: 1447114 - RNA, 19 nt, Artificial Sequence
  Description of Artificial Sequence: Synthetic oligonucleotide
cacguagggacuggugccc

SEQ ID NO: 1447115 - RNA, 19 nt, Artificial Sequence
  Description of Artificial Sequence: Synthetic oligonucleotide
aacugauaccgaagcugga

SEQ ID NO: 1447116 - RNA, 19 nt, Artificial Sequence
  Description of Artificial Sequence: Synthetic oligonucleotide
ggucaaugacuccugucuc

SEQ ID NO: 1447117 - RNA, 19 nt, Artificial Sequence
  Description of Artificial Sequence: Synthetic oligonucleotide
ggcaauucaucgccccugc

SEQ ID NO: 1447118 - RNA, 19 nt, Artificial Sequence
  Description of Artificial Sequence: Synthetic oligonucleotide
caacgggaaguaguccacc

SEQ ID NO: 1447119 - RNA, 19 nt, Artificial Sequence
  Description of Artificial Sequence: Synthetic oligonucleotide
cugcccuccguuguuaauc

SEQ ID NO: 1447120 - RNA, 19 nt, Artificial Sequence
  Description of Artificial Sequence: Synthetic oligonucleotide
gaagcggguuccucaugca

SEQ ID NO: 1447121 - RNA, 19 nt, Artificial Sequence
  Description of Artificial Sequence: Synthetic oligonucleotide
ugguuagcugguacacgua

SEQ ID NO: 1447122 - RNA, 19 nt, Artificial Sequence
  Description of Artificial Sequence: Synthetic oligonucleotide
gagguacuaaagugcuaaa

SEQ ID NO: 1447123 - RNA, 19 nt, Artificial Sequence
  Description of Artificial Sequence: Synthetic oligonucleotide
ucaucgccccugcccuccg

SEQ ID NO: 1447124 - RNA, 19 nt, Artificial Sequence
  Description of Artificial Sequence: Synthetic oligonucleotide
ggaaaaggguggaagagua

SEQ ID NO: 1447125 - RNA, 19 nt, Artificial Sequence
  Description of Artificial Sequence: Synthetic oligonucleotide
uguugacacuguggggcug

SEQ ID NO: 1447126 - RNA, 19 nt, Artificial Sequence
  Description of Artificial Sequence: Synthetic oligonucleotide
gaagcagcggagguacuaa

SEQ ID NO: 1447127 - RNA, 19 nt, Artificial Sequence
  Description of Artificial Sequence: Synthetic oligonucleotide
cgccccacgauauaaggcc

SEQ ID NO: 1447128 - RNA, 19 nt, Artificial Sequence
  Description of Artificial Sequence: Synthetic oligonucleotide
agggguaagcagggcauug

SEQ ID NO: 1447129 - RNA, 19 nt, Artificial Sequence
  Description of Artificial Sequence: Synthetic oligonucleotide
gcaggaaaggccugucuca

SEQ ID NO: 1447130 - RNA, 19 nt, Artificial Sequence
  Description of Artificial Sequence: Synthetic oligonucleotide
  modified_base (11)..(11): a, c, u, g, unknown or other
gggcuuuuccnguggggcc

SEQ ID NO: 1447131 - RNA, 19 nt, Artificial Sequence
  Description of Artificial Sequence: Synthetic oligonucleotide
caucacacgccccacgaua

SEQ ID NO: 1447132 - RNA, 19 nt, Artificial Sequence
  Description of Artificial Sequence: Synthetic oligonucleotide
aaggggaguuuugcugcca

SEQ ID NO: 1447133 - RNA, 19 nt, Artificial Sequence
  Description of Artificial Sequence: Synthetic oligonucleotide
aggggaguuuugcugccau

SEQ ID NO: 1447134 - RNA, 19 nt, Artificial Sequence
  Description of Artificial Sequence: Synthetic oligonucleotide
cugcccaccgaacuuggca

SEQ ID NO: 1447135 - RNA, 19 nt, Artificial Sequence
  Description of Artificial Sequence: Synthetic oligonucleotide
gcauauuuuggaaaagggu

SEQ ID NO: 1447136 - RNA, 19 nt, Artificial Sequence
  Description of Artificial Sequence: Synthetic oligonucleotide
agccacauguugaaccgga

SEQ ID NO: 1447137 - RNA, 19 nt, Artificial Sequence
  Description of Artificial Sequence: Synthetic oligonucleotide
ucccgucuuccuugaugag

SEQ ID NO: 1447138 - RNA, 19 nt, Artificial Sequence
  Description of Artificial Sequence: Synthetic oligonucleotide
  modified_base (5)..(5): a, c, u, g, unknown or other
uuccnguggggccggccaa

SEQ ID NO: 1447139 - RNA, 19 nt, Artificial Sequence
  Description of Artificial Sequence: Synthetic oligonucleotide
cuuuggcuaaagcguguga

SEQ ID NO: 1447140 - RNA, 19 nt, Artificial Sequence
  Description of Artificial Sequence: Synthetic oligonucleotide
cugguacacguagggacug

SEQ ID NO: 1447141 - RNA, 19 nt, Artificial Sequence
  Description of Artificial Sequence: Synthetic oligonucleotide
cuggaguguuguaccgcug

SEQ ID NO: 1447142 - RNA, 19 nt, Artificial Sequence
  Description of Artificial Sequence: Synthetic oligonucleotide
gugcccaacugauaccgaa

SEQ ID NO: 1447143 - RNA, 19 nt, Artificial Sequence
  Description of Artificial Sequence: Synthetic oligonucleotide
agcccacugaguucuuuua

SEQ ID NO: 1447144 - RNA, 19 nt, Artificial Sequence
  Description of Artificial Sequence: Synthetic oligonucleotide
uggggcgcggcguucggaa

SEQ ID NO: 1447145 - RNA, 19 nt, Artificial Sequence
  Description of Artificial Sequence: Synthetic oligonucleotide
gagguuucgguagacccgu

SEQ ID NO: 1447146 - RNA, 19 nt, Artificial Sequence
  Description of Artificial Sequence: Synthetic oligonucleotide
agggcuagcuaggcaaggu

SEQ ID NO: 1447147 - RNA, 19 nt, Artificial Sequence
  Description of Artificial Sequence: Synthetic oligonucleotide
gggcuagcuaggcaaggug

SEQ ID NO: 1447148 - RNA, 19 nt, Artificial Sequence
  Description of Artificial Sequence: Synthetic oligonucleotide
ggcacgagcgggcucugcc

SEQ ID NO: 1447149 - RNA, 19 nt, Artificial Sequence
  Description of Artificial Sequence: Synthetic oligonucleotide
ccgucuuccuugaugagca

SEQ ID NO: 1447150 - RNA, 19 nt, Artificial Sequence
  Description of Artificial Sequence: Synthetic oligonucleotide
gauaccgaagcuggagggu

SEQ ID NO: 1447151 - RNA, 19 nt, Artificial Sequence
  Description of Artificial Sequence: Synthetic oligonucleotide
ggaauccucccggugaaca

SEQ ID NO: 1447152 - RNA, 19 nt, Artificial Sequence
  Description of Artificial Sequence: Synthetic oligonucleotide
ugaagcccuuaugacucau

SEQ ID NO: 1447153 - RNA, 19 nt, Artificial Sequence
  Description of Artificial Sequence: Synthetic oligonucleotide
ggaagggaggcaauucauc

SEQ ID NO: 1447154 - RNA, 19 nt, Artificial Sequence
  Description of Artificial Sequence: Synthetic oligonucleotide
  modified_base (18)..(18): a, c, u, g, unknown or other
ccccauggggcuuuuccng

SEQ ID NO: 1447155 - RNA, 19 nt, Artificial Sequence
  Description of Artificial Sequence: Synthetic oligonucleotide
acacgccccacgauauaag

SEQ ID NO: 1447156 - RNA, 19 nt, Artificial Sequence
  Description of Artificial Sequence: Synthetic oligonucleotide
gacccgugugauguugaca

SEQ ID NO: 1447157 - RNA, 19 nt, Artificial Sequence
  Description of Artificial Sequence: Synthetic oligonucleotide
gugaggcuuggcccaacuc

SEQ ID NO: 1447158 - RNA, 19 nt, Artificial Sequence
  Description of Artificial Sequence: Synthetic oligonucleotide
gacuuugaguggaggccca

SEQ ID NO: 1447159 - RNA, 19 nt, Artificial Sequence
  Description of Artificial Sequence: Synthetic oligonucleotide
gcgugugaagcagcggagg

SEQ ID NO: 1447160 - RNA, 19 nt, Artificial Sequence
  Description of Artificial Sequence: Synthetic oligonucleotide
ugagggcacgagcgggcuc

SEQ ID NO: 1447161 - RNA, 19 nt, Artificial Sequence
  Description of Artificial Sequence: Synthetic oligonucleotide
ccuccguuguuaaucccug

SEQ ID NO: 1447162 - RNA, 19 nt, Artificial Sequence
  Description of Artificial Sequence: Synthetic oligonucleotide
ucacacgccccacgauaua

SEQ ID NO: 1447163 - RNA, 19 nt, Artificial Sequence
  Description of Artificial Sequence: Synthetic oligonucleotide
  modified_base (4)..(4): a, c, u, g, unknown or other
uccnguggggccggccaac

SEQ ID NO: 1447164 - RNA, 19 nt, Artificial Sequence
  Description of Artificial Sequence: Synthetic oligonucleotide
  modified_base (16)..(16): a, c, u, g, unknown or other
ccauggggcuuuuccngug

SEQ ID NO: 1447165 - RNA, 19 nt, Artificial Sequence
  Description of Artificial Sequence: Synthetic oligonucleotide
gcuuuggcuaaagcgugug

SEQ ID NO: 1447166 - RNA, 19 nt, Artificial Sequence
  Description of Artificial Sequence: Synthetic oligonucleotide
ccgugugauguugacacug

SEQ ID NO: 1447167 - RNA, 19 nt, Artificial Sequence
  Description of Artificial Sequence: Synthetic oligonucleotide
cccgucuuccuugaugagc

SEQ ID NO: 1447168 - RNA, 19 nt, Artificial Sequence
  Description of Artificial Sequence: Synthetic oligonucleotide
agcggguuccucaugcauu

SEQ ID NO: 1447169 - RNA, 19 nt, Artificial Sequence
  Description of Artificial Sequence: Synthetic oligonucleotide
agggucccgucuuccuuga

SEQ ID NO: 1447170 - RNA, 19 nt, Artificial Sequence
  Description of Artificial Sequence: Synthetic oligonucleotide
accagacaggcagccugag

SEQ ID NO: 1447171 - RNA, 19 nt, Artificial Sequence
  Description of Artificial Sequence: Synthetic oligonucleotide
uuucuacuugcaggcuuuu

SEQ ID NO: 1447172 - RNA, 19 nt, Artificial Sequence
  Description of Artificial Sequence: Synthetic oligonucleotide
  modified_base (4)..(4): a, c, u, g, unknown or other
cuunagggagccacauguu

SEQ ID NO: 1447173 - RNA, 19 nt, Artificial Sequence
  Description of Artificial Sequence: Synthetic oligonucleotide
gcagcggagguacuaaagu

SEQ ID NO: 1447174 - RNA, 19 nt, Artificial Sequence
  Description of Artificial Sequence: Synthetic oligonucleotide
gccucuuggucucuguaaa

SEQ ID NO: 1447175 - RNA, 19 nt, Artificial Sequence
  Description of Artificial Sequence: Synthetic oligonucleotide
ugcuaaacugaggccucuu

SEQ ID NO: 1447176 - RNA, 19 nt, Artificial Sequence
  Description of Artificial Sequence: Synthetic oligonucleotide
ggaguguuguaccgcugga

SEQ ID NO: 1447177 - RNA, 19 nt, Artificial Sequence
  Description of Artificial Sequence: Synthetic oligonucleotide
gcuagcuaggcaagguguc

SEQ ID NO: 1447178 - RNA, 19 nt, Artificial Sequence
  Description of Artificial Sequence: Synthetic oligonucleotide
ggugagggcacgagcgggc

SEQ ID NO: 1447179 - RNA, 19 nt, Artificial Sequence
  Description of Artificial Sequence: Synthetic oligonucleotide
cauggggcgcggcguucgg

SEQ ID NO: 1447180 - RNA, 19 nt, Artificial Sequence
  Description of Artificial Sequence: Synthetic oligonucleotide
  modified_base (2)..(2): a, c, u, g, unknown or other
cnguggggccggccaacag

SEQ ID NO: 1447181 - RNA, 19 nt, Artificial Sequence
  Description of Artificial Sequence: Synthetic oligonucleotide
gcaccaaggcuauugcaua

SEQ ID NO: 1447182 - RNA, 19 nt, Artificial Sequence
  Description of Artificial Sequence: Synthetic oligonucleotide
cacacgccccacgauauaa

SEQ ID NO: 1447183 - RNA, 19 nt, Artificial Sequence
  Description of Artificial Sequence: Synthetic oligonucleotide
ggcauugguuuaggcagug

SEQ ID NO: 1447184 - RNA, 19 nt, Artificial Sequence
  Description of Artificial Sequence: Synthetic oligonucleotide
ggggaguuuugcugccaug

SEQ ID NO: 1447185 - RNA, 19 nt, Artificial Sequence
  Description of Artificial Sequence: Synthetic oligonucleotide
gcacgagcgggcucugccc

SEQ ID NO: 1447186 - RNA, 19 nt, Artificial Sequence
  Description of Artificial Sequence: Synthetic oligonucleotide
ccgagugguuagcugguac

SEQ ID NO: 1447187 - RNA, 19 nt, Artificial Sequence
  Description of Artificial Sequence: Synthetic oligonucleotide
acgagcgggcucugcccug

SEQ ID NO: 1447188 - RNA, 19 nt, Artificial Sequence
  Description of Artificial Sequence: Synthetic oligonucleotide
gagggcacgagcgggcucu

SEQ ID NO: 1447189 - RNA, 19 nt, Artificial Sequence
  Description of Artificial Sequence: Synthetic oligonucleotide
cuaggcaaggugucugcau

SEQ ID NO: 1447190 - RNA, 19 nt, Artificial Sequence
  Description of Artificial Sequence: Synthetic oligonucleotide
  modified_base (9)..(9): a, c, u, g, unknown or other
gcuuuuccnguggggccgg

SEQ ID NO: 1447191 - RNA, 19 nt, Artificial Sequence
  Description of Artificial Sequence: Synthetic oligonucleotide
ccacgauauaaggccuugg

SEQ ID NO: 1447192 - RNA, 19 nt, Artificial Sequence
  Description of Artificial Sequence: Synthetic oligonucleotide
gucccugcugacagugcac

SEQ ID NO: 1447193 - RNA, 19 nt, Artificial Sequence
  Description of Artificial Sequence: Synthetic oligonucleotide
gcaggauaugggaaaggaa

SEQ ID NO: 1447194 - RNA, 19 nt, Artificial Sequence
  Description of Artificial Sequence: Synthetic oligonucleotide
gcccaccgaacuuggcaag

SEQ ID NO: 1447195 - RNA, 19 nt, Artificial Sequence
  Description of Artificial Sequence: Synthetic oligonucleotide
aucgccccugcccuccguu

SEQ ID NO: 1447196 - RNA, 19 nt, Artificial Sequence
  Description of Artificial Sequence: Synthetic oligonucleotide
ggcuagcuaggcaaggugu

SEQ ID NO: 1447197 - RNA, 19 nt, Artificial Sequence
  Description of Artificial Sequence: Synthetic oligonucleotide
agccugcuaagaagagcca

SEQ ID NO: 1447198 - RNA, 19 nt, Artificial Sequence
  Description of Artificial Sequence: Synthetic oligonucleotide
cggcguucggaaauggguc

SEQ ID NO: 1447199 - RNA, 19 nt, Artificial Sequence
  Description of Artificial Sequence: Synthetic oligonucleotide
cccuuaugacucauucaga

SEQ ID NO: 1447200 - RNA, 19 nt, Artificial Sequence
  Description of Artificial Sequence: Synthetic oligonucleotide
cacuggccgagugguuagc

SEQ ID NO: 1447201 - RNA, 19 nt, Artificial Sequence
  Description of Artificial Sequence: Synthetic oligonucleotide
gguuucgguagacccgugu

SEQ ID NO: 1447202 - RNA, 19 nt, Artificial Sequence
  Description of Artificial Sequence: Synthetic oligonucleotide
  modified_base (8)..(8): a, c, u, g, unknown or other
cuuuuccnguggggccggc

SEQ ID NO: 1447203 - RNA, 19 nt, Artificial Sequence
  Description of Artificial Sequence: Synthetic oligonucleotide
  modified_base (7)..(7): a, c, u, g, unknown or other
ggucuunagggagccacau

SEQ ID NO: 1447204 - RNA, 19 nt, Artificial Sequence
  Description of Artificial Sequence: Synthetic oligonucleotide
gggaagcggguuccucaug

SEQ ID NO: 1447205 - RNA, 19 nt, Artificial Sequence
  Description of Artificial Sequence: Synthetic oligonucleotide
guuguaccgcuggaucucu

SEQ ID NO: 1447206 - RNA, 19 nt, Artificial Sequence
  Description of Artificial Sequence: Synthetic oligonucleotide
ccaccgaacuuggcaagag

SEQ ID NO: 1447207 - RNA, 19 nt, Artificial Sequence
  Description of Artificial Sequence: Synthetic oligonucleotide
ggcgcuuaccacagacuca

SEQ ID NO: 1447208 - RNA, 19 nt, Artificial Sequence
  Description of Artificial Sequence: Synthetic oligonucleotide
cccacgauauaaggccuug

SEQ ID NO: 1447209 - RNA, 19 nt, Artificial Sequence
  Description of Artificial Sequence: Synthetic oligonucleotide
gcugguacacguagggacu

SEQ ID NO: 1447210 - RNA, 19 nt, Artificial Sequence
  Description of Artificial Sequence: Synthetic oligonucleotide
guggaagaguagagggcua

SEQ ID NO: 1447211 - RNA, 19 nt, Artificial Sequence
  Description of Artificial Sequence: Synthetic oligonucleotide
gcuaggcaaggugucugca

SEQ ID NO: 1447212 - RNA, 19 nt, Artificial Sequence
  Description of Artificial Sequence: Synthetic oligonucleotide
gcggagguacuaaagugcu

SEQ ID NO: 1447213 - RNA, 19 nt, Artificial Sequence
  Description of Artificial Sequence: Synthetic oligonucleotide
cccugcugacagugcacag

SEQ ID NO: 1447214 - RNA, 19 nt, Artificial Sequence
  Description of Artificial Sequence: Synthetic oligonucleotide
acuccccuuuuggucccca

SEQ ID NO: 1447215 - RNA, 19 nt, Artificial Sequence
  Description of Artificial Sequence: Synthetic oligonucleotide
  modified_base (8)..(8): a, c, u, g, unknown or other
gggucuunagggagccaca

SEQ ID NO: 1447216 - RNA, 19 nt, Artificial Sequence
  Description of Artificial Sequence: Synthetic oligonucleotide
ccuggaguguuguaccgcu

SEQ ID NO: 1447217 - RNA, 19 nt, Artificial Sequence
  Description of Artificial Sequence: Synthetic oligonucleotide
gccacauguugaaccggac

SEQ ID NO: 1447218 - RNA, 19 nt, Artificial Sequence
  Description of Artificial Sequence: Synthetic oligonucleotide
ccauggggcgcggcguucg

SEQ ID NO: 1447219 - RNA, 19 nt, Artificial Sequence
  Description of Artificial Sequence: Synthetic oligonucleotide
uugcugccauggggcgcgg

SEQ ID NO: 1447220 - RNA, 19 nt, Artificial Sequence
  Description of Artificial Sequence: Synthetic oligonucleotide
cacgagcgggcucugcccu

SEQ ID NO: 1447221 - RNA, 19 nt, Artificial Sequence
  Description of Artificial Sequence: Synthetic oligonucleotide
agguuucgguagacccgug

SEQ ID NO: 1447222 - RNA, 19 nt, Artificial Sequence
  Description of Artificial Sequence: Synthetic oligonucleotide
ggcgcggcguucggaaaug

SEQ ID NO: 1447223 - RNA, 19 nt, Artificial Sequence
  Description of Artificial Sequence: Synthetic oligonucleotide
gcgucucugagcagaggga

SEQ ID NO: 1447224 - RNA, 19 nt, Artificial Sequence
  Description of Artificial Sequence: Synthetic oligonucleotide
cccuccguuguuaaucccu

SEQ ID NO: 1447225 - RNA, 19 nt, Artificial Sequence
  Description of Artificial Sequence: Synthetic oligonucleotide
gcauugguuuaggcaguga

SEQ ID NO: 1447226 - RNA, 19 nt, Artificial Sequence
  Description of Artificial Sequence: Synthetic oligonucleotide
ggaaggcgcuuaccacaga

SEQ ID NO: 1447227 - RNA, 19 nt, Artificial Sequence
  Description of Artificial Sequence: Synthetic oligonucleotide
gugcuaaacugaggccucu

SEQ ID NO: 1447228 - RNA, 19 nt, Artificial Sequence
  Description of Artificial Sequence: Synthetic oligonucleotide
accggacaccagacaggca

SEQ ID NO: 1447229 - RNA, 19 nt, Artificial Sequence
  Description of Artificial Sequence: Synthetic oligonucleotide
gcgggcucugcccugacuu

SEQ ID NO: 1447230 - RNA, 19 nt, Artificial Sequence
  Description of Artificial Sequence: Synthetic oligonucleotide
ggacuggugcccaacugau

SEQ ID NO: 1447231 - RNA, 19 nt, Artificial Sequence
  Description of Artificial Sequence: Synthetic oligonucleotide
gcccacugaguucuuuuau

SEQ ID NO: 1447232 - RNA, 19 nt, Artificial Sequence
  Description of Artificial Sequence: Synthetic oligonucleotide
gggaauccucccggugaac

SEQ ID NO: 1447233 - RNA, 19 nt, Artificial Sequence
  Description of Artificial Sequence: Synthetic oligonucleotide
gcgcggcguucggaaaugg

SEQ ID NO: 1447234 - RNA, 19 nt, Artificial Sequence
  Description of Artificial Sequence: Synthetic oligonucleotide
ccaaggcuauugcauauuu

SEQ ID NO: 1447235 - RNA, 19 nt, Artificial Sequence
  Description of Artificial Sequence: Synthetic oligonucleotide
gugagggcacgagcgggcu

SEQ ID NO: 1447236 - RNA, 19 nt, Artificial Sequence
  Description of Artificial Sequence: Synthetic oligonucleotide
agggcacgagcgggcucug

SEQ ID NO: 1447237 - RNA, 19 nt, Artificial Sequence
  Description of Artificial Sequence: Synthetic oligonucleotide
cgguagacccgugugaugu

SEQ ID NO: 1447238 - RNA, 19 nt, Artificial Sequence
  Description of Artificial Sequence: Synthetic oligonucleotide
ccugagaaaccuggagugu

SEQ ID NO: 1447239 - RNA, 19 nt, Artificial Sequence
  Description of Artificial Sequence: Synthetic oligonucleotide
gggcauugguuuaggcagu

SEQ ID NO: 1447240 - RNA, 19 nt, Artificial Sequence
  Description of Artificial Sequence: Synthetic oligonucleotide
cccaccgaacuuggcaaga

SEQ ID NO: 1447241 - RNA, 19 nt, Artificial Sequence
  Description of Artificial Sequence: Synthetic oligonucleotide
cgcuuaccacagacucagc

SEQ ID NO: 1447242 - RNA, 19 nt, Artificial Sequence
  Description of Artificial Sequence: Synthetic oligonucleotide
ggccggccaacagccagga

SEQ ID NO: 1447243 - RNA, 19 nt, Artificial Sequence
  Description of Artificial Sequence: Synthetic oligonucleotide
gguagacccgugugauguu

SEQ ID NO: 1447244 - RNA, 19 nt, Artificial Sequence
  Description of Artificial Sequence: Synthetic oligonucleotide
gccccacgauauaaggccu

SEQ ID NO: 1447245 - RNA, 19 nt, Artificial Sequence
  Description of Artificial Sequence: Synthetic oligonucleotide
gggcgcggcguucggaaau

SEQ ID NO: 1447246 - RNA, 19 nt, Artificial Sequence
  Description of Artificial Sequence: Synthetic oligonucleotide
cuccccuuuugguccccau

SEQ ID NO: 1447247 - RNA, 19 nt, Artificial Sequence
  Description of Artificial Sequence: Synthetic oligonucleotide
ggggcgcggcguucggaaa

SEQ ID NO: 1447248 - RNA, 19 nt, Artificial Sequence
  Description of Artificial Sequence: Synthetic oligonucleotide
ggccgagugguuagcuggu

SEQ ID NO: 1447249 - RNA, 19 nt, Artificial Sequence
  Description of Artificial Sequence: Synthetic oligonucleotide
gggcacgagcgggcucugc

SEQ ID NO: 1447250 - RNA, 19 nt, Artificial Sequence
  Description of Artificial Sequence: Synthetic oligonucleotide
  modified_base (3)..(3): a, c, u, g, unknown or other
ccnguggggccggccaaca

SEQ ID NO: 1447251 - RNA, 19 nt, Artificial Sequence
  Description of Artificial Sequence: Synthetic oligonucleotide
gccauggggcgcggcguuc

SEQ ID NO: 1447252 - RNA, 19 nt, Artificial Sequence
  Description of Artificial Sequence: Synthetic oligonucleotide
ccggugaacagagccugcu

SEQ ID NO: 1447253 - RNA, 19 nt, Artificial Sequence
  Description of Artificial Sequence: Synthetic oligonucleotide
gccgagugguuagcuggua

SEQ ID NO: 1447254 - RNA, 19 nt, Artificial Sequence
  Description of Artificial Sequence: Synthetic oligonucleotide
cccgugugauguugacacu

SEQ ID NO: 1447255 - RNA, 19 nt, Artificial Sequence
  Description of Artificial Sequence: Synthetic oligonucleotide
caucgccccugcccuccgu

SEQ ID NO: 1447256 - RNA, 19 nt, Artificial Sequence
  Description of Artificial Sequence: Synthetic oligonucleotide
ccaucacacgccccacgau

SEQ ID NO: 1447257 - RNA, 19 nt, Artificial Sequence
  Description of Artificial Sequence: Synthetic oligonucleotide
ccccacgauauaaggccuu

SEQ ID NO: 1447258 - RNA, 19 nt, Artificial Sequence
  Description of Artificial Sequence: Synthetic oligonucleotide
ccugcccuccguuguuaau

SEQ ID NO: 1447259 - RNA, 19 nt, Artificial Sequence
  Description of Artificial Sequence: Synthetic oligonucleotide
gccccugcccuccguuguu

SEQ ID NO: 1447260 - RNA, 19 nt, Artificial Sequence
  Description of Artificial Sequence: Synthetic oligonucleotide
gggucccgucuuccuugau

SEQ ID NO: 1447261 - RNA, 19 nt, Artificial Sequence
  Description of Artificial Sequence: Synthetic oligonucleotide
cgccccugcccuccguugu

SEQ ID NO: 1447262 - RNA, 19 nt, Artificial Sequence
  Description of Artificial Sequence: Synthetic oligonucleotide
aauaaaagacauuaguggc

SEQ ID NO: 1447263 - RNA, 19 nt, Artificial Sequence
  Description of Artificial Sequence: Synthetic oligonucleotide
acugcaauuacuuaaauac

SEQ ID NO: 1447264 - RNA, 19 nt, Artificial Sequence
  Description of Artificial Sequence: Synthetic oligonucleotide
gauacaauuaucuaggugc

SEQ ID NO: 1447265 - RNA, 19 nt, Artificial Sequence
  Description of Artificial Sequence: Synthetic oligonucleotide
aacacaacgaauuuuguag

SEQ ID NO: 1447266 - RNA, 19 nt, Artificial Sequence
  Description of Artificial Sequence: Synthetic oligonucleotide
ugagauacaauuaucuagg

SEQ ID NO: 1447267 - RNA, 19 nt, Artificial Sequence
  Description of Artificial Sequence: Synthetic oligonucleotide
uauagaaccacugagaucu

SEQ ID NO: 1447268 - RNA, 19 nt, Artificial Sequence
  Description of Artificial Sequence: Synthetic oligonucleotide
uuuaauuugacaucuggag

SEQ ID NO: 1447269 - RNA, 19 nt, Artificial Sequence
  Description of Artificial Sequence: Synthetic oligonucleotide
aauguuuagacauucaaaa

SEQ ID NO: 1447270 - RNA, 19 nt, Artificial Sequence
  Description of Artificial Sequence: Synthetic oligonucleotide
aauagguaucuacagaauc

SEQ ID NO: 1447271 - RNA, 19 nt, Artificial Sequence
  Description of Artificial Sequence: Synthetic oligonucleotide
ucuauuaaaaccaagcgau

SEQ ID NO: 1447272 - RNA, 19 nt, Artificial Sequence
  Description of Artificial Sequence: Synthetic oligonucleotide
uauacuucaagugagauac

SEQ ID NO: 1447273 - RNA, 19 nt, Artificial Sequence
  Description of Artificial Sequence: Synthetic oligonucleotide
ugccauaucaauuauaucu

SEQ ID NO: 1447274 - RNA, 19 nt, Artificial Sequence
  Description of Artificial Sequence: Synthetic oligonucleotide
aaagauuggauaaaugagg

SEQ ID NO: 1447275 - RNA, 19 nt, Artificial Sequence
  Description of Artificial Sequence: Synthetic oligonucleotide
ucaccuacgaguaaugagg

SEQ ID NO: 1447276 - RNA, 19 nt, Artificial Sequence
  Description of Artificial Sequence: Synthetic oligonucleotide
uacaacuuggaucacaccc

SEQ ID NO: 1447277 - RNA, 19 nt, Artificial Sequence
  Description of Artificial Sequence: Synthetic oligonucleotide
uaucauugaaaagaaaagg

SEQ ID NO: 1447278 - RNA, 19 nt, Artificial Sequence
  Description of Artificial Sequence: Synthetic oligonucleotide
aaaguuuagcaucagauuu

SEQ ID NO: 1447279 - RNA, 19 nt, Artificial Sequence
  Description of Artificial Sequence: Synthetic oligonucleotide
auuaaaaccaagcgauggc

SEQ ID NO: 1447280 - RNA, 19 nt, Artificial Sequence
  Description of Artificial Sequence: Synthetic oligonucleotide
aagaacucuagccaguaag

SEQ ID NO: 1447281 - RNA, 19 nt, Artificial Sequence
  Description of Artificial Sequence: Synthetic oligonucleotide
uuaauuugacaucuggagc

SEQ ID NO: 1447282 - RNA, 19 nt, Artificial Sequence
  Description of Artificial Sequence: Synthetic oligonucleotide
augaauauccuaucacucc

SEQ ID NO: 1447283 - RNA, 19 nt, Artificial Sequence
  Description of Artificial Sequence: Synthetic oligonucleotide
uuuggaauguauaaaauuu

SEQ ID NO: 1447284 - RNA, 19 nt, Artificial Sequence
  Description of Artificial Sequence: Synthetic oligonucleotide
uuaaaucaaauguuuagac

SEQ ID NO: 1447285 - RNA, 19 nt, Artificial Sequence
  Description of Artificial Sequence: Synthetic oligonucleotide
uaauacaauuguaacacca

SEQ ID NO: 1447286 - RNA, 19 nt, Artificial Sequence
  Description of Artificial Sequence: Synthetic oligonucleotide
uuagcaggcgcauaggccg

SEQ ID NO: 1447287 - RNA, 19 nt, Artificial Sequence
  Description of Artificial Sequence: Synthetic oligonucleotide
aaagauuuuaaaccugccu

SEQ ID NO: 1447288 - RNA, 19 nt, Artificial Sequence
  Description of Artificial Sequence: Synthetic oligonucleotide
caaauuuauacuucaagug

SEQ ID NO: 1447289 - RNA, 19 nt, Artificial Sequence
  Description of Artificial Sequence: Synthetic oligonucleotide
ugauaaauucuccaccucc

SEQ ID NO: 1447290 - RNA, 19 nt, Artificial Sequence
  Description of Artificial Sequence: Synthetic oligonucleotide
uuucaaaagauccaaccac

SEQ ID NO: 1447291 - RNA, 19 nt, Artificial Sequence
  Description of Artificial Sequence: Synthetic oligonucleotide
uaauuugacaucuggagcu

SEQ ID NO: 1447292 - RNA, 19 nt, Artificial Sequence
  Description of Artificial Sequence: Synthetic oligonucleotide
aauuauaucucuugcuccu

SEQ ID NO: 1447293 - RNA, 19 nt, Artificial Sequence
  Description of Artificial Sequence: Synthetic oligonucleotide
aagauuuuaaaccugccuu

SEQ ID NO: 1447294 - RNA, 19 nt, Artificial Sequence
  Description of Artificial Sequence: Synthetic oligonucleotide
aaaagauccaaccaccaaa

SEQ ID NO: 1447295 - RNA, 19 nt, Artificial Sequence
  Description of Artificial Sequence: Synthetic oligonucleotide
aaugguuauaauccaugag

SEQ ID NO: 1447296 - RNA, 19 nt, Artificial Sequence
  Description of Artificial Sequence: Synthetic oligonucleotide
agcuuaauacaauuguaac

SEQ ID NO: 1447297 - RNA, 19 nt, Artificial Sequence
  Description of Artificial Sequence: Synthetic oligonucleotide
guaguaaauauccuuuagg

SEQ ID NO: 1447298 - RNA, 19 nt, Artificial Sequence
  Description of Artificial Sequence: Synthetic oligonucleotide
ucaauuauaucucuugcuc

SEQ ID NO: 1447299 - RNA, 19 nt, Artificial Sequence
  Description of Artificial Sequence: Synthetic oligonucleotide
uuaaggaaaguuuagcauc

SEQ ID NO: 1447300 - RNA, 19 nt, Artificial Sequence
  Description of Artificial Sequence: Synthetic oligonucleotide
uaucacuccaagcacuugg

SEQ ID NO: 1447301 - RNA, 19 nt, Artificial Sequence
  Description of Artificial Sequence: Synthetic oligonucleotide
uccuauauauuaaugauuu

SEQ ID NO: 1447302 - RNA, 19 nt, Artificial Sequence
  Description of Artificial Sequence: Synthetic oligonucleotide
gugagauacaauuaucuag

SEQ ID NO: 1447303 - RNA, 19 nt, Artificial Sequence
  Description of Artificial Sequence: Synthetic oligonucleotide
uuaguggccaaauuaagga

SEQ ID NO: 1447304 - RNA, 19 nt, Artificial Sequence
  Description of Artificial Sequence: Synthetic oligonucleotide
uucaaaagauccaaccacc

SEQ ID NO: 1447305 - RNA, 19 nt, Artificial Sequence
  Description of Artificial Sequence: Synthetic oligonucleotide
auaaaagacauuaguggcc

SEQ ID NO: 1447306 - RNA, 19 nt, Artificial Sequence
  Description of Artificial Sequence: Synthetic oligonucleotide
uuuauaaguguagacacca

SEQ ID NO: 1447307 - RNA, 19 nt, Artificial Sequence
  Description of Artificial Sequence: Synthetic oligonucleotide
uaaaucaaauguuuagaca

SEQ ID NO: 1447308 - RNA, 19 nt, Artificial Sequence
  Description of Artificial Sequence: Synthetic oligonucleotide
uauugacacaaucugaaaa

SEQ ID NO: 1447309 - RNA, 19 nt, Artificial Sequence
  Description of Artificial Sequence: Synthetic oligonucleotide
ucagaaauguaguagcugu

SEQ ID NO: 1447310 - RNA, 19 nt, Artificial Sequence
  Description of Artificial Sequence: Synthetic oligonucleotide
aaaguggcuuguuaucuuc

SEQ ID NO: 1447311 - RNA, 19 nt, Artificial Sequence
  Description of Artificial Sequence: Synthetic oligonucleotide
agauuuaguaucuuaauuu

SEQ ID NO: 1447312 - RNA, 19 nt, Artificial Sequence
  Description of Artificial Sequence: Synthetic oligonucleotide
aaaugguuauaauccauga

SEQ ID NO: 1447313 - RNA, 19 nt, Artificial Sequence
  Description of Artificial Sequence: Synthetic oligonucleotide
uauccaaaugguuauaauc

SEQ ID NO: 1447314 - RNA, 19 nt, Artificial Sequence
  Description of Artificial Sequence: Synthetic oligonucleotide
auuaucuaggugcuuuugg

SEQ ID NO: 1447315 - RNA, 19 nt, Artificial Sequence
  Description of Artificial Sequence: Synthetic oligonucleotide
gauaacugcaauuacuuaa

SEQ ID NO: 1447316 - RNA, 19 nt, Artificial Sequence
  Description of Artificial Sequence: Synthetic oligonucleotide
cuuugauaaauucuccacc

SEQ ID NO: 1447317 - RNA, 19 nt, Artificial Sequence
  Description of Artificial Sequence: Synthetic oligonucleotide
ugguuauaauccaugagac

SEQ ID NO: 1447318 - RNA, 19 nt, Artificial Sequence
  Description of Artificial Sequence: Synthetic oligonucleotide
ugaaccaaauauccaaaug

SEQ ID NO: 1447319 - RNA, 19 nt, Artificial Sequence
  Description of Artificial Sequence: Synthetic oligonucleotide
ugaauauccuaucacucca

SEQ ID NO: 1447320 - RNA, 19 nt, Artificial Sequence
  Description of Artificial Sequence: Synthetic oligonucleotide
aagaaaauugucagugaac

SEQ ID NO: 1447321 - RNA, 19 nt, Artificial Sequence
  Description of Artificial Sequence: Synthetic oligonucleotide
ucaagugagauacaauuau

SEQ ID NO: 1447322 - RNA, 19 nt, Artificial Sequence
  Description of Artificial Sequence: Synthetic oligonucleotide
ggcuauuacaaugagaggg

SEQ ID NO: 1447323 - RNA, 19 nt, Artificial Sequence
  Description of Artificial Sequence: Synthetic oligonucleotide
accacugagaucuuccgcg

SEQ ID NO: 1447324 - RNA, 19 nt, Artificial Sequence
  Description of Artificial Sequence: Synthetic oligonucleotide
uaaggaaaguuuagcauca

SEQ ID NO: 1447325 - RNA, 19 nt, Artificial Sequence
  Description of Artificial Sequence: Synthetic oligonucleotide
aauauugacacaaucugaa

SEQ ID NO: 1447326 - RNA, 19 nt, Artificial Sequence
  Description of Artificial Sequence: Synthetic oligonucleotide
aaugccauaucaauuauau

SEQ ID NO: 1447327 - RNA, 19 nt, Artificial Sequence
  Description of Artificial Sequence: Synthetic oligonucleotide
aauauccuaucacuccaag

SEQ ID NO: 1447328 - RNA, 19 nt, Artificial Sequence
  Description of Artificial Sequence: Synthetic oligonucleotide
gagggaguaaugaauaucc

SEQ ID NO: 1447329 - RNA, 19 nt, Artificial Sequence
  Description of Artificial Sequence: Synthetic oligonucleotide
ucuuugauaaauucuccac

SEQ ID NO: 1447330 - RNA, 19 nt, Artificial Sequence
  Description of Artificial Sequence: Synthetic oligonucleotide
aaccacugagaucuuccgc

SEQ ID NO: 1447331 - RNA, 19 nt, Artificial Sequence
  Description of Artificial Sequence: Synthetic oligonucleotide
accacuugucuauuaaaac

SEQ ID NO: 1447332 - RNA, 19 nt, Artificial Sequence
  Description of Artificial Sequence: Synthetic oligonucleotide
aucuaggugcuuuuggcac

SEQ ID NO: 1447333 - RNA, 19 nt, Artificial Sequence
  Description of Artificial Sequence: Synthetic oligonucleotide
ugugaauaagaauuauuuc

SEQ ID NO: 1447334 - RNA, 19 nt, Artificial Sequence
  Description of Artificial Sequence: Synthetic oligonucleotide
ucaacuuccaaaagccagc

SEQ ID NO: 1447335 - RNA, 19 nt, Artificial Sequence
  Description of Artificial Sequence: Synthetic oligonucleotide
uuaucuaggugcuuuuggc

SEQ ID NO: 1447336 - RNA, 19 nt, Artificial Sequence
  Description of Artificial Sequence: Synthetic oligonucleotide
uuuggcacaaguguucagg

SEQ ID NO: 1447337 - RNA, 19 nt, Artificial Sequence
  Description of Artificial Sequence: Synthetic oligonucleotide
auuuuaaugaaugccauau

SEQ ID NO: 1447338 - RNA, 19 nt, Artificial Sequence
  Description of Artificial Sequence: Synthetic oligonucleotide
uauuaaugauuuuaaugaa

SEQ ID NO: 1447339 - RNA, 19 nt, Artificial Sequence
  Description of Artificial Sequence: Synthetic oligonucleotide
ugaaguccccguuagcagg

SEQ ID NO: 1447340 - RNA, 19 nt, Artificial Sequence
  Description of Artificial Sequence: Synthetic oligonucleotide
ucuacagaaucuguggugc

SEQ ID NO: 1447341 - RNA, 19 nt, Artificial Sequence
  Description of Artificial Sequence: Synthetic oligonucleotide
aaaguaccggggcuauuac

SEQ ID NO: 1447342 - RNA, 19 nt, Artificial Sequence
  Description of Artificial Sequence: Synthetic oligonucleotide
aaaccugccuuucuauuug

SEQ ID NO: 1447343 - RNA, 19 nt, Artificial Sequence
  Description of Artificial Sequence: Synthetic oligonucleotide
ugcuauagaaccacugaga

SEQ ID NO: 1447344 - RNA, 19 nt, Artificial Sequence
  Description of Artificial Sequence: Synthetic oligonucleotide
auuaguggccaaauuaagg

SEQ ID NO: 1447345 - RNA, 19 nt, Artificial Sequence
  Description of Artificial Sequence: Synthetic oligonucleotide
aagauuggauaaaugagga

SEQ ID NO: 1447346 - RNA, 19 nt, Artificial Sequence
  Description of Artificial Sequence: Synthetic oligonucleotide
uaaaagacauuaguggcca

SEQ ID NO: 1447347 - RNA, 19 nt, Artificial Sequence
  Description of Artificial Sequence: Synthetic oligonucleotide
aucaauuauaucucuugcu

SEQ ID NO: 1447348 - RNA, 19 nt, Artificial Sequence
  Description of Artificial Sequence: Synthetic oligonucleotide
uucagcaagaauucccagc

SEQ ID NO: 1447349 - RNA, 19 nt, Artificial Sequence
  Description of Artificial Sequence: Synthetic oligonucleotide
ugucucagaaauguaguag

SEQ ID NO: 1447350 - RNA, 19 nt, Artificial Sequence
  Description of Artificial Sequence: Synthetic oligonucleotide
uauuuggaauguauaaaau

SEQ ID NO: 1447351 - RNA, 19 nt, Artificial Sequence
  Description of Artificial Sequence: Synthetic oligonucleotide
aaacacaacgaauuuugua

SEQ ID NO: 1447352 - RNA, 19 nt, Artificial Sequence
  Description of Artificial Sequence: Synthetic oligonucleotide
ggggcuauuacaaugagag

SEQ ID NO: 1447353 - RNA, 19 nt, Artificial Sequence
  Description of Artificial Sequence: Synthetic oligonucleotide
gucuauuaaaaccaagcga

SEQ ID NO: 1447354 - RNA, 19 nt, Artificial Sequence
  Description of Artificial Sequence: Synthetic oligonucleotide
uaucuacagaaucuguggu

SEQ ID NO: 1447355 - RNA, 19 nt, Artificial Sequence
  Description of Artificial Sequence: Synthetic oligonucleotide
augauuuuaaugaaugcca

SEQ ID NO: 1447356 - RNA, 19 nt, Artificial Sequence
  Description of Artificial Sequence: Synthetic oligonucleotide
augaaugccauaucaauua

SEQ ID NO: 1447357 - RNA, 19 nt, Artificial Sequence
  Description of Artificial Sequence: Synthetic oligonucleotide
ugauuuuaaugaaugccau

SEQ ID NO: 1447358 - RNA, 19 nt, Artificial Sequence
  Description of Artificial Sequence: Synthetic oligonucleotide
auuggauaaaugaggagag

SEQ ID NO: 1447359 - RNA, 19 nt, Artificial Sequence
  Description of Artificial Sequence: Synthetic oligonucleotide
uaauccaugagaccacccu

SEQ ID NO: 1447360 - RNA, 19 nt, Artificial Sequence
  Description of Artificial Sequence: Synthetic oligonucleotide
ccauauaaugauaucauug

SEQ ID NO: 1447361 - RNA, 19 nt, Artificial Sequence
  Description of Artificial Sequence: Synthetic oligonucleotide
agaaccacugagaucuucc

SEQ ID NO: 1447362 - RNA, 19 nt, Artificial Sequence
  Description of Artificial Sequence: Synthetic oligonucleotide
ucucuugcuccuuugguca

SEQ ID NO: 1447363 - RNA, 19 nt, Artificial Sequence
  Description of Artificial Sequence: Synthetic oligonucleotide
auuacaaugagagggagua

SEQ ID NO: 1447364 - RNA, 19 nt, Artificial Sequence
  Description of Artificial Sequence: Synthetic oligonucleotide
aauauccaaaugguuauaa

SEQ ID NO: 1447365 - RNA, 19 nt, Artificial Sequence
  Description of Artificial Sequence: Synthetic oligonucleotide
ugagagggaguaaugaaua

SEQ ID NO: 1447366 - RNA, 19 nt, Artificial Sequence
  Description of Artificial Sequence: Synthetic oligonucleotide
auaucacaacuauuauuuc

SEQ ID NO: 1447367 - RNA, 19 nt, Artificial Sequence
  Description of Artificial Sequence: Synthetic oligonucleotide
aacugcaauuacuuaaaua

SEQ ID NO: 1447368 - RNA, 19 nt, Artificial Sequence
  Description of Artificial Sequence: Synthetic oligonucleotide
uauaaguguagacaccauu

SEQ ID NO: 1447369 - RNA, 19 nt, Artificial Sequence
  Description of Artificial Sequence: Synthetic oligonucleotide
auuguaacaccaucuuuca

SEQ ID NO: 1447370 - RNA, 19 nt, Artificial Sequence
  Description of Artificial Sequence: Synthetic oligonucleotide
agaaauguaguagcuguag

SEQ ID NO: 1447371 - RNA, 19 nt, Artificial Sequence
  Description of Artificial Sequence: Synthetic oligonucleotide
auaucucuugcuccuuugg

SEQ ID NO: 1447372 - RNA, 19 nt, Artificial Sequence
  Description of Artificial Sequence: Synthetic oligonucleotide
uaucuaggugcuuuuggca

SEQ ID NO: 1447373 - RNA, 19 nt, Artificial Sequence
  Description of Artificial Sequence: Synthetic oligonucleotide
uauuuacugaugcuauaaa

SEQ ID NO: 1447374 - RNA, 19 nt, Artificial Sequence
  Description of Artificial Sequence: Synthetic oligonucleotide
cauaucacaacuauuauuu

SEQ ID NO: 1447375 - RNA, 19 nt, Artificial Sequence
  Description of Artificial Sequence: Synthetic oligonucleotide
aaaccaagcgauggcauug

SEQ ID NO: 1447376 - RNA, 19 nt, Artificial Sequence
  Description of Artificial Sequence: Synthetic oligonucleotide
aauucuucaccuacgagua

SEQ ID NO: 1447377 - RNA, 19 nt, Artificial Sequence
  Description of Artificial Sequence: Synthetic oligonucleotide
uguucaggugaauauugac

SEQ ID NO: 1447378 - RNA, 19 nt, Artificial Sequence
  Description of Artificial Sequence: Synthetic oligonucleotide
uaaguguagacaccauuuc

SEQ ID NO: 1447379 - RNA, 19 nt, Artificial Sequence
  Description of Artificial Sequence: Synthetic oligonucleotide
ucagauuuaguaucuuaau

SEQ ID NO: 1447380 - RNA, 19 nt, Artificial Sequence
  Description of Artificial Sequence: Synthetic oligonucleotide
uuuaggucaauguccaauu

SEQ ID NO: 1447381 - RNA, 19 nt, Artificial Sequence
  Description of Artificial Sequence: Synthetic oligonucleotide
aggauugucucucaccacu

SEQ ID NO: 1447382 - RNA, 19 nt, Artificial Sequence
  Description of Artificial Sequence: Synthetic oligonucleotide
caagguuuaauuugacauc

SEQ ID NO: 1447383 - RNA, 19 nt, Artificial Sequence
  Description of Artificial Sequence: Synthetic oligonucleotide
gacaacagccaguggaccc

SEQ ID NO: 1447384 - RNA, 19 nt, Artificial Sequence
  Description of Artificial Sequence: Synthetic oligonucleotide
agauuggauaaaugaggag

SEQ ID NO: 1447385 - RNA, 19 nt, Artificial Sequence
  Description of Artificial Sequence: Synthetic oligonucleotide
uagcaucagauuuaguauc

SEQ ID NO: 1447386 - RNA, 19 nt, Artificial Sequence
  Description of Artificial Sequence: Synthetic oligonucleotide
aucuacagaaucuguggug

SEQ ID NO: 1447387 - RNA, 19 nt, Artificial Sequence
  Description of Artificial Sequence: Synthetic oligonucleotide
auagguaucuacagaaucu

SEQ ID NO: 1447388 - RNA, 19 nt, Artificial Sequence
  Description of Artificial Sequence: Synthetic oligonucleotide
augagaccacccuaaacug

SEQ ID NO: 1447389 - RNA, 19 nt, Artificial Sequence
  Description of Artificial Sequence: Synthetic oligonucleotide
uuauacuucaagugagaua

SEQ ID NO: 1447390 - RNA, 19 nt, Artificial Sequence
  Description of Artificial Sequence: Synthetic oligonucleotide
agagggaguaaugaauauc

SEQ ID NO: 1447391 - RNA, 19 nt, Artificial Sequence
  Description of Artificial Sequence: Synthetic oligonucleotide
uagguaucuacagaaucug

SEQ ID NO: 1447392 - RNA, 19 nt, Artificial Sequence
  Description of Artificial Sequence: Synthetic oligonucleotide
uccuaucacuccaagcacu

SEQ ID NO: 1447393 - RNA, 19 nt, Artificial Sequence
  Description of Artificial Sequence: Synthetic oligonucleotide
aauccaugagaccacccua

SEQ ID NO: 1447394 - RNA, 19 nt, Artificial Sequence
  Description of Artificial Sequence: Synthetic oligonucleotide
aaaaguaccggggcuauua

SEQ ID NO: 1447395 - RNA, 19 nt, Artificial Sequence
  Description of Artificial Sequence: Synthetic oligonucleotide
acaauuguaacaccaucuu

SEQ ID NO: 1447396 - RNA, 19 nt, Artificial Sequence
  Description of Artificial Sequence: Synthetic oligonucleotide
acacaacgaauuuuguagu

SEQ ID NO: 1447397 - RNA, 19 nt, Artificial Sequence
  Description of Artificial Sequence: Synthetic oligonucleotide
aaaggugaaguccccguua

SEQ ID NO: 1447398 - RNA, 19 nt, Artificial Sequence
  Description of Artificial Sequence: Synthetic oligonucleotide
uacaaugagagggaguaau

SEQ ID NO: 1447399 - RNA, 19 nt, Artificial Sequence
  Description of Artificial Sequence: Synthetic oligonucleotide
aauuugacaucuggagcug

SEQ ID NO: 1447400 - RNA, 19 nt, Artificial Sequence
  Description of Artificial Sequence: Synthetic oligonucleotide
aggcuauucagaaauauau

SEQ ID NO: 1447401 - RNA, 19 nt, Artificial Sequence
  Description of Artificial Sequence: Synthetic oligonucleotide
gaauucccagcuuaauaca

SEQ ID NO: 1447402 - RNA, 19 nt, Artificial Sequence
  Description of Artificial Sequence: Synthetic oligonucleotide
ucccagcuuaauacaauug

SEQ ID NO: 1447403 - RNA, 19 nt, Artificial Sequence
  Description of Artificial Sequence: Synthetic oligonucleotide
caugagaccacccuaaacu

SEQ ID NO: 1447404 - RNA, 19 nt, Artificial Sequence
  Description of Artificial Sequence: Synthetic oligonucleotide
uuggauaaaugaggagagg

SEQ ID NO: 1447405 - RNA, 19 nt, Artificial Sequence
  Description of Artificial Sequence: Synthetic oligonucleotide
gacaccauuucaaaagauc

SEQ ID NO: 1447406 - RNA, 19 nt, Artificial Sequence
  Description of Artificial Sequence: Synthetic oligonucleotide
uaaaccugccuuucuauuu

SEQ ID NO: 1447407 - RNA, 19 nt, Artificial Sequence
  Description of Artificial Sequence: Synthetic oligonucleotide
gauuuaguaucuuaauuuu

SEQ ID NO: 1447408 - RNA, 19 nt, Artificial Sequence
  Description of Artificial Sequence: Synthetic oligonucleotide
aaacaguuuuauaagugua

SEQ ID NO: 1447409 - RNA, 19 nt, Artificial Sequence
  Description of Artificial Sequence: Synthetic oligonucleotide
cuacgaguaaugaggcagc

SEQ ID NO: 1447410 - RNA, 19 nt, Artificial Sequence
  Description of Artificial Sequence: Synthetic oligonucleotide
accaagguuuaauuugaca

SEQ ID NO: 1447411 - RNA, 19 nt, Artificial Sequence
  Description of Artificial Sequence: Synthetic oligonucleotide
uugauaaauucuccaccuc

SEQ ID NO: 1447412 - RNA, 19 nt, Artificial Sequence
  Description of Artificial Sequence: Synthetic oligonucleotide
ggaggaaauucuuuaaaga

SEQ ID NO: 1447413 - RNA, 19 nt, Artificial Sequence
  Description of Artificial Sequence: Synthetic oligonucleotide
caccaagaacucuagccag

SEQ ID NO: 1447414 - RNA, 19 nt, Artificial Sequence
  Description of Artificial Sequence: Synthetic oligonucleotide
aaagacauuaguggccaaa

SEQ ID NO: 1447415 - RNA, 19 nt, Artificial Sequence
  Description of Artificial Sequence: Synthetic oligonucleotide
uuaggucaauguccaauuc

SEQ ID NO: 1447416 - RNA, 19 nt, Artificial Sequence
  Description of Artificial Sequence: Synthetic oligonucleotide
aaauuucacuaguuuuguu

SEQ ID NO: 1447417 - RNA, 19 nt, Artificial Sequence
  Description of Artificial Sequence: Synthetic oligonucleotide
uccgccgaggagacaaagg

SEQ ID NO: 1447418 - RNA, 19 nt, Artificial Sequence
  Description of Artificial Sequence: Synthetic oligonucleotide
ugaaugccauaucaauuau

SEQ ID NO: 1447419 - RNA, 19 nt, Artificial Sequence
  Description of Artificial Sequence: Synthetic oligonucleotide
augccauaucaauuauauc

SEQ ID NO: 1447420 - RNA, 19 nt, Artificial Sequence
  Description of Artificial Sequence: Synthetic oligonucleotide
auaaguguagacaccauuu

SEQ ID NO: 1447421 - RNA, 19 nt, Artificial Sequence
  Description of Artificial Sequence: Synthetic oligonucleotide
aagacauuaguggccaaau

SEQ ID NO: 1447422 - RNA, 19 nt, Artificial Sequence
  Description of Artificial Sequence: Synthetic oligonucleotide
agucaggauugucucucac

SEQ ID NO: 1447423 - RNA, 19 nt, Artificial Sequence
  Description of Artificial Sequence: Synthetic oligonucleotide
caccuacgaguaaugaggc

SEQ ID NO: 1447424 - RNA, 19 nt, Artificial Sequence
  Description of Artificial Sequence: Synthetic oligonucleotide
uacuucaagugagauacaa

SEQ ID NO: 1447425 - RNA, 19 nt, Artificial Sequence
  Description of Artificial Sequence: Synthetic oligonucleotide
ggcauuggcaucaaaacac

SEQ ID NO: 1447426 - RNA, 19 nt, Artificial Sequence
  Description of Artificial Sequence: Synthetic oligonucleotide
acaauuaucuaggugcuuu

SEQ ID NO: 1447427 - RNA, 19 nt, Artificial Sequence
  Description of Artificial Sequence: Synthetic oligonucleotide
gguuauaauccaugagacc

SEQ ID NO: 1447428 - RNA, 19 nt, Artificial Sequence
  Description of Artificial Sequence: Synthetic oligonucleotide
aauucccagcuuaauacaa

SEQ ID NO: 1447429 - RNA, 19 nt, Artificial Sequence
  Description of Artificial Sequence: Synthetic oligonucleotide
aaguaccggggcuauuaca

SEQ ID NO: 1447430 - RNA, 19 nt, Artificial Sequence
  Description of Artificial Sequence: Synthetic oligonucleotide
aaccaagcgauggcauugg

SEQ ID NO: 1447431 - RNA, 19 nt, Artificial Sequence
  Description of Artificial Sequence: Synthetic oligonucleotide
aucacuccaagcacuuggc

SEQ ID NO: 1447432 - RNA, 19 nt, Artificial Sequence
  Description of Artificial Sequence: Synthetic oligonucleotide
auauccaaaugguuauaau

SEQ ID NO: 1447433 - RNA, 19 nt, Artificial Sequence
  Description of Artificial Sequence: Synthetic oligonucleotide
aggaaaguuuagcaucaga

SEQ ID NO: 1447434 - RNA, 19 nt, Artificial Sequence
  Description of Artificial Sequence: Synthetic oligonucleotide
aaauagguaucuacagaau

SEQ ID NO: 1447435 - RNA, 19 nt, Artificial Sequence
  Description of Artificial Sequence: Synthetic oligonucleotide
ucccagauaacugcaauua

SEQ ID NO: 1447436 - RNA, 19 nt, Artificial Sequence
  Description of Artificial Sequence: Synthetic oligonucleotide
cuucaagugagauacaauu

SEQ ID NO: 1447437 - RNA, 19 nt, Artificial Sequence
  Description of Artificial Sequence: Synthetic oligonucleotide
uuggaucacaccccaguau

SEQ ID NO: 1447438 - RNA, 19 nt, Artificial Sequence
  Description of Artificial Sequence: Synthetic oligonucleotide
acgaauuuuguaguaaaua

SEQ ID NO: 1447439 - RNA, 19 nt, Artificial Sequence
  Description of Artificial Sequence: Synthetic oligonucleotide
ugacaucuggagcugcuau

SEQ ID NO: 1447440 - RNA, 19 nt, Artificial Sequence
  Description of Artificial Sequence: Synthetic oligonucleotide
aacgaauuuuguaguaaau

SEQ ID NO: 1447441 - RNA, 19 nt, Artificial Sequence
  Description of Artificial Sequence: Synthetic oligonucleotide
caaacaguuuuauaagugu

SEQ ID NO: 1447442 - RNA, 19 nt, Artificial Sequence
  Description of Artificial Sequence: Synthetic oligonucleotide
ggcacaaguguucagguga

SEQ ID NO: 1447443 - RNA, 19 nt, Artificial Sequence
  Description of Artificial Sequence: Synthetic oligonucleotide
cugcaauuacuuaaauaca

SEQ ID NO: 1447444 - RNA, 19 nt, Artificial Sequence
  Description of Artificial Sequence: Synthetic oligonucleotide
gaaaguuuagcaucagauu

SEQ ID NO: 1447445 - RNA, 19 nt, Artificial Sequence
  Description of Artificial Sequence: Synthetic oligonucleotide
guuagcaggcgcauaggcc

SEQ ID NO: 1447446 - RNA, 19 nt, Artificial Sequence
  Description of Artificial Sequence: Synthetic oligonucleotide
cucagaaauguaguagcug

SEQ ID NO: 1447447 - RNA, 19 nt, Artificial Sequence
  Description of Artificial Sequence: Synthetic oligonucleotide
ucaccacuugucuauuaaa

SEQ ID NO: 1447448 - RNA, 19 nt, Artificial Sequence
  Description of Artificial Sequence: Synthetic oligonucleotide
gaguaaugaggcagcacug

SEQ ID NO: 1447449 - RNA, 19 nt, Artificial Sequence
  Description of Artificial Sequence: Synthetic oligonucleotide
agaacucuagccaguaaga

SEQ ID NO: 1447450 - RNA, 19 nt, Artificial Sequence
  Description of Artificial Sequence: Synthetic oligonucleotide
ccuacgaguaaugaggcag

SEQ ID NO: 1447451 - RNA, 19 nt, Artificial Sequence
  Description of Artificial Sequence: Synthetic oligonucleotide
agauaacugcaauuacuua

SEQ ID NO: 1447452 - RNA, 19 nt, Artificial Sequence
  Description of Artificial Sequence: Synthetic oligonucleotide
aucacaccccaguauacaa

SEQ ID NO: 1447453 - RNA, 19 nt, Artificial Sequence
  Description of Artificial Sequence: Synthetic oligonucleotide
uucccagcuuaauacaauu

SEQ ID NO: 1447454 - RNA, 19 nt, Artificial Sequence
  Description of Artificial Sequence: Synthetic oligonucleotide
aagucaggauugucucuca

SEQ ID NO: 1447455 - RNA, 19 nt, Artificial Sequence
  Description of Artificial Sequence: Synthetic oligonucleotide
aguaccggggcuauuacaa

SEQ ID NO: 1447456 - RNA, 19 nt, Artificial Sequence
  Description of Artificial Sequence: Synthetic oligonucleotide
acaacgaauuuuguaguaa

SEQ ID NO: 1447457 - RNA, 19 nt, Artificial Sequence
  Description of Artificial Sequence: Synthetic oligonucleotide
aggugcuuuuggcacaagu

SEQ ID NO: 1447458 - RNA, 19 nt, Artificial Sequence
  Description of Artificial Sequence: Synthetic oligonucleotide
gagaccacccuaaacuguc

SEQ ID NO: 1447459 - RNA, 19 nt, Artificial Sequence
  Description of Artificial Sequence: Synthetic oligonucleotide
aguggccaaauuaaggaaa

SEQ ID NO: 1447460 - RNA, 19 nt, Artificial Sequence
  Description of Artificial Sequence: Synthetic oligonucleotide
aguccccguuagcaggcgc

SEQ ID NO: 1447461 - RNA, 19 nt, Artificial Sequence
  Description of Artificial Sequence: Synthetic oligonucleotide
accccuucagcaagaauuc

SEQ ID NO: 1447462 - RNA, 19 nt, Artificial Sequence
  Description of Artificial Sequence: Synthetic oligonucleotide
agcaucagauuuaguaucu

SEQ ID NO: 1447463 - RNA, 19 nt, Artificial Sequence
  Description of Artificial Sequence: Synthetic oligonucleotide
acaaugagagggaguaaug

SEQ ID NO: 1447464 - RNA, 19 nt, Artificial Sequence
  Description of Artificial Sequence: Synthetic oligonucleotide
gcuuguuaucuucaggguc

SEQ ID NO: 1447465 - RNA, 19 nt, Artificial Sequence
  Description of Artificial Sequence: Synthetic oligonucleotide
caccacuugucuauuaaaa

SEQ ID NO: 1447466 - RNA, 19 nt, Artificial Sequence
  Description of Artificial Sequence: Synthetic oligonucleotide
caguggaccccaaaaguca

SEQ ID NO: 1447467 - RNA, 19 nt, Artificial Sequence
  Description of Artificial Sequence: Synthetic oligonucleotide
gaaguccccguuagcaggc

SEQ ID NO: 1447468 - RNA, 19 nt, Artificial Sequence
  Description of Artificial Sequence: Synthetic oligonucleotide
gaucacaccccaguauaca

SEQ ID NO: 1447469 - RNA, 19 nt, Artificial Sequence
  Description of Artificial Sequence: Synthetic oligonucleotide
cauacccucuuugucucag

SEQ ID NO: 1447470 - RNA, 19 nt, Artificial Sequence
  Description of Artificial Sequence: Synthetic oligonucleotide
auguacaacuuggaucaca

SEQ ID NO: 1447471 - RNA, 19 nt, Artificial Sequence
  Description of Artificial Sequence: Synthetic oligonucleotide
uccaugagaccacccuaaa

SEQ ID NO: 1447472 - RNA, 19 nt, Artificial Sequence
  Description of Artificial Sequence: Synthetic oligonucleotide
gaacucuagccaguaagaa

SEQ ID NO: 1447473 - RNA, 19 nt, Artificial Sequence
  Description of Artificial Sequence: Synthetic oligonucleotide
ucuagccaguaagaaaauu

SEQ ID NO: 1447474 - RNA, 19 nt, Artificial Sequence
  Description of Artificial Sequence: Synthetic oligonucleotide
agaccacccuaaacugucc

SEQ ID NO: 1447475 - RNA, 19 nt, Artificial Sequence
  Description of Artificial Sequence: Synthetic oligonucleotide
ggaguaaugaauauccuau

SEQ ID NO: 1447476 - RNA, 19 nt, Artificial Sequence
  Description of Artificial Sequence: Synthetic oligonucleotide
agacauuaguggccaaauu

SEQ ID NO: 1447477 - RNA, 19 nt, Artificial Sequence
  Description of Artificial Sequence: Synthetic oligonucleotide
gagauacaauuaucuaggu

SEQ ID NO: 1447478 - RNA, 19 nt, Artificial Sequence
  Description of Artificial Sequence: Synthetic oligonucleotide
gggcuauuacaaugagagg

SEQ ID NO: 1447479 - RNA, 19 nt, Artificial Sequence
  Description of Artificial Sequence: Synthetic oligonucleotide
gccauaucaauuauaucuc

SEQ ID NO: 1447480 - RNA, 19 nt, Artificial Sequence
  Description of Artificial Sequence: Synthetic oligonucleotide
ccaagguuuaauuugacau

SEQ ID NO: 1447481 - RNA, 19 nt, Artificial Sequence
  Description of Artificial Sequence: Synthetic oligonucleotide
ccaguggaccccaaaaguc

SEQ ID NO: 1447482 - RNA, 19 nt, Artificial Sequence
  Description of Artificial Sequence: Synthetic oligonucleotide
gcuauuacaaugagaggga

SEQ ID NO: 1447483 - RNA, 19 nt, Artificial Sequence
  Description of Artificial Sequence: Synthetic oligonucleotide
caaguguucaggugaauau

SEQ ID NO: 1447484 - RNA, 19 nt, Artificial Sequence
  Description of Artificial Sequence: Synthetic oligonucleotide
gggaguaaugaauauccua

SEQ ID NO: 1447485 - RNA, 19 nt, Artificial Sequence
  Description of Artificial Sequence: Synthetic oligonucleotide
caccaagguuuaauuugac

SEQ ID NO: 1447486 - RNA, 19 nt, Artificial Sequence
  Description of Artificial Sequence: Synthetic oligonucleotide
guaaugaggcagcacugua

SEQ ID NO: 1447487 - RNA, 19 nt, Artificial Sequence
  Description of Artificial Sequence: Synthetic oligonucleotide
ggcagcccaaaacacacca

SEQ ID NO: 1447488 - RNA, 19 nt, Artificial Sequence
  Description of Artificial Sequence: Synthetic oligonucleotide
gcuauagaaccacugagau

SEQ ID NO: 1447489 - RNA, 19 nt, Artificial Sequence
  Description of Artificial Sequence: Synthetic oligonucleotide
aacuuggaucacaccccag

SEQ ID NO: 1447490 - RNA, 19 nt, Artificial Sequence
  Description of Artificial Sequence: Synthetic oligonucleotide
ggucuugaauucuucaccu

SEQ ID NO: 1447491 - RNA, 19 nt, Artificial Sequence
  Description of Artificial Sequence: Synthetic oligonucleotide
gaauauccuaucacuccaa

SEQ ID NO: 1447492 - RNA, 19 nt, Artificial Sequence
  Description of Artificial Sequence: Synthetic oligonucleotide
accuacgaguaaugaggca

SEQ ID NO: 1447493 - RNA, 19 nt, Artificial Sequence
  Description of Artificial Sequence: Synthetic oligonucleotide
accaaaaguaccggggcua

SEQ ID NO: 1447494 - RNA, 19 nt, Artificial Sequence
  Description of Artificial Sequence: Synthetic oligonucleotide
cagauuuaguaucuuaauu

SEQ ID NO: 1447495 - RNA, 19 nt, Artificial Sequence
  Description of Artificial Sequence: Synthetic oligonucleotide
uuacaaugagagggaguaa

SEQ ID NO: 1447496 - RNA, 19 nt, Artificial Sequence
  Description of Artificial Sequence: Synthetic oligonucleotide
uuguuaucuucaggguccu

SEQ ID NO: 1447497 - RNA, 19 nt, Artificial Sequence
  Description of Artificial Sequence: Synthetic oligonucleotide
cccuaaacuguccauauaa

SEQ ID NO: 1447498 - RNA, 19 nt, Artificial Sequence
  Description of Artificial Sequence: Synthetic oligonucleotide
cucaccacuugucuauuaa

SEQ ID NO: 1447499 - RNA, 19 nt, Artificial Sequence
  Description of Artificial Sequence: Synthetic oligonucleotide
cacaacgaauuuuguagua

SEQ ID NO: 1447500 - RNA, 19 nt, Artificial Sequence
  Description of Artificial Sequence: Synthetic oligonucleotide
cauaucaauuauaucucuu

SEQ ID NO: 1447501 - RNA, 19 nt, Artificial Sequence
  Description of Artificial Sequence: Synthetic oligonucleotide
uagaaccacugagaucuuc

SEQ ID NO: 1447502 - RNA, 19 nt, Artificial Sequence
  Description of Artificial Sequence: Synthetic oligonucleotide
accggggcuauuacaauga

SEQ ID NO: 1447503 - RNA, 19 nt, Artificial Sequence
  Description of Artificial Sequence: Synthetic oligonucleotide
aaguccccguuagcaggcg

SEQ ID NO: 1447504 - RNA, 19 nt, Artificial Sequence
  Description of Artificial Sequence: Synthetic oligonucleotide
agguaucuacagaaucugu

SEQ ID NO: 1447505 - RNA, 19 nt, Artificial Sequence
  Description of Artificial Sequence: Synthetic oligonucleotide
uggccaaauuaaggaaagu

SEQ ID NO: 1447506 - RNA, 19 nt, Artificial Sequence
  Description of Artificial Sequence: Synthetic oligonucleotide
ucucaccacuugucuauua

SEQ ID NO: 1447507 - RNA, 19 nt, Artificial Sequence
  Description of Artificial Sequence: Synthetic oligonucleotide
cuuggaucacaccccagua

SEQ ID NO: 1447508 - RNA, 19 nt, Artificial Sequence
  Description of Artificial Sequence: Synthetic oligonucleotide
auccaugagaccacccuaa

SEQ ID NO: 1447509 - RNA, 19 nt, Artificial Sequence
  Description of Artificial Sequence: Synthetic oligonucleotide
cccguuagcaggcgcauag

SEQ ID NO: 1447510 - RNA, 19 nt, Artificial Sequence
  Description of Artificial Sequence: Synthetic oligonucleotide
agggaguaaugaauauccu

SEQ ID NO: 1447511 - RNA, 19 nt, Artificial Sequence
  Description of Artificial Sequence: Synthetic oligonucleotide
auuauaucucuugcuccuu

SEQ ID NO: 1447512 - RNA, 19 nt, Artificial Sequence
  Description of Artificial Sequence: Synthetic oligonucleotide
cacaccaaacaguuuuaua

SEQ ID NO: 1447513 - RNA, 19 nt, Artificial Sequence
  Description of Artificial Sequence: Synthetic oligonucleotide
cuuuaggucaauguccaau

SEQ ID NO: 1447514 - RNA, 19 nt, Artificial Sequence
  Description of Artificial Sequence: Synthetic oligonucleotide
cagaaauguaguagcugua

SEQ ID NO: 1447515 - RNA, 19 nt, Artificial Sequence
  Description of Artificial Sequence: Synthetic oligonucleotide
cuucaccuacgaguaauga

SEQ ID NO: 1447516 - RNA, 19 nt, Artificial Sequence
  Description of Artificial Sequence: Synthetic oligonucleotide
auacccucuuugucucaga

SEQ ID NO: 1447517 - RNA, 19 nt, Artificial Sequence
  Description of Artificial Sequence: Synthetic oligonucleotide
cuaucacuccaagcacuug

SEQ ID NO: 1447518 - RNA, 19 nt, Artificial Sequence
  Description of Artificial Sequence: Synthetic oligonucleotide
cacuuggccauaugcaacu

SEQ ID NO: 1447519 - RNA, 19 nt, Artificial Sequence
  Description of Artificial Sequence: Synthetic oligonucleotide
cgaauuuuguaguaaauau

SEQ ID NO: 1447520 - RNA, 19 nt, Artificial Sequence
  Description of Artificial Sequence: Synthetic oligonucleotide
cccagauaacugcaauuac

SEQ ID NO: 1447521 - RNA, 19 nt, Artificial Sequence
  Description of Artificial Sequence: Synthetic oligonucleotide
gucucucaccacuugucua

SEQ ID NO: 1447522 - RNA, 19 nt, Artificial Sequence
  Description of Artificial Sequence: Synthetic oligonucleotide
gcaggaggaaauucuuuaa

SEQ ID NO: 1447523 - RNA, 19 nt, Artificial Sequence
  Description of Artificial Sequence: Synthetic oligonucleotide
acccuaaacuguccauaua

SEQ ID NO: 1447524 - RNA, 19 nt, Artificial Sequence
  Description of Artificial Sequence: Synthetic oligonucleotide
ccaugagaccacccuaaac

SEQ ID NO: 1447525 - RNA, 19 nt, Artificial Sequence
  Description of Artificial Sequence: Synthetic oligonucleotide
caauuguaacaccaucuuu

SEQ ID NO: 1447526 - RNA, 19 nt, Artificial Sequence
  Description of Artificial Sequence: Synthetic oligonucleotide
aggugaauauugacacaau

SEQ ID NO: 1447527 - RNA, 19 nt, Artificial Sequence
  Description of Artificial Sequence: Synthetic oligonucleotide
guccgccgaggagacaaag

SEQ ID NO: 1447528 - RNA, 19 nt, Artificial Sequence
  Description of Artificial Sequence: Synthetic oligonucleotide
uccaagcacuuggccauau

SEQ ID NO: 1447529 - RNA, 19 nt, Artificial Sequence
  Description of Artificial Sequence: Synthetic oligonucleotide
cgaguaaugaggcagcacu

SEQ ID NO: 1447530 - RNA, 19 nt, Artificial Sequence
  Description of Artificial Sequence: Synthetic oligonucleotide
auacuucaagugagauaca

SEQ ID NO: 1447531 - RNA, 19 nt, Artificial Sequence
  Description of Artificial Sequence: Synthetic oligonucleotide
cccagcuuaauacaauugu

SEQ ID NO: 1447532 - RNA, 19 nt, Artificial Sequence
  Description of Artificial Sequence: Synthetic oligonucleotide
cugaugcuauaaauauuau

SEQ ID NO: 1447533 - RNA, 19 nt, Artificial Sequence
  Description of Artificial Sequence: Synthetic oligonucleotide
cugcaucccgccggccucg

SEQ ID NO: 1447534 - RNA, 19 nt, Artificial Sequence
  Description of Artificial Sequence: Synthetic oligonucleotide
ggcuuguuaucuucagggu

SEQ ID NO: 1447535 - RNA, 19 nt, Artificial Sequence
  Description of Artificial Sequence: Synthetic oligonucleotide
uccccguuagcaggcgcau

SEQ ID NO: 1447536 - RNA, 19 nt, Artificial Sequence
  Description of Artificial Sequence: Synthetic oligonucleotide
ccaaaugguuauaauccau

SEQ ID NO: 1447537 - RNA, 19 nt, Artificial Sequence
  Description of Artificial Sequence: Synthetic oligonucleotide
caagaauucccagcuuaau

SEQ ID NO: 1447538 - RNA, 19 nt, Artificial Sequence
  Description of Artificial Sequence: Synthetic oligonucleotide
cgaggagacaaaggugaag

SEQ ID NO: 1447539 - RNA, 19 nt, Artificial Sequence
  Description of Artificial Sequence: Synthetic oligonucleotide
cucuagccaguaagaaaau

SEQ ID NO: 1447540 - RNA, 19 nt, Artificial Sequence
  Description of Artificial Sequence: Synthetic oligonucleotide
ccggggcuauuacaaugag

SEQ ID NO: 1447541 - RNA, 19 nt, Artificial Sequence
  Description of Artificial Sequence: Synthetic oligonucleotide
ccuaaacuguccauauaau

SEQ ID NO: 1447542 - RNA, 19 nt, Artificial Sequence
  Description of Artificial Sequence: Synthetic oligonucleotide
guaccggggcuauuacaau

SEQ ID NO: 1447543 - RNA, 19 nt, Artificial Sequence
  Description of Artificial Sequence: Synthetic oligonucleotide
ccguuagcaggcgcauagg

SEQ ID NO: 1447544 - RNA, 19 nt, Artificial Sequence
  Description of Artificial Sequence: Synthetic oligonucleotide
gcacaaguguucaggugaa

SEQ ID NO: 1447545 - RNA, 19 nt, Artificial Sequence
  Description of Artificial Sequence: Synthetic oligonucleotide
ccccuucagcaagaauucc

SEQ ID NO: 1447546 - RNA, 19 nt, Artificial Sequence
  Description of Artificial Sequence: Synthetic oligonucleotide
auagaaccacugagaucuu

SEQ ID NO: 1447547 - RNA, 19 nt, Artificial Sequence
  Description of Artificial Sequence: Synthetic oligonucleotide
gcguccgccgaggagacaa

SEQ ID NO: 1447548 - RNA, 19 nt, Artificial Sequence
  Description of Artificial Sequence: Synthetic oligonucleotide
ggugcaggaggaaauucuu

SEQ ID NO: 1447549 - RNA, 19 nt, Artificial Sequence
  Description of Artificial Sequence: Synthetic oligonucleotide
ccgccgaggagacaaaggu

SEQ ID NO: 1447550 - RNA, 19 nt, Artificial Sequence
  Description of Artificial Sequence: Synthetic oligonucleotide
ccuauauauuaaugauuuu

SEQ ID NO: 1447551 - RNA, 19 nt, Artificial Sequence
  Description of Artificial Sequence: Synthetic oligonucleotide
cggggcuauuacaaugaga

SEQ ID NO: 1447552 - RNA, 19 nt, Artificial Sequence
  Description of Artificial Sequence: Synthetic oligonucleotide
ccuaucacuccaagcacuu

SEQ ID NO: 1447553 - RNA, 19 nt, Artificial Sequence
  Description of Artificial Sequence: Synthetic oligonucleotide
gcagcccaaaacacaccaa

SEQ ID NO: 1447554 - RNA, 19 nt, Artificial Sequence
  Description of Artificial Sequence: Synthetic oligonucleotide
ccgaggagacaaaggugaa

SEQ ID NO: 1447555 - RNA, 19 nt, Artificial Sequence
  Description of Artificial Sequence: Synthetic oligonucleotide
ccauacccucuuugucuca

SEQ ID NO: 1447556 - RNA, 19 nt, Artificial Sequence
  Description of Artificial Sequence: Synthetic oligonucleotide
caaccccuucagcaagaau

SEQ ID NO: 1447557 - RNA, 19 nt, Artificial Sequence
  Description of Artificial Sequence: Synthetic oligonucleotide
cccaguauacaaggacaaa

SEQ ID NO: 1447558 - RNA, 19 nt, Artificial Sequence
  Description of Artificial Sequence: Synthetic oligonucleotide
ccgcguccgccgaggagac

SEQ ID NO: 1447559 - RNA, 19 nt, Artificial Sequence
  Description of Artificial Sequence: Synthetic oligonucleotide
gcacuguaggcagcccaaa

SEQ ID NO: 1447560 - RNA, 19 nt, Artificial Sequence
  Description of Artificial Sequence: Synthetic oligonucleotide
caaaaguaccggggcuauu

SEQ ID NO: 1447561 - RNA, 19 nt, Artificial Sequence
  Description of Artificial Sequence: Synthetic oligonucleotide
ccaaaaguaccggggcuau

SEQ ID NO: 1447562 - RNA, 19 nt, Artificial Sequence
  Description of Artificial Sequence: Synthetic oligonucleotide
ggcgggcccggaggcugca

SEQ ID NO: 1447563 - RNA, 19 nt, Artificial Sequence
  Description of Artificial Sequence: Synthetic oligonucleotide
cguccgccgaggagacaaa

SEQ ID NO: 1447564 - RNA, 19 nt, Artificial Sequence
  Description of Artificial Sequence: Synthetic oligonucleotide
ccccguuagcaggcgcaua

SEQ ID NO: 1447565 - RNA, 19 nt, Artificial Sequence
  Description of Artificial Sequence: Synthetic oligonucleotide
cgcguccgccgaggagaca

SEQ ID NO: 1447566 - RNA, 19 nt, Artificial Sequence
  Description of Artificial Sequence: Synthetic oligonucleotide
uuuaggauaacuucguaag

SEQ ID NO: 1447567 - RNA, 19 nt, Artificial Sequence
  Description of Artificial Sequence: Synthetic oligonucleotide
aaagauuaaaggcugagaa

SEQ ID NO: 1447568 - RNA, 19 nt, Artificial Sequence
  Description of Artificial Sequence: Synthetic oligonucleotide
gaggacaauacccagaucc

SEQ ID NO: 1447569 - RNA, 19 nt, Artificial Sequence
  Description of Artificial Sequence: Synthetic oligonucleotide
agauggauacauuuggggc

SEQ ID NO: 1447570 - RNA, 19 nt, Artificial Sequence
  Description of Artificial Sequence: Synthetic oligonucleotide
aagauuuaggauaacuucg

SEQ ID NO: 1447571 - RNA, 19 nt, Artificial Sequence
  Description of Artificial Sequence: Synthetic oligonucleotide
aaaccuuagauucccacag

SEQ ID NO: 1447572 - RNA, 19 nt, Artificial Sequence
  Description of Artificial Sequence: Synthetic oligonucleotide
aaccucuggauucuuauuc

SEQ ID NO: 1447573 - RNA, 19 nt, Artificial Sequence
  Description of Artificial Sequence: Synthetic oligonucleotide
uccccauguagccagaugg

SEQ ID NO: 1447574 - RNA, 19 nt, Artificial Sequence
  Description of Artificial Sequence: Synthetic oligonucleotide
uaagauuuaggauaacuuc

SEQ ID NO: 1447575 - RNA, 19 nt, Artificial Sequence
  Description of Artificial Sequence: Synthetic oligonucleotide
auggcuaaagcgaaaagcc

SEQ ID NO: 1447576 - RNA, 19 nt, Artificial Sequence
  Description of Artificial Sequence: Synthetic oligonucleotide
cuuuaagggacccaggccc

SEQ ID NO: 1447577 - RNA, 19 nt, Artificial Sequence
  Description of Artificial Sequence: Synthetic oligonucleotide
uuagacaacagcgaugaag

SEQ ID NO: 1447578 - RNA, 19 nt, Artificial Sequence
  Description of Artificial Sequence: Synthetic oligonucleotide
uacauuuggggccaggcag

SEQ ID NO: 1447579 - RNA, 19 nt, Artificial Sequence
  Description of Artificial Sequence: Synthetic oligonucleotide
ucugggaucuaagagaucc

SEQ ID NO: 1447580 - RNA, 19 nt, Artificial Sequence
  Description of Artificial Sequence: Synthetic oligonucleotide
uaaaugagaucucaguggu

SEQ ID NO: 1447581 - RNA, 19 nt, Artificial Sequence
  Description of Artificial Sequence: Synthetic oligonucleotide
aaggguaggaguguacugc

SEQ ID NO: 1447582 - RNA, 19 nt, Artificial Sequence
  Description of Artificial Sequence: Synthetic oligonucleotide
ugcaauauugcuuggaauc

SEQ ID NO: 1447583 - RNA, 19 nt, Artificial Sequence
  Description of Artificial Sequence: Synthetic oligonucleotide
aggacuaagauuuaggaua

SEQ ID NO: 1447584 - RNA, 19 nt, Artificial Sequence
  Description of Artificial Sequence: Synthetic oligonucleotide
aaaaccuuagauucccaca

SEQ ID NO: 1447585 - RNA, 19 nt, Artificial Sequence
  Description of Artificial Sequence: Synthetic oligonucleotide
caauuuaaaugcuugggac

SEQ ID NO: 1447586 - RNA, 19 nt, Artificial Sequence
  Description of Artificial Sequence: Synthetic oligonucleotide
auacccagaucccagcacc

SEQ ID NO: 1447587 - RNA, 19 nt, Artificial Sequence
  Description of Artificial Sequence: Synthetic oligonucleotide
ucuaucaggcaggagaggg

SEQ ID NO: 1447588 - RNA, 19 nt, Artificial Sequence
  Description of Artificial Sequence: Synthetic oligonucleotide
uaaguggaagaacuguaag

SEQ ID NO: 1447589 - RNA, 19 nt, Artificial Sequence
  Description of Artificial Sequence: Synthetic oligonucleotide
aauaugcagagcuggggug

SEQ ID NO: 1447590 - RNA, 19 nt, Artificial Sequence
  Description of Artificial Sequence: Synthetic oligonucleotide
ucucuaucaggcaggagag

SEQ ID NO: 1447591 - RNA, 19 nt, Artificial Sequence
  Description of Artificial Sequence: Synthetic oligonucleotide
uaauaugcagagcuggggu

SEQ ID NO: 1447592 - RNA, 19 nt, Artificial Sequence
  Description of Artificial Sequence: Synthetic oligonucleotide
uuaauaugcagagcugggg

SEQ ID NO: 1447593 - RNA, 19 nt, Artificial Sequence
  Description of Artificial Sequence: Synthetic oligonucleotide
gaaacuuguaggcucuaag

SEQ ID NO: 1447594 - RNA, 19 nt, Artificial Sequence
  Description of Artificial Sequence: Synthetic oligonucleotide
cacagagcaaacuguaggg

SEQ ID NO: 1447595 - RNA, 19 nt, Artificial Sequence
  Description of Artificial Sequence: Synthetic oligonucleotide
ucucuauccacccuccucu

SEQ ID NO: 1447596 - RNA, 19 nt, Artificial Sequence
  Description of Artificial Sequence: Synthetic oligonucleotide
cagauggauacauuugggg

SEQ ID NO: 1447597 - RNA, 19 nt, Artificial Sequence
  Description of Artificial Sequence: Synthetic oligonucleotide
uaggauaacuucguaagug

SEQ ID NO: 1447598 - RNA, 19 nt, Artificial Sequence
  Description of Artificial Sequence: Synthetic oligonucleotide
uaaccguugucucaguaac

SEQ ID NO: 1447599 - RNA, 19 nt, Artificial Sequence
  Description of Artificial Sequence: Synthetic oligonucleotide
uaaccguugucucagugac

SEQ ID NO: 1447600 - RNA, 19 nt, Artificial Sequence
  Description of Artificial Sequence: Synthetic oligonucleotide
ugguugaaaacccaauuua

SEQ ID NO: 1447601 - RNA, 19 nt, Artificial Sequence
  Description of Artificial Sequence: Synthetic oligonucleotide
agugucacuuguccauucc

SEQ ID NO: 1447602 - RNA, 19 nt, Artificial Sequence
  Description of Artificial Sequence: Synthetic oligonucleotide
gaucuaagagauccgguac

SEQ ID NO: 1447603 - RNA, 19 nt, Artificial Sequence
  Description of Artificial Sequence: Synthetic oligonucleotide
agaguagcggccaggaacc

SEQ ID NO: 1447604 - RNA, 19 nt, Artificial Sequence
  Description of Artificial Sequence: Synthetic oligonucleotide
uccgguacucgauucagag

SEQ ID NO: 1447605 - RNA, 19 nt, Artificial Sequence
  Description of Artificial Sequence: Synthetic oligonucleotide
agcgaugaagcucaaagau

SEQ ID NO: 1447606 - RNA, 19 nt, Artificial Sequence
  Description of Artificial Sequence: Synthetic oligonucleotide
ucaaagauuaaaggcugag

SEQ ID NO: 1447607 - RNA, 19 nt, Artificial Sequence
  Description of Artificial Sequence: Synthetic oligonucleotide
uacucgauucagaguagcg

SEQ ID NO: 1447608 - RNA, 19 nt, Artificial Sequence
  Description of Artificial Sequence: Synthetic oligonucleotide
gauaacuggaucccaggac

SEQ ID NO: 1447609 - RNA, 19 nt, Artificial Sequence
  Description of Artificial Sequence: Synthetic oligonucleotide
uaagagauccgguacucga

SEQ ID NO: 1447610 - RNA, 19 nt, Artificial Sequence
  Description of Artificial Sequence: Synthetic oligonucleotide
guugaauccccauguagcc

SEQ ID NO: 1447611 - RNA, 19 nt, Artificial Sequence
  Description of Artificial Sequence: Synthetic oligonucleotide
uuuucugcgcuucugggau

SEQ ID NO: 1447612 - RNA, 19 nt, Artificial Sequence
  Description of Artificial Sequence: Synthetic oligonucleotide
uuaggauaacuucguaagu

SEQ ID NO: 1447613 - RNA, 19 nt, Artificial Sequence
  Description of Artificial Sequence: Synthetic oligonucleotide
aaccuuagauucccacagg

SEQ ID NO: 1447614 - RNA, 19 nt, Artificial Sequence
  Description of Artificial Sequence: Synthetic oligonucleotide
caaacuguagggaaggaga

SEQ ID NO: 1447615 - RNA, 19 nt, Artificial Sequence
  Description of Artificial Sequence: Synthetic oligonucleotide
auuaauaugcagagcuggg

SEQ ID NO: 1447616 - RNA, 19 nt, Artificial Sequence
  Description of Artificial Sequence: Synthetic oligonucleotide
accguugucucagugacgg

SEQ ID NO: 1447617 - RNA, 19 nt, Artificial Sequence
  Description of Artificial Sequence: Synthetic oligonucleotide
uaggcucuaagucauuggu

SEQ ID NO: 1447618 - RNA, 19 nt, Artificial Sequence
  Description of Artificial Sequence: Synthetic oligonucleotide
aacccaauuuaaaugcuug

SEQ ID NO: 1447619 - RNA, 19 nt, Artificial Sequence
  Description of Artificial Sequence: Synthetic oligonucleotide
aaacuguagggaaggagag

SEQ ID NO: 1447620 - RNA, 19 nt, Artificial Sequence
  Description of Artificial Sequence: Synthetic oligonucleotide
cuaugguguccccaaaacc

SEQ ID NO: 1447621 - RNA, 19 nt, Artificial Sequence
  Description of Artificial Sequence: Synthetic oligonucleotide
acucgauucagaguagcgg

SEQ ID NO: 1447622 - RNA, 19 nt, Artificial Sequence
  Description of Artificial Sequence: Synthetic oligonucleotide
uugcuuggaaucugacugg

SEQ ID NO: 1447623 - RNA, 19 nt, Artificial Sequence
  Description of Artificial Sequence: Synthetic oligonucleotide
cagaguagcggccaggaac

SEQ ID NO: 1447624 - RNA, 19 nt, Artificial Sequence
  Description of Artificial Sequence: Synthetic oligonucleotide
uuuaagggacccaggcccc

SEQ ID NO: 1447625 - RNA, 19 nt, Artificial Sequence
  Description of Artificial Sequence: Synthetic oligonucleotide
uuuccgaaguuuaaugguu

SEQ ID NO: 1447626 - RNA, 19 nt, Artificial Sequence
  Description of Artificial Sequence: Synthetic oligonucleotide
ggugagagggauuuagugc

SEQ ID NO: 1447627 - RNA, 19 nt, Artificial Sequence
  Description of Artificial Sequence: Synthetic oligonucleotide
uagauucccacaggcaagg

SEQ ID NO: 1447628 - RNA, 19 nt, Artificial Sequence
  Description of Artificial Sequence: Synthetic oligonucleotide
aucucuauccacccuccuc

SEQ ID NO: 1447629 - RNA, 19 nt, Artificial Sequence
  Description of Artificial Sequence: Synthetic oligonucleotide
acaacagcgaugaagcuca

SEQ ID NO: 1447630 - RNA, 19 nt, Artificial Sequence
  Description of Artificial Sequence: Synthetic oligonucleotide
auggguugaauccccaugu

SEQ ID NO: 1447631 - RNA, 19 nt, Artificial Sequence
  Description of Artificial Sequence: Synthetic oligonucleotide
uguacugugcacagcuaga

SEQ ID NO: 1447632 - RNA, 19 nt, Artificial Sequence
  Description of Artificial Sequence: Synthetic oligonucleotide
ugucacuuguccauuccac

SEQ ID NO: 1447633 - RNA, 19 nt, Artificial Sequence
  Description of Artificial Sequence: Synthetic oligonucleotide
gugacggucucacucagcc

SEQ ID NO: 1447634 - RNA, 19 nt, Artificial Sequence
  Description of Artificial Sequence: Synthetic oligonucleotide
gauucuuauucuucccuuc

SEQ ID NO: 1447635 - RNA, 19 nt, Artificial Sequence
  Description of Artificial Sequence: Synthetic oligonucleotide
cuuagauucccacaggcaa

SEQ ID NO: 1447636 - RNA, 19 nt, Artificial Sequence
  Description of Artificial Sequence: Synthetic oligonucleotide
uuuugaacccuaugguguc

SEQ ID NO: 1447637 - RNA, 19 nt, Artificial Sequence
  Description of Artificial Sequence: Synthetic oligonucleotide
acuucguaaguggaagaac

SEQ ID NO: 1447638 - RNA, 19 nt, Artificial Sequence
  Description of Artificial Sequence: Synthetic oligonucleotide
cugggaugguugaaaaccc

SEQ ID NO: 1447639 - RNA, 19 nt, Artificial Sequence
  Description of Artificial Sequence: Synthetic oligonucleotide
aacuguagggaaggagagg

SEQ ID NO: 1447640 - RNA, 19 nt, Artificial Sequence
  Description of Artificial Sequence: Synthetic oligonucleotide
aucuaagagauccgguacu

SEQ ID NO: 1447641 - RNA, 19 nt, Artificial Sequence
  Description of Artificial Sequence: Synthetic oligonucleotide
caagaugccugaaucccag

SEQ ID NO: 1447642 - RNA, 19 nt, Artificial Sequence
  Description of Artificial Sequence: Synthetic oligonucleotide
guaagccaggauuaauaug

SEQ ID NO: 1447643 - RNA, 19 nt, Artificial Sequence
  Description of Artificial Sequence: Synthetic oligonucleotide
ucgauucagaguagcggcc

SEQ ID NO: 1447644 - RNA, 19 nt, Artificial Sequence
  Description of Artificial Sequence: Synthetic oligonucleotide
cucagugacggucucacuc

SEQ ID NO: 1447645 - RNA, 19 nt, Artificial Sequence
  Description of Artificial Sequence: Synthetic oligonucleotide
uguaggcucuaagucauug

SEQ ID NO: 1447646 - RNA, 19 nt, Artificial Sequence
  Description of Artificial Sequence: Synthetic oligonucleotide
uguggcaauaaaugagauc

SEQ ID NO: 1447647 - RNA, 19 nt, Artificial Sequence
  Description of Artificial Sequence: Synthetic oligonucleotide
aagaugccugaaucccagg

SEQ ID NO: 1447648 - RNA, 19 nt, Artificial Sequence
  Description of Artificial Sequence: Synthetic oligonucleotide
ugaaugacgccguccuuug

SEQ ID NO: 1447649 - RNA, 19 nt, Artificial Sequence
  Description of Artificial Sequence: Synthetic oligonucleotide
aaccguugucucaguaacc

SEQ ID NO: 1447650 - RNA, 19 nt, Artificial Sequence
  Description of Artificial Sequence: Synthetic oligonucleotide
gaucccagcaccaguuggg

SEQ ID NO: 1447651 - RNA, 19 nt, Artificial Sequence
  Description of Artificial Sequence: Synthetic oligonucleotide
ugcgcuucugggaucuaag

SEQ ID NO: 1447652 - RNA, 19 nt, Artificial Sequence
  Description of Artificial Sequence: Synthetic oligonucleotide
ucaagcuaagggugcaggu

SEQ ID NO: 1447653 - RNA, 19 nt, Artificial Sequence
  Description of Artificial Sequence: Synthetic oligonucleotide
aacuucguaaguggaagaa

SEQ ID NO: 1447654 - RNA, 19 nt, Artificial Sequence
  Description of Artificial Sequence: Synthetic oligonucleotide
gacaacagcgaugaagcuc

SEQ ID NO: 1447655 - RNA, 19 nt, Artificial Sequence
  Description of Artificial Sequence: Synthetic oligonucleotide
ucguaaguggaagaacugu

SEQ ID NO: 1447656 - RNA, 19 nt, Artificial Sequence
  Description of Artificial Sequence: Synthetic oligonucleotide
ugagcggcgccccaugugu

SEQ ID NO: 1447657 - RNA, 19 nt, Artificial Sequence
  Description of Artificial Sequence: Synthetic oligonucleotide
cuggcuuccguuuccgaag

SEQ ID NO: 1447658 - RNA, 19 nt, Artificial Sequence
  Description of Artificial Sequence: Synthetic oligonucleotide
agagcaaacuguagggaag

SEQ ID NO: 1447659 - RNA, 19 nt, Artificial Sequence
  Description of Artificial Sequence: Synthetic oligonucleotide
auacauuuggggccaggca

SEQ ID NO: 1447660 - RNA, 19 nt, Artificial Sequence
  Description of Artificial Sequence: Synthetic oligonucleotide
cauggguugaauccccaug

SEQ ID NO: 1447661 - RNA, 19 nt, Artificial Sequence
  Description of Artificial Sequence: Synthetic oligonucleotide
ucagaccauggguugaauc

SEQ ID NO: 1447662 - RNA, 19 nt, Artificial Sequence
  Description of Artificial Sequence: Synthetic oligonucleotide
cuauauucaggucaugacu

SEQ ID NO: 1447663 - RNA, 19 nt, Artificial Sequence
  Description of Artificial Sequence: Synthetic oligonucleotide
gaaguuuaaugguuaggcu

SEQ ID NO: 1447664 - RNA, 19 nt, Artificial Sequence
  Description of Artificial Sequence: Synthetic oligonucleotide
uaaaugcuugggacucaag

SEQ ID NO: 1447665 - RNA, 19 nt, Artificial Sequence
  Description of Artificial Sequence: Synthetic oligonucleotide
gauucagaguagcggccag

SEQ ID NO: 1447666 - RNA, 19 nt, Artificial Sequence
  Description of Artificial Sequence: Synthetic oligonucleotide
uuccgaaguuuaaugguua

SEQ ID NO: 1447667 - RNA, 19 nt, Artificial Sequence
  Description of Artificial Sequence: Synthetic oligonucleotide
agauuuaggauaacuucgu

SEQ ID NO: 1447668 - RNA, 19 nt, Artificial Sequence
  Description of Artificial Sequence: Synthetic oligonucleotide
guaaccguugucucaguga

SEQ ID NO: 1447669 - RNA, 19 nt, Artificial Sequence
  Description of Artificial Sequence: Synthetic oligonucleotide
cuucguaaguggaagaacu

SEQ ID NO: 1447670 - RNA, 19 nt, Artificial Sequence
  Description of Artificial Sequence: Synthetic oligonucleotide
cauuuugaugagcggcgcc

SEQ ID NO: 1447671 - RNA, 19 nt, Artificial Sequence
  Description of Artificial Sequence: Synthetic oligonucleotide
ggcuaaagcgaaaagccag

SEQ ID NO: 1447672 - RNA, 19 nt, Artificial Sequence
  Description of Artificial Sequence: Synthetic oligonucleotide
caauaaaugagaucucagu

SEQ ID NO: 1447673 - RNA, 19 nt, Artificial Sequence
  Description of Artificial Sequence: Synthetic oligonucleotide
gugagagggauuuagugcu

SEQ ID NO: 1447674 - RNA, 19 nt, Artificial Sequence
  Description of Artificial Sequence: Synthetic oligonucleotide
aacccuaugguguccccaa

SEQ ID NO: 1447675 - RNA, 19 nt, Artificial Sequence
  Description of Artificial Sequence: Synthetic oligonucleotide
ugcuugggacucaagcuaa

SEQ ID NO: 1447676 - RNA, 19 nt, Artificial Sequence
  Description of Artificial Sequence: Synthetic oligonucleotide
agggauuuagugcugcaua

SEQ ID NO: 1447677 - RNA, 19 nt, Artificial Sequence
  Description of Artificial Sequence: Synthetic oligonucleotide
ucucaguaaccguugucuc

SEQ ID NO: 1447678 - RNA, 19 nt, Artificial Sequence
  Description of Artificial Sequence: Synthetic oligonucleotide
cuaagagauccgguacucg

SEQ ID NO: 1447679 - RNA, 19 nt, Artificial Sequence
  Description of Artificial Sequence: Synthetic oligonucleotide
agcaagacaccugggcugg

SEQ ID NO: 1447680 - RNA, 19 nt, Artificial Sequence
  Description of Artificial Sequence: Synthetic oligonucleotide
cucaagcuaagggugcagg

SEQ ID NO: 1447681 - RNA, 19 nt, Artificial Sequence
  Description of Artificial Sequence: Synthetic oligonucleotide
ucucaccaaaggcccgagg

SEQ ID NO: 1447682 - RNA, 19 nt, Artificial Sequence
  Description of Artificial Sequence: Synthetic oligonucleotide
gcuauauucaggucaugac

SEQ ID NO: 1447683 - RNA, 19 nt, Artificial Sequence
  Description of Artificial Sequence: Synthetic oligonucleotide
uguagccagauggauacau

SEQ ID NO: 1447684 - RNA, 19 nt, Artificial Sequence
  Description of Artificial Sequence: Synthetic oligonucleotide
cuaagauuuaggauaacuu

SEQ ID NO: 1447685 - RNA, 19 nt, Artificial Sequence
  Description of Artificial Sequence: Synthetic oligonucleotide
ucaguggugguauggguuu

SEQ ID NO: 1447686 - RNA, 19 nt, Artificial Sequence
  Description of Artificial Sequence: Synthetic oligonucleotide
cgaaguuuaaugguuaggc

SEQ ID NO: 1447687 - RNA, 19 nt, Artificial Sequence
  Description of Artificial Sequence: Synthetic oligonucleotide
cuugggacucaagcuaagg

SEQ ID NO: 1447688 - RNA, 19 nt, Artificial Sequence
  Description of Artificial Sequence: Synthetic oligonucleotide
cugggaucuaagagauccg

SEQ ID NO: 1447689 - RNA, 19 nt, Artificial Sequence
  Description of Artificial Sequence: Synthetic oligonucleotide
acgguaaccguugucucag

SEQ ID NO: 1447690 - RNA, 19 nt, Artificial Sequence
  Description of Artificial Sequence: Synthetic oligonucleotide
uugaaugacgccguccuuu

SEQ ID NO: 1447691 - RNA, 19 nt, Artificial Sequence
  Description of Artificial Sequence: Synthetic oligonucleotide
gaauuccaggaucucuauc

SEQ ID NO: 1447692 - RNA, 19 nt, Artificial Sequence
  Description of Artificial Sequence: Synthetic oligonucleotide
agaacaaaagggacagacu

SEQ ID NO: 1447693 - RNA, 19 nt, Artificial Sequence
  Description of Artificial Sequence: Synthetic oligonucleotide
gagguuucucauaaauaca

SEQ ID NO: 1447694 - RNA, 19 nt, Artificial Sequence
  Description of Artificial Sequence: Synthetic oligonucleotide
gcaaggacuaagauuuagg

SEQ ID NO: 1447695 - RNA, 19 nt, Artificial Sequence
  Description of Artificial Sequence: Synthetic oligonucleotide
ugggguugaaugacgccgu

SEQ ID NO: 1447696 - RNA, 19 nt, Artificial Sequence
  Description of Artificial Sequence: Synthetic oligonucleotide
augcuugggacucaagcua

SEQ ID NO: 1447697 - RNA, 19 nt, Artificial Sequence
  Description of Artificial Sequence: Synthetic oligonucleotide
ucucgguggagcucucacc

SEQ ID NO: 1447698 - RNA, 19 nt, Artificial Sequence
  Description of Artificial Sequence: Synthetic oligonucleotide
guugucucaguaaccguug

SEQ ID NO: 1447699 - RNA, 19 nt, Artificial Sequence
  Description of Artificial Sequence: Synthetic oligonucleotide
uuugaacccuauggugucc

SEQ ID NO: 1447700 - RNA, 19 nt, Artificial Sequence
  Description of Artificial Sequence: Synthetic oligonucleotide
auauucaggucaugacuau

SEQ ID NO: 1447701 - RNA, 19 nt, Artificial Sequence
  Description of Artificial Sequence: Synthetic oligonucleotide
ugucucaguaaccguuguc

SEQ ID NO: 1447702 - RNA, 19 nt, Artificial Sequence
  Description of Artificial Sequence: Synthetic oligonucleotide
uugaacccuaugguguccc

SEQ ID NO: 1447703 - RNA, 19 nt, Artificial Sequence
  Description of Artificial Sequence: Synthetic oligonucleotide
guaaccguugucucaguaa

SEQ ID NO: 1447704 - RNA, 19 nt, Artificial Sequence
  Description of Artificial Sequence: Synthetic oligonucleotide
aggguaggaguguacugca

SEQ ID NO: 1447705 - RNA, 19 nt, Artificial Sequence
  Description of Artificial Sequence: Synthetic oligonucleotide
agggaccuacugcuucccc

SEQ ID NO: 1447706 - RNA, 19 nt, Artificial Sequence
  Description of Artificial Sequence: Synthetic oligonucleotide
agauccgguacucgauuca

SEQ ID NO: 1447707 - RNA, 19 nt, Artificial Sequence
  Description of Artificial Sequence: Synthetic oligonucleotide
caauauugcuuggaaucug

SEQ ID NO: 1447708 - RNA, 19 nt, Artificial Sequence
  Description of Artificial Sequence: Synthetic oligonucleotide
agaagggaucagaccaugg

SEQ ID NO: 1447709 - RNA, 19 nt, Artificial Sequence
  Description of Artificial Sequence: Synthetic oligonucleotide
gagauccgguacucgauuc

SEQ ID NO: 1447710 - RNA, 19 nt, Artificial Sequence
  Description of Artificial Sequence: Synthetic oligonucleotide
gauuuaggauaacuucgua

SEQ ID NO: 1447711 - RNA, 19 nt, Artificial Sequence
  Description of Artificial Sequence: Synthetic oligonucleotide
gcuaaagcgaaaagccagg

SEQ ID NO: 1447712 - RNA, 19 nt, Artificial Sequence
  Description of Artificial Sequence: Synthetic oligonucleotide
ucuucucuaucaggcagga

SEQ ID NO: 1447713 - RNA, 19 nt, Artificial Sequence
  Description of Artificial Sequence: Synthetic oligonucleotide
gaagcgggaugggacaccc

SEQ ID NO: 1447714 - RNA, 19 nt, Artificial Sequence
  Description of Artificial Sequence: Synthetic oligonucleotide
guuuaaugguuaggcuccg

SEQ ID NO: 1447715 - RNA, 19 nt, Artificial Sequence
  Description of Artificial Sequence: Synthetic oligonucleotide
gagagggauuuagugcugc

SEQ ID NO: 1447716 - RNA, 19 nt, Artificial Sequence
  Description of Artificial Sequence: Synthetic oligonucleotide
acuggaucccaggacaggu

SEQ ID NO: 1447717 - RNA, 19 nt, Artificial Sequence
  Description of Artificial Sequence: Synthetic oligonucleotide
ucacucucgguggagcucu

SEQ ID NO: 1447718 - RNA, 19 nt, Artificial Sequence
  Description of Artificial Sequence: Synthetic oligonucleotide
auggauacauuuggggcca

SEQ ID NO: 1447719 - RNA, 19 nt, Artificial Sequence
  Description of Artificial Sequence: Synthetic oligonucleotide
uguucccucaucucugcuu

SEQ ID NO: 1447720 - RNA, 19 nt, Artificial Sequence
  Description of Artificial Sequence: Synthetic oligonucleotide
agcuggggugcaauauugc

SEQ ID NO: 1447721 - RNA, 19 nt, Artificial Sequence
  Description of Artificial Sequence: Synthetic oligonucleotide
guccuuugcggugaccccg

SEQ ID NO: 1447722 - RNA, 19 nt, Artificial Sequence
  Description of Artificial Sequence: Synthetic oligonucleotide
ucaccaaaggcccgagguu

SEQ ID NO: 1447723 - RNA, 19 nt, Artificial Sequence
  Description of Artificial Sequence: Synthetic oligonucleotide
cucgguggagcucucacca

SEQ ID NO: 1447724 - RNA, 19 nt, Artificial Sequence
  Description of Artificial Sequence: Synthetic oligonucleotide
uacccagaucccagcacca

SEQ ID NO: 1447725 - RNA, 19 nt, Artificial Sequence
  Description of Artificial Sequence: Synthetic oligonucleotide
aggcucuaagucauugguc

SEQ ID NO: 1447726 - RNA, 19 nt, Artificial Sequence
  Description of Artificial Sequence: Synthetic oligonucleotide
ggauuuagugcugcauagg

SEQ ID NO: 1447727 - RNA, 19 nt, Artificial Sequence
  Description of Artificial Sequence: Synthetic oligonucleotide
cagagcaaacuguagggaa

SEQ ID NO: 1447728 - RNA, 19 nt, Artificial Sequence
  Description of Artificial Sequence: Synthetic oligonucleotide
agacugagaccaagaugcc

SEQ ID NO: 1447729 - RNA, 19 nt, Artificial Sequence
  Description of Artificial Sequence: Synthetic oligonucleotide
gagaagggaucagaccaug

SEQ ID NO: 1447730 - RNA, 19 nt, Artificial Sequence
  Description of Artificial Sequence: Synthetic oligonucleotide
ccaauuuaaaugcuuggga

SEQ ID NO: 1447731 - RNA, 19 nt, Artificial Sequence
  Description of Artificial Sequence: Synthetic oligonucleotide
uccuuugcggugaccccgc

SEQ ID NO: 1447732 - RNA, 19 nt, Artificial Sequence
  Description of Artificial Sequence: Synthetic oligonucleotide
gggacucaagcuaagggug

SEQ ID NO: 1447733 - RNA, 19 nt, Artificial Sequence
  Description of Artificial Sequence: Synthetic oligonucleotide
cucaaagauuaaaggcuga

SEQ ID NO: 1447734 - RNA, 19 nt, Artificial Sequence
  Description of Artificial Sequence: Synthetic oligonucleotide
ucacgguaaccguugucuc

SEQ ID NO: 1447735 - RNA, 19 nt, Artificial Sequence
  Description of Artificial Sequence: Synthetic oligonucleotide
agagauccgguacucgauu

SEQ ID NO: 1447736 - RNA, 19 nt, Artificial Sequence
  Description of Artificial Sequence: Synthetic oligonucleotide
aagagauccgguacucgau

SEQ ID NO: 1447737 - RNA, 19 nt, Artificial Sequence
  Description of Artificial Sequence: Synthetic oligonucleotide
uuccguuuccgaaguuuaa

SEQ ID NO: 1447738 - RNA, 19 nt, Artificial Sequence
  Description of Artificial Sequence: Synthetic oligonucleotide
agugguuggaguggguccu

SEQ ID NO: 1447739 - RNA, 19 nt, Artificial Sequence
  Description of Artificial Sequence: Synthetic oligonucleotide
gaaaggguaggaguguacu

SEQ ID NO: 1447740 - RNA, 19 nt, Artificial Sequence
  Description of Artificial Sequence: Synthetic oligonucleotide
uggcuuccguuuccgaagu

SEQ ID NO: 1447741 - RNA, 19 nt, Artificial Sequence
  Description of Artificial Sequence: Synthetic oligonucleotide
guacucgauucagaguagc

SEQ ID NO: 1447742 - RNA, 19 nt, Artificial Sequence
  Description of Artificial Sequence: Synthetic oligonucleotide
aacuguaagccaggauuaa

SEQ ID NO: 1447743 - RNA, 19 nt, Artificial Sequence
  Description of Artificial Sequence: Synthetic oligonucleotide
aaccguugucucagugacg

SEQ ID NO: 1447744 - RNA, 19 nt, Artificial Sequence
  Description of Artificial Sequence: Synthetic oligonucleotide
uuuaaugguuaggcuccga

SEQ ID NO: 1447745 - RNA, 19 nt, Artificial Sequence
  Description of Artificial Sequence: Synthetic oligonucleotide
ggaucuaagagauccggua

SEQ ID NO: 1447746 - RNA, 19 nt, Artificial Sequence
  Description of Artificial Sequence: Synthetic oligonucleotide
cuaagucauuggucucagc

SEQ ID NO: 1447747 - RNA, 19 nt, Artificial Sequence
  Description of Artificial Sequence: Synthetic oligonucleotide
ugccugaaucccaggcaca

SEQ ID NO: 1447748 - RNA, 19 nt, Artificial Sequence
  Description of Artificial Sequence: Synthetic oligonucleotide
ggugcaauauugcuuggaa

SEQ ID NO: 1447749 - RNA, 19 nt, Artificial Sequence
  Description of Artificial Sequence: Synthetic oligonucleotide
gguugaaaacccaauuuaa

SEQ ID NO: 1447750 - RNA, 19 nt, Artificial Sequence
  Description of Artificial Sequence: Synthetic oligonucleotide
ugaacccuauggugucccc

SEQ ID NO: 1447751 - RNA, 19 nt, Artificial Sequence
  Description of Artificial Sequence: Synthetic oligonucleotide
ccccauguguucauugucc

SEQ ID NO: 1447752 - RNA, 19 nt, Artificial Sequence
  Description of Artificial Sequence: Synthetic oligonucleotide
gcaaacuguagggaaggag

SEQ ID NO: 1447753 - RNA, 19 nt, Artificial Sequence
  Description of Artificial Sequence: Synthetic oligonucleotide
ugucacgguaaccguuguc

SEQ ID NO: 1447754 - RNA, 19 nt, Artificial Sequence
  Description of Artificial Sequence: Synthetic oligonucleotide
gggaucagaccauggguug

SEQ ID NO: 1447755 - RNA, 19 nt, Artificial Sequence
  Description of Artificial Sequence: Synthetic oligonucleotide
uucugcgcuucugggaucu

SEQ ID NO: 1447756 - RNA, 19 nt, Artificial Sequence
  Description of Artificial Sequence: Synthetic oligonucleotide
cagcgaugaagcucaaaga

SEQ ID NO: 1447757 - RNA, 19 nt, Artificial Sequence
  Description of Artificial Sequence: Synthetic oligonucleotide
agcgggaugggacacccuu

SEQ ID NO: 1447758 - RNA, 19 nt, Artificial Sequence
  Description of Artificial Sequence: Synthetic oligonucleotide
ggcaaggacuaagauuuag

SEQ ID NO: 1447759 - RNA, 19 nt, Artificial Sequence
  Description of Artificial Sequence: Synthetic oligonucleotide
uauucaggucaugacuauu

SEQ ID NO: 1447760 - RNA, 19 nt, Artificial Sequence
  Description of Artificial Sequence: Synthetic oligonucleotide
gucacgguaaccguugucu

SEQ ID NO: 1447761 - RNA, 19 nt, Artificial Sequence
  Description of Artificial Sequence: Synthetic oligonucleotide
uugucacgguaaccguugu

SEQ ID NO: 1447762 - RNA, 19 nt, Artificial Sequence
  Description of Artificial Sequence: Synthetic oligonucleotide
cagcuagaggccuggagga

SEQ ID NO: 1447763 - RNA, 19 nt, Artificial Sequence
  Description of Artificial Sequence: Synthetic oligonucleotide
agugaaagcugggaugguu

SEQ ID NO: 1447764 - RNA, 19 nt, Artificial Sequence
  Description of Artificial Sequence: Synthetic oligonucleotide
caauacccagaucccagca

SEQ ID NO: 1447765 - RNA, 19 nt, Artificial Sequence
  Description of Artificial Sequence: Synthetic oligonucleotide
cucaccaaaggcccgaggu

SEQ ID NO: 1447766 - RNA, 19 nt, Artificial Sequence
  Description of Artificial Sequence: Synthetic oligonucleotide
cuggaucccaggacaggug

SEQ ID NO: 1447767 - RNA, 19 nt, Artificial Sequence
  Description of Artificial Sequence: Synthetic oligonucleotide
uggguugaauccccaugua

SEQ ID NO: 1447768 - RNA, 19 nt, Artificial Sequence
  Description of Artificial Sequence: Synthetic oligonucleotide
agggaucagaccauggguu

SEQ ID NO: 1447769 - RNA, 19 nt, Artificial Sequence
  Description of Artificial Sequence: Synthetic oligonucleotide
agcggcgccccauguguuc

SEQ ID NO: 1447770 - RNA, 19 nt, Artificial Sequence
  Description of Artificial Sequence: Synthetic oligonucleotide
gugugugugaccacaaccu

SEQ ID NO: 1447771 - RNA, 19 nt, Artificial Sequence
  Description of Artificial Sequence: Synthetic oligonucleotide
cuaaagcgaaaagccagga

SEQ ID NO: 1447772 - RNA, 19 nt, Artificial Sequence
  Description of Artificial Sequence: Synthetic oligonucleotide
ccguuuccgaaguuuaaug

SEQ ID NO: 1447773 - RNA, 19 nt, Artificial Sequence
  Description of Artificial Sequence: Synthetic oligonucleotide
gguugaaugacgccguccu

SEQ ID NO: 1447774 - RNA, 19 nt, Artificial Sequence
  Description of Artificial Sequence: Synthetic oligonucleotide
caccugggcuggcagagac

SEQ ID NO: 1447775 - RNA, 19 nt, Artificial Sequence
  Description of Artificial Sequence: Synthetic oligonucleotide
ugggacacccuucccuuuu

SEQ ID NO: 1447776 - RNA, 19 nt, Artificial Sequence
  Description of Artificial Sequence: Synthetic oligonucleotide
gcgaaaagccaggaagcgg

SEQ ID NO: 1447777 - RNA, 19 nt, Artificial Sequence
  Description of Artificial Sequence: Synthetic oligonucleotide
ggccuggaggacaauaccc

SEQ ID NO: 1447778 - RNA, 19 nt, Artificial Sequence
  Description of Artificial Sequence: Synthetic oligonucleotide
cucuaucaggcaggagagg

SEQ ID NO: 1447779 - RNA, 19 nt, Artificial Sequence
  Description of Artificial Sequence: Synthetic oligonucleotide
gggagaacccagaagccug

SEQ ID NO: 1447780 - RNA, 19 nt, Artificial Sequence
  Description of Artificial Sequence: Synthetic oligonucleotide
ggaccuacugcuuccccac

SEQ ID NO: 1447781 - RNA, 19 nt, Artificial Sequence
  Description of Artificial Sequence: Synthetic oligonucleotide
gaccuacugcuuccccacc

SEQ ID NO: 1447782 - RNA, 19 nt, Artificial Sequence
  Description of Artificial Sequence: Synthetic oligonucleotide
gacucaagcuaagggugca

SEQ ID NO: 1447783 - RNA, 19 nt, Artificial Sequence
  Description of Artificial Sequence: Synthetic oligonucleotide
gaugaagcucaaagauuaa

SEQ ID NO: 1447784 - RNA, 19 nt, Artificial Sequence
  Description of Artificial Sequence: Synthetic oligonucleotide
caccaguuggggagggcug

SEQ ID NO: 1447785 - RNA, 19 nt, Artificial Sequence
  Description of Artificial Sequence: Synthetic oligonucleotide
gauucucgggcucgguugu

SEQ ID NO: 1447786 - RNA, 19 nt, Artificial Sequence
  Description of Artificial Sequence: Synthetic oligonucleotide
guccugggguugaaugacg

SEQ ID NO: 1447787 - RNA, 19 nt, Artificial Sequence
  Description of Artificial Sequence: Synthetic oligonucleotide
ggauaacuucguaagugga

SEQ ID NO: 1447788 - RNA, 19 nt, Artificial Sequence
  Description of Artificial Sequence: Synthetic oligonucleotide
gaacccuauggugucccca

SEQ ID NO: 1447789 - RNA, 19 nt, Artificial Sequence
  Description of Artificial Sequence: Synthetic oligonucleotide
cuaagggugcagguggcca

SEQ ID NO: 1447790 - RNA, 19 nt, Artificial Sequence
  Description of Artificial Sequence: Synthetic oligonucleotide
uagugcugcauagguccug

SEQ ID NO: 1447791 - RNA, 19 nt, Artificial Sequence
  Description of Artificial Sequence: Synthetic oligonucleotide
ggacuaagauuuaggauaa

SEQ ID NO: 1447792 - RNA, 19 nt, Artificial Sequence
  Description of Artificial Sequence: Synthetic oligonucleotide
uuucugcgcuucugggauc

SEQ ID NO: 1447793 - RNA, 19 nt, Artificial Sequence
  Description of Artificial Sequence: Synthetic oligonucleotide
cuagaggccuggaggacaa

SEQ ID NO: 1447794 - RNA, 19 nt, Artificial Sequence
  Description of Artificial Sequence: Synthetic oligonucleotide
ggacucaagcuaagggugc

SEQ ID NO: 1447795 - RNA, 19 nt, Artificial Sequence
  Description of Artificial Sequence: Synthetic oligonucleotide
uuaagggacccaggccccu

SEQ ID NO: 1447796 - RNA, 19 nt, Artificial Sequence
  Description of Artificial Sequence: Synthetic oligonucleotide
gaucagaccauggguugaa

SEQ ID NO: 1447797 - RNA, 19 nt, Artificial Sequence
  Description of Artificial Sequence: Synthetic oligonucleotide
gacuaagauuuaggauaac

SEQ ID NO: 1447798 - RNA, 19 nt, Artificial Sequence
  Description of Artificial Sequence: Synthetic oligonucleotide
ugacgccguccuuugcggu

SEQ ID NO: 1447799 - RNA, 19 nt, Artificial Sequence
  Description of Artificial Sequence: Synthetic oligonucleotide
gguacucgauucagaguag

SEQ ID NO: 1447800 - RNA, 19 nt, Artificial Sequence
  Description of Artificial Sequence: Synthetic oligonucleotide
ggaucucuauccacccucc

SEQ ID NO: 1447801 - RNA, 19 nt, Artificial Sequence
  Description of Artificial Sequence: Synthetic oligonucleotide
cccuuagacaacagcgaug

SEQ ID NO: 1447802 - RNA, 19 nt, Artificial Sequence
  Description of Artificial Sequence: Synthetic oligonucleotide
gugcaauauugcuuggaau

SEQ ID NO: 1447803 - RNA, 19 nt, Artificial Sequence
  Description of Artificial Sequence: Synthetic oligonucleotide
accaguuggggagggcuga

SEQ ID NO: 1447804 - RNA, 19 nt, Artificial Sequence
  Description of Artificial Sequence: Synthetic oligonucleotide
guagcggccaggaaccucu

SEQ ID NO: 1447805 - RNA, 19 nt, Artificial Sequence
  Description of Artificial Sequence: Synthetic oligonucleotide
gggaccuacugcuucccca

SEQ ID NO: 1447806 - RNA, 19 nt, Artificial Sequence
  Description of Artificial Sequence: Synthetic oligonucleotide
gguccugggguugaaugac

SEQ ID NO: 1447807 - RNA, 19 nt, Artificial Sequence
  Description of Artificial Sequence: Synthetic oligonucleotide
ccguccuuugcggugaccc

SEQ ID NO: 1447808 - RNA, 19 nt, Artificial Sequence
  Description of Artificial Sequence: Synthetic oligonucleotide
ggacaauacccagauccca

SEQ ID NO: 1447809 - RNA, 19 nt, Artificial Sequence
  Description of Artificial Sequence: Synthetic oligonucleotide
accccgcacacagugugug

SEQ ID NO: 1447810 - RNA, 19 nt, Artificial Sequence
  Description of Artificial Sequence: Synthetic oligonucleotide
cugagagagcaagacaccu

SEQ ID NO: 1447811 - RNA, 19 nt, Artificial Sequence
  Description of Artificial Sequence: Synthetic oligonucleotide
cgauucucgggcucgguug

SEQ ID NO: 1447812 - RNA, 19 nt, Artificial Sequence
  Description of Artificial Sequence: Synthetic oligonucleotide
uuguaggcucuaagucauu

SEQ ID NO: 1447813 - RNA, 19 nt, Artificial Sequence
  Description of Artificial Sequence: Synthetic oligonucleotide
cucauaaauacagcagcau

SEQ ID NO: 1447814 - RNA, 19 nt, Artificial Sequence
  Description of Artificial Sequence: Synthetic oligonucleotide
uggauacauuuggggccag

SEQ ID NO: 1447815 - RNA, 19 nt, Artificial Sequence
  Description of Artificial Sequence: Synthetic oligonucleotide
ggggugcaauauugcuugg

SEQ ID NO: 1447816 - RNA, 19 nt, Artificial Sequence
  Description of Artificial Sequence: Synthetic oligonucleotide
ggaugggacacccuucccu

SEQ ID NO: 1447817 - RNA, 19 nt, Artificial Sequence
  Description of Artificial Sequence: Synthetic oligonucleotide
gcuccgauucucgggcucg

SEQ ID NO: 1447818 - RNA, 19 nt, Artificial Sequence
  Description of Artificial Sequence: Synthetic oligonucleotide
cgguacucgauucagagua

SEQ ID NO: 1447819 - RNA, 19 nt, Artificial Sequence
  Description of Artificial Sequence: Synthetic oligonucleotide
caggccccuuagacaacag

SEQ ID NO: 1447820 - RNA, 19 nt, Artificial Sequence
  Description of Artificial Sequence: Synthetic oligonucleotide
cacucagcccggccccugc

SEQ ID NO: 1447821 - RNA, 19 nt, Artificial Sequence
  Description of Artificial Sequence: Synthetic oligonucleotide
cagggaccuacugcuuccc

SEQ ID NO: 1447822 - RNA, 19 nt, Artificial Sequence
  Description of Artificial Sequence: Synthetic oligonucleotide
gaucucuauccacccuccu

SEQ ID NO: 1447823 - RNA, 19 nt, Artificial Sequence
  Description of Artificial Sequence: Synthetic oligonucleotide
augcuauauucaggucaug

SEQ ID NO: 1447824 - RNA, 19 nt, Artificial Sequence
  Description of Artificial Sequence: Synthetic oligonucleotide
gaugagcggcgccccaugu

SEQ ID NO: 1447825 - RNA, 19 nt, Artificial Sequence
  Description of Artificial Sequence: Synthetic oligonucleotide
gguaaccguugucucagua

SEQ ID NO: 1447826 - RNA, 19 nt, Artificial Sequence
  Description of Artificial Sequence: Synthetic oligonucleotide
cuguggcaauaaaugagau

SEQ ID NO: 1447827 - RNA, 19 nt, Artificial Sequence
  Description of Artificial Sequence: Synthetic oligonucleotide
gagggauuuagugcugcau

SEQ ID NO: 1447828 - RNA, 19 nt, Artificial Sequence
  Description of Artificial Sequence: Synthetic oligonucleotide
ggauucuuauucuucccuu

SEQ ID NO: 1447829 - RNA, 19 nt, Artificial Sequence
  Description of Artificial Sequence: Synthetic oligonucleotide
gcuagaggccuggaggaca

SEQ ID NO: 1447830 - RNA, 19 nt, Artificial Sequence
  Description of Artificial Sequence: Synthetic oligonucleotide
aggcuccgauucucgggcu

SEQ ID NO: 1447831 - RNA, 19 nt, Artificial Sequence
  Description of Artificial Sequence: Synthetic oligonucleotide
cccaccccugggcauaacc

SEQ ID NO: 1447832 - RNA, 19 nt, Artificial Sequence
  Description of Artificial Sequence: Synthetic oligonucleotide
gcagcaagucagaauucca

SEQ ID NO: 1447833 - RNA, 19 nt, Artificial Sequence
  Description of Artificial Sequence: Synthetic oligonucleotide
guggccaagauaacuggau

SEQ ID NO: 1447834 - RNA, 19 nt, Artificial Sequence
  Description of Artificial Sequence: Synthetic oligonucleotide
cguaaguggaagaacugua

SEQ ID NO: 1447835 - RNA, 19 nt, Artificial Sequence
  Description of Artificial Sequence: Synthetic oligonucleotide
gccccauguguucauuguc

SEQ ID NO: 1447836 - RNA, 19 nt, Artificial Sequence
  Description of Artificial Sequence: Synthetic oligonucleotide
gcucgguugucacgguaac

SEQ ID NO: 1447837 - RNA, 19 nt, Artificial Sequence
  Description of Artificial Sequence: Synthetic oligonucleotide
ccauguagccagauggaua

SEQ ID NO: 1447838 - RNA, 19 nt, Artificial Sequence
  Description of Artificial Sequence: Synthetic oligonucleotide
acccuaugguguccccaaa

SEQ ID NO: 1447839 - RNA, 19 nt, Artificial Sequence
  Description of Artificial Sequence: Synthetic oligonucleotide
gggaugggacacccuuccc

SEQ ID NO: 1447840 - RNA, 19 nt, Artificial Sequence
  Description of Artificial Sequence: Synthetic oligonucleotide
uccgauucucgggcucggu

SEQ ID NO: 1447841 - RNA, 19 nt, Artificial Sequence
  Description of Artificial Sequence: Synthetic oligonucleotide
gccuccgccauggcuaaag

SEQ ID NO: 1447842 - RNA, 19 nt, Artificial Sequence
  Description of Artificial Sequence: Synthetic oligonucleotide
gcuaagggugcagguggcc

SEQ ID NO: 1447843 - RNA, 19 nt, Artificial Sequence
  Description of Artificial Sequence: Synthetic oligonucleotide
gaucccaggacagguguuu

SEQ ID NO: 1447844 - RNA, 19 nt, Artificial Sequence
  Description of Artificial Sequence: Synthetic oligonucleotide
ggggcaggagaagggauca

SEQ ID NO: 1447845 - RNA, 19 nt, Artificial Sequence
  Description of Artificial Sequence: Synthetic oligonucleotide
ccgagguuucucauaaaua

SEQ ID NO: 1447846 - RNA, 19 nt, Artificial Sequence
  Description of Artificial Sequence: Synthetic oligonucleotide
cacaggcaaggacuaagau

SEQ ID NO: 1447847 - RNA, 19 nt, Artificial Sequence
  Description of Artificial Sequence: Synthetic oligonucleotide
cuuagacaacagcgaugaa

SEQ ID NO: 1447848 - RNA, 19 nt, Artificial Sequence
  Description of Artificial Sequence: Synthetic oligonucleotide
gggugcaauauugcuugga

SEQ ID NO: 1447849 - RNA, 19 nt, Artificial Sequence
  Description of Artificial Sequence: Synthetic oligonucleotide
gcgccccauguguucauug

SEQ ID NO: 1447850 - RNA, 19 nt, Artificial Sequence
  Description of Artificial Sequence: Synthetic oligonucleotide
ccacagugucacuugucca

SEQ ID NO: 1447851 - RNA, 19 nt, Artificial Sequence
  Description of Artificial Sequence: Synthetic oligonucleotide
gccccuuagacaacagcga

SEQ ID NO: 1447852 - RNA, 19 nt, Artificial Sequence
  Description of Artificial Sequence: Synthetic oligonucleotide
gugguuggaguggguccug

SEQ ID NO: 1447853 - RNA, 19 nt, Artificial Sequence
  Description of Artificial Sequence: Synthetic oligonucleotide
ggacagguguuuuggcagu

SEQ ID NO: 1447854 - RNA, 19 nt, Artificial Sequence
  Description of Artificial Sequence: Synthetic oligonucleotide
cuguagggaaggagaggcu

SEQ ID NO: 1447855 - RNA, 19 nt, Artificial Sequence
  Description of Artificial Sequence: Synthetic oligonucleotide
aagcgggaugggacacccu

SEQ ID NO: 1447856 - RNA, 19 nt, Artificial Sequence
  Description of Artificial Sequence: Synthetic oligonucleotide
ggcucgguugucacgguaa

SEQ ID NO: 1447857 - RNA, 19 nt, Artificial Sequence
  Description of Artificial Sequence: Synthetic oligonucleotide
ggaugguugaaaacccaau

SEQ ID NO: 1447858 - RNA, 19 nt, Artificial Sequence
  Description of Artificial Sequence: Synthetic oligonucleotide
guugaaugacgccguccuu

SEQ ID NO: 1447859 - RNA, 19 nt, Artificial Sequence
  Description of Artificial Sequence: Synthetic oligonucleotide
ggcuccgauucucgggcuc

SEQ ID NO: 1447860 - RNA, 19 nt, Artificial Sequence
  Description of Artificial Sequence: Synthetic oligonucleotide
caggaucucuauccacccu

SEQ ID NO: 1447861 - RNA, 19 nt, Artificial Sequence
  Description of Artificial Sequence: Synthetic oligonucleotide
gggaucuaagagauccggu

SEQ ID NO: 1447862 - RNA, 19 nt, Artificial Sequence
  Description of Artificial Sequence: Synthetic oligonucleotide
ccccauguagccagaugga

SEQ ID NO: 1447863 - RNA, 19 nt, Artificial Sequence
  Description of Artificial Sequence: Synthetic oligonucleotide
cagccagcucagaaaugcu

SEQ ID NO: 1447864 - RNA, 19 nt, Artificial Sequence
  Description of Artificial Sequence: Synthetic oligonucleotide
guagccagauggauacauu

SEQ ID NO: 1447865 - RNA, 19 nt, Artificial Sequence
  Description of Artificial Sequence: Synthetic oligonucleotide
cugccuccgccauggcuaa

SEQ ID NO: 1447866 - RNA, 19 nt, Artificial Sequence
  Description of Artificial Sequence: Synthetic oligonucleotide
cccuaugguguccccaaaa

SEQ ID NO: 1447867 - RNA, 19 nt, Artificial Sequence
  Description of Artificial Sequence: Synthetic oligonucleotide
gcgaugaagcucaaagauu

SEQ ID NO: 1447868 - RNA, 19 nt, Artificial Sequence
  Description of Artificial Sequence: Synthetic oligonucleotide
gguugucacgguaaccguu

SEQ ID NO: 1447869 - RNA, 19 nt, Artificial Sequence
  Description of Artificial Sequence: Synthetic oligonucleotide
ccgcacacaguguguguga

SEQ ID NO: 1447870 - RNA, 19 nt, Artificial Sequence
  Description of Artificial Sequence: Synthetic oligonucleotide
ucugcgcuucugggaucua

SEQ ID NO: 1447871 - RNA, 19 nt, Artificial Sequence
  Description of Artificial Sequence: Synthetic oligonucleotide
cucuauccacccuccucuu

SEQ ID NO: 1447872 - RNA, 19 nt, Artificial Sequence
  Description of Artificial Sequence: Synthetic oligonucleotide
caacagcgaugaagcucaa

SEQ ID NO: 1447873 - RNA, 19 nt, Artificial Sequence
  Description of Artificial Sequence: Synthetic oligonucleotide
gcgggaugggacacccuuc

SEQ ID NO: 1447874 - RNA, 19 nt, Artificial Sequence
  Description of Artificial Sequence: Synthetic oligonucleotide
caguaaccguugucucagu

SEQ ID NO: 1447875 - RNA, 19 nt, Artificial Sequence
  Description of Artificial Sequence: Synthetic oligonucleotide
ccccuuagacaacagcgau

SEQ ID NO: 1447876 - RNA, 19 nt, Artificial Sequence
  Description of Artificial Sequence: Synthetic oligonucleotide
gugaccccgcacacagugu

SEQ ID NO: 1447877 - RNA, 19 nt, Artificial Sequence
  Description of Artificial Sequence: Synthetic oligonucleotide
gcaagacaccugggcuggc

SEQ ID NO: 1447878 - RNA, 19 nt, Artificial Sequence
  Description of Artificial Sequence: Synthetic oligonucleotide
gggcucgguugucacggua

SEQ ID NO: 1447879 - RNA, 19 nt, Artificial Sequence
  Description of Artificial Sequence: Synthetic oligonucleotide
cccaggccccuuagacaac

SEQ ID NO: 1447880 - RNA, 19 nt, Artificial Sequence
  Description of Artificial Sequence: Synthetic oligonucleotide
ccgguacucgauucagagu

SEQ ID NO: 1447881 - RNA, 19 nt, Artificial Sequence
  Description of Artificial Sequence: Synthetic oligonucleotide
gcggcgccccauguguuca

SEQ ID NO: 1447882 - RNA, 19 nt, Artificial Sequence
  Description of Artificial Sequence: Synthetic oligonucleotide
ugccuccgccauggcuaaa

SEQ ID NO: 1447883 - RNA, 19 nt, Artificial Sequence
  Description of Artificial Sequence: Synthetic oligonucleotide
ccguugucucaguaaccgu

SEQ ID NO: 1447884 - RNA, 19 nt, Artificial Sequence
  Description of Artificial Sequence: Synthetic oligonucleotide
gccguccuuugcggugacc

SEQ ID NO: 1447885 - RNA, 19 nt, Artificial Sequence
  Description of Artificial Sequence: Synthetic oligonucleotide
cccauguagccagauggau

SEQ ID NO: 1447886 - RNA, 19 nt, Artificial Sequence
  Description of Artificial Sequence: Synthetic oligonucleotide
gagcggcgccccauguguu

SEQ ID NO: 1447887 - RNA, 19 nt, Artificial Sequence
  Description of Artificial Sequence: Synthetic oligonucleotide
caguggugguauggguuuu

SEQ ID NO: 1447888 - RNA, 19 nt, Artificial Sequence
  Description of Artificial Sequence: Synthetic oligonucleotide
ccgauucucgggcucgguu

SEQ ID NO: 1447889 - RNA, 19 nt, Artificial Sequence
  Description of Artificial Sequence: Synthetic oligonucleotide
ccuuugcggugaccccgca

SEQ ID NO: 1447890 - RNA, 19 nt, Artificial Sequence
  Description of Artificial Sequence: Synthetic oligonucleotide
cgccauggcuaaagcgaaa

SEQ ID NO: 1447891 - RNA, 19 nt, Artificial Sequence
  Description of Artificial Sequence: Synthetic oligonucleotide
ccguugucucagugacggu

SEQ ID NO: 1447892 - RNA, 19 nt, Artificial Sequence
  Description of Artificial Sequence: Synthetic oligonucleotide
ggcgccccauguguucauu

SEQ ID NO: 1447893 - RNA, 19 nt, Artificial Sequence
  Description of Artificial Sequence: Synthetic oligonucleotide
cgguaaccguugucucagu

SEQ ID NO: 1447894 - RNA, 19 nt, Artificial Sequence
  Description of Artificial Sequence: Synthetic oligonucleotide
cggcgccccauguguucau

SEQ ID NO: 1447895 - RNA, 19 nt, Artificial Sequence
  Description of Artificial Sequence: Synthetic oligonucleotide
aaggaaauauccuugaggc

SEQ ID NO: 1447896 - RNA, 19 nt, Artificial Sequence
  Description of Artificial Sequence: Synthetic oligonucleotide
aaaggaaauauccuugagg

SEQ ID NO: 1447897 - RNA, 19 nt, Artificial Sequence
  Description of Artificial Sequence: Synthetic oligonucleotide
uguuguuucaacaacacca

SEQ ID NO: 1447898 - RNA, 19 nt, Artificial Sequence
  Description of Artificial Sequence: Synthetic oligonucleotide
ugauaauggaauuaaaccc

SEQ ID NO: 1447899 - RNA, 19 nt, Artificial Sequence
  Description of Artificial Sequence: Synthetic oligonucleotide
gaaacuaacuuccucauag

SEQ ID NO: 1447900 - RNA, 19 nt, Artificial Sequence
  Description of Artificial Sequence: Synthetic oligonucleotide
cuugcuguaagaauuaugc

SEQ ID NO: 1447901 - RNA, 19 nt, Artificial Sequence
  Description of Artificial Sequence: Synthetic oligonucleotide
uuaacauguaaaaugacgu

SEQ ID NO: 1447902 - RNA, 19 nt, Artificial Sequence
  Description of Artificial Sequence: Synthetic oligonucleotide
aaugucgcuucucaggccc

SEQ ID NO: 1447903 - RNA, 19 nt, Artificial Sequence
  Description of Artificial Sequence: Synthetic oligonucleotide
aaugguauguccaugugac

SEQ ID NO: 1447904 - RNA, 19 nt, Artificial Sequence
  Description of Artificial Sequence: Synthetic oligonucleotide
uccuauuacacuaguaggg

SEQ ID NO: 1447905 - RNA, 19 nt, Artificial Sequence
  Description of Artificial Sequence: Synthetic oligonucleotide
auaaugucgcuucucaggc

SEQ ID NO: 1447906 - RNA, 19 nt, Artificial Sequence
  Description of Artificial Sequence: Synthetic oligonucleotide
auuccuauuacacuaguag

SEQ ID NO: 1447907 - RNA, 19 nt, Artificial Sequence
  Description of Artificial Sequence: Synthetic oligonucleotide
agaauuaugcacugauugc

SEQ ID NO: 1447908 - RNA, 19 nt, Artificial Sequence
  Description of Artificial Sequence: Synthetic oligonucleotide
uucaccauaccauggaugg

SEQ ID NO: 1447909 - RNA, 19 nt, Artificial Sequence
  Description of Artificial Sequence: Synthetic oligonucleotide
acuuaaauuaaacaaggga

SEQ ID NO: 1447910 - RNA, 19 nt, Artificial Sequence
  Description of Artificial Sequence: Synthetic oligonucleotide
uuuauucaccauaccaugg

SEQ ID NO: 1447911 - RNA, 19 nt, Artificial Sequence
  Description of Artificial Sequence: Synthetic oligonucleotide
aacgaaacuaacuuccuca

SEQ ID NO: 1447912 - RNA, 19 nt, Artificial Sequence
  Description of Artificial Sequence: Synthetic oligonucleotide
gauaauggaauuaaacccc

SEQ ID NO: 1447913 - RNA, 19 nt, Artificial Sequence
  Description of Artificial Sequence: Synthetic oligonucleotide
uuaaacaagggaaguaagc

SEQ ID NO: 1447914 - RNA, 19 nt, Artificial Sequence
  Description of Artificial Sequence: Synthetic oligonucleotide
uuuacauaaucgcuacagg

SEQ ID NO: 1447915 - RNA, 19 nt, Artificial Sequence
  Description of Artificial Sequence: Synthetic oligonucleotide
cauuucauuaaaacgaaac

SEQ ID NO: 1447916 - RNA, 19 nt, Artificial Sequence
  Description of Artificial Sequence: Synthetic oligonucleotide
aauuagucucccugcauuc

SEQ ID NO: 1447917 - RNA, 19 nt, Artificial Sequence
  Description of Artificial Sequence: Synthetic oligonucleotide
auuauguugccaucggacg

SEQ ID NO: 1447918 - RNA, 19 nt, Artificial Sequence
  Description of Artificial Sequence: Synthetic oligonucleotide
cuaacuacaucauucaguc

SEQ ID NO: 1447919 - RNA, 19 nt, Artificial Sequence
  Description of Artificial Sequence: Synthetic oligonucleotide
uuccuauuacacuaguagg

SEQ ID NO: 1447920 - RNA, 19 nt, Artificial Sequence
  Description of Artificial Sequence: Synthetic oligonucleotide
acauaaucgcuacagguuc

SEQ ID NO: 1447921 - RNA, 19 nt, Artificial Sequence
  Description of Artificial Sequence: Synthetic oligonucleotide
aaacaaugucgacagaaca

SEQ ID NO: 1447922 - RNA, 19 nt, Artificial Sequence
  Description of Artificial Sequence: Synthetic oligonucleotide
uaguguaggagaaugagaa

SEQ ID NO: 1447923 - RNA, 19 nt, Artificial Sequence
  Description of Artificial Sequence: Synthetic oligonucleotide
uuauguugccaucggacgg

SEQ ID NO: 1447924 - RNA, 19 nt, Artificial Sequence
  Description of Artificial Sequence: Synthetic oligonucleotide
uuacauaaucgcuacaggu

SEQ ID NO: 1447925 - RNA, 19 nt, Artificial Sequence
  Description of Artificial Sequence: Synthetic oligonucleotide
aaccagaagucacccaccc

SEQ ID NO: 1447926 - RNA, 19 nt, Artificial Sequence
  Description of Artificial Sequence: Synthetic oligonucleotide
ucggcuggcaugauaaugg

SEQ ID NO: 1447927 - RNA, 19 nt, Artificial Sequence
  Description of Artificial Sequence: Synthetic oligonucleotide
aagacugaagacuuucuga

SEQ ID NO: 1447928 - RNA, 19 nt, Artificial Sequence
  Description of Artificial Sequence: Synthetic oligonucleotide
auuuacauaaucgcuacag

SEQ ID NO: 1447929 - RNA, 19 nt, Artificial Sequence
  Description of Artificial Sequence: Synthetic oligonucleotide
aaacgaaacuaacuuccuc

SEQ ID NO: 1447930 - RNA, 19 nt, Artificial Sequence
  Description of Artificial Sequence: Synthetic oligonucleotide
uacuuggugacacacaggu

SEQ ID NO: 1447931 - RNA, 19 nt, Artificial Sequence
  Description of Artificial Sequence: Synthetic oligonucleotide
aaaacaaugucgacagaac

SEQ ID NO: 1447932 - RNA, 19 nt, Artificial Sequence
  Description of Artificial Sequence: Synthetic oligonucleotide
cauaucaacucucagggac

SEQ ID NO: 1447933 - RNA, 19 nt, Artificial Sequence
  Description of Artificial Sequence: Synthetic oligonucleotide
aacauguaaaaugacgugu

SEQ ID NO: 1447934 - RNA, 19 nt, Artificial Sequence
  Description of Artificial Sequence: Synthetic oligonucleotide
aaauaaugucgcuucucag

SEQ ID NO: 1447935 - RNA, 19 nt, Artificial Sequence
  Description of Artificial Sequence: Synthetic oligonucleotide
caucauucagucaugucgg

SEQ ID NO: 1447936 - RNA, 19 nt, Artificial Sequence
  Description of Artificial Sequence: Synthetic oligonucleotide
aaaugguauguccauguga

SEQ ID NO: 1447937 - RNA, 19 nt, Artificial Sequence
  Description of Artificial Sequence: Synthetic oligonucleotide
agagauugggguuucacug

SEQ ID NO: 1447938 - RNA, 19 nt, Artificial Sequence
  Description of Artificial Sequence: Synthetic oligonucleotide
uuaaaacgaaacuaacuuc

SEQ ID NO: 1447939 - RNA, 19 nt, Artificial Sequence
  Description of Artificial Sequence: Synthetic oligonucleotide
aaaacagcgccaacuagac

SEQ ID NO: 1447940 - RNA, 19 nt, Artificial Sequence
  Description of Artificial Sequence: Synthetic oligonucleotide
agaauauacugcugccacc

SEQ ID NO: 1447941 - RNA, 19 nt, Artificial Sequence
  Description of Artificial Sequence: Synthetic oligonucleotide
cucaaaauaaugucgcuuc

SEQ ID NO: 1447942 - RNA, 19 nt, Artificial Sequence
  Description of Artificial Sequence: Synthetic oligonucleotide
guaacagguguuaagaggc

SEQ ID NO: 1447943 - RNA, 19 nt, Artificial Sequence
  Description of Artificial Sequence: Synthetic oligonucleotide
aacuaacuuccucauagga

SEQ ID NO: 1447944 - RNA, 19 nt, Artificial Sequence
  Description of Artificial Sequence: Synthetic oligonucleotide
ugccagaugagaaugauuu

SEQ ID NO: 1447945 - RNA, 19 nt, Artificial Sequence
  Description of Artificial Sequence: Synthetic oligonucleotide
auuaugcacugauugcugg

SEQ ID NO: 1447946 - RNA, 19 nt, Artificial Sequence
  Description of Artificial Sequence: Synthetic oligonucleotide
gcugaauuccuucuuaugg

SEQ ID NO: 1447947 - RNA, 19 nt, Artificial Sequence
  Description of Artificial Sequence: Synthetic oligonucleotide
aauaugacccuaaaggaaa

SEQ ID NO: 1447948 - RNA, 19 nt, Artificial Sequence
  Description of Artificial Sequence: Synthetic oligonucleotide
aucuuuacuagacuaagau

SEQ ID NO: 1447949 - RNA, 19 nt, Artificial Sequence
  Description of Artificial Sequence: Synthetic oligonucleotide
ugcaugggaacauggaugc

SEQ ID NO: 1447950 - RNA, 19 nt, Artificial Sequence
  Description of Artificial Sequence: Synthetic oligonucleotide
acauuucagaauauacugc

SEQ ID NO: 1447951 - RNA, 19 nt, Artificial Sequence
  Description of Artificial Sequence: Synthetic oligonucleotide
cauuauguugccaucggac

SEQ ID NO: 1447952 - RNA, 19 nt, Artificial Sequence
  Description of Artificial Sequence: Synthetic oligonucleotide
uugcaugggaacauggaug

SEQ ID NO: 1447953 - RNA, 19 nt, Artificial Sequence
  Description of Artificial Sequence: Synthetic oligonucleotide
caaaggauagaacacagca

SEQ ID NO: 1447954 - RNA, 19 nt, Artificial Sequence
  Description of Artificial Sequence: Synthetic oligonucleotide
aaauuagucucccugcauu

SEQ ID NO: 1447955 - RNA, 19 nt, Artificial Sequence
  Description of Artificial Sequence: Synthetic oligonucleotide
uuauucaccauaccaugga

SEQ ID NO: 1447956 - RNA, 19 nt, Artificial Sequence
  Description of Artificial Sequence: Synthetic oligonucleotide
acaaugucgacagaacaac

SEQ ID NO: 1447957 - RNA, 19 nt, Artificial Sequence
  Description of Artificial Sequence: Synthetic oligonucleotide
uuaguguaggagaaugaga

SEQ ID NO: 1447958 - RNA, 19 nt, Artificial Sequence
  Description of Artificial Sequence: Synthetic oligonucleotide
uauuacacuaguagggcaa

SEQ ID NO: 1447959 - RNA, 19 nt, Artificial Sequence
  Description of Artificial Sequence: Synthetic oligonucleotide
uaacauguaaaaugacgug

SEQ ID NO: 1447960 - RNA, 19 nt, Artificial Sequence
  Description of Artificial Sequence: Synthetic oligonucleotide
aaucgcuacagguucauuu

SEQ ID NO: 1447961 - RNA, 19 nt, Artificial Sequence
  Description of Artificial Sequence: Synthetic oligonucleotide
agaaaugguauguccaugu

SEQ ID NO: 1447962 - RNA, 19 nt, Artificial Sequence
  Description of Artificial Sequence: Synthetic oligonucleotide
aucuaugagacauuucaga

SEQ ID NO: 1447963 - RNA, 19 nt, Artificial Sequence
  Description of Artificial Sequence: Synthetic oligonucleotide
cugaauuccuucuuauggc

SEQ ID NO: 1447964 - RNA, 19 nt, Artificial Sequence
  Description of Artificial Sequence: Synthetic oligonucleotide
augucgacagaacaacggg

SEQ ID NO: 1447965 - RNA, 19 nt, Artificial Sequence
  Description of Artificial Sequence: Synthetic oligonucleotide
ugggguuucacugaaguca

SEQ ID NO: 1447966 - RNA, 19 nt, Artificial Sequence
  Description of Artificial Sequence: Synthetic oligonucleotide
aacaagggaaguaagcaca

SEQ ID NO: 1447967 - RNA, 19 nt, Artificial Sequence
  Description of Artificial Sequence: Synthetic oligonucleotide
uccauuauguugccaucgg

SEQ ID NO: 1447968 - RNA, 19 nt, Artificial Sequence
  Description of Artificial Sequence: Synthetic oligonucleotide
ugaucuuuacuagacuaag

SEQ ID NO: 1447969 - RNA, 19 nt, Artificial Sequence
  Description of Artificial Sequence: Synthetic oligonucleotide
ucagcuucgggcuauaauu

SEQ ID NO: 1447970 - RNA, 19 nt, Artificial Sequence
  Description of Artificial Sequence: Synthetic oligonucleotide
gaggaauaugacccuaaag

SEQ ID NO: 1447971 - RNA, 19 nt, Artificial Sequence
  Description of Artificial Sequence: Synthetic oligonucleotide
agugagcuaauccauuaug

SEQ ID NO: 1447972 - RNA, 19 nt, Artificial Sequence
  Description of Artificial Sequence: Synthetic oligonucleotide
uucuaaauaaaguccuaaa

SEQ ID NO: 1447973 - RNA, 19 nt, Artificial Sequence
  Description of Artificial Sequence: Synthetic oligonucleotide
uuaagaggccaacauguuc

SEQ ID NO: 1447974 - RNA, 19 nt, Artificial Sequence
  Description of Artificial Sequence: Synthetic oligonucleotide
ucaacucucagggacaaga

SEQ ID NO: 1447975 - RNA, 19 nt, Artificial Sequence
  Description of Artificial Sequence: Synthetic oligonucleotide
gaaaacaaugucgacagaa

SEQ ID NO: 1447976 - RNA, 19 nt, Artificial Sequence
  Description of Artificial Sequence: Synthetic oligonucleotide
uacauaaucgcuacagguu

SEQ ID NO: 1447977 - RNA, 19 nt, Artificial Sequence
  Description of Artificial Sequence: Synthetic oligonucleotide
auaccauggauggaugccc

SEQ ID NO: 1447978 - RNA, 19 nt, Artificial Sequence
  Description of Artificial Sequence: Synthetic oligonucleotide
auugggguuucacugaagu

SEQ ID NO: 1447979 - RNA, 19 nt, Artificial Sequence
  Description of Artificial Sequence: Synthetic oligonucleotide
ugaauuccuucuuauggcu

SEQ ID NO: 1447980 - RNA, 19 nt, Artificial Sequence
  Description of Artificial Sequence: Synthetic oligonucleotide
caagcgaaaggcagcaugc

SEQ ID NO: 1447981 - RNA, 19 nt, Artificial Sequence
  Description of Artificial Sequence: Synthetic oligonucleotide
ugucgacagaacaacgggc

SEQ ID NO: 1447982 - RNA, 19 nt, Artificial Sequence
  Description of Artificial Sequence: Synthetic oligonucleotide
aacucaaaauaaugucgcu

SEQ ID NO: 1447983 - RNA, 19 nt, Artificial Sequence
  Description of Artificial Sequence: Synthetic oligonucleotide
uucucagauugacaggcug

SEQ ID NO: 1447984 - RNA, 19 nt, Artificial Sequence
  Description of Artificial Sequence: Synthetic oligonucleotide
acuggcauggcacaccgug

SEQ ID NO: 1447985 - RNA, 19 nt, Artificial Sequence
  Description of Artificial Sequence: Synthetic oligonucleotide
gauggaugcccacauggug

SEQ ID NO: 1447986 - RNA, 19 nt, Artificial Sequence
  Description of Artificial Sequence: Synthetic oligonucleotide
uccuaacuacaucauucag

SEQ ID NO: 1447987 - RNA, 19 nt, Artificial Sequence
  Description of Artificial Sequence: Synthetic oligonucleotide
uuagucucccugcauuccc

SEQ ID NO: 1447988 - RNA, 19 nt, Artificial Sequence
  Description of Artificial Sequence: Synthetic oligonucleotide
aacaaugucgacagaacaa

SEQ ID NO: 1447989 - RNA, 19 nt, Artificial Sequence
  Description of Artificial Sequence: Synthetic oligonucleotide
caaugucgacagaacaacg

SEQ ID NO: 1447990 - RNA, 19 nt, Artificial Sequence
  Description of Artificial Sequence: Synthetic oligonucleotide
agccuauacuucuaaauaa

SEQ ID NO: 1447991 - RNA, 19 nt, Artificial Sequence
  Description of Artificial Sequence: Synthetic oligonucleotide
aaccgaagcauuucauuaa

SEQ ID NO: 1447992 - RNA, 19 nt, Artificial Sequence
  Description of Artificial Sequence: Synthetic oligonucleotide
cucagggacaagaaguuuc

SEQ ID NO: 1447993 - RNA, 19 nt, Artificial Sequence
  Description of Artificial Sequence: Synthetic oligonucleotide
ggaauaugacccuaaagga

SEQ ID NO: 1447994 - RNA, 19 nt, Artificial Sequence
  Description of Artificial Sequence: Synthetic oligonucleotide
uaguagggcaaaaugguuu

SEQ ID NO: 1447995 - RNA, 19 nt, Artificial Sequence
  Description of Artificial Sequence: Synthetic oligonucleotide
uggaguuaguguaggagaa

SEQ ID NO: 1447996 - RNA, 19 nt, Artificial Sequence
  Description of Artificial Sequence: Synthetic oligonucleotide
acugguacugagucccaac

SEQ ID NO: 1447997 - RNA, 19 nt, Artificial Sequence
  Description of Artificial Sequence: Synthetic oligonucleotide
aacaagugaccuugcuucu

SEQ ID NO: 1447998 - RNA, 19 nt, Artificial Sequence
  Description of Artificial Sequence: Synthetic oligonucleotide
ggcaaaaugguuucugccc

SEQ ID NO: 1447999 - RNA, 19 nt, Artificial Sequence
  Description of Artificial Sequence: Synthetic oligonucleotide
caagccugaucuuuacuag

SEQ ID NO: 1448000 - RNA, 19 nt, Artificial Sequence
  Description of Artificial Sequence: Synthetic oligonucleotide
ucagaauauacugcugcca

SEQ ID NO: 1448001 - RNA, 19 nt, Artificial Sequence
  Description of Artificial Sequence: Synthetic oligonucleotide
gaaaugguauguccaugug

SEQ ID NO: 1448002 - RNA, 19 nt, Artificial Sequence
  Description of Artificial Sequence: Synthetic oligonucleotide
agggacaagaaguuucacu

SEQ ID NO: 1448003 - RNA, 19 nt, Artificial Sequence
  Description of Artificial Sequence: Synthetic oligonucleotide
aagccugaucuuuacuaga

SEQ ID NO: 1448004 - RNA, 19 nt, Artificial Sequence
  Description of Artificial Sequence: Synthetic oligonucleotide
gaguuguuuguaguaauac

SEQ ID NO: 1448005 - RNA, 19 nt, Artificial Sequence
  Description of Artificial Sequence: Synthetic oligonucleotide
acuaguagggcaaaauggu

SEQ ID NO: 1448006 - RNA, 19 nt, Artificial Sequence
  Description of Artificial Sequence: Synthetic oligonucleotide
uaauuccuauuacacuagu

SEQ ID NO: 1448007 - RNA, 19 nt, Artificial Sequence
  Description of Artificial Sequence: Synthetic oligonucleotide
gcuauaauuccuauuacac

SEQ ID NO: 1448008 - RNA, 19 nt, Artificial Sequence
  Description of Artificial Sequence: Synthetic oligonucleotide
auccuaacuacaucauuca

SEQ ID NO: 1448009 - RNA, 19 nt, Artificial Sequence
  Description of Artificial Sequence: Synthetic oligonucleotide
uguccuauuugcagagcug

SEQ ID NO: 1448010 - RNA, 19 nt, Artificial Sequence
  Description of Artificial Sequence: Synthetic oligonucleotide
gaauaugacccuaaaggaa

SEQ ID NO: 1448011 - RNA, 19 nt, Artificial Sequence
  Description of Artificial Sequence: Synthetic oligonucleotide
uuacuagacuaagauaaaa

SEQ ID NO: 1448012 - RNA, 19 nt, Artificial Sequence
  Description of Artificial Sequence: Synthetic oligonucleotide
ugagccugccagaugagaa

SEQ ID NO: 1448013 - RNA, 19 nt, Artificial Sequence
  Description of Artificial Sequence: Synthetic oligonucleotide
ucuugaucuugcuguaaga

SEQ ID NO: 1448014 - RNA, 19 nt, Artificial Sequence
  Description of Artificial Sequence: Synthetic oligonucleotide
agucaugucggcuggcaug

SEQ ID NO: 1448015 - RNA, 19 nt, Artificial Sequence
  Description of Artificial Sequence: Synthetic oligonucleotide
ucggacgguguucagaaau

SEQ ID NO: 1448016 - RNA, 19 nt, Artificial Sequence
  Description of Artificial Sequence: Synthetic oligonucleotide
gaugcccuaaauaaacaca

SEQ ID NO: 1448017 - RNA, 19 nt, Artificial Sequence
  Description of Artificial Sequence: Synthetic oligonucleotide
guguuaagaggccaacaug

SEQ ID NO: 1448018 - RNA, 19 nt, Artificial Sequence
  Description of Artificial Sequence: Synthetic oligonucleotide
cagaguaaacaagcgaaag

SEQ ID NO: 1448019 - RNA, 19 nt, Artificial Sequence
  Description of Artificial Sequence: Synthetic oligonucleotide
uggaugcccuaaauaaaca

SEQ ID NO: 1448020 - RNA, 19 nt, Artificial Sequence
  Description of Artificial Sequence: Synthetic oligonucleotide
ugagcuaauccauuauguu

SEQ ID NO: 1448021 - RNA, 19 nt, Artificial Sequence
  Description of Artificial Sequence: Synthetic oligonucleotide
acauguaaaaugacgugug

SEQ ID NO: 1448022 - RNA, 19 nt, Artificial Sequence
  Description of Artificial Sequence: Synthetic oligonucleotide
uaacagguguuaagaggcc

SEQ ID NO: 1448023 - RNA, 19 nt, Artificial Sequence
  Description of Artificial Sequence: Synthetic oligonucleotide
cugguacugagucccaacc

SEQ ID NO: 1448024 - RNA, 19 nt, Artificial Sequence
  Description of Artificial Sequence: Synthetic oligonucleotide
ucgacagaacaacgggcag

SEQ ID NO: 1448025 - RNA, 19 nt, Artificial Sequence
  Description of Artificial Sequence: Synthetic oligonucleotide
cauaccauggauggaugcc

SEQ ID NO: 1448026 - RNA, 19 nt, Artificial Sequence
  Description of Artificial Sequence: Synthetic oligonucleotide
ugccaaaggauagaacaca

SEQ ID NO: 1448027 - RNA, 19 nt, Artificial Sequence
  Description of Artificial Sequence: Synthetic oligonucleotide
agcuucucagauugacagg

SEQ ID NO: 1448028 - RNA, 19 nt, Artificial Sequence
  Description of Artificial Sequence: Synthetic oligonucleotide
aguguuccacagcagagau

SEQ ID NO: 1448029 - RNA, 19 nt, Artificial Sequence
  Description of Artificial Sequence: Synthetic oligonucleotide
gaauuaugcacugauugcu

SEQ ID NO: 1448030 - RNA, 19 nt, Artificial Sequence
  Description of Artificial Sequence: Synthetic oligonucleotide
cauuucagaauauacugcu

SEQ ID NO: 1448031 - RNA, 19 nt, Artificial Sequence
  Description of Artificial Sequence: Synthetic oligonucleotide
ugaggaauaugacccuaaa

SEQ ID NO: 1448032 - RNA, 19 nt, Artificial Sequence
  Description of Artificial Sequence: Synthetic oligonucleotide
acaacgggcagaguaaaca

SEQ ID NO: 1448033 - RNA, 19 nt, Artificial Sequence
  Description of Artificial Sequence: Synthetic oligonucleotide
acaagggaaguaagcacac

SEQ ID NO: 1448034 - RNA, 19 nt, Artificial Sequence
  Description of Artificial Sequence: Synthetic oligonucleotide
uuucugcccuuuccgaugu

SEQ ID NO: 1448035 - RNA, 19 nt, Artificial Sequence
  Description of Artificial Sequence: Synthetic oligonucleotide
cuauuugcagagcugcuca

SEQ ID NO: 1448036 - RNA, 19 nt, Artificial Sequence
  Description of Artificial Sequence: Synthetic oligonucleotide
agccugaucuuuacuagac

SEQ ID NO: 1448037 - RNA, 19 nt, Artificial Sequence
  Description of Artificial Sequence: Synthetic oligonucleotide
aacagguguuaagaggcca

SEQ ID NO: 1448038 - RNA, 19 nt, Artificial Sequence
  Description of Artificial Sequence: Synthetic oligonucleotide
guaagaauuaugcacugau

SEQ ID NO: 1448039 - RNA, 19 nt, Artificial Sequence
  Description of Artificial Sequence: Synthetic oligonucleotide
aacaacgggcagaguaaac

SEQ ID NO: 1448040 - RNA, 19 nt, Artificial Sequence
  Description of Artificial Sequence: Synthetic oligonucleotide
ugagucccaaccucauagc

SEQ ID NO: 1448041 - RNA, 19 nt, Artificial Sequence
  Description of Artificial Sequence: Synthetic oligonucleotide
uggcauggcacaccgugug

SEQ ID NO: 1448042 - RNA, 19 nt, Artificial Sequence
  Description of Artificial Sequence: Synthetic oligonucleotide
uauggcuuuuggacuucag

SEQ ID NO: 1448043 - RNA, 19 nt, Artificial Sequence
  Description of Artificial Sequence: Synthetic oligonucleotide
uguucagaaaugguauguc

SEQ ID NO: 1448044 - RNA, 19 nt, Artificial Sequence
  Description of Artificial Sequence: Synthetic oligonucleotide
gaacauggaugcagagugg

SEQ ID NO: 1448045 - RNA, 19 nt, Artificial Sequence
  Description of Artificial Sequence: Synthetic oligonucleotide
gagauugggguuucacuga

SEQ ID NO: 1448046 - RNA, 19 nt, Artificial Sequence
  Description of Artificial Sequence: Synthetic oligonucleotide
cucagauugacaggcugcc

SEQ ID NO: 1448047 - RNA, 19 nt, Artificial Sequence
  Description of Artificial Sequence: Synthetic oligonucleotide
uucagcuucgggcuauaau

SEQ ID NO: 1448048 - RNA, 19 nt, Artificial Sequence
  Description of Artificial Sequence: Synthetic oligonucleotide
cuacuuggugacacacagg

SEQ ID NO: 1448049 - RNA, 19 nt, Artificial Sequence
  Description of Artificial Sequence: Synthetic oligonucleotide
aguccuaaauuaauauaca

SEQ ID NO: 1448050 - RNA, 19 nt, Artificial Sequence
  Description of Artificial Sequence: Synthetic oligonucleotide
ccuacuuggugacacacag

SEQ ID NO: 1448051 - RNA, 19 nt, Artificial Sequence
  Description of Artificial Sequence: Synthetic oligonucleotide
caguguccuauuugcagag

SEQ ID NO: 1448052 - RNA, 19 nt, Artificial Sequence
  Description of Artificial Sequence: Synthetic oligonucleotide
ggcuauaauuccuauuaca

SEQ ID NO: 1448053 - RNA, 19 nt, Artificial Sequence
  Description of Artificial Sequence: Synthetic oligonucleotide
uaaugucgcuucucaggcc

SEQ ID NO: 1448054 - RNA, 19 nt, Artificial Sequence
  Description of Artificial Sequence: Synthetic oligonucleotide
acgaaacuaacuuccucau

SEQ ID NO: 1448055 - RNA, 19 nt, Artificial Sequence
  Description of Artificial Sequence: Synthetic oligonucleotide
aauuccuauuacacuagua

SEQ ID NO: 1448056 - RNA, 19 nt, Artificial Sequence
  Description of Artificial Sequence: Synthetic oligonucleotide
uauguugccaucggacggu

SEQ ID NO: 1448057 - RNA, 19 nt, Artificial Sequence
  Description of Artificial Sequence: Synthetic oligonucleotide
ccaaccucauagcaggugg

SEQ ID NO: 1448058 - RNA, 19 nt, Artificial Sequence
  Description of Artificial Sequence: Synthetic oligonucleotide
acucaaaauaaugucgcuu

SEQ ID NO: 1448059 - RNA, 19 nt, Artificial Sequence
  Description of Artificial Sequence: Synthetic oligonucleotide
augacccuaaaggaaauau

SEQ ID NO: 1448060 - RNA, 19 nt, Artificial Sequence
  Description of Artificial Sequence: Synthetic oligonucleotide
uacacuaguagggcaaaau

SEQ ID NO: 1448061 - RNA, 19 nt, Artificial Sequence
  Description of Artificial Sequence: Synthetic oligonucleotide
ucgcuacagguucauuucu

SEQ ID NO: 1448062 - RNA, 19 nt, Artificial Sequence
  Description of Artificial Sequence: Synthetic oligonucleotide
agcgccaacuagaccaggc

SEQ ID NO: 1448063 - RNA, 19 nt, Artificial Sequence
  Description of Artificial Sequence: Synthetic oligonucleotide
ggcucuaacugguacugag

SEQ ID NO: 1448064 - RNA, 19 nt, Artificial Sequence
  Description of Artificial Sequence: Synthetic oligonucleotide
gagucccaaccucauagca

SEQ ID NO: 1448065 - RNA, 19 nt, Artificial Sequence
  Description of Artificial Sequence: Synthetic oligonucleotide
augcccuaaauaaacacaa

SEQ ID NO: 1448066 - RNA, 19 nt, Artificial Sequence
  Description of Artificial Sequence: Synthetic oligonucleotide
aguguccuauuugcagagc

SEQ ID NO: 1448067 - RNA, 19 nt, Artificial Sequence
  Description of Artificial Sequence: Synthetic oligonucleotide
uaacuacaucauucaguca

SEQ ID NO: 1448068 - RNA, 19 nt, Artificial Sequence
  Description of Artificial Sequence: Synthetic oligonucleotide
uccaagccugaucuuuacu

SEQ ID NO: 1448069 - RNA, 19 nt, Artificial Sequence
  Description of Artificial Sequence: Synthetic oligonucleotide
agucccaaccucauagcag

SEQ ID NO: 1448070 - RNA, 19 nt, Artificial Sequence
  Description of Artificial Sequence: Synthetic oligonucleotide
accgaagcauuucauuaaa

SEQ ID NO: 1448071 - RNA, 19 nt, Artificial Sequence
  Description of Artificial Sequence: Synthetic oligonucleotide
gguguucagaaaugguaug

SEQ ID NO: 1448072 - RNA, 19 nt, Artificial Sequence
  Description of Artificial Sequence: Synthetic oligonucleotide
cccaaauuagucucccugc

SEQ ID NO: 1448073 - RNA, 19 nt, Artificial Sequence
  Description of Artificial Sequence: Synthetic oligonucleotide
cagcuucgggcuauaauuc

SEQ ID NO: 1448074 - RNA, 19 nt, Artificial Sequence
  Description of Artificial Sequence: Synthetic oligonucleotide
ccuauuacacuaguagggc

SEQ ID NO: 1448075 - RNA, 19 nt, Artificial Sequence
  Description of Artificial Sequence: Synthetic oligonucleotide
ugcccuaaauaaacacaaa

SEQ ID NO: 1448076 - RNA, 19 nt, Artificial Sequence
  Description of Artificial Sequence: Synthetic oligonucleotide
aaaaugguuucugcccuuu

SEQ ID NO: 1448077 - RNA, 19 nt, Artificial Sequence
  Description of Artificial Sequence: Synthetic oligonucleotide
ugaagucacugcuguccug

SEQ ID NO: 1448078 - RNA, 19 nt, Artificial Sequence
  Description of Artificial Sequence: Synthetic oligonucleotide
caugcacucuaugagaaaa

SEQ ID NO: 1448079 - RNA, 19 nt, Artificial Sequence
  Description of Artificial Sequence: Synthetic oligonucleotide
cauaaucgcuacagguuca

SEQ ID NO: 1448080 - RNA, 19 nt, Artificial Sequence
  Description of Artificial Sequence: Synthetic oligonucleotide
agaacaacgggcagaguaa

SEQ ID NO: 1448081 - RNA, 19 nt, Artificial Sequence
  Description of Artificial Sequence: Synthetic oligonucleotide
ggaagucugcuaguaacag

SEQ ID NO: 1448082 - RNA, 19 nt, Artificial Sequence
  Description of Artificial Sequence: Synthetic oligonucleotide
ccaugugacacuggcaugg

SEQ ID NO: 1448083 - RNA, 19 nt, Artificial Sequence
  Description of Artificial Sequence: Synthetic oligonucleotide
aggugaguuguuuguagua

SEQ ID NO: 1448084 - RNA, 19 nt, Artificial Sequence
  Description of Artificial Sequence: Synthetic oligonucleotide
ugaggccuauggaugcccu

SEQ ID NO: 1448085 - RNA, 19 nt, Artificial Sequence
  Description of Artificial Sequence: Synthetic oligonucleotide
ucgcugaauuccuucuuau

SEQ ID NO: 1448086 - RNA, 19 nt, Artificial Sequence
  Description of Artificial Sequence: Synthetic oligonucleotide
cagccuauacuucuaaaua

SEQ ID NO: 1448087 - RNA, 19 nt, Artificial Sequence
  Description of Artificial Sequence: Synthetic oligonucleotide
gucagaguugccugcuuca

SEQ ID NO: 1448088 - RNA, 19 nt, Artificial Sequence
  Description of Artificial Sequence: Synthetic oligonucleotide
aggauagaacacagcagug

SEQ ID NO: 1448089 - RNA, 19 nt, Artificial Sequence
  Description of Artificial Sequence: Synthetic oligonucleotide
cagaaaugguauguccaug

SEQ ID NO: 1448090 - RNA, 19 nt, Artificial Sequence
  Description of Artificial Sequence: Synthetic oligonucleotide
aagcgaaaggcagcaugca

SEQ ID NO: 1448091 - RNA, 19 nt, Artificial Sequence
  Description of Artificial Sequence: Synthetic oligonucleotide
caucggacgguguucagaa

SEQ ID NO: 1448092 - RNA, 19 nt, Artificial Sequence
  Description of Artificial Sequence: Synthetic oligonucleotide
uggcaugauaauggaauua

SEQ ID NO: 1448093 - RNA, 19 nt, Artificial Sequence
  Description of Artificial Sequence: Synthetic oligonucleotide
ugccuacuuggugacacac

SEQ ID NO: 1448094 - RNA, 19 nt, Artificial Sequence
  Description of Artificial Sequence: Synthetic oligonucleotide
acgguguucagaaauggua

SEQ ID NO: 1448095 - RNA, 19 nt, Artificial Sequence
  Description of Artificial Sequence: Synthetic oligonucleotide
augucggcuggcaugauaa

SEQ ID NO: 1448096 - RNA, 19 nt, Artificial Sequence
  Description of Artificial Sequence: Synthetic oligonucleotide
acccuaaaggaaauauccu

SEQ ID NO: 1448097 - RNA, 19 nt, Artificial Sequence
  Description of Artificial Sequence: Synthetic oligonucleotide
caggcucuaacugguacug

SEQ ID NO: 1448098 - RNA, 19 nt, Artificial Sequence
  Description of Artificial Sequence: Synthetic oligonucleotide
uaacugguacugaguccca

SEQ ID NO: 1448099 - RNA, 19 nt, Artificial Sequence
  Description of Artificial Sequence: Synthetic oligonucleotide
gauugggguuucacugaag

SEQ ID NO: 1448100 - RNA, 19 nt, Artificial Sequence
  Description of Artificial Sequence: Synthetic oligonucleotide
ugcuaguaacagguguuaa

SEQ ID NO: 1448101 - RNA, 19 nt, Artificial Sequence
  Description of Artificial Sequence: Synthetic oligonucleotide
ggacgguguucagaaaugg

SEQ ID NO: 1448102 - RNA, 19 nt, Artificial Sequence
  Description of Artificial Sequence: Synthetic oligonucleotide
ugaggcggaugcuggcuga

SEQ ID NO: 1448103 - RNA, 19 nt, Artificial Sequence
  Description of Artificial Sequence: Synthetic oligonucleotide
auggauggaugcccacaug

SEQ ID NO: 1448104 - RNA, 19 nt, Artificial Sequence
  Description of Artificial Sequence: Synthetic oligonucleotide
caauggcagccuauacuuc

SEQ ID NO: 1448105 - RNA, 19 nt, Artificial Sequence
  Description of Artificial Sequence: Synthetic oligonucleotide
uucgggcuauaauuccuau

SEQ ID NO: 1448106 - RNA, 19 nt, Artificial Sequence
  Description of Artificial Sequence: Synthetic oligonucleotide
gggacaagaaguuucacuu

SEQ ID NO: 1448107 - RNA, 19 nt, Artificial Sequence
  Description of Artificial Sequence: Synthetic oligonucleotide
gaagacuuucugaggaaua

SEQ ID NO: 1448108 - RNA, 19 nt, Artificial Sequence
  Description of Artificial Sequence: Synthetic oligonucleotide
ugucgcuucucaggccccg

SEQ ID NO: 1448109 - RNA, 19 nt, Artificial Sequence
  Description of Artificial Sequence: Synthetic oligonucleotide
auuacacuaguagggcaaa

SEQ ID NO: 1448110 - RNA, 19 nt, Artificial Sequence
  Description of Artificial Sequence: Synthetic oligonucleotide
gaagucacugcuguccugu

SEQ ID NO: 1448111 - RNA, 19 nt, Artificial Sequence
  Description of Artificial Sequence: Synthetic oligonucleotide
ggcaugauaauggaauuaa

SEQ ID NO: 1448112 - RNA, 19 nt, Artificial Sequence
  Description of Artificial Sequence: Synthetic oligonucleotide
guaauacuccucuuugcau

SEQ ID NO: 1448113 - RNA, 19 nt, Artificial Sequence
  Description of Artificial Sequence: Synthetic oligonucleotide
gugagcuaauccauuaugu

SEQ ID NO: 1448114 - RNA, 19 nt, Artificial Sequence
  Description of Artificial Sequence: Synthetic oligonucleotide
cuaugagacauuucagaau

SEQ ID NO: 1448115 - RNA, 19 nt, Artificial Sequence
  Description of Artificial Sequence: Synthetic oligonucleotide
caacgggcagaguaaacaa

SEQ ID NO: 1448116 - RNA, 19 nt, Artificial Sequence
  Description of Artificial Sequence: Synthetic oligonucleotide
cagauugacaggcugccua

SEQ ID NO: 1448117 - RNA, 19 nt, Artificial Sequence
  Description of Artificial Sequence: Synthetic oligonucleotide
ugccaucggacgguguuca

SEQ ID NO: 1448118 - RNA, 19 nt, Artificial Sequence
  Description of Artificial Sequence: Synthetic oligonucleotide
cagguucauuucuugaucu

SEQ ID NO: 1448119 - RNA, 19 nt, Artificial Sequence
  Description of Artificial Sequence: Synthetic oligonucleotide
agguguuaagaggccaaca

SEQ ID NO: 1448120 - RNA, 19 nt, Artificial Sequence
  Description of Artificial Sequence: Synthetic oligonucleotide
cauuuacauaaucgcuaca

SEQ ID NO: 1448121 - RNA, 19 nt, Artificial Sequence
  Description of Artificial Sequence: Synthetic oligonucleotide
ucgggcuauaauuccuauu

SEQ ID NO: 1448122 - RNA, 19 nt, Artificial Sequence
  Description of Artificial Sequence: Synthetic oligonucleotide
ccauaccauggauggaugc

SEQ ID NO: 1448123 - RNA, 19 nt, Artificial Sequence
  Description of Artificial Sequence: Synthetic oligonucleotide
cugaggcggaugcuggcug

SEQ ID NO: 1448124 - RNA, 19 nt, Artificial Sequence
  Description of Artificial Sequence: Synthetic oligonucleotide
auaaucgcuacagguucau

SEQ ID NO: 1448125 - RNA, 19 nt, Artificial Sequence
  Description of Artificial Sequence: Synthetic oligonucleotide
gaaauauccuugaggccua

SEQ ID NO: 1448126 - RNA, 19 nt, Artificial Sequence
  Description of Artificial Sequence: Synthetic oligonucleotide
uuacacuaguagggcaaaa

SEQ ID NO: 1448127 - RNA, 19 nt, Artificial Sequence
  Description of Artificial Sequence: Synthetic oligonucleotide
cugaggaauaugacccuaa

SEQ ID NO: 1448128 - RNA, 19 nt, Artificial Sequence
  Description of Artificial Sequence: Synthetic oligonucleotide
aacugguacugagucccaa

SEQ ID NO: 1448129 - RNA, 19 nt, Artificial Sequence
  Description of Artificial Sequence: Synthetic oligonucleotide
gguguuaagaggccaacau

SEQ ID NO: 1448130 - RNA, 19 nt, Artificial Sequence
  Description of Artificial Sequence: Synthetic oligonucleotide
ccugaucuuuacuagacua

SEQ ID NO: 1448131 - RNA, 19 nt, Artificial Sequence
  Description of Artificial Sequence: Synthetic oligonucleotide
ucucugcuggaggugaguu

SEQ ID NO: 1448132 - RNA, 19 nt, Artificial Sequence
  Description of Artificial Sequence: Synthetic oligonucleotide
gggcuauaauuccuauuac

SEQ ID NO: 1448133 - RNA, 19 nt, Artificial Sequence
  Description of Artificial Sequence: Synthetic oligonucleotide
gaacaacgggcagaguaaa

SEQ ID NO: 1448134 - RNA, 19 nt, Artificial Sequence
  Description of Artificial Sequence: Synthetic oligonucleotide
ucaccauaccauggaugga

SEQ ID NO: 1448135 - RNA, 19 nt, Artificial Sequence
  Description of Artificial Sequence: Synthetic oligonucleotide
gcauggcacaccguguggg

SEQ ID NO: 1448136 - RNA, 19 nt, Artificial Sequence
  Description of Artificial Sequence: Synthetic oligonucleotide
auaugacccuaaaggaaau

SEQ ID NO: 1448137 - RNA, 19 nt, Artificial Sequence
  Description of Artificial Sequence: Synthetic oligonucleotide
gucgcugaauuccuucuua

SEQ ID NO: 1448138 - RNA, 19 nt, Artificial Sequence
  Description of Artificial Sequence: Synthetic oligonucleotide
ucccaaccucauagcaggu

SEQ ID NO: 1448139 - RNA, 19 nt, Artificial Sequence
  Description of Artificial Sequence: Synthetic oligonucleotide
gggcagaguaaacaagcga

SEQ ID NO: 1448140 - RNA, 19 nt, Artificial Sequence
  Description of Artificial Sequence: Synthetic oligonucleotide
ggcauggcacaccgugugg

SEQ ID NO: 1448141 - RNA, 19 nt, Artificial Sequence
  Description of Artificial Sequence: Synthetic oligonucleotide
ccuaacuacaucauucagu

SEQ ID NO: 1448142 - RNA, 19 nt, Artificial Sequence
  Description of Artificial Sequence: Synthetic oligonucleotide
aggccaacauguucauuua

SEQ ID NO: 1448143 - RNA, 19 nt, Artificial Sequence
  Description of Artificial Sequence: Synthetic oligonucleotide
gcaaaaugguuucugcccu

SEQ ID NO: 1448144 - RNA, 19 nt, Artificial Sequence
  Description of Artificial Sequence: Synthetic oligonucleotide
acagguguuaagaggccaa

SEQ ID NO: 1448145 - RNA, 19 nt, Artificial Sequence
  Description of Artificial Sequence: Synthetic oligonucleotide
cagagauugggguuucacu

SEQ ID NO: 1448146 - RNA, 19 nt, Artificial Sequence
  Description of Artificial Sequence: Synthetic oligonucleotide
ggugaguuguuuguaguaa

SEQ ID NO: 1448147 - RNA, 19 nt, Artificial Sequence
  Description of Artificial Sequence: Synthetic oligonucleotide
cagguguuaagaggccaac

SEQ ID NO: 1448148 - RNA, 19 nt, Artificial Sequence
  Description of Artificial Sequence: Synthetic oligonucleotide
aaggcagcaugcacucuau

SEQ ID NO: 1448149 - RNA, 19 nt, Artificial Sequence
  Description of Artificial Sequence: Synthetic oligonucleotide
augucgcuucucaggcccc

SEQ ID NO: 1448150 - RNA, 19 nt, Artificial Sequence
  Description of Artificial Sequence: Synthetic oligonucleotide
gggaaguaagcacacaguu

SEQ ID NO: 1448151 - RNA, 19 nt, Artificial Sequence
  Description of Artificial Sequence: Synthetic oligonucleotide
cuuauggcuuuuggacuuc

SEQ ID NO: 1448152 - RNA, 19 nt, Artificial Sequence
  Description of Artificial Sequence: Synthetic oligonucleotide
cuucgggcuauaauuccua

SEQ ID NO: 1448153 - RNA, 19 nt, Artificial Sequence
  Description of Artificial Sequence: Synthetic oligonucleotide
gcuggcaugauaauggaau

SEQ ID NO: 1448154 - RNA, 19 nt, Artificial Sequence
  Description of Artificial Sequence: Synthetic oligonucleotide
aggccuauggaugcccuaa

SEQ ID NO: 1448155 - RNA, 19 nt, Artificial Sequence
  Description of Artificial Sequence: Synthetic oligonucleotide
uuucagguccaagccugau

SEQ ID NO: 1448156 - RNA, 19 nt, Artificial Sequence
  Description of Artificial Sequence: Synthetic oligonucleotide
agucugcuaguaacaggug

SEQ ID NO: 1448157 - RNA, 19 nt, Artificial Sequence
  Description of Artificial Sequence: Synthetic oligonucleotide
ccaagccugaucuuuacua

SEQ ID NO: 1448158 - RNA, 19 nt, Artificial Sequence
  Description of Artificial Sequence: Synthetic oligonucleotide
ugccuggcgugcucagugu

SEQ ID NO: 1448159 - RNA, 19 nt, Artificial Sequence
  Description of Artificial Sequence: Synthetic oligonucleotide
acccgccauaucaacucuc

SEQ ID NO: 1448160 - RNA, 19 nt, Artificial Sequence
  Description of Artificial Sequence: Synthetic oligonucleotide
ccaaauuagucucccugca

SEQ ID NO: 1448161 - RNA, 19 nt, Artificial Sequence
  Description of Artificial Sequence: Synthetic oligonucleotide
uugccaucggacgguguuc

SEQ ID NO: 1448162 - RNA, 19 nt, Artificial Sequence
  Description of Artificial Sequence: Synthetic oligonucleotide
uggggcagcuucucagauu

SEQ ID NO: 1448163 - RNA, 19 nt, Artificial Sequence
  Description of Artificial Sequence: Synthetic oligonucleotide
ggcggaugcuggcugaaga

SEQ ID NO: 1448164 - RNA, 19 nt, Artificial Sequence
  Description of Artificial Sequence: Synthetic oligonucleotide
ggccccgucgcugaauucc

SEQ ID NO: 1448165 - RNA, 19 nt, Artificial Sequence
  Description of Artificial Sequence: Synthetic oligonucleotide
gcagccuauacuucuaaau

SEQ ID NO: 1448166 - RNA, 19 nt, Artificial Sequence
  Description of Artificial Sequence: Synthetic oligonucleotide
ucgcuucucaggccccguc

SEQ ID NO: 1448167 - RNA, 19 nt, Artificial Sequence
  Description of Artificial Sequence: Synthetic oligonucleotide
aucaacucucagggacaag

SEQ ID NO: 1448168 - RNA, 19 nt, Artificial Sequence
  Description of Artificial Sequence: Synthetic oligonucleotide
ggacaagaaguuucacuua

SEQ ID NO: 1448169 - RNA, 19 nt, Artificial Sequence
  Description of Artificial Sequence: Synthetic oligonucleotide
ugucggcuggcaugauaau

SEQ ID NO: 1448170 - RNA, 19 nt, Artificial Sequence
  Description of Artificial Sequence: Synthetic oligonucleotide
gguauguccaugugacacu

SEQ ID NO: 1448171 - RNA, 19 nt, Artificial Sequence
  Description of Artificial Sequence: Synthetic oligonucleotide
augagacauuucagaauau

SEQ ID NO: 1448172 - RNA, 19 nt, Artificial Sequence
  Description of Artificial Sequence: Synthetic oligonucleotide
ccuggcgugcucagugucc

SEQ ID NO: 1448173 - RNA, 19 nt, Artificial Sequence
  Description of Artificial Sequence: Synthetic oligonucleotide
agucucccugcauucccuu

SEQ ID NO: 1448174 - RNA, 19 nt, Artificial Sequence
  Description of Artificial Sequence: Synthetic oligonucleotide
gacgguguucagaaauggu

SEQ ID NO: 1448175 - RNA, 19 nt, Artificial Sequence
  Description of Artificial Sequence: Synthetic oligonucleotide
cgggcuauaauuccuauua

SEQ ID NO: 1448176 - RNA, 19 nt, Artificial Sequence
  Description of Artificial Sequence: Synthetic oligonucleotide
uaaucgcuacagguucauu

SEQ ID NO: 1448177 - RNA, 19 nt, Artificial Sequence
  Description of Artificial Sequence: Synthetic oligonucleotide
gggaaguguuccacagcag

SEQ ID NO: 1448178 - RNA, 19 nt, Artificial Sequence
  Description of Artificial Sequence: Synthetic oligonucleotide
aucggacgguguucagaaa

SEQ ID NO: 1448179 - RNA, 19 nt, Artificial Sequence
  Description of Artificial Sequence: Synthetic oligonucleotide
cuggcaugauaauggaauu

SEQ ID NO: 1448180 - RNA, 19 nt, Artificial Sequence
  Description of Artificial Sequence: Synthetic oligonucleotide
aggcucuaacugguacuga

SEQ ID NO: 1448181 - RNA, 19 nt, Artificial Sequence
  Description of Artificial Sequence: Synthetic oligonucleotide
cugcuaguaacagguguua

SEQ ID NO: 1448182 - RNA, 19 nt, Artificial Sequence
  Description of Artificial Sequence: Synthetic oligonucleotide
gauugacaggcugccuacu

SEQ ID NO: 1448183 - RNA, 19 nt, Artificial Sequence
  Description of Artificial Sequence: Synthetic oligonucleotide
cacggacugccuggcgugc

SEQ ID NO: 1448184 - RNA, 19 nt, Artificial Sequence
  Description of Artificial Sequence: Synthetic oligonucleotide
aggcggaugcuggcugaag

SEQ ID NO: 1448185 - RNA, 19 nt, Artificial Sequence
  Description of Artificial Sequence: Synthetic oligonucleotide
ggcagccuauacuucuaaa

SEQ ID NO: 1448186 - RNA, 19 nt, Artificial Sequence
  Description of Artificial Sequence: Synthetic oligonucleotide
guuaagaggccaacauguu

SEQ ID NO: 1448187 - RNA, 19 nt, Artificial Sequence
  Description of Artificial Sequence: Synthetic oligonucleotide
agaguggcacggacugccu

SEQ ID NO: 1448188 - RNA, 19 nt, Artificial Sequence
  Description of Artificial Sequence: Synthetic oligonucleotide
cggacgguguucagaaaug

SEQ ID NO: 1448189 - RNA, 19 nt, Artificial Sequence
  Description of Artificial Sequence: Synthetic oligonucleotide
gucuccaacaagugaccuu

SEQ ID NO: 1448190 - RNA, 19 nt, Artificial Sequence
  Description of Artificial Sequence: Synthetic oligonucleotide
gcgccaacuagaccaggca

SEQ ID NO: 1448191 - RNA, 19 nt, Artificial Sequence
  Description of Artificial Sequence: Synthetic oligonucleotide
cagcgccaacuagaccagg

SEQ ID NO: 1448192 - RNA, 19 nt, Artificial Sequence
  Description of Artificial Sequence: Synthetic oligonucleotide
cccgucgcugaauuccuuc

SEQ ID NO: 1448193 - RNA, 19 nt, Artificial Sequence
  Description of Artificial Sequence: Synthetic oligonucleotide
cccgccauaucaacucuca

SEQ ID NO: 1448194 - RNA, 19 nt, Artificial Sequence
  Description of Artificial Sequence: Synthetic oligonucleotide
ccauaucaacucucaggga

SEQ ID NO: 1448195 - RNA, 19 nt, Artificial Sequence
  Description of Artificial Sequence: Synthetic oligonucleotide
cuggcauggcacaccgugu

SEQ ID NO: 1448196 - RNA, 19 nt, Artificial Sequence
  Description of Artificial Sequence: Synthetic oligonucleotide
caccguguggggaaguguu

SEQ ID NO: 1448197 - RNA, 19 nt, Artificial Sequence
  Description of Artificial Sequence: Synthetic oligonucleotide
ucaggccccgucgcugaau

SEQ ID NO: 1448198 - RNA, 19 nt, Artificial Sequence
  Description of Artificial Sequence: Synthetic oligonucleotide
ggaugcuggcugaagagau

SEQ ID NO: 1448199 - RNA, 19 nt, Artificial Sequence
  Description of Artificial Sequence: Synthetic oligonucleotide
agguuugcuuuaacaugua

SEQ ID NO: 1448200 - RNA, 19 nt, Artificial Sequence
  Description of Artificial Sequence: Synthetic oligonucleotide
ccgccauaucaacucucag

SEQ ID NO: 1448201 - RNA, 19 nt, Artificial Sequence
  Description of Artificial Sequence: Synthetic oligonucleotide
gcaugcacucuaugagaaa

SEQ ID NO: 1448202 - RNA, 19 nt, Artificial Sequence
  Description of Artificial Sequence: Synthetic oligonucleotide
gacuucagcuucgggcuau

SEQ ID NO: 1448203 - RNA, 19 nt, Artificial Sequence
  Description of Artificial Sequence: Synthetic oligonucleotide
cccaaccucauagcaggug

SEQ ID NO: 1448204 - RNA, 19 nt, Artificial Sequence
  Description of Artificial Sequence: Synthetic oligonucleotide
ggcacaccguguggggaag

SEQ ID NO: 1448205 - RNA, 19 nt, Artificial Sequence
  Description of Artificial Sequence: Synthetic oligonucleotide
ggagacugggagugguggu

SEQ ID NO: 1448206 - RNA, 19 nt, Artificial Sequence
  Description of Artificial Sequence: Synthetic oligonucleotide
auagcagguggggcagcuu

SEQ ID NO: 1448207 - RNA, 19 nt, Artificial Sequence
  Description of Artificial Sequence: Synthetic oligonucleotide
acggacugccuggcgugcu

SEQ ID NO: 1448208 - RNA, 19 nt, Artificial Sequence
  Description of Artificial Sequence: Synthetic oligonucleotide
gguccaagccugaucuuua

SEQ ID NO: 1448209 - RNA, 19 nt, Artificial Sequence
  Description of Artificial Sequence: Synthetic oligonucleotide
guggggcagcuucucagau

SEQ ID NO: 1448210 - RNA, 19 nt, Artificial Sequence
  Description of Artificial Sequence: Synthetic oligonucleotide
gcacugauugcuggucaga

SEQ ID NO: 1448211 - RNA, 19 nt, Artificial Sequence
  Description of Artificial Sequence: Synthetic oligonucleotide
gccaucggacgguguucag

SEQ ID NO: 1448212 - RNA, 19 nt, Artificial Sequence
  Description of Artificial Sequence: Synthetic oligonucleotide
gcuucgggcuauaauuccu

SEQ ID NO: 1448213 - RNA, 19 nt, Artificial Sequence
  Description of Artificial Sequence: Synthetic oligonucleotide
gccuacuuggugacacaca

SEQ ID NO: 1448214 - RNA, 19 nt, Artificial Sequence
  Description of Artificial Sequence: Synthetic oligonucleotide
ggccuauggaugcccuaaa

SEQ ID NO: 1448215 - RNA, 19 nt, Artificial Sequence
  Description of Artificial Sequence: Synthetic oligonucleotide
ggacuucagcuucgggcua

SEQ ID NO: 1448216 - RNA, 19 nt, Artificial Sequence
  Description of Artificial Sequence: Synthetic oligonucleotide
cacccgccauaucaacucu

SEQ ID NO: 1448217 - RNA, 19 nt, Artificial Sequence
  Description of Artificial Sequence: Synthetic oligonucleotide
ggaguuaguguaggagaau

SEQ ID NO: 1448218 - RNA, 19 nt, Artificial Sequence
  Description of Artificial Sequence: Synthetic oligonucleotide
ccaucggacgguguucaga

SEQ ID NO: 1448219 - RNA, 19 nt, Artificial Sequence
  Description of Artificial Sequence: Synthetic oligonucleotide
cgaaacuaacuuccucaua

SEQ ID NO: 1448220 - RNA, 19 nt, Artificial Sequence
  Description of Artificial Sequence: Synthetic oligonucleotide
cccacccgccauaucaacu

SEQ ID NO: 1448221 - RNA, 19 nt, Artificial Sequence
  Description of Artificial Sequence: Synthetic oligonucleotide
caggccccgucgcugaauu

SEQ ID NO: 1448222 - RNA, 19 nt, Artificial Sequence
  Description of Artificial Sequence: Synthetic oligonucleotide
ccgucgcugaauuccuucu

SEQ ID NO: 1448223 - RNA, 19 nt, Artificial Sequence
  Description of Artificial Sequence: Synthetic oligonucleotide
ccaccaauggcagccuaua

SEQ ID NO: 1448224 - RNA, 19 nt, Artificial Sequence
  Description of Artificial Sequence: Synthetic oligonucleotide
cucaggccccgucgcugaa

SEQ ID NO: 1448225 - RNA, 19 nt, Artificial Sequence
  Description of Artificial Sequence: Synthetic oligonucleotide
cacuggcauggcacaccgu

SEQ ID NO: 1448226 - RNA, 19 nt, Artificial Sequence
  Description of Artificial Sequence: Synthetic oligonucleotide
gccaccaauggcagccuau

SEQ ID NO: 1448227 - RNA, 19 nt, Artificial Sequence
  Description of Artificial Sequence: Synthetic oligonucleotide
ccugaggcggaugcuggcu

SEQ ID NO: 1448228 - RNA, 19 nt, Artificial Sequence
  Description of Artificial Sequence: Synthetic oligonucleotide
gccccgucgcugaauuccu

SEQ ID NO: 1448229 - RNA, 19 nt, Artificial Sequence
  Description of Artificial Sequence: Synthetic oligonucleotide
gcgugcucaguguccuauu

SEQ ID NO: 1448230 - RNA, 19 nt, Artificial Sequence
  Description of Artificial Sequence: Synthetic oligonucleotide
gcacaccguguggggaagu

SEQ ID NO: 1448231 - RNA, 19 nt, Artificial Sequence
  Description of Artificial Sequence: Synthetic oligonucleotide
ccccgucgcugaauuccuu

SEQ ID NO: 1448232 - RNA, 19 nt, Artificial Sequence
  Description of Artificial Sequence: Synthetic oligonucleotide
uacaauaucaccaagggca

SEQ ID NO: 1448233 - RNA, 19 nt, Artificial Sequence
  Description of Artificial Sequence: Synthetic oligonucleotide
aaucaaucaguccucagag

SEQ ID NO: 1448234 - RNA, 19 nt, Artificial Sequence
  Description of Artificial Sequence: Synthetic oligonucleotide
uauaguaggggacagaggu

SEQ ID NO: 1448235 - RNA, 19 nt, Artificial Sequence
  Description of Artificial Sequence: Synthetic oligonucleotide
uaaguuuucucccuuauga

SEQ ID NO: 1448236 - RNA, 19 nt, Artificial Sequence
  Description of Artificial Sequence: Synthetic oligonucleotide
auauauaggccccaacagc

SEQ ID NO: 1448237 - RNA, 19 nt, Artificial Sequence
  Description of Artificial Sequence: Synthetic oligonucleotide
uccguguaaacacagauga

SEQ ID NO: 1448238 - RNA, 19 nt, Artificial Sequence
  Description of Artificial Sequence: Synthetic oligonucleotide
aagucguccguguaaacac

SEQ ID NO: 1448239 - RNA, 19 nt, Artificial Sequence
  Description of Artificial Sequence: Synthetic oligonucleotide
uuauugaaaugccaggagc

SEQ ID NO: 1448240 - RNA, 19 nt, Artificial Sequence
  Description of Artificial Sequence: Synthetic oligonucleotide
aagcacuaaguuuucuccc

SEQ ID NO: 1448241 - RNA, 19 nt, Artificial Sequence
  Description of Artificial Sequence: Synthetic oligonucleotide
uauauaggccccaacagca

SEQ ID NO: 1448242 - RNA, 19 nt, Artificial Sequence
  Description of Artificial Sequence: Synthetic oligonucleotide
aaaucaaucaguccucaga

SEQ ID NO: 1448243 - RNA, 19 nt, Artificial Sequence
  Description of Artificial Sequence: Synthetic oligonucleotide
ucaaucaguccucagagcu

SEQ ID NO: 1448244 - RNA, 19 nt, Artificial Sequence
  Description of Artificial Sequence: Synthetic oligonucleotide
uauugaaaugccaggagca

SEQ ID NO: 1448245 - RNA, 19 nt, Artificial Sequence
  Description of Artificial Sequence: Synthetic oligonucleotide
ugcagguugaguauaguag

SEQ ID NO: 1448246 - RNA, 19 nt, Artificial Sequence
  Description of Artificial Sequence: Synthetic oligonucleotide
uuugguuccauccuucggc

SEQ ID NO: 1448247 - RNA, 19 nt, Artificial Sequence
  Description of Artificial Sequence: Synthetic oligonucleotide
agaaagaaggauccauccc

SEQ ID NO: 1448248 - RNA, 19 nt, Artificial Sequence
  Description of Artificial Sequence: Synthetic oligonucleotide
uuguaagugagcaagcacu

SEQ ID NO: 1448249 - RNA, 19 nt, Artificial Sequence
  Description of Artificial Sequence: Synthetic oligonucleotide
agagcuagggaguuuggcc

SEQ ID NO: 1448250 - RNA, 19 nt, Artificial Sequence
  Description of Artificial Sequence: Synthetic oligonucleotide
aaacggcucucauagagag

SEQ ID NO: 1448251 - RNA, 19 nt, Artificial Sequence
  Description of Artificial Sequence: Synthetic oligonucleotide
uguaguacgggcaucaaau

SEQ ID NO: 1448252 - RNA, 19 nt, Artificial Sequence
  Description of Artificial Sequence: Synthetic oligonucleotide
accgaguacaggcaguucc

SEQ ID NO: 1448253 - RNA, 19 nt, Artificial Sequence
  Description of Artificial Sequence: Synthetic oligonucleotide
gaagcacuaaguuuucucc

SEQ ID NO: 1448254 - RNA, 19 nt, Artificial Sequence
  Description of Artificial Sequence: Synthetic oligonucleotide
acggcccucaacuacagcc

SEQ ID NO: 1448255 - RNA, 19 nt, Artificial Sequence
  Description of Artificial Sequence: Synthetic oligonucleotide
gagaaguucaaagggaccg

SEQ ID NO: 1448256 - RNA, 19 nt, Artificial Sequence
  Description of Artificial Sequence: Synthetic oligonucleotide
auagcgaguaacuugagau

SEQ ID NO: 1448257 - RNA, 19 nt, Artificial Sequence
  Description of Artificial Sequence: Synthetic oligonucleotide
ugcaauccaacccacaggu

SEQ ID NO: 1448258 - RNA, 19 nt, Artificial Sequence
  Description of Artificial Sequence: Synthetic oligonucleotide
cuggguuuuauugaaaugc

SEQ ID NO: 1448259 - RNA, 19 nt, Artificial Sequence
  Description of Artificial Sequence: Synthetic oligonucleotide
aguacgggcaucaaauacc

SEQ ID NO: 1448260 - RNA, 19 nt, Artificial Sequence
  Description of Artificial Sequence: Synthetic oligonucleotide
uucucccuuaugaaggagg

SEQ ID NO: 1448261 - RNA, 19 nt, Artificial Sequence
  Description of Artificial Sequence: Synthetic oligonucleotide
agcaaaaguuguucucucc

SEQ ID NO: 1448262 - RNA, 19 nt, Artificial Sequence
  Description of Artificial Sequence: Synthetic oligonucleotide
ugccaagugaaucagccac

SEQ ID NO: 1448263 - RNA, 19 nt, Artificial Sequence
  Description of Artificial Sequence: Synthetic oligonucleotide
uaagugagcaagcacuuaa

SEQ ID NO: 1448264 - RNA, 19 nt, Artificial Sequence
  Description of Artificial Sequence: Synthetic oligonucleotide
aaucaguccucagagcuag

SEQ ID NO: 1448265 - RNA, 19 nt, Artificial Sequence
  Description of Artificial Sequence: Synthetic oligonucleotide
agcgaguaacuugagaugg

SEQ ID NO: 1448266 - RNA, 19 nt, Artificial Sequence
  Description of Artificial Sequence: Synthetic oligonucleotide
cuuaaugcccgcagcacgg

SEQ ID NO: 1448267 - RNA, 19 nt, Artificial Sequence
  Description of Artificial Sequence: Synthetic oligonucleotide
uggguuuuauugaaaugcc

SEQ ID NO: 1448268 - RNA, 19 nt, Artificial Sequence
  Description of Artificial Sequence: Synthetic oligonucleotide
cuuccaacuccucauuugg

SEQ ID NO: 1448269 - RNA, 19 nt, Artificial Sequence
  Description of Artificial Sequence: Synthetic oligonucleotide
uagagaguggggcaaaggu

SEQ ID NO: 1448270 - RNA, 19 nt, Artificial Sequence
  Description of Artificial Sequence: Synthetic oligonucleotide
agcacuuaaugcccgcagc

SEQ ID NO: 1448271 - RNA, 19 nt, Artificial Sequence
  Description of Artificial Sequence: Synthetic oligonucleotide
gugggugauagccagcugg

SEQ ID NO: 1448272 - RNA, 19 nt, Artificial Sequence
  Description of Artificial Sequence: Synthetic oligonucleotide
agguuuguaagugagcaag

SEQ ID NO: 1448273 - RNA, 19 nt, Artificial Sequence
  Description of Artificial Sequence: Synthetic oligonucleotide
uugaacauccccugaguug

SEQ ID NO: 1448274 - RNA, 19 nt, Artificial Sequence
  Description of Artificial Sequence: Synthetic oligonucleotide
aaaaguuguucucucccau

SEQ ID NO: 1448275 - RNA, 19 nt, Artificial Sequence
  Description of Artificial Sequence: Synthetic oligonucleotide
gagucaacccggcacagag

SEQ ID NO: 1448276 - RNA, 19 nt, Artificial Sequence
  Description of Artificial Sequence: Synthetic oligonucleotide
cacacgucaagguagucag

SEQ ID NO: 1448277 - RNA, 19 nt, Artificial Sequence
  Description of Artificial Sequence: Synthetic oligonucleotide
agugaaucagccacuugcc

SEQ ID NO: 1448278 - RNA, 19 nt, Artificial Sequence
  Description of Artificial Sequence: Synthetic oligonucleotide
guagacaucagguuuguaa

SEQ ID NO: 1448279 - RNA, 19 nt, Artificial Sequence
  Description of Artificial Sequence: Synthetic oligonucleotide
gagaguggggcaaaggugc

SEQ ID NO: 1448280 - RNA, 19 nt, Artificial Sequence
  Description of Artificial Sequence: Synthetic oligonucleotide
uaguacgggcaucaaauac

SEQ ID NO: 1448281 - RNA, 19 nt, Artificial Sequence
  Description of Artificial Sequence: Synthetic oligonucleotide
gucaacccggcacagagag

SEQ ID NO: 1448282 - RNA, 19 nt, Artificial Sequence
  Description of Artificial Sequence: Synthetic oligonucleotide
aagcacuuaaugcccgcag

SEQ ID NO: 1448283 - RNA, 19 nt, Artificial Sequence
  Description of Artificial Sequence: Synthetic oligonucleotide
agugagcaagcacuuaaug

SEQ ID NO: 1448284 - RNA, 19 nt, Artificial Sequence
  Description of Artificial Sequence: Synthetic oligonucleotide
uaugaguuugcagggagga

SEQ ID NO: 1448285 - RNA, 19 nt, Artificial Sequence
  Description of Artificial Sequence: Synthetic oligonucleotide
caucaaauaccagccaggg

SEQ ID NO: 1448286 - RNA, 19 nt, Artificial Sequence
  Description of Artificial Sequence: Synthetic oligonucleotide
uugaguauaguaggggaca

SEQ ID NO: 1448287 - RNA, 19 nt, Artificial Sequence
  Description of Artificial Sequence: Synthetic oligonucleotide
ggaaacggcucucauagag

SEQ ID NO: 1448288 - RNA, 19 nt, Artificial Sequence
  Description of Artificial Sequence: Synthetic oligonucleotide
aguucaaagggaccgagua

SEQ ID NO: 1448289 - RNA, 19 nt, Artificial Sequence
  Description of Artificial Sequence: Synthetic oligonucleotide
aggcccuauguccaugacc

SEQ ID NO: 1448290 - RNA, 19 nt, Artificial Sequence
  Description of Artificial Sequence: Synthetic oligonucleotide
uaacccugcccauaggcug

SEQ ID NO: 1448291 - RNA, 19 nt, Artificial Sequence
  Description of Artificial Sequence: Synthetic oligonucleotide
gacaucagguuuguaagug

SEQ ID NO: 1448292 - RNA, 19 nt, Artificial Sequence
  Description of Artificial Sequence: Synthetic oligonucleotide
uggccaaccaggcauccag

SEQ ID NO: 1448293 - RNA, 19 nt, Artificial Sequence
  Description of Artificial Sequence: Synthetic oligonucleotide
cuaugaguuugcagggagg

SEQ ID NO: 1448294 - RNA, 19 nt, Artificial Sequence
  Description of Artificial Sequence: Synthetic oligonucleotide
ucggccuucgcuccguucc

SEQ ID NO: 1448295 - RNA, 19 nt, Artificial Sequence
  Description of Artificial Sequence: Synthetic oligonucleotide
ucaaagggaccgaguacag

SEQ ID NO: 1448296 - RNA, 19 nt, Artificial Sequence
  Description of Artificial Sequence: Synthetic oligonucleotide
uccucucuuggccagacau

SEQ ID NO: 1448297 - RNA, 19 nt, Artificial Sequence
  Description of Artificial Sequence: Synthetic oligonucleotide
gguagguguagacaucagg

SEQ ID NO: 1448298 - RNA, 19 nt, Artificial Sequence
  Description of Artificial Sequence: Synthetic oligonucleotide
caggcacacgucaagguag

SEQ ID NO: 1448299 - RNA, 19 nt, Artificial Sequence
  Description of Artificial Sequence: Synthetic oligonucleotide
guugggugaacccgggucc

SEQ ID NO: 1448300 - RNA, 19 nt, Artificial Sequence
  Description of Artificial Sequence: Synthetic oligonucleotide
cugggcuacaauaucacca

SEQ ID NO: 1448301 - RNA, 19 nt, Artificial Sequence
  Description of Artificial Sequence: Synthetic oligonucleotide
uagcgaguaacuugagaug

SEQ ID NO: 1448302 - RNA, 19 nt, Artificial Sequence
  Description of Artificial Sequence: Synthetic oligonucleotide
gaagacggcccucaacuac

SEQ ID NO: 1448303 - RNA, 19 nt, Artificial Sequence
  Description of Artificial Sequence: Synthetic oligonucleotide
agcacuaaguuuucucccu

SEQ ID NO: 1448304 - RNA, 19 nt, Artificial Sequence
  Description of Artificial Sequence: Synthetic oligonucleotide
ugaguauaguaggggacag

SEQ ID NO: 1448305 - RNA, 19 nt, Artificial Sequence
  Description of Artificial Sequence: Synthetic oligonucleotide
ggcaucaaauaccagccag

SEQ ID NO: 1448306 - RNA, 19 nt, Artificial Sequence
  Description of Artificial Sequence: Synthetic oligonucleotide
cauaggcugcaauccaacc

SEQ ID NO: 1448307 - RNA, 19 nt, Artificial Sequence
  Description of Artificial Sequence: Synthetic oligonucleotide
gaaguucaaagggaccgag

SEQ ID NO: 1448308 - RNA, 19 nt, Artificial Sequence
  Description of Artificial Sequence: Synthetic oligonucleotide
gucaagguagucagggagg

SEQ ID NO: 1448309 - RNA, 19 nt, Artificial Sequence
  Description of Artificial Sequence: Synthetic oligonucleotide
ugggugauagccagcuggc

SEQ ID NO: 1448310 - RNA, 19 nt, Artificial Sequence
  Description of Artificial Sequence: Synthetic oligonucleotide
agggacuggaagcacuaag

SEQ ID NO: 1448311 - RNA, 19 nt, Artificial Sequence
  Description of Artificial Sequence: Synthetic oligonucleotide
agguugaguauaguagggg

SEQ ID NO: 1448312 - RNA, 19 nt, Artificial Sequence
  Description of Artificial Sequence: Synthetic oligonucleotide
ucaaagagggcggcugagg

SEQ ID NO: 1448313 - RNA, 19 nt, Artificial Sequence
  Description of Artificial Sequence: Synthetic oligonucleotide
aauccaacccacagguuca

SEQ ID NO: 1448314 - RNA, 19 nt, Artificial Sequence
  Description of Artificial Sequence: Synthetic oligonucleotide
uguucucucccauguggcc

SEQ ID NO: 1448315 - RNA, 19 nt, Artificial Sequence
  Description of Artificial Sequence: Synthetic oligonucleotide
cauccuucggccuucgcuc

SEQ ID NO: 1448316 - RNA, 19 nt, Artificial Sequence
  Description of Artificial Sequence: Synthetic oligonucleotide
augcccgcagcacggaugg

SEQ ID NO: 1448317 - RNA, 19 nt, Artificial Sequence
  Description of Artificial Sequence: Synthetic oligonucleotide
gaugcgggcuaugaguuug

SEQ ID NO: 1448318 - RNA, 19 nt, Artificial Sequence
  Description of Artificial Sequence: Synthetic oligonucleotide
gggagcagcaucaaagagg

SEQ ID NO: 1448319 - RNA, 19 nt, Artificial Sequence
  Description of Artificial Sequence: Synthetic oligonucleotide
agcacauggugggugauag

SEQ ID NO: 1448320 - RNA, 19 nt, Artificial Sequence
  Description of Artificial Sequence: Synthetic oligonucleotide
aguacaggcaguucccaaa

SEQ ID NO: 1448321 - RNA, 19 nt, Artificial Sequence
  Description of Artificial Sequence: Synthetic oligonucleotide
aguggcggggagcagcauc

SEQ ID NO: 1448322 - RNA, 19 nt, Artificial Sequence
  Description of Artificial Sequence: Synthetic oligonucleotide
acaauaucaccaagggcag

SEQ ID NO: 1448323 - RNA, 19 nt, Artificial Sequence
  Description of Artificial Sequence: Synthetic oligonucleotide
acuaaguuuucucccuuau

SEQ ID NO: 1448324 - RNA, 19 nt, Artificial Sequence
  Description of Artificial Sequence: Synthetic oligonucleotide
gaugaccuggcgcccaccc

SEQ ID NO: 1448325 - RNA, 19 nt, Artificial Sequence
  Description of Artificial Sequence: Synthetic oligonucleotide
acaucagguuuguaaguga

SEQ ID NO: 1448326 - RNA, 19 nt, Artificial Sequence
  Description of Artificial Sequence: Synthetic oligonucleotide
gaagucguccguguaaaca

SEQ ID NO: 1448327 - RNA, 19 nt, Artificial Sequence
  Description of Artificial Sequence: Synthetic oligonucleotide
guugaguauaguaggggac

SEQ ID NO: 1448328 - RNA, 19 nt, Artificial Sequence
  Description of Artificial Sequence: Synthetic oligonucleotide
caaaucaaucaguccucag

SEQ ID NO: 1448329 - RNA, 19 nt, Artificial Sequence
  Description of Artificial Sequence: Synthetic oligonucleotide
auagagaguggggcaaagg

SEQ ID NO: 1448330 - RNA, 19 nt, Artificial Sequence
  Description of Artificial Sequence: Synthetic oligonucleotide
uaacuugagauggugggua

SEQ ID NO: 1448331 - RNA, 19 nt, Artificial Sequence
  Description of Artificial Sequence: Synthetic oligonucleotide
ggcccuauguccaugaccc

SEQ ID NO: 1448332 - RNA, 19 nt, Artificial Sequence
  Description of Artificial Sequence: Synthetic oligonucleotide
gagcaagcacuuaaugccc

SEQ ID NO: 1448333 - RNA, 19 nt, Artificial Sequence
  Description of Artificial Sequence: Synthetic oligonucleotide
ugcacccaagcuguggucc

SEQ ID NO: 1448334 - RNA, 19 nt, Artificial Sequence
  Description of Artificial Sequence: Synthetic oligonucleotide
agcacucccaagcgguccg

SEQ ID NO: 1448335 - RNA, 19 nt, Artificial Sequence
  Description of Artificial Sequence: Synthetic oligonucleotide
aacauccccugaguugggg

SEQ ID NO: 1448336 - RNA, 19 nt, Artificial Sequence
  Description of Artificial Sequence: Synthetic oligonucleotide
gguguaacccugcccauag

SEQ ID NO: 1448337 - RNA, 19 nt, Artificial Sequence
  Description of Artificial Sequence: Synthetic oligonucleotide
gcuaugaguuugcagggag

SEQ ID NO: 1448338 - RNA, 19 nt, Artificial Sequence
  Description of Artificial Sequence: Synthetic oligonucleotide
ggugccagcgguuggcucg

SEQ ID NO: 1448339 - RNA, 19 nt, Artificial Sequence
  Description of Artificial Sequence: Synthetic oligonucleotide
acuaggucaguucuacauu

SEQ ID NO: 1448340 - RNA, 19 nt, Artificial Sequence
  Description of Artificial Sequence: Synthetic oligonucleotide
gguugaguauaguagggga

SEQ ID NO: 1448341 - RNA, 19 nt, Artificial Sequence
  Description of Artificial Sequence: Synthetic oligonucleotide
gccagacauauauaggccc

SEQ ID NO: 1448342 - RNA, 19 nt, Artificial Sequence
  Description of Artificial Sequence: Synthetic oligonucleotide
cucagagcuagggaguuug

SEQ ID NO: 1448343 - RNA, 19 nt, Artificial Sequence
  Description of Artificial Sequence: Synthetic oligonucleotide
agggaccgaguacaggcag

SEQ ID NO: 1448344 - RNA, 19 nt, Artificial Sequence
  Description of Artificial Sequence: Synthetic oligonucleotide
gagcaaaaguuguucucuc

SEQ ID NO: 1448345 - RNA, 19 nt, Artificial Sequence
  Description of Artificial Sequence: Synthetic oligonucleotide
aagacggcccucaacuaca

SEQ ID NO: 1448346 - RNA, 19 nt, Artificial Sequence
  Description of Artificial Sequence: Synthetic oligonucleotide
uuccaacuccucauuuggu

SEQ ID NO: 1448347 - RNA, 19 nt, Artificial Sequence
  Description of Artificial Sequence: Synthetic oligonucleotide
augcagguugaguauagua

SEQ ID NO: 1448348 - RNA, 19 nt, Artificial Sequence
  Description of Artificial Sequence: Synthetic oligonucleotide
ugaccuggcgcccacccuc

SEQ ID NO: 1448349 - RNA, 19 nt, Artificial Sequence
  Description of Artificial Sequence: Synthetic oligonucleotide
aaugcccgcagcacggaug

SEQ ID NO: 1448350 - RNA, 19 nt, Artificial Sequence
  Description of Artificial Sequence: Synthetic oligonucleotide
guuuguaagugagcaagca

SEQ ID NO: 1448351 - RNA, 19 nt, Artificial Sequence
  Description of Artificial Sequence: Synthetic oligonucleotide
guucuacauuguuggcacg

SEQ ID NO: 1448352 - RNA, 19 nt, Artificial Sequence
  Description of Artificial Sequence: Synthetic oligonucleotide
aguucccaaaucaaucagu

SEQ ID NO: 1448353 - RNA, 19 nt, Artificial Sequence
  Description of Artificial Sequence: Synthetic oligonucleotide
aguccuguaggggcccugc

SEQ ID NO: 1448354 - RNA, 19 nt, Artificial Sequence
  Description of Artificial Sequence: Synthetic oligonucleotide
cuucgcuccguuccgcgcc

SEQ ID NO: 1448355 - RNA, 19 nt, Artificial Sequence
  Description of Artificial Sequence: Synthetic oligonucleotide
cucaacuacagcccuggca

SEQ ID NO: 1448356 - RNA, 19 nt, Artificial Sequence
  Description of Artificial Sequence: Synthetic oligonucleotide
ccaggcaugguccagcuug

SEQ ID NO: 1448357 - RNA, 19 nt, Artificial Sequence
  Description of Artificial Sequence: Synthetic oligonucleotide
ucccaagcgguccgugaag

SEQ ID NO: 1448358 - RNA, 19 nt, Artificial Sequence
  Description of Artificial Sequence: Synthetic oligonucleotide
uaccuggcgugaugggccg

SEQ ID NO: 1448359 - RNA, 19 nt, Artificial Sequence
  Description of Artificial Sequence: Synthetic oligonucleotide
gagcuagggaguuuggccu

SEQ ID NO: 1448360 - RNA, 19 nt, Artificial Sequence
  Description of Artificial Sequence: Synthetic oligonucleotide
aaguucaaagggaccgagu

SEQ ID NO: 1448361 - RNA, 19 nt, Artificial Sequence
  Description of Artificial Sequence: Synthetic oligonucleotide
cauagcgaguaacuugaga

SEQ ID NO: 1448362 - RNA, 19 nt, Artificial Sequence
  Description of Artificial Sequence: Synthetic oligonucleotide
guccguguaaacacagaug

SEQ ID NO: 1448363 - RNA, 19 nt, Artificial Sequence
  Description of Artificial Sequence: Synthetic oligonucleotide
uccgugaagucguccgugu

SEQ ID NO: 1448364 - RNA, 19 nt, Artificial Sequence
  Description of Artificial Sequence: Synthetic oligonucleotide
cuacauuguuggcacgguc

SEQ ID NO: 1448365 - RNA, 19 nt, Artificial Sequence
  Description of Artificial Sequence: Synthetic oligonucleotide
gcuggagucaacccggcac

SEQ ID NO: 1448366 - RNA, 19 nt, Artificial Sequence
  Description of Artificial Sequence: Synthetic oligonucleotide
cuccguuccgcgccaaccc

SEQ ID NO: 1448367 - RNA, 19 nt, Artificial Sequence
  Description of Artificial Sequence: Synthetic oligonucleotide
aucaccaagggcagggacu

SEQ ID NO: 1448368 - RNA, 19 nt, Artificial Sequence
  Description of Artificial Sequence: Synthetic oligonucleotide
aucugcacccaagcugugg

SEQ ID NO: 1448369 - RNA, 19 nt, Artificial Sequence
  Description of Artificial Sequence: Synthetic oligonucleotide
ugaagucguccguguaaac

SEQ ID NO: 1448370 - RNA, 19 nt, Artificial Sequence
  Description of Artificial Sequence: Synthetic oligonucleotide
aagugagcaagcacuuaau

SEQ ID NO: 1448371 - RNA, 19 nt, Artificial Sequence
  Description of Artificial Sequence: Synthetic oligonucleotide
gcuggguuuuauugaaaug

SEQ ID NO: 1448372 - RNA, 19 nt, Artificial Sequence
  Description of Artificial Sequence: Synthetic oligonucleotide
ucguccguguaaacacaga

SEQ ID NO: 1448373 - RNA, 19 nt, Artificial Sequence
  Description of Artificial Sequence: Synthetic oligonucleotide
guacgggcaucaaauacca

SEQ ID NO: 1448374 - RNA, 19 nt, Artificial Sequence
  Description of Artificial Sequence: Synthetic oligonucleotide
aucaaagagggcggcugag

SEQ ID NO: 1448375 - RNA, 19 nt, Artificial Sequence
  Description of Artificial Sequence: Synthetic oligonucleotide
ugaagacggcccucaacua

SEQ ID NO: 1448376 - RNA, 19 nt, Artificial Sequence
  Description of Artificial Sequence: Synthetic oligonucleotide
agguguaguacgggcauca

SEQ ID NO: 1448377 - RNA, 19 nt, Artificial Sequence
  Description of Artificial Sequence: Synthetic oligonucleotide
acagacccaagcuggguuu

SEQ ID NO: 1448378 - RNA, 19 nt, Artificial Sequence
  Description of Artificial Sequence: Synthetic oligonucleotide
ggcucucauagagaguggg

SEQ ID NO: 1448379 - RNA, 19 nt, Artificial Sequence
  Description of Artificial Sequence: Synthetic oligonucleotide
uccguuccgcgccaaccca

SEQ ID NO: 1448380 - RNA, 19 nt, Artificial Sequence
  Description of Artificial Sequence: Synthetic oligonucleotide
cuccagcacucccaagcgg

SEQ ID NO: 1448381 - RNA, 19 nt, Artificial Sequence
  Description of Artificial Sequence: Synthetic oligonucleotide
cauagagaguggggcaaag

SEQ ID NO: 1448382 - RNA, 19 nt, Artificial Sequence
  Description of Artificial Sequence: Synthetic oligonucleotide
gccaacccaacuucgggcc

SEQ ID NO: 1448383 - RNA, 19 nt, Artificial Sequence
  Description of Artificial Sequence: Synthetic oligonucleotide
uuccgcgccaacccaacuu

SEQ ID NO: 1448384 - RNA, 19 nt, Artificial Sequence
  Description of Artificial Sequence: Synthetic oligonucleotide
gucguccguguaaacacag

SEQ ID NO: 1448385 - RNA, 19 nt, Artificial Sequence
  Description of Artificial Sequence: Synthetic oligonucleotide
gcuggcgcaggguaccugg

SEQ ID NO: 1448386 - RNA, 19 nt, Artificial Sequence
  Description of Artificial Sequence: Synthetic oligonucleotide
caagugaaucagccacuug

SEQ ID NO: 1448387 - RNA, 19 nt, Artificial Sequence
  Description of Artificial Sequence: Synthetic oligonucleotide
cucuuggccagacauauau

SEQ ID NO: 1448388 - RNA, 19 nt, Artificial Sequence
  Description of Artificial Sequence: Synthetic oligonucleotide
caacccggcacagagagaa

SEQ ID NO: 1448389 - RNA, 19 nt, Artificial Sequence
  Description of Artificial Sequence: Synthetic oligonucleotide
uguaggggcccugccaccu

SEQ ID NO: 1448390 - RNA, 19 nt, Artificial Sequence
  Description of Artificial Sequence: Synthetic oligonucleotide
gguuuguaagugagcaagc

SEQ ID NO: 1448391 - RNA, 19 nt, Artificial Sequence
  Description of Artificial Sequence: Synthetic oligonucleotide
aggugccaagugaaucagc

SEQ ID NO: 1448392 - RNA, 19 nt, Artificial Sequence
  Description of Artificial Sequence: Synthetic oligonucleotide
aagggaccgaguacaggca

SEQ ID NO: 1448393 - RNA, 19 nt, Artificial Sequence
  Description of Artificial Sequence: Synthetic oligonucleotide
ugccuccaagcuggaaacg

SEQ ID NO: 1448394 - RNA, 19 nt, Artificial Sequence
  Description of Artificial Sequence: Synthetic oligonucleotide
ggugaugcgggcuaugagu

SEQ ID NO: 1448395 - RNA, 19 nt, Artificial Sequence
  Description of Artificial Sequence: Synthetic oligonucleotide
cgucaagguagucagggag

SEQ ID NO: 1448396 - RNA, 19 nt, Artificial Sequence
  Description of Artificial Sequence: Synthetic oligonucleotide
cccauagcgaguaacuuga

SEQ ID NO: 1448397 - RNA, 19 nt, Artificial Sequence
  Description of Artificial Sequence: Synthetic oligonucleotide
cuggagucaacccggcaca

SEQ ID NO: 1448398 - RNA, 19 nt, Artificial Sequence
  Description of Artificial Sequence: Synthetic oligonucleotide
cagguagguguagacauca

SEQ ID NO: 1448399 - RNA, 19 nt, Artificial Sequence
  Description of Artificial Sequence: Synthetic oligonucleotide
acggccaccgggagagucc

SEQ ID NO: 1448400 - RNA, 19 nt, Artificial Sequence
  Description of Artificial Sequence: Synthetic oligonucleotide
ccucagggagccaaagccc

SEQ ID NO: 1448401 - RNA, 19 nt, Artificial Sequence
  Description of Artificial Sequence: Synthetic oligonucleotide
uggagucaacccggcacag

SEQ ID NO: 1448402 - RNA, 19 nt, Artificial Sequence
  Description of Artificial Sequence: Synthetic oligonucleotide
aacuccucauuugguucca

SEQ ID NO: 1448403 - RNA, 19 nt, Artificial Sequence
  Description of Artificial Sequence: Synthetic oligonucleotide
uuaaugcccgcagcacgga

SEQ ID NO: 1448404 - RNA, 19 nt, Artificial Sequence
  Description of Artificial Sequence: Synthetic oligonucleotide
uggaaacggcucucauaga

SEQ ID NO: 1448405 - RNA, 19 nt, Artificial Sequence
  Description of Artificial Sequence: Synthetic oligonucleotide
ucaacccggcacagagaga

SEQ ID NO: 1448406 - RNA, 19 nt, Artificial Sequence
  Description of Artificial Sequence: Synthetic oligonucleotide
gaguacaggcaguucccaa

SEQ ID NO: 1448407 - RNA, 19 nt, Artificial Sequence
  Description of Artificial Sequence: Synthetic oligonucleotide
uaaugcccgcagcacggau

SEQ ID NO: 1448408 - RNA, 19 nt, Artificial Sequence
  Description of Artificial Sequence: Synthetic oligonucleotide
aacccaacuucgggcccgg

SEQ ID NO: 1448409 - RNA, 19 nt, Artificial Sequence
  Description of Artificial Sequence: Synthetic oligonucleotide
gcacuuaaugcccgcagca

SEQ ID NO: 1448410 - RNA, 19 nt, Artificial Sequence
  Description of Artificial Sequence: Synthetic oligonucleotide
cuggcgcccacccuccuug

SEQ ID NO: 1448411 - RNA, 19 nt, Artificial Sequence
  Description of Artificial Sequence: Synthetic oligonucleotide
gauagccagcuggcgcagg

SEQ ID NO: 1448412 - RNA, 19 nt, Artificial Sequence
  Description of Artificial Sequence: Synthetic oligonucleotide
aggugccagcgguuggcuc

SEQ ID NO: 1448413 - RNA, 19 nt, Artificial Sequence
  Description of Artificial Sequence: Synthetic oligonucleotide
agaugaccuggcgcccacc

SEQ ID NO: 1448414 - RNA, 19 nt, Artificial Sequence
  Description of Artificial Sequence: Synthetic oligonucleotide
guguaguacgggcaucaaa

SEQ ID NO: 1448415 - RNA, 19 nt, Artificial Sequence
  Description of Artificial Sequence: Synthetic oligonucleotide
ccccauagcgaguaacuug

SEQ ID NO: 1448416 - RNA, 19 nt, Artificial Sequence
  Description of Artificial Sequence: Synthetic oligonucleotide
cuuggccaaccaggcaucc

SEQ ID NO: 1448417 - RNA, 19 nt, Artificial Sequence
  Description of Artificial Sequence: Synthetic oligonucleotide
ccagcgguuggcucgguag

SEQ ID NO: 1448418 - RNA, 19 nt, Artificial Sequence
  Description of Artificial Sequence: Synthetic oligonucleotide
uucgcuccguuccgcgcca

SEQ ID NO: 1448419 - RNA, 19 nt, Artificial Sequence
  Description of Artificial Sequence: Synthetic oligonucleotide
cccaaaucaaucaguccuc

SEQ ID NO: 1448420 - RNA, 19 nt, Artificial Sequence
  Description of Artificial Sequence: Synthetic oligonucleotide
uuggcccgugggcucaccu

SEQ ID NO: 1448421 - RNA, 19 nt, Artificial Sequence
  Description of Artificial Sequence: Synthetic oligonucleotide
gaguauaguaggggacaga

SEQ ID NO: 1448422 - RNA, 19 nt, Artificial Sequence
  Description of Artificial Sequence: Synthetic oligonucleotide
augggccgcccacuggucu

SEQ ID NO: 1448423 - RNA, 19 nt, Artificial Sequence
  Description of Artificial Sequence: Synthetic oligonucleotide
ccgaguacaggcaguuccc

SEQ ID NO: 1448424 - RNA, 19 nt, Artificial Sequence
  Description of Artificial Sequence: Synthetic oligonucleotide
gugaagucguccguguaaa

SEQ ID NO: 1448425 - RNA, 19 nt, Artificial Sequence
  Description of Artificial Sequence: Synthetic oligonucleotide
gcgccaacccaacuucggg

SEQ ID NO: 1448426 - RNA, 19 nt, Artificial Sequence
  Description of Artificial Sequence: Synthetic oligonucleotide
augcgggcuaugaguuugc

SEQ ID NO: 1448427 - RNA, 19 nt, Artificial Sequence
  Description of Artificial Sequence: Synthetic oligonucleotide
agacauauauaggccccaa

SEQ ID NO: 1448428 - RNA, 19 nt, Artificial Sequence
  Description of Artificial Sequence: Synthetic oligonucleotide
caggagcaggcacacguca

SEQ ID NO: 1448429 - RNA, 19 nt, Artificial Sequence
  Description of Artificial Sequence: Synthetic oligonucleotide
ggguuuuauugaaaugcca

SEQ ID NO: 1448430 - RNA, 19 nt, Artificial Sequence
  Description of Artificial Sequence: Synthetic oligonucleotide
ccaagcuggguuuuauuga

SEQ ID NO: 1448431 - RNA, 19 nt, Artificial Sequence
  Description of Artificial Sequence: Synthetic oligonucleotide
gcagcccuugaacaucccc

SEQ ID NO: 1448432 - RNA, 19 nt, Artificial Sequence
  Description of Artificial Sequence: Synthetic oligonucleotide
agcuagggaguuuggccuu

SEQ ID NO: 1448433 - RNA, 19 nt, Artificial Sequence
  Description of Artificial Sequence: Synthetic oligonucleotide
ccuguaggggcccugccac

SEQ ID NO: 1448434 - RNA, 19 nt, Artificial Sequence
  Description of Artificial Sequence: Synthetic oligonucleotide
uccccauagcgaguaacuu

SEQ ID NO: 1448435 - RNA, 19 nt, Artificial Sequence
  Description of Artificial Sequence: Synthetic oligonucleotide
guaacuugagauggugggu

SEQ ID NO: 1448436 - RNA, 19 nt, Artificial Sequence
  Description of Artificial Sequence: Synthetic oligonucleotide
acacgucaagguagucagg

SEQ ID NO: 1448437 - RNA, 19 nt, Artificial Sequence
  Description of Artificial Sequence: Synthetic oligonucleotide
gacggcccucaacuacagc

SEQ ID NO: 1448438 - RNA, 19 nt, Artificial Sequence
  Description of Artificial Sequence: Synthetic oligonucleotide
agucguccguguaaacaca

SEQ ID NO: 1448439 - RNA, 19 nt, Artificial Sequence
  Description of Artificial Sequence: Synthetic oligonucleotide
augaccuggcgcccacccu

SEQ ID NO: 1448440 - RNA, 19 nt, Artificial Sequence
  Description of Artificial Sequence: Synthetic oligonucleotide
ugaugcgggcuaugaguuu

SEQ ID NO: 1448441 - RNA, 19 nt, Artificial Sequence
  Description of Artificial Sequence: Synthetic oligonucleotide
uuccauccuucggccuucg

SEQ ID NO: 1448442 - RNA, 19 nt, Artificial Sequence
  Description of Artificial Sequence: Synthetic oligonucleotide
auauaggccccaacagcau

SEQ ID NO: 1448443 - RNA, 19 nt, Artificial Sequence
  Description of Artificial Sequence: Synthetic oligonucleotide
uggcgugaugggccgccca

SEQ ID NO: 1448444 - RNA, 19 nt, Artificial Sequence
  Description of Artificial Sequence: Synthetic oligonucleotide
cagcccuugaacauccccu

SEQ ID NO: 1448445 - RNA, 19 nt, Artificial Sequence
  Description of Artificial Sequence: Synthetic oligonucleotide
uuggccaaccaggcaucca

SEQ ID NO: 1448446 - RNA, 19 nt, Artificial Sequence
  Description of Artificial Sequence: Synthetic oligonucleotide
cauccucucuuggccagac

SEQ ID NO: 1448447 - RNA, 19 nt, Artificial Sequence
  Description of Artificial Sequence: Synthetic oligonucleotide
cccggguccccauagcgag

SEQ ID NO: 1448448 - RNA, 19 nt, Artificial Sequence
  Description of Artificial Sequence: Synthetic oligonucleotide
gcgggcuaugaguuugcag

SEQ ID NO: 1448449 - RNA, 19 nt, Artificial Sequence
  Description of Artificial Sequence: Synthetic oligonucleotide
cagacauauauaggcccca

SEQ ID NO: 1448450 - RNA, 19 nt, Artificial Sequence
  Description of Artificial Sequence: Synthetic oligonucleotide
agguagguguagacaucag

SEQ ID NO: 1448451 - RNA, 19 nt, Artificial Sequence
  Description of Artificial Sequence: Synthetic oligonucleotide
ggcccgugggcucaccuug

SEQ ID NO: 1448452 - RNA, 19 nt, Artificial Sequence
  Description of Artificial Sequence: Synthetic oligonucleotide
caagcacuuaaugcccgca

SEQ ID NO: 1448453 - RNA, 19 nt, Artificial Sequence
  Description of Artificial Sequence: Synthetic oligonucleotide
aacccggcacagagagaag

SEQ ID NO: 1448454 - RNA, 19 nt, Artificial Sequence
  Description of Artificial Sequence: Synthetic oligonucleotide
gcacacgucaagguaguca

SEQ ID NO: 1448455 - RNA, 19 nt, Artificial Sequence
  Description of Artificial Sequence: Synthetic oligonucleotide
cacgguccagcacucgaga

SEQ ID NO: 1448456 - RNA, 19 nt, Artificial Sequence
  Description of Artificial Sequence: Synthetic oligonucleotide
guaacccugcccauaggcu

SEQ ID NO: 1448457 - RNA, 19 nt, Artificial Sequence
  Description of Artificial Sequence: Synthetic oligonucleotide
cagaugaccuggcgcccac

SEQ ID NO: 1448458 - RNA, 19 nt, Artificial Sequence
  Description of Artificial Sequence: Synthetic oligonucleotide
cugcacccaagcugugguc

SEQ ID NO: 1448459 - RNA, 19 nt, Artificial Sequence
  Description of Artificial Sequence: Synthetic oligonucleotide
uucgggcccggcuccguuc

SEQ ID NO: 1448460 - RNA, 19 nt, Artificial Sequence
  Description of Artificial Sequence: Synthetic oligonucleotide
ugcgggcuaugaguuugca

SEQ ID NO: 1448461 - RNA, 19 nt, Artificial Sequence
  Description of Artificial Sequence: Synthetic oligonucleotide
gguggguacuuggccaacc

SEQ ID NO: 1448462 - RNA, 19 nt, Artificial Sequence
  Description of Artificial Sequence: Synthetic oligonucleotide
uccaacccacagguucaga

SEQ ID NO: 1448463 - RNA, 19 nt, Artificial Sequence
  Description of Artificial Sequence: Synthetic oligonucleotide
cccacuaggucaguucuac

SEQ ID NO: 1448464 - RNA, 19 nt, Artificial Sequence
  Description of Artificial Sequence: Synthetic oligonucleotide
guccuguaggggcccugcc

SEQ ID NO: 1448465 - RNA, 19 nt, Artificial Sequence
  Description of Artificial Sequence: Synthetic oligonucleotide
gguagucagggaggggaug

SEQ ID NO: 1448466 - RNA, 19 nt, Artificial Sequence
  Description of Artificial Sequence: Synthetic oligonucleotide
caggcaugguccagcuuga

SEQ ID NO: 1448467 - RNA, 19 nt, Artificial Sequence
  Description of Artificial Sequence: Synthetic oligonucleotide
guaagugagcaagcacuua

SEQ ID NO: 1448468 - RNA, 19 nt, Artificial Sequence
  Description of Artificial Sequence: Synthetic oligonucleotide
ugggugaacccgggucccc

SEQ ID NO: 1448469 - RNA, 19 nt, Artificial Sequence
  Description of Artificial Sequence: Synthetic oligonucleotide
agucaacccggcacagaga

SEQ ID NO: 1448470 - RNA, 19 nt, Artificial Sequence
  Description of Artificial Sequence: Synthetic oligonucleotide
uggcacgguccagcacucg

SEQ ID NO: 1448471 - RNA, 19 nt, Artificial Sequence
  Description of Artificial Sequence: Synthetic oligonucleotide
gaccuggcgcccacccucc

SEQ ID NO: 1448472 - RNA, 19 nt, Artificial Sequence
  Description of Artificial Sequence: Synthetic oligonucleotide
ccguguaaacacagaugac

SEQ ID NO: 1448473 - RNA, 19 nt, Artificial Sequence
  Description of Artificial Sequence: Synthetic oligonucleotide
gaugcagguugaguauagu

SEQ ID NO: 1448474 - RNA, 19 nt, Artificial Sequence
  Description of Artificial Sequence: Synthetic oligonucleotide
cccuauguccaugacccug

SEQ ID NO: 1448475 - RNA, 19 nt, Artificial Sequence
  Description of Artificial Sequence: Synthetic oligonucleotide
gcuccguuccugcccgggg

SEQ ID NO: 1448476 - RNA, 19 nt, Artificial Sequence
  Description of Artificial Sequence: Synthetic oligonucleotide
aggcacacgucaagguagu

SEQ ID NO: 1448477 - RNA, 19 nt, Artificial Sequence
  Description of Artificial Sequence: Synthetic oligonucleotide
gguccccauagcgaguaac

SEQ ID NO: 1448478 - RNA, 19 nt, Artificial Sequence
  Description of Artificial Sequence: Synthetic oligonucleotide
guuccauccuucggccuuc

SEQ ID NO: 1448479 - RNA, 19 nt, Artificial Sequence
  Description of Artificial Sequence: Synthetic oligonucleotide
ccacuugccagagagcaca

SEQ ID NO: 1448480 - RNA, 19 nt, Artificial Sequence
  Description of Artificial Sequence: Synthetic oligonucleotide
gugccagcgguuggcucgg

SEQ ID NO: 1448481 - RNA, 19 nt, Artificial Sequence
  Description of Artificial Sequence: Synthetic oligonucleotide
cgccaacccaacuucgggc

SEQ ID NO: 1448482 - RNA, 19 nt, Artificial Sequence
  Description of Artificial Sequence: Synthetic oligonucleotide
cacgggcauugccuccaag

SEQ ID NO: 1448483 - RNA, 19 nt, Artificial Sequence
  Description of Artificial Sequence: Synthetic oligonucleotide
caggcccuauguccaugac

SEQ ID NO: 1448484 - RNA, 19 nt, Artificial Sequence
  Description of Artificial Sequence: Synthetic oligonucleotide
agcgguuggcucgguagau

SEQ ID NO: 1448485 - RNA, 19 nt, Artificial Sequence
  Description of Artificial Sequence: Synthetic oligonucleotide
guccccauagcgaguaacu

SEQ ID NO: 1448486 - RNA, 19 nt, Artificial Sequence
  Description of Artificial Sequence: Synthetic oligonucleotide
gaccgaguacaggcaguuc

SEQ ID NO: 1448487 - RNA, 19 nt, Artificial Sequence
  Description of Artificial Sequence: Synthetic oligonucleotide
ccauagcgaguaacuugag

SEQ ID NO: 1448488 - RNA, 19 nt, Artificial Sequence
  Description of Artificial Sequence: Synthetic oligonucleotide
accuggcgugaugggccgc

SEQ ID NO: 1448489 - RNA, 19 nt, Artificial Sequence
  Description of Artificial Sequence: Synthetic oligonucleotide
gugaugcgggcuaugaguu

SEQ ID NO: 1448490 - RNA, 19 nt, Artificial Sequence
  Description of Artificial Sequence: Synthetic oligonucleotide
cagguguaguacgggcauc

SEQ ID NO: 1448491 - RNA, 19 nt, Artificial Sequence
  Description of Artificial Sequence: Synthetic oligonucleotide
gcacgguccagcacucgag

SEQ ID NO: 1448492 - RNA, 19 nt, Artificial Sequence
  Description of Artificial Sequence: Synthetic oligonucleotide
gaugggccgcccacugguc

SEQ ID NO: 1448493 - RNA, 19 nt, Artificial Sequence
  Description of Artificial Sequence: Synthetic oligonucleotide
cuugagaugguggguacuu

SEQ ID NO: 1448494 - RNA, 19 nt, Artificial Sequence
  Description of Artificial Sequence: Synthetic oligonucleotide
gaguugggugaacccgggu

SEQ ID NO: 1448495 - RNA, 19 nt, Artificial Sequence
  Description of Artificial Sequence: Synthetic oligonucleotide
ccacagguucagaguuggg

SEQ ID NO: 1448496 - RNA, 19 nt, Artificial Sequence
  Description of Artificial Sequence: Synthetic oligonucleotide
gagcacauggugggugaua

SEQ ID NO: 1448497 - RNA, 19 nt, Artificial Sequence
  Description of Artificial Sequence: Synthetic oligonucleotide
cgcgccaacccaacuucgg

SEQ ID NO: 1448498 - RNA, 19 nt, Artificial Sequence
  Description of Artificial Sequence: Synthetic oligonucleotide
gcgcaggguaccuggcgug

SEQ ID NO: 1448499 - RNA, 19 nt, Artificial Sequence
  Description of Artificial Sequence: Synthetic oligonucleotide
ccgcgccaacccaacuucg

SEQ ID NO: 1448500 - RNA, 19 nt, Artificial Sequence
  Description of Artificial Sequence: Synthetic oligonucleotide
cacucccaagcgguccgug

SEQ ID NO: 1448501 - RNA, 19 nt, Artificial Sequence
  Description of Artificial Sequence: Synthetic oligonucleotide
acccaacuucgggcccggc

SEQ ID NO: 1448502 - RNA, 19 nt, Artificial Sequence
  Description of Artificial Sequence: Synthetic oligonucleotide
gccccacuaggucaguucu

SEQ ID NO: 1448503 - RNA, 19 nt, Artificial Sequence
  Description of Artificial Sequence: Synthetic oligonucleotide
gcagguguaguacgggcau

SEQ ID NO: 1448504 - RNA, 19 nt, Artificial Sequence
  Description of Artificial Sequence: Synthetic oligonucleotide
agcuggcgcaggguaccug

SEQ ID NO: 1448505 - RNA, 19 nt, Artificial Sequence
  Description of Artificial Sequence: Synthetic oligonucleotide
gaccagggcaggcuuucuu

SEQ ID NO: 1448506 - RNA, 19 nt, Artificial Sequence
  Description of Artificial Sequence: Synthetic oligonucleotide
cucccuuaugaaggaggaa

SEQ ID NO: 1448507 - RNA, 19 nt, Artificial Sequence
  Description of Artificial Sequence: Synthetic oligonucleotide
ggcgcaggguaccuggcgu

SEQ ID NO: 1448508 - RNA, 19 nt, Artificial Sequence
  Description of Artificial Sequence: Synthetic oligonucleotide
ccucaacuacagcccuggc

SEQ ID NO: 1448509 - RNA, 19 nt, Artificial Sequence
  Description of Artificial Sequence: Synthetic oligonucleotide
gacccaagcuggguuuuau

SEQ ID NO: 1448510 - RNA, 19 nt, Artificial Sequence
  Description of Artificial Sequence: Synthetic oligonucleotide
gugaacccggguccccaua

SEQ ID NO: 1448511 - RNA, 19 nt, Artificial Sequence
  Description of Artificial Sequence: Synthetic oligonucleotide
gcccuugaacauccccuga

SEQ ID NO: 1448512 - RNA, 19 nt, Artificial Sequence
  Description of Artificial Sequence: Synthetic oligonucleotide
ccauccuucggccuucgcu

SEQ ID NO: 1448513 - RNA, 19 nt, Artificial Sequence
  Description of Artificial Sequence: Synthetic oligonucleotide
gcgguuggcucgguagaug

SEQ ID NO: 1448514 - RNA, 19 nt, Artificial Sequence
  Description of Artificial Sequence: Synthetic oligonucleotide
cuuggcccgugggcucacc

SEQ ID NO: 1448515 - RNA, 19 nt, Artificial Sequence
  Description of Artificial Sequence: Synthetic oligonucleotide
ggguccgcgccgccacccg

SEQ ID NO: 1448516 - RNA, 19 nt, Artificial Sequence
  Description of Artificial Sequence: Synthetic oligonucleotide
ccuggcgugaugggccgcc

SEQ ID NO: 1448517 - RNA, 19 nt, Artificial Sequence
  Description of Artificial Sequence: Synthetic oligonucleotide
ggagucaacccggcacaga

SEQ ID NO: 1448518 - RNA, 19 nt, Artificial Sequence
  Description of Artificial Sequence: Synthetic oligonucleotide
gguccgcgccgccacccgc

SEQ ID NO: 1448519 - RNA, 19 nt, Artificial Sequence
  Description of Artificial Sequence: Synthetic oligonucleotide
gcccgugggcucaccuugg

SEQ ID NO: 1448520 - RNA, 19 nt, Artificial Sequence
  Description of Artificial Sequence: Synthetic oligonucleotide
ggguccaugucggcugcca

SEQ ID NO: 1448521 - RNA, 19 nt, Artificial Sequence
  Description of Artificial Sequence: Synthetic oligonucleotide
uggcggggagcagcaucaa

SEQ ID NO: 1448522 - RNA, 19 nt, Artificial Sequence
  Description of Artificial Sequence: Synthetic oligonucleotide
cggcucucauagagagugg

SEQ ID NO: 1448523 - RNA, 19 nt, Artificial Sequence
  Description of Artificial Sequence: Synthetic oligonucleotide
gguguaguacgggcaucaa

SEQ ID NO: 1448524 - RNA, 19 nt, Artificial Sequence
  Description of Artificial Sequence: Synthetic oligonucleotide
cguuccgcgccaacccaac

SEQ ID NO: 1448525 - RNA, 19 nt, Artificial Sequence
  Description of Artificial Sequence: Synthetic oligonucleotide
gggugaacccgggucccca

SEQ ID NO: 1448526 - RNA, 19 nt, Artificial Sequence
  Description of Artificial Sequence: Synthetic oligonucleotide
cagggacuggaagcacuaa

SEQ ID NO: 1448527 - RNA, 19 nt, Artificial Sequence
  Description of Artificial Sequence: Synthetic oligonucleotide
cccgugggcucaccuuggc

SEQ ID NO: 1448528 - RNA, 19 nt, Artificial Sequence
  Description of Artificial Sequence: Synthetic oligonucleotide
cguccguguaaacacagau

SEQ ID NO: 1448529 - RNA, 19 nt, Artificial Sequence
  Description of Artificial Sequence: Synthetic oligonucleotide
ggccuucgcuccguuccgc

SEQ ID NO: 1448530 - RNA, 19 nt, Artificial Sequence
  Description of Artificial Sequence: Synthetic oligonucleotide
ggguguaacccugcccaua

SEQ ID NO: 1448531 - RNA, 19 nt, Artificial Sequence
  Description of Artificial Sequence: Synthetic oligonucleotide
cucucccauguggccccac

SEQ ID NO: 1448532 - RNA, 19 nt, Artificial Sequence
  Description of Artificial Sequence: Synthetic oligonucleotide
cacuugccagagagcacau

SEQ ID NO: 1448533 - RNA, 19 nt, Artificial Sequence
  Description of Artificial Sequence: Synthetic oligonucleotide
ggcacacgucaagguaguc

SEQ ID NO: 1448534 - RNA, 19 nt, Artificial Sequence
  Description of Artificial Sequence: Synthetic oligonucleotide
cggccuucgcuccguuccg

SEQ ID NO: 1448535 - RNA, 19 nt, Artificial Sequence
  Description of Artificial Sequence: Synthetic oligonucleotide
gguccaugucggcugccau

SEQ ID NO: 1448536 - RNA, 19 nt, Artificial Sequence
  Description of Artificial Sequence: Synthetic oligonucleotide
ggaccgaguacaggcaguu

SEQ ID NO: 1448537 - RNA, 19 nt, Artificial Sequence
  Description of Artificial Sequence: Synthetic oligonucleotide
gcgaguaacuugagauggu

SEQ ID NO: 1448538 - RNA, 19 nt, Artificial Sequence
  Description of Artificial Sequence: Synthetic oligonucleotide
gcauccucucuuggccaga

SEQ ID NO: 1448539 - RNA, 19 nt, Artificial Sequence
  Description of Artificial Sequence: Synthetic oligonucleotide
ggugaacccggguccccau

SEQ ID NO: 1448540 - RNA, 19 nt, Artificial Sequence
  Description of Artificial Sequence: Synthetic oligonucleotide
ucgcuccguuccgcgccaa

SEQ ID NO: 1448541 - RNA, 19 nt, Artificial Sequence
  Description of Artificial Sequence: Synthetic oligonucleotide
gggguccaugucggcugcc

SEQ ID NO: 1448542 - RNA, 19 nt, Artificial Sequence
  Description of Artificial Sequence: Synthetic oligonucleotide
gggguguaacccugcccau

SEQ ID NO: 1448543 - RNA, 19 nt, Artificial Sequence
  Description of Artificial Sequence: Synthetic oligonucleotide
cccaacuucgggcccggcu

SEQ ID NO: 1448544 - RNA, 19 nt, Artificial Sequence
  Description of Artificial Sequence: Synthetic oligonucleotide
ccguuccgcgccaacccaa

SEQ ID NO: 1448545 - RNA, 19 nt, Artificial Sequence
  Description of Artificial Sequence: Synthetic oligonucleotide
ugccagcgguuggcucggu

SEQ ID NO: 1448546 - RNA, 19 nt, Artificial Sequence
  Description of Artificial Sequence: Synthetic oligonucleotide
ccgugaagucguccgugua

SEQ ID NO: 1448547 - RNA, 19 nt, Artificial Sequence
  Description of Artificial Sequence: Synthetic oligonucleotide
gccagcgguuggcucggua

SEQ ID NO: 1448548 - RNA, 19 nt, Artificial Sequence
  Description of Artificial Sequence: Synthetic oligonucleotide
ccccacuaggucaguucua

SEQ ID NO: 1448549 - RNA, 19 nt, Artificial Sequence
  Description of Artificial Sequence: Synthetic oligonucleotide
gcccuauguccaugacccu

SEQ ID NO: 1448550 - RNA, 19 nt, Artificial Sequence
  Description of Artificial Sequence: Synthetic oligonucleotide
cuucgggcccggcuccguu

SEQ ID NO: 1448551 - RNA, 19 nt, Artificial Sequence
  Description of Artificial Sequence: Synthetic oligonucleotide
cccggcacagagagaaguu

SEQ ID NO: 1448552 - RNA, 19 nt, Artificial Sequence
  Description of Artificial Sequence: Synthetic oligonucleotide
cgcaggguaccuggcguga

SEQ ID NO: 1448553 - RNA, 19 nt, Artificial Sequence
  Description of Artificial Sequence: Synthetic oligonucleotide
gcgugaugggccgcccacu

SEQ ID NO: 1448554 - RNA, 19 nt, Artificial Sequence
  Description of Artificial Sequence: Synthetic oligonucleotide
cuucggccuucgcuccguu

SEQ ID NO: 1448555 - RNA, 19 nt, Artificial Sequence
  Description of Artificial Sequence: Synthetic oligonucleotide
cgcuccguuccgcgccaac

SEQ ID NO: 1448556 - RNA, 19 nt, Artificial Sequence
  Description of Artificial Sequence: Synthetic oligonucleotide
gcaggguaccuggcgugau

SEQ ID NO: 1448557 - RNA, 19 nt, Artificial Sequence
  Description of Artificial Sequence: Synthetic oligonucleotide
cggguccccauagcgagua

SEQ ID NO: 1448558 - RNA, 19 nt, Artificial Sequence
  Description of Artificial Sequence: Synthetic oligonucleotide
ggccaccgggagaguccuc

SEQ ID NO: 1448559 - RNA, 19 nt, Artificial Sequence
  Description of Artificial Sequence: Synthetic oligonucleotide
ccggguccccauagcgagu

SEQ ID NO: 1448560 - RNA, 19 nt, Artificial Sequence
  Description of Artificial Sequence: Synthetic oligonucleotide
cggccaccgggagaguccu

SEQ ID NO: 1448561 - RNA, 19 nt, Artificial Sequence
  Description of Artificial Sequence: Synthetic oligonucleotide
aaaacguacucauagcccc

SEQ ID NO: 1448562 - RNA, 19 nt, Artificial Sequence
  Description of Artificial Sequence: Synthetic oligonucleotide
uucaauacagcacaacccg

SEQ ID NO: 1448563 - RNA, 19 nt, Artificial Sequence
  Description of Artificial Sequence: Synthetic oligonucleotide
auugaauuccgucaagccg

SEQ ID NO: 1448564 - RNA, 19 nt, Artificial Sequence
  Description of Artificial Sequence: Synthetic oligonucleotide
aaaacuuagucaaacacug

SEQ ID NO: 1448565 - RNA, 19 nt, Artificial Sequence
  Description of Artificial Sequence: Synthetic oligonucleotide
cagaaauagacuuuauucc

SEQ ID NO: 1448566 - RNA, 19 nt, Artificial Sequence
  Description of Artificial Sequence: Synthetic oligonucleotide
aauggcuaagcccgcaucg

SEQ ID NO: 1448567 - RNA, 19 nt, Artificial Sequence
  Description of Artificial Sequence: Synthetic oligonucleotide
cucuuaauaucaaaugugc

SEQ ID NO: 1448568 - RNA, 19 nt, Artificial Sequence
  Description of Artificial Sequence: Synthetic oligonucleotide
agcaaaauggcuaagcccg

SEQ ID NO: 1448569 - RNA, 19 nt, Artificial Sequence
  Description of Artificial Sequence: Synthetic oligonucleotide
uugaauuccgucaagccga

SEQ ID NO: 1448570 - RNA, 19 nt, Artificial Sequence
  Description of Artificial Sequence: Synthetic oligonucleotide
cauucaauacagcacaacc

SEQ ID NO: 1448571 - RNA, 19 nt, Artificial Sequence
  Description of Artificial Sequence: Synthetic oligonucleotide
uccgucaagccgaagagcg

SEQ ID NO: 1448572 - RNA, 19 nt, Artificial Sequence
  Description of Artificial Sequence: Synthetic oligonucleotide
ucuuaauaucaaaugugcc

SEQ ID NO: 1448573 - RNA, 19 nt, Artificial Sequence
  Description of Artificial Sequence: Synthetic oligonucleotide
gaucauuucuggaagagcc

SEQ ID NO: 1448574 - RNA, 19 nt, Artificial Sequence
  Description of Artificial Sequence: Synthetic oligonucleotide
aaugugccaugauggaccc

SEQ ID NO: 1448575 - RNA, 19 nt, Artificial Sequence
  Description of Artificial Sequence: Synthetic oligonucleotide
agaaauagacuuuauucca

SEQ ID NO: 1448576 - RNA, 19 nt, Artificial Sequence
  Description of Artificial Sequence: Synthetic oligonucleotide
ucaaaugaaugacuuggcc

SEQ ID NO: 1448577 - RNA, 19 nt, Artificial Sequence
  Description of Artificial Sequence: Synthetic oligonucleotide
accuggauaaccguuaccc

SEQ ID NO: 1448578 - RNA, 19 nt, Artificial Sequence
  Description of Artificial Sequence: Synthetic oligonucleotide
auagccccugguuuuaucc

SEQ ID NO: 1448579 - RNA, 19 nt, Artificial Sequence
  Description of Artificial Sequence: Synthetic oligonucleotide
aacccgugccaccacaagc

SEQ ID NO: 1448580 - RNA, 19 nt, Artificial Sequence
  Description of Artificial Sequence: Synthetic oligonucleotide
ugaggauugaauuccguca

SEQ ID NO: 1448581 - RNA, 19 nt, Artificial Sequence
  Description of Artificial Sequence: Synthetic oligonucleotide
uagacuuccccuuuguuug

SEQ ID NO: 1448582 - RNA, 19 nt, Artificial Sequence
  Description of Artificial Sequence: Synthetic oligonucleotide
aauacuggucuucgaggcg

SEQ ID NO: 1448583 - RNA, 19 nt, Artificial Sequence
  Description of Artificial Sequence: Synthetic oligonucleotide
aaggagauucaaaugaaug

SEQ ID NO: 1448584 - RNA, 19 nt, Artificial Sequence
  Description of Artificial Sequence: Synthetic oligonucleotide
cuuacuccaaagcuggccg

SEQ ID NO: 1448585 - RNA, 19 nt, Artificial Sequence
  Description of Artificial Sequence: Synthetic oligonucleotide
uaaccguuaccccagcaag

SEQ ID NO: 1448586 - RNA, 19 nt, Artificial Sequence
  Description of Artificial Sequence: Synthetic oligonucleotide
caaaacguacucauagccc

SEQ ID NO: 1448587 - RNA, 19 nt, Artificial Sequence
  Description of Artificial Sequence: Synthetic oligonucleotide
aaauggcuaagcccgcauc

SEQ ID NO: 1448588 - RNA, 19 nt, Artificial Sequence
  Description of Artificial Sequence: Synthetic oligonucleotide
ucuucgaggcguccgaucc

SEQ ID NO: 1448589 - RNA, 19 nt, Artificial Sequence
  Description of Artificial Sequence: Synthetic oligonucleotide
ggugagugcagcaaaaugg

SEQ ID NO: 1448590 - RNA, 19 nt, Artificial Sequence
  Description of Artificial Sequence: Synthetic oligonucleotide
agggacauuaaccugagua

SEQ ID NO: 1448591 - RNA, 19 nt, Artificial Sequence
  Description of Artificial Sequence: Synthetic oligonucleotide
cagaguuaccaugugaucc

SEQ ID NO: 1448592 - RNA, 19 nt, Artificial Sequence
  Description of Artificial Sequence: Synthetic oligonucleotide
gugacaagggacuaccaag

SEQ ID NO: 1448593 - RNA, 19 nt, Artificial Sequence
  Description of Artificial Sequence: Synthetic oligonucleotide
aaacuuagucaaacacugc

SEQ ID NO: 1448594 - RNA, 19 nt, Artificial Sequence
  Description of Artificial Sequence: Synthetic oligonucleotide
uguacugugugacucucac

SEQ ID NO: 1448595 - RNA, 19 nt, Artificial Sequence
  Description of Artificial Sequence: Synthetic oligonucleotide
aaccuggauaaccguuacc

SEQ ID NO: 1448596 - RNA, 19 nt, Artificial Sequence
  Description of Artificial Sequence: Synthetic oligonucleotide
caaaugaaugacuuggcca

SEQ ID NO: 1448597 - RNA, 19 nt, Artificial Sequence
  Description of Artificial Sequence: Synthetic oligonucleotide
uuaaccugaguagagucug

SEQ ID NO: 1448598 - RNA, 19 nt, Artificial Sequence
  Description of Artificial Sequence: Synthetic oligonucleotide
uccaucaaaguccugcauc

SEQ ID NO: 1448599 - RNA, 19 nt, Artificial Sequence
  Description of Artificial Sequence: Synthetic oligonucleotide
caccuguccaucaaagucc

SEQ ID NO: 1448600 - RNA, 19 nt, Artificial Sequence
  Description of Artificial Sequence: Synthetic oligonucleotide
ugauggacccagaaggaga

SEQ ID NO: 1448601 - RNA, 19 nt, Artificial Sequence
  Description of Artificial Sequence: Synthetic oligonucleotide
guuaccaugugauccacac

SEQ ID NO: 1448602 - RNA, 19 nt, Artificial Sequence
  Description of Artificial Sequence: Synthetic oligonucleotide
uucggagaaaggcaggcac

SEQ ID NO: 1448603 - RNA, 19 nt, Artificial Sequence
  Description of Artificial Sequence: Synthetic oligonucleotide
ucgaccgcaagacaccugc

SEQ ID NO: 1448604 - RNA, 19 nt, Artificial Sequence
  Description of Artificial Sequence: Synthetic oligonucleotide
uucucugucugucaggaua

SEQ ID NO: 1448605 - RNA, 19 nt, Artificial Sequence
  Description of Artificial Sequence: Synthetic oligonucleotide
cauuaaccugaguagaguc

SEQ ID NO: 1448606 - RNA, 19 nt, Artificial Sequence
  Description of Artificial Sequence: Synthetic oligonucleotide
cagcaaaauggcuaagccc

SEQ ID NO: 1448607 - RNA, 19 nt, Artificial Sequence
  Description of Artificial Sequence: Synthetic oligonucleotide
uccaaaacguacucauagc

SEQ ID NO: 1448608 - RNA, 19 nt, Artificial Sequence
  Description of Artificial Sequence: Synthetic oligonucleotide
auuccgucaagccgaagag

SEQ ID NO: 1448609 - RNA, 19 nt, Artificial Sequence
  Description of Artificial Sequence: Synthetic oligonucleotide
cagcaaucaccguaggugg

SEQ ID NO: 1448610 - RNA, 19 nt, Artificial Sequence
  Description of Artificial Sequence: Synthetic oligonucleotide
accaaguuccuccugggug

SEQ ID NO: 1448611 - RNA, 19 nt, Artificial Sequence
  Description of Artificial Sequence: Synthetic oligonucleotide
acggaggagguuccaaggc

SEQ ID NO: 1448612 - RNA, 19 nt, Artificial Sequence
  Description of Artificial Sequence: Synthetic oligonucleotide
auugucacccuccacggga

SEQ ID NO: 1448613 - RNA, 19 nt, Artificial Sequence
  Description of Artificial Sequence: Synthetic oligonucleotide
uggugagugcagcaaaaug

SEQ ID NO: 1448614 - RNA, 19 nt, Artificial Sequence
  Description of Artificial Sequence: Synthetic oligonucleotide
uugccuacuucggagaaag

SEQ ID NO: 1448615 - RNA, 19 nt, Artificial Sequence
  Description of Artificial Sequence: Synthetic oligonucleotide
uggaagagccguuuccaag

SEQ ID NO: 1448616 - RNA, 19 nt, Artificial Sequence
  Description of Artificial Sequence: Synthetic oligonucleotide
agaguuaccaugugaucca

SEQ ID NO: 1448617 - RNA, 19 nt, Artificial Sequence
  Description of Artificial Sequence: Synthetic oligonucleotide
uaggugggaucauuucugg

SEQ ID NO: 1448618 - RNA, 19 nt, Artificial Sequence
  Description of Artificial Sequence: Synthetic oligonucleotide
uggaugugaggauugaauu

SEQ ID NO: 1448619 - RNA, 19 nt, Artificial Sequence
  Description of Artificial Sequence: Synthetic oligonucleotide
ucuuacuccaaagcuggcc

SEQ ID NO: 1448620 - RNA, 19 nt, Artificial Sequence
  Description of Artificial Sequence: Synthetic oligonucleotide
caauacagcacaacccgug

SEQ ID NO: 1448621 - RNA, 19 nt, Artificial Sequence
  Description of Artificial Sequence: Synthetic oligonucleotide
uaagggagugugcucgacc

SEQ ID NO: 1448622 - RNA, 19 nt, Artificial Sequence
  Description of Artificial Sequence: Synthetic oligonucleotide
gaauuguuccccaugcuga

SEQ ID NO: 1448623 - RNA, 19 nt, Artificial Sequence
  Description of Artificial Sequence: Synthetic oligonucleotide
acagacaaccuggaccacc

SEQ ID NO: 1448624 - RNA, 19 nt, Artificial Sequence
  Description of Artificial Sequence: Synthetic oligonucleotide
aagagccguuuccaagagg

SEQ ID NO: 1448625 - RNA, 19 nt, Artificial Sequence
  Description of Artificial Sequence: Synthetic oligonucleotide
uccccuuuguuugugagga

SEQ ID NO: 1448626 - RNA, 19 nt, Artificial Sequence
  Description of Artificial Sequence: Synthetic oligonucleotide
ccaaaacguacucauagcc

SEQ ID NO: 1448627 - RNA, 19 nt, Artificial Sequence
  Description of Artificial Sequence: Synthetic oligonucleotide
ggauaagggagugugcucg

SEQ ID NO: 1448628 - RNA, 19 nt, Artificial Sequence
  Description of Artificial Sequence: Synthetic oligonucleotide
gucaggauaagggagugug

SEQ ID NO: 1448629 - RNA, 19 nt, Artificial Sequence
  Description of Artificial Sequence: Synthetic oligonucleotide
aaucaccguagguggcaac

SEQ ID NO: 1448630 - RNA, 19 nt, Artificial Sequence
  Description of Artificial Sequence: Synthetic oligonucleotide
ucaggauaagggagugugc

SEQ ID NO: 1448631 - RNA, 19 nt, Artificial Sequence
  Description of Artificial Sequence: Synthetic oligonucleotide
ggaauuguuccccaugcug

SEQ ID NO: 1448632 - RNA, 19 nt, Artificial Sequence
  Description of Artificial Sequence: Synthetic oligonucleotide
ugaucagagaggcccuagc

SEQ ID NO: 1448633 - RNA, 19 nt, Artificial Sequence
  Description of Artificial Sequence: Synthetic oligonucleotide
cuagcugaagucagcuagc

SEQ ID NO: 1448634 - RNA, 19 nt, Artificial Sequence
  Description of Artificial Sequence: Synthetic oligonucleotide
auaaccguuaccccagcaa

SEQ ID NO: 1448635 - RNA, 19 nt, Artificial Sequence
  Description of Artificial Sequence: Synthetic oligonucleotide
uguccaucaaaguccugca

SEQ ID NO: 1448636 - RNA, 19 nt, Artificial Sequence
  Description of Artificial Sequence: Synthetic oligonucleotide
uuaccaugugauccacacc

SEQ ID NO: 1448637 - RNA, 19 nt, Artificial Sequence
  Description of Artificial Sequence: Synthetic oligonucleotide
guggcaaccuggauaaccg

SEQ ID NO: 1448638 - RNA, 19 nt, Artificial Sequence
  Description of Artificial Sequence: Synthetic oligonucleotide
agagccguuuccaagaggu

SEQ ID NO: 1448639 - RNA, 19 nt, Artificial Sequence
  Description of Artificial Sequence: Synthetic oligonucleotide
aggauaagggagugugcuc

SEQ ID NO: 1448640 - RNA, 19 nt, Artificial Sequence
  Description of Artificial Sequence: Synthetic oligonucleotide
uguuggugagugcagcaaa

SEQ ID NO: 1448641 - RNA, 19 nt, Artificial Sequence
  Description of Artificial Sequence: Synthetic oligonucleotide
acaaacaguucaccguugu

SEQ ID NO: 1448642 - RNA, 19 nt, Artificial Sequence
  Description of Artificial Sequence: Synthetic oligonucleotide
acaccuucgucuccugagg

SEQ ID NO: 1448643 - RNA, 19 nt, Artificial Sequence
  Description of Artificial Sequence: Synthetic oligonucleotide
aaccguuaccccagcaagg

SEQ ID NO: 1448644 - RNA, 19 nt, Artificial Sequence
  Description of Artificial Sequence: Synthetic oligonucleotide
aaggcagaaauagacuuua

SEQ ID NO: 1448645 - RNA, 19 nt, Artificial Sequence
  Description of Artificial Sequence: Synthetic oligonucleotide
gaacuugugggguggcagc

SEQ ID NO: 1448646 - RNA, 19 nt, Artificial Sequence
  Description of Artificial Sequence: Synthetic oligonucleotide
ucaccgggcauugucaccc

SEQ ID NO: 1448647 - RNA, 19 nt, Artificial Sequence
  Description of Artificial Sequence: Synthetic oligonucleotide
ccuagcugaagucagcuag

SEQ ID NO: 1448648 - RNA, 19 nt, Artificial Sequence
  Description of Artificial Sequence: Synthetic oligonucleotide
uucauucaauacagcacaa

SEQ ID NO: 1448649 - RNA, 19 nt, Artificial Sequence
  Description of Artificial Sequence: Synthetic oligonucleotide
augugauccacaccacaug

SEQ ID NO: 1448650 - RNA, 19 nt, Artificial Sequence
  Description of Artificial Sequence: Synthetic oligonucleotide
gccaaagaccccuccaucg

SEQ ID NO: 1448651 - RNA, 19 nt, Artificial Sequence
  Description of Artificial Sequence: Synthetic oligonucleotide
gugagugcagcaaaauggc

SEQ ID NO: 1448652 - RNA, 19 nt, Artificial Sequence
  Description of Artificial Sequence: Synthetic oligonucleotide
cuuuguuugugaggaacag

SEQ ID NO: 1448653 - RNA, 19 nt, Artificial Sequence
  Description of Artificial Sequence: Synthetic oligonucleotide
aaagaccccuccaucggag

SEQ ID NO: 1448654 - RNA, 19 nt, Artificial Sequence
  Description of Artificial Sequence: Synthetic oligonucleotide
ucaccguuguuggugagug

SEQ ID NO: 1448655 - RNA, 19 nt, Artificial Sequence
  Description of Artificial Sequence: Synthetic oligonucleotide
agauucaaaugaaugacuu

SEQ ID NO: 1448656 - RNA, 19 nt, Artificial Sequence
  Description of Artificial Sequence: Synthetic oligonucleotide
gaggauugaauuccgucaa

SEQ ID NO: 1448657 - RNA, 19 nt, Artificial Sequence
  Description of Artificial Sequence: Synthetic oligonucleotide
agccaaagaccccuccauc

SEQ ID NO: 1448658 - RNA, 19 nt, Artificial Sequence
  Description of Artificial Sequence: Synthetic oligonucleotide
uacucagaauuuccccagc

SEQ ID NO: 1448659 - RNA, 19 nt, Artificial Sequence
  Description of Artificial Sequence: Synthetic oligonucleotide
aguucaccguuguugguga

SEQ ID NO: 1448660 - RNA, 19 nt, Artificial Sequence
  Description of Artificial Sequence: Synthetic oligonucleotide
gugaggauugaauuccguc

SEQ ID NO: 1448661 - RNA, 19 nt, Artificial Sequence
  Description of Artificial Sequence: Synthetic oligonucleotide
ucauucaauacagcacaac

SEQ ID NO: 1448662 - RNA, 19 nt, Artificial Sequence
  Description of Artificial Sequence: Synthetic oligonucleotide
ucccagacuguccugggaa

SEQ ID NO: 1448663 - RNA, 19 nt, Artificial Sequence
  Description of Artificial Sequence: Synthetic oligonucleotide
auuaaccugaguagagucu

SEQ ID NO: 1448664 - RNA, 19 nt, Artificial Sequence
  Description of Artificial Sequence: Synthetic oligonucleotide
aagcagcaaucaccguagg

SEQ ID NO: 1448665 - RNA, 19 nt, Artificial Sequence
  Description of Artificial Sequence: Synthetic oligonucleotide
auccacaagaauagacuuc

SEQ ID NO: 1448666 - RNA, 19 nt, Artificial Sequence
  Description of Artificial Sequence: Synthetic oligonucleotide
ugcucgaccgcaagacacc

SEQ ID NO: 1448667 - RNA, 19 nt, Artificial Sequence
  Description of Artificial Sequence: Synthetic oligonucleotide
cuuagucaaacacugcucu

SEQ ID NO: 1448668 - RNA, 19 nt, Artificial Sequence
  Description of Artificial Sequence: Synthetic oligonucleotide
gagguuugguccuuuccca

SEQ ID NO: 1448669 - RNA, 19 nt, Artificial Sequence
  Description of Artificial Sequence: Synthetic oligonucleotide
uuuggccuacagauucucu

SEQ ID NO: 1448670 - RNA, 19 nt, Artificial Sequence
  Description of Artificial Sequence: Synthetic oligonucleotide
uccacgggaaauacugguc

SEQ ID NO: 1448671 - RNA, 19 nt, Artificial Sequence
  Description of Artificial Sequence: Synthetic oligonucleotide
aagcuggccguccagccaa

SEQ ID NO: 1448672 - RNA, 19 nt, Artificial Sequence
  Description of Artificial Sequence: Synthetic oligonucleotide
ugugcucgaccgcaagaca

SEQ ID NO: 1448673 - RNA, 19 nt, Artificial Sequence
  Description of Artificial Sequence: Synthetic oligonucleotide
guagguggcaaccuggaua

SEQ ID NO: 1448674 - RNA, 19 nt, Artificial Sequence
  Description of Artificial Sequence: Synthetic oligonucleotide
acauuaaccugaguagagu

SEQ ID NO: 1448675 - RNA, 19 nt, Artificial Sequence
  Description of Artificial Sequence: Synthetic oligonucleotide
ucggaggacacagccaagc

SEQ ID NO: 1448676 - RNA, 19 nt, Artificial Sequence
  Description of Artificial Sequence: Synthetic oligonucleotide
gguuccaaggcugggaugc

SEQ ID NO: 1448677 - RNA, 19 nt, Artificial Sequence
  Description of Artificial Sequence: Synthetic oligonucleotide
aaaccuggaugugaggauu

SEQ ID NO: 1448678 - RNA, 19 nt, Artificial Sequence
  Description of Artificial Sequence: Synthetic oligonucleotide
uguguucuguugugacaag

SEQ ID NO: 1448679 - RNA, 19 nt, Artificial Sequence
  Description of Artificial Sequence: Synthetic oligonucleotide
auaucaaaugugccaugau

SEQ ID NO: 1448680 - RNA, 19 nt, Artificial Sequence
  Description of Artificial Sequence: Synthetic oligonucleotide
aaugaaugacuuggccaga

SEQ ID NO: 1448681 - RNA, 19 nt, Artificial Sequence
  Description of Artificial Sequence: Synthetic oligonucleotide
caaucucuuaauaucaaau

SEQ ID NO: 1448682 - RNA, 19 nt, Artificial Sequence
  Description of Artificial Sequence: Synthetic oligonucleotide
accuucgucuccugagguc

SEQ ID NO: 1448683 - RNA, 19 nt, Artificial Sequence
  Description of Artificial Sequence: Synthetic oligonucleotide
uuguagugacccaggccug

SEQ ID NO: 1448684 - RNA, 19 nt, Artificial Sequence
  Description of Artificial Sequence: Synthetic oligonucleotide
aggcucaccgggcauuguc

SEQ ID NO: 1448685 - RNA, 19 nt, Artificial Sequence
  Description of Artificial Sequence: Synthetic oligonucleotide
accguuguuggugagugca

SEQ ID NO: 1448686 - RNA, 19 nt, Artificial Sequence
  Description of Artificial Sequence: Synthetic oligonucleotide
cacccucggauauucuugc

SEQ ID NO: 1448687 - RNA, 19 nt, Artificial Sequence
  Description of Artificial Sequence: Synthetic oligonucleotide
ugcaacaccuucgucuccu

SEQ ID NO: 1448688 - RNA, 19 nt, Artificial Sequence
  Description of Artificial Sequence: Synthetic oligonucleotide
caccccauccacaagaaua

SEQ ID NO: 1448689 - RNA, 19 nt, Artificial Sequence
  Description of Artificial Sequence: Synthetic oligonucleotide
uugugacaagggacuacca

SEQ ID NO: 1448690 - RNA, 19 nt, Artificial Sequence
  Description of Artificial Sequence: Synthetic oligonucleotide
accgagggacauuaaccug

SEQ ID NO: 1448691 - RNA, 19 nt, Artificial Sequence
  Description of Artificial Sequence: Synthetic oligonucleotide
ugggaugcuguagaccaug

SEQ ID NO: 1448692 - RNA, 19 nt, Artificial Sequence
  Description of Artificial Sequence: Synthetic oligonucleotide
uccugggugccuugucagg

SEQ ID NO: 1448693 - RNA, 19 nt, Artificial Sequence
  Description of Artificial Sequence: Synthetic oligonucleotide
gugggaauuguuccccaug

SEQ ID NO: 1448694 - RNA, 19 nt, Artificial Sequence
  Description of Artificial Sequence: Synthetic oligonucleotide
agugugcucgaccgcaaga

SEQ ID NO: 1448695 - RNA, 19 nt, Artificial Sequence
  Description of Artificial Sequence: Synthetic oligonucleotide
gcuucuuacuccaaagcug

SEQ ID NO: 1448696 - RNA, 19 nt, Artificial Sequence
  Description of Artificial Sequence: Synthetic oligonucleotide
acccucggauauucuugcc

SEQ ID NO: 1448697 - RNA, 19 nt, Artificial Sequence
  Description of Artificial Sequence: Synthetic oligonucleotide
gauaaccguuaccccagca

SEQ ID NO: 1448698 - RNA, 19 nt, Artificial Sequence
  Description of Artificial Sequence: Synthetic oligonucleotide
agaaggagauucaaaugaa

SEQ ID NO: 1448699 - RNA, 19 nt, Artificial Sequence
  Description of Artificial Sequence: Synthetic oligonucleotide
cccaagaauuccauagccc

SEQ ID NO: 1448700 - RNA, 19 nt, Artificial Sequence
  Description of Artificial Sequence: Synthetic oligonucleotide
aaccuggaugugaggauug

SEQ ID NO: 1448701 - RNA, 19 nt, Artificial Sequence
  Description of Artificial Sequence: Synthetic oligonucleotide
ugggugccuugucaggucu

SEQ ID NO: 1448702 - RNA, 19 nt, Artificial Sequence
  Description of Artificial Sequence: Synthetic oligonucleotide
gaggcguccgauccccaag

SEQ ID NO: 1448703 - RNA, 19 nt, Artificial Sequence
  Description of Artificial Sequence: Synthetic oligonucleotide
gagugcagcaaaauggcua

SEQ ID NO: 1448704 - RNA, 19 nt, Artificial Sequence
  Description of Artificial Sequence: Synthetic oligonucleotide
caguucaccguuguuggug

SEQ ID NO: 1448705 - RNA, 19 nt, Artificial Sequence
  Description of Artificial Sequence: Synthetic oligonucleotide
gauaagggagugugcucga

SEQ ID NO: 1448706 - RNA, 19 nt, Artificial Sequence
  Description of Artificial Sequence: Synthetic oligonucleotide
cauugucacccuccacggg

SEQ ID NO: 1448707 - RNA, 19 nt, Artificial Sequence
  Description of Artificial Sequence: Synthetic oligonucleotide
uucgaggcguccgaucccc

SEQ ID NO: 1448708 - RNA, 19 nt, Artificial Sequence
  Description of Artificial Sequence: Synthetic oligonucleotide
ugaauuccgucaagccgaa

SEQ ID NO: 1448709 - RNA, 19 nt, Artificial Sequence
  Description of Artificial Sequence: Synthetic oligonucleotide
uggccguccagccaagauu

SEQ ID NO: 1448710 - RNA, 19 nt, Artificial Sequence
  Description of Artificial Sequence: Synthetic oligonucleotide
caucggaggacacagccaa

SEQ ID NO: 1448711 - RNA, 19 nt, Artificial Sequence
  Description of Artificial Sequence: Synthetic oligonucleotide
cuccugggugccuugucag

SEQ ID NO: 1448712 - RNA, 19 nt, Artificial Sequence
  Description of Artificial Sequence: Synthetic oligonucleotide
gguggcaaccuggauaacc

SEQ ID NO: 1448713 - RNA, 19 nt, Artificial Sequence
  Description of Artificial Sequence: Synthetic oligonucleotide
uuccgucaagccgaagagc

SEQ ID NO: 1448714 - RNA, 19 nt, Artificial Sequence
  Description of Artificial Sequence: Synthetic oligonucleotide
ucucaagccaaggcauucu

SEQ ID NO: 1448715 - RNA, 19 nt, Artificial Sequence
  Description of Artificial Sequence: Synthetic oligonucleotide
aaacguacucauagccccu

SEQ ID NO: 1448716 - RNA, 19 nt, Artificial Sequence
  Description of Artificial Sequence: Synthetic oligonucleotide
ugccuacuucggagaaagg

SEQ ID NO: 1448717 - RNA, 19 nt, Artificial Sequence
  Description of Artificial Sequence: Synthetic oligonucleotide
gagugugcucgaccgcaag

SEQ ID NO: 1448718 - RNA, 19 nt, Artificial Sequence
  Description of Artificial Sequence: Synthetic oligonucleotide
agaggcccaaguguguucu

SEQ ID NO: 1448719 - RNA, 19 nt, Artificial Sequence
  Description of Artificial Sequence: Synthetic oligonucleotide
agccaagauuccacagccc

SEQ ID NO: 1448720 - RNA, 19 nt, Artificial Sequence
  Description of Artificial Sequence: Synthetic oligonucleotide
uccuguguacugugugacu

SEQ ID NO: 1448721 - RNA, 19 nt, Artificial Sequence
  Description of Artificial Sequence: Synthetic oligonucleotide
gauccacaccacaugccac

SEQ ID NO: 1448722 - RNA, 19 nt, Artificial Sequence
  Description of Artificial Sequence: Synthetic oligonucleotide
gucuccaaucucuuaauau

SEQ ID NO: 1448723 - RNA, 19 nt, Artificial Sequence
  Description of Artificial Sequence: Synthetic oligonucleotide
gccccgugaaaucucaagc

SEQ ID NO: 1448724 - RNA, 19 nt, Artificial Sequence
  Description of Artificial Sequence: Synthetic oligonucleotide
uguagugacccaggccugu

SEQ ID NO: 1448725 - RNA, 19 nt, Artificial Sequence
  Description of Artificial Sequence: Synthetic oligonucleotide
ccccgugaaaucucaagcc

SEQ ID NO: 1448726 - RNA, 19 nt, Artificial Sequence
  Description of Artificial Sequence: Synthetic oligonucleotide
accguuaccccagcaaggu

SEQ ID NO: 1448727 - RNA, 19 nt, Artificial Sequence
  Description of Artificial Sequence: Synthetic oligonucleotide
ucggauauucuugccccac

SEQ ID NO: 1448728 - RNA, 19 nt, Artificial Sequence
  Description of Artificial Sequence: Synthetic oligonucleotide
ggaucauuucuggaagagc

SEQ ID NO: 1448729 - RNA, 19 nt, Artificial Sequence
  Description of Artificial Sequence: Synthetic oligonucleotide
acuggucuucgaggcgucc

SEQ ID NO: 1448730 - RNA, 19 nt, Artificial Sequence
  Description of Artificial Sequence: Synthetic oligonucleotide
aaucucaagccaaggcauu

SEQ ID NO: 1448731 - RNA, 19 nt, Artificial Sequence
  Description of Artificial Sequence: Synthetic oligonucleotide
cguccgauccccaagcacc

SEQ ID NO: 1448732 - RNA, 19 nt, Artificial Sequence
  Description of Artificial Sequence: Synthetic oligonucleotide
gaggcccuagcugaaguca

SEQ ID NO: 1448733 - RNA, 19 nt, Artificial Sequence
  Description of Artificial Sequence: Synthetic oligonucleotide
cuggucuucgaggcguccg

SEQ ID NO: 1448734 - RNA, 19 nt, Artificial Sequence
  Description of Artificial Sequence: Synthetic oligonucleotide
gcaccgagggacauuaacc

SEQ ID NO: 1448735 - RNA, 19 nt, Artificial Sequence
  Description of Artificial Sequence: Synthetic oligonucleotide
uucaccguuguuggugagu

SEQ ID NO: 1448736 - RNA, 19 nt, Artificial Sequence
  Description of Artificial Sequence: Synthetic oligonucleotide
gugcucgaccgcaagacac

SEQ ID NO: 1448737 - RNA, 19 nt, Artificial Sequence
  Description of Artificial Sequence: Synthetic oligonucleotide
agaccccuccaucggagga

SEQ ID NO: 1448738 - RNA, 19 nt, Artificial Sequence
  Description of Artificial Sequence: Synthetic oligonucleotide
aggucuccaaucucuuaau

SEQ ID NO: 1448739 - RNA, 19 nt, Artificial Sequence
  Description of Artificial Sequence: Synthetic oligonucleotide
cucaccgggcauugucacc

SEQ ID NO: 1448740 - RNA, 19 nt, Artificial Sequence
  Description of Artificial Sequence: Synthetic oligonucleotide
gugauccacaccacaugcc

SEQ ID NO: 1448741 - RNA, 19 nt, Artificial Sequence
  Description of Artificial Sequence: Synthetic oligonucleotide
gaagagcguaggugggauc

SEQ ID NO: 1448742 - RNA, 19 nt, Artificial Sequence
  Description of Artificial Sequence: Synthetic oligonucleotide
guagaccauggugggaggc

SEQ ID NO: 1448743 - RNA, 19 nt, Artificial Sequence
  Description of Artificial Sequence: Synthetic oligonucleotide
gugugcucgaccgcaagac

SEQ ID NO: 1448744 - RNA, 19 nt, Artificial Sequence
  Description of Artificial Sequence: Synthetic oligonucleotide
uccugggaacuuguggggu

SEQ ID NO: 1448745 - RNA, 19 nt, Artificial Sequence
  Description of Artificial Sequence: Synthetic oligonucleotide
gaaaccuggaugugaggau

SEQ ID NO: 1448746 - RNA, 19 nt, Artificial Sequence
  Description of Artificial Sequence: Synthetic oligonucleotide
caugugauccacaccacau

SEQ ID NO: 1448747 - RNA, 19 nt, Artificial Sequence
  Description of Artificial Sequence: Synthetic oligonucleotide
uggcaaccuggauaaccgu

SEQ ID NO: 1448748 - RNA, 19 nt, Artificial Sequence
  Description of Artificial Sequence: Synthetic oligonucleotide
cuucgaggcguccgauccc

SEQ ID NO: 1448749 - RNA, 19 nt, Artificial Sequence
  Description of Artificial Sequence: Synthetic oligonucleotide
agacuuccccuuuguuugu

SEQ ID NO: 1448750 - RNA, 19 nt, Artificial Sequence
  Description of Artificial Sequence: Synthetic oligonucleotide
ugucaggauaagggagugu

SEQ ID NO: 1448751 - RNA, 19 nt, Artificial Sequence
  Description of Artificial Sequence: Synthetic oligonucleotide
caaagaccccuccaucgga

SEQ ID NO: 1448752 - RNA, 19 nt, Artificial Sequence
  Description of Artificial Sequence: Synthetic oligonucleotide
caggcacggaggagguucc

SEQ ID NO: 1448753 - RNA, 19 nt, Artificial Sequence
  Description of Artificial Sequence: Synthetic oligonucleotide
aggagguuccaaggcuggg

SEQ ID NO: 1448754 - RNA, 19 nt, Artificial Sequence
  Description of Artificial Sequence: Synthetic oligonucleotide
ggcaccgagggacauuaac

SEQ ID NO: 1448755 - RNA, 19 nt, Artificial Sequence
  Description of Artificial Sequence: Synthetic oligonucleotide
caccgagggacauuaaccu

SEQ ID NO: 1448756 - RNA, 19 nt, Artificial Sequence
  Description of Artificial Sequence: Synthetic oligonucleotide
gucaagccgaagagcguag

SEQ ID NO: 1448757 - RNA, 19 nt, Artificial Sequence
  Description of Artificial Sequence: Synthetic oligonucleotide
caacccgugccaccacaag

SEQ ID NO: 1448758 - RNA, 19 nt, Artificial Sequence
  Description of Artificial Sequence: Synthetic oligonucleotide
gauggacccagaaggagau

SEQ ID NO: 1448759 - RNA, 19 nt, Artificial Sequence
  Description of Artificial Sequence: Synthetic oligonucleotide
accgggcauugucacccuc

SEQ ID NO: 1448760 - RNA, 19 nt, Artificial Sequence
  Description of Artificial Sequence: Synthetic oligonucleotide
guucaccguuguuggugag

SEQ ID NO: 1448761 - RNA, 19 nt, Artificial Sequence
  Description of Artificial Sequence: Synthetic oligonucleotide
caccguagguggcaaccug

SEQ ID NO: 1448762 - RNA, 19 nt, Artificial Sequence
  Description of Artificial Sequence: Synthetic oligonucleotide
ucacacuggccgccccgug

SEQ ID NO: 1448763 - RNA, 19 nt, Artificial Sequence
  Description of Artificial Sequence: Synthetic oligonucleotide
ccuguguacugugugacuc

SEQ ID NO: 1448764 - RNA, 19 nt, Artificial Sequence
  Description of Artificial Sequence: Synthetic oligonucleotide
acacuggccgccccgugaa

SEQ ID NO: 1448765 - RNA, 19 nt, Artificial Sequence
  Description of Artificial Sequence: Synthetic oligonucleotide
cuccggccagcuugguggg

SEQ ID NO: 1448766 - RNA, 19 nt, Artificial Sequence
  Description of Artificial Sequence: Synthetic oligonucleotide
aggcccuagcugaagucag

SEQ ID NO: 1448767 - RNA, 19 nt, Artificial Sequence
  Description of Artificial Sequence: Synthetic oligonucleotide
gcaagacaccugcaacacc

SEQ ID NO: 1448768 - RNA, 19 nt, Artificial Sequence
  Description of Artificial Sequence: Synthetic oligonucleotide
uaagcccgcaucggaucug

SEQ ID NO: 1448769 - RNA, 19 nt, Artificial Sequence
  Description of Artificial Sequence: Synthetic oligonucleotide
guccgauccccaagcaccc

SEQ ID NO: 1448770 - RNA, 19 nt, Artificial Sequence
  Description of Artificial Sequence: Synthetic oligonucleotide
agacaaccuggaccaccug

SEQ ID NO: 1448771 - RNA, 19 nt, Artificial Sequence
  Description of Artificial Sequence: Synthetic oligonucleotide
ccgagggacauuaaccuga

SEQ ID NO: 1448772 - RNA, 19 nt, Artificial Sequence
  Description of Artificial Sequence: Synthetic oligonucleotide
ggccugucuguccaucagc

SEQ ID NO: 1448773 - RNA, 19 nt, Artificial Sequence
  Description of Artificial Sequence: Synthetic oligonucleotide
aguuaccaugugauccaca

SEQ ID NO: 1448774 - RNA, 19 nt, Artificial Sequence
  Description of Artificial Sequence: Synthetic oligonucleotide
ccuccaucggaggacacag

SEQ ID NO: 1448775 - RNA, 19 nt, Artificial Sequence
  Description of Artificial Sequence: Synthetic oligonucleotide
acaggcucaccgggcauug

SEQ ID NO: 1448776 - RNA, 19 nt, Artificial Sequence
  Description of Artificial Sequence: Synthetic oligonucleotide
agccccugguuuuauccuu

SEQ ID NO: 1448777 - RNA, 19 nt, Artificial Sequence
  Description of Artificial Sequence: Synthetic oligonucleotide
gccaagauuccacagcccu

SEQ ID NO: 1448778 - RNA, 19 nt, Artificial Sequence
  Description of Artificial Sequence: Synthetic oligonucleotide
caaaauggcuaagcccgca

SEQ ID NO: 1448779 - RNA, 19 nt, Artificial Sequence
  Description of Artificial Sequence: Synthetic oligonucleotide
ggccguccagccaagauuc

SEQ ID NO: 1448780 - RNA, 19 nt, Artificial Sequence
  Description of Artificial Sequence: Synthetic oligonucleotide
gucuccggccagcuuggug

SEQ ID NO: 1448781 - RNA, 19 nt, Artificial Sequence
  Description of Artificial Sequence: Synthetic oligonucleotide
cagacaaccuggaccaccu

SEQ ID NO: 1448782 - RNA, 19 nt, Artificial Sequence
  Description of Artificial Sequence: Synthetic oligonucleotide
caccguuguuggugagugc

SEQ ID NO: 1448783 - RNA, 19 nt, Artificial Sequence
  Description of Artificial Sequence: Synthetic oligonucleotide
cucggauauucuugcccca

SEQ ID NO: 1448784 - RNA, 19 nt, Artificial Sequence
  Description of Artificial Sequence: Synthetic oligonucleotide
cuccacgggaaauacuggu

SEQ ID NO: 1448785 - RNA, 19 nt, Artificial Sequence
  Description of Artificial Sequence: Synthetic oligonucleotide
ugucacccuccacgggaaa

SEQ ID NO: 1448786 - RNA, 19 nt, Artificial Sequence
  Description of Artificial Sequence: Synthetic oligonucleotide
ggccagaguuaccauguga

SEQ ID NO: 1448787 - RNA, 19 nt, Artificial Sequence
  Description of Artificial Sequence: Synthetic oligonucleotide
agcauuuggccuacagauu

SEQ ID NO: 1448788 - RNA, 19 nt, Artificial Sequence
  Description of Artificial Sequence: Synthetic oligonucleotide
ccaagcagcaaucaccgua

SEQ ID NO: 1448789 - RNA, 19 nt, Artificial Sequence
  Description of Artificial Sequence: Synthetic oligonucleotide
gaauuccgucaagccgaag

SEQ ID NO: 1448790 - RNA, 19 nt, Artificial Sequence
  Description of Artificial Sequence: Synthetic oligonucleotide
cucgaccgcaagacaccug

SEQ ID NO: 1448791 - RNA, 19 nt, Artificial Sequence
  Description of Artificial Sequence: Synthetic oligonucleotide
agcguaggugggaucauuu

SEQ ID NO: 1448792 - RNA, 19 nt, Artificial Sequence
  Description of Artificial Sequence: Synthetic oligonucleotide
ggugcaggcuccaaaacgu

SEQ ID NO: 1448793 - RNA, 19 nt, Artificial Sequence
  Description of Artificial Sequence: Synthetic oligonucleotide
ggauaaccguuaccccagc

SEQ ID NO: 1448794 - RNA, 19 nt, Artificial Sequence
  Description of Artificial Sequence: Synthetic oligonucleotide
cacccuccacgggaaauac

SEQ ID NO: 1448795 - RNA, 19 nt, Artificial Sequence
  Description of Artificial Sequence: Synthetic oligonucleotide
acuggccgccccgugaaau

SEQ ID NO: 1448796 - RNA, 19 nt, Artificial Sequence
  Description of Artificial Sequence: Synthetic oligonucleotide
caucggaucugggaaaccu

SEQ ID NO: 1448797 - RNA, 19 nt, Artificial Sequence
  Description of Artificial Sequence: Synthetic oligonucleotide
gcaaaauggcuaagcccgc

SEQ ID NO: 1448798 - RNA, 19 nt, Artificial Sequence
  Description of Artificial Sequence: Synthetic oligonucleotide
cccgugaaaucucaagcca

SEQ ID NO: 1448799 - RNA, 19 nt, Artificial Sequence
  Description of Artificial Sequence: Synthetic oligonucleotide
cuaagcccgcaucggaucu

SEQ ID NO: 1448800 - RNA, 19 nt, Artificial Sequence
  Description of Artificial Sequence: Synthetic oligonucleotide
cacaacccgugccaccaca

SEQ ID NO: 1448801 - RNA, 19 nt, Artificial Sequence
  Description of Artificial Sequence: Synthetic oligonucleotide
ccaggcacggaggagguuc

SEQ ID NO: 1448802 - RNA, 19 nt, Artificial Sequence
  Description of Artificial Sequence: Synthetic oligonucleotide
ucgaggcguccgaucccca

SEQ ID NO: 1448803 - RNA, 19 nt, Artificial Sequence
  Description of Artificial Sequence: Synthetic oligonucleotide
ccgcaagacaccugcaaca

SEQ ID NO: 1448804 - RNA, 19 nt, Artificial Sequence
  Description of Artificial Sequence: Synthetic oligonucleotide
gccgaagagcguagguggg

SEQ ID NO: 1448805 - RNA, 19 nt, Artificial Sequence
  Description of Artificial Sequence: Synthetic oligonucleotide
gcucaccgggcauugucac

SEQ ID NO: 1448806 - RNA, 19 nt, Artificial Sequence
  Description of Artificial Sequence: Synthetic oligonucleotide
cacacuggccgccccguga

SEQ ID NO: 1448807 - RNA, 19 nt, Artificial Sequence
  Description of Artificial Sequence: Synthetic oligonucleotide
aucggaggacacagccaag

SEQ ID NO: 1448808 - RNA, 19 nt, Artificial Sequence
  Description of Artificial Sequence: Synthetic oligonucleotide
ggagguuccaaggcuggga

SEQ ID NO: 1448809 - RNA, 19 nt, Artificial Sequence
  Description of Artificial Sequence: Synthetic oligonucleotide
ggucuccaaucucuuaaua

SEQ ID NO: 1448810 - RNA, 19 nt, Artificial Sequence
  Description of Artificial Sequence: Synthetic oligonucleotide
cuugccccacacaaacagu

SEQ ID NO: 1448811 - RNA, 19 nt, Artificial Sequence
  Description of Artificial Sequence: Synthetic oligonucleotide
gggagugugcucgaccgca

SEQ ID NO: 1448812 - RNA, 19 nt, Artificial Sequence
  Description of Artificial Sequence: Synthetic oligonucleotide
gcaaucaccguagguggca

SEQ ID NO: 1448813 - RNA, 19 nt, Artificial Sequence
  Description of Artificial Sequence: Synthetic oligonucleotide
cuguguacugugugacucu

SEQ ID NO: 1448814 - RNA, 19 nt, Artificial Sequence
  Description of Artificial Sequence: Synthetic oligonucleotide
gucugucgaggggcagugg

SEQ ID NO: 1448815 - RNA, 19 nt, Artificial Sequence
  Description of Artificial Sequence: Synthetic oligonucleotide
acaacccgugccaccacaa

SEQ ID NO: 1448816 - RNA, 19 nt, Artificial Sequence
  Description of Artificial Sequence: Synthetic oligonucleotide
cccugguuuuauccuuccg

SEQ ID NO: 1448817 - RNA, 19 nt, Artificial Sequence
  Description of Artificial Sequence: Synthetic oligonucleotide
guacugugugacucucacu

SEQ ID NO: 1448818 - RNA, 19 nt, Artificial Sequence
  Description of Artificial Sequence: Synthetic oligonucleotide
gcguaggugggaucauuuc

SEQ ID NO: 1448819 - RNA, 19 nt, Artificial Sequence
  Description of Artificial Sequence: Synthetic oligonucleotide
accccuccaucggaggaca

SEQ ID NO: 1448820 - RNA, 19 nt, Artificial Sequence
  Description of Artificial Sequence: Synthetic oligonucleotide
cccacaagcauuuggccua

SEQ ID NO: 1448821 - RNA, 19 nt, Artificial Sequence
  Description of Artificial Sequence: Synthetic oligonucleotide
cgauccccaagcacccucg

SEQ ID NO: 1448822 - RNA, 19 nt, Artificial Sequence
  Description of Artificial Sequence: Synthetic oligonucleotide
gcccacaagcauuuggccu

SEQ ID NO: 1448823 - RNA, 19 nt, Artificial Sequence
  Description of Artificial Sequence: Synthetic oligonucleotide
ccgugaaaucucaagccaa

SEQ ID NO: 1448824 - RNA, 19 nt, Artificial Sequence
  Description of Artificial Sequence: Synthetic oligonucleotide
gccagaguuaccaugugau

SEQ ID NO: 1448825 - RNA, 19 nt, Artificial Sequence
  Description of Artificial Sequence: Synthetic oligonucleotide
guagugacccaggccuguc

SEQ ID NO: 1448826 - RNA, 19 nt, Artificial Sequence
  Description of Artificial Sequence: Synthetic oligonucleotide
caagccgaagagcguaggu

SEQ ID NO: 1448827 - RNA, 19 nt, Artificial Sequence
  Description of Artificial Sequence: Synthetic oligonucleotide
cccagacuguccugggaac

SEQ ID NO: 1448828 - RNA, 19 nt, Artificial Sequence
  Description of Artificial Sequence: Synthetic oligonucleotide
ccaugugauccacaccaca

SEQ ID NO: 1448829 - RNA, 19 nt, Artificial Sequence
  Description of Artificial Sequence: Synthetic oligonucleotide
guguacugugugacucuca

SEQ ID NO: 1448830 - RNA, 19 nt, Artificial Sequence
  Description of Artificial Sequence: Synthetic oligonucleotide
cccgugggaauuguucccc

SEQ ID NO: 1448831 - RNA, 19 nt, Artificial Sequence
  Description of Artificial Sequence: Synthetic oligonucleotide
guccgcacugcccguggga

SEQ ID NO: 1448832 - RNA, 19 nt, Artificial Sequence
  Description of Artificial Sequence: Synthetic oligonucleotide
ucgucuccugaggucuguc

SEQ ID NO: 1448833 - RNA, 19 nt, Artificial Sequence
  Description of Artificial Sequence: Synthetic oligonucleotide
gcguccgauccccaagcac

SEQ ID NO: 1448834 - RNA, 19 nt, Artificial Sequence
  Description of Artificial Sequence: Synthetic oligonucleotide
cuugccuacuucggagaaa

SEQ ID NO: 1448835 - RNA, 19 nt, Artificial Sequence
  Description of Artificial Sequence: Synthetic oligonucleotide
uccgauccccaagcacccu

SEQ ID NO: 1448836 - RNA, 19 nt, Artificial Sequence
  Description of Artificial Sequence: Synthetic oligonucleotide
uuccguccgcacugcccgu

SEQ ID NO: 1448837 - RNA, 19 nt, Artificial Sequence
  Description of Artificial Sequence: Synthetic oligonucleotide
caccugcaacaccuucguc

SEQ ID NO: 1448838 - RNA, 19 nt, Artificial Sequence
  Description of Artificial Sequence: Synthetic oligonucleotide
cccgcaucggaucugggaa

SEQ ID NO: 1448839 - RNA, 19 nt, Artificial Sequence
  Description of Artificial Sequence: Synthetic oligonucleotide
guccaucaaaguccugcau

SEQ ID NO: 1448840 - RNA, 19 nt, Artificial Sequence
  Description of Artificial Sequence: Synthetic oligonucleotide
caaucaccguagguggcaa

SEQ ID NO: 1448841 - RNA, 19 nt, Artificial Sequence
  Description of Artificial Sequence: Synthetic oligonucleotide
gcaacaccuucgucuccug

SEQ ID NO: 1448842 - RNA, 19 nt, Artificial Sequence
  Description of Artificial Sequence: Synthetic oligonucleotide
cgcaagacaccugcaacac

SEQ ID NO: 1448843 - RNA, 19 nt, Artificial Sequence
  Description of Artificial Sequence: Synthetic oligonucleotide
ggcucaccgggcauuguca

SEQ ID NO: 1448844 - RNA, 19 nt, Artificial Sequence
  Description of Artificial Sequence: Synthetic oligonucleotide
gcccgcaucggaucuggga

SEQ ID NO: 1448845 - RNA, 19 nt, Artificial Sequence
  Description of Artificial Sequence: Synthetic oligonucleotide
ccguuuccaagagguuugg

SEQ ID NO: 1448846 - RNA, 19 nt, Artificial Sequence
  Description of Artificial Sequence: Synthetic oligonucleotide
cgccccgugaaaucucaag

SEQ ID NO: 1448847 - RNA, 19 nt, Artificial Sequence
  Description of Artificial Sequence: Synthetic oligonucleotide
cugcagguacucagaauuu

SEQ ID NO: 1448848 - RNA, 19 nt, Artificial Sequence
  Description of Artificial Sequence: Synthetic oligonucleotide
acccuccacgggaaauacu

SEQ ID NO: 1448849 - RNA, 19 nt, Artificial Sequence
  Description of Artificial Sequence: Synthetic oligonucleotide
gagggacauuaaccugagu

SEQ ID NO: 1448850 - RNA, 19 nt, Artificial Sequence
  Description of Artificial Sequence: Synthetic oligonucleotide
gcaucggaucugggaaacc

SEQ ID NO: 1448851 - RNA, 19 nt, Artificial Sequence
  Description of Artificial Sequence: Synthetic oligonucleotide
ccgauccccaagcacccuc

SEQ ID NO: 1448852 - RNA, 19 nt, Artificial Sequence
  Description of Artificial Sequence: Synthetic oligonucleotide
agcccgcaucggaucuggg

SEQ ID NO: 1448853 - RNA, 19 nt, Artificial Sequence
  Description of Artificial Sequence: Synthetic oligonucleotide
acugcccgugggaauuguu

SEQ ID NO: 1448854 - RNA, 19 nt, Artificial Sequence
  Description of Artificial Sequence: Synthetic oligonucleotide
ccuugccuacuucggagaa

SEQ ID NO: 1448855 - RNA, 19 nt, Artificial Sequence
  Description of Artificial Sequence: Synthetic oligonucleotide
agcuggccguccagccaag

SEQ ID NO: 1448856 - RNA, 19 nt, Artificial Sequence
  Description of Artificial Sequence: Synthetic oligonucleotide
cgcaucggaucugggaaac

SEQ ID NO: 1448857 - RNA, 19 nt, Artificial Sequence
  Description of Artificial Sequence: Synthetic oligonucleotide
uccggccagcuuggugggu

SEQ ID NO: 1448858 - RNA, 19 nt, Artificial Sequence
  Description of Artificial Sequence: Synthetic oligonucleotide
aggcacggaggagguucca

SEQ ID NO: 1448859 - RNA, 19 nt, Artificial Sequence
  Description of Artificial Sequence: Synthetic oligonucleotide
ccguuaccccagcaagguc

SEQ ID NO: 1448860 - RNA, 19 nt, Artificial Sequence
  Description of Artificial Sequence: Synthetic oligonucleotide
cuggccguccagccaagau

SEQ ID NO: 1448861 - RNA, 19 nt, Artificial Sequence
  Description of Artificial Sequence: Synthetic oligonucleotide
ccguccgcacugcccgugg

SEQ ID NO: 1448862 - RNA, 19 nt, Artificial Sequence
  Description of Artificial Sequence: Synthetic oligonucleotide
ggcaaccuggauaaccguu

SEQ ID NO: 1448863 - RNA, 19 nt, Artificial Sequence
  Description of Artificial Sequence: Synthetic oligonucleotide
gccccugguuuuauccuuc

SEQ ID NO: 1448864 - RNA, 19 nt, Artificial Sequence
  Description of Artificial Sequence: Synthetic oligonucleotide
gagcguaggugggaucauu

SEQ ID NO: 1448865 - RNA, 19 nt, Artificial Sequence
  Description of Artificial Sequence: Synthetic oligonucleotide
ggcacggaggagguuccaa

SEQ ID NO: 1448866 - RNA, 19 nt, Artificial Sequence
  Description of Artificial Sequence: Synthetic oligonucleotide
gcccuagcugaagucagcu

SEQ ID NO: 1448867 - RNA, 19 nt, Artificial Sequence
  Description of Artificial Sequence: Synthetic oligonucleotide
cugggaugcuguagaccau

SEQ ID NO: 1448868 - RNA, 19 nt, Artificial Sequence
  Description of Artificial Sequence: Synthetic oligonucleotide
gcacugcccgugggaauug

SEQ ID NO: 1448869 - RNA, 19 nt, Artificial Sequence
  Description of Artificial Sequence: Synthetic oligonucleotide
ggagugugcucgaccgcaa

SEQ ID NO: 1448870 - RNA, 19 nt, Artificial Sequence
  Description of Artificial Sequence: Synthetic oligonucleotide
cucacacuggccgccccgu

SEQ ID NO: 1448871 - RNA, 19 nt, Artificial Sequence
  Description of Artificial Sequence: Synthetic oligonucleotide
ccgugggaauuguucccca

SEQ ID NO: 1448872 - RNA, 19 nt, Artificial Sequence
  Description of Artificial Sequence: Synthetic oligonucleotide
ggcccaaguguguucuguu

SEQ ID NO: 1448873 - RNA, 19 nt, Artificial Sequence
  Description of Artificial Sequence: Synthetic oligonucleotide
ccgcaucggaucugggaaa

SEQ ID NO: 1448874 - RNA, 19 nt, Artificial Sequence
  Description of Artificial Sequence: Synthetic oligonucleotide
cgucaagccgaagagcgua

SEQ ID NO: 1448875 - RNA, 19 nt, Artificial Sequence
  Description of Artificial Sequence: Synthetic oligonucleotide
ccgaagagcguagguggga

SEQ ID NO: 1448876 - RNA, 19 nt, Artificial Sequence
  Description of Artificial Sequence: Synthetic oligonucleotide
ccccaugcugaagacaccu

SEQ ID NO: 1448877 - RNA, 19 nt, Artificial Sequence
  Description of Artificial Sequence: Synthetic oligonucleotide
gagccguuuccaagagguu

SEQ ID NO: 1448878 - RNA, 19 nt, Artificial Sequence
  Description of Artificial Sequence: Synthetic oligonucleotide
gcucgaccgcaagacaccu

SEQ ID NO: 1448879 - RNA, 19 nt, Artificial Sequence
  Description of Artificial Sequence: Synthetic oligonucleotide
cccgugccaccacaagcca

SEQ ID NO: 1448880 - RNA, 19 nt, Artificial Sequence
  Description of Artificial Sequence: Synthetic oligonucleotide
ccccaagcacccucggaua

SEQ ID NO: 1448881 - RNA, 19 nt, Artificial Sequence
  Description of Artificial Sequence: Synthetic oligonucleotide
cacuggccgccccgugaaa

SEQ ID NO: 1448882 - RNA, 19 nt, Artificial Sequence
  Description of Artificial Sequence: Synthetic oligonucleotide
aggcaccgagggacauuaa

SEQ ID NO: 1448883 - RNA, 19 nt, Artificial Sequence
  Description of Artificial Sequence: Synthetic oligonucleotide
caaggucuccggccagcuu

SEQ ID NO: 1448884 - RNA, 19 nt, Artificial Sequence
  Description of Artificial Sequence: Synthetic oligonucleotide
ggccgccccgugaaaucuc

SEQ ID NO: 1448885 - RNA, 19 nt, Artificial Sequence
  Description of Artificial Sequence: Synthetic oligonucleotide
ccgucaagccgaagagcgu

SEQ ID NO: 1448886 - RNA, 19 nt, Artificial Sequence
  Description of Artificial Sequence: Synthetic oligonucleotide
ccccuuuguuugugaggaa

SEQ ID NO: 1448887 - RNA, 19 nt, Artificial Sequence
  Description of Artificial Sequence: Synthetic oligonucleotide
cacugcccgugggaauugu

SEQ ID NO: 1448888 - RNA, 19 nt, Artificial Sequence
  Description of Artificial Sequence: Synthetic oligonucleotide
cgaccgcaagacaccugca

SEQ ID NO: 1448889 - RNA, 19 nt, Artificial Sequence
  Description of Artificial Sequence: Synthetic oligonucleotide
cgaggcguccgauccccaa

SEQ ID NO: 1448890 - RNA, 19 nt, Artificial Sequence
  Description of Artificial Sequence: Synthetic oligonucleotide
cgaagagcguaggugggau

SEQ ID NO: 1448891 - RNA, 19 nt, Artificial Sequence
  Description of Artificial Sequence: Synthetic oligonucleotide
cgugggaauuguuccccau

SEQ ID NO: 1448892 - RNA, 19 nt, Artificial Sequence
  Description of Artificial Sequence: Synthetic oligonucleotide
cccaugcugaagacaccuu

SEQ ID NO: 1448893 - RNA, 19 nt, Artificial Sequence
  Description of Artificial Sequence: Synthetic oligonucleotide
caggcucaccgggcauugu

SEQ ID NO: 1448894 - RNA, 19 nt, Artificial Sequence
  Description of Artificial Sequence: Synthetic oligonucleotide
cgcacugcccgugggaauu

SEQ ID NO: 1448895 - RNA, 19 nt, Artificial Sequence
  Description of Artificial Sequence: Synthetic oligonucleotide
ggucuccggccagcuuggu

SEQ ID NO: 1448896 - RNA, 19 nt, Artificial Sequence
  Description of Artificial Sequence: Synthetic oligonucleotide
auauaaaugaccgaggugc

SEQ ID NO: 1448897 - RNA, 19 nt, Artificial Sequence
  Description of Artificial Sequence: Synthetic oligonucleotide
aauucgaucgauuucuuuc

SEQ ID NO: 1448898 - RNA, 19 nt, Artificial Sequence
  Description of Artificial Sequence: Synthetic oligonucleotide
uuuaauccaacaaauaucu

SEQ ID NO: 1448899 - RNA, 19 nt, Artificial Sequence
  Description of Artificial Sequence: Synthetic oligonucleotide
auaauguauuaucuuaucc

SEQ ID NO: 1448900 - RNA, 19 nt, Artificial Sequence
  Description of Artificial Sequence: Synthetic oligonucleotide
aguacuaucucuuccaaac

SEQ ID NO: 1448901 - RNA, 19 nt, Artificial Sequence
  Description of Artificial Sequence: Synthetic oligonucleotide
uauauugccaauuucaggu

SEQ ID NO: 1448902 - RNA, 19 nt, Artificial Sequence
  Description of Artificial Sequence: Synthetic oligonucleotide
aacauuagcaugaauaaag

SEQ ID NO: 1448903 - RNA, 19 nt, Artificial Sequence
  Description of Artificial Sequence: Synthetic oligonucleotide
uuagcaugaauaaaguccc

SEQ ID NO: 1448904 - RNA, 19 nt, Artificial Sequence
  Description of Artificial Sequence: Synthetic oligonucleotide
uguacauccagucaaguac

SEQ ID NO: 1448905 - RNA, 19 nt, Artificial Sequence
  Description of Artificial Sequence: Synthetic oligonucleotide
aaaggaguuaccaagagca

SEQ ID NO: 1448906 - RNA, 19 nt, Artificial Sequence
  Description of Artificial Sequence: Synthetic oligonucleotide
uauaguacucuuccaaagg

SEQ ID NO: 1448907 - RNA, 19 nt, Artificial Sequence
  Description of Artificial Sequence: Synthetic oligonucleotide
uucuauauugccaauuuca

SEQ ID NO: 1448908 - RNA, 19 nt, Artificial Sequence
  Description of Artificial Sequence: Synthetic oligonucleotide
uccguuuugaauuuggagc

SEQ ID NO: 1448909 - RNA, 19 nt, Artificial Sequence
  Description of Artificial Sequence: Synthetic oligonucleotide
agaugcaacagcaugaagc

SEQ ID NO: 1448910 - RNA, 19 nt, Artificial Sequence
  Description of Artificial Sequence: Synthetic oligonucleotide
uguaguuacuauuuguaag

SEQ ID NO: 1448911 - RNA, 19 nt, Artificial Sequence
  Description of Artificial Sequence: Synthetic oligonucleotide
uauuuguaagcguaggucc

SEQ ID NO: 1448912 - RNA, 19 nt, Artificial Sequence
  Description of Artificial Sequence: Synthetic oligonucleotide
aaguaaagguacuggaauc

SEQ ID NO: 1448913 - RNA, 19 nt, Artificial Sequence
  Description of Artificial Sequence: Synthetic oligonucleotide
ucugugauuauuaagucaa

SEQ ID NO: 1448914 - RNA, 19 nt, Artificial Sequence
  Description of Artificial Sequence: Synthetic oligonucleotide
agaaacgaaagcaaagugc

SEQ ID NO: 1448915 - RNA, 19 nt, Artificial Sequence
  Description of Artificial Sequence: Synthetic oligonucleotide
aauaggaugcguauguuuc

SEQ ID NO: 1448916 - RNA, 19 nt, Artificial Sequence
  Description of Artificial Sequence: Synthetic oligonucleotide
uaacuucauaauaucaucc

SEQ ID NO: 1448917 - RNA, 19 nt, Artificial Sequence
  Description of Artificial Sequence: Synthetic oligonucleotide
ucuauauugccaauuucag

SEQ ID NO: 1448918 - RNA, 19 nt, Artificial Sequence
  Description of Artificial Sequence: Synthetic oligonucleotide
ugauuauuaagucaauguc

SEQ ID NO: 1448919 - RNA, 19 nt, Artificial Sequence
  Description of Artificial Sequence: Synthetic oligonucleotide
acauacucuaccgaggucc

SEQ ID NO: 1448920 - RNA, 19 nt, Artificial Sequence
  Description of Artificial Sequence: Synthetic oligonucleotide
ucguguuucagcaauuucc

SEQ ID NO: 1448921 - RNA, 19 nt, Artificial Sequence
  Description of Artificial Sequence: Synthetic oligonucleotide
uucguaaacauacucuacc

SEQ ID NO: 1448922 - RNA, 19 nt, Artificial Sequence
  Description of Artificial Sequence: Synthetic oligonucleotide
uaauccaacaaauaucuuc

SEQ ID NO: 1448923 - RNA, 19 nt, Artificial Sequence
  Description of Artificial Sequence: Synthetic oligonucleotide
uucauaauaucaucccacg

SEQ ID NO: 1448924 - RNA, 19 nt, Artificial Sequence
  Description of Artificial Sequence: Synthetic oligonucleotide
guaaacauacucuaccgag

SEQ ID NO: 1448925 - RNA, 19 nt, Artificial Sequence
  Description of Artificial Sequence: Synthetic oligonucleotide
uuaccaagagcaauaaugu

SEQ ID NO: 1448926 - RNA, 19 nt, Artificial Sequence
  Description of Artificial Sequence: Synthetic oligonucleotide
ugaaauaggaugcguaugu

SEQ ID NO: 1448927 - RNA, 19 nt, Artificial Sequence
  Description of Artificial Sequence: Synthetic oligonucleotide
guaguuacuauuuguaagc

SEQ ID NO: 1448928 - RNA, 19 nt, Artificial Sequence
  Description of Artificial Sequence: Synthetic oligonucleotide
auaaaguccccaucugugc

SEQ ID NO: 1448929 - RNA, 19 nt, Artificial Sequence
  Description of Artificial Sequence: Synthetic oligonucleotide
aggaauauaaaugaccgag

SEQ ID NO: 1448930 - RNA, 19 nt, Artificial Sequence
  Description of Artificial Sequence: Synthetic oligonucleotide
uaagucuccacuaccgagg

SEQ ID NO: 1448931 - RNA, 19 nt, Artificial Sequence
  Description of Artificial Sequence: Synthetic oligonucleotide
uguauuaucuuauccggca

SEQ ID NO: 1448932 - RNA, 19 nt, Artificial Sequence
  Description of Artificial Sequence: Synthetic oligonucleotide
ucguaaacauacucuaccg

SEQ ID NO: 1448933 - RNA, 19 nt, Artificial Sequence
  Description of Artificial Sequence: Synthetic oligonucleotide
uguaucuccuucauccagg

SEQ ID NO: 1448934 - RNA, 19 nt, Artificial Sequence
  Description of Artificial Sequence: Synthetic oligonucleotide
uacuaucucuuccaaacag

SEQ ID NO: 1448935 - RNA, 19 nt, Artificial Sequence
  Description of Artificial Sequence: Synthetic oligonucleotide
aauaucaucccacguccag

SEQ ID NO: 1448936 - RNA, 19 nt, Artificial Sequence
  Description of Artificial Sequence: Synthetic oligonucleotide
uaaguaaagguacuggaau

SEQ ID NO: 1448937 - RNA, 19 nt, Artificial Sequence
  Description of Artificial Sequence: Synthetic oligonucleotide
aaacauacucuaccgaggu

SEQ ID NO: 1448938 - RNA, 19 nt, Artificial Sequence
  Description of Artificial Sequence: Synthetic oligonucleotide
aauaaaguccccaucugug

SEQ ID NO: 1448939 - RNA, 19 nt, Artificial Sequence
  Description of Artificial Sequence: Synthetic oligonucleotide
cauaauaucaucccacguc

SEQ ID NO: 1448940 - RNA, 19 nt, Artificial Sequence
  Description of Artificial Sequence: Synthetic oligonucleotide
agagucuucgucuugccag

SEQ ID NO: 1448941 - RNA, 19 nt, Artificial Sequence
  Description of Artificial Sequence: Synthetic oligonucleotide
aauuuggagcagcuguauc

SEQ ID NO: 1448942 - RNA, 19 nt, Artificial Sequence
  Description of Artificial Sequence: Synthetic oligonucleotide
ugauaguacuaucucuucc

SEQ ID NO: 1448943 - RNA, 19 nt, Artificial Sequence
  Description of Artificial Sequence: Synthetic oligonucleotide
ucuucauauggcaauuucu

SEQ ID NO: 1448944 - RNA, 19 nt, Artificial Sequence
  Description of Artificial Sequence: Synthetic oligonucleotide
acuggaaucuuuguaaauc

SEQ ID NO: 1448945 - RNA, 19 nt, Artificial Sequence
  Description of Artificial Sequence: Synthetic oligonucleotide
gaagacgucgucuuccaag

SEQ ID NO: 1448946 - RNA, 19 nt, Artificial Sequence
  Description of Artificial Sequence: Synthetic oligonucleotide
aaugcucuauuauaugaaa

SEQ ID NO: 1448947 - RNA, 19 nt, Artificial Sequence
  Description of Artificial Sequence: Synthetic oligonucleotide
ucuaugucugcuuguaagc

SEQ ID NO: 1448948 - RNA, 19 nt, Artificial Sequence
  Description of Artificial Sequence: Synthetic oligonucleotide
ucugaaaacugccuuugga

SEQ ID NO: 1448949 - RNA, 19 nt, Artificial Sequence
  Description of Artificial Sequence: Synthetic oligonucleotide
acuaccgagguggaaagcc

SEQ ID NO: 1448950 - RNA, 19 nt, Artificial Sequence
  Description of Artificial Sequence: Synthetic oligonucleotide
uaagcguucccuuaaguaa

SEQ ID NO: 1448951 - RNA, 19 nt, Artificial Sequence
  Description of Artificial Sequence: Synthetic oligonucleotide
augucaaaggcuucuaugu

SEQ ID NO: 1448952 - RNA, 19 nt, Artificial Sequence
  Description of Artificial Sequence: Synthetic oligonucleotide
cuauaguacucuuccaaag

SEQ ID NO: 1448953 - RNA, 19 nt, Artificial Sequence
  Description of Artificial Sequence: Synthetic oligonucleotide
aacagaugaagacgucguc

SEQ ID NO: 1448954 - RNA, 19 nt, Artificial Sequence
  Description of Artificial Sequence: Synthetic oligonucleotide
gagaaacgaaagcaaagug

SEQ ID NO: 1448955 - RNA, 19 nt, Artificial Sequence
  Description of Artificial Sequence: Synthetic oligonucleotide
uucuuucucgaccacggcc

SEQ ID NO: 1448956 - RNA, 19 nt, Artificial Sequence
  Description of Artificial Sequence: Synthetic oligonucleotide
uguuucagcaauuucccuc

SEQ ID NO: 1448957 - RNA, 19 nt, Artificial Sequence
  Description of Artificial Sequence: Synthetic oligonucleotide
aaugcuaucggcacuuuca

SEQ ID NO: 1448958 - RNA, 19 nt, Artificial Sequence
  Description of Artificial Sequence: Synthetic oligonucleotide
ugugauuauuaagucaaug

SEQ ID NO: 1448959 - RNA, 19 nt, Artificial Sequence
  Description of Artificial Sequence: Synthetic oligonucleotide
auaguacucuuccaaagga

SEQ ID NO: 1448960 - RNA, 19 nt, Artificial Sequence
  Description of Artificial Sequence: Synthetic oligonucleotide
uguaucauaggaagcccug

SEQ ID NO: 1448961 - RNA, 19 nt, Artificial Sequence
  Description of Artificial Sequence: Synthetic oligonucleotide
cuccucggaaauucgaucg

SEQ ID NO: 1448962 - RNA, 19 nt, Artificial Sequence
  Description of Artificial Sequence: Synthetic oligonucleotide
uggagaugcaacagcauga

SEQ ID NO: 1448963 - RNA, 19 nt, Artificial Sequence
  Description of Artificial Sequence: Synthetic oligonucleotide
uaaaugaccgaggugcugc

SEQ ID NO: 1448964 - RNA, 19 nt, Artificial Sequence
  Description of Artificial Sequence: Synthetic oligonucleotide
uuuggucuaagccucucga

SEQ ID NO: 1448965 - RNA, 19 nt, Artificial Sequence
  Description of Artificial Sequence: Synthetic oligonucleotide
aaauaggaugcguauguuu

SEQ ID NO: 1448966 - RNA, 19 nt, Artificial Sequence
  Description of Artificial Sequence: Synthetic oligonucleotide
ugcauuguaguuacuauuu

SEQ ID NO: 1448967 - RNA, 19 nt, Artificial Sequence
  Description of Artificial Sequence: Synthetic oligonucleotide
uaagcguagguccaacugu

SEQ ID NO: 1448968 - RNA, 19 nt, Artificial Sequence
  Description of Artificial Sequence: Synthetic oligonucleotide
cagucaaguacgaauuggg

SEQ ID NO: 1448969 - RNA, 19 nt, Artificial Sequence
  Description of Artificial Sequence: Synthetic oligonucleotide
uaguuacuauuuguaagcg

SEQ ID NO: 1448970 - RNA, 19 nt, Artificial Sequence
  Description of Artificial Sequence: Synthetic oligonucleotide
aagacgucgucuuccaaga

SEQ ID NO: 1448971 - RNA, 19 nt, Artificial Sequence
  Description of Artificial Sequence: Synthetic oligonucleotide
auccggcauauccaaaccc

SEQ ID NO: 1448972 - RNA, 19 nt, Artificial Sequence
  Description of Artificial Sequence: Synthetic oligonucleotide
uucacaucuucuguaaccc

SEQ ID NO: 1448973 - RNA, 19 nt, Artificial Sequence
  Description of Artificial Sequence: Synthetic oligonucleotide
uuauccggcauauccaaac

SEQ ID NO: 1448974 - RNA, 19 nt, Artificial Sequence
  Description of Artificial Sequence: Synthetic oligonucleotide
ucgaucgauuucuuucucg

SEQ ID NO: 1448975 - RNA, 19 nt, Artificial Sequence
  Description of Artificial Sequence: Synthetic oligonucleotide
cauccuuauauucuucuac

SEQ ID NO: 1448976 - RNA, 19 nt, Artificial Sequence
  Description of Artificial Sequence: Synthetic oligonucleotide
ucauaauaucaucccacgu

SEQ ID NO: 1448977 - RNA, 19 nt, Artificial Sequence
  Description of Artificial Sequence: Synthetic oligonucleotide
ucuguaaccccacuuucgu

SEQ ID NO: 1448978 - RNA, 19 nt, Artificial Sequence
  Description of Artificial Sequence: Synthetic oligonucleotide
caagccaagggguggaagg

SEQ ID NO: 1448979 - RNA, 19 nt, Artificial Sequence
  Description of Artificial Sequence: Synthetic oligonucleotide
uuucguaaacauacucuac

SEQ ID NO: 1448980 - RNA, 19 nt, Artificial Sequence
  Description of Artificial Sequence: Synthetic oligonucleotide
uauuuaacacagcaccaau

SEQ ID NO: 1448981 - RNA, 19 nt, Artificial Sequence
  Description of Artificial Sequence: Synthetic oligonucleotide
guagguccaacugugagcc

SEQ ID NO: 1448982 - RNA, 19 nt, Artificial Sequence
  Description of Artificial Sequence: Synthetic oligonucleotide
uagcuaaagucuuucuggc

SEQ ID NO: 1448983 - RNA, 19 nt, Artificial Sequence
  Description of Artificial Sequence: Synthetic oligonucleotide
aacauacucuaccgagguc

SEQ ID NO: 1448984 - RNA, 19 nt, Artificial Sequence
  Description of Artificial Sequence: Synthetic oligonucleotide
guaagucuccacuaccgag

SEQ ID NO: 1448985 - RNA, 19 nt, Artificial Sequence
  Description of Artificial Sequence: Synthetic oligonucleotide
uuaacacagcaccaaugcu

SEQ ID NO: 1448986 - RNA, 19 nt, Artificial Sequence
  Description of Artificial Sequence: Synthetic oligonucleotide
uuguaguuacuauuuguaa

SEQ ID NO: 1448987 - RNA, 19 nt, Artificial Sequence
  Description of Artificial Sequence: Synthetic oligonucleotide
auguauuaucuuauccggc

SEQ ID NO: 1448988 - RNA, 19 nt, Artificial Sequence
  Description of Artificial Sequence: Synthetic oligonucleotide
uuauugguuuuaauccaac

SEQ ID NO: 1448989 - RNA, 19 nt, Artificial Sequence
  Description of Artificial Sequence: Synthetic oligonucleotide
auaucaucccacguccagc

SEQ ID NO: 1448990 - RNA, 19 nt, Artificial Sequence
  Description of Artificial Sequence: Synthetic oligonucleotide
ugggagugaguuucuaaag

SEQ ID NO: 1448991 - RNA, 19 nt, Artificial Sequence
  Description of Artificial Sequence: Synthetic oligonucleotide
ucauucgcggugaugccag

SEQ ID NO: 1448992 - RNA, 19 nt, Artificial Sequence
  Description of Artificial Sequence: Synthetic oligonucleotide
acugaaauaggaugcguau

SEQ ID NO: 1448993 - RNA, 19 nt, Artificial Sequence
  Description of Artificial Sequence: Synthetic oligonucleotide
ugacuuuggucuaagccuc

SEQ ID NO: 1448994 - RNA, 19 nt, Artificial Sequence
  Description of Artificial Sequence: Synthetic oligonucleotide
cccacuuucguaaacauac

SEQ ID NO: 1448995 - RNA, 19 nt, Artificial Sequence
  Description of Artificial Sequence: Synthetic oligonucleotide
uguaaaucucuucuucaua

SEQ ID NO: 1448996 - RNA, 19 nt, Artificial Sequence
  Description of Artificial Sequence: Synthetic oligonucleotide
uauugccaauuucagguuc

SEQ ID NO: 1448997 - RNA, 19 nt, Artificial Sequence
  Description of Artificial Sequence: Synthetic oligonucleotide
agugaguuucuaaaguaag

SEQ ID NO: 1448998 - RNA, 19 nt, Artificial Sequence
  Description of Artificial Sequence: Synthetic oligonucleotide
uaucaucccacguccagca

SEQ ID NO: 1448999 - RNA, 19 nt, Artificial Sequence
  Description of Artificial Sequence: Synthetic oligonucleotide
uggaucuagagucuucguc

SEQ ID NO: 1449000 - RNA, 19 nt, Artificial Sequence
  Description of Artificial Sequence: Synthetic oligonucleotide
ucauaggaagcccugcaau

SEQ ID NO: 1449001 - RNA, 19 nt, Artificial Sequence
  Description of Artificial Sequence: Synthetic oligonucleotide
aguaaagguacuggaaucu

SEQ ID NO: 1449002 - RNA, 19 nt, Artificial Sequence
  Description of Artificial Sequence: Synthetic oligonucleotide
agcaauaauguauuaucuu

SEQ ID NO: 1449003 - RNA, 19 nt, Artificial Sequence
  Description of Artificial Sequence: Synthetic oligonucleotide
cuaugucugcuuguaagcg

SEQ ID NO: 1449004 - RNA, 19 nt, Artificial Sequence
  Description of Artificial Sequence: Synthetic oligonucleotide
guaagcguagguccaacug

SEQ ID NO: 1449005 - RNA, 19 nt, Artificial Sequence
  Description of Artificial Sequence: Synthetic oligonucleotide
uauccggcauauccaaacc

SEQ ID NO: 1449006 - RNA, 19 nt, Artificial Sequence
  Description of Artificial Sequence: Synthetic oligonucleotide
uggccugauaguacuaucu

SEQ ID NO: 1449007 - RNA, 19 nt, Artificial Sequence
  Description of Artificial Sequence: Synthetic oligonucleotide
cacgaccuccccuaaagcc

SEQ ID NO: 1449008 - RNA, 19 nt, Artificial Sequence
  Description of Artificial Sequence: Synthetic oligonucleotide
aguuacuauuuguaagcgu

SEQ ID NO: 1449009 - RNA, 19 nt, Artificial Sequence
  Description of Artificial Sequence: Synthetic oligonucleotide
aggaugcguauguuucugc

SEQ ID NO: 1449010 - RNA, 19 nt, Artificial Sequence
  Description of Artificial Sequence: Synthetic oligonucleotide
uauuaucuuauccggcaua

SEQ ID NO: 1449011 - RNA, 19 nt, Artificial Sequence
  Description of Artificial Sequence: Synthetic oligonucleotide
uaucggcacuuucagcucc

SEQ ID NO: 1449012 - RNA, 19 nt, Artificial Sequence
  Description of Artificial Sequence: Synthetic oligonucleotide
guuacuauuuguaagcgua

SEQ ID NO: 1449013 - RNA, 19 nt, Artificial Sequence
  Description of Artificial Sequence: Synthetic oligonucleotide
uguaagcguucccuuaagu

SEQ ID NO: 1449014 - RNA, 19 nt, Artificial Sequence
  Description of Artificial Sequence: Synthetic oligonucleotide
ucggaaauucgaucgauuu

SEQ ID NO: 1449015 - RNA, 19 nt, Artificial Sequence
  Description of Artificial Sequence: Synthetic oligonucleotide
acagcaccaaugcuaucgg

SEQ ID NO: 1449016 - RNA, 19 nt, Artificial Sequence
  Description of Artificial Sequence: Synthetic oligonucleotide
uccagucaaguacgaauug

SEQ ID NO: 1449017 - RNA, 19 nt, Artificial Sequence
  Description of Artificial Sequence: Synthetic oligonucleotide
uuucuccucggaaauucga

SEQ ID NO: 1449018 - RNA, 19 nt, Artificial Sequence
  Description of Artificial Sequence: Synthetic oligonucleotide
agucaaguacgaauugggg

SEQ ID NO: 1449019 - RNA, 19 nt, Artificial Sequence
  Description of Artificial Sequence: Synthetic oligonucleotide
aaauucgaucgauuucuuu

SEQ ID NO: 1449020 - RNA, 19 nt, Artificial Sequence
  Description of Artificial Sequence: Synthetic oligonucleotide
cuuucuccucggaaauucg

SEQ ID NO: 1449021 - RNA, 19 nt, Artificial Sequence
  Description of Artificial Sequence: Synthetic oligonucleotide
ucugugugugccuccacga

SEQ ID NO: 1449022 - RNA, 19 nt, Artificial Sequence
  Description of Artificial Sequence: Synthetic oligonucleotide
agacuuggauuuuggagga

SEQ ID NO: 1449023 - RNA, 19 nt, Artificial Sequence
  Description of Artificial Sequence: Synthetic oligonucleotide
gcaaagugcaagcugggag

SEQ ID NO: 1449024 - RNA, 19 nt, Artificial Sequence
  Description of Artificial Sequence: Synthetic oligonucleotide
cuuucguaaacauacucua

SEQ ID NO: 1449025 - RNA, 19 nt, Artificial Sequence
  Description of Artificial Sequence: Synthetic oligonucleotide
cuuuggucuaagccucucg

SEQ ID NO: 1449026 - RNA, 19 nt, Artificial Sequence
  Description of Artificial Sequence: Synthetic oligonucleotide
guaaaucucuucuucauau

SEQ ID NO: 1449027 - RNA, 19 nt, Artificial Sequence
  Description of Artificial Sequence: Synthetic oligonucleotide
uuguaagcguucccuuaag

SEQ ID NO: 1449028 - RNA, 19 nt, Artificial Sequence
  Description of Artificial Sequence: Synthetic oligonucleotide
caagcugggagugaguuuc

SEQ ID NO: 1449029 - RNA, 19 nt, Artificial Sequence
  Description of Artificial Sequence: Synthetic oligonucleotide
aguaagucuccacuaccga

SEQ ID NO: 1449030 - RNA, 19 nt, Artificial Sequence
  Description of Artificial Sequence: Synthetic oligonucleotide
ugggugucaauucucugau

SEQ ID NO: 1449031 - RNA, 19 nt, Artificial Sequence
  Description of Artificial Sequence: Synthetic oligonucleotide
ugcguauguuucugcauug

SEQ ID NO: 1449032 - RNA, 19 nt, Artificial Sequence
  Description of Artificial Sequence: Synthetic oligonucleotide
auaggaugcguauguuucu

SEQ ID NO: 1449033 - RNA, 19 nt, Artificial Sequence
  Description of Artificial Sequence: Synthetic oligonucleotide
auuaucuuauccggcauau

SEQ ID NO: 1449034 - RNA, 19 nt, Artificial Sequence
  Description of Artificial Sequence: Synthetic oligonucleotide
cacuuucguaaacauacuc

SEQ ID NO: 1449035 - RNA, 19 nt, Artificial Sequence
  Description of Artificial Sequence: Synthetic oligonucleotide
gcaauaauguauuaucuua

SEQ ID NO: 1449036 - RNA, 19 nt, Artificial Sequence
  Description of Artificial Sequence: Synthetic oligonucleotide
cucugugugugccuccacg

SEQ ID NO: 1449037 - RNA, 19 nt, Artificial Sequence
  Description of Artificial Sequence: Synthetic oligonucleotide
guuuugaauuuggagcagc

SEQ ID NO: 1449038 - RNA, 19 nt, Artificial Sequence
  Description of Artificial Sequence: Synthetic oligonucleotide
acucuaccgagguccaguc

SEQ ID NO: 1449039 - RNA, 19 nt, Artificial Sequence
  Description of Artificial Sequence: Synthetic oligonucleotide
uccacuaccgagguggaaa

SEQ ID NO: 1449040 - RNA, 19 nt, Artificial Sequence
  Description of Artificial Sequence: Synthetic oligonucleotide
uggucuaagccucucgauu

SEQ ID NO: 1449041 - RNA, 19 nt, Artificial Sequence
  Description of Artificial Sequence: Synthetic oligonucleotide
caagcggcuguccaugccc

SEQ ID NO: 1449042 - RNA, 19 nt, Artificial Sequence
  Description of Artificial Sequence: Synthetic oligonucleotide
uguaagcguagguccaacu

SEQ ID NO: 1449043 - RNA, 19 nt, Artificial Sequence
  Description of Artificial Sequence: Synthetic oligonucleotide
cucucgauuuccucuguac

SEQ ID NO: 1449044 - RNA, 19 nt, Artificial Sequence
  Description of Artificial Sequence: Synthetic oligonucleotide
agugcaagcugggagugag

SEQ ID NO: 1449045 - RNA, 19 nt, Artificial Sequence
  Description of Artificial Sequence: Synthetic oligonucleotide
cuguaucuccuucauccag

SEQ ID NO: 1449046 - RNA, 19 nt, Artificial Sequence
  Description of Artificial Sequence: Synthetic oligonucleotide
accgagguccaguccuucc

SEQ ID NO: 1449047 - RNA, 19 nt, Artificial Sequence
  Description of Artificial Sequence: Synthetic oligonucleotide
gacgucgucuuccaagaca

SEQ ID NO: 1449048 - RNA, 19 nt, Artificial Sequence
  Description of Artificial Sequence: Synthetic oligonucleotide
accacggucagacuuggau

SEQ ID NO: 1449049 - RNA, 19 nt, Artificial Sequence
  Description of Artificial Sequence: Synthetic oligonucleotide
uucgcggugaugccagucu

SEQ ID NO: 1449050 - RNA, 19 nt, Artificial Sequence
  Description of Artificial Sequence: Synthetic oligonucleotide
ggcauauccaaacccauuc

SEQ ID NO: 1449051 - RNA, 19 nt, Artificial Sequence
  Description of Artificial Sequence: Synthetic oligonucleotide
aagcguagguccaacugug

SEQ ID NO: 1449052 - RNA, 19 nt, Artificial Sequence
  Description of Artificial Sequence: Synthetic oligonucleotide
aaaugaccgaggugcugca

SEQ ID NO: 1449053 - RNA, 19 nt, Artificial Sequence
  Description of Artificial Sequence: Synthetic oligonucleotide
aaccccacuuucguaaaca

SEQ ID NO: 1449054 - RNA, 19 nt, Artificial Sequence
  Description of Artificial Sequence: Synthetic oligonucleotide
guaagcguucccuuaagua

SEQ ID NO: 1449055 - RNA, 19 nt, Artificial Sequence
  Description of Artificial Sequence: Synthetic oligonucleotide
ucuccucggaaauucgauc

SEQ ID NO: 1449056 - RNA, 19 nt, Artificial Sequence
  Description of Artificial Sequence: Synthetic oligonucleotide
cugauaguacuaucucuuc

SEQ ID NO: 1449057 - RNA, 19 nt, Artificial Sequence
  Description of Artificial Sequence: Synthetic oligonucleotide
agcacuucucauucgcggu

SEQ ID NO: 1449058 - RNA, 19 nt, Artificial Sequence
  Description of Artificial Sequence: Synthetic oligonucleotide
guacucuuccaaaggaggc

SEQ ID NO: 1449059 - RNA, 19 nt, Artificial Sequence
  Description of Artificial Sequence: Synthetic oligonucleotide
gacacgagggaaggugugg

SEQ ID NO: 1449060 - RNA, 19 nt, Artificial Sequence
  Description of Artificial Sequence: Synthetic oligonucleotide
gagaugcaacagcaugaag

SEQ ID NO: 1449061 - RNA, 19 nt, Artificial Sequence
  Description of Artificial Sequence: Synthetic oligonucleotide
cugaaauaggaugcguaug

SEQ ID NO: 1449062 - RNA, 19 nt, Artificial Sequence
  Description of Artificial Sequence: Synthetic oligonucleotide
uccuuauauucuucuacuu

SEQ ID NO: 1449063 - RNA, 19 nt, Artificial Sequence
  Description of Artificial Sequence: Synthetic oligonucleotide
auauccaaacccauucaga

SEQ ID NO: 1449064 - RNA, 19 nt, Artificial Sequence
  Description of Artificial Sequence: Synthetic oligonucleotide
augcguauguuucugcauu

SEQ ID NO: 1449065 - RNA, 19 nt, Artificial Sequence
  Description of Artificial Sequence: Synthetic oligonucleotide
uagcaugaauaaagucccc

SEQ ID NO: 1449066 - RNA, 19 nt, Artificial Sequence
  Description of Artificial Sequence: Synthetic oligonucleotide
ccuuaaguaaagguacugg

SEQ ID NO: 1449067 - RNA, 19 nt, Artificial Sequence
  Description of Artificial Sequence: Synthetic oligonucleotide
uuaauccaacaaauaucuu

SEQ ID NO: 1449068 - RNA, 19 nt, Artificial Sequence
  Description of Artificial Sequence: Synthetic oligonucleotide
gagguccaguccuuccccg

SEQ ID NO: 1449069 - RNA, 19 nt, Artificial Sequence
  Description of Artificial Sequence: Synthetic oligonucleotide
aagcguucccuuaaguaaa

SEQ ID NO: 1449070 - RNA, 19 nt, Artificial Sequence
  Description of Artificial Sequence: Synthetic oligonucleotide
uccucggaaauucgaucga

SEQ ID NO: 1449071 - RNA, 19 nt, Artificial Sequence
  Description of Artificial Sequence: Synthetic oligonucleotide
uaggaugcguauguuucug

SEQ ID NO: 1449072 - RNA, 19 nt, Artificial Sequence
  Description of Artificial Sequence: Synthetic oligonucleotide
auuuguaagcguaggucca

SEQ ID NO: 1449073 - RNA, 19 nt, Artificial Sequence
  Description of Artificial Sequence: Synthetic oligonucleotide
ugccagucucucuauagua

SEQ ID NO: 1449074 - RNA, 19 nt, Artificial Sequence
  Description of Artificial Sequence: Synthetic oligonucleotide
augccagucucucuauagu

SEQ ID NO: 1449075 - RNA, 19 nt, Artificial Sequence
  Description of Artificial Sequence: Synthetic oligonucleotide
uaccgagguggaaagccac

SEQ ID NO: 1449076 - RNA, 19 nt, Artificial Sequence
  Description of Artificial Sequence: Synthetic oligonucleotide
uuuucucguguuucagcaa

SEQ ID NO: 1449077 - RNA, 19 nt, Artificial Sequence
  Description of Artificial Sequence: Synthetic oligonucleotide
uaagccucucgauuuccuc

SEQ ID NO: 1449078 - RNA, 19 nt, Artificial Sequence
  Description of Artificial Sequence: Synthetic oligonucleotide
aaacccauucagacacgag

SEQ ID NO: 1449079 - RNA, 19 nt, Artificial Sequence
  Description of Artificial Sequence: Synthetic oligonucleotide
uucuggcagcaugagaaac

SEQ ID NO: 1449080 - RNA, 19 nt, Artificial Sequence
  Description of Artificial Sequence: Synthetic oligonucleotide
gagcaauaauguauuaucu

SEQ ID NO: 1449081 - RNA, 19 nt, Artificial Sequence
  Description of Artificial Sequence: Synthetic oligonucleotide
ggaaauucgaucgauuucu

SEQ ID NO: 1449082 - RNA, 19 nt, Artificial Sequence
  Description of Artificial Sequence: Synthetic oligonucleotide
ucucauucgcggugaugcc

SEQ ID NO: 1449083 - RNA, 19 nt, Artificial Sequence
  Description of Artificial Sequence: Synthetic oligonucleotide
auuuuggaggaggugacuu

SEQ ID NO: 1449084 - RNA, 19 nt, Artificial Sequence
  Description of Artificial Sequence: Synthetic oligonucleotide
uucgaucgauuucuuucuc

SEQ ID NO: 1449085 - RNA, 19 nt, Artificial Sequence
  Description of Artificial Sequence: Synthetic oligonucleotide
agacgucgucuuccaagac

SEQ ID NO: 1449086 - RNA, 19 nt, Artificial Sequence
  Description of Artificial Sequence: Synthetic oligonucleotide
guacuaucucuuccaaaca

SEQ ID NO: 1449087 - RNA, 19 nt, Artificial Sequence
  Description of Artificial Sequence: Synthetic oligonucleotide
gcuaucggcacuuucagcu

SEQ ID NO: 1449088 - RNA, 19 nt, Artificial Sequence
  Description of Artificial Sequence: Synthetic oligonucleotide
aucuuauccggcauaucca

SEQ ID NO: 1449089 - RNA, 19 nt, Artificial Sequence
  Description of Artificial Sequence: Synthetic oligonucleotide
aaccgcaccagaggaauau

SEQ ID NO: 1449090 - RNA, 19 nt, Artificial Sequence
  Description of Artificial Sequence: Synthetic oligonucleotide
gaagcccugcaauuuucuc

SEQ ID NO: 1449091 - RNA, 19 nt, Artificial Sequence
  Description of Artificial Sequence: Synthetic oligonucleotide
ggaucuagagucuucgucu

SEQ ID NO: 1449092 - RNA, 19 nt, Artificial Sequence
  Description of Artificial Sequence: Synthetic oligonucleotide
auugccaauuucagguucu

SEQ ID NO: 1449093 - RNA, 19 nt, Artificial Sequence
  Description of Artificial Sequence: Synthetic oligonucleotide
aguuaccaagagcaauaau

SEQ ID NO: 1449094 - RNA, 19 nt, Artificial Sequence
  Description of Artificial Sequence: Synthetic oligonucleotide
uuuguaagcguagguccaa

SEQ ID NO: 1449095 - RNA, 19 nt, Artificial Sequence
  Description of Artificial Sequence: Synthetic oligonucleotide
uuggucuaagccucucgau

SEQ ID NO: 1449096 - RNA, 19 nt, Artificial Sequence
  Description of Artificial Sequence: Synthetic oligonucleotide
cuauuuaacacagcaccaa

SEQ ID NO: 1449097 - RNA, 19 nt, Artificial Sequence
  Description of Artificial Sequence: Synthetic oligonucleotide
aucaucccacguccagcac

SEQ ID NO: 1449098 - RNA, 19 nt, Artificial Sequence
  Description of Artificial Sequence: Synthetic oligonucleotide
aggaguuaccaagagcaau

SEQ ID NO: 1449099 - RNA, 19 nt, Artificial Sequence
  Description of Artificial Sequence: Synthetic oligonucleotide
agccuggccugauaguacu

SEQ ID NO: 1449100 - RNA, 19 nt, Artificial Sequence
  Description of Artificial Sequence: Synthetic oligonucleotide
uaaccccacuuucguaaac

SEQ ID NO: 1449101 - RNA, 19 nt, Artificial Sequence
  Description of Artificial Sequence: Synthetic oligonucleotide
agucuuucuggcagcauga

SEQ ID NO: 1449102 - RNA, 19 nt, Artificial Sequence
  Description of Artificial Sequence: Synthetic oligonucleotide
ccccaugaggcaauguucc

SEQ ID NO: 1449103 - RNA, 19 nt, Artificial Sequence
  Description of Artificial Sequence: Synthetic oligonucleotide
cuuugauccccaugaggca

SEQ ID NO: 1449104 - RNA, 19 nt, Artificial Sequence
  Description of Artificial Sequence: Synthetic oligonucleotide
ggagugaguuucuaaagua

SEQ ID NO: 1449105 - RNA, 19 nt, Artificial Sequence
  Description of Artificial Sequence: Synthetic oligonucleotide
cuaucggcacuuucagcuc

SEQ ID NO: 1449106 - RNA, 19 nt, Artificial Sequence
  Description of Artificial Sequence: Synthetic oligonucleotide
aggaagcccugcaauuuuc

SEQ ID NO: 1449107 - RNA, 19 nt, Artificial Sequence
  Description of Artificial Sequence: Synthetic oligonucleotide
ugcaagcggcuguccaugc

SEQ ID NO: 1449108 - RNA, 19 nt, Artificial Sequence
  Description of Artificial Sequence: Synthetic oligonucleotide
ccagucaaguacgaauugg

SEQ ID NO: 1449109 - RNA, 19 nt, Artificial Sequence
  Description of Artificial Sequence: Synthetic oligonucleotide
ugcuuguaagcguucccuu

SEQ ID NO: 1449110 - RNA, 19 nt, Artificial Sequence
  Description of Artificial Sequence: Synthetic oligonucleotide
ugaagacgucgucuuccaa

SEQ ID NO: 1449111 - RNA, 19 nt, Artificial Sequence
  Description of Artificial Sequence: Synthetic oligonucleotide
acgucgucuuccaagacaa

SEQ ID NO: 1449112 - RNA, 19 nt, Artificial Sequence
  Description of Artificial Sequence: Synthetic oligonucleotide
caaugcuaucggcacuuuc

SEQ ID NO: 1449113 - RNA, 19 nt, Artificial Sequence
  Description of Artificial Sequence: Synthetic oligonucleotide
aaggaguuaccaagagcaa

SEQ ID NO: 1449114 - RNA, 19 nt, Artificial Sequence
  Description of Artificial Sequence: Synthetic oligonucleotide
aucggcacuuucagcuccc

SEQ ID NO: 1449115 - RNA, 19 nt, Artificial Sequence
  Description of Artificial Sequence: Synthetic oligonucleotide
ucuccacuaccgaggugga

SEQ ID NO: 1449116 - RNA, 19 nt, Artificial Sequence
  Description of Artificial Sequence: Synthetic oligonucleotide
augaggcaauguuccuuug

SEQ ID NO: 1449117 - RNA, 19 nt, Artificial Sequence
  Description of Artificial Sequence: Synthetic oligonucleotide
cauacucuaccgaggucca

SEQ ID NO: 1449118 - RNA, 19 nt, Artificial Sequence
  Description of Artificial Sequence: Synthetic oligonucleotide
cuggccugauaguacuauc

SEQ ID NO: 1449119 - RNA, 19 nt, Artificial Sequence
  Description of Artificial Sequence: Synthetic oligonucleotide
ucucguguuucagcaauuu

SEQ ID NO: 1449120 - RNA, 19 nt, Artificial Sequence
  Description of Artificial Sequence: Synthetic oligonucleotide
cagcaccaaugcuaucggc

SEQ ID NO: 1449121 - RNA, 19 nt, Artificial Sequence
  Description of Artificial Sequence: Synthetic oligonucleotide
gcguagguccaacugugag

SEQ ID NO: 1449122 - RNA, 19 nt, Artificial Sequence
  Description of Artificial Sequence: Synthetic oligonucleotide
ggaugcguauguuucugca

SEQ ID NO: 1449123 - RNA, 19 nt, Artificial Sequence
  Description of Artificial Sequence: Synthetic oligonucleotide
uuguaagcguagguccaac

SEQ ID NO: 1449124 - RNA, 19 nt, Artificial Sequence
  Description of Artificial Sequence: Synthetic oligonucleotide
gaugcguauguuucugcau

SEQ ID NO: 1449125 - RNA, 19 nt, Artificial Sequence
  Description of Artificial Sequence: Synthetic oligonucleotide
uuaucuuauccggcauauc

SEQ ID NO: 1449126 - RNA, 19 nt, Artificial Sequence
  Description of Artificial Sequence: Synthetic oligonucleotide
accaaugcuaucggcacuu

SEQ ID NO: 1449127 - RNA, 19 nt, Artificial Sequence
  Description of Artificial Sequence: Synthetic oligonucleotide
cuugccagguauuuguuuu

SEQ ID NO: 1449128 - RNA, 19 nt, Artificial Sequence
  Description of Artificial Sequence: Synthetic oligonucleotide
ugccgccguaacuucugcc

SEQ ID NO: 1449129 - RNA, 19 nt, Artificial Sequence
  Description of Artificial Sequence: Synthetic oligonucleotide
gaguuaccaagagcaauaa

SEQ ID NO: 1449130 - RNA, 19 nt, Artificial Sequence
  Description of Artificial Sequence: Synthetic oligonucleotide
uucgucuugccagguauuu

SEQ ID NO: 1449131 - RNA, 19 nt, Artificial Sequence
  Description of Artificial Sequence: Synthetic oligonucleotide
acaucaaauuuggguguca

SEQ ID NO: 1449132 - RNA, 19 nt, Artificial Sequence
  Description of Artificial Sequence: Synthetic oligonucleotide
cuaccgagguggaaagcca

SEQ ID NO: 1449133 - RNA, 19 nt, Artificial Sequence
  Description of Artificial Sequence: Synthetic oligonucleotide
gucaauucucugaugucaa

SEQ ID NO: 1449134 - RNA, 19 nt, Artificial Sequence
  Description of Artificial Sequence: Synthetic oligonucleotide
cguagguccaacugugagc

SEQ ID NO: 1449135 - RNA, 19 nt, Artificial Sequence
  Description of Artificial Sequence: Synthetic oligonucleotide
ucccaacugcugagccagg

SEQ ID NO: 1449136 - RNA, 19 nt, Artificial Sequence
  Description of Artificial Sequence: Synthetic oligonucleotide
gugaguuucuaaaguaagu

SEQ ID NO: 1449137 - RNA, 19 nt, Artificial Sequence
  Description of Artificial Sequence: Synthetic oligonucleotide
ggaguuaccaagagcaaua

SEQ ID NO: 1449138 - RNA, 19 nt, Artificial Sequence
  Description of Artificial Sequence: Synthetic oligonucleotide
uucagacacgagggaaggu

SEQ ID NO: 1449139 - RNA, 19 nt, Artificial Sequence
  Description of Artificial Sequence: Synthetic oligonucleotide
agcguucccuuaaguaaag

SEQ ID NO: 1449140 - RNA, 19 nt, Artificial Sequence
  Description of Artificial Sequence: Synthetic oligonucleotide
caaacccauucagacacga

SEQ ID NO: 1449141 - RNA, 19 nt, Artificial Sequence
  Description of Artificial Sequence: Synthetic oligonucleotide
guauuaucuuauccggcau

SEQ ID NO: 1449142 - RNA, 19 nt, Artificial Sequence
  Description of Artificial Sequence: Synthetic oligonucleotide
uccccggaaccgcaccaga

SEQ ID NO: 1449143 - RNA, 19 nt, Artificial Sequence
  Description of Artificial Sequence: Synthetic oligonucleotide
ggccugauaguacuaucuc

SEQ ID NO: 1449144 - RNA, 19 nt, Artificial Sequence
  Description of Artificial Sequence: Synthetic oligonucleotide
gaucuagagucuucgucuu

SEQ ID NO: 1449145 - RNA, 19 nt, Artificial Sequence
  Description of Artificial Sequence: Synthetic oligonucleotide
gggagugaguuucuaaagu

SEQ ID NO: 1449146 - RNA, 19 nt, Artificial Sequence
  Description of Artificial Sequence: Synthetic oligonucleotide
caucaaauuugggugucaa

SEQ ID NO: 1449147 - RNA, 19 nt, Artificial Sequence
  Description of Artificial Sequence: Synthetic oligonucleotide
cuuauccggcauauccaaa

SEQ ID NO: 1449148 - RNA, 19 nt, Artificial Sequence
  Description of Artificial Sequence: Synthetic oligonucleotide
cucauucgcggugaugcca

SEQ ID NO: 1449149 - RNA, 19 nt, Artificial Sequence
  Description of Artificial Sequence: Synthetic oligonucleotide
agacacgagggaaggugug

SEQ ID NO: 1449150 - RNA, 19 nt, Artificial Sequence
  Description of Artificial Sequence: Synthetic oligonucleotide
cucucccgccaccucuggg

SEQ ID NO: 1449151 - RNA, 19 nt, Artificial Sequence
  Description of Artificial Sequence: Synthetic oligonucleotide
cauaggaagcccugcaauu

SEQ ID NO: 1449152 - RNA, 19 nt, Artificial Sequence
  Description of Artificial Sequence: Synthetic oligonucleotide
ccacuaccgagguggaaag

SEQ ID NO: 1449153 - RNA, 19 nt, Artificial Sequence
  Description of Artificial Sequence: Synthetic oligonucleotide
uccuuccccggaaccgcac

SEQ ID NO: 1449154 - RNA, 19 nt, Artificial Sequence
  Description of Artificial Sequence: Synthetic oligonucleotide
aggaggugacuuuggucua

SEQ ID NO: 1449155 - RNA, 19 nt, Artificial Sequence
  Description of Artificial Sequence: Synthetic oligonucleotide
gauuuuggaggaggugacu

SEQ ID NO: 1449156 - RNA, 19 nt, Artificial Sequence
  Description of Artificial Sequence: Synthetic oligonucleotide
cccggaaccgcaccagagg

SEQ ID NO: 1449157 - RNA, 19 nt, Artificial Sequence
  Description of Artificial Sequence: Synthetic oligonucleotide
gugugccuccacgaccucc

SEQ ID NO: 1449158 - RNA, 19 nt, Artificial Sequence
  Description of Artificial Sequence: Synthetic oligonucleotide
cacggucagacuuggauuu

SEQ ID NO: 1449159 - RNA, 19 nt, Artificial Sequence
  Description of Artificial Sequence: Synthetic oligonucleotide
ccaaacccauucagacacg

SEQ ID NO: 1449160 - RNA, 19 nt, Artificial Sequence
  Description of Artificial Sequence: Synthetic oligonucleotide
cacuaccgagguggaaagc

SEQ ID NO: 1449161 - RNA, 19 nt, Artificial Sequence
  Description of Artificial Sequence: Synthetic oligonucleotide
cccuuaaguaaagguacug

SEQ ID NO: 1449162 - RNA, 19 nt, Artificial Sequence
  Description of Artificial Sequence: Synthetic oligonucleotide
ggagaugcaacagcaugaa

SEQ ID NO: 1449163 - RNA, 19 nt, Artificial Sequence
  Description of Artificial Sequence: Synthetic oligonucleotide
caauuucccucugcucauc

SEQ ID NO: 1449164 - RNA, 19 nt, Artificial Sequence
  Description of Artificial Sequence: Synthetic oligonucleotide
gccugauaguacuaucucu

SEQ ID NO: 1449165 - RNA, 19 nt, Artificial Sequence
  Description of Artificial Sequence: Synthetic oligonucleotide
gcuuguaagcguucccuua

SEQ ID NO: 1449166 - RNA, 19 nt, Artificial Sequence
  Description of Artificial Sequence: Synthetic oligonucleotide
ccgagguccaguccuuccc

SEQ ID NO: 1449167 - RNA, 19 nt, Artificial Sequence
  Description of Artificial Sequence: Synthetic oligonucleotide
cuuccccggaaccgcacca

SEQ ID NO: 1449168 - RNA, 19 nt, Artificial Sequence
  Description of Artificial Sequence: Synthetic oligonucleotide
cggaaauucgaucgauuuc

SEQ ID NO: 1449169 - RNA, 19 nt, Artificial Sequence
  Description of Artificial Sequence: Synthetic oligonucleotide
cguaaacauacucuaccga

SEQ ID NO: 1449170 - RNA, 19 nt, Artificial Sequence
  Description of Artificial Sequence: Synthetic oligonucleotide
cacuuccguuuugaauuug

SEQ ID NO: 1449171 - RNA, 19 nt, Artificial Sequence
  Description of Artificial Sequence: Synthetic oligonucleotide
cauccaggcacuuccguuu

SEQ ID NO: 1449172 - RNA, 19 nt, Artificial Sequence
  Description of Artificial Sequence: Synthetic oligonucleotide
cgaucgauuucuuucucga

SEQ ID NO: 1449173 - RNA, 19 nt, Artificial Sequence
  Description of Artificial Sequence: Synthetic oligonucleotide
cuguaaccccacuuucgua

SEQ ID NO: 1449174 - RNA, 19 nt, Artificial Sequence
  Description of Artificial Sequence: Synthetic oligonucleotide
gcugggagugaguuucuaa

SEQ ID NO: 1449175 - RNA, 19 nt, Artificial Sequence
  Description of Artificial Sequence: Synthetic oligonucleotide
ugugugccuccacgaccuc

SEQ ID NO: 1449176 - RNA, 19 nt, Artificial Sequence
  Description of Artificial Sequence: Synthetic oligonucleotide
agcguagguccaacuguga

SEQ ID NO: 1449177 - RNA, 19 nt, Artificial Sequence
  Description of Artificial Sequence: Synthetic oligonucleotide
gcguucccuuaaguaaagg

SEQ ID NO: 1449178 - RNA, 19 nt, Artificial Sequence
  Description of Artificial Sequence: Synthetic oligonucleotide
guaaagguacuggaaucuu

SEQ ID NO: 1449179 - RNA, 19 nt, Artificial Sequence
  Description of Artificial Sequence: Synthetic oligonucleotide
ccacgaccuccccuaaagc

SEQ ID NO: 1449180 - RNA, 19 nt, Artificial Sequence
  Description of Artificial Sequence: Synthetic oligonucleotide
uccaagccaagggguggaa

SEQ ID NO: 1449181 - RNA, 19 nt, Artificial Sequence
  Description of Artificial Sequence: Synthetic oligonucleotide
gaaauucgaucgauuucuu

SEQ ID NO: 1449182 - RNA, 19 nt, Artificial Sequence
  Description of Artificial Sequence: Synthetic oligonucleotide
gguccaguccuuccccgga

SEQ ID NO: 1449183 - RNA, 19 nt, Artificial Sequence
  Description of Artificial Sequence: Synthetic oligonucleotide
gcuucuaugucugcuugua

SEQ ID NO: 1449184 - RNA, 19 nt, Artificial Sequence
  Description of Artificial Sequence: Synthetic oligonucleotide
ucggcacuuucagcuccca

SEQ ID NO: 1449185 - RNA, 19 nt, Artificial Sequence
  Description of Artificial Sequence: Synthetic oligonucleotide
ccgccguaacuucugccgc

SEQ ID NO: 1449186 - RNA, 19 nt, Artificial Sequence
  Description of Artificial Sequence: Synthetic oligonucleotide
cucggaaauucgaucgauu

SEQ ID NO: 1449187 - RNA, 19 nt, Artificial Sequence
  Description of Artificial Sequence: Synthetic oligonucleotide
cugugauuauuaagucaau

SEQ ID NO: 1449188 - RNA, 19 nt, Artificial Sequence
  Description of Artificial Sequence: Synthetic oligonucleotide
ccccggaaccgcaccagag

SEQ ID NO: 1449189 - RNA, 19 nt, Artificial Sequence
  Description of Artificial Sequence: Synthetic oligonucleotide
ccgaggugcugcaaucuca

SEQ ID NO: 1449190 - RNA, 19 nt, Artificial Sequence
  Description of Artificial Sequence: Synthetic oligonucleotide
caucccacguccagcacuu

SEQ ID NO: 1449191 - RNA, 19 nt, Artificial Sequence
  Description of Artificial Sequence: Synthetic oligonucleotide
ccaagccaagggguggaag

SEQ ID NO: 1449192 - RNA, 19 nt, Artificial Sequence
  Description of Artificial Sequence: Synthetic oligonucleotide
gcugccgccguaacuucug

SEQ ID NO: 1449193 - RNA, 19 nt, Artificial Sequence
  Description of Artificial Sequence: Synthetic oligonucleotide
cguucccuuaaguaaaggu

SEQ ID NO: 1449194 - RNA, 19 nt, Artificial Sequence
  Description of Artificial Sequence: Synthetic oligonucleotide
ggaaccgcaccagaggaau

SEQ ID NO: 1449195 - RNA, 19 nt, Artificial Sequence
  Description of Artificial Sequence: Synthetic oligonucleotide
gcggcuguccaugccccgg

SEQ ID NO: 1449196 - RNA, 19 nt, Artificial Sequence
  Description of Artificial Sequence: Synthetic oligonucleotide
caccaccacggucagacuu

SEQ ID NO: 1449197 - RNA, 19 nt, Artificial Sequence
  Description of Artificial Sequence: Synthetic oligonucleotide
gcaauuucccucugcucau

SEQ ID NO: 1449198 - RNA, 19 nt, Artificial Sequence
  Description of Artificial Sequence: Synthetic oligonucleotide
gaaccgcaccagaggaaua

SEQ ID NO: 1449199 - RNA, 19 nt, Artificial Sequence
  Description of Artificial Sequence: Synthetic oligonucleotide
accgcaccagaggaauaua

SEQ ID NO: 1449200 - RNA, 19 nt, Artificial Sequence
  Description of Artificial Sequence: Synthetic oligonucleotide
ccaccacggucagacuugg

SEQ ID NO: 1449201 - RNA, 19 nt, Artificial Sequence
  Description of Artificial Sequence: Synthetic oligonucleotide
ccgcaccagaggaauauaa

SEQ ID NO: 1449202 - RNA, 19 nt, Artificial Sequence
  Description of Artificial Sequence: Synthetic oligonucleotide
acggucagacuuggauuuu

SEQ ID NO: 1449203 - RNA, 19 nt, Artificial Sequence
  Description of Artificial Sequence: Synthetic oligonucleotide
ggaagcccugcaauuuucu

SEQ ID NO: 1449204 - RNA, 19 nt, Artificial Sequence
  Description of Artificial Sequence: Synthetic oligonucleotide
ggaggugacuuuggucuaa

SEQ ID NO: 1449205 - RNA, 19 nt, Artificial Sequence
  Description of Artificial Sequence: Synthetic oligonucleotide
cgcaccagaggaauauaaa

SEQ ID NO: 1449206 - RNA, 19 nt, Artificial Sequence
  Description of Artificial Sequence: Synthetic oligonucleotide
gcccugcaauuuucucgug

SEQ ID NO: 1449207 - RNA, 19 nt, Artificial Sequence
  Description of Artificial Sequence: Synthetic oligonucleotide
ccccacuuucguaaacaua

SEQ ID NO: 1449208 - RNA, 19 nt, Artificial Sequence
  Description of Artificial Sequence: Synthetic oligonucleotide
caccacggucagacuugga

SEQ ID NO: 1449209 - RNA, 19 nt, Artificial Sequence
  Description of Artificial Sequence: Synthetic oligonucleotide
ccacuuucguaaacauacu

SEQ ID NO: 1449210 - RNA, 19 nt, Artificial Sequence
  Description of Artificial Sequence: Synthetic oligonucleotide
cccugcaauuuucucgugu

SEQ ID NO: 1449211 - RNA, 19 nt, Artificial Sequence
  Description of Artificial Sequence: Synthetic oligonucleotide
ccuccccuaaagccaccuc

SEQ ID NO: 1449212 - RNA, 19 nt, Artificial Sequence
  Description of Artificial Sequence: Synthetic oligonucleotide
gcacuuccguuuugaauuu

SEQ ID NO: 1449213 - RNA, 19 nt, Artificial Sequence
  Description of Artificial Sequence: Synthetic oligonucleotide
ccacggucagacuuggauu

SEQ ID NO: 1449214 - RNA, 19 nt, Artificial Sequence
  Description of Artificial Sequence: Synthetic oligonucleotide
cuaccgagguccaguccuu

SEQ ID NO: 1449215 - RNA, 19 nt, Artificial Sequence
  Description of Artificial Sequence: Synthetic oligonucleotide
gcguauguuucugcauugu

SEQ ID NO: 1449216 - RNA, 19 nt, Artificial Sequence
  Description of Artificial Sequence: Synthetic oligonucleotide
cuccacuaccgagguggaa

SEQ ID NO: 1449217 - RNA, 19 nt, Artificial Sequence
  Description of Artificial Sequence: Synthetic oligonucleotide
cagguucuucugugauuau

SEQ ID NO: 1449218 - RNA, 19 nt, Artificial Sequence
  Description of Artificial Sequence: Synthetic oligonucleotide
cauucgcggugaugccagu

SEQ ID NO: 1449219 - RNA, 19 nt, Artificial Sequence
  Description of Artificial Sequence: Synthetic oligonucleotide
ccggcauauccaaacccau

SEQ ID NO: 1449220 - RNA, 19 nt, Artificial Sequence
  Description of Artificial Sequence: Synthetic oligonucleotide
cggaaccgcaccagaggaa

SEQ ID NO: 1449221 - RNA, 19 nt, Artificial Sequence
  Description of Artificial Sequence: Synthetic oligonucleotide
ccucggaaauucgaucgau

SEQ ID NO: 1449222 - RNA, 19 nt, Artificial Sequence
  Description of Artificial Sequence: Synthetic oligonucleotide
gccuggccugauaguacua

SEQ ID NO: 1449223 - RNA, 19 nt, Artificial Sequence
  Description of Artificial Sequence: Synthetic oligonucleotide
cgccguaacuucugccgcu

SEQ ID NO: 1449224 - RNA, 19 nt, Artificial Sequence
  Description of Artificial Sequence: Synthetic oligonucleotide
cgucgucuuccaagacaaa

SEQ ID NO: 1449225 - RNA, 19 nt, Artificial Sequence
  Description of Artificial Sequence: Synthetic oligonucleotide
cgaccacggccagcagaug

SEQ ID NO: 1449226 - RNA, 19 nt, Artificial Sequence
  Description of Artificial Sequence: Synthetic oligonucleotide
ccaaugcuaucggcacuuu

SEQ ID NO: 1449227 - RNA, 19 nt, Artificial Sequence
  Description of Artificial Sequence: Synthetic oligonucleotide
aaaguuaaaccuuacuacc

SEQ ID NO: 1449228 - RNA, 19 nt, Artificial Sequence
  Description of Artificial Sequence: Synthetic oligonucleotide
auuaaaugagucuagaaac

SEQ ID NO: 1449229 - RNA, 19 nt, Artificial Sequence
  Description of Artificial Sequence: Synthetic oligonucleotide
aauacauucauucaucaag

SEQ ID NO: 1449230 - RNA, 19 nt, Artificial Sequence
  Description of Artificial Sequence: Synthetic oligonucleotide
acaaauaaaaugcugacuc

SEQ ID NO: 1449231 - RNA, 19 nt, Artificial Sequence
  Description of Artificial Sequence: Synthetic oligonucleotide
auuuaugcaacauccaucc

SEQ ID NO: 1449232 - RNA, 19 nt, Artificial Sequence
  Description of Artificial Sequence: Synthetic oligonucleotide
aaaguuaacauaaaguggg

SEQ ID NO: 1449233 - RNA, 19 nt, Artificial Sequence
  Description of Artificial Sequence: Synthetic oligonucleotide
aauaguguucccuagauga

SEQ ID NO: 1449234 - RNA, 19 nt, Artificial Sequence
  Description of Artificial Sequence: Synthetic oligonucleotide
  modified_base (8)..(8): a, c, u, g, unknown or other
aaaucaunuccucauuugc

SEQ ID NO: 1449235 - RNA, 19 nt, Artificial Sequence
  Description of Artificial Sequence: Synthetic oligonucleotide
aaaucaaaugcuucagacc

SEQ ID NO: 1449236 - RNA, 19 nt, Artificial Sequence
  Description of Artificial Sequence: Synthetic oligonucleotide
  modified_base (16)..(16): a, c, u, g, unknown or other
aucaguccaaaucaunucc

SEQ ID NO: 1449237 - RNA, 19 nt, Artificial Sequence
  Description of Artificial Sequence: Synthetic oligonucleotide
ugguauaucacauuaaaug

SEQ ID NO: 1449238 - RNA, 19 nt, Artificial Sequence
  Description of Artificial Sequence: Synthetic oligonucleotide
agaaaugaauguuaauccc

SEQ ID NO: 1449239 - RNA, 19 nt, Artificial Sequence
  Description of Artificial Sequence: Synthetic oligonucleotide
auuaggauuaucuaaauau

SEQ ID NO: 1449240 - RNA, 19 nt, Artificial Sequence
  Description of Artificial Sequence: Synthetic oligonucleotide
aauguaaauacuuuauuau

SEQ ID NO: 1449241 - RNA, 19 nt, Artificial Sequence
  Description of Artificial Sequence: Synthetic oligonucleotide
aaacauagcccucaucuac

SEQ ID NO: 1449242 - RNA, 19 nt, Artificial Sequence
  Description of Artificial Sequence: Synthetic oligonucleotide
aaaccuagucuucagaaag

SEQ ID NO: 1449243 - RNA, 19 nt, Artificial Sequence
  Description of Artificial Sequence: Synthetic oligonucleotide
aagaauaugcugucaacgg

SEQ ID NO: 1449244 - RNA, 19 nt, Artificial Sequence
  Description of Artificial Sequence: Synthetic oligonucleotide
aaugcuucagaccguaaac

SEQ ID NO: 1449245 - RNA, 19 nt, Artificial Sequence
  Description of Artificial Sequence: Synthetic oligonucleotide
uuuagcaacaauuauaauu

SEQ ID NO: 1449246 - RNA, 19 nt, Artificial Sequence
  Description of Artificial Sequence: Synthetic oligonucleotide
uaaguugucgaguauacag

SEQ ID NO: 1449247 - RNA, 19 nt, Artificial Sequence
  Description of Artificial Sequence: Synthetic oligonucleotide
aauagcuguagaugaagac

SEQ ID NO: 1449248 - RNA, 19 nt, Artificial Sequence
  Description of Artificial Sequence: Synthetic oligonucleotide
aauguauucacauccacaa

SEQ ID NO: 1449249 - RNA, 19 nt, Artificial Sequence
  Description of Artificial Sequence: Synthetic oligonucleotide
cauucauucaucaaguaug

SEQ ID NO: 1449250 - RNA, 19 nt, Artificial Sequence
  Description of Artificial Sequence: Synthetic oligonucleotide
uucaacacgcucuugaaag

SEQ ID NO: 1449251 - RNA, 19 nt, Artificial Sequence
  Description of Artificial Sequence: Synthetic oligonucleotide
uaagauuaaauaguguucc

SEQ ID NO: 1449252 - RNA, 19 nt, Artificial Sequence
  Description of Artificial Sequence: Synthetic oligonucleotide
uuuacugagcuaaagugug

SEQ ID NO: 1449253 - RNA, 19 nt, Artificial Sequence
  Description of Artificial Sequence: Synthetic oligonucleotide
auauauguagccugacacc

SEQ ID NO: 1449254 - RNA, 19 nt, Artificial Sequence
  Description of Artificial Sequence: Synthetic oligonucleotide
agacuauuuaaauauuuag

SEQ ID NO: 1449255 - RNA, 19 nt, Artificial Sequence
  Description of Artificial Sequence: Synthetic oligonucleotide
aaaaugcugacucacaaua

SEQ ID NO: 1449256 - RNA, 19 nt, Artificial Sequence
  Description of Artificial Sequence: Synthetic oligonucleotide
ucauucaucaaguauggga

SEQ ID NO: 1449257 - RNA, 19 nt, Artificial Sequence
  Description of Artificial Sequence: Synthetic oligonucleotide
aauacuccuaaguacagaa

SEQ ID NO: 1449258 - RNA, 19 nt, Artificial Sequence
  Description of Artificial Sequence: Synthetic oligonucleotide
uuuacacccaaguacagca

SEQ ID NO: 1449259 - RNA, 19 nt, Artificial Sequence
  Description of Artificial Sequence: Synthetic oligonucleotide
agaauaugcugucaacggc

SEQ ID NO: 1449260 - RNA, 19 nt, Artificial Sequence
  Description of Artificial Sequence: Synthetic oligonucleotide
aauuuaugcaacauccauc

SEQ ID NO: 1449261 - RNA, 19 nt, Artificial Sequence
  Description of Artificial Sequence: Synthetic oligonucleotide
cuucagaccguaaacauag

SEQ ID NO: 1449262 - RNA, 19 nt, Artificial Sequence
  Description of Artificial Sequence: Synthetic oligonucleotide
agugguaaaauguaaacaa

SEQ ID NO: 1449263 - RNA, 19 nt, Artificial Sequence
  Description of Artificial Sequence: Synthetic oligonucleotide
uuuacagagcguuacaggu

SEQ ID NO: 1449264 - RNA, 19 nt, Artificial Sequence
  Description of Artificial Sequence: Synthetic oligonucleotide
uauaucacauuaaaugagu

SEQ ID NO: 1449265 - RNA, 19 nt, Artificial Sequence
  Description of Artificial Sequence: Synthetic oligonucleotide
aauaaguugucgaguauac

SEQ ID NO: 1449266 - RNA, 19 nt, Artificial Sequence
  Description of Artificial Sequence: Synthetic oligonucleotide
cuuaauuuaacaccccggc

SEQ ID NO: 1449267 - RNA, 19 nt, Artificial Sequence
  Description of Artificial Sequence: Synthetic oligonucleotide
uuaaaugagucuagaaaca

SEQ ID NO: 1449268 - RNA, 19 nt, Artificial Sequence
  Description of Artificial Sequence: Synthetic oligonucleotide
uuccaguugggaaaggacg

SEQ ID NO: 1449269 - RNA, 19 nt, Artificial Sequence
  Description of Artificial Sequence: Synthetic oligonucleotide
uagaugaagacuuuacuga

SEQ ID NO: 1449270 - RNA, 19 nt, Artificial Sequence
  Description of Artificial Sequence: Synthetic oligonucleotide
acagugguaaaauguaaac

SEQ ID NO: 1449271 - RNA, 19 nt, Artificial Sequence
  Description of Artificial Sequence: Synthetic oligonucleotide
uuuuacagagcguuacagg

SEQ ID NO: 1449272 - RNA, 19 nt, Artificial Sequence
  Description of Artificial Sequence: Synthetic oligonucleotide
ucgaaauagcuguagauga

SEQ ID NO: 1449273 - RNA, 19 nt, Artificial Sequence
  Description of Artificial Sequence: Synthetic oligonucleotide
uccguuuaaauguuccugg

SEQ ID NO: 1449274 - RNA, 19 nt, Artificial Sequence
  Description of Artificial Sequence: Synthetic oligonucleotide
aucuuaauuuaacaccccg

SEQ ID NO: 1449275 - RNA, 19 nt, Artificial Sequence
  Description of Artificial Sequence: Synthetic oligonucleotide
aaugcugacucacaauaca

SEQ ID NO: 1449276 - RNA, 19 nt, Artificial Sequence
  Description of Artificial Sequence: Synthetic oligonucleotide
guuuaaauguuccugggac

SEQ ID NO: 1449277 - RNA, 19 nt, Artificial Sequence
  Description of Artificial Sequence: Synthetic oligonucleotide
uacaagacaggacagacua

SEQ ID NO: 1449278 - RNA, 19 nt, Artificial Sequence
  Description of Artificial Sequence: Synthetic oligonucleotide
ucagacaaaaccuagucuu

SEQ ID NO: 1449279 - RNA, 19 nt, Artificial Sequence
  Description of Artificial Sequence: Synthetic oligonucleotide
auuaaauaguguucccuag

SEQ ID NO: 1449280 - RNA, 19 nt, Artificial Sequence
  Description of Artificial Sequence: Synthetic oligonucleotide
uuaggauuaucuaaauauc

SEQ ID NO: 1449281 - RNA, 19 nt, Artificial Sequence
  Description of Artificial Sequence: Synthetic oligonucleotide
uucacauacguuuggcuag

SEQ ID NO: 1449282 - RNA, 19 nt, Artificial Sequence
  Description of Artificial Sequence: Synthetic oligonucleotide
uuuauucagacaaaaccua

SEQ ID NO: 1449283 - RNA, 19 nt, Artificial Sequence
  Description of Artificial Sequence: Synthetic oligonucleotide
uuaaauaguguucccuaga

SEQ ID NO: 1449284 - RNA, 19 nt, Artificial Sequence
  Description of Artificial Sequence: Synthetic oligonucleotide
ugguuacauaaacacauug

SEQ ID NO: 1449285 - RNA, 19 nt, Artificial Sequence
  Description of Artificial Sequence: Synthetic oligonucleotide
caagaauaugcugucaacg

SEQ ID NO: 1449286 - RNA, 19 nt, Artificial Sequence
  Description of Artificial Sequence: Synthetic oligonucleotide
ucgaguauacaguuauuag

SEQ ID NO: 1449287 - RNA, 19 nt, Artificial Sequence
  Description of Artificial Sequence: Synthetic oligonucleotide
aguauggacaggcagggug

SEQ ID NO: 1449288 - RNA, 19 nt, Artificial Sequence
  Description of Artificial Sequence: Synthetic oligonucleotide
uacagagcguuacaggugc

SEQ ID NO: 1449289 - RNA, 19 nt, Artificial Sequence
  Description of Artificial Sequence: Synthetic oligonucleotide
agaacaaauaaaaugcuga

SEQ ID NO: 1449290 - RNA, 19 nt, Artificial Sequence
  Description of Artificial Sequence: Synthetic oligonucleotide
  modified_base (7)..(7): a, c, u, g, unknown or other
aaucaunuccucauuugcu

SEQ ID NO: 1449291 - RNA, 19 nt, Artificial Sequence
  Description of Artificial Sequence: Synthetic oligonucleotide
auuuucaacacgcucuuga

SEQ ID NO: 1449292 - RNA, 19 nt, Artificial Sequence
  Description of Artificial Sequence: Synthetic oligonucleotide
uauuugagaaauguauuca

SEQ ID NO: 1449293 - RNA, 19 nt, Artificial Sequence
  Description of Artificial Sequence: Synthetic oligonucleotide
acaguuauuaggauuaucu

SEQ ID NO: 1449294 - RNA, 19 nt, Artificial Sequence
  Description of Artificial Sequence: Synthetic oligonucleotide
uacguuuggcuagugaugg

SEQ ID NO: 1449295 - RNA, 19 nt, Artificial Sequence
  Description of Artificial Sequence: Synthetic oligonucleotide
aguuacugaauccugagua

SEQ ID NO: 1449296 - RNA, 19 nt, Artificial Sequence
  Description of Artificial Sequence: Synthetic oligonucleotide
uucgaaauagcuguagaug

SEQ ID NO: 1449297 - RNA, 19 nt, Artificial Sequence
  Description of Artificial Sequence: Synthetic oligonucleotide
aaauaguguucccuagaug

SEQ ID NO: 1449298 - RNA, 19 nt, Artificial Sequence
  Description of Artificial Sequence: Synthetic oligonucleotide
guaaacauagcccucaucu

SEQ ID NO: 1449299 - RNA, 19 nt, Artificial Sequence
  Description of Artificial Sequence: Synthetic oligonucleotide
uuuaaauguuccugggaca

SEQ ID NO: 1449300 - RNA, 19 nt, Artificial Sequence
  Description of Artificial Sequence: Synthetic oligonucleotide
acauaaacacauugaucac

SEQ ID NO: 1449301 - RNA, 19 nt, Artificial Sequence
  Description of Artificial Sequence: Synthetic oligonucleotide
uguguucacauacguuugg

SEQ ID NO: 1449302 - RNA, 19 nt, Artificial Sequence
  Description of Artificial Sequence: Synthetic oligonucleotide
uuaauuuaacaccccggcu

SEQ ID NO: 1449303 - RNA, 19 nt, Artificial Sequence
  Description of Artificial Sequence: Synthetic oligonucleotide
gaguauacaguuauuagga

SEQ ID NO: 1449304 - RNA, 19 nt, Artificial Sequence
  Description of Artificial Sequence: Synthetic oligonucleotide
uccauccauauuaaaauaa

SEQ ID NO: 1449305 - RNA, 19 nt, Artificial Sequence
  Description of Artificial Sequence: Synthetic oligonucleotide
cagaccguaaacauagccc

SEQ ID NO: 1449306 - RNA, 19 nt, Artificial Sequence
  Description of Artificial Sequence: Synthetic oligonucleotide
uacuugaguugacuuaucc

SEQ ID NO: 1449307 - RNA, 19 nt, Artificial Sequence
  Description of Artificial Sequence: Synthetic oligonucleotide
ucuuaagauuaaauagugu

SEQ ID NO: 1449308 - RNA, 19 nt, Artificial Sequence
  Description of Artificial Sequence: Synthetic oligonucleotide
augaccuuuacacuccaag

SEQ ID NO: 1449309 - RNA, 19 nt, Artificial Sequence
  Description of Artificial Sequence: Synthetic oligonucleotide
gguauaucacauuaaauga

SEQ ID NO: 1449310 - RNA, 19 nt, Artificial Sequence
  Description of Artificial Sequence: Synthetic oligonucleotide
cauuuuaauaaguugucga

SEQ ID NO: 1449311 - RNA, 19 nt, Artificial Sequence
  Description of Artificial Sequence: Synthetic oligonucleotide
aaguuaacauaaagugggc

SEQ ID NO: 1449312 - RNA, 19 nt, Artificial Sequence
  Description of Artificial Sequence: Synthetic oligonucleotide
uaaauaguguucccuagau

SEQ ID NO: 1449313 - RNA, 19 nt, Artificial Sequence
  Description of Artificial Sequence: Synthetic oligonucleotide
gaagccucauccccaaacg

SEQ ID NO: 1449314 - RNA, 19 nt, Artificial Sequence
  Description of Artificial Sequence: Synthetic oligonucleotide
guauaucacauuaaaugag

SEQ ID NO: 1449315 - RNA, 19 nt, Artificial Sequence
  Description of Artificial Sequence: Synthetic oligonucleotide
agaccguaaacauagcccu

SEQ ID NO: 1449316 - RNA, 19 nt, Artificial Sequence
  Description of Artificial Sequence: Synthetic oligonucleotide
  modified_base (9)..(9): a, c, u, g, unknown or other
caaaucaunuccucauuug

SEQ ID NO: 1449317 - RNA, 19 nt, Artificial Sequence
  Description of Artificial Sequence: Synthetic oligonucleotide
auccaucauauauauaugu

SEQ ID NO: 1449318 - RNA, 19 nt, Artificial Sequence
  Description of Artificial Sequence: Synthetic oligonucleotide
uauguagccugacaccacc

SEQ ID NO: 1449319 - RNA, 19 nt, Artificial Sequence
  Description of Artificial Sequence: Synthetic oligonucleotide
auuuacacccaaguacagc

SEQ ID NO: 1449320 - RNA, 19 nt, Artificial Sequence
  Description of Artificial Sequence: Synthetic oligonucleotide
caucuuacaagacaggaca

SEQ ID NO: 1449321 - RNA, 19 nt, Artificial Sequence
  Description of Artificial Sequence: Synthetic oligonucleotide
aaaugcugacucacaauac

SEQ ID NO: 1449322 - RNA, 19 nt, Artificial Sequence
  Description of Artificial Sequence: Synthetic oligonucleotide
cuugagaguuacugaaucc

SEQ ID NO: 1449323 - RNA, 19 nt, Artificial Sequence
  Description of Artificial Sequence: Synthetic oligonucleotide
cauuaaaugagucuagaaa

SEQ ID NO: 1449324 - RNA, 19 nt, Artificial Sequence
  Description of Artificial Sequence: Synthetic oligonucleotide
auaaaaugcugacucacaa

SEQ ID NO: 1449325 - RNA, 19 nt, Artificial Sequence
  Description of Artificial Sequence: Synthetic oligonucleotide
gacguuuccguuuaaaugu

SEQ ID NO: 1449326 - RNA, 19 nt, Artificial Sequence
  Description of Artificial Sequence: Synthetic oligonucleotide
ucaucuuacaagacaggac

SEQ ID NO: 1449327 - RNA, 19 nt, Artificial Sequence
  Description of Artificial Sequence: Synthetic oligonucleotide
aguacagaaaucaaaugcu

SEQ ID NO: 1449328 - RNA, 19 nt, Artificial Sequence
  Description of Artificial Sequence: Synthetic oligonucleotide
aaauguauucacauccaca

SEQ ID NO: 1449329 - RNA, 19 nt, Artificial Sequence
  Description of Artificial Sequence: Synthetic oligonucleotide
acuuauccaucauauauau

SEQ ID NO: 1449330 - RNA, 19 nt, Artificial Sequence
  Description of Artificial Sequence: Synthetic oligonucleotide
aaaauugguauaucacauu

SEQ ID NO: 1449331 - RNA, 19 nt, Artificial Sequence
  Description of Artificial Sequence: Synthetic oligonucleotide
uugucgaguauacaguuau

SEQ ID NO: 1449332 - RNA, 19 nt, Artificial Sequence
  Description of Artificial Sequence: Synthetic oligonucleotide
aguucuuaaguaucugugu

SEQ ID NO: 1449333 - RNA, 19 nt, Artificial Sequence
  Description of Artificial Sequence: Synthetic oligonucleotide
uguucgaaauagcuguaga

SEQ ID NO: 1449334 - RNA, 19 nt, Artificial Sequence
  Description of Artificial Sequence: Synthetic oligonucleotide
ugagaguuacugaauccug

SEQ ID NO: 1449335 - RNA, 19 nt, Artificial Sequence
  Description of Artificial Sequence: Synthetic oligonucleotide
aguaugggagggcuggcac

SEQ ID NO: 1449336 - RNA, 19 nt, Artificial Sequence
  Description of Artificial Sequence: Synthetic oligonucleotide
ucuaucauccgcacuucug

SEQ ID NO: 1449337 - RNA, 19 nt, Artificial Sequence
  Description of Artificial Sequence: Synthetic oligonucleotide
auuaauguaaauacuuuau

SEQ ID NO: 1449338 - RNA, 19 nt, Artificial Sequence
  Description of Artificial Sequence: Synthetic oligonucleotide
acgaccacagguugguuac

SEQ ID NO: 1449339 - RNA, 19 nt, Artificial Sequence
  Description of Artificial Sequence: Synthetic oligonucleotide
ugucuaaaauacuccuaag

SEQ ID NO: 1449340 - RNA, 19 nt, Artificial Sequence
  Description of Artificial Sequence: Synthetic oligonucleotide
guuaacauaaagugggcaa

SEQ ID NO: 1449341 - RNA, 19 nt, Artificial Sequence
  Description of Artificial Sequence: Synthetic oligonucleotide
ugaccuuuacacuccaaga

SEQ ID NO: 1449342 - RNA, 19 nt, Artificial Sequence
  Description of Artificial Sequence: Synthetic oligonucleotide
  modified_base (4)..(4): a, c, u, g, unknown or other
caunuccucauuugcuuag

SEQ ID NO: 1449343 - RNA, 19 nt, Artificial Sequence
  Description of Artificial Sequence: Synthetic oligonucleotide
uuaaucccuucccugaaaa

SEQ ID NO: 1449344 - RNA, 19 nt, Artificial Sequence
  Description of Artificial Sequence: Synthetic oligonucleotide
acugcagcgaugcucaacu

SEQ ID NO: 1449345 - RNA, 19 nt, Artificial Sequence
  Description of Artificial Sequence: Synthetic oligonucleotide
auuaucuaaauaucacuua

SEQ ID NO: 1449346 - RNA, 19 nt, Artificial Sequence
  Description of Artificial Sequence: Synthetic oligonucleotide
ucaacggcacaaauuacaa

SEQ ID NO: 1449347 - RNA, 19 nt, Artificial Sequence
  Description of Artificial Sequence: Synthetic oligonucleotide
aacauaaagugggcaacag

SEQ ID NO: 1449348 - RNA, 19 nt, Artificial Sequence
  Description of Artificial Sequence: Synthetic oligonucleotide
uaugcaacauccauccaua

SEQ ID NO: 1449349 - RNA, 19 nt, Artificial Sequence
  Description of Artificial Sequence: Synthetic oligonucleotide
uuacugaauccugaguaag

SEQ ID NO: 1449350 - RNA, 19 nt, Artificial Sequence
  Description of Artificial Sequence: Synthetic oligonucleotide
uacacuccaagaauaugcu

SEQ ID NO: 1449351 - RNA, 19 nt, Artificial Sequence
  Description of Artificial Sequence: Synthetic oligonucleotide
ugagcuugagaguuacuga

SEQ ID NO: 1449352 - RNA, 19 nt, Artificial Sequence
  Description of Artificial Sequence: Synthetic oligonucleotide
uugagaguuacugaauccu

SEQ ID NO: 1449353 - RNA, 19 nt, Artificial Sequence
  Description of Artificial Sequence: Synthetic oligonucleotide
uugguauaucacauuaaau

SEQ ID NO: 1449354 - RNA, 19 nt, Artificial Sequence
  Description of Artificial Sequence: Synthetic oligonucleotide
uuacagagcguuacaggug

SEQ ID NO: 1449355 - RNA, 19 nt, Artificial Sequence
  Description of Artificial Sequence: Synthetic oligonucleotide
aaguuaaaccuuacuacca

SEQ ID NO: 1449356 - RNA, 19 nt, Artificial Sequence
  Description of Artificial Sequence: Synthetic oligonucleotide
aucacauuaaaugagucua

SEQ ID NO: 1449357 - RNA, 19 nt, Artificial Sequence
  Description of Artificial Sequence: Synthetic oligonucleotide
guuauuaggauuaucuaaa

SEQ ID NO: 1449358 - RNA, 19 nt, Artificial Sequence
  Description of Artificial Sequence: Synthetic oligonucleotide
ugcuuaguucuuaaguauc

SEQ ID NO: 1449359 - RNA, 19 nt, Artificial Sequence
  Description of Artificial Sequence: Synthetic oligonucleotide
cuuacaagacaggacagac

SEQ ID NO: 1449360 - RNA, 19 nt, Artificial Sequence
  Description of Artificial Sequence: Synthetic oligonucleotide
aaaacgaccacagguuggu

SEQ ID NO: 1449361 - RNA, 19 nt, Artificial Sequence
  Description of Artificial Sequence: Synthetic oligonucleotide
ugccucuuaagauuaaaua

SEQ ID NO: 1449362 - RNA, 19 nt, Artificial Sequence
  Description of Artificial Sequence: Synthetic oligonucleotide
uaucuaaauaucacuuaua

SEQ ID NO: 1449363 - RNA, 19 nt, Artificial Sequence
  Description of Artificial Sequence: Synthetic oligonucleotide
augagcuugagaguuacug

SEQ ID NO: 1449364 - RNA, 19 nt, Artificial Sequence
  Description of Artificial Sequence: Synthetic oligonucleotide
uagcuguagaugaagacuu

SEQ ID NO: 1449365 - RNA, 19 nt, Artificial Sequence
  Description of Artificial Sequence: Synthetic oligonucleotide
uccaguugggaaaggacgu

SEQ ID NO: 1449366 - RNA, 19 nt, Artificial Sequence
  Description of Artificial Sequence: Synthetic oligonucleotide
agcuaaagugugcccaagg

SEQ ID NO: 1449367 - RNA, 19 nt, Artificial Sequence
  Description of Artificial Sequence: Synthetic oligonucleotide
auaaagugggcaacagugg

SEQ ID NO: 1449368 - RNA, 19 nt, Artificial Sequence
  Description of Artificial Sequence: Synthetic oligonucleotide
gaauaugcugucaacggca

SEQ ID NO: 1449369 - RNA, 19 nt, Artificial Sequence
  Description of Artificial Sequence: Synthetic oligonucleotide
gagggaaggugguagaaca

SEQ ID NO: 1449370 - RNA, 19 nt, Artificial Sequence
  Description of Artificial Sequence: Synthetic oligonucleotide
uuaauaaguugucgaguau

SEQ ID NO: 1449371 - RNA, 19 nt, Artificial Sequence
  Description of Artificial Sequence: Synthetic oligonucleotide
acauuaaaugagucuagaa

SEQ ID NO: 1449372 - RNA, 19 nt, Artificial Sequence
  Description of Artificial Sequence: Synthetic oligonucleotide
ugggacaagcuuuuccacc

SEQ ID NO: 1449373 - RNA, 19 nt, Artificial Sequence
  Description of Artificial Sequence: Synthetic oligonucleotide
aguuaaaccuuacuaccaa

SEQ ID NO: 1449374 - RNA, 19 nt, Artificial Sequence
  Description of Artificial Sequence: Synthetic oligonucleotide
auguuaaucccuucccuga

SEQ ID NO: 1449375 - RNA, 19 nt, Artificial Sequence
  Description of Artificial Sequence: Synthetic oligonucleotide
uuauuaggauuaucuaaau

SEQ ID NO: 1449376 - RNA, 19 nt, Artificial Sequence
  Description of Artificial Sequence: Synthetic oligonucleotide
aucaucuuacaagacagga

SEQ ID NO: 1449377 - RNA, 19 nt, Artificial Sequence
  Description of Artificial Sequence: Synthetic oligonucleotide
cuguaguauggacaggcag

SEQ ID NO: 1449378 - RNA, 19 nt, Artificial Sequence
  Description of Artificial Sequence: Synthetic oligonucleotide
uguucccuagaugagcuug

SEQ ID NO: 1449379 - RNA, 19 nt, Artificial Sequence
  Description of Artificial Sequence: Synthetic oligonucleotide
aaacguaggcaaaucucag

SEQ ID NO: 1449380 - RNA, 19 nt, Artificial Sequence
  Description of Artificial Sequence: Synthetic oligonucleotide
uuacugagcuaaagugugc

SEQ ID NO: 1449381 - RNA, 19 nt, Artificial Sequence
  Description of Artificial Sequence: Synthetic oligonucleotide
cgaguauacaguuauuagg

SEQ ID NO: 1449382 - RNA, 19 nt, Artificial Sequence
  Description of Artificial Sequence: Synthetic oligonucleotide
guuuccguuuaaauguucc

SEQ ID NO: 1449383 - RNA, 19 nt, Artificial Sequence
  Description of Artificial Sequence: Synthetic oligonucleotide
uacugagcuaaagugugcc

SEQ ID NO: 1449384 - RNA, 19 nt, Artificial Sequence
  Description of Artificial Sequence: Synthetic oligonucleotide
uguagccugacaccacccc

SEQ ID NO: 1449385 - RNA, 19 nt, Artificial Sequence
  Description of Artificial Sequence: Synthetic oligonucleotide
gugguaaaauguaaacaag

SEQ ID NO: 1449386 - RNA, 19 nt, Artificial Sequence
  Description of Artificial Sequence: Synthetic oligonucleotide
uaacauaaagugggcaaca

SEQ ID NO: 1449387 - RNA, 19 nt, Artificial Sequence
  Description of Artificial Sequence: Synthetic oligonucleotide
aaauacuccuaaguacaga

SEQ ID NO: 1449388 - RNA, 19 nt, Artificial Sequence
  Description of Artificial Sequence: Synthetic oligonucleotide
gaccuuuacacuccaagaa

SEQ ID NO: 1449389 - RNA, 19 nt, Artificial Sequence
  Description of Artificial Sequence: Synthetic oligonucleotide
gcaacauccauccauauua

SEQ ID NO: 1449390 - RNA, 19 nt, Artificial Sequence
  Description of Artificial Sequence: Synthetic oligonucleotide
aaguugucgaguauacagu

SEQ ID NO: 1449391 - RNA, 19 nt, Artificial Sequence
  Description of Artificial Sequence: Synthetic oligonucleotide
  modified_base (6)..(6): a, c, u, g, unknown or other
aucaunuccucauuugcuu

SEQ ID NO: 1449392 - RNA, 19 nt, Artificial Sequence
  Description of Artificial Sequence: Synthetic oligonucleotide
acauaaagugggcaacagu

SEQ ID NO: 1449393 - RNA, 19 nt, Artificial Sequence
  Description of Artificial Sequence: Synthetic oligonucleotide
ggacguuuccguuuaaaug

SEQ ID NO: 1449394 - RNA, 19 nt, Artificial Sequence
  Description of Artificial Sequence: Synthetic oligonucleotide
acagcuaaugccugcggcu

SEQ ID NO: 1449395 - RNA, 19 nt, Artificial Sequence
  Description of Artificial Sequence: Synthetic oligonucleotide
ugcagcgaugcucaacugu

SEQ ID NO: 1449396 - RNA, 19 nt, Artificial Sequence
  Description of Artificial Sequence: Synthetic oligonucleotide
aacgaccacagguugguua

SEQ ID NO: 1449397 - RNA, 19 nt, Artificial Sequence
  Description of Artificial Sequence: Synthetic oligonucleotide
aguuacuguggacacaauu

SEQ ID NO: 1449398 - RNA, 19 nt, Artificial Sequence
  Description of Artificial Sequence: Synthetic oligonucleotide
aacaccuuuuccaguuggg

SEQ ID NO: 1449399 - RNA, 19 nt, Artificial Sequence
  Description of Artificial Sequence: Synthetic oligonucleotide
aguuaacauaaagugggca

SEQ ID NO: 1449400 - RNA, 19 nt, Artificial Sequence
  Description of Artificial Sequence: Synthetic oligonucleotide
caaaaccuagucuucagaa

SEQ ID NO: 1449401 - RNA, 19 nt, Artificial Sequence
  Description of Artificial Sequence: Synthetic oligonucleotide
uaagaaucacuuccuguuu

SEQ ID NO: 1449402 - RNA, 19 nt, Artificial Sequence
  Description of Artificial Sequence: Synthetic oligonucleotide
guuacaggugcacagcuaa

SEQ ID NO: 1449403 - RNA, 19 nt, Artificial Sequence
  Description of Artificial Sequence: Synthetic oligonucleotide
accuuuacacuccaagaau

SEQ ID NO: 1449404 - RNA, 19 nt, Artificial Sequence
  Description of Artificial Sequence: Synthetic oligonucleotide
uuucuacuuucagugaagu

SEQ ID NO: 1449405 - RNA, 19 nt, Artificial Sequence
  Description of Artificial Sequence: Synthetic oligonucleotide
aaauugccucuuaagauua

SEQ ID NO: 1449406 - RNA, 19 nt, Artificial Sequence
  Description of Artificial Sequence: Synthetic oligonucleotide
ucuuacaagacaggacaga

SEQ ID NO: 1449407 - RNA, 19 nt, Artificial Sequence
  Description of Artificial Sequence: Synthetic oligonucleotide
aguauacaguuauuaggau

SEQ ID NO: 1449408 - RNA, 19 nt, Artificial Sequence
  Description of Artificial Sequence: Synthetic oligonucleotide
aguugucgaguauacaguu

SEQ ID NO: 1449409 - RNA, 19 nt, Artificial Sequence
  Description of Artificial Sequence: Synthetic oligonucleotide
caaauaaaaugcugacuca

SEQ ID NO: 1449410 - RNA, 19 nt, Artificial Sequence
  Description of Artificial Sequence: Synthetic oligonucleotide
uguguugcuagggaacaca

SEQ ID NO: 1449411 - RNA, 19 nt, Artificial Sequence
  Description of Artificial Sequence: Synthetic oligonucleotide
uguuaaucccuucccugaa

SEQ ID NO: 1449412 - RNA, 19 nt, Artificial Sequence
  Description of Artificial Sequence: Synthetic oligonucleotide
  modified_base (5)..(5): a, c, u, g, unknown or other
ucaunuccucauuugcuua

SEQ ID NO: 1449413 - RNA, 19 nt, Artificial Sequence
  Description of Artificial Sequence: Synthetic oligonucleotide
ucaacacgcucuugaaaga

SEQ ID NO: 1449414 - RNA, 19 nt, Artificial Sequence
  Description of Artificial Sequence: Synthetic oligonucleotide
ugcuucagaccguaaacau

SEQ ID NO: 1449415 - RNA, 19 nt, Artificial Sequence
  Description of Artificial Sequence: Synthetic oligonucleotide
aauugguauaucacauuaa

SEQ ID NO: 1449416 - RNA, 19 nt, Artificial Sequence
  Description of Artificial Sequence: Synthetic oligonucleotide
uguugcuagggaacacaug

SEQ ID NO: 1449417 - RNA, 19 nt, Artificial Sequence
  Description of Artificial Sequence: Synthetic oligonucleotide
agcguuacaggugcacagc

SEQ ID NO: 1449418 - RNA, 19 nt, Artificial Sequence
  Description of Artificial Sequence: Synthetic oligonucleotide
uaaacauagcccucaucua

SEQ ID NO: 1449419 - RNA, 19 nt, Artificial Sequence
  Description of Artificial Sequence: Synthetic oligonucleotide
uaguguucccuagaugagc

SEQ ID NO: 1449420 - RNA, 19 nt, Artificial Sequence
  Description of Artificial Sequence: Synthetic oligonucleotide
cugucaacggcacaaauua

SEQ ID NO: 1449421 - RNA, 19 nt, Artificial Sequence
  Description of Artificial Sequence: Synthetic oligonucleotide
uucguacuugaguugacuu

SEQ ID NO: 1449422 - RNA, 19 nt, Artificial Sequence
  Description of Artificial Sequence: Synthetic oligonucleotide
gcugacucacaauacaaac

SEQ ID NO: 1449423 - RNA, 19 nt, Artificial Sequence
  Description of Artificial Sequence: Synthetic oligonucleotide
guucacauacguuuggcua

SEQ ID NO: 1449424 - RNA, 19 nt, Artificial Sequence
  Description of Artificial Sequence: Synthetic oligonucleotide
guuucuacuuucagugaag

SEQ ID NO: 1449425 - RNA, 19 nt, Artificial Sequence
  Description of Artificial Sequence: Synthetic oligonucleotide
ugucaacggcacaaauuac

SEQ ID NO: 1449426 - RNA, 19 nt, Artificial Sequence
  Description of Artificial Sequence: Synthetic oligonucleotide
aaggcuuuucguacuugag

SEQ ID NO: 1449427 - RNA, 19 nt, Artificial Sequence
  Description of Artificial Sequence: Synthetic oligonucleotide
cacagcuaaugccugcggc

SEQ ID NO: 1449428 - RNA, 19 nt, Artificial Sequence
  Description of Artificial Sequence: Synthetic oligonucleotide
aucuacuguguugcuaggg

SEQ ID NO: 1449429 - RNA, 19 nt, Artificial Sequence
  Description of Artificial Sequence: Synthetic oligonucleotide
acacuccaagaauaugcug

SEQ ID NO: 1449430 - RNA, 19 nt, Artificial Sequence
  Description of Artificial Sequence: Synthetic oligonucleotide
cuuaguucuuaaguaucug

SEQ ID NO: 1449431 - RNA, 19 nt, Artificial Sequence
  Description of Artificial Sequence: Synthetic oligonucleotide
guuacugaauccugaguaa

SEQ ID NO: 1449432 - RNA, 19 nt, Artificial Sequence
  Description of Artificial Sequence: Synthetic oligonucleotide
ugagcuaaagugugcccaa

SEQ ID NO: 1449433 - RNA, 19 nt, Artificial Sequence
  Description of Artificial Sequence: Synthetic oligonucleotide
uuucguacuugaguugacu

SEQ ID NO: 1449434 - RNA, 19 nt, Artificial Sequence
  Description of Artificial Sequence: Synthetic oligonucleotide
ucguacuugaguugacuua

SEQ ID NO: 1449435 - RNA, 19 nt, Artificial Sequence
  Description of Artificial Sequence: Synthetic oligonucleotide
gaauguuaaucccuucccu

SEQ ID NO: 1449436 - RNA, 19 nt, Artificial Sequence
  Description of Artificial Sequence: Synthetic oligonucleotide
uuuucguacuugaguugac

SEQ ID NO: 1449437 - RNA, 19 nt, Artificial Sequence
  Description of Artificial Sequence: Synthetic oligonucleotide
acauacguuuggcuaguga

SEQ ID NO: 1449438 - RNA, 19 nt, Artificial Sequence
  Description of Artificial Sequence: Synthetic oligonucleotide
uuccuguuuuauucagaca

SEQ ID NO: 1449439 - RNA, 19 nt, Artificial Sequence
  Description of Artificial Sequence: Synthetic oligonucleotide
gaaaggacguuuccguuua

SEQ ID NO: 1449440 - RNA, 19 nt, Artificial Sequence
  Description of Artificial Sequence: Synthetic oligonucleotide
ugcaacauccauccauauu

SEQ ID NO: 1449441 - RNA, 19 nt, Artificial Sequence
  Description of Artificial Sequence: Synthetic oligonucleotide
guauggacaggcagggugc

SEQ ID NO: 1449442 - RNA, 19 nt, Artificial Sequence
  Description of Artificial Sequence: Synthetic oligonucleotide
cacuccaagaauaugcugu

SEQ ID NO: 1449443 - RNA, 19 nt, Artificial Sequence
  Description of Artificial Sequence: Synthetic oligonucleotide
agacaaaaccuagucuuca

SEQ ID NO: 1449444 - RNA, 19 nt, Artificial Sequence
  Description of Artificial Sequence: Synthetic oligonucleotide
uucuacuuucagugaaguc

SEQ ID NO: 1449445 - RNA, 19 nt, Artificial Sequence
  Description of Artificial Sequence: Synthetic oligonucleotide
ucaucaaguaugggagggc

SEQ ID NO: 1449446 - RNA, 19 nt, Artificial Sequence
  Description of Artificial Sequence: Synthetic oligonucleotide
gucaacggcacaaauuaca

SEQ ID NO: 1449447 - RNA, 19 nt, Artificial Sequence
  Description of Artificial Sequence: Synthetic oligonucleotide
auuuagcaacaauuauaau

SEQ ID NO: 1449448 - RNA, 19 nt, Artificial Sequence
  Description of Artificial Sequence: Synthetic oligonucleotide
  modified_base (11)..(11): a, c, u, g, unknown or other
uccaaaucaunuccucauu

SEQ ID NO: 1449449 - RNA, 19 nt, Artificial Sequence
  Description of Artificial Sequence: Synthetic oligonucleotide
aguguucccuagaugagcu

SEQ ID NO: 1449450 - RNA, 19 nt, Artificial Sequence
  Description of Artificial Sequence: Synthetic oligonucleotide
ucauccccaaacguaggca

SEQ ID NO: 1449451 - RNA, 19 nt, Artificial Sequence
  Description of Artificial Sequence: Synthetic oligonucleotide
aauguuccugggacaagcu

SEQ ID NO: 1449452 - RNA, 19 nt, Artificial Sequence
  Description of Artificial Sequence: Synthetic oligonucleotide
auacguuuggcuagugaug

SEQ ID NO: 1449453 - RNA, 19 nt, Artificial Sequence
  Description of Artificial Sequence: Synthetic oligonucleotide
ggauuaucuaaauaucacu

SEQ ID NO: 1449454 - RNA, 19 nt, Artificial Sequence
  Description of Artificial Sequence: Synthetic oligonucleotide
guuaaaccuuacuaccaaa

SEQ ID NO: 1449455 - RNA, 19 nt, Artificial Sequence
  Description of Artificial Sequence: Synthetic oligonucleotide
auuuagacauuuacaccca

SEQ ID NO: 1449456 - RNA, 19 nt, Artificial Sequence
  Description of Artificial Sequence: Synthetic oligonucleotide
auaguguucccuagaugag

SEQ ID NO: 1449457 - RNA, 19 nt, Artificial Sequence
  Description of Artificial Sequence: Synthetic oligonucleotide
uuacacccaaguacagcaa

SEQ ID NO: 1449458 - RNA, 19 nt, Artificial Sequence
  Description of Artificial Sequence: Synthetic oligonucleotide
cauacguuuggcuagugau

SEQ ID NO: 1449459 - RNA, 19 nt, Artificial Sequence
  Description of Artificial Sequence: Synthetic oligonucleotide
guugacuuauccaucauau

SEQ ID NO: 1449460 - RNA, 19 nt, Artificial Sequence
  Description of Artificial Sequence: Synthetic oligonucleotide
augcuucagaccguaaaca

SEQ ID NO: 1449461 - RNA, 19 nt, Artificial Sequence
  Description of Artificial Sequence: Synthetic oligonucleotide
auauguagccugacaccac

SEQ ID NO: 1449462 - RNA, 19 nt, Artificial Sequence
  Description of Artificial Sequence: Synthetic oligonucleotide
uucagaccguaaacauagc

SEQ ID NO: 1449463 - RNA, 19 nt, Artificial Sequence
  Description of Artificial Sequence: Synthetic oligonucleotide
agacauaauugaaaaguua

SEQ ID NO: 1449464 - RNA, 19 nt, Artificial Sequence
  Description of Artificial Sequence: Synthetic oligonucleotide
ugugcccaaggcuuuucgu

SEQ ID NO: 1449465 - RNA, 19 nt, Artificial Sequence
  Description of Artificial Sequence: Synthetic oligonucleotide
gugaugaccuuuacacucc

SEQ ID NO: 1449466 - RNA, 19 nt, Artificial Sequence
  Description of Artificial Sequence: Synthetic oligonucleotide
uggcuagugauggaagccu

SEQ ID NO: 1449467 - RNA, 19 nt, Artificial Sequence
  Description of Artificial Sequence: Synthetic oligonucleotide
guauacaguuauuaggauu

SEQ ID NO: 1449468 - RNA, 19 nt, Artificial Sequence
  Description of Artificial Sequence: Synthetic oligonucleotide
accguaaacauagcccuca

SEQ ID NO: 1449469 - RNA, 19 nt, Artificial Sequence
  Description of Artificial Sequence: Synthetic oligonucleotide
  modified_base (2)..(2): a, c, u, g, unknown or other
unuccucauuugcuuaguu

SEQ ID NO: 1449470 - RNA, 19 nt, Artificial Sequence
  Description of Artificial Sequence: Synthetic oligonucleotide
uacaguuauuaggauuauc

SEQ ID NO: 1449471 - RNA, 19 nt, Artificial Sequence
  Description of Artificial Sequence: Synthetic oligonucleotide
aaguaugggagggcuggca

SEQ ID NO: 1449472 - RNA, 19 nt, Artificial Sequence
  Description of Artificial Sequence: Synthetic oligonucleotide
agucuaucauccgcacuuc

SEQ ID NO: 1449473 - RNA, 19 nt, Artificial Sequence
  Description of Artificial Sequence: Synthetic oligonucleotide
ccaaacguaggcaaaucuc

SEQ ID NO: 1449474 - RNA, 19 nt, Artificial Sequence
  Description of Artificial Sequence: Synthetic oligonucleotide
cacccaaguacagcaauac

SEQ ID NO: 1449475 - RNA, 19 nt, Artificial Sequence
  Description of Artificial Sequence: Synthetic oligonucleotide
acccaaguacagcaauaca

SEQ ID NO: 1449476 - RNA, 19 nt, Artificial Sequence
  Description of Artificial Sequence: Synthetic oligonucleotide
cugggacaagcuuuuccac

SEQ ID NO: 1449477 - RNA, 19 nt, Artificial Sequence
  Description of Artificial Sequence: Synthetic oligonucleotide
gagauaagaaucacuuccu

SEQ ID NO: 1449478 - RNA, 19 nt, Artificial Sequence
  Description of Artificial Sequence: Synthetic oligonucleotide
gucgaguauacaguuauua

SEQ ID NO: 1449479 - RNA, 19 nt, Artificial Sequence
  Description of Artificial Sequence: Synthetic oligonucleotide
aucccuucccugaaaagca

SEQ ID NO: 1449480 - RNA, 19 nt, Artificial Sequence
  Description of Artificial Sequence: Synthetic oligonucleotide
gaugcucaacugucuaaaa

SEQ ID NO: 1449481 - RNA, 19 nt, Artificial Sequence
  Description of Artificial Sequence: Synthetic oligonucleotide
agggaaggugguagaacac

SEQ ID NO: 1449482 - RNA, 19 nt, Artificial Sequence
  Description of Artificial Sequence: Synthetic oligonucleotide
guguguucacauacguuug

SEQ ID NO: 1449483 - RNA, 19 nt, Artificial Sequence
  Description of Artificial Sequence: Synthetic oligonucleotide
aauguucgaaauagcugua

SEQ ID NO: 1449484 - RNA, 19 nt, Artificial Sequence
  Description of Artificial Sequence: Synthetic oligonucleotide
guucgaaauagcuguagau

SEQ ID NO: 1449485 - RNA, 19 nt, Artificial Sequence
  Description of Artificial Sequence: Synthetic oligonucleotide
guguucacauacguuuggc

SEQ ID NO: 1449486 - RNA, 19 nt, Artificial Sequence
  Description of Artificial Sequence: Synthetic oligonucleotide
caguuauuaggauuaucua

SEQ ID NO: 1449487 - RNA, 19 nt, Artificial Sequence
  Description of Artificial Sequence: Synthetic oligonucleotide
gugauuggcccacuccuuc

SEQ ID NO: 1449488 - RNA, 19 nt, Artificial Sequence
  Description of Artificial Sequence: Synthetic oligonucleotide
agcaucccaucuuaauuua

SEQ ID NO: 1449489 - RNA, 19 nt, Artificial Sequence
  Description of Artificial Sequence: Synthetic oligonucleotide
aaagugggcaacaguggua

SEQ ID NO: 1449490 - RNA, 19 nt, Artificial Sequence
  Description of Artificial Sequence: Synthetic oligonucleotide
ugggugcuguaguauggac

SEQ ID NO: 1449491 - RNA, 19 nt, Artificial Sequence
  Description of Artificial Sequence: Synthetic oligonucleotide
uugggugcuguaguaugga

SEQ ID NO: 1449492 - RNA, 19 nt, Artificial Sequence
  Description of Artificial Sequence: Synthetic oligonucleotide
aagacuuuacugagcuaaa

SEQ ID NO: 1449493 - RNA, 19 nt, Artificial Sequence
  Description of Artificial Sequence: Synthetic oligonucleotide
agagcguuacaggugcaca

SEQ ID NO: 1449494 - RNA, 19 nt, Artificial Sequence
  Description of Artificial Sequence: Synthetic oligonucleotide
cacauuaaaugagucuaga

SEQ ID NO: 1449495 - RNA, 19 nt, Artificial Sequence
  Description of Artificial Sequence: Synthetic oligonucleotide
uuacaggugcacagcuaau

SEQ ID NO: 1449496 - RNA, 19 nt, Artificial Sequence
  Description of Artificial Sequence: Synthetic oligonucleotide
ucacauacguuuggcuagu

SEQ ID NO: 1449497 - RNA, 19 nt, Artificial Sequence
  Description of Artificial Sequence: Synthetic oligonucleotide
uagagacauuuagacauuu

SEQ ID NO: 1449498 - RNA, 19 nt, Artificial Sequence
  Description of Artificial Sequence: Synthetic oligonucleotide
cccaaauugccucuuaaga

SEQ ID NO: 1449499 - RNA, 19 nt, Artificial Sequence
  Description of Artificial Sequence: Synthetic oligonucleotide
guagccugacaccacccca

SEQ ID NO: 1449500 - RNA, 19 nt, Artificial Sequence
  Description of Artificial Sequence: Synthetic oligonucleotide
ccguuuaaauguuccuggg

SEQ ID NO: 1449501 - RNA, 19 nt, Artificial Sequence
  Description of Artificial Sequence: Synthetic oligonucleotide
cagaguuucuacuuucagu

SEQ ID NO: 1449502 - RNA, 19 nt, Artificial Sequence
  Description of Artificial Sequence: Synthetic oligonucleotide
cgcacuucugcuuccacgg

SEQ ID NO: 1449503 - RNA, 19 nt, Artificial Sequence
  Description of Artificial Sequence: Synthetic oligonucleotide
auaugcugucaacggcaca

SEQ ID NO: 1449504 - RNA, 19 nt, Artificial Sequence
  Description of Artificial Sequence: Synthetic oligonucleotide
uucccuagaugagcuugag

SEQ ID NO: 1449505 - RNA, 19 nt, Artificial Sequence
  Description of Artificial Sequence: Synthetic oligonucleotide
agcgaugcucaacugucua

SEQ ID NO: 1449506 - RNA, 19 nt, Artificial Sequence
  Description of Artificial Sequence: Synthetic oligonucleotide
ugucgaguauacaguuauu

SEQ ID NO: 1449507 - RNA, 19 nt, Artificial Sequence
  Description of Artificial Sequence: Synthetic oligonucleotide
  modified_base (12)..(12): a, c, u, g, unknown or other
guccaaaucaunuccucau

SEQ ID NO: 1449508 - RNA, 19 nt, Artificial Sequence
  Description of Artificial Sequence: Synthetic oligonucleotide
guuaaucccuucccugaaa

SEQ ID NO: 1449509 - RNA, 19 nt, Artificial Sequence
  Description of Artificial Sequence: Synthetic oligonucleotide
acaagacaggacagacuag

SEQ ID NO: 1449510 - RNA, 19 nt, Artificial Sequence
  Description of Artificial Sequence: Synthetic oligonucleotide
gagcuaaagugugcccaag

SEQ ID NO: 1449511 - RNA, 19 nt, Artificial Sequence
  Description of Artificial Sequence: Synthetic oligonucleotide
  modified_base (3)..(3): a, c, u, g, unknown or other
aunuccucauuugcuuagu

SEQ ID NO: 1449512 - RNA, 19 nt, Artificial Sequence
  Description of Artificial Sequence: Synthetic oligonucleotide
agcuaaugccugcggcucu

SEQ ID NO: 1449513 - RNA, 19 nt, Artificial Sequence
  Description of Artificial Sequence: Synthetic oligonucleotide
cugacggcccgagggaagg

SEQ ID NO: 1449514 - RNA, 19 nt, Artificial Sequence
  Description of Artificial Sequence: Synthetic oligonucleotide
aucauccgcacuucugcuu

SEQ ID NO: 1449515 - RNA, 19 nt, Artificial Sequence
  Description of Artificial Sequence: Synthetic oligonucleotide
ccucuuaagauuaaauagu

SEQ ID NO: 1449516 - RNA, 19 nt, Artificial Sequence
  Description of Artificial Sequence: Synthetic oligonucleotide
cauccauauuaaaauaauu

SEQ ID NO: 1449517 - RNA, 19 nt, Artificial Sequence
  Description of Artificial Sequence: Synthetic oligonucleotide
aaaggacguuuccguuuaa

SEQ ID NO: 1449518 - RNA, 19 nt, Artificial Sequence
  Description of Artificial Sequence: Synthetic oligonucleotide
caacauccauccauauuaa

SEQ ID NO: 1449519 - RNA, 19 nt, Artificial Sequence
  Description of Artificial Sequence: Synthetic oligonucleotide
gcacaaauuacaaacccua

SEQ ID NO: 1449520 - RNA, 19 nt, Artificial Sequence
  Description of Artificial Sequence: Synthetic oligonucleotide
ccacccguucucuugcucc

SEQ ID NO: 1449521 - RNA, 19 nt, Artificial Sequence
  Description of Artificial Sequence: Synthetic oligonucleotide
cauccgcacuucugcuucc

SEQ ID NO: 1449522 - RNA, 19 nt, Artificial Sequence
  Description of Artificial Sequence: Synthetic oligonucleotide
ccacuuacacacauuuuca

SEQ ID NO: 1449523 - RNA, 19 nt, Artificial Sequence
  Description of Artificial Sequence: Synthetic oligonucleotide
uaacaccccggcugucaga

SEQ ID NO: 1449524 - RNA, 19 nt, Artificial Sequence
  Description of Artificial Sequence: Synthetic oligonucleotide
ggcuuuucguacuugaguu

SEQ ID NO: 1449525 - RNA, 19 nt, Artificial Sequence
  Description of Artificial Sequence: Synthetic oligonucleotide
cuuauccaucauauauaua

SEQ ID NO: 1449526 - RNA, 19 nt, Artificial Sequence
  Description of Artificial Sequence: Synthetic oligonucleotide
acacgcucuugaaagacua

SEQ ID NO: 1449527 - RNA, 19 nt, Artificial Sequence
  Description of Artificial Sequence: Synthetic oligonucleotide
ccuuuacacuccaagaaua

SEQ ID NO: 1449528 - RNA, 19 nt, Artificial Sequence
  Description of Artificial Sequence: Synthetic oligonucleotide
cagagcguuacaggugcac

SEQ ID NO: 1449529 - RNA, 19 nt, Artificial Sequence
  Description of Artificial Sequence: Synthetic oligonucleotide
cagcuaaugccugcggcuc

SEQ ID NO: 1449530 - RNA, 19 nt, Artificial Sequence
  Description of Artificial Sequence: Synthetic oligonucleotide
caaguaugggagggcuggc

SEQ ID NO: 1449531 - RNA, 19 nt, Artificial Sequence
  Description of Artificial Sequence: Synthetic oligonucleotide
gugggcaacagugguaaaa

SEQ ID NO: 1449532 - RNA, 19 nt, Artificial Sequence
  Description of Artificial Sequence: Synthetic oligonucleotide
auacuccuaaguacagaaa

SEQ ID NO: 1449533 - RNA, 19 nt, Artificial Sequence
  Description of Artificial Sequence: Synthetic oligonucleotide
uggacacaauuugggugcu

SEQ ID NO: 1449534 - RNA, 19 nt, Artificial Sequence
  Description of Artificial Sequence: Synthetic oligonucleotide
ccgcacuucugcuuccacg

SEQ ID NO: 1449535 - RNA, 19 nt, Artificial Sequence
  Description of Artificial Sequence: Synthetic oligonucleotide
caacggcacaaauuacaaa

SEQ ID NO: 1449536 - RNA, 19 nt, Artificial Sequence
  Description of Artificial Sequence: Synthetic oligonucleotide
cuccauggugauuggccca

SEQ ID NO: 1449537 - RNA, 19 nt, Artificial Sequence
  Description of Artificial Sequence: Synthetic oligonucleotide
gcagcgaugcucaacuguc

SEQ ID NO: 1449538 - RNA, 19 nt, Artificial Sequence
  Description of Artificial Sequence: Synthetic oligonucleotide
gaccguaaacauagcccuc

SEQ ID NO: 1449539 - RNA, 19 nt, Artificial Sequence
  Description of Artificial Sequence: Synthetic oligonucleotide
uaguuacuguggacacaau

SEQ ID NO: 1449540 - RNA, 19 nt, Artificial Sequence
  Description of Artificial Sequence: Synthetic oligonucleotide
acguuuggcuagugaugga

SEQ ID NO: 1449541 - RNA, 19 nt, Artificial Sequence
  Description of Artificial Sequence: Synthetic oligonucleotide
cuaaugccugcggcucucc

SEQ ID NO: 1449542 - RNA, 19 nt, Artificial Sequence
  Description of Artificial Sequence: Synthetic oligonucleotide
gacggcccgagggaaggug

SEQ ID NO: 1449543 - RNA, 19 nt, Artificial Sequence
  Description of Artificial Sequence: Synthetic oligonucleotide
uaguauggacaggcagggu

SEQ ID NO: 1449544 - RNA, 19 nt, Artificial Sequence
  Description of Artificial Sequence: Synthetic oligonucleotide
gggugcuguaguauggaca

SEQ ID NO: 1449545 - RNA, 19 nt, Artificial Sequence
  Description of Artificial Sequence: Synthetic oligonucleotide
cuguguugcuagggaacac

SEQ ID NO: 1449546 - RNA, 19 nt, Artificial Sequence
  Description of Artificial Sequence: Synthetic oligonucleotide
caucaaguaugggagggcu

SEQ ID NO: 1449547 - RNA, 19 nt, Artificial Sequence
  Description of Artificial Sequence: Synthetic oligonucleotide
guugucgaguauacaguua

SEQ ID NO: 1449548 - RNA, 19 nt, Artificial Sequence
  Description of Artificial Sequence: Synthetic oligonucleotide
uuccacccguucucuugcu

SEQ ID NO: 1449549 - RNA, 19 nt, Artificial Sequence
  Description of Artificial Sequence: Synthetic oligonucleotide
uccugacggcccgagggaa

SEQ ID NO: 1449550 - RNA, 19 nt, Artificial Sequence
  Description of Artificial Sequence: Synthetic oligonucleotide
cugcagcgaugcucaacug

SEQ ID NO: 1449551 - RNA, 19 nt, Artificial Sequence
  Description of Artificial Sequence: Synthetic oligonucleotide
guaugggagggcuggcacu

SEQ ID NO: 1449552 - RNA, 19 nt, Artificial Sequence
  Description of Artificial Sequence: Synthetic oligonucleotide
  modified_base (18)..(18): a, c, u, g, unknown or other
ccaucaguccaaaucaunu

SEQ ID NO: 1449553 - RNA, 19 nt, Artificial Sequence
  Description of Artificial Sequence: Synthetic oligonucleotide
gcuuaguucuuaaguaucu

SEQ ID NO: 1449554 - RNA, 19 nt, Artificial Sequence
  Description of Artificial Sequence: Synthetic oligonucleotide
guacuugaguugacuuauc

SEQ ID NO: 1449555 - RNA, 19 nt, Artificial Sequence
  Description of Artificial Sequence: Synthetic oligonucleotide
  modified_base (10)..(10): a, c, u, g, unknown or other
ccaaaucaunuccucauuu

SEQ ID NO: 1449556 - RNA, 19 nt, Artificial Sequence
  Description of Artificial Sequence: Synthetic oligonucleotide
acaccaccccaaauugccu

SEQ ID NO: 1449557 - RNA, 19 nt, Artificial Sequence
  Description of Artificial Sequence: Synthetic oligonucleotide
aaacgaccacagguugguu

SEQ ID NO: 1449558 - RNA, 19 nt, Artificial Sequence
  Description of Artificial Sequence: Synthetic oligonucleotide
gaguugacuuauccaucau

SEQ ID NO: 1449559 - RNA, 19 nt, Artificial Sequence
  Description of Artificial Sequence: Synthetic oligonucleotide
cguuuaaauguuccuggga

SEQ ID NO: 1449560 - RNA, 19 nt, Artificial Sequence
  Description of Artificial Sequence: Synthetic oligonucleotide
cuccugacggcccgaggga

SEQ ID NO: 1449561 - RNA, 19 nt, Artificial Sequence
  Description of Artificial Sequence: Synthetic oligonucleotide
cacauacguuuggcuagug

SEQ ID NO: 1449562 - RNA, 19 nt, Artificial Sequence
  Description of Artificial Sequence: Synthetic oligonucleotide
agccacuuacacacauuuu

SEQ ID NO: 1449563 - RNA, 19 nt, Artificial Sequence
  Description of Artificial Sequence: Synthetic oligonucleotide
ggcuagugauggaagccuc

SEQ ID NO: 1449564 - RNA, 19 nt, Artificial Sequence
  Description of Artificial Sequence: Synthetic oligonucleotide
ccugacggcccgagggaag

SEQ ID NO: 1449565 - RNA, 19 nt, Artificial Sequence
  Description of Artificial Sequence: Synthetic oligonucleotide
gcuguaguauggacaggca

SEQ ID NO: 1449566 - RNA, 19 nt, Artificial Sequence
  Description of Artificial Sequence: Synthetic oligonucleotide
cguaaacauagcccucauc

SEQ ID NO: 1449567 - RNA, 19 nt, Artificial Sequence
  Description of Artificial Sequence: Synthetic oligonucleotide
gaugagcuugagaguuacu

SEQ ID NO: 1449568 - RNA, 19 nt, Artificial Sequence
  Description of Artificial Sequence: Synthetic oligonucleotide
guguugcuagggaacacau

SEQ ID NO: 1449569 - RNA, 19 nt, Artificial Sequence
  Description of Artificial Sequence: Synthetic oligonucleotide
cuagugauggaagccucau

SEQ ID NO: 1449570 - RNA, 19 nt, Artificial Sequence
  Description of Artificial Sequence: Synthetic oligonucleotide
cgaaauagcuguagaugaa

SEQ ID NO: 1449571 - RNA, 19 nt, Artificial Sequence
  Description of Artificial Sequence: Synthetic oligonucleotide
acagagcguuacaggugca

SEQ ID NO: 1449572 - RNA, 19 nt, Artificial Sequence
  Description of Artificial Sequence: Synthetic oligonucleotide
ccugacaccaccccaaauu

SEQ ID NO: 1449573 - RNA, 19 nt, Artificial Sequence
  Description of Artificial Sequence: Synthetic oligonucleotide
cguuuccguuuaaauguuc

SEQ ID NO: 1449574 - RNA, 19 nt, Artificial Sequence
  Description of Artificial Sequence: Synthetic oligonucleotide
ugacggcccgagggaaggu

SEQ ID NO: 1449575 - RNA, 19 nt, Artificial Sequence
  Description of Artificial Sequence: Synthetic oligonucleotide
gcguuacaggugcacagcu

SEQ ID NO: 1449576 - RNA, 19 nt, Artificial Sequence
  Description of Artificial Sequence: Synthetic oligonucleotide
ccacggucuccugacggcc

SEQ ID NO: 1449577 - RNA, 19 nt, Artificial Sequence
  Description of Artificial Sequence: Synthetic oligonucleotide
cccaaacguaggcaaaucu

SEQ ID NO: 1449578 - RNA, 19 nt, Artificial Sequence
  Description of Artificial Sequence: Synthetic oligonucleotide
agacugcagcgaugcucaa

SEQ ID NO: 1449579 - RNA, 19 nt, Artificial Sequence
  Description of Artificial Sequence: Synthetic oligonucleotide
ggucuccugacggcccgag

SEQ ID NO: 1449580 - RNA, 19 nt, Artificial Sequence
  Description of Artificial Sequence: Synthetic oligonucleotide
cgagggaaggugguagaac

SEQ ID NO: 1449581 - RNA, 19 nt, Artificial Sequence
  Description of Artificial Sequence: Synthetic oligonucleotide
cuuuuccacccguucucuu

SEQ ID NO: 1449582 - RNA, 19 nt, Artificial Sequence
  Description of Artificial Sequence: Synthetic oligonucleotide
cacgcucuugaaagacuau

SEQ ID NO: 1449583 - RNA, 19 nt, Artificial Sequence
  Description of Artificial Sequence: Synthetic oligonucleotide
caccccaaauugccucuua

SEQ ID NO: 1449584 - RNA, 19 nt, Artificial Sequence
  Description of Artificial Sequence: Synthetic oligonucleotide
cguacuugaguugacuuau

SEQ ID NO: 1449585 - RNA, 19 nt, Artificial Sequence
  Description of Artificial Sequence: Synthetic oligonucleotide
gcccaaggcuuuucguacu

SEQ ID NO: 1449586 - RNA, 19 nt, Artificial Sequence
  Description of Artificial Sequence: Synthetic oligonucleotide
cccgagggaaggugguaga

SEQ ID NO: 1449587 - RNA, 19 nt, Artificial Sequence
  Description of Artificial Sequence: Synthetic oligonucleotide
guguucccuagaugagcuu

SEQ ID NO: 1449588 - RNA, 19 nt, Artificial Sequence
  Description of Artificial Sequence: Synthetic oligonucleotide
gcccacuccuucauagacu

SEQ ID NO: 1449589 - RNA, 19 nt, Artificial Sequence
  Description of Artificial Sequence: Synthetic oligonucleotide
cguuacaggugcacagcua

SEQ ID NO: 1449590 - RNA, 19 nt, Artificial Sequence
  Description of Artificial Sequence: Synthetic oligonucleotide
ccguaaacauagcccucau

SEQ ID NO: 1449591 - RNA, 19 nt, Artificial Sequence
  Description of Artificial Sequence: Synthetic oligonucleotide
ccaguugggaaaggacguu

SEQ ID NO: 1449592 - RNA, 19 nt, Artificial Sequence
  Description of Artificial Sequence: Synthetic oligonucleotide
cagggugcacaggccccuu

SEQ ID NO: 1449593 - RNA, 19 nt, Artificial Sequence
  Description of Artificial Sequence: Synthetic oligonucleotide
cggucuccugacggcccga

SEQ ID NO: 1449594 - RNA, 19 nt, Artificial Sequence
  Description of Artificial Sequence: Synthetic oligonucleotide
aacacaacuccuuuaagcc

SEQ ID NO: 1449595 - RNA, 19 nt, Artificial Sequence
  Description of Artificial Sequence: Synthetic oligonucleotide
aguaacugcauguucaugc

SEQ ID NO: 1449596 - RNA, 19 nt, Artificial Sequence
  Description of Artificial Sequence: Synthetic oligonucleotide
agaauucagauacucaucc

SEQ ID NO: 1449597 - RNA, 19 nt, Artificial Sequence
  Description of Artificial Sequence: Synthetic oligonucleotide
ucuguaauaacucagcaga

SEQ ID NO: 1449598 - RNA, 19 nt, Artificial Sequence
  Description of Artificial Sequence: Synthetic oligonucleotide
aauauacugguguugaugu

SEQ ID NO: 1449599 - RNA, 19 nt, Artificial Sequence
  Description of Artificial Sequence: Synthetic oligonucleotide
auaacuacuacacuuuguc

SEQ ID NO: 1449600 - RNA, 19 nt, Artificial Sequence
  Description of Artificial Sequence: Synthetic oligonucleotide
acggcuacuauucuaaugg

SEQ ID NO: 1449601 - RNA, 19 nt, Artificial Sequence
  Description of Artificial Sequence: Synthetic oligonucleotide
aauccuaucuacaugcaac

SEQ ID NO: 1449602 - RNA, 19 nt, Artificial Sequence
  Description of Artificial Sequence: Synthetic oligonucleotide
auagcugccagcaauauac

SEQ ID NO: 1449603 - RNA, 19 nt, Artificial Sequence
  Description of Artificial Sequence: Synthetic oligonucleotide
uuaggaaagcguauuuugg

SEQ ID NO: 1449604 - RNA, 19 nt, Artificial Sequence
  Description of Artificial Sequence: Synthetic oligonucleotide
aauacaauagcugccagca

SEQ ID NO: 1449605 - RNA, 19 nt, Artificial Sequence
  Description of Artificial Sequence: Synthetic oligonucleotide
ucuacaugcaacucuggcg

SEQ ID NO: 1449606 - RNA, 19 nt, Artificial Sequence
  Description of Artificial Sequence: Synthetic oligonucleotide
aguaccuccgaauuggagg

SEQ ID NO: 1449607 - RNA, 19 nt, Artificial Sequence
  Description of Artificial Sequence: Synthetic oligonucleotide
ugaagguuauaaacggugg

SEQ ID NO: 1449608 - RNA, 19 nt, Artificial Sequence
  Description of Artificial Sequence: Synthetic oligonucleotide
uacuugguaagucucuugg

SEQ ID NO: 1449609 - RNA, 19 nt, Artificial Sequence
  Description of Artificial Sequence: Synthetic oligonucleotide
aggaauaucaaaguugcgg

SEQ ID NO: 1449610 - RNA, 19 nt, Artificial Sequence
  Description of Artificial Sequence: Synthetic oligonucleotide
cuuugucuaucuuuaaucc

SEQ ID NO: 1449611 - RNA, 19 nt, Artificial Sequence
  Description of Artificial Sequence: Synthetic oligonucleotide
aaggcaucucgcuugaaag

SEQ ID NO: 1449612 - RNA, 19 nt, Artificial Sequence
  Description of Artificial Sequence: Synthetic oligonucleotide
gaacacaacuccuuuaagc

SEQ ID NO: 1449613 - RNA, 19 nt, Artificial Sequence
  Description of Artificial Sequence: Synthetic oligonucleotide
gaggggagaauucagauac

SEQ ID NO: 1449614 - RNA, 19 nt, Artificial Sequence
  Description of Artificial Sequence: Synthetic oligonucleotide
uccuuuaagccaaagaauc

SEQ ID NO: 1449615 - RNA, 19 nt, Artificial Sequence
  Description of Artificial Sequence: Synthetic oligonucleotide
auacacuucuacuuuagag

SEQ ID NO: 1449616 - RNA, 19 nt, Artificial Sequence
  Description of Artificial Sequence: Synthetic oligonucleotide
aauucuagugcugauccuc

SEQ ID NO: 1449617 - RNA, 19 nt, Artificial Sequence
  Description of Artificial Sequence: Synthetic oligonucleotide
gaagaaauaaauccuaucu

SEQ ID NO: 1449618 - RNA, 19 nt, Artificial Sequence
  Description of Artificial Sequence: Synthetic oligonucleotide
agaauaauacugcuuagga

SEQ ID NO: 1449619 - RNA, 19 nt, Artificial Sequence
  Description of Artificial Sequence: Synthetic oligonucleotide
uguauuggagauaacuacu

SEQ ID NO: 1449620 - RNA, 19 nt, Artificial Sequence
  Description of Artificial Sequence: Synthetic oligonucleotide
aucuacacacuaugaaugc

SEQ ID NO: 1449621 - RNA, 19 nt, Artificial Sequence
  Description of Artificial Sequence: Synthetic oligonucleotide
uuuaauacaauagcugcca

SEQ ID NO: 1449622 - RNA, 19 nt, Artificial Sequence
  Description of Artificial Sequence: Synthetic oligonucleotide
uaggaaagcguauuuuggg

SEQ ID NO: 1449623 - RNA, 19 nt, Artificial Sequence
  Description of Artificial Sequence: Synthetic oligonucleotide
gaggauuuuagaauaauac

SEQ ID NO: 1449624 - RNA, 19 nt, Artificial Sequence
  Description of Artificial Sequence: Synthetic oligonucleotide
cuugguaagucucuuggcg

SEQ ID NO: 1449625 - RNA, 19 nt, Artificial Sequence
  Description of Artificial Sequence: Synthetic oligonucleotide
cuaugaaugcacaugauga

SEQ ID NO: 1449626 - RNA, 19 nt, Artificial Sequence
  Description of Artificial Sequence: Synthetic oligonucleotide
gaagguuauaaacgguggg

SEQ ID NO: 1449627 - RNA, 19 nt, Artificial Sequence
  Description of Artificial Sequence: Synthetic oligonucleotide
aacuacuacacuuugucua

SEQ ID NO: 1449628 - RNA, 19 nt, Artificial Sequence
  Description of Artificial Sequence: Synthetic oligonucleotide
aggauuuuagaauaauacu

SEQ ID NO: 1449629 - RNA, 19 nt, Artificial Sequence
  Description of Artificial Sequence: Synthetic oligonucleotide
acgguugugacacugaaca

SEQ ID NO: 1449630 - RNA, 19 nt, Artificial Sequence
  Description of Artificial Sequence: Synthetic oligonucleotide
aucuacaugcaacucuggc

SEQ ID NO: 1449631 - RNA, 19 nt, Artificial Sequence
  Description of Artificial Sequence: Synthetic oligonucleotide
uagaauaauacugcuuagg

SEQ ID NO: 1449632 - RNA, 19 nt, Artificial Sequence
  Description of Artificial Sequence: Synthetic oligonucleotide
acuccuuuaagccaaagaa

SEQ ID NO: 1449633 - RNA, 19 nt, Artificial Sequence
  Description of Artificial Sequence: Synthetic oligonucleotide
auuuacauccguuuugacu

SEQ ID NO: 1449634 - RNA, 19 nt, Artificial Sequence
  Description of Artificial Sequence: Synthetic oligonucleotide
acuaugaaugcacaugaug

SEQ ID NO: 1449635 - RNA, 19 nt, Artificial Sequence
  Description of Artificial Sequence: Synthetic oligonucleotide
uuaauccuagucuugagua

SEQ ID NO: 1449636 - RNA, 19 nt, Artificial Sequence
  Description of Artificial Sequence: Synthetic oligonucleotide
uuuaagccaaagaaucaug

SEQ ID NO: 1449637 - RNA, 19 nt, Artificial Sequence
  Description of Artificial Sequence: Synthetic oligonucleotide
uuugacuucgcuguugaag

SEQ ID NO: 1449638 - RNA, 19 nt, Artificial Sequence
  Description of Artificial Sequence: Synthetic oligonucleotide
ugcaaaauacacuucuacu

SEQ ID NO: 1449639 - RNA, 19 nt, Artificial Sequence
  Description of Artificial Sequence: Synthetic oligonucleotide
ucaauuucgucagggaggg

SEQ ID NO: 1449640 - RNA, 19 nt, Artificial Sequence
  Description of Artificial Sequence: Synthetic oligonucleotide
gauagaggauuuuagaaua

SEQ ID NO: 1449641 - RNA, 19 nt, Artificial Sequence
  Description of Artificial Sequence: Synthetic oligonucleotide
auguucaugcaaaauacac

SEQ ID NO: 1449642 - RNA, 19 nt, Artificial Sequence
  Description of Artificial Sequence: Synthetic oligonucleotide
aggaaagcguauuuugggg

SEQ ID NO: 1449643 - RNA, 19 nt, Artificial Sequence
  Description of Artificial Sequence: Synthetic oligonucleotide
aauuucgucagggagggga

SEQ ID NO: 1449644 - RNA, 19 nt, Artificial Sequence
  Description of Artificial Sequence: Synthetic oligonucleotide
uucuaaugguugaacacug

SEQ ID NO: 1449645 - RNA, 19 nt, Artificial Sequence
  Description of Artificial Sequence: Synthetic oligonucleotide
augaugauugggcuccagc

SEQ ID NO: 1449646 - RNA, 19 nt, Artificial Sequence
  Description of Artificial Sequence: Synthetic oligonucleotide
aggucaacgguugugacac

SEQ ID NO: 1449647 - RNA, 19 nt, Artificial Sequence
  Description of Artificial Sequence: Synthetic oligonucleotide
aucucccugagccacaggg

SEQ ID NO: 1449648 - RNA, 19 nt, Artificial Sequence
  Description of Artificial Sequence: Synthetic oligonucleotide
auaccugucauuccuuuag

SEQ ID NO: 1449649 - RNA, 19 nt, Artificial Sequence
  Description of Artificial Sequence: Synthetic oligonucleotide
auaaacggugggugggucc

SEQ ID NO: 1449650 - RNA, 19 nt, Artificial Sequence
  Description of Artificial Sequence: Synthetic oligonucleotide
acacuaugaaugcacauga

SEQ ID NO: 1449651 - RNA, 19 nt, Artificial Sequence
  Description of Artificial Sequence: Synthetic oligonucleotide
uuauuuacauccguuuuga

SEQ ID NO: 1449652 - RNA, 19 nt, Artificial Sequence
  Description of Artificial Sequence: Synthetic oligonucleotide
aucaauuucgucagggagg

SEQ ID NO: 1449653 - RNA, 19 nt, Artificial Sequence
  Description of Artificial Sequence: Synthetic oligonucleotide
uggaguaccuccgaauugg

SEQ ID NO: 1449654 - RNA, 19 nt, Artificial Sequence
  Description of Artificial Sequence: Synthetic oligonucleotide
acuauucuaaugguugaac

SEQ ID NO: 1449655 - RNA, 19 nt, Artificial Sequence
  Description of Artificial Sequence: Synthetic oligonucleotide
aaugcacaugaugauuggg

SEQ ID NO: 1449656 - RNA, 19 nt, Artificial Sequence
  Description of Artificial Sequence: Synthetic oligonucleotide
uugucuaucuuuaauccua

SEQ ID NO: 1449657 - RNA, 19 nt, Artificial Sequence
  Description of Artificial Sequence: Synthetic oligonucleotide
aacuccuuuaagccaaaga

SEQ ID NO: 1449658 - RNA, 19 nt, Artificial Sequence
  Description of Artificial Sequence: Synthetic oligonucleotide
aagaaucaugaagagccuc

SEQ ID NO: 1449659 - RNA, 19 nt, Artificial Sequence
  Description of Artificial Sequence: Synthetic oligonucleotide
aauacugcuuaggagugug

SEQ ID NO: 1449660 - RNA, 19 nt, Artificial Sequence
  Description of Artificial Sequence: Synthetic oligonucleotide
uuugucuaucuuuaauccu

SEQ ID NO: 1449661 - RNA, 19 nt, Artificial Sequence
  Description of Artificial Sequence: Synthetic oligonucleotide
ugucuaucuuuaauccuag

SEQ ID NO: 1449662 - RNA, 19 nt, Artificial Sequence
  Description of Artificial Sequence: Synthetic oligonucleotide
guguauuggagauaacuac

SEQ ID NO: 1449663 - RNA, 19 nt, Artificial Sequence
  Description of Artificial Sequence: Synthetic oligonucleotide
ugugacgagcuuguggugg

SEQ ID NO: 1449664 - RNA, 19 nt, Artificial Sequence
  Description of Artificial Sequence: Synthetic oligonucleotide
aagagccucugugaaaagg

SEQ ID NO: 1449665 - RNA, 19 nt, Artificial Sequence
  Description of Artificial Sequence: Synthetic oligonucleotide
aucgcuguaugcgauuucc

SEQ ID NO: 1449666 - RNA, 19 nt, Artificial Sequence
  Description of Artificial Sequence: Synthetic oligonucleotide
ucuuauuuacauccguuuu

SEQ ID NO: 1449667 - RNA, 19 nt, Artificial Sequence
  Description of Artificial Sequence: Synthetic oligonucleotide
aaauacacuucuacuuuag

SEQ ID NO: 1449668 - RNA, 19 nt, Artificial Sequence
  Description of Artificial Sequence: Synthetic oligonucleotide
aagguuauaaacggugggu

SEQ ID NO: 1449669 - RNA, 19 nt, Artificial Sequence
  Description of Artificial Sequence: Synthetic oligonucleotide
ucgugugacgagcuugugg

SEQ ID NO: 1449670 - RNA, 19 nt, Artificial Sequence
  Description of Artificial Sequence: Synthetic oligonucleotide
uaauaacucagcagaagua

SEQ ID NO: 1449671 - RNA, 19 nt, Artificial Sequence
  Description of Artificial Sequence: Synthetic oligonucleotide
gaaugcacaugaugauugg

SEQ ID NO: 1449672 - RNA, 19 nt, Artificial Sequence
  Description of Artificial Sequence: Synthetic oligonucleotide
uugauucuggguguuuugg

SEQ ID NO: 1449673 - RNA, 19 nt, Artificial Sequence
  Description of Artificial Sequence: Synthetic oligonucleotide
cagauacucauccaguuuc

SEQ ID NO: 1449674 - RNA, 19 nt, Artificial Sequence
  Description of Artificial Sequence: Synthetic oligonucleotide
ggaaucugaaggcaucucg

SEQ ID NO: 1449675 - RNA, 19 nt, Artificial Sequence
  Description of Artificial Sequence: Synthetic oligonucleotide
acacaagacuucuucaaga

SEQ ID NO: 1449676 - RNA, 19 nt, Artificial Sequence
  Description of Artificial Sequence: Synthetic oligonucleotide
agcgugacagcaaacugcc

SEQ ID NO: 1449677 - RNA, 19 nt, Artificial Sequence
  Description of Artificial Sequence: Synthetic oligonucleotide
ucuggcgagacucuguaau

SEQ ID NO: 1449678 - RNA, 19 nt, Artificial Sequence
  Description of Artificial Sequence: Synthetic oligonucleotide
uugguaagucucuuggcga

SEQ ID NO: 1449679 - RNA, 19 nt, Artificial Sequence
  Description of Artificial Sequence: Synthetic oligonucleotide
ugcacaugaugauugggcu

SEQ ID NO: 1449680 - RNA, 19 nt, Artificial Sequence
  Description of Artificial Sequence: Synthetic oligonucleotide
uugauguaagcagagaauu

SEQ ID NO: 1449681 - RNA, 19 nt, Artificial Sequence
  Description of Artificial Sequence: Synthetic oligonucleotide
uacacacuaugaaugcaca

SEQ ID NO: 1449682 - RNA, 19 nt, Artificial Sequence
  Description of Artificial Sequence: Synthetic oligonucleotide
ugucauuccuuuaggaaua

SEQ ID NO: 1449683 - RNA, 19 nt, Artificial Sequence
  Description of Artificial Sequence: Synthetic oligonucleotide
gcuguugaagguuauaaac

SEQ ID NO: 1449684 - RNA, 19 nt, Artificial Sequence
  Description of Artificial Sequence: Synthetic oligonucleotide
ucuaaugguugaacacugc

SEQ ID NO: 1449685 - RNA, 19 nt, Artificial Sequence
  Description of Artificial Sequence: Synthetic oligonucleotide
uaugaaugcacaugaugau

SEQ ID NO: 1449686 - RNA, 19 nt, Artificial Sequence
  Description of Artificial Sequence: Synthetic oligonucleotide
gguuauaaacggugggugg

SEQ ID NO: 1449687 - RNA, 19 nt, Artificial Sequence
  Description of Artificial Sequence: Synthetic oligonucleotide
guaagcagagaauuuggca

SEQ ID NO: 1449688 - RNA, 19 nt, Artificial Sequence
  Description of Artificial Sequence: Synthetic oligonucleotide
cuucaacccguucaggggc

SEQ ID NO: 1449689 - RNA, 19 nt, Artificial Sequence
  Description of Artificial Sequence: Synthetic oligonucleotide
cuauucuaaugguugaaca

SEQ ID NO: 1449690 - RNA, 19 nt, Artificial Sequence
  Description of Artificial Sequence: Synthetic oligonucleotide
cacaugaugauugggcucc

SEQ ID NO: 1449691 - RNA, 19 nt, Artificial Sequence
  Description of Artificial Sequence: Synthetic oligonucleotide
aaaacuugauguccuccau

SEQ ID NO: 1449692 - RNA, 19 nt, Artificial Sequence
  Description of Artificial Sequence: Synthetic oligonucleotide
cuacaugcaacucuggcga

SEQ ID NO: 1449693 - RNA, 19 nt, Artificial Sequence
  Description of Artificial Sequence: Synthetic oligonucleotide
aaaucuccguguggaaaac

SEQ ID NO: 1449694 - RNA, 19 nt, Artificial Sequence
  Description of Artificial Sequence: Synthetic oligonucleotide
uugugguggaguaccuccg

SEQ ID NO: 1449695 - RNA, 19 nt, Artificial Sequence
  Description of Artificial Sequence: Synthetic oligonucleotide
gaaaucuccguguggaaaa

SEQ ID NO: 1449696 - RNA, 19 nt, Artificial Sequence
  Description of Artificial Sequence: Synthetic oligonucleotide
uaaauccuaucuacaugca

SEQ ID NO: 1449697 - RNA, 19 nt, Artificial Sequence
  Description of Artificial Sequence: Synthetic oligonucleotide
caauauacugguguugaug

SEQ ID NO: 1449698 - RNA, 19 nt, Artificial Sequence
  Description of Artificial Sequence: Synthetic oligonucleotide
cagcgugacagcaaacugc

SEQ ID NO: 1449699 - RNA, 19 nt, Artificial Sequence
  Description of Artificial Sequence: Synthetic oligonucleotide
aacccguucaggggcaucg

SEQ ID NO: 1449700 - RNA, 19 nt, Artificial Sequence
  Description of Artificial Sequence: Synthetic oligonucleotide
gcuacuauucuaaugguug

SEQ ID NO: 1449701 - RNA, 19 nt, Artificial Sequence
  Description of Artificial Sequence: Synthetic oligonucleotide
auccguuuugacuucgcug

SEQ ID NO: 1449702 - RNA, 19 nt, Artificial Sequence
  Description of Artificial Sequence: Synthetic oligonucleotide
uuagccucuggccuugagu

SEQ ID NO: 1449703 - RNA, 19 nt, Artificial Sequence
  Description of Artificial Sequence: Synthetic oligonucleotide
auccuaucuacaugcaacu

SEQ ID NO: 1449704 - RNA, 19 nt, Artificial Sequence
  Description of Artificial Sequence: Synthetic oligonucleotide
uacuuuagaggaggcagag

SEQ ID NO: 1449705 - RNA, 19 nt, Artificial Sequence
  Description of Artificial Sequence: Synthetic oligonucleotide
uuggcgacaucgcuguaug

SEQ ID NO: 1449706 - RNA, 19 nt, Artificial Sequence
  Description of Artificial Sequence: Synthetic oligonucleotide
ucucgcuugaaagugcugu

SEQ ID NO: 1449707 - RNA, 19 nt, Artificial Sequence
  Description of Artificial Sequence: Synthetic oligonucleotide
uuacuugguaagucucuug

SEQ ID NO: 1449708 - RNA, 19 nt, Artificial Sequence
  Description of Artificial Sequence: Synthetic oligonucleotide
aaacuugauguccuccaua

SEQ ID NO: 1449709 - RNA, 19 nt, Artificial Sequence
  Description of Artificial Sequence: Synthetic oligonucleotide
uggccuugaguucuugaug

SEQ ID NO: 1449710 - RNA, 19 nt, Artificial Sequence
  Description of Artificial Sequence: Synthetic oligonucleotide
auaauacugcuuaggagug

SEQ ID NO: 1449711 - RNA, 19 nt, Artificial Sequence
  Description of Artificial Sequence: Synthetic oligonucleotide
agguuauaaacggugggug

SEQ ID NO: 1449712 - RNA, 19 nt, Artificial Sequence
  Description of Artificial Sequence: Synthetic oligonucleotide
cacacuaugaaugcacaug

SEQ ID NO: 1449713 - RNA, 19 nt, Artificial Sequence
  Description of Artificial Sequence: Synthetic oligonucleotide
aacgguugugacacugaac

SEQ ID NO: 1449714 - RNA, 19 nt, Artificial Sequence
  Description of Artificial Sequence: Synthetic oligonucleotide
ugcaacucuggcgagacuc

SEQ ID NO: 1449715 - RNA, 19 nt, Artificial Sequence
  Description of Artificial Sequence: Synthetic oligonucleotide
cuaaauucuagugcugauc

SEQ ID NO: 1449716 - RNA, 19 nt, Artificial Sequence
  Description of Artificial Sequence: Synthetic oligonucleotide
ucugccaucuacacacuau

SEQ ID NO: 1449717 - RNA, 19 nt, Artificial Sequence
  Description of Artificial Sequence: Synthetic oligonucleotide
uucaggucaacgguuguga

SEQ ID NO: 1449718 - RNA, 19 nt, Artificial Sequence
  Description of Artificial Sequence: Synthetic oligonucleotide
acacaacuccuuuaagcca

SEQ ID NO: 1449719 - RNA, 19 nt, Artificial Sequence
  Description of Artificial Sequence: Synthetic oligonucleotide
uaauccuagucuugaguaa

SEQ ID NO: 1449720 - RNA, 19 nt, Artificial Sequence
  Description of Artificial Sequence: Synthetic oligonucleotide
acucagcagaaguauaaau

SEQ ID NO: 1449721 - RNA, 19 nt, Artificial Sequence
  Description of Artificial Sequence: Synthetic oligonucleotide
auacuguucucaucaauuu

SEQ ID NO: 1449722 - RNA, 19 nt, Artificial Sequence
  Description of Artificial Sequence: Synthetic oligonucleotide
uuuccuaugcucucuccau

SEQ ID NO: 1449723 - RNA, 19 nt, Artificial Sequence
  Description of Artificial Sequence: Synthetic oligonucleotide
ucuacacacuaugaaugca

SEQ ID NO: 1449724 - RNA, 19 nt, Artificial Sequence
  Description of Artificial Sequence: Synthetic oligonucleotide
ugguaagucucuuggcgac

SEQ ID NO: 1449725 - RNA, 19 nt, Artificial Sequence
  Description of Artificial Sequence: Synthetic oligonucleotide
ucaacgguugugacacuga

SEQ ID NO: 1449726 - RNA, 19 nt, Artificial Sequence
  Description of Artificial Sequence: Synthetic oligonucleotide
agcaaacugccucucgugu

SEQ ID NO: 1449727 - RNA, 19 nt, Artificial Sequence
  Description of Artificial Sequence: Synthetic oligonucleotide
guaugcgauuuccaccucc

SEQ ID NO: 1449728 - RNA, 19 nt, Artificial Sequence
  Description of Artificial Sequence: Synthetic oligonucleotide
acuuuagaggaggcagagc

SEQ ID NO: 1449729 - RNA, 19 nt, Artificial Sequence
  Description of Artificial Sequence: Synthetic oligonucleotide
agaaucaugaagagccucu

SEQ ID NO: 1449730 - RNA, 19 nt, Artificial Sequence
  Description of Artificial Sequence: Synthetic oligonucleotide
gcguuugucagguaucucc

SEQ ID NO: 1449731 - RNA, 19 nt, Artificial Sequence
  Description of Artificial Sequence: Synthetic oligonucleotide
uaaacgguggguggguccc

SEQ ID NO: 1449732 - RNA, 19 nt, Artificial Sequence
  Description of Artificial Sequence: Synthetic oligonucleotide
uccagauaccugucauucc

SEQ ID NO: 1449733 - RNA, 19 nt, Artificial Sequence
  Description of Artificial Sequence: Synthetic oligonucleotide
uuuucaggucaacgguugu

SEQ ID NO: 1449734 - RNA, 19 nt, Artificial Sequence
  Description of Artificial Sequence: Synthetic oligonucleotide
uuccagcaguguuugauuc

SEQ ID NO: 1449735 - RNA, 19 nt, Artificial Sequence
  Description of Artificial Sequence: Synthetic oligonucleotide
gaguguguauuggagauaa

SEQ ID NO: 1449736 - RNA, 19 nt, Artificial Sequence
  Description of Artificial Sequence: Synthetic oligonucleotide
ucuguuaggaaagcguauu

SEQ ID NO: 1449737 - RNA, 19 nt, Artificial Sequence
  Description of Artificial Sequence: Synthetic oligonucleotide
guaccuccgaauuggagga

SEQ ID NO: 1449738 - RNA, 19 nt, Artificial Sequence
  Description of Artificial Sequence: Synthetic oligonucleotide
gagcuugugguggaguacc

SEQ ID NO: 1449739 - RNA, 19 nt, Artificial Sequence
  Description of Artificial Sequence: Synthetic oligonucleotide
uauuuacauccguuuugac

SEQ ID NO: 1449740 - RNA, 19 nt, Artificial Sequence
  Description of Artificial Sequence: Synthetic oligonucleotide
uuucaggucaacgguugug

SEQ ID NO: 1449741 - RNA, 19 nt, Artificial Sequence
  Description of Artificial Sequence: Synthetic oligonucleotide
gcuguaugcgauuuccacc

SEQ ID NO: 1449742 - RNA, 19 nt, Artificial Sequence
  Description of Artificial Sequence: Synthetic oligonucleotide
augaggggcucuuuguccu

SEQ ID NO: 1449743 - RNA, 19 nt, Artificial Sequence
  Description of Artificial Sequence: Synthetic oligonucleotide
ugccuaaauucuagugcug

SEQ ID NO: 1449744 - RNA, 19 nt, Artificial Sequence
  Description of Artificial Sequence: Synthetic oligonucleotide
guuuccuaugcucucucca

SEQ ID NO: 1449745 - RNA, 19 nt, Artificial Sequence
  Description of Artificial Sequence: Synthetic oligonucleotide
gaaucaugaagagccucug

SEQ ID NO: 1449746 - RNA, 19 nt, Artificial Sequence
  Description of Artificial Sequence: Synthetic oligonucleotide
acaagacuucuucaagaaa

SEQ ID NO: 1449747 - RNA, 19 nt, Artificial Sequence
  Description of Artificial Sequence: Synthetic oligonucleotide
gaauaucaaaguugcggua

SEQ ID NO: 1449748 - RNA, 19 nt, Artificial Sequence
  Description of Artificial Sequence: Synthetic oligonucleotide
cuacuauucuaaugguuga

SEQ ID NO: 1449749 - RNA, 19 nt, Artificial Sequence
  Description of Artificial Sequence: Synthetic oligonucleotide
ggaauaucaaaguugcggu

SEQ ID NO: 1449750 - RNA, 19 nt, Artificial Sequence
  Description of Artificial Sequence: Synthetic oligonucleotide
aucgccauccagaaaucuc

SEQ ID NO: 1449751 - RNA, 19 nt, Artificial Sequence
  Description of Artificial Sequence: Synthetic oligonucleotide
uacauccguuuugacuucg

SEQ ID NO: 1449752 - RNA, 19 nt, Artificial Sequence
  Description of Artificial Sequence: Synthetic oligonucleotide
cacggcuacuauucuaaug

SEQ ID NO: 1449753 - RNA, 19 nt, Artificial Sequence
  Description of Artificial Sequence: Synthetic oligonucleotide
acugcuuaggaguguguau

SEQ ID NO: 1449754 - RNA, 19 nt, Artificial Sequence
  Description of Artificial Sequence: Synthetic oligonucleotide
agaauuuggcaaagauguc

SEQ ID NO: 1449755 - RNA, 19 nt, Artificial Sequence
  Description of Artificial Sequence: Synthetic oligonucleotide
uaacugcauguucaugcaa

SEQ ID NO: 1449756 - RNA, 19 nt, Artificial Sequence
  Description of Artificial Sequence: Synthetic oligonucleotide
uccuaguggcaucucccug

SEQ ID NO: 1449757 - RNA, 19 nt, Artificial Sequence
  Description of Artificial Sequence: Synthetic oligonucleotide
cuggguguuuuggugaaag

SEQ ID NO: 1449758 - RNA, 19 nt, Artificial Sequence
  Description of Artificial Sequence: Synthetic oligonucleotide
ggcgacaucgcuguaugcg

SEQ ID NO: 1449759 - RNA, 19 nt, Artificial Sequence
  Description of Artificial Sequence: Synthetic oligonucleotide
cacaacuccuuuaagccaa

SEQ ID NO: 1449760 - RNA, 19 nt, Artificial Sequence
  Description of Artificial Sequence: Synthetic oligonucleotide
cucaagucugccaucuaca

SEQ ID NO: 1449761 - RNA, 19 nt, Artificial Sequence
  Description of Artificial Sequence: Synthetic oligonucleotide
uuuacuugguaagucucuu

SEQ ID NO: 1449762 - RNA, 19 nt, Artificial Sequence
  Description of Artificial Sequence: Synthetic oligonucleotide
aucuccagauaccugucau

SEQ ID NO: 1449763 - RNA, 19 nt, Artificial Sequence
  Description of Artificial Sequence: Synthetic oligonucleotide
guguggaaaacuugauguc

SEQ ID NO: 1449764 - RNA, 19 nt, Artificial Sequence
  Description of Artificial Sequence: Synthetic oligonucleotide
ugaugucacggcuacuauu

SEQ ID NO: 1449765 - RNA, 19 nt, Artificial Sequence
  Description of Artificial Sequence: Synthetic oligonucleotide
uacaugcaacucuggcgag

SEQ ID NO: 1449766 - RNA, 19 nt, Artificial Sequence
  Description of Artificial Sequence: Synthetic oligonucleotide
agucucuuggcgacaucgc

SEQ ID NO: 1449767 - RNA, 19 nt, Artificial Sequence
  Description of Artificial Sequence: Synthetic oligonucleotide
uuccuaugcucucuccauc

SEQ ID NO: 1449768 - RNA, 19 nt, Artificial Sequence
  Description of Artificial Sequence: Synthetic oligonucleotide
aggcaucucgcuugaaagu

SEQ ID NO: 1449769 - RNA, 19 nt, Artificial Sequence
  Description of Artificial Sequence: Synthetic oligonucleotide
uacuauucuaaugguugaa

SEQ ID NO: 1449770 - RNA, 19 nt, Artificial Sequence
  Description of Artificial Sequence: Synthetic oligonucleotide
uucaacccguucaggggca

SEQ ID NO: 1449771 - RNA, 19 nt, Artificial Sequence
  Description of Artificial Sequence: Synthetic oligonucleotide
acugaugucacggcuacua

SEQ ID NO: 1449772 - RNA, 19 nt, Artificial Sequence
  Description of Artificial Sequence: Synthetic oligonucleotide
ugugacuccgggguugcug

SEQ ID NO: 1449773 - RNA, 19 nt, Artificial Sequence
  Description of Artificial Sequence: Synthetic oligonucleotide
uagaggauuuuagaauaau

SEQ ID NO: 1449774 - RNA, 19 nt, Artificial Sequence
  Description of Artificial Sequence: Synthetic oligonucleotide
guggaguaccuccgaauug

SEQ ID NO: 1449775 - RNA, 19 nt, Artificial Sequence
  Description of Artificial Sequence: Synthetic oligonucleotide
uaggcguuugucagguauc

SEQ ID NO: 1449776 - RNA, 19 nt, Artificial Sequence
  Description of Artificial Sequence: Synthetic oligonucleotide
ucaggucaacgguugugac

SEQ ID NO: 1449777 - RNA, 19 nt, Artificial Sequence
  Description of Artificial Sequence: Synthetic oligonucleotide
cuguaugcgauuuccaccu

SEQ ID NO: 1449778 - RNA, 19 nt, Artificial Sequence
  Description of Artificial Sequence: Synthetic oligonucleotide
acacacuaugaaugcacau

SEQ ID NO: 1449779 - RNA, 19 nt, Artificial Sequence
  Description of Artificial Sequence: Synthetic oligonucleotide
ccuagucuugaguaacugc

SEQ ID NO: 1449780 - RNA, 19 nt, Artificial Sequence
  Description of Artificial Sequence: Synthetic oligonucleotide
caugcaacucuggcgagac

SEQ ID NO: 1449781 - RNA, 19 nt, Artificial Sequence
  Description of Artificial Sequence: Synthetic oligonucleotide
gguugugacacugaacaca

SEQ ID NO: 1449782 - RNA, 19 nt, Artificial Sequence
  Description of Artificial Sequence: Synthetic oligonucleotide
ugucacggcuacuauucua

SEQ ID NO: 1449783 - RNA, 19 nt, Artificial Sequence
  Description of Artificial Sequence: Synthetic oligonucleotide
guguguauuggagauaacu

SEQ ID NO: 1449784 - RNA, 19 nt, Artificial Sequence
  Description of Artificial Sequence: Synthetic oligonucleotide
augaaugcacaugaugauu

SEQ ID NO: 1449785 - RNA, 19 nt, Artificial Sequence
  Description of Artificial Sequence: Synthetic oligonucleotide
uggcucgcuggcucgcugg

SEQ ID NO: 1449786 - RNA, 19 nt, Artificial Sequence
  Description of Artificial Sequence: Synthetic oligonucleotide
uggugaacucaucccugcu

SEQ ID NO: 1449787 - RNA, 19 nt, Artificial Sequence
  Description of Artificial Sequence: Synthetic oligonucleotide
ccuucaacccguucagggg

SEQ ID NO: 1449788 - RNA, 19 nt, Artificial Sequence
  Description of Artificial Sequence: Synthetic oligonucleotide
gucaacgguugugacacug

SEQ ID NO: 1449789 - RNA, 19 nt, Artificial Sequence
  Description of Artificial Sequence: Synthetic oligonucleotide
gaguaccuccgaauuggag

SEQ ID NO: 1449790 - RNA, 19 nt, Artificial Sequence
  Description of Artificial Sequence: Synthetic oligonucleotide
uccguguggaaaacuugau

SEQ ID NO: 1449791 - RNA, 19 nt, Artificial Sequence
  Description of Artificial Sequence: Synthetic oligonucleotide
ucgcuguaugcgauuucca

SEQ ID NO: 1449792 - RNA, 19 nt, Artificial Sequence
  Description of Artificial Sequence: Synthetic oligonucleotide
agucuguuaggaaagcgua

SEQ ID NO: 1449793 - RNA, 19 nt, Artificial Sequence
  Description of Artificial Sequence: Synthetic oligonucleotide
ucauuagccucuggccuug

SEQ ID NO: 1449794 - RNA, 19 nt, Artificial Sequence
  Description of Artificial Sequence: Synthetic oligonucleotide
gauaacuacuacacuuugu

SEQ ID NO: 1449795 - RNA, 19 nt, Artificial Sequence
  Description of Artificial Sequence: Synthetic oligonucleotide
ugguggaguaccuccgaau

SEQ ID NO: 1449796 - RNA, 19 nt, Artificial Sequence
  Description of Artificial Sequence: Synthetic oligonucleotide
ugacuucgcuguugaaggu

SEQ ID NO: 1449797 - RNA, 19 nt, Artificial Sequence
  Description of Artificial Sequence: Synthetic oligonucleotide
auuagccucuggccuugag

SEQ ID NO: 1449798 - RNA, 19 nt, Artificial Sequence
  Description of Artificial Sequence: Synthetic oligonucleotide
uuacauccguuuugacuuc

SEQ ID NO: 1449799 - RNA, 19 nt, Artificial Sequence
  Description of Artificial Sequence: Synthetic oligonucleotide
ggcaucucgcuugaaagug

SEQ ID NO: 1449800 - RNA, 19 nt, Artificial Sequence
  Description of Artificial Sequence: Synthetic oligonucleotide
ggauagaggauuuuagaau

SEQ ID NO: 1449801 - RNA, 19 nt, Artificial Sequence
  Description of Artificial Sequence: Synthetic oligonucleotide
ggcagagcagucuguuagg

SEQ ID NO: 1449802 - RNA, 19 nt, Artificial Sequence
  Description of Artificial Sequence: Synthetic oligonucleotide
guauuggagauaacuacua

SEQ ID NO: 1449803 - RNA, 19 nt, Artificial Sequence
  Description of Artificial Sequence: Synthetic oligonucleotide
gacuccgggguugcugugg

SEQ ID NO: 1449804 - RNA, 19 nt, Artificial Sequence
  Description of Artificial Sequence: Synthetic oligonucleotide
acauccguuuugacuucgc

SEQ ID NO: 1449805 - RNA, 19 nt, Artificial Sequence
  Description of Artificial Sequence: Synthetic oligonucleotide
auagaggauuuuagaauaa

SEQ ID NO: 1449806 - RNA, 19 nt, Artificial Sequence
  Description of Artificial Sequence: Synthetic oligonucleotide
ugauccuccuaguggcauc

SEQ ID NO: 1449807 - RNA, 19 nt, Artificial Sequence
  Description of Artificial Sequence: Synthetic oligonucleotide
cagaaguauaaaugccuaa

SEQ ID NO: 1449808 - RNA, 19 nt, Artificial Sequence
  Description of Artificial Sequence: Synthetic oligonucleotide
ggugaaagcuuuaaguacu

SEQ ID NO: 1449809 - RNA, 19 nt, Artificial Sequence
  Description of Artificial Sequence: Synthetic oligonucleotide
uccuaucuacaugcaacuc

SEQ ID NO: 1449810 - RNA, 19 nt, Artificial Sequence
  Description of Artificial Sequence: Synthetic oligonucleotide
gucacggcuacuauucuaa

SEQ ID NO: 1449811 - RNA, 19 nt, Artificial Sequence
  Description of Artificial Sequence: Synthetic oligonucleotide
aacucuggcgagacucugu

SEQ ID NO: 1449812 - RNA, 19 nt, Artificial Sequence
  Description of Artificial Sequence: Synthetic oligonucleotide
auauacugguguugauguu

SEQ ID NO: 1449813 - RNA, 19 nt, Artificial Sequence
  Description of Artificial Sequence: Synthetic oligonucleotide
cuugucgcugggacaggug

SEQ ID NO: 1449814 - RNA, 19 nt, Artificial Sequence
  Description of Artificial Sequence: Synthetic oligonucleotide
ugccucucgugugacgagc

SEQ ID NO: 1449815 - RNA, 19 nt, Artificial Sequence
  Description of Artificial Sequence: Synthetic oligonucleotide
acaauagcugccagcaaua

SEQ ID NO: 1449816 - RNA, 19 nt, Artificial Sequence
  Description of Artificial Sequence: Synthetic oligonucleotide
uguaugcgauuuccaccuc

SEQ ID NO: 1449817 - RNA, 19 nt, Artificial Sequence
  Description of Artificial Sequence: Synthetic oligonucleotide
cagucuguuaggaaagcgu

SEQ ID NO: 1449818 - RNA, 19 nt, Artificial Sequence
  Description of Artificial Sequence: Synthetic oligonucleotide
caggucaacgguugugaca

SEQ ID NO: 1449819 - RNA, 19 nt, Artificial Sequence
  Description of Artificial Sequence: Synthetic oligonucleotide
augucacggcuacuauucu

SEQ ID NO: 1449820 - RNA, 19 nt, Artificial Sequence
  Description of Artificial Sequence: Synthetic oligonucleotide
cuccuuuaagccaaagaau

SEQ ID NO: 1449821 - RNA, 19 nt, Artificial Sequence
  Description of Artificial Sequence: Synthetic oligonucleotide
guaggcguuugucagguau

SEQ ID NO: 1449822 - RNA, 19 nt, Artificial Sequence
  Description of Artificial Sequence: Synthetic oligonucleotide
cguucaggggcaucgacag

SEQ ID NO: 1449823 - RNA, 19 nt, Artificial Sequence
  Description of Artificial Sequence: Synthetic oligonucleotide
aguguguauuggagauaac

SEQ ID NO: 1449824 - RNA, 19 nt, Artificial Sequence
  Description of Artificial Sequence: Synthetic oligonucleotide
ccucaagucugccaucuac

SEQ ID NO: 1449825 - RNA, 19 nt, Artificial Sequence
  Description of Artificial Sequence: Synthetic oligonucleotide
aggcguuugucagguaucu

SEQ ID NO: 1449826 - RNA, 19 nt, Artificial Sequence
  Description of Artificial Sequence: Synthetic oligonucleotide
ugcagucugccagugucau

SEQ ID NO: 1449827 - RNA, 19 nt, Artificial Sequence
  Description of Artificial Sequence: Synthetic oligonucleotide
gcuguuuacuugguaaguc

SEQ ID NO: 1449828 - RNA, 19 nt, Artificial Sequence
  Description of Artificial Sequence: Synthetic oligonucleotide
gccggauagaggauuuuag

SEQ ID NO: 1449829 - RNA, 19 nt, Artificial Sequence
  Description of Artificial Sequence: Synthetic oligonucleotide
ugcggguucccgccgcgcu

SEQ ID NO: 1449830 - RNA, 19 nt, Artificial Sequence
  Description of Artificial Sequence: Synthetic oligonucleotide
ucacggcuacuauucuaau

SEQ ID NO: 1449831 - RNA, 19 nt, Artificial Sequence
  Description of Artificial Sequence: Synthetic oligonucleotide
ggcgagacucuguaauaac

SEQ ID NO: 1449832 - RNA, 19 nt, Artificial Sequence
  Description of Artificial Sequence: Synthetic oligonucleotide
cuccgaauuggaggagagc

SEQ ID NO: 1449833 - RNA, 19 nt, Artificial Sequence
  Description of Artificial Sequence: Synthetic oligonucleotide
ugucgcugggacagguguu

SEQ ID NO: 1449834 - RNA, 19 nt, Artificial Sequence
  Description of Artificial Sequence: Synthetic oligonucleotide
ucgcuugaaagugcuguuu

SEQ ID NO: 1449835 - RNA, 19 nt, Artificial Sequence
  Description of Artificial Sequence: Synthetic oligonucleotide
ugggccggauagaggauuu

SEQ ID NO: 1449836 - RNA, 19 nt, Artificial Sequence
  Description of Artificial Sequence: Synthetic oligonucleotide
ucauuccuuuaggaauauc

SEQ ID NO: 1449837 - RNA, 19 nt, Artificial Sequence
  Description of Artificial Sequence: Synthetic oligonucleotide
accuccgaauuggaggaga

SEQ ID NO: 1449838 - RNA, 19 nt, Artificial Sequence
  Description of Artificial Sequence: Synthetic oligonucleotide
gugugacgagcuuguggug

SEQ ID NO: 1449839 - RNA, 19 nt, Artificial Sequence
  Description of Artificial Sequence: Synthetic oligonucleotide
ccgaauuggaggagagcag

SEQ ID NO: 1449840 - RNA, 19 nt, Artificial Sequence
  Description of Artificial Sequence: Synthetic oligonucleotide
acuucgcuguugaagguua

SEQ ID NO: 1449841 - RNA, 19 nt, Artificial Sequence
  Description of Artificial Sequence: Synthetic oligonucleotide
gccuaaauucuagugcuga

SEQ ID NO: 1449842 - RNA, 19 nt, Artificial Sequence
  Description of Artificial Sequence: Synthetic oligonucleotide
agguaucuccagauaccug

SEQ ID NO: 1449843 - RNA, 19 nt, Artificial Sequence
  Description of Artificial Sequence: Synthetic oligonucleotide
ccuaguggcaucucccuga

SEQ ID NO: 1449844 - RNA, 19 nt, Artificial Sequence
  Description of Artificial Sequence: Synthetic oligonucleotide
caacgguugugacacugaa

SEQ ID NO: 1449845 - RNA, 19 nt, Artificial Sequence
  Description of Artificial Sequence: Synthetic oligonucleotide
caacuccuuuaagccaaag

SEQ ID NO: 1449846 - RNA, 19 nt, Artificial Sequence
  Description of Artificial Sequence: Synthetic oligonucleotide
agagcucgaugaggggcuc

SEQ ID NO: 1449847 - RNA, 19 nt, Artificial Sequence
  Description of Artificial Sequence: Synthetic oligonucleotide
uaccuccgaauuggaggag

SEQ ID NO: 1449848 - RNA, 19 nt, Artificial Sequence
  Description of Artificial Sequence: Synthetic oligonucleotide
ccuaucuacaugcaacucu

SEQ ID NO: 1449849 - RNA, 19 nt, Artificial Sequence
  Description of Artificial Sequence: Synthetic oligonucleotide
gcgacaucgcuguaugcga

SEQ ID NO: 1449850 - RNA, 19 nt, Artificial Sequence
  Description of Artificial Sequence: Synthetic oligonucleotide
ccuccgaauuggaggagag

SEQ ID NO: 1449851 - RNA, 19 nt, Artificial Sequence
  Description of Artificial Sequence: Synthetic oligonucleotide
cugccucucgugugacgag

SEQ ID NO: 1449852 - RNA, 19 nt, Artificial Sequence
  Description of Artificial Sequence: Synthetic oligonucleotide
gucucuuggcgacaucgcu

SEQ ID NO: 1449853 - RNA, 19 nt, Artificial Sequence
  Description of Artificial Sequence: Synthetic oligonucleotide
caucucgcuugaaagugcu

SEQ ID NO: 1449854 - RNA, 19 nt, Artificial Sequence
  Description of Artificial Sequence: Synthetic oligonucleotide
cggauagaggauuuuagaa

SEQ ID NO: 1449855 - RNA, 19 nt, Artificial Sequence
  Description of Artificial Sequence: Synthetic oligonucleotide
ugacuccgggguugcugug

SEQ ID NO: 1449856 - RNA, 19 nt, Artificial Sequence
  Description of Artificial Sequence: Synthetic oligonucleotide
gauccuccuaguggcaucu

SEQ ID NO: 1449857 - RNA, 19 nt, Artificial Sequence
  Description of Artificial Sequence: Synthetic oligonucleotide
ccggauagaggauuuuaga

SEQ ID NO: 1449858 - RNA, 19 nt, Artificial Sequence
  Description of Artificial Sequence: Synthetic oligonucleotide
uccuugucgcugggacagg

SEQ ID NO: 1449859 - RNA, 19 nt, Artificial Sequence
  Description of Artificial Sequence: Synthetic oligonucleotide
gugacuccgggguugcugu

SEQ ID NO: 1449860 - RNA, 19 nt, Artificial Sequence
  Description of Artificial Sequence: Synthetic oligonucleotide
caacucuggcgagacucug

SEQ ID NO: 1449861 - RNA, 19 nt, Artificial Sequence
  Description of Artificial Sequence: Synthetic oligonucleotide
gcagaaguauaaaugccua

SEQ ID NO: 1449862 - RNA, 19 nt, Artificial Sequence
  Description of Artificial Sequence: Synthetic oligonucleotide
uugcugugacuccgggguu

SEQ ID NO: 1449863 - RNA, 19 nt, Artificial Sequence
  Description of Artificial Sequence: Synthetic oligonucleotide
cuaugcucucuccaucacu

SEQ ID NO: 1449864 - RNA, 19 nt, Artificial Sequence
  Description of Artificial Sequence: Synthetic oligonucleotide
cgcuguaugcgauuuccac

SEQ ID NO: 1449865 - RNA, 19 nt, Artificial Sequence
  Description of Artificial Sequence: Synthetic oligonucleotide
cauuccagcaguguuugau

SEQ ID NO: 1449866 - RNA, 19 nt, Artificial Sequence
  Description of Artificial Sequence: Synthetic oligonucleotide
gcaucucgcuugaaagugc

SEQ ID NO: 1449867 - RNA, 19 nt, Artificial Sequence
  Description of Artificial Sequence: Synthetic oligonucleotide
cuggcgagacucuguaaua

SEQ ID NO: 1449868 - RNA, 19 nt, Artificial Sequence
  Description of Artificial Sequence: Synthetic oligonucleotide
cagguaucuccagauaccu

SEQ ID NO: 1449869 - RNA, 19 nt, Artificial Sequence
  Description of Artificial Sequence: Synthetic oligonucleotide
auacugcuuaggagugugu

SEQ ID NO: 1449870 - RNA, 19 nt, Artificial Sequence
  Description of Artificial Sequence: Synthetic oligonucleotide
gguggaguaccuccgaauu

SEQ ID NO: 1449871 - RNA, 19 nt, Artificial Sequence
  Description of Artificial Sequence: Synthetic oligonucleotide
aaacgguggguggguccca

SEQ ID NO: 1449872 - RNA, 19 nt, Artificial Sequence
  Description of Artificial Sequence: Synthetic oligonucleotide
augcaacucuggcgagacu

SEQ ID NO: 1449873 - RNA, 19 nt, Artificial Sequence
  Description of Artificial Sequence: Synthetic oligonucleotide
caauuucgucagggagggg

SEQ ID NO: 1449874 - RNA, 19 nt, Artificial Sequence
  Description of Artificial Sequence: Synthetic oligonucleotide
uguaggcguuugucaggua

SEQ ID NO: 1449875 - RNA, 19 nt, Artificial Sequence
  Description of Artificial Sequence: Synthetic oligonucleotide
aucucgcuugaaagugcug

SEQ ID NO: 1449876 - RNA, 19 nt, Artificial Sequence
  Description of Artificial Sequence: Synthetic oligonucleotide
gucuaucuuuaauccuagu

SEQ ID NO: 1449877 - RNA, 19 nt, Artificial Sequence
  Description of Artificial Sequence: Synthetic oligonucleotide
cguuugucagguaucucca

SEQ ID NO: 1449878 - RNA, 19 nt, Artificial Sequence
  Description of Artificial Sequence: Synthetic oligonucleotide
cauccguuuugacuucgcu

SEQ ID NO: 1449879 - RNA, 19 nt, Artificial Sequence
  Description of Artificial Sequence: Synthetic oligonucleotide
cgugugacgagcuuguggu

SEQ ID NO: 1449880 - RNA, 19 nt, Artificial Sequence
  Description of Artificial Sequence: Synthetic oligonucleotide
acaugaugauugggcucca

SEQ ID NO: 1449881 - RNA, 19 nt, Artificial Sequence
  Description of Artificial Sequence: Synthetic oligonucleotide
gacaucgcuguaugcgauu

SEQ ID NO: 1449882 - RNA, 19 nt, Artificial Sequence
  Description of Artificial Sequence: Synthetic oligonucleotide
cuggcucgcuggcucgcug

SEQ ID NO: 1449883 - RNA, 19 nt, Artificial Sequence
  Description of Artificial Sequence: Synthetic oligonucleotide
gggaggggagaauucagau

SEQ ID NO: 1449884 - RNA, 19 nt, Artificial Sequence
  Description of Artificial Sequence: Synthetic oligonucleotide
gcagagcagucuguuagga

SEQ ID NO: 1449885 - RNA, 19 nt, Artificial Sequence
  Description of Artificial Sequence: Synthetic oligonucleotide
cuguaggcguuugucaggu

SEQ ID NO: 1449886 - RNA, 19 nt, Artificial Sequence
  Description of Artificial Sequence: Synthetic oligonucleotide
gacuucgcuguugaagguu

SEQ ID NO: 1449887 - RNA, 19 nt, Artificial Sequence
  Description of Artificial Sequence: Synthetic oligonucleotide
auccuccuaguggcaucuc

SEQ ID NO: 1449888 - RNA, 19 nt, Artificial Sequence
  Description of Artificial Sequence: Synthetic oligonucleotide
ucgucagggaggggagaau

SEQ ID NO: 1449889 - RNA, 19 nt, Artificial Sequence
  Description of Artificial Sequence: Synthetic oligonucleotide
gacgagcuugugguggagu

SEQ ID NO: 1449890 - RNA, 19 nt, Artificial Sequence
  Description of Artificial Sequence: Synthetic oligonucleotide
ucaacccguucaggggcau

SEQ ID NO: 1449891 - RNA, 19 nt, Artificial Sequence
  Description of Artificial Sequence: Synthetic oligonucleotide
ccguucaggggcaucgaca

SEQ ID NO: 1449892 - RNA, 19 nt, Artificial Sequence
  Description of Artificial Sequence: Synthetic oligonucleotide
cuguggcugcggguucccg

SEQ ID NO: 1449893 - RNA, 19 nt, Artificial Sequence
  Description of Artificial Sequence: Synthetic oligonucleotide
cuuggcgacaucgcuguau

SEQ ID NO: 1449894 - RNA, 19 nt, Artificial Sequence
  Description of Artificial Sequence: Synthetic oligonucleotide
cucuggcgagacucuguaa

SEQ ID NO: 1449895 - RNA, 19 nt, Artificial Sequence
  Description of Artificial Sequence: Synthetic oligonucleotide
gcugcggguucccgccgcg

SEQ ID NO: 1449896 - RNA, 19 nt, Artificial Sequence
  Description of Artificial Sequence: Synthetic oligonucleotide
cguuuugacuucgcuguug

SEQ ID NO: 1449897 - RNA, 19 nt, Artificial Sequence
  Description of Artificial Sequence: Synthetic oligonucleotide
cucgcuugaaagugcuguu

SEQ ID NO: 1449898 - RNA, 19 nt, Artificial Sequence
  Description of Artificial Sequence: Synthetic oligonucleotide
ggaguaccuccgaauugga

SEQ ID NO: 1449899 - RNA, 19 nt, Artificial Sequence
  Description of Artificial Sequence: Synthetic oligonucleotide
gcuugugguggaguaccuc

SEQ ID NO: 1449900 - RNA, 19 nt, Artificial Sequence
  Description of Artificial Sequence: Synthetic oligonucleotide
ggaguguguauuggagaua

SEQ ID NO: 1449901 - RNA, 19 nt, Artificial Sequence
  Description of Artificial Sequence: Synthetic oligonucleotide
acccguucaggggcaucga

SEQ ID NO: 1449902 - RNA, 19 nt, Artificial Sequence
  Description of Artificial Sequence: Synthetic oligonucleotide
ggcuacuauucuaaugguu

SEQ ID NO: 1449903 - RNA, 19 nt, Artificial Sequence
  Description of Artificial Sequence: Synthetic oligonucleotide
ccuaaauucuagugcugau

SEQ ID NO: 1449904 - RNA, 19 nt, Artificial Sequence
  Description of Artificial Sequence: Synthetic oligonucleotide
gucauuccuuuaggaauau

SEQ ID NO: 1449905 - RNA, 19 nt, Artificial Sequence
  Description of Artificial Sequence: Synthetic oligonucleotide
cugcggguucccgccgcgc

SEQ ID NO: 1449906 - RNA, 19 nt, Artificial Sequence
  Description of Artificial Sequence: Synthetic oligonucleotide
ggccggauagaggauuuua

SEQ ID NO: 1449907 - RNA, 19 nt, Artificial Sequence
  Description of Artificial Sequence: Synthetic oligonucleotide
caacccguucaggggcauc

SEQ ID NO: 1449908 - RNA, 19 nt, Artificial Sequence
  Description of Artificial Sequence: Synthetic oligonucleotide
gcaguuuccuaugcucucu

SEQ ID NO: 1449909 - RNA, 19 nt, Artificial Sequence
  Description of Artificial Sequence: Synthetic oligonucleotide
cuucgcuguugaagguuau

SEQ ID NO: 1449910 - RNA, 19 nt, Artificial Sequence
  Description of Artificial Sequence: Synthetic oligonucleotide
ggcguuugucagguaucuc

SEQ ID NO: 1449911 - RNA, 19 nt, Artificial Sequence
  Description of Artificial Sequence: Synthetic oligonucleotide
cauuagccucuggccuuga

SEQ ID NO: 1449912 - RNA, 19 nt, Artificial Sequence
  Description of Artificial Sequence: Synthetic oligonucleotide
gcaacucuggcgagacucu

SEQ ID NO: 1449913 - RNA, 19 nt, Artificial Sequence
  Description of Artificial Sequence: Synthetic oligonucleotide
gagcucgaugaggggcucu

SEQ ID NO: 1449914 - RNA, 19 nt, Artificial Sequence
  Description of Artificial Sequence: Synthetic oligonucleotide
cggguucccgccgcgcucg

SEQ ID NO: 1449915 - RNA, 19 nt, Artificial Sequence
  Description of Artificial Sequence: Synthetic oligonucleotide
ggggcaucgacagcgccau

SEQ ID NO: 1449916 - RNA, 19 nt, Artificial Sequence
  Description of Artificial Sequence: Synthetic oligonucleotide
gcggguucccgccgcgcuc

SEQ ID NO: 1449917 - RNA, 19 nt, Artificial Sequence
  Description of Artificial Sequence: Synthetic oligonucleotide
ggucaacgguugugacacu

SEQ ID NO: 1449918 - RNA, 19 nt, Artificial Sequence
  Description of Artificial Sequence: Synthetic oligonucleotide
ggguucccgccgcgcucgc

SEQ ID NO: 1449919 - RNA, 19 nt, Artificial Sequence
  Description of Artificial Sequence: Synthetic oligonucleotide
cacugaugucacggcuacu

SEQ ID NO: 1449920 - RNA, 19 nt, Artificial Sequence
  Description of Artificial Sequence: Synthetic oligonucleotide
cggcuacuauucuaauggu

SEQ ID NO: 1449921 - RNA, 19 nt, Artificial Sequence
  Description of Artificial Sequence: Synthetic oligonucleotide
ccuugucgcugggacaggu

SEQ ID NO: 1449922 - RNA, 19 nt, Artificial Sequence
  Description of Artificial Sequence: Synthetic oligonucleotide
cgacaucgcuguaugcgau

SEQ ID NO: 1449923 - RNA, 19 nt, Artificial Sequence
  Description of Artificial Sequence: Synthetic oligonucleotide
ccguuuugacuucgcuguu

SEQ ID NO: 1449924 - RNA, 19 nt, Artificial Sequence
  Description of Artificial Sequence: Synthetic oligonucleotide
gggccggauagaggauuuu

SEQ ID NO: 1449925 - RNA, 19 nt, Artificial Sequence
  Description of Artificial Sequence: Synthetic oligonucleotide
aagacagugucauacauag

SEQ ID NO: 1449926 - RNA, 19 nt, Artificial Sequence
  Description of Artificial Sequence: Synthetic oligonucleotide
aauacugcgaagugugaac

SEQ ID NO: 1449927 - RNA, 19 nt, Artificial Sequence
  Description of Artificial Sequence: Synthetic oligonucleotide
agcacggugaccuuugucc

SEQ ID NO: 1449928 - RNA, 19 nt, Artificial Sequence
  Description of Artificial Sequence: Synthetic oligonucleotide
uuaaauccagaggagaugg

SEQ ID NO: 1449929 - RNA, 19 nt, Artificial Sequence
  Description of Artificial Sequence: Synthetic oligonucleotide
aauacgaagauuacugggg

SEQ ID NO: 1449930 - RNA, 19 nt, Artificial Sequence
  Description of Artificial Sequence: Synthetic oligonucleotide
aacacuuucugccuaaacu

SEQ ID NO: 1449931 - RNA, 19 nt, Artificial Sequence
  Description of Artificial Sequence: Synthetic oligonucleotide
ugagagacggcccaguccg

SEQ ID NO: 1449932 - RNA, 19 nt, Artificial Sequence
  Description of Artificial Sequence: Synthetic oligonucleotide
uguaccuucaguucgaccu

SEQ ID NO: 1449933 - RNA, 19 nt, Artificial Sequence
  Description of Artificial Sequence: Synthetic oligonucleotide
gaauacgaagauuacuggg

SEQ ID NO: 1449934 - RNA, 19 nt, Artificial Sequence
  Description of Artificial Sequence: Synthetic oligonucleotide
aagauuacuggggagcugc

SEQ ID NO: 1449935 - RNA, 19 nt, Artificial Sequence
  Description of Artificial Sequence: Synthetic oligonucleotide
uuuucuauaagguguaccu

SEQ ID NO: 1449936 - RNA, 19 nt, Artificial Sequence
  Description of Artificial Sequence: Synthetic oligonucleotide
auuacucaacacuuucugc

SEQ ID NO: 1449937 - RNA, 19 nt, Artificial Sequence
  Description of Artificial Sequence: Synthetic oligonucleotide
aaaacgaaggcuuugcauu

SEQ ID NO: 1449938 - RNA, 19 nt, Artificial Sequence
  Description of Artificial Sequence: Synthetic oligonucleotide
cagaauacgaagauuacug

SEQ ID NO: 1449939 - RNA, 19 nt, Artificial Sequence
  Description of Artificial Sequence: Synthetic oligonucleotide
aauacuuuucuaaugcucu

SEQ ID NO: 1449940 - RNA, 19 nt, Artificial Sequence
  Description of Artificial Sequence: Synthetic oligonucleotide
ucugccuaaacucagcuuc

SEQ ID NO: 1449941 - RNA, 19 nt, Artificial Sequence
  Description of Artificial Sequence: Synthetic oligonucleotide
agcuuaucugucuggagcc

SEQ ID NO: 1449942 - RNA, 19 nt, Artificial Sequence
  Description of Artificial Sequence: Synthetic oligonucleotide
uauagcuugggcuaaggcu

SEQ ID NO: 1449943 - RNA, 19 nt, Artificial Sequence
  Description of Artificial Sequence: Synthetic oligonucleotide
cuuguuuaaggauaugaug

SEQ ID NO: 1449944 - RNA, 19 nt, Artificial Sequence
  Description of Artificial Sequence: Synthetic oligonucleotide
uccguguucagcaucagug

SEQ ID NO: 1449945 - RNA, 19 nt, Artificial Sequence
  Description of Artificial Sequence: Synthetic oligonucleotide
cagugucauacauagaugc

SEQ ID NO: 1449946 - RNA, 19 nt, Artificial Sequence
  Description of Artificial Sequence: Synthetic oligonucleotide
agaaccguaucucugucuc

SEQ ID NO: 1449947 - RNA, 19 nt, Artificial Sequence
  Description of Artificial Sequence: Synthetic oligonucleotide
ucugucgguacaaaguucu

SEQ ID NO: 1449948 - RNA, 19 nt, Artificial Sequence
  Description of Artificial Sequence: Synthetic oligonucleotide
gaucuuuugcucgaggcgg

SEQ ID NO: 1449949 - RNA, 19 nt, Artificial Sequence
  Description of Artificial Sequence: Synthetic oligonucleotide
gucacuagcauacugcccc

SEQ ID NO: 1449950 - RNA, 19 nt, Artificial Sequence
  Description of Artificial Sequence: Synthetic oligonucleotide
ucuaugucugccugggagg

SEQ ID NO: 1449951 - RNA, 19 nt, Artificial Sequence
  Description of Artificial Sequence: Synthetic oligonucleotide
uaugaugggguuuucgugu

SEQ ID NO: 1449952 - RNA, 19 nt, Artificial Sequence
  Description of Artificial Sequence: Synthetic oligonucleotide
uucguguauaaacauagau

SEQ ID NO: 1449953 - RNA, 19 nt, Artificial Sequence
  Description of Artificial Sequence: Synthetic oligonucleotide
caggauuaaauccagagga

SEQ ID NO: 1449954 - RNA, 19 nt, Artificial Sequence
  Description of Artificial Sequence: Synthetic oligonucleotide
aaaaugagcuguacgucac

SEQ ID NO: 1449955 - RNA, 19 nt, Artificial Sequence
  Description of Artificial Sequence: Synthetic oligonucleotide
uugaucuuuugcucgaggc

SEQ ID NO: 1449956 - RNA, 19 nt, Artificial Sequence
  Description of Artificial Sequence: Synthetic oligonucleotide
uuuauucguguauaaacau

SEQ ID NO: 1449957 - RNA, 19 nt, Artificial Sequence
  Description of Artificial Sequence: Synthetic oligonucleotide
ugagcuguacgucacuagc

SEQ ID NO: 1449958 - RNA, 19 nt, Artificial Sequence
  Description of Artificial Sequence: Synthetic oligonucleotide
ucguguauaaacauagauu

SEQ ID NO: 1449959 - RNA, 19 nt, Artificial Sequence
  Description of Artificial Sequence: Synthetic oligonucleotide
acgaagauuacuggggagc

SEQ ID NO: 1449960 - RNA, 19 nt, Artificial Sequence
  Description of Artificial Sequence: Synthetic oligonucleotide
acgucacuagcauacugcc

SEQ ID NO: 1449961 - RNA, 19 nt, Artificial Sequence
  Description of Artificial Sequence: Synthetic oligonucleotide
gguuuauucguguauaaac

SEQ ID NO: 1449962 - RNA, 19 nt, Artificial Sequence
  Description of Artificial Sequence: Synthetic oligonucleotide
ucuauaagguguaccuuca

SEQ ID NO: 1449963 - RNA, 19 nt, Artificial Sequence
  Description of Artificial Sequence: Synthetic oligonucleotide
uuuucaucgacuuguccac

SEQ ID NO: 1449964 - RNA, 19 nt, Artificial Sequence
  Description of Artificial Sequence: Synthetic oligonucleotide
gacaacaugucaauacugc

SEQ ID NO: 1449965 - RNA, 19 nt, Artificial Sequence
  Description of Artificial Sequence: Synthetic oligonucleotide
guggcuugggaacagaccc

SEQ ID NO: 1449966 - RNA, 19 nt, Artificial Sequence
  Description of Artificial Sequence: Synthetic oligonucleotide
aaccguaucucugucucac

SEQ ID NO: 1449967 - RNA, 19 nt, Artificial Sequence
  Description of Artificial Sequence: Synthetic oligonucleotide
uggacaacaugucaauacu

SEQ ID NO: 1449968 - RNA, 19 nt, Artificial Sequence
  Description of Artificial Sequence: Synthetic oligonucleotide
ggaauuguacuucugcucc

SEQ ID NO: 1449969 - RNA, 19 nt, Artificial Sequence
  Description of Artificial Sequence: Synthetic oligonucleotide
cugaaugcuacaaauaaaa

SEQ ID NO: 1449970 - RNA, 19 nt, Artificial Sequence
  Description of Artificial Sequence: Synthetic oligonucleotide
ucgaccuauagcuugggcu

SEQ ID NO: 1449971 - RNA, 19 nt, Artificial Sequence
  Description of Artificial Sequence: Synthetic oligonucleotide
aacauagauuaauacuuuu

SEQ ID NO: 1449972 - RNA, 19 nt, Artificial Sequence
  Description of Artificial Sequence: Synthetic oligonucleotide
cuguacgucacuagcauac

SEQ ID NO: 1449973 - RNA, 19 nt, Artificial Sequence
  Description of Artificial Sequence: Synthetic oligonucleotide
uguuucuaugucugccugg

SEQ ID NO: 1449974 - RNA, 19 nt, Artificial Sequence
  Description of Artificial Sequence: Synthetic oligonucleotide
cuuuacucucaaugcaggg

SEQ ID NO: 1449975 - RNA, 19 nt, Artificial Sequence
  Description of Artificial Sequence: Synthetic oligonucleotide
ugucgcagcucuuugguca

SEQ ID NO: 1449976 - RNA, 19 nt, Artificial Sequence
  Description of Artificial Sequence: Synthetic oligonucleotide
agauuuucuuuuaggcucc

SEQ ID NO: 1449977 - RNA, 19 nt, Artificial Sequence
  Description of Artificial Sequence: Synthetic oligonucleotide
auaugaugggguuuucgug

SEQ ID NO: 1449978 - RNA, 19 nt, Artificial Sequence
  Description of Artificial Sequence: Synthetic oligonucleotide
uuauucguguauaaacaua

SEQ ID NO: 1449979 - RNA, 19 nt, Artificial Sequence
  Description of Artificial Sequence: Synthetic oligonucleotide
caguccgugacuuucugcc

SEQ ID NO: 1449980 - RNA, 19 nt, Artificial Sequence
  Description of Artificial Sequence: Synthetic oligonucleotide
ucuuguucgaucuguaguu

SEQ ID NO: 1449981 - RNA, 19 nt, Artificial Sequence
  Description of Artificial Sequence: Synthetic oligonucleotide
uuucguguggugccaagug

SEQ ID NO: 1449982 - RNA, 19 nt, Artificial Sequence
  Description of Artificial Sequence: Synthetic oligonucleotide
cugaccuuuucaaucuucc

SEQ ID NO: 1449983 - RNA, 19 nt, Artificial Sequence
  Description of Artificial Sequence: Synthetic oligonucleotide
guuuauucguguauaaaca

SEQ ID NO: 1449984 - RNA, 19 nt, Artificial Sequence
  Description of Artificial Sequence: Synthetic oligonucleotide
uuacucucaaugcaggguu

SEQ ID NO: 1449985 - RNA, 19 nt, Artificial Sequence
  Description of Artificial Sequence: Synthetic oligonucleotide
agugugaacaggcuccgug

SEQ ID NO: 1449986 - RNA, 19 nt, Artificial Sequence
  Description of Artificial Sequence: Synthetic oligonucleotide
gaugccguucuccagccgc

SEQ ID NO: 1449987 - RNA, 19 nt, Artificial Sequence
  Description of Artificial Sequence: Synthetic oligonucleotide
uggaccugcaauuacucaa

SEQ ID NO: 1449988 - RNA, 19 nt, Artificial Sequence
  Description of Artificial Sequence: Synthetic oligonucleotide
accugcaauuacucaacac

SEQ ID NO: 1449989 - RNA, 19 nt, Artificial Sequence
  Description of Artificial Sequence: Synthetic oligonucleotide
uggaugaacugcuggaggu

SEQ ID NO: 1449990 - RNA, 19 nt, Artificial Sequence
  Description of Artificial Sequence: Synthetic oligonucleotide
uggaauuguacuucugcuc

SEQ ID NO: 1449991 - RNA, 19 nt, Artificial Sequence
  Description of Artificial Sequence: Synthetic oligonucleotide
guuucuaugucugccuggg

SEQ ID NO: 1449992 - RNA, 19 nt, Artificial Sequence
  Description of Artificial Sequence: Synthetic oligonucleotide
cucgaggcggacaauuucc

SEQ ID NO: 1449993 - RNA, 19 nt, Artificial Sequence
  Description of Artificial Sequence: Synthetic oligonucleotide
uuuugcucgaggcggacaa

SEQ ID NO: 1449994 - RNA, 19 nt, Artificial Sequence
  Description of Artificial Sequence: Synthetic oligonucleotide
uaagguguaccuucaguuc

SEQ ID NO: 1449995 - RNA, 19 nt, Artificial Sequence
  Description of Artificial Sequence: Synthetic oligonucleotide
auacgaagauuacugggga

SEQ ID NO: 1449996 - RNA, 19 nt, Artificial Sequence
  Description of Artificial Sequence: Synthetic oligonucleotide
uuaaggauaugaugggguu

SEQ ID NO: 1449997 - RNA, 19 nt, Artificial Sequence
  Description of Artificial Sequence: Synthetic oligonucleotide
uucuuuuaggcucccuccu

SEQ ID NO: 1449998 - RNA, 19 nt, Artificial Sequence
  Description of Artificial Sequence: Synthetic oligonucleotide
aaacgaaggcuuugcauuu

SEQ ID NO: 1449999 - RNA, 19 nt, Artificial Sequence
  Description of Artificial Sequence: Synthetic oligonucleotide
uacgaagauuacuggggag

SEQ ID NO: 1450000 - RNA, 19 nt, Artificial Sequence
  Description of Artificial Sequence: Synthetic oligonucleotide
aaugcaggguuuauucgug

SEQ ID NO: 1450001 - RNA, 19 nt, Artificial Sequence
  Description of Artificial Sequence: Synthetic oligonucleotide
gauaugaugggguuuucgu

SEQ ID NO: 1450002 - RNA, 19 nt, Artificial Sequence
  Description of Artificial Sequence: Synthetic oligonucleotide
augucaauacugcgaagug

SEQ ID NO: 1450003 - RNA, 19 nt, Artificial Sequence
  Description of Artificial Sequence: Synthetic oligonucleotide
ccuuuugaucuuuugcucg

SEQ ID NO: 1450004 - RNA, 19 nt, Artificial Sequence
  Description of Artificial Sequence: Synthetic oligonucleotide
ugggguucugcagaauacg

SEQ ID NO: 1450005 - RNA, 19 nt, Artificial Sequence
  Description of Artificial Sequence: Synthetic oligonucleotide
ucgacuuguccaccugagg

SEQ ID NO: 1450006 - RNA, 19 nt, Artificial Sequence
  Description of Artificial Sequence: Synthetic oligonucleotide
cugcgaagugugaacaggc

SEQ ID NO: 1450007 - RNA, 19 nt, Artificial Sequence
  Description of Artificial Sequence: Synthetic oligonucleotide
aagugucucucagugucuc

SEQ ID NO: 1450008 - RNA, 19 nt, Artificial Sequence
  Description of Artificial Sequence: Synthetic oligonucleotide
uuguucgaucuguaguuca

SEQ ID NO: 1450009 - RNA, 19 nt, Artificial Sequence
  Description of Artificial Sequence: Synthetic oligonucleotide
acugcgaagugugaacagg

SEQ ID NO: 1450010 - RNA, 19 nt, Artificial Sequence
  Description of Artificial Sequence: Synthetic oligonucleotide
aacagacccuguucaguug

SEQ ID NO: 1450011 - RNA, 19 nt, Artificial Sequence
  Description of Artificial Sequence: Synthetic oligonucleotide
cuauagcuugggcuaaggc

SEQ ID NO: 1450012 - RNA, 19 nt, Artificial Sequence
  Description of Artificial Sequence: Synthetic oligonucleotide
ugaccuuuucaaucuuccc

SEQ ID NO: 1450013 - RNA, 19 nt, Artificial Sequence
  Description of Artificial Sequence: Synthetic oligonucleotide
cugcagaauacgaagauua

SEQ ID NO: 1450014 - RNA, 19 nt, Artificial Sequence
  Description of Artificial Sequence: Synthetic oligonucleotide
aaacauagauuaauacuuu

SEQ ID NO: 1450015 - RNA, 19 nt, Artificial Sequence
  Description of Artificial Sequence: Synthetic oligonucleotide
ugaucgggagaggacacag

SEQ ID NO: 1450016 - RNA, 19 nt, Artificial Sequence
  Description of Artificial Sequence: Synthetic oligonucleotide
uucguguggugccaagugu

SEQ ID NO: 1450017 - RNA, 19 nt, Artificial Sequence
  Description of Artificial Sequence: Synthetic oligonucleotide
gaagugugaacaggcuccg

SEQ ID NO: 1450018 - RNA, 19 nt, Artificial Sequence
  Description of Artificial Sequence: Synthetic oligonucleotide
caguucgaccuauagcuug

SEQ ID NO: 1450019 - RNA, 19 nt, Artificial Sequence
  Description of Artificial Sequence: Synthetic oligonucleotide
aucugcgccagguaguccu

SEQ ID NO: 1450020 - RNA, 19 nt, Artificial Sequence
  Description of Artificial Sequence: Synthetic oligonucleotide
ugugaucgggagaggacac

SEQ ID NO: 1450021 - RNA, 19 nt, Artificial Sequence
  Description of Artificial Sequence: Synthetic oligonucleotide
uucgaucuguaguucauuu

SEQ ID NO: 1450022 - RNA, 19 nt, Artificial Sequence
  Description of Artificial Sequence: Synthetic oligonucleotide
uuuggcgccuccugugaag

SEQ ID NO: 1450023 - RNA, 19 nt, Artificial Sequence
  Description of Artificial Sequence: Synthetic oligonucleotide
ucguguggugccaaguguc

SEQ ID NO: 1450024 - RNA, 19 nt, Artificial Sequence
  Description of Artificial Sequence: Synthetic oligonucleotide
uacugcgaagugugaacag

SEQ ID NO: 1450025 - RNA, 19 nt, Artificial Sequence
  Description of Artificial Sequence: Synthetic oligonucleotide
auagcuugggcuaaggcua

SEQ ID NO: 1450026 - RNA, 19 nt, Artificial Sequence
  Description of Artificial Sequence: Synthetic oligonucleotide
uucaucgacuuguccaccu

SEQ ID NO: 1450027 - RNA, 19 nt, Artificial Sequence
  Description of Artificial Sequence: Synthetic oligonucleotide
aggauuaaauccagaggag

SEQ ID NO: 1450028 - RNA, 19 nt, Artificial Sequence
  Description of Artificial Sequence: Synthetic oligonucleotide
aacgaaggcuuugcauuuc

SEQ ID NO: 1450029 - RNA, 19 nt, Artificial Sequence
  Description of Artificial Sequence: Synthetic oligonucleotide
cuuaucugucuggagccgg

SEQ ID NO: 1450030 - RNA, 19 nt, Artificial Sequence
  Description of Artificial Sequence: Synthetic oligonucleotide
aguccgugacuuucugccg

SEQ ID NO: 1450031 - RNA, 19 nt, Artificial Sequence
  Description of Artificial Sequence: Synthetic oligonucleotide
acuuguuuaaggauaugau

SEQ ID NO: 1450032 - RNA, 19 nt, Artificial Sequence
  Description of Artificial Sequence: Synthetic oligonucleotide
aguucgaccuauagcuugg

SEQ ID NO: 1450033 - RNA, 19 nt, Artificial Sequence
  Description of Artificial Sequence: Synthetic oligonucleotide
uucgaccuauagcuugggc

SEQ ID NO: 1450034 - RNA, 19 nt, Artificial Sequence
  Description of Artificial Sequence: Synthetic oligonucleotide
gaugggguucugcagaaua

SEQ ID NO: 1450035 - RNA, 19 nt, Artificial Sequence
  Description of Artificial Sequence: Synthetic oligonucleotide
ugcgaagugugaacaggcu

SEQ ID NO: 1450036 - RNA, 19 nt, Artificial Sequence
  Description of Artificial Sequence: Synthetic oligonucleotide
ucugaggugggccgcucgc

SEQ ID NO: 1450037 - RNA, 19 nt, Artificial Sequence
  Description of Artificial Sequence: Synthetic oligonucleotide
cacuuguuuaaggauauga

SEQ ID NO: 1450038 - RNA, 19 nt, Artificial Sequence
  Description of Artificial Sequence: Synthetic oligonucleotide
guaucucugucucacugga

SEQ ID NO: 1450039 - RNA, 19 nt, Artificial Sequence
  Description of Artificial Sequence: Synthetic oligonucleotide
ucaucgacuuguccaccug

SEQ ID NO: 1450040 - RNA, 19 nt, Artificial Sequence
  Description of Artificial Sequence: Synthetic oligonucleotide
aaugagcuguacgucacua

SEQ ID NO: 1450041 - RNA, 19 nt, Artificial Sequence
  Description of Artificial Sequence: Synthetic oligonucleotide
augggguucugcagaauac

SEQ ID NO: 1450042 - RNA, 19 nt, Artificial Sequence
  Description of Artificial Sequence: Synthetic oligonucleotide
aucugucuggagccggauc

SEQ ID NO: 1450043 - RNA, 19 nt, Artificial Sequence
  Description of Artificial Sequence: Synthetic oligonucleotide
uuuaggcucccuccuuuuc

SEQ ID NO: 1450044 - RNA, 19 nt, Artificial Sequence
  Description of Artificial Sequence: Synthetic oligonucleotide
auacugcgaagugugaaca

SEQ ID NO: 1450045 - RNA, 19 nt, Artificial Sequence
  Description of Artificial Sequence: Synthetic oligonucleotide
ggacaauuuccucuuccag

SEQ ID NO: 1450046 - RNA, 19 nt, Artificial Sequence
  Description of Artificial Sequence: Synthetic oligonucleotide
agcuguacgucacuagcau

SEQ ID NO: 1450047 - RNA, 19 nt, Artificial Sequence
  Description of Artificial Sequence: Synthetic oligonucleotide
guugacuugucgcagcucu

SEQ ID NO: 1450048 - RNA, 19 nt, Artificial Sequence
  Description of Artificial Sequence: Synthetic oligonucleotide
cgaagugugaacaggcucc

SEQ ID NO: 1450049 - RNA, 19 nt, Artificial Sequence
  Description of Artificial Sequence: Synthetic oligonucleotide
cagacuggaauuguacuuc

SEQ ID NO: 1450050 - RNA, 19 nt, Artificial Sequence
  Description of Artificial Sequence: Synthetic oligonucleotide
guacgucacuagcauacug

SEQ ID NO: 1450051 - RNA, 19 nt, Artificial Sequence
  Description of Artificial Sequence: Synthetic oligonucleotide
cucuauuucagugggcuca

SEQ ID NO: 1450052 - RNA, 19 nt, Artificial Sequence
  Description of Artificial Sequence: Synthetic oligonucleotide
acaugucaauacugcgaag

SEQ ID NO: 1450053 - RNA, 19 nt, Artificial Sequence
  Description of Artificial Sequence: Synthetic oligonucleotide
uuuucguguggugccaagu

SEQ ID NO: 1450054 - RNA, 19 nt, Artificial Sequence
  Description of Artificial Sequence: Synthetic oligonucleotide
ucuuuuaggcucccuccuu

SEQ ID NO: 1450055 - RNA, 19 nt, Artificial Sequence
  Description of Artificial Sequence: Synthetic oligonucleotide
ugaggccgcaguuuggcua

SEQ ID NO: 1450056 - RNA, 19 nt, Artificial Sequence
  Description of Artificial Sequence: Synthetic oligonucleotide
agggacccagacuggaaug

SEQ ID NO: 1450057 - RNA, 19 nt, Artificial Sequence
  Description of Artificial Sequence: Synthetic oligonucleotide
uuucuauaagguguaccuu

SEQ ID NO: 1450058 - RNA, 19 nt, Artificial Sequence
  Description of Artificial Sequence: Synthetic oligonucleotide
ucgaggcggacaauuuccu

SEQ ID NO: 1450059 - RNA, 19 nt, Artificial Sequence
  Description of Artificial Sequence: Synthetic oligonucleotide
ucugcagaauacgaagauu

SEQ ID NO: 1450060 - RNA, 19 nt, Artificial Sequence
  Description of Artificial Sequence: Synthetic oligonucleotide
guuugugaucgggagagga

SEQ ID NO: 1450061 - RNA, 19 nt, Artificial Sequence
  Description of Artificial Sequence: Synthetic oligonucleotide
aggguuuauucguguauaa

SEQ ID NO: 1450062 - RNA, 19 nt, Artificial Sequence
  Description of Artificial Sequence: Synthetic oligonucleotide
aggcucugucgguacaaag

SEQ ID NO: 1450063 - RNA, 19 nt, Artificial Sequence
  Description of Artificial Sequence: Synthetic oligonucleotide
ucaguucgaccuauagcuu

SEQ ID NO: 1450064 - RNA, 19 nt, Artificial Sequence
  Description of Artificial Sequence: Synthetic oligonucleotide
uuucaucgacuuguccacc

SEQ ID NO: 1450065 - RNA, 19 nt, Artificial Sequence
  Description of Artificial Sequence: Synthetic oligonucleotide
ugcugucgcaguccgugac

SEQ ID NO: 1450066 - RNA, 19 nt, Artificial Sequence
  Description of Artificial Sequence: Synthetic oligonucleotide
caugucaauacugcgaagu

SEQ ID NO: 1450067 - RNA, 19 nt, Artificial Sequence
  Description of Artificial Sequence: Synthetic oligonucleotide
guuuucguguggugccaag

SEQ ID NO: 1450068 - RNA, 19 nt, Artificial Sequence
  Description of Artificial Sequence: Synthetic oligonucleotide
gaagauuacuggggagcug

SEQ ID NO: 1450069 - RNA, 19 nt, Artificial Sequence
  Description of Artificial Sequence: Synthetic oligonucleotide
cucugucgguacaaaguuc

SEQ ID NO: 1450070 - RNA, 19 nt, Artificial Sequence
  Description of Artificial Sequence: Synthetic oligonucleotide
uugaccugcgccuccucaa

SEQ ID NO: 1450071 - RNA, 19 nt, Artificial Sequence
  Description of Artificial Sequence: Synthetic oligonucleotide
ggauuuacuguccuuggua

SEQ ID NO: 1450072 - RNA, 19 nt, Artificial Sequence
  Description of Artificial Sequence: Synthetic oligonucleotide
gguggccugccccagagac

SEQ ID NO: 1450073 - RNA, 19 nt, Artificial Sequence
  Description of Artificial Sequence: Synthetic oligonucleotide
ucucagugucucuccauuu

SEQ ID NO: 1450074 - RNA, 19 nt, Artificial Sequence
  Description of Artificial Sequence: Synthetic oligonucleotide
ugaccugcgccuccucaac

SEQ ID NO: 1450075 - RNA, 19 nt, Artificial Sequence
  Description of Artificial Sequence: Synthetic oligonucleotide
cacgugguuugugaucggg

SEQ ID NO: 1450076 - RNA, 19 nt, Artificial Sequence
  Description of Artificial Sequence: Synthetic oligonucleotide
ugcaggguuuauucgugua

SEQ ID NO: 1450077 - RNA, 19 nt, Artificial Sequence
  Description of Artificial Sequence: Synthetic oligonucleotide
agcagcuuaucugucugga

SEQ ID NO: 1450078 - RNA, 19 nt, Artificial Sequence
  Description of Artificial Sequence: Synthetic oligonucleotide
uguacgucacuagcauacu

SEQ ID NO: 1450079 - RNA, 19 nt, Artificial Sequence
  Description of Artificial Sequence: Synthetic oligonucleotide
cuuguucgaucuguaguuc

SEQ ID NO: 1450080 - RNA, 19 nt, Artificial Sequence
  Description of Artificial Sequence: Synthetic oligonucleotide
uccaccgcucugaugccgu

SEQ ID NO: 1450081 - RNA, 19 nt, Artificial Sequence
  Description of Artificial Sequence: Synthetic oligonucleotide
caaugcaggguuuauucgu

SEQ ID NO: 1450082 - RNA, 19 nt, Artificial Sequence
  Description of Artificial Sequence: Synthetic oligonucleotide
aucgacuuguccaccugag

SEQ ID NO: 1450083 - RNA, 19 nt, Artificial Sequence
  Description of Artificial Sequence: Synthetic oligonucleotide
cucugaugccguucuccag

SEQ ID NO: 1450084 - RNA, 19 nt, Artificial Sequence
  Description of Artificial Sequence: Synthetic oligonucleotide
aggcuccguguucagcauc

SEQ ID NO: 1450085 - RNA, 19 nt, Artificial Sequence
  Description of Artificial Sequence: Synthetic oligonucleotide
uucugccuaaacucagcuu

SEQ ID NO: 1450086 - RNA, 19 nt, Artificial Sequence
  Description of Artificial Sequence: Synthetic oligonucleotide
gaccugcaauuacucaaca

SEQ ID NO: 1450087 - RNA, 19 nt, Artificial Sequence
  Description of Artificial Sequence: Synthetic oligonucleotide
gagcuguacgucacuagca

SEQ ID NO: 1450088 - RNA, 19 nt, Artificial Sequence
  Description of Artificial Sequence: Synthetic oligonucleotide
gccgcaguuuggcuaaggg

SEQ ID NO: 1450089 - RNA, 19 nt, Artificial Sequence
  Description of Artificial Sequence: Synthetic oligonucleotide
gaacagacccuguucaguu

SEQ ID NO: 1450090 - RNA, 19 nt, Artificial Sequence
  Description of Artificial Sequence: Synthetic oligonucleotide
cugcgccuccucaacuucc

SEQ ID NO: 1450091 - RNA, 19 nt, Artificial Sequence
  Description of Artificial Sequence: Synthetic oligonucleotide
ucucaaugcaggguuuauu

SEQ ID NO: 1450092 - RNA, 19 nt, Artificial Sequence
  Description of Artificial Sequence: Synthetic oligonucleotide
ccgcaguuuggcuaagggg

SEQ ID NO: 1450093 - RNA, 19 nt, Artificial Sequence
  Description of Artificial Sequence: Synthetic oligonucleotide
agagacggcccaguccguc

SEQ ID NO: 1450094 - RNA, 19 nt, Artificial Sequence
  Description of Artificial Sequence: Synthetic oligonucleotide
gaaccguaucucugucuca

SEQ ID NO: 1450095 - RNA, 19 nt, Artificial Sequence
  Description of Artificial Sequence: Synthetic oligonucleotide
gagaugggguucugcagaa

SEQ ID NO: 1450096 - RNA, 19 nt, Artificial Sequence
  Description of Artificial Sequence: Synthetic oligonucleotide
gucugaggugggccgcucg

SEQ ID NO: 1450097 - RNA, 19 nt, Artificial Sequence
  Description of Artificial Sequence: Synthetic oligonucleotide
uugucgcagcucuuugguc

SEQ ID NO: 1450098 - RNA, 19 nt, Artificial Sequence
  Description of Artificial Sequence: Synthetic oligonucleotide
gaugagccaggucgcuuca

SEQ ID NO: 1450099 - RNA, 19 nt, Artificial Sequence
  Description of Artificial Sequence: Synthetic oligonucleotide
ucgcaguccgugacuuucu

SEQ ID NO: 1450100 - RNA, 19 nt, Artificial Sequence
  Description of Artificial Sequence: Synthetic oligonucleotide
gugaacaggcuccguguuc

SEQ ID NO: 1450101 - RNA, 19 nt, Artificial Sequence
  Description of Artificial Sequence: Synthetic oligonucleotide
gaggccgcaguuuggcuaa

SEQ ID NO: 1450102 - RNA, 19 nt, Artificial Sequence
  Description of Artificial Sequence: Synthetic oligonucleotide
gggacccagacuggaaugg

SEQ ID NO: 1450103 - RNA, 19 nt, Artificial Sequence
  Description of Artificial Sequence: Synthetic oligonucleotide
agagaccucuccaccgcuc

SEQ ID NO: 1450104 - RNA, 19 nt, Artificial Sequence
  Description of Artificial Sequence: Synthetic oligonucleotide
gggaacagacccuguucag

SEQ ID NO: 1450105 - RNA, 19 nt, Artificial Sequence
  Description of Artificial Sequence: Synthetic oligonucleotide
ugacuugucgcagcucuuu

SEQ ID NO: 1450106 - RNA, 19 nt, Artificial Sequence
  Description of Artificial Sequence: Synthetic oligonucleotide
ugcucgaggcggacaauuu

SEQ ID NO: 1450107 - RNA, 19 nt, Artificial Sequence
  Description of Artificial Sequence: Synthetic oligonucleotide
ccguguucagcaucagugc

SEQ ID NO: 1450108 - RNA, 19 nt, Artificial Sequence
  Description of Artificial Sequence: Synthetic oligonucleotide
caauacugcgaagugugaa

SEQ ID NO: 1450109 - RNA, 19 nt, Artificial Sequence
  Description of Artificial Sequence: Synthetic oligonucleotide
caucgacuuguccaccuga

SEQ ID NO: 1450110 - RNA, 19 nt, Artificial Sequence
  Description of Artificial Sequence: Synthetic oligonucleotide
ucuccaccgcucugaugcc

SEQ ID NO: 1450111 - RNA, 19 nt, Artificial Sequence
  Description of Artificial Sequence: Synthetic oligonucleotide
gucgcaguccgugacuuuc

SEQ ID NO: 1450112 - RNA, 19 nt, Artificial Sequence
  Description of Artificial Sequence: Synthetic oligonucleotide
gcgaagugugaacaggcuc

SEQ ID NO: 1450113 - RNA, 19 nt, Artificial Sequence
  Description of Artificial Sequence: Synthetic oligonucleotide
guucgaccuauagcuuggg

SEQ ID NO: 1450114 - RNA, 19 nt, Artificial Sequence
  Description of Artificial Sequence: Synthetic oligonucleotide
gaucucuacaucauuccuu

SEQ ID NO: 1450115 - RNA, 19 nt, Artificial Sequence
  Description of Artificial Sequence: Synthetic oligonucleotide
gccaggucgcuucagggac

SEQ ID NO: 1450116 - RNA, 19 nt, Artificial Sequence
  Description of Artificial Sequence: Synthetic oligonucleotide
gugggccgcucgcugagag

SEQ ID NO: 1450117 - RNA, 19 nt, Artificial Sequence
  Description of Artificial Sequence: Synthetic oligonucleotide
cucaacacuuucugccuaa

SEQ ID NO: 1450118 - RNA, 19 nt, Artificial Sequence
  Description of Artificial Sequence: Synthetic oligonucleotide
uguccccgucugcuggaug

SEQ ID NO: 1450119 - RNA, 19 nt, Artificial Sequence
  Description of Artificial Sequence: Synthetic oligonucleotide
gccggaucagccuccuuag

SEQ ID NO: 1450120 - RNA, 19 nt, Artificial Sequence
  Description of Artificial Sequence: Synthetic oligonucleotide
aggugggccgcucgcugag

SEQ ID NO: 1450121 - RNA, 19 nt, Artificial Sequence
  Description of Artificial Sequence: Synthetic oligonucleotide
ugcuguggaccugcaauua

SEQ ID NO: 1450122 - RNA, 19 nt, Artificial Sequence
  Description of Artificial Sequence: Synthetic oligonucleotide
uugcucgaggcggacaauu

SEQ ID NO: 1450123 - RNA, 19 nt, Artificial Sequence
  Description of Artificial Sequence: Synthetic oligonucleotide
ccaucagcccuuuggcgcc

SEQ ID NO: 1450124 - RNA, 19 nt, Artificial Sequence
  Description of Artificial Sequence: Synthetic oligonucleotide
accuauagcuugggcuaag

SEQ ID NO: 1450125 - RNA, 19 nt, Artificial Sequence
  Description of Artificial Sequence: Synthetic oligonucleotide
ggaccugcaauuacucaac

SEQ ID NO: 1450126 - RNA, 19 nt, Artificial Sequence
  Description of Artificial Sequence: Synthetic oligonucleotide
caggucgcuucagggaccc

SEQ ID NO: 1450127 - RNA, 19 nt, Artificial Sequence
  Description of Artificial Sequence: Synthetic oligonucleotide
gugaccuuuguccccgucu

SEQ ID NO: 1450128 - RNA, 19 nt, Artificial Sequence
  Description of Artificial Sequence: Synthetic oligonucleotide
gcuguggaccugcaauuac

SEQ ID NO: 1450129 - RNA, 19 nt, Artificial Sequence
  Description of Artificial Sequence: Synthetic oligonucleotide
ccguaucucugucucacug

SEQ ID NO: 1450130 - RNA, 19 nt, Artificial Sequence
  Description of Artificial Sequence: Synthetic oligonucleotide
gaggugggccgcucgcuga

SEQ ID NO: 1450131 - RNA, 19 nt, Artificial Sequence
  Description of Artificial Sequence: Synthetic oligonucleotide
cuguggaccugcaauuacu

SEQ ID NO: 1450132 - RNA, 19 nt, Artificial Sequence
  Description of Artificial Sequence: Synthetic oligonucleotide
ccugaccuuuucaaucuuc

SEQ ID NO: 1450133 - RNA, 19 nt, Artificial Sequence
  Description of Artificial Sequence: Synthetic oligonucleotide
acgugguuugugaucggga

SEQ ID NO: 1450134 - RNA, 19 nt, Artificial Sequence
  Description of Artificial Sequence: Synthetic oligonucleotide
ggcucagcuggcagcacgg

SEQ ID NO: 1450135 - RNA, 19 nt, Artificial Sequence
  Description of Artificial Sequence: Synthetic oligonucleotide
gcucugaugccguucucca

SEQ ID NO: 1450136 - RNA, 19 nt, Artificial Sequence
  Description of Artificial Sequence: Synthetic oligonucleotide
ccuauagcuugggcuaagg

SEQ ID NO: 1450137 - RNA, 19 nt, Artificial Sequence
  Description of Artificial Sequence: Synthetic oligonucleotide
gccgcucgcugagagacgg

SEQ ID NO: 1450138 - RNA, 19 nt, Artificial Sequence
  Description of Artificial Sequence: Synthetic oligonucleotide
caggguuuauucguguaua

SEQ ID NO: 1450139 - RNA, 19 nt, Artificial Sequence
  Description of Artificial Sequence: Synthetic oligonucleotide
ccucgaugagccaggucgc

SEQ ID NO: 1450140 - RNA, 19 nt, Artificial Sequence
  Description of Artificial Sequence: Synthetic oligonucleotide
uuacuguccuugguaccuu

SEQ ID NO: 1450141 - RNA, 19 nt, Artificial Sequence
  Description of Artificial Sequence: Synthetic oligonucleotide
gcucgaggcggacaauuuc

SEQ ID NO: 1450142 - RNA, 19 nt, Artificial Sequence
  Description of Artificial Sequence: Synthetic oligonucleotide
ucgaugagccaggucgcuu

SEQ ID NO: 1450143 - RNA, 19 nt, Artificial Sequence
  Description of Artificial Sequence: Synthetic oligonucleotide
gaccuauagcuugggcuaa

SEQ ID NO: 1450144 - RNA, 19 nt, Artificial Sequence
  Description of Artificial Sequence: Synthetic oligonucleotide
ugggccgcucgcugagaga

SEQ ID NO: 1450145 - RNA, 19 nt, Artificial Sequence
  Description of Artificial Sequence: Synthetic oligonucleotide
cuuuugcucgaggcggaca

SEQ ID NO: 1450146 - RNA, 19 nt, Artificial Sequence
  Description of Artificial Sequence: Synthetic oligonucleotide
gggagcugccucgaugagc

SEQ ID NO: 1450147 - RNA, 19 nt, Artificial Sequence
  Description of Artificial Sequence: Synthetic oligonucleotide
gggccgcucgcugagagac

SEQ ID NO: 1450148 - RNA, 19 nt, Artificial Sequence
  Description of Artificial Sequence: Synthetic oligonucleotide
uuugcucgaggcggacaau

SEQ ID NO: 1450149 - RNA, 19 nt, Artificial Sequence
  Description of Artificial Sequence: Synthetic oligonucleotide
gcucccagaaccguaucuc

SEQ ID NO: 1450150 - RNA, 19 nt, Artificial Sequence
  Description of Artificial Sequence: Synthetic oligonucleotide
cagugcacagggcguccac

SEQ ID NO: 1450151 - RNA, 19 nt, Artificial Sequence
  Description of Artificial Sequence: Synthetic oligonucleotide
cgucacuagcauacugccc

SEQ ID NO: 1450152 - RNA, 19 nt, Artificial Sequence
  Description of Artificial Sequence: Synthetic oligonucleotide
cagaaccguaucucugucu

SEQ ID NO: 1450153 - RNA, 19 nt, Artificial Sequence
  Description of Artificial Sequence: Synthetic oligonucleotide
cugccuaaacucagcuucu

SEQ ID NO: 1450154 - RNA, 19 nt, Artificial Sequence
  Description of Artificial Sequence: Synthetic oligonucleotide
guguggugccaagugucuc

SEQ ID NO: 1450155 - RNA, 19 nt, Artificial Sequence
  Description of Artificial Sequence: Synthetic oligonucleotide
gccucuauuucagugggcu

SEQ ID NO: 1450156 - RNA, 19 nt, Artificial Sequence
  Description of Artificial Sequence: Synthetic oligonucleotide
uggcgccuccugugaaggu

SEQ ID NO: 1450157 - RNA, 19 nt, Artificial Sequence
  Description of Artificial Sequence: Synthetic oligonucleotide
ccaggucgcuucagggacc

SEQ ID NO: 1450158 - RNA, 19 nt, Artificial Sequence
  Description of Artificial Sequence: Synthetic oligonucleotide
gcucugucgguacaaaguu

SEQ ID NO: 1450159 - RNA, 19 nt, Artificial Sequence
  Description of Artificial Sequence: Synthetic oligonucleotide
cucagugucucuccauuuu

SEQ ID NO: 1450160 - RNA, 19 nt, Artificial Sequence
  Description of Artificial Sequence: Synthetic oligonucleotide
acuggggagcugccucgau

SEQ ID NO: 1450161 - RNA, 19 nt, Artificial Sequence
  Description of Artificial Sequence: Synthetic oligonucleotide
gugaucgggagaggacaca

SEQ ID NO: 1450162 - RNA, 19 nt, Artificial Sequence
  Description of Artificial Sequence: Synthetic oligonucleotide
ugucugccugggaggccuc

SEQ ID NO: 1450163 - RNA, 19 nt, Artificial Sequence
  Description of Artificial Sequence: Synthetic oligonucleotide
cgcugucugaggugggccg

SEQ ID NO: 1450164 - RNA, 19 nt, Artificial Sequence
  Description of Artificial Sequence: Synthetic oligonucleotide
ggguucugcagaauacgaa

SEQ ID NO: 1450165 - RNA, 19 nt, Artificial Sequence
  Description of Artificial Sequence: Synthetic oligonucleotide
ccccacuuguuuaaggaua

SEQ ID NO: 1450166 - RNA, 19 nt, Artificial Sequence
  Description of Artificial Sequence: Synthetic oligonucleotide
ggaacagacccuguucagu

SEQ ID NO: 1450167 - RNA, 19 nt, Artificial Sequence
  Description of Artificial Sequence: Synthetic oligonucleotide
augccguucuccagccgca

SEQ ID NO: 1450168 - RNA, 19 nt, Artificial Sequence
  Description of Artificial Sequence: Synthetic oligonucleotide
cucucagugucucuccauu

SEQ ID NO: 1450169 - RNA, 19 nt, Artificial Sequence
  Description of Artificial Sequence: Synthetic oligonucleotide
gaccugcgccuccucaacu

SEQ ID NO: 1450170 - RNA, 19 nt, Artificial Sequence
  Description of Artificial Sequence: Synthetic oligonucleotide
gcuguacgucacuagcaua

SEQ ID NO: 1450171 - RNA, 19 nt, Artificial Sequence
  Description of Artificial Sequence: Synthetic oligonucleotide
cguguucagcaucagugca

SEQ ID NO: 1450172 - RNA, 19 nt, Artificial Sequence
  Description of Artificial Sequence: Synthetic oligonucleotide
ugucugaggugggccgcuc

SEQ ID NO: 1450173 - RNA, 19 nt, Artificial Sequence
  Description of Artificial Sequence: Synthetic oligonucleotide
gacggcccaguccgucgca

SEQ ID NO: 1450174 - RNA, 19 nt, Artificial Sequence
  Description of Artificial Sequence: Synthetic oligonucleotide
ccgcuugguggccugcccc

SEQ ID NO: 1450175 - RNA, 19 nt, Artificial Sequence
  Description of Artificial Sequence: Synthetic oligonucleotide
cgcucugaugccguucucc

SEQ ID NO: 1450176 - RNA, 19 nt, Artificial Sequence
  Description of Artificial Sequence: Synthetic oligonucleotide
cagggacccagacuggaau

SEQ ID NO: 1450177 - RNA, 19 nt, Artificial Sequence
  Description of Artificial Sequence: Synthetic oligonucleotide
ggcgccuccugugaagguc

SEQ ID NO: 1450178 - RNA, 19 nt, Artificial Sequence
  Description of Artificial Sequence: Synthetic oligonucleotide
cacagggcguccacguggu

SEQ ID NO: 1450179 - RNA, 19 nt, Artificial Sequence
  Description of Artificial Sequence: Synthetic oligonucleotide
uccccgucugcuggaugaa

SEQ ID NO: 1450180 - RNA, 19 nt, Artificial Sequence
  Description of Artificial Sequence: Synthetic oligonucleotide
caccgcucugaugccguuc

SEQ ID NO: 1450181 - RNA, 19 nt, Artificial Sequence
  Description of Artificial Sequence: Synthetic oligonucleotide
gcucgcugagagacggccc

SEQ ID NO: 1450182 - RNA, 19 nt, Artificial Sequence
  Description of Artificial Sequence: Synthetic oligonucleotide
uuguccccgucugcuggau

SEQ ID NO: 1450183 - RNA, 19 nt, Artificial Sequence
  Description of Artificial Sequence: Synthetic oligonucleotide
ggcccaguccgucgcaaaa

SEQ ID NO: 1450184 - RNA, 19 nt, Artificial Sequence
  Description of Artificial Sequence: Synthetic oligonucleotide
ccagacuggaauuguacuu

SEQ ID NO: 1450185 - RNA, 19 nt, Artificial Sequence
  Description of Artificial Sequence: Synthetic oligonucleotide
guucgaucuguaguucauu

SEQ ID NO: 1450186 - RNA, 19 nt, Artificial Sequence
  Description of Artificial Sequence: Synthetic oligonucleotide
gcuggacaacaugucaaua

SEQ ID NO: 1450187 - RNA, 19 nt, Artificial Sequence
  Description of Artificial Sequence: Synthetic oligonucleotide
cccagaaccguaucucugu

SEQ ID NO: 1450188 - RNA, 19 nt, Artificial Sequence
  Description of Artificial Sequence: Synthetic oligonucleotide
ccggaucagccuccuuagc

SEQ ID NO: 1450189 - RNA, 19 nt, Artificial Sequence
  Description of Artificial Sequence: Synthetic oligonucleotide
ccacgugguuugugaucgg

SEQ ID NO: 1450190 - RNA, 19 nt, Artificial Sequence
  Description of Artificial Sequence: Synthetic oligonucleotide
cgcucgcugagagacggcc

SEQ ID NO: 1450191 - RNA, 19 nt, Artificial Sequence
  Description of Artificial Sequence: Synthetic oligonucleotide
cccacuuguuuaaggauau

SEQ ID NO: 1450192 - RNA, 19 nt, Artificial Sequence
  Description of Artificial Sequence: Synthetic oligonucleotide
ccacgcugucugagguggg

SEQ ID NO: 1450193 - RNA, 19 nt, Artificial Sequence
  Description of Artificial Sequence: Synthetic oligonucleotide
ccccugaccuuuucaaucu

SEQ ID NO: 1450194 - RNA, 19 nt, Artificial Sequence
  Description of Artificial Sequence: Synthetic oligonucleotide
gcgccuccugugaagguca

SEQ ID NO: 1450195 - RNA, 19 nt, Artificial Sequence
  Description of Artificial Sequence: Synthetic oligonucleotide
acggcccaguccgucgcaa

SEQ ID NO: 1450196 - RNA, 19 nt, Artificial Sequence
  Description of Artificial Sequence: Synthetic oligonucleotide
aggccgcaguuuggcuaag

SEQ ID NO: 1450197 - RNA, 19 nt, Artificial Sequence
  Description of Artificial Sequence: Synthetic oligonucleotide
ggccgcucgcugagagacg

SEQ ID NO: 1450198 - RNA, 19 nt, Artificial Sequence
  Description of Artificial Sequence: Synthetic oligonucleotide
cgaucucuacaucauuccu

SEQ ID NO: 1450199 - RNA, 19 nt, Artificial Sequence
  Description of Artificial Sequence: Synthetic oligonucleotide
guaccuuggcuggauccuu

SEQ ID NO: 1450200 - RNA, 19 nt, Artificial Sequence
  Description of Artificial Sequence: Synthetic oligonucleotide
cucgaugagccaggucgcu

SEQ ID NO: 1450201 - RNA, 19 nt, Artificial Sequence
  Description of Artificial Sequence: Synthetic oligonucleotide
cgcaguccgugacuuucug

SEQ ID NO: 1450202 - RNA, 19 nt, Artificial Sequence
  Description of Artificial Sequence: Synthetic oligonucleotide
caagaccacuuuccaucuu

SEQ ID NO: 1450203 - RNA, 19 nt, Artificial Sequence
  Description of Artificial Sequence: Synthetic oligonucleotide
ggacccagacuggaauggu

SEQ ID NO: 1450204 - RNA, 19 nt, Artificial Sequence
  Description of Artificial Sequence: Synthetic oligonucleotide
cgaagauuacuggggagcu

SEQ ID NO: 1450205 - RNA, 19 nt, Artificial Sequence
  Description of Artificial Sequence: Synthetic oligonucleotide
cguguggugccaagugucu

SEQ ID NO: 1450206 - RNA, 19 nt, Artificial Sequence
  Description of Artificial Sequence: Synthetic oligonucleotide
ccagaggagaugggguucu

SEQ ID NO: 1450207 - RNA, 19 nt, Artificial Sequence
  Description of Artificial Sequence: Synthetic oligonucleotide
gggauccgggccacgcugu

SEQ ID NO: 1450208 - RNA, 19 nt, Artificial Sequence
  Description of Artificial Sequence: Synthetic oligonucleotide
ggugggccgcucgcugaga

SEQ ID NO: 1450209 - RNA, 19 nt, Artificial Sequence
  Description of Artificial Sequence: Synthetic oligonucleotide
gccuccugugaaggucaga

SEQ ID NO: 1450210 - RNA, 19 nt, Artificial Sequence
  Description of Artificial Sequence: Synthetic oligonucleotide
caucagcccuuuggcgccu

SEQ ID NO: 1450211 - RNA, 19 nt, Artificial Sequence
  Description of Artificial Sequence: Synthetic oligonucleotide
gagccggaucagccuccuu

SEQ ID NO: 1450212 - RNA, 19 nt, Artificial Sequence
  Description of Artificial Sequence: Synthetic oligonucleotide
cggcccaguccgucgcaaa

SEQ ID NO: 1450213 - RNA, 19 nt, Artificial Sequence
  Description of Artificial Sequence: Synthetic oligonucleotide
ccgugacuuucugccggau

SEQ ID NO: 1450214 - RNA, 19 nt, Artificial Sequence
  Description of Artificial Sequence: Synthetic oligonucleotide
aagaaauaaagccacaucc

SEQ ID NO: 1450215 - RNA, 19 nt, Artificial Sequence
  Description of Artificial Sequence: Synthetic oligonucleotide
aaucgaaaacacuugcugc

SEQ ID NO: 1450216 - RNA, 19 nt, Artificial Sequence
  Description of Artificial Sequence: Synthetic oligonucleotide
gaauucauggcauacgagg

SEQ ID NO: 1450217 - RNA, 19 nt, Artificial Sequence
  Description of Artificial Sequence: Synthetic oligonucleotide
aaagagcuuguccacgacc

SEQ ID NO: 1450218 - RNA, 19 nt, Artificial Sequence
  Description of Artificial Sequence: Synthetic oligonucleotide
aaucccacgugucuuuucc

SEQ ID NO: 1450219 - RNA, 19 nt, Artificial Sequence
  Description of Artificial Sequence: Synthetic oligonucleotide
acacauaucuccuggaaac

SEQ ID NO: 1450220 - RNA, 19 nt, Artificial Sequence
  Description of Artificial Sequence: Synthetic oligonucleotide
aaggcaaguaagcaacaac

SEQ ID NO: 1450221 - RNA, 19 nt, Artificial Sequence
  Description of Artificial Sequence: Synthetic oligonucleotide
gaauucacaugaaauaucc

SEQ ID NO: 1450222 - RNA, 19 nt, Artificial Sequence
  Description of Artificial Sequence: Synthetic oligonucleotide
uguaaauagauggauggcc

SEQ ID NO: 1450223 - RNA, 19 nt, Artificial Sequence
  Description of Artificial Sequence: Synthetic oligonucleotide
uucagaacggacuugcuug

SEQ ID NO: 1450224 - RNA, 19 nt, Artificial Sequence
  Description of Artificial Sequence: Synthetic oligonucleotide
uguaggacuuuaaugaagu

SEQ ID NO: 1450225 - RNA, 19 nt, Artificial Sequence
  Description of Artificial Sequence: Synthetic oligonucleotide
caaacacuaguguaaauag

SEQ ID NO: 1450226 - RNA, 19 nt, Artificial Sequence
  Description of Artificial Sequence: Synthetic oligonucleotide
ugaguugaaccacaguuug

SEQ ID NO: 1450227 - RNA, 19 nt, Artificial Sequence
  Description of Artificial Sequence: Synthetic oligonucleotide
ugugcauguaaacauccag

SEQ ID NO: 1450228 - RNA, 19 nt, Artificial Sequence
  Description of Artificial Sequence: Synthetic oligonucleotide
aauaaagccacauccucau

SEQ ID NO: 1450229 - RNA, 19 nt, Artificial Sequence
  Description of Artificial Sequence: Synthetic oligonucleotide
aggcaaguaagcaacaacc

SEQ ID NO: 1450230 - RNA, 19 nt, Artificial Sequence
  Description of Artificial Sequence: Synthetic oligonucleotide
ugcauguaaacauccagcc

SEQ ID NO: 1450231 - RNA, 19 nt, Artificial Sequence
  Description of Artificial Sequence: Synthetic oligonucleotide
agcaagucaacauuuguug

SEQ ID NO: 1450232 - RNA, 19 nt, Artificial Sequence
  Description of Artificial Sequence: Synthetic oligonucleotide
uaucuguugcucaucauca

SEQ ID NO: 1450233 - RNA, 19 nt, Artificial Sequence
  Description of Artificial Sequence: Synthetic oligonucleotide
aacuccgucauccacugug

SEQ ID NO: 1450234 - RNA, 19 nt, Artificial Sequence
  Description of Artificial Sequence: Synthetic oligonucleotide
aaggaauucacaugaaaua

SEQ ID NO: 1450235 - RNA, 19 nt, Artificial Sequence
  Description of Artificial Sequence: Synthetic oligonucleotide
uacaaucgaaaacacuugc

SEQ ID NO: 1450236 - RNA, 19 nt, Artificial Sequence
  Description of Artificial Sequence: Synthetic oligonucleotide
ugugguaaguagcuguaag

SEQ ID NO: 1450237 - RNA, 19 nt, Artificial Sequence
  Description of Artificial Sequence: Synthetic oligonucleotide
uucacaugaaauauccuuc

SEQ ID NO: 1450238 - RNA, 19 nt, Artificial Sequence
  Description of Artificial Sequence: Synthetic oligonucleotide
agaaacucaaacuuggguu

SEQ ID NO: 1450239 - RNA, 19 nt, Artificial Sequence
  Description of Artificial Sequence: Synthetic oligonucleotide
uuggcuaguacucccauga

SEQ ID NO: 1450240 - RNA, 19 nt, Artificial Sequence
  Description of Artificial Sequence: Synthetic oligonucleotide
ucaacauuuguugaacuug

SEQ ID NO: 1450241 - RNA, 19 nt, Artificial Sequence
  Description of Artificial Sequence: Synthetic oligonucleotide
uaagaugugcauguaaaca

SEQ ID NO: 1450242 - RNA, 19 nt, Artificial Sequence
  Description of Artificial Sequence: Synthetic oligonucleotide
aaauagauggauggccccg

SEQ ID NO: 1450243 - RNA, 19 nt, Artificial Sequence
  Description of Artificial Sequence: Synthetic oligonucleotide
uccugcaguaugaugggcg

SEQ ID NO: 1450244 - RNA, 19 nt, Artificial Sequence
  Description of Artificial Sequence: Synthetic oligonucleotide
uuuucuaauccacuccaac

SEQ ID NO: 1450245 - RNA, 19 nt, Artificial Sequence
  Description of Artificial Sequence: Synthetic oligonucleotide
aacggacuugcuuggcacc

SEQ ID NO: 1450246 - RNA, 19 nt, Artificial Sequence
  Description of Artificial Sequence: Synthetic oligonucleotide
acucgggaagcuuucuucc

SEQ ID NO: 1450247 - RNA, 19 nt, Artificial Sequence
  Description of Artificial Sequence: Synthetic oligonucleotide
aaguaaaucccacgugucu

SEQ ID NO: 1450248 - RNA, 19 nt, Artificial Sequence
  Description of Artificial Sequence: Synthetic oligonucleotide
aaccacaguuuguaggcuc

SEQ ID NO: 1450249 - RNA, 19 nt, Artificial Sequence
  Description of Artificial Sequence: Synthetic oligonucleotide
gacaauggcccauauuuug

SEQ ID NO: 1450250 - RNA, 19 nt, Artificial Sequence
  Description of Artificial Sequence: Synthetic oligonucleotide
aaaguaaaucccacguguc

SEQ ID NO: 1450251 - RNA, 19 nt, Artificial Sequence
  Description of Artificial Sequence: Synthetic oligonucleotide
uaacacccgaauuaggcug

SEQ ID NO: 1450252 - RNA, 19 nt, Artificial Sequence
  Description of Artificial Sequence: Synthetic oligonucleotide
cuuuaaugaagucuuccac

SEQ ID NO: 1450253 - RNA, 19 nt, Artificial Sequence
  Description of Artificial Sequence: Synthetic oligonucleotide
caaucgaaaacacuugcug

SEQ ID NO: 1450254 - RNA, 19 nt, Artificial Sequence
  Description of Artificial Sequence: Synthetic oligonucleotide
uuaggcugucaauuagugg

SEQ ID NO: 1450255 - RNA, 19 nt, Artificial Sequence
  Description of Artificial Sequence: Synthetic oligonucleotide
aucaaccucauguaggacu

SEQ ID NO: 1450256 - RNA, 19 nt, Artificial Sequence
  Description of Artificial Sequence: Synthetic oligonucleotide
uuucuagcagagugggugg

SEQ ID NO: 1450257 - RNA, 19 nt, Artificial Sequence
  Description of Artificial Sequence: Synthetic oligonucleotide
uuuguaggcucuucuguag

SEQ ID NO: 1450258 - RNA, 19 nt, Artificial Sequence
  Description of Artificial Sequence: Synthetic oligonucleotide
ucaacccagacacuggcca

SEQ ID NO: 1450259 - RNA, 19 nt, Artificial Sequence
  Description of Artificial Sequence: Synthetic oligonucleotide
cagugcuugcuguagaccg

SEQ ID NO: 1450260 - RNA, 19 nt, Artificial Sequence
  Description of Artificial Sequence: Synthetic oligonucleotide
uuucaacccagacacuggc

SEQ ID NO: 1450261 - RNA, 19 nt, Artificial Sequence
  Description of Artificial Sequence: Synthetic oligonucleotide
agauggauggccccggauc

SEQ ID NO: 1450262 - RNA, 19 nt, Artificial Sequence
  Description of Artificial Sequence: Synthetic oligonucleotide
ucuaauccacuccaacaug

SEQ ID NO: 1450263 - RNA, 19 nt, Artificial Sequence
  Description of Artificial Sequence: Synthetic oligonucleotide
cauauucccuaaaauuccc

SEQ ID NO: 1450264 - RNA, 19 nt, Artificial Sequence
  Description of Artificial Sequence: Synthetic oligonucleotide
aaacaagccauauucccua

SEQ ID NO: 1450265 - RNA, 19 nt, Artificial Sequence
  Description of Artificial Sequence: Synthetic oligonucleotide
ucaucauccgagcuggacu

SEQ ID NO: 1450266 - RNA, 19 nt, Artificial Sequence
  Description of Artificial Sequence: Synthetic oligonucleotide
ugcacaauugcuugaacuc

SEQ ID NO: 1450267 - RNA, 19 nt, Artificial Sequence
  Description of Artificial Sequence: Synthetic oligonucleotide
uggaugagcccgcagagga

SEQ ID NO: 1450268 - RNA, 19 nt, Artificial Sequence
  Description of Artificial Sequence: Synthetic oligonucleotide
acuuaacuggcccuccuuc

SEQ ID NO: 1450269 - RNA, 19 nt, Artificial Sequence
  Description of Artificial Sequence: Synthetic oligonucleotide
guuucuagcagagugggug

SEQ ID NO: 1450270 - RNA, 19 nt, Artificial Sequence
  Description of Artificial Sequence: Synthetic oligonucleotide
aucgaaaacacuugcugcu

SEQ ID NO: 1450271 - RNA, 19 nt, Artificial Sequence
  Description of Artificial Sequence: Synthetic oligonucleotide
acucccaugaauaugucag

SEQ ID NO: 1450272 - RNA, 19 nt, Artificial Sequence
  Description of Artificial Sequence: Synthetic oligonucleotide
aauucauggcauacgaggu

SEQ ID NO: 1450273 - RNA, 19 nt, Artificial Sequence
  Description of Artificial Sequence: Synthetic oligonucleotide
gauggauggccccggaucc

SEQ ID NO: 1450274 - RNA, 19 nt, Artificial Sequence
  Description of Artificial Sequence: Synthetic oligonucleotide
aaaacagaguuuauucccu

SEQ ID NO: 1450275 - RNA, 19 nt, Artificial Sequence
  Description of Artificial Sequence: Synthetic oligonucleotide
ucagaacggacuugcuugg

SEQ ID NO: 1450276 - RNA, 19 nt, Artificial Sequence
  Description of Artificial Sequence: Synthetic oligonucleotide
acuuucaggugugacaauc

SEQ ID NO: 1450277 - RNA, 19 nt, Artificial Sequence
  Description of Artificial Sequence: Synthetic oligonucleotide
aguacucccaugaauaugu

SEQ ID NO: 1450278 - RNA, 19 nt, Artificial Sequence
  Description of Artificial Sequence: Synthetic oligonucleotide
ugguuucuagcagaguggg

SEQ ID NO: 1450279 - RNA, 19 nt, Artificial Sequence
  Description of Artificial Sequence: Synthetic oligonucleotide
ucaugguuuccuuuguuaa

SEQ ID NO: 1450280 - RNA, 19 nt, Artificial Sequence
  Description of Artificial Sequence: Synthetic oligonucleotide
cuaucuguugcucaucauc

SEQ ID NO: 1450281 - RNA, 19 nt, Artificial Sequence
  Description of Artificial Sequence: Synthetic oligonucleotide
aauuaguggaagauccacu

SEQ ID NO: 1450282 - RNA, 19 nt, Artificial Sequence
  Description of Artificial Sequence: Synthetic oligonucleotide
cugguuucuagcagagugg

SEQ ID NO: 1450283 - RNA, 19 nt, Artificial Sequence
  Description of Artificial Sequence: Synthetic oligonucleotide
uagaccgugcucccaaugc

SEQ ID NO: 1450284 - RNA, 19 nt, Artificial Sequence
  Description of Artificial Sequence: Synthetic oligonucleotide
cuuucaacccagacacugg

SEQ ID NO: 1450285 - RNA, 19 nt, Artificial Sequence
  Description of Artificial Sequence: Synthetic oligonucleotide
aguacacaggguacaaucg

SEQ ID NO: 1450286 - RNA, 19 nt, Artificial Sequence
  Description of Artificial Sequence: Synthetic oligonucleotide
uaucuccuggaaacaagcc

SEQ ID NO: 1450287 - RNA, 19 nt, Artificial Sequence
  Description of Artificial Sequence: Synthetic oligonucleotide
uggguuuuaagcugagccu

SEQ ID NO: 1450288 - RNA, 19 nt, Artificial Sequence
  Description of Artificial Sequence: Synthetic oligonucleotide
acuugucacuuucaggugu

SEQ ID NO: 1450289 - RNA, 19 nt, Artificial Sequence
  Description of Artificial Sequence: Synthetic oligonucleotide
aaaucccacgugucuuuuc

SEQ ID NO: 1450290 - RNA, 19 nt, Artificial Sequence
  Description of Artificial Sequence: Synthetic oligonucleotide
aagcaccugcccacgaucc

SEQ ID NO: 1450291 - RNA, 19 nt, Artificial Sequence
  Description of Artificial Sequence: Synthetic oligonucleotide
uugaguugaaccacaguuu

SEQ ID NO: 1450292 - RNA, 19 nt, Artificial Sequence
  Description of Artificial Sequence: Synthetic oligonucleotide
uuccagguuuucagaacgg

SEQ ID NO: 1450293 - RNA, 19 nt, Artificial Sequence
  Description of Artificial Sequence: Synthetic oligonucleotide
agaaauaaagccacauccu

SEQ ID NO: 1450294 - RNA, 19 nt, Artificial Sequence
  Description of Artificial Sequence: Synthetic oligonucleotide
guaagaugugcauguaaac

SEQ ID NO: 1450295 - RNA, 19 nt, Artificial Sequence
  Description of Artificial Sequence: Synthetic oligonucleotide
caguacacaggguacaauc

SEQ ID NO: 1450296 - RNA, 19 nt, Artificial Sequence
  Description of Artificial Sequence: Synthetic oligonucleotide
aggaauucacaugaaauau

SEQ ID NO: 1450297 - RNA, 19 nt, Artificial Sequence
  Description of Artificial Sequence: Synthetic oligonucleotide
cuuaagcggggacacuugg

SEQ ID NO: 1450298 - RNA, 19 nt, Artificial Sequence
  Description of Artificial Sequence: Synthetic oligonucleotide
aacauuuguugaacuugac

SEQ ID NO: 1450299 - RNA, 19 nt, Artificial Sequence
  Description of Artificial Sequence: Synthetic oligonucleotide
auucccuaaaauucccaca

SEQ ID NO: 1450300 - RNA, 19 nt, Artificial Sequence
  Description of Artificial Sequence: Synthetic oligonucleotide
aauggcccauauuuuguaa

SEQ ID NO: 1450301 - RNA, 19 nt, Artificial Sequence
  Description of Artificial Sequence: Synthetic oligonucleotide
ugguaaguagcuguaagau

SEQ ID NO: 1450302 - RNA, 19 nt, Artificial Sequence
  Description of Artificial Sequence: Synthetic oligonucleotide
uaaguagcuguaagaugug

SEQ ID NO: 1450303 - RNA, 19 nt, Artificial Sequence
  Description of Artificial Sequence: Synthetic oligonucleotide
uaagcggggacacuuggau

SEQ ID NO: 1450304 - RNA, 19 nt, Artificial Sequence
  Description of Artificial Sequence: Synthetic oligonucleotide
ugaugggcgggucaccagc

SEQ ID NO: 1450305 - RNA, 19 nt, Artificial Sequence
  Description of Artificial Sequence: Synthetic oligonucleotide
aaacacuaguguaaauaga

SEQ ID NO: 1450306 - RNA, 19 nt, Artificial Sequence
  Description of Artificial Sequence: Synthetic oligonucleotide
uuuacuuaacuggcccucc

SEQ ID NO: 1450307 - RNA, 19 nt, Artificial Sequence
  Description of Artificial Sequence: Synthetic oligonucleotide
uuuuacuuaacuggcccuc

SEQ ID NO: 1450308 - RNA, 19 nt, Artificial Sequence
  Description of Artificial Sequence: Synthetic oligonucleotide
agaugugcauguaaacauc

SEQ ID NO: 1450309 - RNA, 19 nt, Artificial Sequence
  Description of Artificial Sequence: Synthetic oligonucleotide
ugucaauuaguggaagauc

SEQ ID NO: 1450310 - RNA, 19 nt, Artificial Sequence
  Description of Artificial Sequence: Synthetic oligonucleotide
gaacggacuugcuuggcac

SEQ ID NO: 1450311 - RNA, 19 nt, Artificial Sequence
  Description of Artificial Sequence: Synthetic oligonucleotide
cauccauggacauauccca

SEQ ID NO: 1450312 - RNA, 19 nt, Artificial Sequence
  Description of Artificial Sequence: Synthetic oligonucleotide
acuaguguaaauagaugga

SEQ ID NO: 1450313 - RNA, 19 nt, Artificial Sequence
  Description of Artificial Sequence: Synthetic oligonucleotide
auuaggcugucaauuagug

SEQ ID NO: 1450314 - RNA, 19 nt, Artificial Sequence
  Description of Artificial Sequence: Synthetic oligonucleotide
uacucccaugaauauguca

SEQ ID NO: 1450315 - RNA, 19 nt, Artificial Sequence
  Description of Artificial Sequence: Synthetic oligonucleotide
gaggcgacggguuacgguc

SEQ ID NO: 1450316 - RNA, 19 nt, Artificial Sequence
  Description of Artificial Sequence: Synthetic oligonucleotide
uugaaaugcacaggaacau

SEQ ID NO: 1450317 - RNA, 19 nt, Artificial Sequence
  Description of Artificial Sequence: Synthetic oligonucleotide
uucaacccagacacuggcc

SEQ ID NO: 1450318 - RNA, 19 nt, Artificial Sequence
  Description of Artificial Sequence: Synthetic oligonucleotide
guuuauucccuggacagca

SEQ ID NO: 1450319 - RNA, 19 nt, Artificial Sequence
  Description of Artificial Sequence: Synthetic oligonucleotide
ugacaaucuggaugagccc

SEQ ID NO: 1450320 - RNA, 19 nt, Artificial Sequence
  Description of Artificial Sequence: Synthetic oligonucleotide
uuaagcggggacacuugga

SEQ ID NO: 1450321 - RNA, 19 nt, Artificial Sequence
  Description of Artificial Sequence: Synthetic oligonucleotide
aaucuggaugagcccgcag

SEQ ID NO: 1450322 - RNA, 19 nt, Artificial Sequence
  Description of Artificial Sequence: Synthetic oligonucleotide
cuugaguugaaccacaguu

SEQ ID NO: 1450323 - RNA, 19 nt, Artificial Sequence
  Description of Artificial Sequence: Synthetic oligonucleotide
ucccaugaauaugucagca

SEQ ID NO: 1450324 - RNA, 19 nt, Artificial Sequence
  Description of Artificial Sequence: Synthetic oligonucleotide
agcagccuuaaauucuuga

SEQ ID NO: 1450325 - RNA, 19 nt, Artificial Sequence
  Description of Artificial Sequence: Synthetic oligonucleotide
guacaaucgaaaacacuug

SEQ ID NO: 1450326 - RNA, 19 nt, Artificial Sequence
  Description of Artificial Sequence: Synthetic oligonucleotide
auguaggacuuuaaugaag

SEQ ID NO: 1450327 - RNA, 19 nt, Artificial Sequence
  Description of Artificial Sequence: Synthetic oligonucleotide
ggacuugucacuuucaggu

SEQ ID NO: 1450328 - RNA, 19 nt, Artificial Sequence
  Description of Artificial Sequence: Synthetic oligonucleotide
gacggguuacgguccaugc

SEQ ID NO: 1450329 - RNA, 19 nt, Artificial Sequence
  Description of Artificial Sequence: Synthetic oligonucleotide
gugguaaguagcuguaaga

SEQ ID NO: 1450330 - RNA, 19 nt, Artificial Sequence
  Description of Artificial Sequence: Synthetic oligonucleotide
cugacaauggcccauauuu

SEQ ID NO: 1450331 - RNA, 19 nt, Artificial Sequence
  Description of Artificial Sequence: Synthetic oligonucleotide
cauccacugugguaaguag

SEQ ID NO: 1450332 - RNA, 19 nt, Artificial Sequence
  Description of Artificial Sequence: Synthetic oligonucleotide
agaacggacuugcuuggca

SEQ ID NO: 1450333 - RNA, 19 nt, Artificial Sequence
  Description of Artificial Sequence: Synthetic oligonucleotide
agaggcuagcacugucuuc

SEQ ID NO: 1450334 - RNA, 19 nt, Artificial Sequence
  Description of Artificial Sequence: Synthetic oligonucleotide
uaguacucccaugaauaug

SEQ ID NO: 1450335 - RNA, 19 nt, Artificial Sequence
  Description of Artificial Sequence: Synthetic oligonucleotide
cagaguuuauucccuggac

SEQ ID NO: 1450336 - RNA, 19 nt, Artificial Sequence
  Description of Artificial Sequence: Synthetic oligonucleotide
agguuuucagaacggacuu

SEQ ID NO: 1450337 - RNA, 19 nt, Artificial Sequence
  Description of Artificial Sequence: Synthetic oligonucleotide
cccuaaaauucccacacag

SEQ ID NO: 1450338 - RNA, 19 nt, Artificial Sequence
  Description of Artificial Sequence: Synthetic oligonucleotide
aggguacaaucgaaaacac

SEQ ID NO: 1450339 - RNA, 19 nt, Artificial Sequence
  Description of Artificial Sequence: Synthetic oligonucleotide
auccacuccaacaugaguu

SEQ ID NO: 1450340 - RNA, 19 nt, Artificial Sequence
  Description of Artificial Sequence: Synthetic oligonucleotide
uucauauggaagucaucuu

SEQ ID NO: 1450341 - RNA, 19 nt, Artificial Sequence
  Description of Artificial Sequence: Synthetic oligonucleotide
ucccuaaaauucccacaca

SEQ ID NO: 1450342 - RNA, 19 nt, Artificial Sequence
  Description of Artificial Sequence: Synthetic oligonucleotide
ugcaguaugaugggcgggu

SEQ ID NO: 1450343 - RNA, 19 nt, Artificial Sequence
  Description of Artificial Sequence: Synthetic oligonucleotide
gugggucugagucacacaa

SEQ ID NO: 1450344 - RNA, 19 nt, Artificial Sequence
  Description of Artificial Sequence: Synthetic oligonucleotide
aacaagccauauucccuaa

SEQ ID NO: 1450345 - RNA, 19 nt, Artificial Sequence
  Description of Artificial Sequence: Synthetic oligonucleotide
aguaaaucccacgugucuu

SEQ ID NO: 1450346 - RNA, 19 nt, Artificial Sequence
  Description of Artificial Sequence: Synthetic oligonucleotide
uucuagcagaguggguggg

SEQ ID NO: 1450347 - RNA, 19 nt, Artificial Sequence
  Description of Artificial Sequence: Synthetic oligonucleotide
ugguccggaagcugaggag

SEQ ID NO: 1450348 - RNA, 19 nt, Artificial Sequence
  Description of Artificial Sequence: Synthetic oligonucleotide
ggauuuggcuaguacuccc

SEQ ID NO: 1450349 - RNA, 19 nt, Artificial Sequence
  Description of Artificial Sequence: Synthetic oligonucleotide
cacucgggaagcuuucuuc

SEQ ID NO: 1450350 - RNA, 19 nt, Artificial Sequence
  Description of Artificial Sequence: Synthetic oligonucleotide
ucugacaauggcccauauu

SEQ ID NO: 1450351 - RNA, 19 nt, Artificial Sequence
  Description of Artificial Sequence: Synthetic oligonucleotide
acccgaauuaggcugucaa

SEQ ID NO: 1450352 - RNA, 19 nt, Artificial Sequence
  Description of Artificial Sequence: Synthetic oligonucleotide
gacauaucccagacucugc

SEQ ID NO: 1450353 - RNA, 19 nt, Artificial Sequence
  Description of Artificial Sequence: Synthetic oligonucleotide
uccagguuuucagaacgga

SEQ ID NO: 1450354 - RNA, 19 nt, Artificial Sequence
  Description of Artificial Sequence: Synthetic oligonucleotide
gggucugagucacacaaac

SEQ ID NO: 1450355 - RNA, 19 nt, Artificial Sequence
  Description of Artificial Sequence: Synthetic oligonucleotide
cuuaacuggcccuccuuca

SEQ ID NO: 1450356 - RNA, 19 nt, Artificial Sequence
  Description of Artificial Sequence: Synthetic oligonucleotide
acgaccuccccaccuucac

SEQ ID NO: 1450357 - RNA, 19 nt, Artificial Sequence
  Description of Artificial Sequence: Synthetic oligonucleotide
caagccauauucccuaaaa

SEQ ID NO: 1450358 - RNA, 19 nt, Artificial Sequence
  Description of Artificial Sequence: Synthetic oligonucleotide
cucguccuccugaucacag

SEQ ID NO: 1450359 - RNA, 19 nt, Artificial Sequence
  Description of Artificial Sequence: Synthetic oligonucleotide
aacacccgaauuaggcugu

SEQ ID NO: 1450360 - RNA, 19 nt, Artificial Sequence
  Description of Artificial Sequence: Synthetic oligonucleotide
uccuuuguuaaugccugaa

SEQ ID NO: 1450361 - RNA, 19 nt, Artificial Sequence
  Description of Artificial Sequence: Synthetic oligonucleotide
cuucagcaagcucuaucug

SEQ ID NO: 1450362 - RNA, 19 nt, Artificial Sequence
  Description of Artificial Sequence: Synthetic oligonucleotide
uguaggcucuucuguaguu

SEQ ID NO: 1450363 - RNA, 19 nt, Artificial Sequence
  Description of Artificial Sequence: Synthetic oligonucleotide
cugcugguuucuagcagag

SEQ ID NO: 1450364 - RNA, 19 nt, Artificial Sequence
  Description of Artificial Sequence: Synthetic oligonucleotide
auuuggcuaguacucccau

SEQ ID NO: 1450365 - RNA, 19 nt, Artificial Sequence
  Description of Artificial Sequence: Synthetic oligonucleotide
gauuuggcuaguacuccca

SEQ ID NO: 1450366 - RNA, 19 nt, Artificial Sequence
  Description of Artificial Sequence: Synthetic oligonucleotide
guaacacccgaauuaggcu

SEQ ID NO: 1450367 - RNA, 19 nt, Artificial Sequence
  Description of Artificial Sequence: Synthetic oligonucleotide
cucccaaugcagucucccc

SEQ ID NO: 1450368 - RNA, 19 nt, Artificial Sequence
  Description of Artificial Sequence: Synthetic oligonucleotide
gucaugguuuccuuuguua

SEQ ID NO: 1450369 - RNA, 19 nt, Artificial Sequence
  Description of Artificial Sequence: Synthetic oligonucleotide
ucgaaaacacuugcugcuc

SEQ ID NO: 1450370 - RNA, 19 nt, Artificial Sequence
  Description of Artificial Sequence: Synthetic oligonucleotide
gaccgugcucccaaugcag

SEQ ID NO: 1450371 - RNA, 19 nt, Artificial Sequence
  Description of Artificial Sequence: Synthetic oligonucleotide
ucuaucuguugcucaucau

SEQ ID NO: 1450372 - RNA, 19 nt, Artificial Sequence
  Description of Artificial Sequence: Synthetic oligonucleotide
gacgccgaagagccagugc

SEQ ID NO: 1450373 - RNA, 19 nt, Artificial Sequence
  Description of Artificial Sequence: Synthetic oligonucleotide
auggcauacgaggucaaaa

SEQ ID NO: 1450374 - RNA, 19 nt, Artificial Sequence
  Description of Artificial Sequence: Synthetic oligonucleotide
auauucccuaaaauuccca

SEQ ID NO: 1450375 - RNA, 19 nt, Artificial Sequence
  Description of Artificial Sequence: Synthetic oligonucleotide
ugcuguagaccgugcuccc

SEQ ID NO: 1450376 - RNA, 19 nt, Artificial Sequence
  Description of Artificial Sequence: Synthetic oligonucleotide
guagaccgugcucccaaug

SEQ ID NO: 1450377 - RNA, 19 nt, Artificial Sequence
  Description of Artificial Sequence: Synthetic oligonucleotide
ucacacucgggaagcuuuc

SEQ ID NO: 1450378 - RNA, 19 nt, Artificial Sequence
  Description of Artificial Sequence: Synthetic oligonucleotide
cacacauaucuccuggaaa

SEQ ID NO: 1450379 - RNA, 19 nt, Artificial Sequence
  Description of Artificial Sequence: Synthetic oligonucleotide
aaccucauguaggacuuua

SEQ ID NO: 1450380 - RNA, 19 nt, Artificial Sequence
  Description of Artificial Sequence: Synthetic oligonucleotide
caguaucaggacacugcac

SEQ ID NO: 1450381 - RNA, 19 nt, Artificial Sequence
  Description of Artificial Sequence: Synthetic oligonucleotide
aagcggggacacuuggauu

SEQ ID NO: 1450382 - RNA, 19 nt, Artificial Sequence
  Description of Artificial Sequence: Synthetic oligonucleotide
ccugcaguaugaugggcgg

SEQ ID NO: 1450383 - RNA, 19 nt, Artificial Sequence
  Description of Artificial Sequence: Synthetic oligonucleotide
uccgucauccacuguggua

SEQ ID NO: 1450384 - RNA, 19 nt, Artificial Sequence
  Description of Artificial Sequence: Synthetic oligonucleotide
uuggcaccuuccaguacac

SEQ ID NO: 1450385 - RNA, 19 nt, Artificial Sequence
  Description of Artificial Sequence: Synthetic oligonucleotide
caaagagcuuguccacgac

SEQ ID NO: 1450386 - RNA, 19 nt, Artificial Sequence
  Description of Artificial Sequence: Synthetic oligonucleotide
gcuaguacucccaugaaua

SEQ ID NO: 1450387 - RNA, 19 nt, Artificial Sequence
  Description of Artificial Sequence: Synthetic oligonucleotide
cugcacaauugcuugaacu

SEQ ID NO: 1450388 - RNA, 19 nt, Artificial Sequence
  Description of Artificial Sequence: Synthetic oligonucleotide
uucagguguuccuguccca

SEQ ID NO: 1450389 - RNA, 19 nt, Artificial Sequence
  Description of Artificial Sequence: Synthetic oligonucleotide
cuguaagaugugcauguaa

SEQ ID NO: 1450390 - RNA, 19 nt, Artificial Sequence
  Description of Artificial Sequence: Synthetic oligonucleotide
uaucaaccucauguaggac

SEQ ID NO: 1450391 - RNA, 19 nt, Artificial Sequence
  Description of Artificial Sequence: Synthetic oligonucleotide
ggauccuuucaacccagac

SEQ ID NO: 1450392 - RNA, 19 nt, Artificial Sequence
  Description of Artificial Sequence: Synthetic oligonucleotide
agucaugguuuccuuuguu

SEQ ID NO: 1450393 - RNA, 19 nt, Artificial Sequence
  Description of Artificial Sequence: Synthetic oligonucleotide
ucauccgagcuggacuugu

SEQ ID NO: 1450394 - RNA, 19 nt, Artificial Sequence
  Description of Artificial Sequence: Synthetic oligonucleotide
ugggccgcggaggcgacgg

SEQ ID NO: 1450395 - RNA, 19 nt, Artificial Sequence
  Description of Artificial Sequence: Synthetic oligonucleotide
ugggucugagucacacaaa

SEQ ID NO: 1450396 - RNA, 19 nt, Artificial Sequence
  Description of Artificial Sequence: Synthetic oligonucleotide
guugguccggaagcugagg

SEQ ID NO: 1450397 - RNA, 19 nt, Artificial Sequence
  Description of Artificial Sequence: Synthetic oligonucleotide
ucuagcagagugggugggu

SEQ ID NO: 1450398 - RNA, 19 nt, Artificial Sequence
  Description of Artificial Sequence: Synthetic oligonucleotide
uggcuaguacucccaugaa

SEQ ID NO: 1450399 - RNA, 19 nt, Artificial Sequence
  Description of Artificial Sequence: Synthetic oligonucleotide
cugagccuucacacucggg

SEQ ID NO: 1450400 - RNA, 19 nt, Artificial Sequence
  Description of Artificial Sequence: Synthetic oligonucleotide
ucccuuagucaugguuucc

SEQ ID NO: 1450401 - RNA, 19 nt, Artificial Sequence
  Description of Artificial Sequence: Synthetic oligonucleotide
agaaaggaauucacaugaa

SEQ ID NO: 1450402 - RNA, 19 nt, Artificial Sequence
  Description of Artificial Sequence: Synthetic oligonucleotide
uguagaccgugcucccaau

SEQ ID NO: 1450403 - RNA, 19 nt, Artificial Sequence
  Description of Artificial Sequence: Synthetic oligonucleotide
aggcgacggguuacggucc

SEQ ID NO: 1450404 - RNA, 19 nt, Artificial Sequence
  Description of Artificial Sequence: Synthetic oligonucleotide
uguaaacauccagcccuuc

SEQ ID NO: 1450405 - RNA, 19 nt, Artificial Sequence
  Description of Artificial Sequence: Synthetic oligonucleotide
augugcauguaaacaucca

SEQ ID NO: 1450406 - RNA, 19 nt, Artificial Sequence
  Description of Artificial Sequence: Synthetic oligonucleotide
cugcaguaugaugggcggg

SEQ ID NO: 1450407 - RNA, 19 nt, Artificial Sequence
  Description of Artificial Sequence: Synthetic oligonucleotide
acgauccucauagcugcug

SEQ ID NO: 1450408 - RNA, 19 nt, Artificial Sequence
  Description of Artificial Sequence: Synthetic oligonucleotide
acacaggguacaaucgaaa

SEQ ID NO: 1450409 - RNA, 19 nt, Artificial Sequence
  Description of Artificial Sequence: Synthetic oligonucleotide
caauggcccauauuuugua

SEQ ID NO: 1450410 - RNA, 19 nt, Artificial Sequence
  Description of Artificial Sequence: Synthetic oligonucleotide
acggacuugcuuggcaccu

SEQ ID NO: 1450411 - RNA, 19 nt, Artificial Sequence
  Description of Artificial Sequence: Synthetic oligonucleotide
acacucgggaagcuuucuu

SEQ ID NO: 1450412 - RNA, 19 nt, Artificial Sequence
  Description of Artificial Sequence: Synthetic oligonucleotide
cucgggaagcuuucuucca

SEQ ID NO: 1450413 - RNA, 19 nt, Artificial Sequence
  Description of Artificial Sequence: Synthetic oligonucleotide
caguaugaugggcggguca

SEQ ID NO: 1450414 - RNA, 19 nt, Artificial Sequence
  Description of Artificial Sequence: Synthetic oligonucleotide
cuaguacucccaugaauau

SEQ ID NO: 1450415 - RNA, 19 nt, Artificial Sequence
  Description of Artificial Sequence: Synthetic oligonucleotide
gccccggauccuuucaacc

SEQ ID NO: 1450416 - RNA, 19 nt, Artificial Sequence
  Description of Artificial Sequence: Synthetic oligonucleotide
ccaguaucaggacacugca

SEQ ID NO: 1450417 - RNA, 19 nt, Artificial Sequence
  Description of Artificial Sequence: Synthetic oligonucleotide
guaugaugggcgggucacc

SEQ ID NO: 1450418 - RNA, 19 nt, Artificial Sequence
  Description of Artificial Sequence: Synthetic oligonucleotide
cagcaagucaacauuuguu

SEQ ID NO: 1450419 - RNA, 19 nt, Artificial Sequence
  Description of Artificial Sequence: Synthetic oligonucleotide
cuuagucaugguuuccuuu

SEQ ID NO: 1450420 - RNA, 19 nt, Artificial Sequence
  Description of Artificial Sequence: Synthetic oligonucleotide
cuguagaccgugcucccaa

SEQ ID NO: 1450421 - RNA, 19 nt, Artificial Sequence
  Description of Artificial Sequence: Synthetic oligonucleotide
cugucaauuaguggaagau

SEQ ID NO: 1450422 - RNA, 19 nt, Artificial Sequence
  Description of Artificial Sequence: Synthetic oligonucleotide
auaugucagcagccuuaaa

SEQ ID NO: 1450423 - RNA, 19 nt, Artificial Sequence
  Description of Artificial Sequence: Synthetic oligonucleotide
ugcccacgauccucauagc

SEQ ID NO: 1450424 - RNA, 19 nt, Artificial Sequence
  Description of Artificial Sequence: Synthetic oligonucleotide
ggcugucaauuaguggaag

SEQ ID NO: 1450425 - RNA, 19 nt, Artificial Sequence
  Description of Artificial Sequence: Synthetic oligonucleotide
ugcugguuucuagcagagu

SEQ ID NO: 1450426 - RNA, 19 nt, Artificial Sequence
  Description of Artificial Sequence: Synthetic oligonucleotide
aggcugucaauuaguggaa

SEQ ID NO: 1450427 - RNA, 19 nt, Artificial Sequence
  Description of Artificial Sequence: Synthetic oligonucleotide
acacccgaauuaggcuguc

SEQ ID NO: 1450428 - RNA, 19 nt, Artificial Sequence
  Description of Artificial Sequence: Synthetic oligonucleotide
accgugcucccaaugcagu

SEQ ID NO: 1450429 - RNA, 19 nt, Artificial Sequence
  Description of Artificial Sequence: Synthetic oligonucleotide
gaguugaaccacaguuugu

SEQ ID NO: 1450430 - RNA, 19 nt, Artificial Sequence
  Description of Artificial Sequence: Synthetic oligonucleotide
gguugguccggaagcugag

SEQ ID NO: 1450431 - RNA, 19 nt, Artificial Sequence
  Description of Artificial Sequence: Synthetic oligonucleotide
caccugcccacgauccuca

SEQ ID NO: 1450432 - RNA, 19 nt, Artificial Sequence
  Description of Artificial Sequence: Synthetic oligonucleotide
ggucugagucacacaaaca

SEQ ID NO: 1450433 - RNA, 19 nt, Artificial Sequence
  Description of Artificial Sequence: Synthetic oligonucleotide
ccgucauccacugugguaa

SEQ ID NO: 1450434 - RNA, 19 nt, Artificial Sequence
  Description of Artificial Sequence: Synthetic oligonucleotide
cacgaccuccccaccuuca

SEQ ID NO: 1450435 - RNA, 19 nt, Artificial Sequence
  Description of Artificial Sequence: Synthetic oligonucleotide
guccggaagcugaggaguc

SEQ ID NO: 1450436 - RNA, 19 nt, Artificial Sequence
  Description of Artificial Sequence: Synthetic oligonucleotide
ccuuuguuaaugccugaaa

SEQ ID NO: 1450437 - RNA, 19 nt, Artificial Sequence
  Description of Artificial Sequence: Synthetic oligonucleotide
ugggugggucugagucaca

SEQ ID NO: 1450438 - RNA, 19 nt, Artificial Sequence
  Description of Artificial Sequence: Synthetic oligonucleotide
ccaugaagcccugaugaca

SEQ ID NO: 1450439 - RNA, 19 nt, Artificial Sequence
  Description of Artificial Sequence: Synthetic oligonucleotide
ccgaagagccagugcuugc

SEQ ID NO: 1450440 - RNA, 19 nt, Artificial Sequence
  Description of Artificial Sequence: Synthetic oligonucleotide
ggcuaguacucccaugaau

SEQ ID NO: 1450441 - RNA, 19 nt, Artificial Sequence
  Description of Artificial Sequence: Synthetic oligonucleotide
guacucccaugaauauguc

SEQ ID NO: 1450442 - RNA, 19 nt, Artificial Sequence
  Description of Artificial Sequence: Synthetic oligonucleotide
gaugggcgggucaccagcu

SEQ ID NO: 1450443 - RNA, 19 nt, Artificial Sequence
  Description of Artificial Sequence: Synthetic oligonucleotide
gguccggaagcugaggagu

SEQ ID NO: 1450444 - RNA, 19 nt, Artificial Sequence
  Description of Artificial Sequence: Synthetic oligonucleotide
cugugguaaguagcuguaa

SEQ ID NO: 1450445 - RNA, 19 nt, Artificial Sequence
  Description of Artificial Sequence: Synthetic oligonucleotide
cauggcauacgaggucaaa

SEQ ID NO: 1450446 - RNA, 19 nt, Artificial Sequence
  Description of Artificial Sequence: Synthetic oligonucleotide
gcccacgauccucauagcu

SEQ ID NO: 1450447 - RNA, 19 nt, Artificial Sequence
  Description of Artificial Sequence: Synthetic oligonucleotide
gggguugguccggaagcug

SEQ ID NO: 1450448 - RNA, 19 nt, Artificial Sequence
  Description of Artificial Sequence: Synthetic oligonucleotide
ccgcagaggacgccgaaga

SEQ ID NO: 1450449 - RNA, 19 nt, Artificial Sequence
  Description of Artificial Sequence: Synthetic oligonucleotide
ccgugcucccaaugcaguc

SEQ ID NO: 1450450 - RNA, 19 nt, Artificial Sequence
  Description of Artificial Sequence: Synthetic oligonucleotide
gcggaggcgacggguuacg

SEQ ID NO: 1450451 - RNA, 19 nt, Artificial Sequence
  Description of Artificial Sequence: Synthetic oligonucleotide
ggaggcgacggguuacggu

SEQ ID NO: 1450452 - RNA, 19 nt, Artificial Sequence
  Description of Artificial Sequence: Synthetic oligonucleotide
aggacgccgaagagccagu

SEQ ID NO: 1450453 - RNA, 19 nt, Artificial Sequence
  Description of Artificial Sequence: Synthetic oligonucleotide
cgauccucauagcugcuga

SEQ ID NO: 1450454 - RNA, 19 nt, Artificial Sequence
  Description of Artificial Sequence: Synthetic oligonucleotide
ggacgccgaagagccagug

SEQ ID NO: 1450455 - RNA, 19 nt, Artificial Sequence
  Description of Artificial Sequence: Synthetic oligonucleotide
ccgaauuaggcugucaauu

SEQ ID NO: 1450456 - RNA, 19 nt, Artificial Sequence
  Description of Artificial Sequence: Synthetic oligonucleotide
ccucauguaggacuuuaau

SEQ ID NO: 1450457 - RNA, 19 nt, Artificial Sequence
  Description of Artificial Sequence: Synthetic oligonucleotide
accugcccacgauccucau

SEQ ID NO: 1450458 - RNA, 19 nt, Artificial Sequence
  Description of Artificial Sequence: Synthetic oligonucleotide
ggcgacggguuacggucca

SEQ ID NO: 1450459 - RNA, 19 nt, Artificial Sequence
  Description of Artificial Sequence: Synthetic oligonucleotide
cacccgaauuaggcuguca

SEQ ID NO: 1450460 - RNA, 19 nt, Artificial Sequence
  Description of Artificial Sequence: Synthetic oligonucleotide
caggugugacaaucuggau

SEQ ID NO: 1450461 - RNA, 19 nt, Artificial Sequence
  Description of Artificial Sequence: Synthetic oligonucleotide
gcuguaagaugugcaugua

SEQ ID NO: 1450462 - RNA, 19 nt, Artificial Sequence
  Description of Artificial Sequence: Synthetic oligonucleotide
cuccgucauccacuguggu

SEQ ID NO: 1450463 - RNA, 19 nt, Artificial Sequence
  Description of Artificial Sequence: Synthetic oligonucleotide
cccgcagaggacgccgaag

SEQ ID NO: 1450464 - RNA, 19 nt, Artificial Sequence
  Description of Artificial Sequence: Synthetic oligonucleotide
cacgauccucauagcugcu

SEQ ID NO: 1450465 - RNA, 19 nt, Artificial Sequence
  Description of Artificial Sequence: Synthetic oligonucleotide
gcggggacacuuggauuug

SEQ ID NO: 1450466 - RNA, 19 nt, Artificial Sequence
  Description of Artificial Sequence: Synthetic oligonucleotide
ggcgggucaccagcuuggc

SEQ ID NO: 1450467 - RNA, 19 nt, Artificial Sequence
  Description of Artificial Sequence: Synthetic oligonucleotide
gcgggucaccagcuuggca

SEQ ID NO: 1450468 - RNA, 19 nt, Artificial Sequence
  Description of Artificial Sequence: Synthetic oligonucleotide
gguuucuagcagagugggu

SEQ ID NO: 1450469 - RNA, 19 nt, Artificial Sequence
  Description of Artificial Sequence: Synthetic oligonucleotide
cacacucgggaagcuuucu

SEQ ID NO: 1450470 - RNA, 19 nt, Artificial Sequence
  Description of Artificial Sequence: Synthetic oligonucleotide
caacaaccugcugguuucu

SEQ ID NO: 1450471 - RNA, 19 nt, Artificial Sequence
  Description of Artificial Sequence: Synthetic oligonucleotide
gucaccagcuuggcagaau

SEQ ID NO: 1450472 - RNA, 19 nt, Artificial Sequence
  Description of Artificial Sequence: Synthetic oligonucleotide
cccgaauuaggcugucaau

SEQ ID NO: 1450473 - RNA, 19 nt, Artificial Sequence
  Description of Artificial Sequence: Synthetic oligonucleotide
ggucaccagcuuggcagaa

SEQ ID NO: 1450474 - RNA, 19 nt, Artificial Sequence
  Description of Artificial Sequence: Synthetic oligonucleotide
cggaggcgacggguuacgg

SEQ ID NO: 1450475 - RNA, 19 nt, Artificial Sequence
  Description of Artificial Sequence: Synthetic oligonucleotide
cgcggaggcgacggguuac

SEQ ID NO: 1450476 - RNA, 19 nt, Artificial Sequence
  Description of Artificial Sequence: Synthetic oligonucleotide
cgugcucccaaugcagucu

SEQ ID NO: 1450477 - RNA, 19 nt, Artificial Sequence
  Description of Artificial Sequence: Synthetic oligonucleotide
cggauccuuucaacccaga

SEQ ID NO: 1450478 - RNA, 19 nt, Artificial Sequence
  Description of Artificial Sequence: Synthetic oligonucleotide
caaccucauguaggacuuu

SEQ ID NO: 1450479 - RNA, 19 nt, Artificial Sequence
  Description of Artificial Sequence: Synthetic oligonucleotide
ccuucacacucgggaagcu

SEQ ID NO: 1450480 - RNA, 19 nt, Artificial Sequence
  Description of Artificial Sequence: Synthetic oligonucleotide
ccgcggaggcgacggguua

SEQ ID NO: 1450481 - RNA, 19 nt, Artificial Sequence
  Description of Artificial Sequence: Synthetic oligonucleotide
gccgcggaggcgacggguu

SEQ ID NO: 1450482 - RNA, 19 nt, Artificial Sequence
  Description of Artificial Sequence: Synthetic oligonucleotide
gcgacggguuacgguccau

SEQ ID NO: 1450483 - RNA, 19 nt, Artificial Sequence
  Description of Artificial Sequence: Synthetic oligonucleotide
aguugaaguagcuugaagg

SEQ ID NO: 1450484 - RNA, 19 nt, Artificial Sequence
  Description of Artificial Sequence: Synthetic oligonucleotide
augaguuugacuuuuacug

SEQ ID NO: 1450485 - RNA, 19 nt, Artificial Sequence
  Description of Artificial Sequence: Synthetic oligonucleotide
ugagcaauugauuucagug

SEQ ID NO: 1450486 - RNA, 19 nt, Artificial Sequence
  Description of Artificial Sequence: Synthetic oligonucleotide
acuuguaugaguuugacuu

SEQ ID NO: 1450487 - RNA, 19 nt, Artificial Sequence
  Description of Artificial Sequence: Synthetic oligonucleotide
uuaggaguugacccgaagg

SEQ ID NO: 1450488 - RNA, 19 nt, Artificial Sequence
  Description of Artificial Sequence: Synthetic oligonucleotide
agucucgugaaauuccucc

SEQ ID NO: 1450489 - RNA, 19 nt, Artificial Sequence
  Description of Artificial Sequence: Synthetic oligonucleotide
uauccuuugauguucgucc

SEQ ID NO: 1450490 - RNA, 19 nt, Artificial Sequence
  Description of Artificial Sequence: Synthetic oligonucleotide
acuuuguaguggcacaugc

SEQ ID NO: 1450491 - RNA, 19 nt, Artificial Sequence
  Description of Artificial Sequence: Synthetic oligonucleotide
gauguuaggaguugacccg

SEQ ID NO: 1450492 - RNA, 19 nt, Artificial Sequence
  Description of Artificial Sequence: Synthetic oligonucleotide
agcuuaucaagccagcuuc

SEQ ID NO: 1450493 - RNA, 19 nt, Artificial Sequence
  Description of Artificial Sequence: Synthetic oligonucleotide
aauaaaacgggcaggacca

SEQ ID NO: 1450494 - RNA, 19 nt, Artificial Sequence
  Description of Artificial Sequence: Synthetic oligonucleotide
ugaaguagcuugaaggcgc

SEQ ID NO: 1450495 - RNA, 19 nt, Artificial Sequence
  Description of Artificial Sequence: Synthetic oligonucleotide
uugucagaguuguugaacg

SEQ ID NO: 1450496 - RNA, 19 nt, Artificial Sequence
  Description of Artificial Sequence: Synthetic oligonucleotide
aaagguagggcuuccguug

SEQ ID NO: 1450497 - RNA, 19 nt, Artificial Sequence
  Description of Artificial Sequence: Synthetic oligonucleotide
guagacaucccguuuaucc

SEQ ID NO: 1450498 - RNA, 19 nt, Artificial Sequence
  Description of Artificial Sequence: Synthetic oligonucleotide
aucguaggcacugaggucc

SEQ ID NO: 1450499 - RNA, 19 nt, Artificial Sequence
  Description of Artificial Sequence: Synthetic oligonucleotide
gaagaagacccgcaguugg

SEQ ID NO: 1450500 - RNA, 19 nt, Artificial Sequence
  Description of Artificial Sequence: Synthetic oligonucleotide
aaaacgggcaggaccaucc

SEQ ID NO: 1450501 - RNA, 19 nt, Artificial Sequence
  Description of Artificial Sequence: Synthetic oligonucleotide
agcaauugauuucaguguc

SEQ ID NO: 1450502 - RNA, 19 nt, Artificial Sequence
  Description of Artificial Sequence: Synthetic oligonucleotide
acaaagggcacaauaaaac

SEQ ID NO: 1450503 - RNA, 19 nt, Artificial Sequence
  Description of Artificial Sequence: Synthetic oligonucleotide
uaauguguuaaggugagca

SEQ ID NO: 1450504 - RNA, 19 nt, Artificial Sequence
  Description of Artificial Sequence: Synthetic oligonucleotide
cagaggauaacugcgaucg

SEQ ID NO: 1450505 - RNA, 19 nt, Artificial Sequence
  Description of Artificial Sequence: Synthetic oligonucleotide
auaacugcgaucggaaucg

SEQ ID NO: 1450506 - RNA, 19 nt, Artificial Sequence
  Description of Artificial Sequence: Synthetic oligonucleotide
agagcaguguuacaucucg

SEQ ID NO: 1450507 - RNA, 19 nt, Artificial Sequence
  Description of Artificial Sequence: Synthetic oligonucleotide
agcaguguuacaucucggc

SEQ ID NO: 1450508 - RNA, 19 nt, Artificial Sequence
  Description of Artificial Sequence: Synthetic oligonucleotide
guucagggcccauagaugg

SEQ ID NO: 1450509 - RNA, 19 nt, Artificial Sequence
  Description of Artificial Sequence: Synthetic oligonucleotide
uugacuuuuacugccaacc

SEQ ID NO: 1450510 - RNA, 19 nt, Artificial Sequence
  Description of Artificial Sequence: Synthetic oligonucleotide
aauuaccagcuucaagaag

SEQ ID NO: 1450511 - RNA, 19 nt, Artificial Sequence
  Description of Artificial Sequence: Synthetic oligonucleotide
uggaguauauuuguacucg

SEQ ID NO: 1450512 - RNA, 19 nt, Artificial Sequence
  Description of Artificial Sequence: Synthetic oligonucleotide
ucuguaucacgccugggag

SEQ ID NO: 1450513 - RNA, 19 nt, Artificial Sequence
  Description of Artificial Sequence: Synthetic oligonucleotide
uugucuacucugccgaugg

SEQ ID NO: 1450514 - RNA, 19 nt, Artificial Sequence
  Description of Artificial Sequence: Synthetic oligonucleotide
ugggaguggagccauagcc

SEQ ID NO: 1450515 - RNA, 19 nt, Artificial Sequence
  Description of Artificial Sequence: Synthetic oligonucleotide
agggucauaacccugacaa

SEQ ID NO: 1450516 - RNA, 19 nt, Artificial Sequence
  Description of Artificial Sequence: Synthetic oligonucleotide
guugaaaucguacgaguag

SEQ ID NO: 1450517 - RNA, 19 nt, Artificial Sequence
  Description of Artificial Sequence: Synthetic oligonucleotide
aacuugucuacucugccga

SEQ ID NO: 1450518 - RNA, 19 nt, Artificial Sequence
  Description of Artificial Sequence: Synthetic oligonucleotide
uuugauguucgucccaucu

SEQ ID NO: 1450519 - RNA, 19 nt, Artificial Sequence
  Description of Artificial Sequence: Synthetic oligonucleotide
ucauaacccugacaaacag

SEQ ID NO: 1450520 - RNA, 19 nt, Artificial Sequence
  Description of Artificial Sequence: Synthetic oligonucleotide
ugaguuugacuuuuacugc

SEQ ID NO: 1450521 - RNA, 19 nt, Artificial Sequence
  Description of Artificial Sequence: Synthetic oligonucleotide
aacccuuaauguguuaagg

SEQ ID NO: 1450522 - RNA, 19 nt, Artificial Sequence
  Description of Artificial Sequence: Synthetic oligonucleotide
aaucggugagaaaagguag

SEQ ID NO: 1450523 - RNA, 19 nt, Artificial Sequence
  Description of Artificial Sequence: Synthetic oligonucleotide
ugauguucgucccaucuca

SEQ ID NO: 1450524 - RNA, 19 nt, Artificial Sequence
  Description of Artificial Sequence: Synthetic oligonucleotide
agacugaauuaccagcuuc

SEQ ID NO: 1450525 - RNA, 19 nt, Artificial Sequence
  Description of Artificial Sequence: Synthetic oligonucleotide
guacgaguaguccagcagg

SEQ ID NO: 1450526 - RNA, 19 nt, Artificial Sequence
  Description of Artificial Sequence: Synthetic oligonucleotide
agaguuguugaacgauccc

SEQ ID NO: 1450527 - RNA, 19 nt, Artificial Sequence
  Description of Artificial Sequence: Synthetic oligonucleotide
gauaacugcgaucggaauc

SEQ ID NO: 1450528 - RNA, 19 nt, Artificial Sequence
  Description of Artificial Sequence: Synthetic oligonucleotide
aauguugagggcagcuagc

SEQ ID NO: 1450529 - RNA, 19 nt, Artificial Sequence
  Description of Artificial Sequence: Synthetic oligonucleotide
ugcaaaucggugagaaaag

SEQ ID NO: 1450530 - RNA, 19 nt, Artificial Sequence
  Description of Artificial Sequence: Synthetic oligonucleotide
aaucguaggcacugagguc

SEQ ID NO: 1450531 - RNA, 19 nt, Artificial Sequence
  Description of Artificial Sequence: Synthetic oligonucleotide
ucuacucugccgauggagc

SEQ ID NO: 1450532 - RNA, 19 nt, Artificial Sequence
  Description of Artificial Sequence: Synthetic oligonucleotide
aguguuacaucucggccuc

SEQ ID NO: 1450533 - RNA, 19 nt, Artificial Sequence
  Description of Artificial Sequence: Synthetic oligonucleotide
agcaccuggcuccagcugc

SEQ ID NO: 1450534 - RNA, 19 nt, Artificial Sequence
  Description of Artificial Sequence: Synthetic oligonucleotide
acugccaacccuuaaugug

SEQ ID NO: 1450535 - RNA, 19 nt, Artificial Sequence
  Description of Artificial Sequence: Synthetic oligonucleotide
uacgaguaguccagcaggg

SEQ ID NO: 1450536 - RNA, 19 nt, Artificial Sequence
  Description of Artificial Sequence: Synthetic oligonucleotide
cuuccguugauguuaggag

SEQ ID NO: 1450537 - RNA, 19 nt, Artificial Sequence
  Description of Artificial Sequence: Synthetic oligonucleotide
aauguguuaaggugagcaa

SEQ ID NO: 1450538 - RNA, 19 nt, Artificial Sequence
  Description of Artificial Sequence: Synthetic oligonucleotide
uucuagauccagaggauaa

SEQ ID NO: 1450539 - RNA, 19 nt, Artificial Sequence
  Description of Artificial Sequence: Synthetic oligonucleotide
ucgcuucacaccuuggaag

SEQ ID NO: 1450540 - RNA, 19 nt, Artificial Sequence
  Description of Artificial Sequence: Synthetic oligonucleotide
aauuccggcugcucuuggg

SEQ ID NO: 1450541 - RNA, 19 nt, Artificial Sequence
  Description of Artificial Sequence: Synthetic oligonucleotide
aaaagguagggcuuccguu

SEQ ID NO: 1450542 - RNA, 19 nt, Artificial Sequence
  Description of Artificial Sequence: Synthetic oligonucleotide
uguacucggagccaucuuc

SEQ ID NO: 1450543 - RNA, 19 nt, Artificial Sequence
  Description of Artificial Sequence: Synthetic oligonucleotide
agagugugcaaaucgguga

SEQ ID NO: 1450544 - RNA, 19 nt, Artificial Sequence
  Description of Artificial Sequence: Synthetic oligonucleotide
aaucguacgaguaguccag

SEQ ID NO: 1450545 - RNA, 19 nt, Artificial Sequence
  Description of Artificial Sequence: Synthetic oligonucleotide
gaaaucguacgaguagucc

SEQ ID NO: 1450546 - RNA, 19 nt, Artificial Sequence
  Description of Artificial Sequence: Synthetic oligonucleotide
uguaucacgccugggagug

SEQ ID NO: 1450547 - RNA, 19 nt, Artificial Sequence
  Description of Artificial Sequence: Synthetic oligonucleotide
acuacuaggucagcagggc

SEQ ID NO: 1450548 - RNA, 19 nt, Artificial Sequence
  Description of Artificial Sequence: Synthetic oligonucleotide
caauguugagggcagcuag

SEQ ID NO: 1450549 - RNA, 19 nt, Artificial Sequence
  Description of Artificial Sequence: Synthetic oligonucleotide
ucgauagggagggagacug

SEQ ID NO: 1450550 - RNA, 19 nt, Artificial Sequence
  Description of Artificial Sequence: Synthetic oligonucleotide
ucuucgauagggagggaga

SEQ ID NO: 1450551 - RNA, 19 nt, Artificial Sequence
  Description of Artificial Sequence: Synthetic oligonucleotide
uucaauguuguuucuuguc

SEQ ID NO: 1450552 - RNA, 19 nt, Artificial Sequence
  Description of Artificial Sequence: Synthetic oligonucleotide
acuggagaagaagacccgc

SEQ ID NO: 1450553 - RNA, 19 nt, Artificial Sequence
  Description of Artificial Sequence: Synthetic oligonucleotide
ucagaguuguugaacgauc

SEQ ID NO: 1450554 - RNA, 19 nt, Artificial Sequence
  Description of Artificial Sequence: Synthetic oligonucleotide
uugaaaucguacgaguagu

SEQ ID NO: 1450555 - RNA, 19 nt, Artificial Sequence
  Description of Artificial Sequence: Synthetic oligonucleotide
caagacaugcguagcaaug

SEQ ID NO: 1450556 - RNA, 19 nt, Artificial Sequence
  Description of Artificial Sequence: Synthetic oligonucleotide
caacuugucuacucugccg

SEQ ID NO: 1450557 - RNA, 19 nt, Artificial Sequence
  Description of Artificial Sequence: Synthetic oligonucleotide
aagaagacccgcaguuggc

SEQ ID NO: 1450558 - RNA, 19 nt, Artificial Sequence
  Description of Artificial Sequence: Synthetic oligonucleotide
guaggcagugggcugaugc

SEQ ID NO: 1450559 - RNA, 19 nt, Artificial Sequence
  Description of Artificial Sequence: Synthetic oligonucleotide
aagagugugcaaaucggug

SEQ ID NO: 1450560 - RNA, 19 nt, Artificial Sequence
  Description of Artificial Sequence: Synthetic oligonucleotide
cauaacccugacaaacagc

SEQ ID NO: 1450561 - RNA, 19 nt, Artificial Sequence
  Description of Artificial Sequence: Synthetic oligonucleotide
gaaucguaggcacugaggu

SEQ ID NO: 1450562 - RNA, 19 nt, Artificial Sequence
  Description of Artificial Sequence: Synthetic oligonucleotide
guaucuguaucacgccugg

SEQ ID NO: 1450563 - RNA, 19 nt, Artificial Sequence
  Description of Artificial Sequence: Synthetic oligonucleotide
acugcgaucggaaucguag

SEQ ID NO: 1450564 - RNA, 19 nt, Artificial Sequence
  Description of Artificial Sequence: Synthetic oligonucleotide
uguguuaaggugagcaauu

SEQ ID NO: 1450565 - RNA, 19 nt, Artificial Sequence
  Description of Artificial Sequence: Synthetic oligonucleotide
cacuacuaggucagcaggg

SEQ ID NO: 1450566 - RNA, 19 nt, Artificial Sequence
  Description of Artificial Sequence: Synthetic oligonucleotide
aucuguaucacgccuggga

SEQ ID NO: 1450567 - RNA, 19 nt, Artificial Sequence
  Description of Artificial Sequence: Synthetic oligonucleotide
ucccguuuauccuuugaug

SEQ ID NO: 1450568 - RNA, 19 nt, Artificial Sequence
  Description of Artificial Sequence: Synthetic oligonucleotide
augcguagcaauguugagg

SEQ ID NO: 1450569 - RNA, 19 nt, Artificial Sequence
  Description of Artificial Sequence: Synthetic oligonucleotide
aagacaugcguagcaaugu

SEQ ID NO: 1450570 - RNA, 19 nt, Artificial Sequence
  Description of Artificial Sequence: Synthetic oligonucleotide
aagaggcaugugcucacag

SEQ ID NO: 1450571 - RNA, 19 nt, Artificial Sequence
  Description of Artificial Sequence: Synthetic oligonucleotide
acccuuaauguguuaaggu

SEQ ID NO: 1450572 - RNA, 19 nt, Artificial Sequence
  Description of Artificial Sequence: Synthetic oligonucleotide
cucggaauaucuuggcuac

SEQ ID NO: 1450573 - RNA, 19 nt, Artificial Sequence
  Description of Artificial Sequence: Synthetic oligonucleotide
uagacaucccguuuauccu

SEQ ID NO: 1450574 - RNA, 19 nt, Artificial Sequence
  Description of Artificial Sequence: Synthetic oligonucleotide
uuccguugauguuaggagu

SEQ ID NO: 1450575 - RNA, 19 nt, Artificial Sequence
  Description of Artificial Sequence: Synthetic oligonucleotide
gaagacccgcaguuggccg

SEQ ID NO: 1450576 - RNA, 19 nt, Artificial Sequence
  Description of Artificial Sequence: Synthetic oligonucleotide
agaagacccgcaguuggcc

SEQ ID NO: 1450577 - RNA, 19 nt, Artificial Sequence
  Description of Artificial Sequence: Synthetic oligonucleotide
agggagacugaauuaccag

SEQ ID NO: 1450578 - RNA, 19 nt, Artificial Sequence
  Description of Artificial Sequence: Synthetic oligonucleotide
ugaaaucguacgaguaguc

SEQ ID NO: 1450579 - RNA, 19 nt, Artificial Sequence
  Description of Artificial Sequence: Synthetic oligonucleotide
aagcuuaucaagccagcuu

SEQ ID NO: 1450580 - RNA, 19 nt, Artificial Sequence
  Description of Artificial Sequence: Synthetic oligonucleotide
ugcgaucggaaucguaggc

SEQ ID NO: 1450581 - RNA, 19 nt, Artificial Sequence
  Description of Artificial Sequence: Synthetic oligonucleotide
ucggccucggaauaucuug

SEQ ID NO: 1450582 - RNA, 19 nt, Artificial Sequence
  Description of Artificial Sequence: Synthetic oligonucleotide
ugguugaaaucguacgagu

SEQ ID NO: 1450583 - RNA, 19 nt, Artificial Sequence
  Description of Artificial Sequence: Synthetic oligonucleotide
uuacaucucggccucggaa

SEQ ID NO: 1450584 - RNA, 19 nt, Artificial Sequence
  Description of Artificial Sequence: Synthetic oligonucleotide
uuugacuuuuacugccaac

SEQ ID NO: 1450585 - RNA, 19 nt, Artificial Sequence
  Description of Artificial Sequence: Synthetic oligonucleotide
ggaguauauuuguacucgg

SEQ ID NO: 1450586 - RNA, 19 nt, Artificial Sequence
  Description of Artificial Sequence: Synthetic oligonucleotide
uguuacaucucggccucgg

SEQ ID NO: 1450587 - RNA, 19 nt, Artificial Sequence
  Description of Artificial Sequence: Synthetic oligonucleotide
acaauaaaacgggcaggac

SEQ ID NO: 1450588 - RNA, 19 nt, Artificial Sequence
  Description of Artificial Sequence: Synthetic oligonucleotide
aacgggcaggaccauccag

SEQ ID NO: 1450589 - RNA, 19 nt, Artificial Sequence
  Description of Artificial Sequence: Synthetic oligonucleotide
cuggaaugaagcccucagg

SEQ ID NO: 1450590 - RNA, 19 nt, Artificial Sequence
  Description of Artificial Sequence: Synthetic oligonucleotide
gugcaaaucggugagaaaa

SEQ ID NO: 1450591 - RNA, 19 nt, Artificial Sequence
  Description of Artificial Sequence: Synthetic oligonucleotide
gacaucaggagccccguca

SEQ ID NO: 1450592 - RNA, 19 nt, Artificial Sequence
  Description of Artificial Sequence: Synthetic oligonucleotide
acaagcuuaucaagccagc

SEQ ID NO: 1450593 - RNA, 19 nt, Artificial Sequence
  Description of Artificial Sequence: Synthetic oligonucleotide
uugauguucgucccaucuc

SEQ ID NO: 1450594 - RNA, 19 nt, Artificial Sequence
  Description of Artificial Sequence: Synthetic oligonucleotide
uacaucucggccucggaau

SEQ ID NO: 1450595 - RNA, 19 nt, Artificial Sequence
  Description of Artificial Sequence: Synthetic oligonucleotide
accugaccagaacucuggc

SEQ ID NO: 1450596 - RNA, 19 nt, Artificial Sequence
  Description of Artificial Sequence: Synthetic oligonucleotide
ggcgguaguagacaucccg

SEQ ID NO: 1450597 - RNA, 19 nt, Artificial Sequence
  Description of Artificial Sequence: Synthetic oligonucleotide
aucggugagaaaagguagg

SEQ ID NO: 1450598 - RNA, 19 nt, Artificial Sequence
  Description of Artificial Sequence: Synthetic oligonucleotide
guaugaguuugacuuuuac

SEQ ID NO: 1450599 - RNA, 19 nt, Artificial Sequence
  Description of Artificial Sequence: Synthetic oligonucleotide
ucaagacaugcguagcaau

SEQ ID NO: 1450600 - RNA, 19 nt, Artificial Sequence
  Description of Artificial Sequence: Synthetic oligonucleotide
aagguagggcuuccguuga

SEQ ID NO: 1450601 - RNA, 19 nt, Artificial Sequence
  Description of Artificial Sequence: Synthetic oligonucleotide
guggaguauauuuguacuc

SEQ ID NO: 1450602 - RNA, 19 nt, Artificial Sequence
  Description of Artificial Sequence: Synthetic oligonucleotide
uccguugauguuaggaguu

SEQ ID NO: 1450603 - RNA, 19 nt, Artificial Sequence
  Description of Artificial Sequence: Synthetic oligonucleotide
ggucauaacccugacaaac

SEQ ID NO: 1450604 - RNA, 19 nt, Artificial Sequence
  Description of Artificial Sequence: Synthetic oligonucleotide
gacugaauuaccagcuuca

SEQ ID NO: 1450605 - RNA, 19 nt, Artificial Sequence
  Description of Artificial Sequence: Synthetic oligonucleotide
gagcaauugauuucagugu

SEQ ID NO: 1450606 - RNA, 19 nt, Artificial Sequence
  Description of Artificial Sequence: Synthetic oligonucleotide
caacccuuaauguguuaag

SEQ ID NO: 1450607 - RNA, 19 nt, Artificial Sequence
  Description of Artificial Sequence: Synthetic oligonucleotide
uacugccaacccuuaaugu

SEQ ID NO: 1450608 - RNA, 19 nt, Artificial Sequence
  Description of Artificial Sequence: Synthetic oligonucleotide
guagcaauguugagggcag

SEQ ID NO: 1450609 - RNA, 19 nt, Artificial Sequence
  Description of Artificial Sequence: Synthetic oligonucleotide
uagccugcaaguccacagc

SEQ ID NO: 1450610 - RNA, 19 nt, Artificial Sequence
  Description of Artificial Sequence: Synthetic oligonucleotide
acgggcaggaccauccagc

SEQ ID NO: 1450611 - RNA, 19 nt, Artificial Sequence
  Description of Artificial Sequence: Synthetic oligonucleotide
aucucacucugcugguagg

SEQ ID NO: 1450612 - RNA, 19 nt, Artificial Sequence
  Description of Artificial Sequence: Synthetic oligonucleotide
acaugcguagcaauguuga

SEQ ID NO: 1450613 - RNA, 19 nt, Artificial Sequence
  Description of Artificial Sequence: Synthetic oligonucleotide
cacaaagggcacaauaaaa

SEQ ID NO: 1450614 - RNA, 19 nt, Artificial Sequence
  Description of Artificial Sequence: Synthetic oligonucleotide
aggugagcaauugauuuca

SEQ ID NO: 1450615 - RNA, 19 nt, Artificial Sequence
  Description of Artificial Sequence: Synthetic oligonucleotide
cacuggagaagaagacccg

SEQ ID NO: 1450616 - RNA, 19 nt, Artificial Sequence
  Description of Artificial Sequence: Synthetic oligonucleotide
uccuuagcucuucgauagg

SEQ ID NO: 1450617 - RNA, 19 nt, Artificial Sequence
  Description of Artificial Sequence: Synthetic oligonucleotide
ucuaggcuugucuguucag

SEQ ID NO: 1450618 - RNA, 19 nt, Artificial Sequence
  Description of Artificial Sequence: Synthetic oligonucleotide
auggaggccggugacauca

SEQ ID NO: 1450619 - RNA, 19 nt, Artificial Sequence
  Description of Artificial Sequence: Synthetic oligonucleotide
uucaagacaugcguagcaa

SEQ ID NO: 1450620 - RNA, 19 nt, Artificial Sequence
  Description of Artificial Sequence: Synthetic oligonucleotide
aucggaaucguaggcacug

SEQ ID NO: 1450621 - RNA, 19 nt, Artificial Sequence
  Description of Artificial Sequence: Synthetic oligonucleotide
aagacccgcaguuggccgu

SEQ ID NO: 1450622 - RNA, 19 nt, Artificial Sequence
  Description of Artificial Sequence: Synthetic oligonucleotide
cacaauaaaacgggcagga

SEQ ID NO: 1450623 - RNA, 19 nt, Artificial Sequence
  Description of Artificial Sequence: Synthetic oligonucleotide
ugaccagaacucuggcccc

SEQ ID NO: 1450624 - RNA, 19 nt, Artificial Sequence
  Description of Artificial Sequence: Synthetic oligonucleotide
gaggauaacugcgaucgga

SEQ ID NO: 1450625 - RNA, 19 nt, Artificial Sequence
  Description of Artificial Sequence: Synthetic oligonucleotide
uccagaggauaacugcgau

SEQ ID NO: 1450626 - RNA, 19 nt, Artificial Sequence
  Description of Artificial Sequence: Synthetic oligonucleotide
agaggauaacugcgaucgg

SEQ ID NO: 1450627 - RNA, 19 nt, Artificial Sequence
  Description of Artificial Sequence: Synthetic oligonucleotide
aggccggugacaucaggag

SEQ ID NO: 1450628 - RNA, 19 nt, Artificial Sequence
  Description of Artificial Sequence: Synthetic oligonucleotide
uucgucccaucucacucug

SEQ ID NO: 1450629 - RNA, 19 nt, Artificial Sequence
  Description of Artificial Sequence: Synthetic oligonucleotide
cccuuaauguguuaaggug

SEQ ID NO: 1450630 - RNA, 19 nt, Artificial Sequence
  Description of Artificial Sequence: Synthetic oligonucleotide
gccgauggagcauucuugg

SEQ ID NO: 1450631 - RNA, 19 nt, Artificial Sequence
  Description of Artificial Sequence: Synthetic oligonucleotide
cuucaagacaugcguagca

SEQ ID NO: 1450632 - RNA, 19 nt, Artificial Sequence
  Description of Artificial Sequence: Synthetic oligonucleotide
ccuuaauguguuaagguga

SEQ ID NO: 1450633 - RNA, 19 nt, Artificial Sequence
  Description of Artificial Sequence: Synthetic oligonucleotide
acuuuuacugccaacccuu

SEQ ID NO: 1450634 - RNA, 19 nt, Artificial Sequence
  Description of Artificial Sequence: Synthetic oligonucleotide
gucuacucugccgauggag

SEQ ID NO: 1450635 - RNA, 19 nt, Artificial Sequence
  Description of Artificial Sequence: Synthetic oligonucleotide
gaauuccggcugcucuugg

SEQ ID NO: 1450636 - RNA, 19 nt, Artificial Sequence
  Description of Artificial Sequence: Synthetic oligonucleotide
aucccguuuauccuuugau

SEQ ID NO: 1450637 - RNA, 19 nt, Artificial Sequence
  Description of Artificial Sequence: Synthetic oligonucleotide
uccuuugauguucguccca

SEQ ID NO: 1450638 - RNA, 19 nt, Artificial Sequence
  Description of Artificial Sequence: Synthetic oligonucleotide
cuuccaccuaggcuggggc

SEQ ID NO: 1450639 - RNA, 19 nt, Artificial Sequence
  Description of Artificial Sequence: Synthetic oligonucleotide
agaagaagacccgcaguug

SEQ ID NO: 1450640 - RNA, 19 nt, Artificial Sequence
  Description of Artificial Sequence: Synthetic oligonucleotide
ugacuuguaugaguuugac

SEQ ID NO: 1450641 - RNA, 19 nt, Artificial Sequence
  Description of Artificial Sequence: Synthetic oligonucleotide
auguguuaaggugagcaau

SEQ ID NO: 1450642 - RNA, 19 nt, Artificial Sequence
  Description of Artificial Sequence: Synthetic oligonucleotide
cucuucgauagggagggag

SEQ ID NO: 1450643 - RNA, 19 nt, Artificial Sequence
  Description of Artificial Sequence: Synthetic oligonucleotide
caugcguagcaauguugag

SEQ ID NO: 1450644 - RNA, 19 nt, Artificial Sequence
  Description of Artificial Sequence: Synthetic oligonucleotide
gaguauauuuguacucgga

SEQ ID NO: 1450645 - RNA, 19 nt, Artificial Sequence
  Description of Artificial Sequence: Synthetic oligonucleotide
gcaguguuacaucucggcc

SEQ ID NO: 1450646 - RNA, 19 nt, Artificial Sequence
  Description of Artificial Sequence: Synthetic oligonucleotide
ggaaucguaggcacugagg

SEQ ID NO: 1450647 - RNA, 19 nt, Artificial Sequence
  Description of Artificial Sequence: Synthetic oligonucleotide
ucguacgaguaguccagca

SEQ ID NO: 1450648 - RNA, 19 nt, Artificial Sequence
  Description of Artificial Sequence: Synthetic oligonucleotide
cacgccugggaguggagcc

SEQ ID NO: 1450649 - RNA, 19 nt, Artificial Sequence
  Description of Artificial Sequence: Synthetic oligonucleotide
aggucaacugcucgcuuca

SEQ ID NO: 1450650 - RNA, 19 nt, Artificial Sequence
  Description of Artificial Sequence: Synthetic oligonucleotide
guugauguuaggaguugac

SEQ ID NO: 1450651 - RNA, 19 nt, Artificial Sequence
  Description of Artificial Sequence: Synthetic oligonucleotide
gaaaagguagggcuuccgu

SEQ ID NO: 1450652 - RNA, 19 nt, Artificial Sequence
  Description of Artificial Sequence: Synthetic oligonucleotide
uccagcugguugaaaucgu

SEQ ID NO: 1450653 - RNA, 19 nt, Artificial Sequence
  Description of Artificial Sequence: Synthetic oligonucleotide
ggaguggagccauagccug

SEQ ID NO: 1450654 - RNA, 19 nt, Artificial Sequence
  Description of Artificial Sequence: Synthetic oligonucleotide
gagggagacugaauuacca

SEQ ID NO: 1450655 - RNA, 19 nt, Artificial Sequence
  Description of Artificial Sequence: Synthetic oligonucleotide
aucguacgaguaguccagc

SEQ ID NO: 1450656 - RNA, 19 nt, Artificial Sequence
  Description of Artificial Sequence: Synthetic oligonucleotide
ggguggaguauauuuguac

SEQ ID NO: 1450657 - RNA, 19 nt, Artificial Sequence
  Description of Artificial Sequence: Synthetic oligonucleotide
cuucgauagggagggagac

SEQ ID NO: 1450658 - RNA, 19 nt, Artificial Sequence
  Description of Artificial Sequence: Synthetic oligonucleotide
cuuagcucuucgauaggga

SEQ ID NO: 1450659 - RNA, 19 nt, Artificial Sequence
  Description of Artificial Sequence: Synthetic oligonucleotide
ugugcaaaucggugagaaa

SEQ ID NO: 1450660 - RNA, 19 nt, Artificial Sequence
  Description of Artificial Sequence: Synthetic oligonucleotide
aaacgggcaggaccaucca

SEQ ID NO: 1450661 - RNA, 19 nt, Artificial Sequence
  Description of Artificial Sequence: Synthetic oligonucleotide
ggugacaucaggagccccg

SEQ ID NO: 1450662 - RNA, 19 nt, Artificial Sequence
  Description of Artificial Sequence: Synthetic oligonucleotide
aaaggccucaaugcuggaa

SEQ ID NO: 1450663 - RNA, 19 nt, Artificial Sequence
  Description of Artificial Sequence: Synthetic oligonucleotide
agccugcaaguccacagcu

SEQ ID NO: 1450664 - RNA, 19 nt, Artificial Sequence
  Description of Artificial Sequence: Synthetic oligonucleotide
aguagacaucccguuuauc

SEQ ID NO: 1450665 - RNA, 19 nt, Artificial Sequence
  Description of Artificial Sequence: Synthetic oligonucleotide
ugcucgcuucacaccuugg

SEQ ID NO: 1450666 - RNA, 19 nt, Artificial Sequence
  Description of Artificial Sequence: Synthetic oligonucleotide
gaguaguccagcagggguc

SEQ ID NO: 1450667 - RNA, 19 nt, Artificial Sequence
  Description of Artificial Sequence: Synthetic oligonucleotide
uaucuguaucacgccuggg

SEQ ID NO: 1450668 - RNA, 19 nt, Artificial Sequence
  Description of Artificial Sequence: Synthetic oligonucleotide
auguucgucccaucucacu

SEQ ID NO: 1450669 - RNA, 19 nt, Artificial Sequence
  Description of Artificial Sequence: Synthetic oligonucleotide
agcggcuucugacuuguau

SEQ ID NO: 1450670 - RNA, 19 nt, Artificial Sequence
  Description of Artificial Sequence: Synthetic oligonucleotide
gcaacuugucuacucugcc

SEQ ID NO: 1450671 - RNA, 19 nt, Artificial Sequence
  Description of Artificial Sequence: Synthetic oligonucleotide
caaaucggugagaaaaggu

SEQ ID NO: 1450672 - RNA, 19 nt, Artificial Sequence
  Description of Artificial Sequence: Synthetic oligonucleotide
cugcaaguccacagcuacc

SEQ ID NO: 1450673 - RNA, 19 nt, Artificial Sequence
  Description of Artificial Sequence: Synthetic oligonucleotide
gcacaauaaaacgggcagg

SEQ ID NO: 1450674 - RNA, 19 nt, Artificial Sequence
  Description of Artificial Sequence: Synthetic oligonucleotide
ucucggccucggaauaucu

SEQ ID NO: 1450675 - RNA, 19 nt, Artificial Sequence
  Description of Artificial Sequence: Synthetic oligonucleotide
uaucacgccugggagugga

SEQ ID NO: 1450676 - RNA, 19 nt, Artificial Sequence
  Description of Artificial Sequence: Synthetic oligonucleotide
uggggcaacuugucuacuc

SEQ ID NO: 1450677 - RNA, 19 nt, Artificial Sequence
  Description of Artificial Sequence: Synthetic oligonucleotide
uguuaggaguugacccgaa

SEQ ID NO: 1450678 - RNA, 19 nt, Artificial Sequence
  Description of Artificial Sequence: Synthetic oligonucleotide
gcggcuucugacuuguaug

SEQ ID NO: 1450679 - RNA, 19 nt, Artificial Sequence
  Description of Artificial Sequence: Synthetic oligonucleotide
agggcccauagaugguauc

SEQ ID NO: 1450680 - RNA, 19 nt, Artificial Sequence
  Description of Artificial Sequence: Synthetic oligonucleotide
gacuuguaugaguuugacu

SEQ ID NO: 1450681 - RNA, 19 nt, Artificial Sequence
  Description of Artificial Sequence: Synthetic oligonucleotide
auguuaggaguugacccga

SEQ ID NO: 1450682 - RNA, 19 nt, Artificial Sequence
  Description of Artificial Sequence: Synthetic oligonucleotide
gguggaguauauuuguacu

SEQ ID NO: 1450683 - RNA, 19 nt, Artificial Sequence
  Description of Artificial Sequence: Synthetic oligonucleotide
cugacuuguaugaguuuga

SEQ ID NO: 1450684 - RNA, 19 nt, Artificial Sequence
  Description of Artificial Sequence: Synthetic oligonucleotide
ccugcaaguccacagcuac

SEQ ID NO: 1450685 - RNA, 19 nt, Artificial Sequence
  Description of Artificial Sequence: Synthetic oligonucleotide
agggcuuccguugauguua

SEQ ID NO: 1450686 - RNA, 19 nt, Artificial Sequence
  Description of Artificial Sequence: Synthetic oligonucleotide
acagucucgugaaauuccu

SEQ ID NO: 1450687 - RNA, 19 nt, Artificial Sequence
  Description of Artificial Sequence: Synthetic oligonucleotide
gcagcuagcagaagcuggg

SEQ ID NO: 1450688 - RNA, 19 nt, Artificial Sequence
  Description of Artificial Sequence: Synthetic oligonucleotide
caguguuacaucucggccu

SEQ ID NO: 1450689 - RNA, 19 nt, Artificial Sequence
  Description of Artificial Sequence: Synthetic oligonucleotide
aggauaacugcgaucggaa

SEQ ID NO: 1450690 - RNA, 19 nt, Artificial Sequence
  Description of Artificial Sequence: Synthetic oligonucleotide
agacaugcguagcaauguu

SEQ ID NO: 1450691 - RNA, 19 nt, Artificial Sequence
  Description of Artificial Sequence: Synthetic oligonucleotide
cuugucuacucugccgaug

SEQ ID NO: 1450692 - RNA, 19 nt, Artificial Sequence
  Description of Artificial Sequence: Synthetic oligonucleotide
uucgauagggagggagacu

SEQ ID NO: 1450693 - RNA, 19 nt, Artificial Sequence
  Description of Artificial Sequence: Synthetic oligonucleotide
ccuuagcucuucgauaggg

SEQ ID NO: 1450694 - RNA, 19 nt, Artificial Sequence
  Description of Artificial Sequence: Synthetic oligonucleotide
auuuguacucggagccauc

SEQ ID NO: 1450695 - RNA, 19 nt, Artificial Sequence
  Description of Artificial Sequence: Synthetic oligonucleotide
uaaaacgggcaggaccauc

SEQ ID NO: 1450696 - RNA, 19 nt, Artificial Sequence
  Description of Artificial Sequence: Synthetic oligonucleotide
aucugcaaacaagcuuauc

SEQ ID NO: 1450697 - RNA, 19 nt, Artificial Sequence
  Description of Artificial Sequence: Synthetic oligonucleotide
ucguaggcacugagguccc

SEQ ID NO: 1450698 - RNA, 19 nt, Artificial Sequence
  Description of Artificial Sequence: Synthetic oligonucleotide
ugucuacucugccgaugga

SEQ ID NO: 1450699 - RNA, 19 nt, Artificial Sequence
  Description of Artificial Sequence: Synthetic oligonucleotide
gauguucgucccaucucac

SEQ ID NO: 1450700 - RNA, 19 nt, Artificial Sequence
  Description of Artificial Sequence: Synthetic oligonucleotide
guuugacuuuuacugccaa

SEQ ID NO: 1450701 - RNA, 19 nt, Artificial Sequence
  Description of Artificial Sequence: Synthetic oligonucleotide
gagggucauaacccugaca

SEQ ID NO: 1450702 - RNA, 19 nt, Artificial Sequence
  Description of Artificial Sequence: Synthetic oligonucleotide
uguagcaacccuggcuguc

SEQ ID NO: 1450703 - RNA, 19 nt, Artificial Sequence
  Description of Artificial Sequence: Synthetic oligonucleotide
cuacucugccgauggagca

SEQ ID NO: 1450704 - RNA, 19 nt, Artificial Sequence
  Description of Artificial Sequence: Synthetic oligonucleotide
gccggugacaucaggagcc

SEQ ID NO: 1450705 - RNA, 19 nt, Artificial Sequence
  Description of Artificial Sequence: Synthetic oligonucleotide
caggagggucauaacccug

SEQ ID NO: 1450706 - RNA, 19 nt, Artificial Sequence
  Description of Artificial Sequence: Synthetic oligonucleotide
ucacgccugggaguggagc

SEQ ID NO: 1450707 - RNA, 19 nt, Artificial Sequence
  Description of Artificial Sequence: Synthetic oligonucleotide
aucucggccucggaauauc

SEQ ID NO: 1450708 - RNA, 19 nt, Artificial Sequence
  Description of Artificial Sequence: Synthetic oligonucleotide
cuuugauguucgucccauc

SEQ ID NO: 1450709 - RNA, 19 nt, Artificial Sequence
  Description of Artificial Sequence: Synthetic oligonucleotide
gaggccggugacaucagga

SEQ ID NO: 1450710 - RNA, 19 nt, Artificial Sequence
  Description of Artificial Sequence: Synthetic oligonucleotide
ggcaacuugucuacucugc

SEQ ID NO: 1450711 - RNA, 19 nt, Artificial Sequence
  Description of Artificial Sequence: Synthetic oligonucleotide
guggguggaguauauuugu

SEQ ID NO: 1450712 - RNA, 19 nt, Artificial Sequence
  Description of Artificial Sequence: Synthetic oligonucleotide
cugccaacccuuaaugugu

SEQ ID NO: 1450713 - RNA, 19 nt, Artificial Sequence
  Description of Artificial Sequence: Synthetic oligonucleotide
gaguugacccgaaggccug

SEQ ID NO: 1450714 - RNA, 19 nt, Artificial Sequence
  Description of Artificial Sequence: Synthetic oligonucleotide
ucggagccaucuucuagau

SEQ ID NO: 1450715 - RNA, 19 nt, Artificial Sequence
  Description of Artificial Sequence: Synthetic oligonucleotide
cuacuaggucagcagggca

SEQ ID NO: 1450716 - RNA, 19 nt, Artificial Sequence
  Description of Artificial Sequence: Synthetic oligonucleotide
cuguucagggcccauagau

SEQ ID NO: 1450717 - RNA, 19 nt, Artificial Sequence
  Description of Artificial Sequence: Synthetic oligonucleotide
ugccaacccuuaauguguu

SEQ ID NO: 1450718 - RNA, 19 nt, Artificial Sequence
  Description of Artificial Sequence: Synthetic oligonucleotide
acaucucggccucggaaua

SEQ ID NO: 1450719 - RNA, 19 nt, Artificial Sequence
  Description of Artificial Sequence: Synthetic oligonucleotide
cucgcuucacaccuuggaa

SEQ ID NO: 1450720 - RNA, 19 nt, Artificial Sequence
  Description of Artificial Sequence: Synthetic oligonucleotide
guagggcuuccguugaugu

SEQ ID NO: 1450721 - RNA, 19 nt, Artificial Sequence
  Description of Artificial Sequence: Synthetic oligonucleotide
gaguggagccauagccugc

SEQ ID NO: 1450722 - RNA, 19 nt, Artificial Sequence
  Description of Artificial Sequence: Synthetic oligonucleotide
acuugucuacucugccgau

SEQ ID NO: 1450723 - RNA, 19 nt, Artificial Sequence
  Description of Artificial Sequence: Synthetic oligonucleotide
guguggguggaguauauuu

SEQ ID NO: 1450724 - RNA, 19 nt, Artificial Sequence
  Description of Artificial Sequence: Synthetic oligonucleotide
caaugcuggaauuccggcu

SEQ ID NO: 1450725 - RNA, 19 nt, Artificial Sequence
  Description of Artificial Sequence: Synthetic oligonucleotide
cgugaaauuccuccugcag

SEQ ID NO: 1450726 - RNA, 19 nt, Artificial Sequence
  Description of Artificial Sequence: Synthetic oligonucleotide
ucugccgauggagcauucu

SEQ ID NO: 1450727 - RNA, 19 nt, Artificial Sequence
  Description of Artificial Sequence: Synthetic oligonucleotide
cugcucgcuucacaccuug

SEQ ID NO: 1450728 - RNA, 19 nt, Artificial Sequence
  Description of Artificial Sequence: Synthetic oligonucleotide
uuguacucggagccaucuu

SEQ ID NO: 1450729 - RNA, 19 nt, Artificial Sequence
  Description of Artificial Sequence: Synthetic oligonucleotide
gcuuccguugauguuagga

SEQ ID NO: 1450730 - RNA, 19 nt, Artificial Sequence
  Description of Artificial Sequence: Synthetic oligonucleotide
guuacaucucggccucgga

SEQ ID NO: 1450731 - RNA, 19 nt, Artificial Sequence
  Description of Artificial Sequence: Synthetic oligonucleotide
ucggaauaucuuggcuaca

SEQ ID NO: 1450732 - RNA, 19 nt, Artificial Sequence
  Description of Artificial Sequence: Synthetic oligonucleotide
cuaggcuggggcaacuugu

SEQ ID NO: 1450733 - RNA, 19 nt, Artificial Sequence
  Description of Artificial Sequence: Synthetic oligonucleotide
cagucucgugaaauuccuc

SEQ ID NO: 1450734 - RNA, 19 nt, Artificial Sequence
  Description of Artificial Sequence: Synthetic oligonucleotide
cuagauccagaggauaacu

SEQ ID NO: 1450735 - RNA, 19 nt, Artificial Sequence
  Description of Artificial Sequence: Synthetic oligonucleotide
agugugcaaaucggugaga

SEQ ID NO: 1450736 - RNA, 19 nt, Artificial Sequence
  Description of Artificial Sequence: Synthetic oligonucleotide
gcuucaagacaugcguagc

SEQ ID NO: 1450737 - RNA, 19 nt, Artificial Sequence
  Description of Artificial Sequence: Synthetic oligonucleotide
cacuuuguaguggcacaug

SEQ ID NO: 1450738 - RNA, 19 nt, Artificial Sequence
  Description of Artificial Sequence: Synthetic oligonucleotide
cuguaucuguaucacgccu

SEQ ID NO: 1450739 - RNA, 19 nt, Artificial Sequence
  Description of Artificial Sequence: Synthetic oligonucleotide
gguugaaaucguacgagua

SEQ ID NO: 1450740 - RNA, 19 nt, Artificial Sequence
  Description of Artificial Sequence: Synthetic oligonucleotide
ggccggugacaucaggagc

SEQ ID NO: 1450741 - RNA, 19 nt, Artificial Sequence
  Description of Artificial Sequence: Synthetic oligonucleotide
gucucgugaaauuccuccu

SEQ ID NO: 1450742 - RNA, 19 nt, Artificial Sequence
  Description of Artificial Sequence: Synthetic oligonucleotide
cguacgaguaguccagcag

SEQ ID NO: 1450743 - RNA, 19 nt, Artificial Sequence
  Description of Artificial Sequence: Synthetic oligonucleotide
ucggaaucguaggcacuga

SEQ ID NO: 1450744 - RNA, 19 nt, Artificial Sequence
  Description of Artificial Sequence: Synthetic oligonucleotide
ggcgcuucgggcccgccag

SEQ ID NO: 1450745 - RNA, 19 nt, Artificial Sequence
  Description of Artificial Sequence: Synthetic oligonucleotide
cuuuuacugccaacccuua

SEQ ID NO: 1450746 - RNA, 19 nt, Artificial Sequence
  Description of Artificial Sequence: Synthetic oligonucleotide
uagcaauguugagggcagc

SEQ ID NO: 1450747 - RNA, 19 nt, Artificial Sequence
  Description of Artificial Sequence: Synthetic oligonucleotide
guucgucccaucucacucu

SEQ ID NO: 1450748 - RNA, 19 nt, Artificial Sequence
  Description of Artificial Sequence: Synthetic oligonucleotide
cgaucggaaucguaggcac

SEQ ID NO: 1450749 - RNA, 19 nt, Artificial Sequence
  Description of Artificial Sequence: Synthetic oligonucleotide
gucuggucaggucuggaau

SEQ ID NO: 1450750 - RNA, 19 nt, Artificial Sequence
  Description of Artificial Sequence: Synthetic oligonucleotide
ggaauuccggcugcucuug

SEQ ID NO: 1450751 - RNA, 19 nt, Artificial Sequence
  Description of Artificial Sequence: Synthetic oligonucleotide
cuuguaugaguuugacuuu

SEQ ID NO: 1450752 - RNA, 19 nt, Artificial Sequence
  Description of Artificial Sequence: Synthetic oligonucleotide
ccagaggauaacugcgauc

SEQ ID NO: 1450753 - RNA, 19 nt, Artificial Sequence
  Description of Artificial Sequence: Synthetic oligonucleotide
uguguggguggaguauauu

SEQ ID NO: 1450754 - RNA, 19 nt, Artificial Sequence
  Description of Artificial Sequence: Synthetic oligonucleotide
aaggcgcuucgggcccgcc

SEQ ID NO: 1450755 - RNA, 19 nt, Artificial Sequence
  Description of Artificial Sequence: Synthetic oligonucleotide
ggccucggaauaucuuggc

SEQ ID NO: 1450756 - RNA, 19 nt, Artificial Sequence
  Description of Artificial Sequence: Synthetic oligonucleotide
ggaggccggugacaucagg

SEQ ID NO: 1450757 - RNA, 19 nt, Artificial Sequence
  Description of Artificial Sequence: Synthetic oligonucleotide
auagggagggagacugaau

SEQ ID NO: 1450758 - RNA, 19 nt, Artificial Sequence
  Description of Artificial Sequence: Synthetic oligonucleotide
ccucggaauaucuuggcua

SEQ ID NO: 1450759 - RNA, 19 nt, Artificial Sequence
  Description of Artificial Sequence: Synthetic oligonucleotide
gcaugugcucacagucucg

SEQ ID NO: 1450760 - RNA, 19 nt, Artificial Sequence
  Description of Artificial Sequence: Synthetic oligonucleotide
gagacugaauuaccagcuu

SEQ ID NO: 1450761 - RNA, 19 nt, Artificial Sequence
  Description of Artificial Sequence: Synthetic oligonucleotide
ggugagcaauugauuucag

SEQ ID NO: 1450762 - RNA, 19 nt, Artificial Sequence
  Description of Artificial Sequence: Synthetic oligonucleotide
gcucgcuucacaccuugga

SEQ ID NO: 1450763 - RNA, 19 nt, Artificial Sequence
  Description of Artificial Sequence: Synthetic oligonucleotide
gcacacuggagaagaagac

SEQ ID NO: 1450764 - RNA, 19 nt, Artificial Sequence
  Description of Artificial Sequence: Synthetic oligonucleotide
gggcuuggcacagagcaca

SEQ ID NO: 1450765 - RNA, 19 nt, Artificial Sequence
  Description of Artificial Sequence: Synthetic oligonucleotide
gucagaguuguugaacgau

SEQ ID NO: 1450766 - RNA, 19 nt, Artificial Sequence
  Description of Artificial Sequence: Synthetic oligonucleotide
cguagcaauguugagggca

SEQ ID NO: 1450767 - RNA, 19 nt, Artificial Sequence
  Description of Artificial Sequence: Synthetic oligonucleotide
auaaaacgggcaggaccau

SEQ ID NO: 1450768 - RNA, 19 nt, Artificial Sequence
  Description of Artificial Sequence: Synthetic oligonucleotide
guaucacgccugggagugg

SEQ ID NO: 1450769 - RNA, 19 nt, Artificial Sequence
  Description of Artificial Sequence: Synthetic oligonucleotide
cuguaucacgccugggagu

SEQ ID NO: 1450770 - RNA, 19 nt, Artificial Sequence
  Description of Artificial Sequence: Synthetic oligonucleotide
aacugcgaucggaaucgua

SEQ ID NO: 1450771 - RNA, 19 nt, Artificial Sequence
  Description of Artificial Sequence: Synthetic oligonucleotide
ggaguugacccgaaggccu

SEQ ID NO: 1450772 - RNA, 19 nt, Artificial Sequence
  Description of Artificial Sequence: Synthetic oligonucleotide
uaacugcgaucggaaucgu

SEQ ID NO: 1450773 - RNA, 19 nt, Artificial Sequence
  Description of Artificial Sequence: Synthetic oligonucleotide
ccgccagccauucuccuug

SEQ ID NO: 1450774 - RNA, 19 nt, Artificial Sequence
  Description of Artificial Sequence: Synthetic oligonucleotide
guguuacaucucggccucg

SEQ ID NO: 1450775 - RNA, 19 nt, Artificial Sequence
  Description of Artificial Sequence: Synthetic oligonucleotide
ggagggucauaacccugac

SEQ ID NO: 1450776 - RNA, 19 nt, Artificial Sequence
  Description of Artificial Sequence: Synthetic oligonucleotide
cccgcaguuggccguagag

SEQ ID NO: 1450777 - RNA, 19 nt, Artificial Sequence
  Description of Artificial Sequence: Synthetic oligonucleotide
ccuaggcuggggcaacuug

SEQ ID NO: 1450778 - RNA, 19 nt, Artificial Sequence
  Description of Artificial Sequence: Synthetic oligonucleotide
caccuuggaagaguuggaa

SEQ ID NO: 1450779 - RNA, 19 nt, Artificial Sequence
  Description of Artificial Sequence: Synthetic oligonucleotide
aguugacccgaaggccugu

SEQ ID NO: 1450780 - RNA, 19 nt, Artificial Sequence
  Description of Artificial Sequence: Synthetic oligonucleotide
ccccgucacacacuacuag

SEQ ID NO: 1450781 - RNA, 19 nt, Artificial Sequence
  Description of Artificial Sequence: Synthetic oligonucleotide
uucaaccugcaggccuccu

SEQ ID NO: 1450782 - RNA, 19 nt, Artificial Sequence
  Description of Artificial Sequence: Synthetic oligonucleotide
acucugccgauggagcauu

SEQ ID NO: 1450783 - RNA, 19 nt, Artificial Sequence
  Description of Artificial Sequence: Synthetic oligonucleotide
gaucggaaucguaggcacu

SEQ ID NO: 1450784 - RNA, 19 nt, Artificial Sequence
  Description of Artificial Sequence: Synthetic oligonucleotide
gcuguccuuagcucuucga

SEQ ID NO: 1450785 - RNA, 19 nt, Artificial Sequence
  Description of Artificial Sequence: Synthetic oligonucleotide
gcgaucggaaucguaggca

SEQ ID NO: 1450786 - RNA, 19 nt, Artificial Sequence
  Description of Artificial Sequence: Synthetic oligonucleotide
aguuggccguagagcagug

SEQ ID NO: 1450787 - RNA, 19 nt, Artificial Sequence
  Description of Artificial Sequence: Synthetic oligonucleotide
ccgcaguuggccguagagc

SEQ ID NO: 1450788 - RNA, 19 nt, Artificial Sequence
  Description of Artificial Sequence: Synthetic oligonucleotide
ggagccccgucacacacua

SEQ ID NO: 1450789 - RNA, 19 nt, Artificial Sequence
  Description of Artificial Sequence: Synthetic oligonucleotide
gggcuuccguugauguuag

SEQ ID NO: 1450790 - RNA, 19 nt, Artificial Sequence
  Description of Artificial Sequence: Synthetic oligonucleotide
cucugccgauggagcauuc

SEQ ID NO: 1450791 - RNA, 19 nt, Artificial Sequence
  Description of Artificial Sequence: Synthetic oligonucleotide
gggucauaacccugacaaa

SEQ ID NO: 1450792 - RNA, 19 nt, Artificial Sequence
  Description of Artificial Sequence: Synthetic oligonucleotide
uucgggcccgccagccauu

SEQ ID NO: 1450793 - RNA, 19 nt, Artificial Sequence
  Description of Artificial Sequence: Synthetic oligonucleotide
gcaauugauuucagugucu

SEQ ID NO: 1450794 - RNA, 19 nt, Artificial Sequence
  Description of Artificial Sequence: Synthetic oligonucleotide
acccgcaguuggccguaga

SEQ ID NO: 1450795 - RNA, 19 nt, Artificial Sequence
  Description of Artificial Sequence: Synthetic oligonucleotide
ggcuuccguugauguuagg

SEQ ID NO: 1450796 - RNA, 19 nt, Artificial Sequence
  Description of Artificial Sequence: Synthetic oligonucleotide
gcaauguugagggcagcua

SEQ ID NO: 1450797 - RNA, 19 nt, Artificial Sequence
  Description of Artificial Sequence: Synthetic oligonucleotide
guaguccagcaggggucug

SEQ ID NO: 1450798 - RNA, 19 nt, Artificial Sequence
  Description of Artificial Sequence: Synthetic oligonucleotide
ccguugauguuaggaguug

SEQ ID NO: 1450799 - RNA, 19 nt, Artificial Sequence
  Description of Artificial Sequence: Synthetic oligonucleotide
gggcccauagaugguaucu

SEQ ID NO: 1450800 - RNA, 19 nt, Artificial Sequence
  Description of Artificial Sequence: Synthetic oligonucleotide
gugacaucaggagccccgu

SEQ ID NO: 1450801 - RNA, 19 nt, Artificial Sequence
  Description of Artificial Sequence: Synthetic oligonucleotide
agguccccacaggucacaa

SEQ ID NO: 1450802 - RNA, 19 nt, Artificial Sequence
  Description of Artificial Sequence: Synthetic oligonucleotide
gacccgcaguuggccguag

SEQ ID NO: 1450803 - RNA, 19 nt, Artificial Sequence
  Description of Artificial Sequence: Synthetic oligonucleotide
gccucggaauaucuuggcu

SEQ ID NO: 1450804 - RNA, 19 nt, Artificial Sequence
  Description of Artificial Sequence: Synthetic oligonucleotide
ucgggcccgccagccauuc

SEQ ID NO: 1450805 - RNA, 19 nt, Artificial Sequence
  Description of Artificial Sequence: Synthetic oligonucleotide
gcuguguggguggaguaua

SEQ ID NO: 1450806 - RNA, 19 nt, Artificial Sequence
  Description of Artificial Sequence: Synthetic oligonucleotide
cuucgggcccgccagccau

SEQ ID NO: 1450807 - RNA, 19 nt, Artificial Sequence
  Description of Artificial Sequence: Synthetic oligonucleotide
gcgguaguagacaucccgu

SEQ ID NO: 1450808 - RNA, 19 nt, Artificial Sequence
  Description of Artificial Sequence: Synthetic oligonucleotide
ggucaacugcucgcuucac

SEQ ID NO: 1450809 - RNA, 19 nt, Artificial Sequence
  Description of Artificial Sequence: Synthetic oligonucleotide
gccguagagcaguguuaca

SEQ ID NO: 1450810 - RNA, 19 nt, Artificial Sequence
  Description of Artificial Sequence: Synthetic oligonucleotide
agacccgcaguuggccgua

SEQ ID NO: 1450811 - RNA, 19 nt, Artificial Sequence
  Description of Artificial Sequence: Synthetic oligonucleotide
guggagccauagccugcaa

SEQ ID NO: 1450812 - RNA, 19 nt, Artificial Sequence
  Description of Artificial Sequence: Synthetic oligonucleotide
cagggcccauagaugguau

SEQ ID NO: 1450813 - RNA, 19 nt, Artificial Sequence
  Description of Artificial Sequence: Synthetic oligonucleotide
cucggccucggaauaucuu

SEQ ID NO: 1450814 - RNA, 19 nt, Artificial Sequence
  Description of Artificial Sequence: Synthetic oligonucleotide
gagccccgucacacacuac

SEQ ID NO: 1450815 - RNA, 19 nt, Artificial Sequence
  Description of Artificial Sequence: Synthetic oligonucleotide
ccccuagcuucaagacaug

SEQ ID NO: 1450816 - RNA, 19 nt, Artificial Sequence
  Description of Artificial Sequence: Synthetic oligonucleotide
gccaacccuuaauguguua

SEQ ID NO: 1450817 - RNA, 19 nt, Artificial Sequence
  Description of Artificial Sequence: Synthetic oligonucleotide
caucucggccucggaauau

SEQ ID NO: 1450818 - RNA, 19 nt, Artificial Sequence
  Description of Artificial Sequence: Synthetic oligonucleotide
ccggcugcucuugggcuug

SEQ ID NO: 1450819 - RNA, 19 nt, Artificial Sequence
  Description of Artificial Sequence: Synthetic oligonucleotide
gccugcaaguccacagcua

SEQ ID NO: 1450820 - RNA, 19 nt, Artificial Sequence
  Description of Artificial Sequence: Synthetic oligonucleotide
cuggggcaacuugucuacu

SEQ ID NO: 1450821 - RNA, 19 nt, Artificial Sequence
  Description of Artificial Sequence: Synthetic oligonucleotide
agcccucaggagggucaua

SEQ ID NO: 1450822 - RNA, 19 nt, Artificial Sequence
  Description of Artificial Sequence: Synthetic oligonucleotide
cgguaguagacaucccguu

SEQ ID NO: 1450823 - RNA, 19 nt, Artificial Sequence
  Description of Artificial Sequence: Synthetic oligonucleotide
acaacuaaggauucguugc

SEQ ID NO: 1450824 - RNA, 19 nt, Artificial Sequence
  Description of Artificial Sequence: Synthetic oligonucleotide
aagaucgggauucuguccc

SEQ ID NO: 1450825 - RNA, 19 nt, Artificial Sequence
  Description of Artificial Sequence: Synthetic oligonucleotide
acauauuuugaugagaacg

SEQ ID NO: 1450826 - RNA, 19 nt, Artificial Sequence
  Description of Artificial Sequence: Synthetic oligonucleotide
uugagaauagcucugguug

SEQ ID NO: 1450827 - RNA, 19 nt, Artificial Sequence
  Description of Artificial Sequence: Synthetic oligonucleotide
gaguagaugcuucauaggg

SEQ ID NO: 1450828 - RNA, 19 nt, Artificial Sequence
  Description of Artificial Sequence: Synthetic oligonucleotide
ugauagaccagaaacaaaa

SEQ ID NO: 1450829 - RNA, 19 nt, Artificial Sequence
  Description of Artificial Sequence: Synthetic oligonucleotide
auuacugcaccaucuauac

SEQ ID NO: 1450830 - RNA, 19 nt, Artificial Sequence
  Description of Artificial Sequence: Synthetic oligonucleotide
uauuuuagagucuucguca

SEQ ID NO: 1450831 - RNA, 19 nt, Artificial Sequence
  Description of Artificial Sequence: Synthetic oligonucleotide
uuauucauauggcacagug

SEQ ID NO: 1450832 - RNA, 19 nt, Artificial Sequence
  Description of Artificial Sequence: Synthetic oligonucleotide
aaaugagguccauguaugc

SEQ ID NO: 1450833 - RNA, 19 nt, Artificial Sequence
  Description of Artificial Sequence: Synthetic oligonucleotide
uacugcaccaucuauacga

SEQ ID NO: 1450834 - RNA, 19 nt, Artificial Sequence
  Description of Artificial Sequence: Synthetic oligonucleotide
ugaaauaagauguccacau

SEQ ID NO: 1450835 - RNA, 19 nt, Artificial Sequence
  Description of Artificial Sequence: Synthetic oligonucleotide
aguuacuccagcuugagaa

SEQ ID NO: 1450836 - RNA, 19 nt, Artificial Sequence
  Description of Artificial Sequence: Synthetic oligonucleotide
cacagugugaucuccaacg

SEQ ID NO: 1450837 - RNA, 19 nt, Artificial Sequence
  Description of Artificial Sequence: Synthetic oligonucleotide
aaugccugcagagauccgc

SEQ ID NO: 1450838 - RNA, 19 nt, Artificial Sequence
  Description of Artificial Sequence: Synthetic oligonucleotide
aaccuauugacaacuaagg

SEQ ID NO: 1450839 - RNA, 19 nt, Artificial Sequence
  Description of Artificial Sequence: Synthetic oligonucleotide
agaauaucccuuucuacuc

SEQ ID NO: 1450840 - RNA, 19 nt, Artificial Sequence
  Description of Artificial Sequence: Synthetic oligonucleotide
uucuguaagaauuccaagu

SEQ ID NO: 1450841 - RNA, 19 nt, Artificial Sequence
  Description of Artificial Sequence: Synthetic oligonucleotide
ugaggugaaaccacaaugu

SEQ ID NO: 1450842 - RNA, 19 nt, Artificial Sequence
  Description of Artificial Sequence: Synthetic oligonucleotide
uucacauuacaucaccaug

SEQ ID NO: 1450843 - RNA, 19 nt, Artificial Sequence
  Description of Artificial Sequence: Synthetic oligonucleotide
acuuuacugaggugaaacc

SEQ ID NO: 1450844 - RNA, 19 nt, Artificial Sequence
  Description of Artificial Sequence: Synthetic oligonucleotide
aaugggaccaggguucacc

SEQ ID NO: 1450845 - RNA, 19 nt, Artificial Sequence
  Description of Artificial Sequence: Synthetic oligonucleotide
ugcuacuacaacaaacagc

SEQ ID NO: 1450846 - RNA, 19 nt, Artificial Sequence
  Description of Artificial Sequence: Synthetic oligonucleotide
aauagaagaugcaugcuug

SEQ ID NO: 1450847 - RNA, 19 nt, Artificial Sequence
  Description of Artificial Sequence: Synthetic oligonucleotide
uccacaugggaauggaacg

SEQ ID NO: 1450848 - RNA, 19 nt, Artificial Sequence
  Description of Artificial Sequence: Synthetic oligonucleotide
uacaucaccauguuuuacc

SEQ ID NO: 1450849 - RNA, 19 nt, Artificial Sequence
  Description of Artificial Sequence: Synthetic oligonucleotide
aauguuaguucuucaggca

SEQ ID NO: 1450850 - RNA, 19 nt, Artificial Sequence
  Description of Artificial Sequence: Synthetic oligonucleotide
aauuauucauauggcacag

SEQ ID NO: 1450851 - RNA, 19 nt, Artificial Sequence
  Description of Artificial Sequence: Synthetic oligonucleotide
ugagcucuauuuuagaguc

SEQ ID NO: 1450852 - RNA, 19 nt, Artificial Sequence
  Description of Artificial Sequence: Synthetic oligonucleotide
cuaguuaaugccugcagag

SEQ ID NO: 1450853 - RNA, 19 nt, Artificial Sequence
  Description of Artificial Sequence: Synthetic oligonucleotide
uuaauguguagcuucacau

SEQ ID NO: 1450854 - RNA, 19 nt, Artificial Sequence
  Description of Artificial Sequence: Synthetic oligonucleotide
uguugugaaguuuccaccc

SEQ ID NO: 1450855 - RNA, 19 nt, Artificial Sequence
  Description of Artificial Sequence: Synthetic oligonucleotide
aaaagugaaauaagauguc

SEQ ID NO: 1450856 - RNA, 19 nt, Artificial Sequence
  Description of Artificial Sequence: Synthetic oligonucleotide
uuuacugaggugaaaccac

SEQ ID NO: 1450857 - RNA, 19 nt, Artificial Sequence
  Description of Artificial Sequence: Synthetic oligonucleotide
uuuucaaugcagcacugac

SEQ ID NO: 1450858 - RNA, 19 nt, Artificial Sequence
  Description of Artificial Sequence: Synthetic oligonucleotide
guagcuucacauuacauca

SEQ ID NO: 1450859 - RNA, 19 nt, Artificial Sequence
  Description of Artificial Sequence: Synthetic oligonucleotide
auaguuucagcuaugggag

SEQ ID NO: 1450860 - RNA, 19 nt, Artificial Sequence
  Description of Artificial Sequence: Synthetic oligonucleotide
ucuccaacguccaaaauau

SEQ ID NO: 1450861 - RNA, 19 nt, Artificial Sequence
  Description of Artificial Sequence: Synthetic oligonucleotide
ugucaguuacuccagcuug

SEQ ID NO: 1450862 - RNA, 19 nt, Artificial Sequence
  Description of Artificial Sequence: Synthetic oligonucleotide
caagggaacauacuugggg

SEQ ID NO: 1450863 - RNA, 19 nt, Artificial Sequence
  Description of Artificial Sequence: Synthetic oligonucleotide
aggauucguugcuugaagc

SEQ ID NO: 1450864 - RNA, 19 nt, Artificial Sequence
  Description of Artificial Sequence: Synthetic oligonucleotide
gaaccuauugacaacuaag

SEQ ID NO: 1450865 - RNA, 19 nt, Artificial Sequence
  Description of Artificial Sequence: Synthetic oligonucleotide
ucggcaaugguuucuuugg

SEQ ID NO: 1450866 - RNA, 19 nt, Artificial Sequence
  Description of Artificial Sequence: Synthetic oligonucleotide
agaagaucgggauucuguc

SEQ ID NO: 1450867 - RNA, 19 nt, Artificial Sequence
  Description of Artificial Sequence: Synthetic oligonucleotide
acguccaaaauauugaaau

SEQ ID NO: 1450868 - RNA, 19 nt, Artificial Sequence
  Description of Artificial Sequence: Synthetic oligonucleotide
gaacgauucuuccauccgg

SEQ ID NO: 1450869 - RNA, 19 nt, Artificial Sequence
  Description of Artificial Sequence: Synthetic oligonucleotide
uuaaugccugcagagaucc

SEQ ID NO: 1450870 - RNA, 19 nt, Artificial Sequence
  Description of Artificial Sequence: Synthetic oligonucleotide
ggugaaaccacaauguuag

SEQ ID NO: 1450871 - RNA, 19 nt, Artificial Sequence
  Description of Artificial Sequence: Synthetic oligonucleotide
cuugagcucuauuuuagag

SEQ ID NO: 1450872 - RNA, 19 nt, Artificial Sequence
  Description of Artificial Sequence: Synthetic oligonucleotide
uuuaguggcucucucuucu

SEQ ID NO: 1450873 - RNA, 19 nt, Artificial Sequence
  Description of Artificial Sequence: Synthetic oligonucleotide
aaggauucguugcuugaag

SEQ ID NO: 1450874 - RNA, 19 nt, Artificial Sequence
  Description of Artificial Sequence: Synthetic oligonucleotide
agagucauuacuuccauuu

SEQ ID NO: 1450875 - RNA, 19 nt, Artificial Sequence
  Description of Artificial Sequence: Synthetic oligonucleotide
uucguuugcuuuucaaugc

SEQ ID NO: 1450876 - RNA, 19 nt, Artificial Sequence
  Description of Artificial Sequence: Synthetic oligonucleotide
agagauccgccuuuggagg

SEQ ID NO: 1450877 - RNA, 19 nt, Artificial Sequence
  Description of Artificial Sequence: Synthetic oligonucleotide
ugcaccaucuauacgaaaa

SEQ ID NO: 1450878 - RNA, 19 nt, Artificial Sequence
  Description of Artificial Sequence: Synthetic oligonucleotide
gaucaaguugaaugugccg

SEQ ID NO: 1450879 - RNA, 19 nt, Artificial Sequence
  Description of Artificial Sequence: Synthetic oligonucleotide
aucuauacgaaaauguugu

SEQ ID NO: 1450880 - RNA, 19 nt, Artificial Sequence
  Description of Artificial Sequence: Synthetic oligonucleotide
aaauuagugaagggauuuc

SEQ ID NO: 1450881 - RNA, 19 nt, Artificial Sequence
  Description of Artificial Sequence: Synthetic oligonucleotide
uguuacuggagucuuugcu

SEQ ID NO: 1450882 - RNA, 19 nt, Artificial Sequence
  Description of Artificial Sequence: Synthetic oligonucleotide
ucauuagagagcucuguca

SEQ ID NO: 1450883 - RNA, 19 nt, Artificial Sequence
  Description of Artificial Sequence: Synthetic oligonucleotide
uuaucuucuggucucaguu

SEQ ID NO: 1450884 - RNA, 19 nt, Artificial Sequence
  Description of Artificial Sequence: Synthetic oligonucleotide
aaaauuagugaagggauuu

SEQ ID NO: 1450885 - RNA, 19 nt, Artificial Sequence
  Description of Artificial Sequence: Synthetic oligonucleotide
cuauuuuagagucuucguc

SEQ ID NO: 1450886 - RNA, 19 nt, Artificial Sequence
  Description of Artificial Sequence: Synthetic oligonucleotide
uacuuggggacauauuuug

SEQ ID NO: 1450887 - RNA, 19 nt, Artificial Sequence
  Description of Artificial Sequence: Synthetic oligonucleotide
ucuauuuuagagucuucgu

SEQ ID NO: 1450888 - RNA, 19 nt, Artificial Sequence
  Description of Artificial Sequence: Synthetic oligonucleotide
agaucaaguugaaugugcc

SEQ ID NO: 1450889 - RNA, 19 nt, Artificial Sequence
  Description of Artificial Sequence: Synthetic oligonucleotide
uugagcucuauuuuagagu

SEQ ID NO: 1450890 - RNA, 19 nt, Artificial Sequence
  Description of Artificial Sequence: Synthetic oligonucleotide
gagaacgauucuuccaucc

SEQ ID NO: 1450891 - RNA, 19 nt, Artificial Sequence
  Description of Artificial Sequence: Synthetic oligonucleotide
agaacgauucuuccauccg

SEQ ID NO: 1450892 - RNA, 19 nt, Artificial Sequence
  Description of Artificial Sequence: Synthetic oligonucleotide
ccaaaagugaaauaagaug

SEQ ID NO: 1450893 - RNA, 19 nt, Artificial Sequence
  Description of Artificial Sequence: Synthetic oligonucleotide
gaaaugagguccauguaug

SEQ ID NO: 1450894 - RNA, 19 nt, Artificial Sequence
  Description of Artificial Sequence: Synthetic oligonucleotide
cauuagagagcucugucac

SEQ ID NO: 1450895 - RNA, 19 nt, Artificial Sequence
  Description of Artificial Sequence: Synthetic oligonucleotide
ucugucagagucauuacuu

SEQ ID NO: 1450896 - RNA, 19 nt, Artificial Sequence
  Description of Artificial Sequence: Synthetic oligonucleotide
agaaaauuagugaagggau

SEQ ID NO: 1450897 - RNA, 19 nt, Artificial Sequence
  Description of Artificial Sequence: Synthetic oligonucleotide
uauucauauggcacagugu

SEQ ID NO: 1450898 - RNA, 19 nt, Artificial Sequence
  Description of Artificial Sequence: Synthetic oligonucleotide
uaugggaguacucucugaa

SEQ ID NO: 1450899 - RNA, 19 nt, Artificial Sequence
  Description of Artificial Sequence: Synthetic oligonucleotide
gauaugucugagaauucag

SEQ ID NO: 1450900 - RNA, 19 nt, Artificial Sequence
  Description of Artificial Sequence: Synthetic oligonucleotide
aaugugccgaagugauuuc

SEQ ID NO: 1450901 - RNA, 19 nt, Artificial Sequence
  Description of Artificial Sequence: Synthetic oligonucleotide
aauaagauguccacauuaa

SEQ ID NO: 1450902 - RNA, 19 nt, Artificial Sequence
  Description of Artificial Sequence: Synthetic oligonucleotide
acuaaggauucguugcuug

SEQ ID NO: 1450903 - RNA, 19 nt, Artificial Sequence
  Description of Artificial Sequence: Synthetic oligonucleotide
uucauuagagagcucuguc

SEQ ID NO: 1450904 - RNA, 19 nt, Artificial Sequence
  Description of Artificial Sequence: Synthetic oligonucleotide
gaugagaacgauucuucca

SEQ ID NO: 1450905 - RNA, 19 nt, Artificial Sequence
  Description of Artificial Sequence: Synthetic oligonucleotide
ugguuguccccacaauggg

SEQ ID NO: 1450906 - RNA, 19 nt, Artificial Sequence
  Description of Artificial Sequence: Synthetic oligonucleotide
aucaaguugaaugugccga

SEQ ID NO: 1450907 - RNA, 19 nt, Artificial Sequence
  Description of Artificial Sequence: Synthetic oligonucleotide
guagaugcuucauagggga

SEQ ID NO: 1450908 - RNA, 19 nt, Artificial Sequence
  Description of Artificial Sequence: Synthetic oligonucleotide
auccacaugggaauggaac

SEQ ID NO: 1450909 - RNA, 19 nt, Artificial Sequence
  Description of Artificial Sequence: Synthetic oligonucleotide
gagaucaaguugaaugugc

SEQ ID NO: 1450910 - RNA, 19 nt, Artificial Sequence
  Description of Artificial Sequence: Synthetic oligonucleotide
aguagaugcuucauagggg

SEQ ID NO: 1450911 - RNA, 19 nt, Artificial Sequence
  Description of Artificial Sequence: Synthetic oligonucleotide
gaagaucgggauucugucc

SEQ ID NO: 1450912 - RNA, 19 nt, Artificial Sequence
  Description of Artificial Sequence: Synthetic oligonucleotide
agggaacauacuuggggac

SEQ ID NO: 1450913 - RNA, 19 nt, Artificial Sequence
  Description of Artificial Sequence: Synthetic oligonucleotide
uuugaugagaacgauucuu

SEQ ID NO: 1450914 - RNA, 19 nt, Artificial Sequence
  Description of Artificial Sequence: Synthetic oligonucleotide
guuacuggagucuuugcuc

SEQ ID NO: 1450915 - RNA, 19 nt, Artificial Sequence
  Description of Artificial Sequence: Synthetic oligonucleotide
acugcuacuacaacaaaca

SEQ ID NO: 1450916 - RNA, 19 nt, Artificial Sequence
  Description of Artificial Sequence: Synthetic oligonucleotide
ugacuugacauccgccaag

SEQ ID NO: 1450917 - RNA, 19 nt, Artificial Sequence
  Description of Artificial Sequence: Synthetic oligonucleotide
uggacucccuaguuaaugc

SEQ ID NO: 1450918 - RNA, 19 nt, Artificial Sequence
  Description of Artificial Sequence: Synthetic oligonucleotide
uuacugaggugaaaccaca

SEQ ID NO: 1450919 - RNA, 19 nt, Artificial Sequence
  Description of Artificial Sequence: Synthetic oligonucleotide
auacgaaaauguugugaag

SEQ ID NO: 1450920 - RNA, 19 nt, Artificial Sequence
  Description of Artificial Sequence: Synthetic oligonucleotide
ucuauacgaaaauguugug

SEQ ID NO: 1450921 - RNA, 19 nt, Artificial Sequence
  Description of Artificial Sequence: Synthetic oligonucleotide
accuauugacaacuaagga

SEQ ID NO: 1450922 - RNA, 19 nt, Artificial Sequence
  Description of Artificial Sequence: Synthetic oligonucleotide
gaagaugcaugcuugaaau

SEQ ID NO: 1450923 - RNA, 19 nt, Artificial Sequence
  Description of Artificial Sequence: Synthetic oligonucleotide
accaucuauacgaaaaugu

SEQ ID NO: 1450924 - RNA, 19 nt, Artificial Sequence
  Description of Artificial Sequence: Synthetic oligonucleotide
uuacugcaccaucuauacg

SEQ ID NO: 1450925 - RNA, 19 nt, Artificial Sequence
  Description of Artificial Sequence: Synthetic oligonucleotide
cucucugaaauuacugcac

SEQ ID NO: 1450926 - RNA, 19 nt, Artificial Sequence
  Description of Artificial Sequence: Synthetic oligonucleotide
uuggucugcggcaacuagc

SEQ ID NO: 1450927 - RNA, 19 nt, Artificial Sequence
  Description of Artificial Sequence: Synthetic oligonucleotide
aggaguagaagaucgggau

SEQ ID NO: 1450928 - RNA, 19 nt, Artificial Sequence
  Description of Artificial Sequence: Synthetic oligonucleotide
ucgucauugucacuguauc

SEQ ID NO: 1450929 - RNA, 19 nt, Artificial Sequence
  Description of Artificial Sequence: Synthetic oligonucleotide
uauugacaacuaaggauuc

SEQ ID NO: 1450930 - RNA, 19 nt, Artificial Sequence
  Description of Artificial Sequence: Synthetic oligonucleotide
auauggcacagugugaucu

SEQ ID NO: 1450931 - RNA, 19 nt, Artificial Sequence
  Description of Artificial Sequence: Synthetic oligonucleotide
uggucugcggcaacuagca

SEQ ID NO: 1450932 - RNA, 19 nt, Artificial Sequence
  Description of Artificial Sequence: Synthetic oligonucleotide
aacauuuccuuaagaauau

SEQ ID NO: 1450933 - RNA, 19 nt, Artificial Sequence
  Description of Artificial Sequence: Synthetic oligonucleotide
ucguuugcuuuucaaugca

SEQ ID NO: 1450934 - RNA, 19 nt, Artificial Sequence
  Description of Artificial Sequence: Synthetic oligonucleotide
gccaagggaacauacuugg

SEQ ID NO: 1450935 - RNA, 19 nt, Artificial Sequence
  Description of Artificial Sequence: Synthetic oligonucleotide
auuuuacuaucuugaagaa

SEQ ID NO: 1450936 - RNA, 19 nt, Artificial Sequence
  Description of Artificial Sequence: Synthetic oligonucleotide
cuuuguggcuuuccggccg

SEQ ID NO: 1450937 - RNA, 19 nt, Artificial Sequence
  Description of Artificial Sequence: Synthetic oligonucleotide
acaucaccauguuuuaccu

SEQ ID NO: 1450938 - RNA, 19 nt, Artificial Sequence
  Description of Artificial Sequence: Synthetic oligonucleotide
uuuaucuucuggucucagu

SEQ ID NO: 1450939 - RNA, 19 nt, Artificial Sequence
  Description of Artificial Sequence: Synthetic oligonucleotide
ugcuugaguguuacuggag

SEQ ID NO: 1450940 - RNA, 19 nt, Artificial Sequence
  Description of Artificial Sequence: Synthetic oligonucleotide
uuagagagcucugucacau

SEQ ID NO: 1450941 - RNA, 19 nt, Artificial Sequence
  Description of Artificial Sequence: Synthetic oligonucleotide
gacauauuuugaugagaac

SEQ ID NO: 1450942 - RNA, 19 nt, Artificial Sequence
  Description of Artificial Sequence: Synthetic oligonucleotide
ugaaaccacaauguuaguu

SEQ ID NO: 1450943 - RNA, 19 nt, Artificial Sequence
  Description of Artificial Sequence: Synthetic oligonucleotide
uucgucauugucacuguau

SEQ ID NO: 1450944 - RNA, 19 nt, Artificial Sequence
  Description of Artificial Sequence: Synthetic oligonucleotide
aacuagcacuaauuccugu

SEQ ID NO: 1450945 - RNA, 19 nt, Artificial Sequence
  Description of Artificial Sequence: Synthetic oligonucleotide
caugggaauggaacguccc

SEQ ID NO: 1450946 - RNA, 19 nt, Artificial Sequence
  Description of Artificial Sequence: Synthetic oligonucleotide
aagcuugagcucuauuuua

SEQ ID NO: 1450947 - RNA, 19 nt, Artificial Sequence
  Description of Artificial Sequence: Synthetic oligonucleotide
gagauccgccuuuggaggg

SEQ ID NO: 1450948 - RNA, 19 nt, Artificial Sequence
  Description of Artificial Sequence: Synthetic oligonucleotide
aucugucagagucauuacu

SEQ ID NO: 1450949 - RNA, 19 nt, Artificial Sequence
  Description of Artificial Sequence: Synthetic oligonucleotide
uaggggaacauuuccuuaa

SEQ ID NO: 1450950 - RNA, 19 nt, Artificial Sequence
  Description of Artificial Sequence: Synthetic oligonucleotide
gagaauucagugauuggca

SEQ ID NO: 1450951 - RNA, 19 nt, Artificial Sequence
  Description of Artificial Sequence: Synthetic oligonucleotide
uugcuugaguguuacugga

SEQ ID NO: 1450952 - RNA, 19 nt, Artificial Sequence
  Description of Artificial Sequence: Synthetic oligonucleotide
guaucugucagagucauua

SEQ ID NO: 1450953 - RNA, 19 nt, Artificial Sequence
  Description of Artificial Sequence: Synthetic oligonucleotide
auuggucugcggcaacuag

SEQ ID NO: 1450954 - RNA, 19 nt, Artificial Sequence
  Description of Artificial Sequence: Synthetic oligonucleotide
caccccguaucucacaagc

SEQ ID NO: 1450955 - RNA, 19 nt, Artificial Sequence
  Description of Artificial Sequence: Synthetic oligonucleotide
cuugaguguuacuggaguc

SEQ ID NO: 1450956 - RNA, 19 nt, Artificial Sequence
  Description of Artificial Sequence: Synthetic oligonucleotide
acaugggaauggaacgucc

SEQ ID NO: 1450957 - RNA, 19 nt, Artificial Sequence
  Description of Artificial Sequence: Synthetic oligonucleotide
ggcaacuagcacuaauucc

SEQ ID NO: 1450958 - RNA, 19 nt, Artificial Sequence
  Description of Artificial Sequence: Synthetic oligonucleotide
ucuuuguggcuuuccggcc

SEQ ID NO: 1450959 - RNA, 19 nt, Artificial Sequence
  Description of Artificial Sequence: Synthetic oligonucleotide
agaugcaugcuugaaauuu

SEQ ID NO: 1450960 - RNA, 19 nt, Artificial Sequence
  Description of Artificial Sequence: Synthetic oligonucleotide
gcauuuuccgcugaggaag

SEQ ID NO: 1450961 - RNA, 19 nt, Artificial Sequence
  Description of Artificial Sequence: Synthetic oligonucleotide
agaucgggauucugucccc

SEQ ID NO: 1450962 - RNA, 19 nt, Artificial Sequence
  Description of Artificial Sequence: Synthetic oligonucleotide
cuucauaggggaacauuuc

SEQ ID NO: 1450963 - RNA, 19 nt, Artificial Sequence
  Description of Artificial Sequence: Synthetic oligonucleotide
cuauacgaaaauguuguga

SEQ ID NO: 1450964 - RNA, 19 nt, Artificial Sequence
  Description of Artificial Sequence: Synthetic oligonucleotide
uugaagccuuuauaguuuc

SEQ ID NO: 1450965 - RNA, 19 nt, Artificial Sequence
  Description of Artificial Sequence: Synthetic oligonucleotide
ugcaugcuugaaauuucca

SEQ ID NO: 1450966 - RNA, 19 nt, Artificial Sequence
  Description of Artificial Sequence: Synthetic oligonucleotide
acuagcacuaauuccuguu

SEQ ID NO: 1450967 - RNA, 19 nt, Artificial Sequence
  Description of Artificial Sequence: Synthetic oligonucleotide
cuuuacugaggugaaacca

SEQ ID NO: 1450968 - RNA, 19 nt, Artificial Sequence
  Description of Artificial Sequence: Synthetic oligonucleotide
aacgauucuuccauccgga

SEQ ID NO: 1450969 - RNA, 19 nt, Artificial Sequence
  Description of Artificial Sequence: Synthetic oligonucleotide
auggaacgucccuucuucg

SEQ ID NO: 1450970 - RNA, 19 nt, Artificial Sequence
  Description of Artificial Sequence: Synthetic oligonucleotide
auuagagagcucugucaca

SEQ ID NO: 1450971 - RNA, 19 nt, Artificial Sequence
  Description of Artificial Sequence: Synthetic oligonucleotide
cuugcauuuuccgcugagg

SEQ ID NO: 1450972 - RNA, 19 nt, Artificial Sequence
  Description of Artificial Sequence: Synthetic oligonucleotide
acgaaaauguugugaaguu

SEQ ID NO: 1450973 - RNA, 19 nt, Artificial Sequence
  Description of Artificial Sequence: Synthetic oligonucleotide
guacucucugaaauuacug

SEQ ID NO: 1450974 - RNA, 19 nt, Artificial Sequence
  Description of Artificial Sequence: Synthetic oligonucleotide
cugcuacuacaacaaacag

SEQ ID NO: 1450975 - RNA, 19 nt, Artificial Sequence
  Description of Artificial Sequence: Synthetic oligonucleotide
agacuguuggcagaggagu

SEQ ID NO: 1450976 - RNA, 19 nt, Artificial Sequence
  Description of Artificial Sequence: Synthetic oligonucleotide
cauagcuugauagaccaga

SEQ ID NO: 1450977 - RNA, 19 nt, Artificial Sequence
  Description of Artificial Sequence: Synthetic oligonucleotide
ucuuugcucugcccuuuag

SEQ ID NO: 1450978 - RNA, 19 nt, Artificial Sequence
  Description of Artificial Sequence: Synthetic oligonucleotide
ggaguagaugcuucauagg

SEQ ID NO: 1450979 - RNA, 19 nt, Artificial Sequence
  Description of Artificial Sequence: Synthetic oligonucleotide
uuucuacucuucuuuccuc

SEQ ID NO: 1450980 - RNA, 19 nt, Artificial Sequence
  Description of Artificial Sequence: Synthetic oligonucleotide
guugaaugugccgaaguga

SEQ ID NO: 1450981 - RNA, 19 nt, Artificial Sequence
  Description of Artificial Sequence: Synthetic oligonucleotide
uucaccccguaucucacaa

SEQ ID NO: 1450982 - RNA, 19 nt, Artificial Sequence
  Description of Artificial Sequence: Synthetic oligonucleotide
cuagcggccggccugcagc

SEQ ID NO: 1450983 - RNA, 19 nt, Artificial Sequence
  Description of Artificial Sequence: Synthetic oligonucleotide
uaucugucagagucauuac

SEQ ID NO: 1450984 - RNA, 19 nt, Artificial Sequence
  Description of Artificial Sequence: Synthetic oligonucleotide
aagaugcaugcuugaaauu

SEQ ID NO: 1450985 - RNA, 19 nt, Artificial Sequence
  Description of Artificial Sequence: Synthetic oligonucleotide
acagugugaucuccaacgu

SEQ ID NO: 1450986 - RNA, 19 nt, Artificial Sequence
  Description of Artificial Sequence: Synthetic oligonucleotide
caugcuugaaauuuccagu

SEQ ID NO: 1450987 - RNA, 19 nt, Artificial Sequence
  Description of Artificial Sequence: Synthetic oligonucleotide
uacuaucuugaagaaaauu

SEQ ID NO: 1450988 - RNA, 19 nt, Artificial Sequence
  Description of Artificial Sequence: Synthetic oligonucleotide
aggggaacauuuccuuaag

SEQ ID NO: 1450989 - RNA, 19 nt, Artificial Sequence
  Description of Artificial Sequence: Synthetic oligonucleotide
ccuuugauuggucugcggc

SEQ ID NO: 1450990 - RNA, 19 nt, Artificial Sequence
  Description of Artificial Sequence: Synthetic oligonucleotide
cugucagagucauuacuuc

SEQ ID NO: 1450991 - RNA, 19 nt, Artificial Sequence
  Description of Artificial Sequence: Synthetic oligonucleotide
aacguccaaaauauugaaa

SEQ ID NO: 1450992 - RNA, 19 nt, Artificial Sequence
  Description of Artificial Sequence: Synthetic oligonucleotide
gaugcuucauaggggaaca

SEQ ID NO: 1450993 - RNA, 19 nt, Artificial Sequence
  Description of Artificial Sequence: Synthetic oligonucleotide
uggcuuuccggccgcgccg

SEQ ID NO: 1450994 - RNA, 19 nt, Artificial Sequence
  Description of Artificial Sequence: Synthetic oligonucleotide
acugaacucuagcggccgg

SEQ ID NO: 1450995 - RNA, 19 nt, Artificial Sequence
  Description of Artificial Sequence: Synthetic oligonucleotide
ugaagccuuuauaguuuca

SEQ ID NO: 1450996 - RNA, 19 nt, Artificial Sequence
  Description of Artificial Sequence: Synthetic oligonucleotide
uaaggauucguugcuugaa

SEQ ID NO: 1450997 - RNA, 19 nt, Artificial Sequence
  Description of Artificial Sequence: Synthetic oligonucleotide
gcagaauagaagaugcaug

SEQ ID NO: 1450998 - RNA, 19 nt, Artificial Sequence
  Description of Artificial Sequence: Synthetic oligonucleotide
ugacaacuaaggauucguu

SEQ ID NO: 1450999 - RNA, 19 nt, Artificial Sequence
  Description of Artificial Sequence: Synthetic oligonucleotide
uggauaugucugagaauuc

SEQ ID NO: 1451000 - RNA, 19 nt, Artificial Sequence
  Description of Artificial Sequence: Synthetic oligonucleotide
uacugaggugaaaccacaa

SEQ ID NO: 1451001 - RNA, 19 nt, Artificial Sequence
  Description of Artificial Sequence: Synthetic oligonucleotide
auauuuugaugagaacgau

SEQ ID NO: 1451002 - RNA, 19 nt, Artificial Sequence
  Description of Artificial Sequence: Synthetic oligonucleotide
uccgccaagggaacauacu

SEQ ID NO: 1451003 - RNA, 19 nt, Artificial Sequence
  Description of Artificial Sequence: Synthetic oligonucleotide
augccugcagagauccgcc

SEQ ID NO: 1451004 - RNA, 19 nt, Artificial Sequence
  Description of Artificial Sequence: Synthetic oligonucleotide
ugagaacgauucuuccauc

SEQ ID NO: 1451005 - RNA, 19 nt, Artificial Sequence
  Description of Artificial Sequence: Synthetic oligonucleotide
ugaacucuagcggccggcc

SEQ ID NO: 1451006 - RNA, 19 nt, Artificial Sequence
  Description of Artificial Sequence: Synthetic oligonucleotide
uauggcacagugugaucuc

SEQ ID NO: 1451007 - RNA, 19 nt, Artificial Sequence
  Description of Artificial Sequence: Synthetic oligonucleotide
ggcaaugguuucuuuggug

SEQ ID NO: 1451008 - RNA, 19 nt, Artificial Sequence
  Description of Artificial Sequence: Synthetic oligonucleotide
aagagacuguuggcagagg

SEQ ID NO: 1451009 - RNA, 19 nt, Artificial Sequence
  Description of Artificial Sequence: Synthetic oligonucleotide
ugugccgaagugauuucuu

SEQ ID NO: 1451010 - RNA, 19 nt, Artificial Sequence
  Description of Artificial Sequence: Synthetic oligonucleotide
ucggcucucggcaaugguu

SEQ ID NO: 1451011 - RNA, 19 nt, Artificial Sequence
  Description of Artificial Sequence: Synthetic oligonucleotide
ucgggauucuguccccugu

SEQ ID NO: 1451012 - RNA, 19 nt, Artificial Sequence
  Description of Artificial Sequence: Synthetic oligonucleotide
uguccccacaaugggacca

SEQ ID NO: 1451013 - RNA, 19 nt, Artificial Sequence
  Description of Artificial Sequence: Synthetic oligonucleotide
agguccauguaugcauuuc

SEQ ID NO: 1451014 - RNA, 19 nt, Artificial Sequence
  Description of Artificial Sequence: Synthetic oligonucleotide
cagugaaccuauugacaac

SEQ ID NO: 1451015 - RNA, 19 nt, Artificial Sequence
  Description of Artificial Sequence: Synthetic oligonucleotide
uuuuagagucuucgucauu

SEQ ID NO: 1451016 - RNA, 19 nt, Artificial Sequence
  Description of Artificial Sequence: Synthetic oligonucleotide
gauucguugcuugaagccu

SEQ ID NO: 1451017 - RNA, 19 nt, Artificial Sequence
  Description of Artificial Sequence: Synthetic oligonucleotide
ugcggcaacuagcacuaau

SEQ ID NO: 1451018 - RNA, 19 nt, Artificial Sequence
  Description of Artificial Sequence: Synthetic oligonucleotide
ggggacauauuuugaugag

SEQ ID NO: 1451019 - RNA, 19 nt, Artificial Sequence
  Description of Artificial Sequence: Synthetic oligonucleotide
agccccuuugauuggucug

SEQ ID NO: 1451020 - RNA, 19 nt, Artificial Sequence
  Description of Artificial Sequence: Synthetic oligonucleotide
gcaacuagcacuaauuccu

SEQ ID NO: 1451021 - RNA, 19 nt, Artificial Sequence
  Description of Artificial Sequence: Synthetic oligonucleotide
acucuagcggccggccugc

SEQ ID NO: 1451022 - RNA, 19 nt, Artificial Sequence
  Description of Artificial Sequence: Synthetic oligonucleotide
caacguccaaaauauugaa

SEQ ID NO: 1451023 - RNA, 19 nt, Artificial Sequence
  Description of Artificial Sequence: Synthetic oligonucleotide
cucccuaguuaaugccugc

SEQ ID NO: 1451024 - RNA, 19 nt, Artificial Sequence
  Description of Artificial Sequence: Synthetic oligonucleotide
ggaacauuuccuuaagaau

SEQ ID NO: 1451025 - RNA, 19 nt, Artificial Sequence
  Description of Artificial Sequence: Synthetic oligonucleotide
ugaguguuacuggagucuu

SEQ ID NO: 1451026 - RNA, 19 nt, Artificial Sequence
  Description of Artificial Sequence: Synthetic oligonucleotide
aacuaaggauucguugcuu

SEQ ID NO: 1451027 - RNA, 19 nt, Artificial Sequence
  Description of Artificial Sequence: Synthetic oligonucleotide
ccaacguccaaaauauuga

SEQ ID NO: 1451028 - RNA, 19 nt, Artificial Sequence
  Description of Artificial Sequence: Synthetic oligonucleotide
ggauaugucugagaauuca

SEQ ID NO: 1451029 - RNA, 19 nt, Artificial Sequence
  Description of Artificial Sequence: Synthetic oligonucleotide
uuucagcuaugggaguacu

SEQ ID NO: 1451030 - RNA, 19 nt, Artificial Sequence
  Description of Artificial Sequence: Synthetic oligonucleotide
cccguaucucacaagcugc

SEQ ID NO: 1451031 - RNA, 19 nt, Artificial Sequence
  Description of Artificial Sequence: Synthetic oligonucleotide
uugauuggucugcggcaac

SEQ ID NO: 1451032 - RNA, 19 nt, Artificial Sequence
  Description of Artificial Sequence: Synthetic oligonucleotide
ggacucccuaguuaaugcc

SEQ ID NO: 1451033 - RNA, 19 nt, Artificial Sequence
  Description of Artificial Sequence: Synthetic oligonucleotide
ucaccauguuuuaccuuau

SEQ ID NO: 1451034 - RNA, 19 nt, Artificial Sequence
  Description of Artificial Sequence: Synthetic oligonucleotide
cacugaacucuagcggccg

SEQ ID NO: 1451035 - RNA, 19 nt, Artificial Sequence
  Description of Artificial Sequence: Synthetic oligonucleotide
auuauucauauggcacagu

SEQ ID NO: 1451036 - RNA, 19 nt, Artificial Sequence
  Description of Artificial Sequence: Synthetic oligonucleotide
caaugcauuuuccccaaaa

SEQ ID NO: 1451037 - RNA, 19 nt, Artificial Sequence
  Description of Artificial Sequence: Synthetic oligonucleotide
ucccuaguuaaugccugca

SEQ ID NO: 1451038 - RNA, 19 nt, Artificial Sequence
  Description of Artificial Sequence: Synthetic oligonucleotide
uguaugcauuucguuugcu

SEQ ID NO: 1451039 - RNA, 19 nt, Artificial Sequence
  Description of Artificial Sequence: Synthetic oligonucleotide
cacuaauuccuguuggagu

SEQ ID NO: 1451040 - RNA, 19 nt, Artificial Sequence
  Description of Artificial Sequence: Synthetic oligonucleotide
acucccuaguuaaugccug

SEQ ID NO: 1451041 - RNA, 19 nt, Artificial Sequence
  Description of Artificial Sequence: Synthetic oligonucleotide
agcuaugggaguacucucu

SEQ ID NO: 1451042 - RNA, 19 nt, Artificial Sequence
  Description of Artificial Sequence: Synthetic oligonucleotide
ucuagcggccggccugcag

SEQ ID NO: 1451043 - RNA, 19 nt, Artificial Sequence
  Description of Artificial Sequence: Synthetic oligonucleotide
uuguccauucagugucagu

SEQ ID NO: 1451044 - RNA, 19 nt, Artificial Sequence
  Description of Artificial Sequence: Synthetic oligonucleotide
cauuucguuugcuuuucaa

SEQ ID NO: 1451045 - RNA, 19 nt, Artificial Sequence
  Description of Artificial Sequence: Synthetic oligonucleotide
uuaguggcucucucuucuc

SEQ ID NO: 1451046 - RNA, 19 nt, Artificial Sequence
  Description of Artificial Sequence: Synthetic oligonucleotide
gcacuaauuccuguuggag

SEQ ID NO: 1451047 - RNA, 19 nt, Artificial Sequence
  Description of Artificial Sequence: Synthetic oligonucleotide
ucaccccguaucucacaag

SEQ ID NO: 1451048 - RNA, 19 nt, Artificial Sequence
  Description of Artificial Sequence: Synthetic oligonucleotide
auagcuugauagaccagaa

SEQ ID NO: 1451049 - RNA, 19 nt, Artificial Sequence
  Description of Artificial Sequence: Synthetic oligonucleotide
aguagaagaucgggauucu

SEQ ID NO: 1451050 - RNA, 19 nt, Artificial Sequence
  Description of Artificial Sequence: Synthetic oligonucleotide
guagaagaucgggauucug

SEQ ID NO: 1451051 - RNA, 19 nt, Artificial Sequence
  Description of Artificial Sequence: Synthetic oligonucleotide
ugcuucauaggggaacauu

SEQ ID NO: 1451052 - RNA, 19 nt, Artificial Sequence
  Description of Artificial Sequence: Synthetic oligonucleotide
ccagugaaccuauugacaa

SEQ ID NO: 1451053 - RNA, 19 nt, Artificial Sequence
  Description of Artificial Sequence: Synthetic oligonucleotide
gcuaugggaguacucucug

SEQ ID NO: 1451054 - RNA, 19 nt, Artificial Sequence
  Description of Artificial Sequence: Synthetic oligonucleotide
gaaaauuagugaagggauu

SEQ ID NO: 1451055 - RNA, 19 nt, Artificial Sequence
  Description of Artificial Sequence: Synthetic oligonucleotide
cauuuuccgcugaggaaga

SEQ ID NO: 1451056 - RNA, 19 nt, Artificial Sequence
  Description of Artificial Sequence: Synthetic oligonucleotide
guuucagcuaugggaguac

SEQ ID NO: 1451057 - RNA, 19 nt, Artificial Sequence
  Description of Artificial Sequence: Synthetic oligonucleotide
ugggaauggaacgucccuu

SEQ ID NO: 1451058 - RNA, 19 nt, Artificial Sequence
  Description of Artificial Sequence: Synthetic oligonucleotide
cuuguggacucccuaguua

SEQ ID NO: 1451059 - RNA, 19 nt, Artificial Sequence
  Description of Artificial Sequence: Synthetic oligonucleotide
uuuccggccgcgccgccgu

SEQ ID NO: 1451060 - RNA, 19 nt, Artificial Sequence
  Description of Artificial Sequence: Synthetic oligonucleotide
aucgggauucuguccccug

SEQ ID NO: 1451061 - RNA, 19 nt, Artificial Sequence
  Description of Artificial Sequence: Synthetic oligonucleotide
cugacuuuacugaggugaa

SEQ ID NO: 1451062 - RNA, 19 nt, Artificial Sequence
  Description of Artificial Sequence: Synthetic oligonucleotide
auacuuggggacauauuuu

SEQ ID NO: 1451063 - RNA, 19 nt, Artificial Sequence
  Description of Artificial Sequence: Synthetic oligonucleotide
cugaacucuagcggccggc

SEQ ID NO: 1451064 - RNA, 19 nt, Artificial Sequence
  Description of Artificial Sequence: Synthetic oligonucleotide
uuggcccucuuguggacuc

SEQ ID NO: 1451065 - RNA, 19 nt, Artificial Sequence
  Description of Artificial Sequence: Synthetic oligonucleotide
ugguuuccauagcuugaua

SEQ ID NO: 1451066 - RNA, 19 nt, Artificial Sequence
  Description of Artificial Sequence: Synthetic oligonucleotide
cuaugggaguacucucuga

SEQ ID NO: 1451067 - RNA, 19 nt, Artificial Sequence
  Description of Artificial Sequence: Synthetic oligonucleotide
gcagagauccgccuuugga

SEQ ID NO: 1451068 - RNA, 19 nt, Artificial Sequence
  Description of Artificial Sequence: Synthetic oligonucleotide
acgauucuuccauccggaa

SEQ ID NO: 1451069 - RNA, 19 nt, Artificial Sequence
  Description of Artificial Sequence: Synthetic oligonucleotide
ccaagggaacauacuuggg

SEQ ID NO: 1451070 - RNA, 19 nt, Artificial Sequence
  Description of Artificial Sequence: Synthetic oligonucleotide
aacgucccuucuucgucuu

SEQ ID NO: 1451071 - RNA, 19 nt, Artificial Sequence
  Description of Artificial Sequence: Synthetic oligonucleotide
ccuaguuaaugccugcaga

SEQ ID NO: 1451072 - RNA, 19 nt, Artificial Sequence
  Description of Artificial Sequence: Synthetic oligonucleotide
uucguugcuugaagccuuu

SEQ ID NO: 1451073 - RNA, 19 nt, Artificial Sequence
  Description of Artificial Sequence: Synthetic oligonucleotide
aggguucaccccguaucuc

SEQ ID NO: 1451074 - RNA, 19 nt, Artificial Sequence
  Description of Artificial Sequence: Synthetic oligonucleotide
gacucccuaguuaaugccu

SEQ ID NO: 1451075 - RNA, 19 nt, Artificial Sequence
  Description of Artificial Sequence: Synthetic oligonucleotide
auucguugcuugaagccuu

SEQ ID NO: 1451076 - RNA, 19 nt, Artificial Sequence
  Description of Artificial Sequence: Synthetic oligonucleotide
ggaguacucucugaaauua

SEQ ID NO: 1451077 - RNA, 19 nt, Artificial Sequence
  Description of Artificial Sequence: Synthetic oligonucleotide
ucaaugcagcacugacuuu

SEQ ID NO: 1451078 - RNA, 19 nt, Artificial Sequence
  Description of Artificial Sequence: Synthetic oligonucleotide
aucucacaagcugcuccag

SEQ ID NO: 1451079 - RNA, 19 nt, Artificial Sequence
  Description of Artificial Sequence: Synthetic oligonucleotide
ccccguaucucacaagcug

SEQ ID NO: 1451080 - RNA, 19 nt, Artificial Sequence
  Description of Artificial Sequence: Synthetic oligonucleotide
uagcggccggccugcagcc

SEQ ID NO: 1451081 - RNA, 19 nt, Artificial Sequence
  Description of Artificial Sequence: Synthetic oligonucleotide
guuacuccagcuugagaau

SEQ ID NO: 1451082 - RNA, 19 nt, Artificial Sequence
  Description of Artificial Sequence: Synthetic oligonucleotide
auauugaaaugagguccau

SEQ ID NO: 1451083 - RNA, 19 nt, Artificial Sequence
  Description of Artificial Sequence: Synthetic oligonucleotide
gggacauauuuugaugaga

SEQ ID NO: 1451084 - RNA, 19 nt, Artificial Sequence
  Description of Artificial Sequence: Synthetic oligonucleotide
uguggcuuuccggccgcgc

SEQ ID NO: 1451085 - RNA, 19 nt, Artificial Sequence
  Description of Artificial Sequence: Synthetic oligonucleotide
cugacuugacauccgccaa

SEQ ID NO: 1451086 - RNA, 19 nt, Artificial Sequence
  Description of Artificial Sequence: Synthetic oligonucleotide
uccgccuuuggagggucca

SEQ ID NO: 1451087 - RNA, 19 nt, Artificial Sequence
  Description of Artificial Sequence: Synthetic oligonucleotide
ugccugcagagauccgccu

SEQ ID NO: 1451088 - RNA, 19 nt, Artificial Sequence
  Description of Artificial Sequence: Synthetic oligonucleotide
acauccgccaagggaacau

SEQ ID NO: 1451089 - RNA, 19 nt, Artificial Sequence
  Description of Artificial Sequence: Synthetic oligonucleotide
cgauucuuccauccggaag

SEQ ID NO: 1451090 - RNA, 19 nt, Artificial Sequence
  Description of Artificial Sequence: Synthetic oligonucleotide
acuucggcucucggcaaug

SEQ ID NO: 1451091 - RNA, 19 nt, Artificial Sequence
  Description of Artificial Sequence: Synthetic oligonucleotide
gagucauuacuuccauuuu

SEQ ID NO: 1451092 - RNA, 19 nt, Artificial Sequence
  Description of Artificial Sequence: Synthetic oligonucleotide
gcuugaguguuacuggagu

SEQ ID NO: 1451093 - RNA, 19 nt, Artificial Sequence
  Description of Artificial Sequence: Synthetic oligonucleotide
acugcaccaucuauacgaa

SEQ ID NO: 1451094 - RNA, 19 nt, Artificial Sequence
  Description of Artificial Sequence: Synthetic oligonucleotide
ggggaacauuuccuuaaga

SEQ ID NO: 1451095 - RNA, 19 nt, Artificial Sequence
  Description of Artificial Sequence: Synthetic oligonucleotide
gcuugagcucuauuuuaga

SEQ ID NO: 1451096 - RNA, 19 nt, Artificial Sequence
  Description of Artificial Sequence: Synthetic oligonucleotide
cuuuccggccgcgccgccg

SEQ ID NO: 1451097 - RNA, 19 nt, Artificial Sequence
  Description of Artificial Sequence: Synthetic oligonucleotide
gauuggucugcggcaacua

SEQ ID NO: 1451098 - RNA, 19 nt, Artificial Sequence
  Description of Artificial Sequence: Synthetic oligonucleotide
gacuguuggcagaggagua

SEQ ID NO: 1451099 - RNA, 19 nt, Artificial Sequence
  Description of Artificial Sequence: Synthetic oligonucleotide
aauuuccagugaaccuauu

SEQ ID NO: 1451100 - RNA, 19 nt, Artificial Sequence
  Description of Artificial Sequence: Synthetic oligonucleotide
ggcagaauagaagaugcau

SEQ ID NO: 1451101 - RNA, 19 nt, Artificial Sequence
  Description of Artificial Sequence: Synthetic oligonucleotide
gacauccgccaagggaaca

SEQ ID NO: 1451102 - RNA, 19 nt, Artificial Sequence
  Description of Artificial Sequence: Synthetic oligonucleotide
agauccgccuuuggagggu

SEQ ID NO: 1451103 - RNA, 19 nt, Artificial Sequence
  Description of Artificial Sequence: Synthetic oligonucleotide
ucucaagcuugagcucuau

SEQ ID NO: 1451104 - RNA, 19 nt, Artificial Sequence
  Description of Artificial Sequence: Synthetic oligonucleotide
auccgccuuuggagggucc

SEQ ID NO: 1451105 - RNA, 19 nt, Artificial Sequence
  Description of Artificial Sequence: Synthetic oligonucleotide
agucuuugcucugcccuuu

SEQ ID NO: 1451106 - RNA, 19 nt, Artificial Sequence
  Description of Artificial Sequence: Synthetic oligonucleotide
gauccgccuuuggaggguc

SEQ ID NO: 1451107 - RNA, 19 nt, Artificial Sequence
  Description of Artificial Sequence: Synthetic oligonucleotide
cugcagagauccgccuuug

SEQ ID NO: 1451108 - RNA, 19 nt, Artificial Sequence
  Description of Artificial Sequence: Synthetic oligonucleotide
guccauguaugcauuucgu

SEQ ID NO: 1451109 - RNA, 19 nt, Artificial Sequence
  Description of Artificial Sequence: Synthetic oligonucleotide
caggguucaccccguaucu

SEQ ID NO: 1451110 - RNA, 19 nt, Artificial Sequence
  Description of Artificial Sequence: Synthetic oligonucleotide
cuuccauccggaagucacu

SEQ ID NO: 1451111 - RNA, 19 nt, Artificial Sequence
  Description of Artificial Sequence: Synthetic oligonucleotide
gaacucuagcggccggccu

SEQ ID NO: 1451112 - RNA, 19 nt, Artificial Sequence
  Description of Artificial Sequence: Synthetic oligonucleotide
accccguaucucacaagcu

SEQ ID NO: 1451113 - RNA, 19 nt, Artificial Sequence
  Description of Artificial Sequence: Synthetic oligonucleotide
cucuuguggacucccuagu

SEQ ID NO: 1451114 - RNA, 19 nt, Artificial Sequence
  Description of Artificial Sequence: Synthetic oligonucleotide
ccaucuauacgaaaauguu

SEQ ID NO: 1451115 - RNA, 19 nt, Artificial Sequence
  Description of Artificial Sequence: Synthetic oligonucleotide
auucagugauuggcagaau

SEQ ID NO: 1451116 - RNA, 19 nt, Artificial Sequence
  Description of Artificial Sequence: Synthetic oligonucleotide
cugcccuuuaguggcucuc

SEQ ID NO: 1451117 - RNA, 19 nt, Artificial Sequence
  Description of Artificial Sequence: Synthetic oligonucleotide
gugaagggauuuccuuggu

SEQ ID NO: 1451118 - RNA, 19 nt, Artificial Sequence
  Description of Artificial Sequence: Synthetic oligonucleotide
cugcaccaucuauacgaaa

SEQ ID NO: 1451119 - RNA, 19 nt, Artificial Sequence
  Description of Artificial Sequence: Synthetic oligonucleotide
ggaguagaagaucgggauu

SEQ ID NO: 1451120 - RNA, 19 nt, Artificial Sequence
  Description of Artificial Sequence: Synthetic oligonucleotide
gugaaccuauugacaacua

SEQ ID NO: 1451121 - RNA, 19 nt, Artificial Sequence
  Description of Artificial Sequence: Synthetic oligonucleotide
augcuucauaggggaacau

SEQ ID NO: 1451122 - RNA, 19 nt, Artificial Sequence
  Description of Artificial Sequence: Synthetic oligonucleotide
ucguugcuugaagccuuua

SEQ ID NO: 1451123 - RNA, 19 nt, Artificial Sequence
  Description of Artificial Sequence: Synthetic oligonucleotide
ggaacauacuuggggacau

SEQ ID NO: 1451124 - RNA, 19 nt, Artificial Sequence
  Description of Artificial Sequence: Synthetic oligonucleotide
caaugggaccaggguucac

SEQ ID NO: 1451125 - RNA, 19 nt, Artificial Sequence
  Description of Artificial Sequence: Synthetic oligonucleotide
ggucugcggcaacuagcac

SEQ ID NO: 1451126 - RNA, 19 nt, Artificial Sequence
  Description of Artificial Sequence: Synthetic oligonucleotide
gcccuuuaguggcucucuc

SEQ ID NO: 1451127 - RNA, 19 nt, Artificial Sequence
  Description of Artificial Sequence: Synthetic oligonucleotide
ggcuuuccggccgcgccgc

SEQ ID NO: 1451128 - RNA, 19 nt, Artificial Sequence
  Description of Artificial Sequence: Synthetic oligonucleotide
cucaagcuugagcucuauu

SEQ ID NO: 1451129 - RNA, 19 nt, Artificial Sequence
  Description of Artificial Sequence: Synthetic oligonucleotide
cauccgccaagggaacaua

SEQ ID NO: 1451130 - RNA, 19 nt, Artificial Sequence
  Description of Artificial Sequence: Synthetic oligonucleotide
gcggcaacuagcacuaauu

SEQ ID NO: 1451131 - RNA, 19 nt, Artificial Sequence
  Description of Artificial Sequence: Synthetic oligonucleotide
cguaucucacaagcugcuc

SEQ ID NO: 1451132 - RNA, 19 nt, Artificial Sequence
  Description of Artificial Sequence: Synthetic oligonucleotide
ccguaucucacaagcugcu

SEQ ID NO: 1451133 - RNA, 19 nt, Artificial Sequence
  Description of Artificial Sequence: Synthetic oligonucleotide
ccgaagugauuucuucagu

SEQ ID NO: 1451134 - RNA, 19 nt, Artificial Sequence
  Description of Artificial Sequence: Synthetic oligonucleotide
cuccaacguccaaaauauu

SEQ ID NO: 1451135 - RNA, 19 nt, Artificial Sequence
  Description of Artificial Sequence: Synthetic oligonucleotide
ccacaugggaauggaacgu

SEQ ID NO: 1451136 - RNA, 19 nt, Artificial Sequence
  Description of Artificial Sequence: Synthetic oligonucleotide
ccgccaagggaacauacuu

SEQ ID NO: 1451137 - RNA, 19 nt, Artificial Sequence
  Description of Artificial Sequence: Synthetic oligonucleotide
cacuucggcucucggcaau

SEQ ID NO: 1451138 - RNA, 19 nt, Artificial Sequence
  Description of Artificial Sequence: Synthetic oligonucleotide
gaggguccacuuguccauu

SEQ ID NO: 1451139 - RNA, 19 nt, Artificial Sequence
  Description of Artificial Sequence: Synthetic oligonucleotide
ggcguucuucuuggcccuc

SEQ ID NO: 1451140 - RNA, 19 nt, Artificial Sequence
  Description of Artificial Sequence: Synthetic oligonucleotide
cucuagcggccggccugca

SEQ ID NO: 1451141 - RNA, 19 nt, Artificial Sequence
  Description of Artificial Sequence: Synthetic oligonucleotide
ggaccaggguucaccccgu

SEQ ID NO: 1451142 - RNA, 19 nt, Artificial Sequence
  Description of Artificial Sequence: Synthetic oligonucleotide
cggcucucggcaaugguuu

SEQ ID NO: 1451143 - RNA, 19 nt, Artificial Sequence
  Description of Artificial Sequence: Synthetic oligonucleotide
cugcggcaacuagcacuaa

SEQ ID NO: 1451144 - RNA, 19 nt, Artificial Sequence
  Description of Artificial Sequence: Synthetic oligonucleotide
aaagacaaaacccauaugg

SEQ ID NO: 1451145 - RNA, 19 nt, Artificial Sequence
  Description of Artificial Sequence: Synthetic oligonucleotide
uuaaguacaacccaguagg

SEQ ID NO: 1451146 - RNA, 19 nt, Artificial Sequence
  Description of Artificial Sequence: Synthetic oligonucleotide
aggaauuuaaucuacagag

SEQ ID NO: 1451147 - RNA, 19 nt, Artificial Sequence
  Description of Artificial Sequence: Synthetic oligonucleotide
aacuauauuauuuugaaua

SEQ ID NO: 1451148 - RNA, 19 nt, Artificial Sequence
  Description of Artificial Sequence: Synthetic oligonucleotide
uauugaaucacacuaagcu

SEQ ID NO: 1451149 - RNA, 19 nt, Artificial Sequence
  Description of Artificial Sequence: Synthetic oligonucleotide
ucauuacugacaauaaugg

SEQ ID NO: 1451150 - RNA, 19 nt, Artificial Sequence
  Description of Artificial Sequence: Synthetic oligonucleotide
auauauagucuauggaucc

SEQ ID NO: 1451151 - RNA, 19 nt, Artificial Sequence
  Description of Artificial Sequence: Synthetic oligonucleotide
uguuauauugccgugaacc

SEQ ID NO: 1451152 - RNA, 19 nt, Artificial Sequence
  Description of Artificial Sequence: Synthetic oligonucleotide
gacuauauaacguuauugc

SEQ ID NO: 1451153 - RNA, 19 nt, Artificial Sequence
  Description of Artificial Sequence: Synthetic oligonucleotide
acgucaauaaaucuauccc

SEQ ID NO: 1451154 - RNA, 19 nt, Artificial Sequence
  Description of Artificial Sequence: Synthetic oligonucleotide
uugaauauuaaauaguuuu

SEQ ID NO: 1451155 - RNA, 19 nt, Artificial Sequence
  Description of Artificial Sequence: Synthetic oligonucleotide
auuacaagcaauuuauuga

SEQ ID NO: 1451156 - RNA, 19 nt, Artificial Sequence
  Description of Artificial Sequence: Synthetic oligonucleotide
uuuauugaaucacacuaag

SEQ ID NO: 1451157 - RNA, 19 nt, Artificial Sequence
  Description of Artificial Sequence: Synthetic oligonucleotide
ugaugaaacagaaagccca

SEQ ID NO: 1451158 - RNA, 19 nt, Artificial Sequence
  Description of Artificial Sequence: Synthetic oligonucleotide
uggcaauuaacgaugagag

SEQ ID NO: 1451159 - RNA, 19 nt, Artificial Sequence
  Description of Artificial Sequence: Synthetic oligonucleotide
aauaaugggcacgggaugc

SEQ ID NO: 1451160 - RNA, 19 nt, Artificial Sequence
  Description of Artificial Sequence: Synthetic oligonucleotide
cauaaacucacaaacuccg

SEQ ID NO: 1451161 - RNA, 19 nt, Artificial Sequence
  Description of Artificial Sequence: Synthetic oligonucleotide
auacagaaaguccacacgg

SEQ ID NO: 1451162 - RNA, 19 nt, Artificial Sequence
  Description of Artificial Sequence: Synthetic oligonucleotide
uuaacuguuauauugccgu

SEQ ID NO: 1451163 - RNA, 19 nt, Artificial Sequence
  Description of Artificial Sequence: Synthetic oligonucleotide
auaaaugggaauuguauug

SEQ ID NO: 1451164 - RNA, 19 nt, Artificial Sequence
  Description of Artificial Sequence: Synthetic oligonucleotide
uaauuugcuacauaaacuc

SEQ ID NO: 1451165 - RNA, 19 nt, Artificial Sequence
  Description of Artificial Sequence: Synthetic oligonucleotide
gaguugauaauaaagauca

SEQ ID NO: 1451166 - RNA, 19 nt, Artificial Sequence
  Description of Artificial Sequence: Synthetic oligonucleotide
uuaaaauccccucaacaug

SEQ ID NO: 1451167 - RNA, 19 nt, Artificial Sequence
  Description of Artificial Sequence: Synthetic oligonucleotide
uguuaaaauccccucaaca

SEQ ID NO: 1451168 - RNA, 19 nt, Artificial Sequence
  Description of Artificial Sequence: Synthetic oligonucleotide
aacguuauugcuuaguaua

SEQ ID NO: 1451169 - RNA, 19 nt, Artificial Sequence
  Description of Artificial Sequence: Synthetic oligonucleotide
uaugggauggcaaagcaca

SEQ ID NO: 1451170 - RNA, 19 nt, Artificial Sequence
  Description of Artificial Sequence: Synthetic oligonucleotide
gacuguguuaaguacaacc

SEQ ID NO: 1451171 - RNA, 19 nt, Artificial Sequence
  Description of Artificial Sequence: Synthetic oligonucleotide
ugacaaguguuauacaaag

SEQ ID NO: 1451172 - RNA, 19 nt, Artificial Sequence
  Description of Artificial Sequence: Synthetic oligonucleotide
uacaccuauaauuugaaaa

SEQ ID NO: 1451173 - RNA, 19 nt, Artificial Sequence
  Description of Artificial Sequence: Synthetic oligonucleotide
uuaaacuccaaguucauua

SEQ ID NO: 1451174 - RNA, 19 nt, Artificial Sequence
  Description of Artificial Sequence: Synthetic oligonucleotide
aagaucauaauuugcuaca

SEQ ID NO: 1451175 - RNA, 19 nt, Artificial Sequence
  Description of Artificial Sequence: Synthetic oligonucleotide
auuguauuguuaaaauccc

SEQ ID NO: 1451176 - RNA, 19 nt, Artificial Sequence
  Description of Artificial Sequence: Synthetic oligonucleotide
aagcaauuuauugaaucac

SEQ ID NO: 1451177 - RNA, 19 nt, Artificial Sequence
  Description of Artificial Sequence: Synthetic oligonucleotide
uguuacaccuauaauuuga

SEQ ID NO: 1451178 - RNA, 19 nt, Artificial Sequence
  Description of Artificial Sequence: Synthetic oligonucleotide
ucuccaugucacaagaucc

SEQ ID NO: 1451179 - RNA, 19 nt, Artificial Sequence
  Description of Artificial Sequence: Synthetic oligonucleotide
uauuguuaaaauccccuca

SEQ ID NO: 1451180 - RNA, 19 nt, Artificial Sequence
  Description of Artificial Sequence: Synthetic oligonucleotide
agaacuugcguaugcaagg

SEQ ID NO: 1451181 - RNA, 19 nt, Artificial Sequence
  Description of Artificial Sequence: Synthetic oligonucleotide
auuuauccaguguagaacu

SEQ ID NO: 1451182 - RNA, 19 nt, Artificial Sequence
  Description of Artificial Sequence: Synthetic oligonucleotide
acuguguuaaguacaaccc

SEQ ID NO: 1451183 - RNA, 19 nt, Artificial Sequence
  Description of Artificial Sequence: Synthetic oligonucleotide
uauauaacguuauugcuua

SEQ ID NO: 1451184 - RNA, 19 nt, Artificial Sequence
  Description of Artificial Sequence: Synthetic oligonucleotide
ucuguauauugcuugagac

SEQ ID NO: 1451185 - RNA, 19 nt, Artificial Sequence
  Description of Artificial Sequence: Synthetic oligonucleotide
caauaaaucuaucccaggc

SEQ ID NO: 1451186 - RNA, 19 nt, Artificial Sequence
  Description of Artificial Sequence: Synthetic oligonucleotide
aagcccaucaacagcaacc

SEQ ID NO: 1451187 - RNA, 19 nt, Artificial Sequence
  Description of Artificial Sequence: Synthetic oligonucleotide
guuaugacaauuuuggcaa

SEQ ID NO: 1451188 - RNA, 19 nt, Artificial Sequence
  Description of Artificial Sequence: Synthetic oligonucleotide
aucaacagcaaccaaauua

SEQ ID NO: 1451189 - RNA, 19 nt, Artificial Sequence
  Description of Artificial Sequence: Synthetic oligonucleotide
agucuauggauccacauga

SEQ ID NO: 1451190 - RNA, 19 nt, Artificial Sequence
  Description of Artificial Sequence: Synthetic oligonucleotide
guuaaguacaacccaguag

SEQ ID NO: 1451191 - RNA, 19 nt, Artificial Sequence
  Description of Artificial Sequence: Synthetic oligonucleotide
acauaaacucacaaacucc

SEQ ID NO: 1451192 - RNA, 19 nt, Artificial Sequence
  Description of Artificial Sequence: Synthetic oligonucleotide
uuauugaaucacacuaagc

SEQ ID NO: 1451193 - RNA, 19 nt, Artificial Sequence
  Description of Artificial Sequence: Synthetic oligonucleotide
ucugcugacuauauaacgu

SEQ ID NO: 1451194 - RNA, 19 nt, Artificial Sequence
  Description of Artificial Sequence: Synthetic oligonucleotide
auugcaaucagugaaucug

SEQ ID NO: 1451195 - RNA, 19 nt, Artificial Sequence
  Description of Artificial Sequence: Synthetic oligonucleotide
caugcgacaccacagaaag

SEQ ID NO: 1451196 - RNA, 19 nt, Artificial Sequence
  Description of Artificial Sequence: Synthetic oligonucleotide
uuacaagcaauuuauugaa

SEQ ID NO: 1451197 - RNA, 19 nt, Artificial Sequence
  Description of Artificial Sequence: Synthetic oligonucleotide
uaaacucacaaacuccgca

SEQ ID NO: 1451198 - RNA, 19 nt, Artificial Sequence
  Description of Artificial Sequence: Synthetic oligonucleotide
uuaaucuacagagauuucu

SEQ ID NO: 1451199 - RNA, 19 nt, Artificial Sequence
  Description of Artificial Sequence: Synthetic oligonucleotide
cacagaaagacccaacccc

SEQ ID NO: 1451200 - RNA, 19 nt, Artificial Sequence
  Description of Artificial Sequence: Synthetic oligonucleotide
cacaugauugcaaucagug

SEQ ID NO: 1451201 - RNA, 19 nt, Artificial Sequence
  Description of Artificial Sequence: Synthetic oligonucleotide
acuaagcuucaauauacag

SEQ ID NO: 1451202 - RNA, 19 nt, Artificial Sequence
  Description of Artificial Sequence: Synthetic oligonucleotide
agaguugauaauaaagauc

SEQ ID NO: 1451203 - RNA, 19 nt, Artificial Sequence
  Description of Artificial Sequence: Synthetic oligonucleotide
ugacuauauaacguuauug

SEQ ID NO: 1451204 - RNA, 19 nt, Artificial Sequence
  Description of Artificial Sequence: Synthetic oligonucleotide
uauauugccgugaaccccu

SEQ ID NO: 1451205 - RNA, 19 nt, Artificial Sequence
  Description of Artificial Sequence: Synthetic oligonucleotide
gauccagugcuuucuacgg

SEQ ID NO: 1451206 - RNA, 19 nt, Artificial Sequence
  Description of Artificial Sequence: Synthetic oligonucleotide
gaauuguauuguuaaaauc

SEQ ID NO: 1451207 - RNA, 19 nt, Artificial Sequence
  Description of Artificial Sequence: Synthetic oligonucleotide
auuugcuacauaaacucac

SEQ ID NO: 1451208 - RNA, 19 nt, Artificial Sequence
  Description of Artificial Sequence: Synthetic oligonucleotide
agauccagugcuuucuacg

SEQ ID NO: 1451209 - RNA, 19 nt, Artificial Sequence
  Description of Artificial Sequence: Synthetic oligonucleotide
uauggauccacaugauugc

SEQ ID NO: 1451210 - RNA, 19 nt, Artificial Sequence
  Description of Artificial Sequence: Synthetic oligonucleotide
ucugacucggagcuaaggc

SEQ ID NO: 1451211 - RNA, 19 nt, Artificial Sequence
  Description of Artificial Sequence: Synthetic oligonucleotide
acacuaagcuucaauauac

SEQ ID NO: 1451212 - RNA, 19 nt, Artificial Sequence
  Description of Artificial Sequence: Synthetic oligonucleotide
aaaucuaucccaggcugac

SEQ ID NO: 1451213 - RNA, 19 nt, Artificial Sequence
  Description of Artificial Sequence: Synthetic oligonucleotide
ucagacgucaauaaaucua

SEQ ID NO: 1451214 - RNA, 19 nt, Artificial Sequence
  Description of Artificial Sequence: Synthetic oligonucleotide
cauuacugacaauaauggg

SEQ ID NO: 1451215 - RNA, 19 nt, Artificial Sequence
  Description of Artificial Sequence: Synthetic oligonucleotide
aaagcacaugcucacauuu

SEQ ID NO: 1451216 - RNA, 19 nt, Artificial Sequence
  Description of Artificial Sequence: Synthetic oligonucleotide
gaaguuguuacaccuauaa

SEQ ID NO: 1451217 - RNA, 19 nt, Artificial Sequence
  Description of Artificial Sequence: Synthetic oligonucleotide
guuauauugccgugaaccc

SEQ ID NO: 1451218 - RNA, 19 nt, Artificial Sequence
  Description of Artificial Sequence: Synthetic oligonucleotide
uuggcaauuaacgaugaga

SEQ ID NO: 1451219 - RNA, 19 nt, Artificial Sequence
  Description of Artificial Sequence: Synthetic oligonucleotide
ucguaagaaggcuauauau

SEQ ID NO: 1451220 - RNA, 19 nt, Artificial Sequence
  Description of Artificial Sequence: Synthetic oligonucleotide
uuugcuacauaaacucaca

SEQ ID NO: 1451221 - RNA, 19 nt, Artificial Sequence
  Description of Artificial Sequence: Synthetic oligonucleotide
agacaaaacccauauggga

SEQ ID NO: 1451222 - RNA, 19 nt, Artificial Sequence
  Description of Artificial Sequence: Synthetic oligonucleotide
gauuuauccaguguagaac

SEQ ID NO: 1451223 - RNA, 19 nt, Artificial Sequence
  Description of Artificial Sequence: Synthetic oligonucleotide
uuacacaauuuaaacucca

SEQ ID NO: 1451224 - RNA, 19 nt, Artificial Sequence
  Description of Artificial Sequence: Synthetic oligonucleotide
aaguacggggaacggacuc

SEQ ID NO: 1451225 - RNA, 19 nt, Artificial Sequence
  Description of Artificial Sequence: Synthetic oligonucleotide
gaauuuaaucuacagagau

SEQ ID NO: 1451226 - RNA, 19 nt, Artificial Sequence
  Description of Artificial Sequence: Synthetic oligonucleotide
aaacucacaaacuccgcaa

SEQ ID NO: 1451227 - RNA, 19 nt, Artificial Sequence
  Description of Artificial Sequence: Synthetic oligonucleotide
uagucuauggauccacaug

SEQ ID NO: 1451228 - RNA, 19 nt, Artificial Sequence
  Description of Artificial Sequence: Synthetic oligonucleotide
ggcuauauauagucuaugg

SEQ ID NO: 1451229 - RNA, 19 nt, Artificial Sequence
  Description of Artificial Sequence: Synthetic oligonucleotide
cuuucuacggagcucaguc

SEQ ID NO: 1451230 - RNA, 19 nt, Artificial Sequence
  Description of Artificial Sequence: Synthetic oligonucleotide
auuguuaaaauccccucaa

SEQ ID NO: 1451231 - RNA, 19 nt, Artificial Sequence
  Description of Artificial Sequence: Synthetic oligonucleotide
aacaugguggaagguggcc

SEQ ID NO: 1451232 - RNA, 19 nt, Artificial Sequence
  Description of Artificial Sequence: Synthetic oligonucleotide
uuauacaaagccuucccuu

SEQ ID NO: 1451233 - RNA, 19 nt, Artificial Sequence
  Description of Artificial Sequence: Synthetic oligonucleotide
uuucuacggagcucagucg

SEQ ID NO: 1451234 - RNA, 19 nt, Artificial Sequence
  Description of Artificial Sequence: Synthetic oligonucleotide
guuuuggcaauuaacgaug

SEQ ID NO: 1451235 - RNA, 19 nt, Artificial Sequence
  Description of Artificial Sequence: Synthetic oligonucleotide
uuagguagauaaagaauua

SEQ ID NO: 1451236 - RNA, 19 nt, Artificial Sequence
  Description of Artificial Sequence: Synthetic oligonucleotide
guuuguaaucuccauguca

SEQ ID NO: 1451237 - RNA, 19 nt, Artificial Sequence
  Description of Artificial Sequence: Synthetic oligonucleotide
augucuggcuccuuaaucu

SEQ ID NO: 1451238 - RNA, 19 nt, Artificial Sequence
  Description of Artificial Sequence: Synthetic oligonucleotide
gcaauuaacgaugagagca

SEQ ID NO: 1451239 - RNA, 19 nt, Artificial Sequence
  Description of Artificial Sequence: Synthetic oligonucleotide
ucaaaugcccuguuuguaa

SEQ ID NO: 1451240 - RNA, 19 nt, Artificial Sequence
  Description of Artificial Sequence: Synthetic oligonucleotide
auugaaucacacuaagcuu

SEQ ID NO: 1451241 - RNA, 19 nt, Artificial Sequence
  Description of Artificial Sequence: Synthetic oligonucleotide
uaaaucuaucccaggcuga

SEQ ID NO: 1451242 - RNA, 19 nt, Artificial Sequence
  Description of Artificial Sequence: Synthetic oligonucleotide
uuauauugccgugaacccc

SEQ ID NO: 1451243 - RNA, 19 nt, Artificial Sequence
  Description of Artificial Sequence: Synthetic oligonucleotide
aucacacuaagcuucaaua

SEQ ID NO: 1451244 - RNA, 19 nt, Artificial Sequence
  Description of Artificial Sequence: Synthetic oligonucleotide
cacaaacuccgcaagugcc

SEQ ID NO: 1451245 - RNA, 19 nt, Artificial Sequence
  Description of Artificial Sequence: Synthetic oligonucleotide
guaaucuccaugucacaag

SEQ ID NO: 1451246 - RNA, 19 nt, Artificial Sequence
  Description of Artificial Sequence: Synthetic oligonucleotide
ugcuacauaaacucacaaa

SEQ ID NO: 1451247 - RNA, 19 nt, Artificial Sequence
  Description of Artificial Sequence: Synthetic oligonucleotide
uugcaaucagugaaucuga

SEQ ID NO: 1451248 - RNA, 19 nt, Artificial Sequence
  Description of Artificial Sequence: Synthetic oligonucleotide
uguuaaguacaacccagua

SEQ ID NO: 1451249 - RNA, 19 nt, Artificial Sequence
  Description of Artificial Sequence: Synthetic oligonucleotide
gagagcaauauagauauaa

SEQ ID NO: 1451250 - RNA, 19 nt, Artificial Sequence
  Description of Artificial Sequence: Synthetic oligonucleotide
aacuccgcaagugccggcc

SEQ ID NO: 1451251 - RNA, 19 nt, Artificial Sequence
  Description of Artificial Sequence: Synthetic oligonucleotide
ugcccuguuuguaaucucc

SEQ ID NO: 1451252 - RNA, 19 nt, Artificial Sequence
  Description of Artificial Sequence: Synthetic oligonucleotide
uauagucuauggauccaca

SEQ ID NO: 1451253 - RNA, 19 nt, Artificial Sequence
  Description of Artificial Sequence: Synthetic oligonucleotide
uguaaucuccaugucacaa

SEQ ID NO: 1451254 - RNA, 19 nt, Artificial Sequence
  Description of Artificial Sequence: Synthetic oligonucleotide
aagccuucccuuccaugcg

SEQ ID NO: 1451255 - RNA, 19 nt, Artificial Sequence
  Description of Artificial Sequence: Synthetic oligonucleotide
uuauccaguguagaacuug

SEQ ID NO: 1451256 - RNA, 19 nt, Artificial Sequence
  Description of Artificial Sequence: Synthetic oligonucleotide
aaguguuauacaaagccuu

SEQ ID NO: 1451257 - RNA, 19 nt, Artificial Sequence
  Description of Artificial Sequence: Synthetic oligonucleotide
aacuugcguaugcaaggag

SEQ ID NO: 1451258 - RNA, 19 nt, Artificial Sequence
  Description of Artificial Sequence: Synthetic oligonucleotide
auaaacucacaaacuccgc

SEQ ID NO: 1451259 - RNA, 19 nt, Artificial Sequence
  Description of Artificial Sequence: Synthetic oligonucleotide
aaguuguuacaccuauaau

SEQ ID NO: 1451260 - RNA, 19 nt, Artificial Sequence
  Description of Artificial Sequence: Synthetic oligonucleotide
uuuggcaauuaacgaugag

SEQ ID NO: 1451261 - RNA, 19 nt, Artificial Sequence
  Description of Artificial Sequence: Synthetic oligonucleotide
aguguuauacaaagccuuc

SEQ ID NO: 1451262 - RNA, 19 nt, Artificial Sequence
  Description of Artificial Sequence: Synthetic oligonucleotide
uuguuacaccuauaauuug

SEQ ID NO: 1451263 - RNA, 19 nt, Artificial Sequence
  Description of Artificial Sequence: Synthetic oligonucleotide
agcucagucgugcuagguc

SEQ ID NO: 1451264 - RNA, 19 nt, Artificial Sequence
  Description of Artificial Sequence: Synthetic oligonucleotide
uccgagagguccagcaucc

SEQ ID NO: 1451265 - RNA, 19 nt, Artificial Sequence
  Description of Artificial Sequence: Synthetic oligonucleotide
aucagugaaucugaaguug

SEQ ID NO: 1451266 - RNA, 19 nt, Artificial Sequence
  Description of Artificial Sequence: Synthetic oligonucleotide
aaacuccgcaagugccggc

SEQ ID NO: 1451267 - RNA, 19 nt, Artificial Sequence
  Description of Artificial Sequence: Synthetic oligonucleotide
guauuguuaaaauccccuc

SEQ ID NO: 1451268 - RNA, 19 nt, Artificial Sequence
  Description of Artificial Sequence: Synthetic oligonucleotide
gacauggauuuauccagug

SEQ ID NO: 1451269 - RNA, 19 nt, Artificial Sequence
  Description of Artificial Sequence: Synthetic oligonucleotide
acaugcucacauuucaaaa

SEQ ID NO: 1451270 - RNA, 19 nt, Artificial Sequence
  Description of Artificial Sequence: Synthetic oligonucleotide
aauuuaaucuacagagauu

SEQ ID NO: 1451271 - RNA, 19 nt, Artificial Sequence
  Description of Artificial Sequence: Synthetic oligonucleotide
uucguaagaaggcuauaua

SEQ ID NO: 1451272 - RNA, 19 nt, Artificial Sequence
  Description of Artificial Sequence: Synthetic oligonucleotide
auaugggauggcaaagcac

SEQ ID NO: 1451273 - RNA, 19 nt, Artificial Sequence
  Description of Artificial Sequence: Synthetic oligonucleotide
gagauuucuguauauugcu

SEQ ID NO: 1451274 - RNA, 19 nt, Artificial Sequence
  Description of Artificial Sequence: Synthetic oligonucleotide
aaacccauaugggauggca

SEQ ID NO: 1451275 - RNA, 19 nt, Artificial Sequence
  Description of Artificial Sequence: Synthetic oligonucleotide
uguagaacuugcguaugca

SEQ ID NO: 1451276 - RNA, 19 nt, Artificial Sequence
  Description of Artificial Sequence: Synthetic oligonucleotide
aaaauucaguuaugacaau

SEQ ID NO: 1451277 - RNA, 19 nt, Artificial Sequence
  Description of Artificial Sequence: Synthetic oligonucleotide
uuuaaucuacagagauuuc

SEQ ID NO: 1451278 - RNA, 19 nt, Artificial Sequence
  Description of Artificial Sequence: Synthetic oligonucleotide
uaacguuauugcuuaguau

SEQ ID NO: 1451279 - RNA, 19 nt, Artificial Sequence
  Description of Artificial Sequence: Synthetic oligonucleotide
aaaaccagcuggguguggu

SEQ ID NO: 1451280 - RNA, 19 nt, Artificial Sequence
  Description of Artificial Sequence: Synthetic oligonucleotide
ucaaaucagaguugauaau

SEQ ID NO: 1451281 - RNA, 19 nt, Artificial Sequence
  Description of Artificial Sequence: Synthetic oligonucleotide
uaaguacaacccaguaggu

SEQ ID NO: 1451282 - RNA, 19 nt, Artificial Sequence
  Description of Artificial Sequence: Synthetic oligonucleotide
cuaagcuucaauauacagu

SEQ ID NO: 1451283 - RNA, 19 nt, Artificial Sequence
  Description of Artificial Sequence: Synthetic oligonucleotide
guugauaauaaagaucaua

SEQ ID NO: 1451284 - RNA, 19 nt, Artificial Sequence
  Description of Artificial Sequence: Synthetic oligonucleotide
agucgugcuaggucugcac

SEQ ID NO: 1451285 - RNA, 19 nt, Artificial Sequence
  Description of Artificial Sequence: Synthetic oligonucleotide
agcaauuuauugaaucaca

SEQ ID NO: 1451286 - RNA, 19 nt, Artificial Sequence
  Description of Artificial Sequence: Synthetic oligonucleotide
caauaaugggcacgggaug

SEQ ID NO: 1451287 - RNA, 19 nt, Artificial Sequence
  Description of Artificial Sequence: Synthetic oligonucleotide
uggauuuauccaguguaga

SEQ ID NO: 1451288 - RNA, 19 nt, Artificial Sequence
  Description of Artificial Sequence: Synthetic oligonucleotide
gcaggaauuuaaucuacag

SEQ ID NO: 1451289 - RNA, 19 nt, Artificial Sequence
  Description of Artificial Sequence: Synthetic oligonucleotide
acaaacuccgcaagugccg

SEQ ID NO: 1451290 - RNA, 19 nt, Artificial Sequence
  Description of Artificial Sequence: Synthetic oligonucleotide
uguuuguaaucuccauguc

SEQ ID NO: 1451291 - RNA, 19 nt, Artificial Sequence
  Description of Artificial Sequence: Synthetic oligonucleotide
auggauuuauccaguguag

SEQ ID NO: 1451292 - RNA, 19 nt, Artificial Sequence
  Description of Artificial Sequence: Synthetic oligonucleotide
uggcaggaauuuaaucuac

SEQ ID NO: 1451293 - RNA, 19 nt, Artificial Sequence
  Description of Artificial Sequence: Synthetic oligonucleotide
uacagagauuucuguauau

SEQ ID NO: 1451294 - RNA, 19 nt, Artificial Sequence
  Description of Artificial Sequence: Synthetic oligonucleotide
cuguuuuggcaauuaacga

SEQ ID NO: 1451295 - RNA, 19 nt, Artificial Sequence
  Description of Artificial Sequence: Synthetic oligonucleotide
ucggagcuaaggcugugca

SEQ ID NO: 1451296 - RNA, 19 nt, Artificial Sequence
  Description of Artificial Sequence: Synthetic oligonucleotide
uguguugacaaguguuaua

SEQ ID NO: 1451297 - RNA, 19 nt, Artificial Sequence
  Description of Artificial Sequence: Synthetic oligonucleotide
cucacaaacuccgcaagug

SEQ ID NO: 1451298 - RNA, 19 nt, Artificial Sequence
  Description of Artificial Sequence: Synthetic oligonucleotide
uuacaccuauaauuugaaa

SEQ ID NO: 1451299 - RNA, 19 nt, Artificial Sequence
  Description of Artificial Sequence: Synthetic oligonucleotide
ugcugacuauauaacguua

SEQ ID NO: 1451300 - RNA, 19 nt, Artificial Sequence
  Description of Artificial Sequence: Synthetic oligonucleotide
aaggcuauauauagucuau

SEQ ID NO: 1451301 - RNA, 19 nt, Artificial Sequence
  Description of Artificial Sequence: Synthetic oligonucleotide
guguagaacuugcguaugc

SEQ ID NO: 1451302 - RNA, 19 nt, Artificial Sequence
  Description of Artificial Sequence: Synthetic oligonucleotide
aauuaacgaugagagcaau

SEQ ID NO: 1451303 - RNA, 19 nt, Artificial Sequence
  Description of Artificial Sequence: Synthetic oligonucleotide
cuauauaacguuauugcuu

SEQ ID NO: 1451304 - RNA, 19 nt, Artificial Sequence
  Description of Artificial Sequence: Synthetic oligonucleotide
uucccuuccaugcgacacc

SEQ ID NO: 1451305 - RNA, 19 nt, Artificial Sequence
  Description of Artificial Sequence: Synthetic oligonucleotide
auauaacguuauugcuuag

SEQ ID NO: 1451306 - RNA, 19 nt, Artificial Sequence
  Description of Artificial Sequence: Synthetic oligonucleotide
ugacuucguaagaaggcua

SEQ ID NO: 1451307 - RNA, 19 nt, Artificial Sequence
  Description of Artificial Sequence: Synthetic oligonucleotide
acucacaaacuccgcaagu

SEQ ID NO: 1451308 - RNA, 19 nt, Artificial Sequence
  Description of Artificial Sequence: Synthetic oligonucleotide
caugguggaagguggccag

SEQ ID NO: 1451309 - RNA, 19 nt, Artificial Sequence
  Description of Artificial Sequence: Synthetic oligonucleotide
guguuauacaaagccuucc

SEQ ID NO: 1451310 - RNA, 19 nt, Artificial Sequence
  Description of Artificial Sequence: Synthetic oligonucleotide
ucuacggagcucagucgug

SEQ ID NO: 1451311 - RNA, 19 nt, Artificial Sequence
  Description of Artificial Sequence: Synthetic oligonucleotide
aggcugacuucguaagaag

SEQ ID NO: 1451312 - RNA, 19 nt, Artificial Sequence
  Description of Artificial Sequence: Synthetic oligonucleotide
uaacgaugagagcaauaua

SEQ ID NO: 1451313 - RNA, 19 nt, Artificial Sequence
  Description of Artificial Sequence: Synthetic oligonucleotide
ugcaaucagugaaucugaa

SEQ ID NO: 1451314 - RNA, 19 nt, Artificial Sequence
  Description of Artificial Sequence: Synthetic oligonucleotide
ugauugcaaucagugaauc

SEQ ID NO: 1451315 - RNA, 19 nt, Artificial Sequence
  Description of Artificial Sequence: Synthetic oligonucleotide
ucgugcuaggucugcacca

SEQ ID NO: 1451316 - RNA, 19 nt, Artificial Sequence
  Description of Artificial Sequence: Synthetic oligonucleotide
acuugcguaugcaaggagu

SEQ ID NO: 1451317 - RNA, 19 nt, Artificial Sequence
  Description of Artificial Sequence: Synthetic oligonucleotide
cauaugggauggcaaagca

SEQ ID NO: 1451318 - RNA, 19 nt, Artificial Sequence
  Description of Artificial Sequence: Synthetic oligonucleotide
uuuauccaguguagaacuu

SEQ ID NO: 1451319 - RNA, 19 nt, Artificial Sequence
  Description of Artificial Sequence: Synthetic oligonucleotide
uccaugcgacaccacagaa

SEQ ID NO: 1451320 - RNA, 19 nt, Artificial Sequence
  Description of Artificial Sequence: Synthetic oligonucleotide
caaacuccgcaagugccgg

SEQ ID NO: 1451321 - RNA, 19 nt, Artificial Sequence
  Description of Artificial Sequence: Synthetic oligonucleotide
caagugccggccaucauca

SEQ ID NO: 1451322 - RNA, 19 nt, Artificial Sequence
  Description of Artificial Sequence: Synthetic oligonucleotide
ugccgugaaccccuucuga

SEQ ID NO: 1451323 - RNA, 19 nt, Artificial Sequence
  Description of Artificial Sequence: Synthetic oligonucleotide
caaguguuauacaaagccu

SEQ ID NO: 1451324 - RNA, 19 nt, Artificial Sequence
  Description of Artificial Sequence: Synthetic oligonucleotide
gucgugcuaggucugcacc

SEQ ID NO: 1451325 - RNA, 19 nt, Artificial Sequence
  Description of Artificial Sequence: Synthetic oligonucleotide
acccauaugggauggcaaa

SEQ ID NO: 1451326 - RNA, 19 nt, Artificial Sequence
  Description of Artificial Sequence: Synthetic oligonucleotide
guuauacaaagccuucccu

SEQ ID NO: 1451327 - RNA, 19 nt, Artificial Sequence
  Description of Artificial Sequence: Synthetic oligonucleotide
gcaaucagugaaucugaag

SEQ ID NO: 1451328 - RNA, 19 nt, Artificial Sequence
  Description of Artificial Sequence: Synthetic oligonucleotide
uuuaaacuccaaguucauu

SEQ ID NO: 1451329 - RNA, 19 nt, Artificial Sequence
  Description of Artificial Sequence: Synthetic oligonucleotide
caauuaacgaugagagcaa

SEQ ID NO: 1451330 - RNA, 19 nt, Artificial Sequence
  Description of Artificial Sequence: Synthetic oligonucleotide
ccaaguacggggaacggac

SEQ ID NO: 1451331 - RNA, 19 nt, Artificial Sequence
  Description of Artificial Sequence: Synthetic oligonucleotide
agagcaauauagauauaaa

SEQ ID NO: 1451332 - RNA, 19 nt, Artificial Sequence
  Description of Artificial Sequence: Synthetic oligonucleotide
uugccgugaaccccuucug

SEQ ID NO: 1451333 - RNA, 19 nt, Artificial Sequence
  Description of Artificial Sequence: Synthetic oligonucleotide
ugcaaguugaaggcccgca

SEQ ID NO: 1451334 - RNA, 19 nt, Artificial Sequence
  Description of Artificial Sequence: Synthetic oligonucleotide
uucaaaugcccuguuugua

SEQ ID NO: 1451335 - RNA, 19 nt, Artificial Sequence
  Description of Artificial Sequence: Synthetic oligonucleotide
ggcugacuucguaagaagg

SEQ ID NO: 1451336 - RNA, 19 nt, Artificial Sequence
  Description of Artificial Sequence: Synthetic oligonucleotide
agaucauaauuugcuacau

SEQ ID NO: 1451337 - RNA, 19 nt, Artificial Sequence
  Description of Artificial Sequence: Synthetic oligonucleotide
gauugcaaucagugaaucu

SEQ ID NO: 1451338 - RNA, 19 nt, Artificial Sequence
  Description of Artificial Sequence: Synthetic oligonucleotide
aaugggcacgggaugcucu

SEQ ID NO: 1451339 - RNA, 19 nt, Artificial Sequence
  Description of Artificial Sequence: Synthetic oligonucleotide
ggauuuauccaguguagaa

SEQ ID NO: 1451340 - RNA, 19 nt, Artificial Sequence
  Description of Artificial Sequence: Synthetic oligonucleotide
gaggguguguugacaagug

SEQ ID NO: 1451341 - RNA, 19 nt, Artificial Sequence
  Description of Artificial Sequence: Synthetic oligonucleotide
ggcaauuaacgaugagagc

SEQ ID NO: 1451342 - RNA, 19 nt, Artificial Sequence
  Description of Artificial Sequence: Synthetic oligonucleotide
gcuaaggcugugcaaguug

SEQ ID NO: 1451343 - RNA, 19 nt, Artificial Sequence
  Description of Artificial Sequence: Synthetic oligonucleotide
gcuccuuaaucuuggggcc

SEQ ID NO: 1451344 - RNA, 19 nt, Artificial Sequence
  Description of Artificial Sequence: Synthetic oligonucleotide
acggggaacggacucucug

SEQ ID NO: 1451345 - RNA, 19 nt, Artificial Sequence
  Description of Artificial Sequence: Synthetic oligonucleotide
aggucugcaccaaguacgg

SEQ ID NO: 1451346 - RNA, 19 nt, Artificial Sequence
  Description of Artificial Sequence: Synthetic oligonucleotide
aggcuauauauagucuaug

SEQ ID NO: 1451347 - RNA, 19 nt, Artificial Sequence
  Description of Artificial Sequence: Synthetic oligonucleotide
cuguauauugcuugagacu

SEQ ID NO: 1451348 - RNA, 19 nt, Artificial Sequence
  Description of Artificial Sequence: Synthetic oligonucleotide
cugacuguguuaaguacaa

SEQ ID NO: 1451349 - RNA, 19 nt, Artificial Sequence
  Description of Artificial Sequence: Synthetic oligonucleotide
aaucuaucccaggcugacu

SEQ ID NO: 1451350 - RNA, 19 nt, Artificial Sequence
  Description of Artificial Sequence: Synthetic oligonucleotide
augcccuguuuguaaucuc

SEQ ID NO: 1451351 - RNA, 19 nt, Artificial Sequence
  Description of Artificial Sequence: Synthetic oligonucleotide
gcugacuucguaagaaggc

SEQ ID NO: 1451352 - RNA, 19 nt, Artificial Sequence
  Description of Artificial Sequence: Synthetic oligonucleotide
augauugcaaucagugaau

SEQ ID NO: 1451353 - RNA, 19 nt, Artificial Sequence
  Description of Artificial Sequence: Synthetic oligonucleotide
cacaugcucacauuucaaa

SEQ ID NO: 1451354 - RNA, 19 nt, Artificial Sequence
  Description of Artificial Sequence: Synthetic oligonucleotide
gaacuugcguaugcaagga

SEQ ID NO: 1451355 - RNA, 19 nt, Artificial Sequence
  Description of Artificial Sequence: Synthetic oligonucleotide
ucccaggcugacuucguaa

SEQ ID NO: 1451356 - RNA, 19 nt, Artificial Sequence
  Description of Artificial Sequence: Synthetic oligonucleotide
guuacaccuauaauuugaa

SEQ ID NO: 1451357 - RNA, 19 nt, Artificial Sequence
  Description of Artificial Sequence: Synthetic oligonucleotide
ugaaccccuucugacugug

SEQ ID NO: 1451358 - RNA, 19 nt, Artificial Sequence
  Description of Artificial Sequence: Synthetic oligonucleotide
ucccuucaaugucuggcuc

SEQ ID NO: 1451359 - RNA, 19 nt, Artificial Sequence
  Description of Artificial Sequence: Synthetic oligonucleotide
cuacggagcucagucgugc

SEQ ID NO: 1451360 - RNA, 19 nt, Artificial Sequence
  Description of Artificial Sequence: Synthetic oligonucleotide
agcccaucaacagcaacca

SEQ ID NO: 1451361 - RNA, 19 nt, Artificial Sequence
  Description of Artificial Sequence: Synthetic oligonucleotide
gagacacccugucuugaga

SEQ ID NO: 1451362 - RNA, 19 nt, Artificial Sequence
  Description of Artificial Sequence: Synthetic oligonucleotide
aacccauaugggauggcaa

SEQ ID NO: 1451363 - RNA, 19 nt, Artificial Sequence
  Description of Artificial Sequence: Synthetic oligonucleotide
ugcaccaaguacggggaac

SEQ ID NO: 1451364 - RNA, 19 nt, Artificial Sequence
  Description of Artificial Sequence: Synthetic oligonucleotide
cacuaagcuucaauauaca

SEQ ID NO: 1451365 - RNA, 19 nt, Artificial Sequence
  Description of Artificial Sequence: Synthetic oligonucleotide
guacaacccaguagguggc

SEQ ID NO: 1451366 - RNA, 19 nt, Artificial Sequence
  Description of Artificial Sequence: Synthetic oligonucleotide
cagacgucaauaaaucuau

SEQ ID NO: 1451367 - RNA, 19 nt, Artificial Sequence
  Description of Artificial Sequence: Synthetic oligonucleotide
ugucuggcuccuuaaucuu

SEQ ID NO: 1451368 - RNA, 19 nt, Artificial Sequence
  Description of Artificial Sequence: Synthetic oligonucleotide
agcccucagacgucaauaa

SEQ ID NO: 1451369 - RNA, 19 nt, Artificial Sequence
  Description of Artificial Sequence: Synthetic oligonucleotide
acguuauugcuuaguauaa

SEQ ID NO: 1451370 - RNA, 19 nt, Artificial Sequence
  Description of Artificial Sequence: Synthetic oligonucleotide
guuugcccagguauuuccc

SEQ ID NO: 1451371 - RNA, 19 nt, Artificial Sequence
  Description of Artificial Sequence: Synthetic oligonucleotide
agacgucaauaaaucuauc

SEQ ID NO: 1451372 - RNA, 19 nt, Artificial Sequence
  Description of Artificial Sequence: Synthetic oligonucleotide
ugcuuucuacggagcucag

SEQ ID NO: 1451373 - RNA, 19 nt, Artificial Sequence
  Description of Artificial Sequence: Synthetic oligonucleotide
cuacagagauuucuguaua

SEQ ID NO: 1451374 - RNA, 19 nt, Artificial Sequence
  Description of Artificial Sequence: Synthetic oligonucleotide
cgucaauaaaucuauccca

SEQ ID NO: 1451375 - RNA, 19 nt, Artificial Sequence
  Description of Artificial Sequence: Synthetic oligonucleotide
ucacaagauccagugcuuu

SEQ ID NO: 1451376 - RNA, 19 nt, Artificial Sequence
  Description of Artificial Sequence: Synthetic oligonucleotide
ucccuuccaugcgacacca

SEQ ID NO: 1451377 - RNA, 19 nt, Artificial Sequence
  Description of Artificial Sequence: Synthetic oligonucleotide
accaaguacggggaacgga

SEQ ID NO: 1451378 - RNA, 19 nt, Artificial Sequence
  Description of Artificial Sequence: Synthetic oligonucleotide
auuaacgaugagagcaaua

SEQ ID NO: 1451379 - RNA, 19 nt, Artificial Sequence
  Description of Artificial Sequence: Synthetic oligonucleotide
auggauccacaugauugca

SEQ ID NO: 1451380 - RNA, 19 nt, Artificial Sequence
  Description of Artificial Sequence: Synthetic oligonucleotide
auaaugggcacgggaugcu

SEQ ID NO: 1451381 - RNA, 19 nt, Artificial Sequence
  Description of Artificial Sequence: Synthetic oligonucleotide
cugacucggagcuaaggcu

SEQ ID NO: 1451382 - RNA, 19 nt, Artificial Sequence
  Description of Artificial Sequence: Synthetic oligonucleotide
agccuucccuuccaugcga

SEQ ID NO: 1451383 - RNA, 19 nt, Artificial Sequence
  Description of Artificial Sequence: Synthetic oligonucleotide
uacggagcucagucgugcu

SEQ ID NO: 1451384 - RNA, 19 nt, Artificial Sequence
  Description of Artificial Sequence: Synthetic oligonucleotide
agaguuugcccagguauuu

SEQ ID NO: 1451385 - RNA, 19 nt, Artificial Sequence
  Description of Artificial Sequence: Synthetic oligonucleotide
ugagagcaauauagauaua

SEQ ID NO: 1451386 - RNA, 19 nt, Artificial Sequence
  Description of Artificial Sequence: Synthetic oligonucleotide
uugcguaugcaaggaguuc

SEQ ID NO: 1451387 - RNA, 19 nt, Artificial Sequence
  Description of Artificial Sequence: Synthetic oligonucleotide
cuucugacucggagcuaag

SEQ ID NO: 1451388 - RNA, 19 nt, Artificial Sequence
  Description of Artificial Sequence: Synthetic oligonucleotide
cucagacgucaauaaaucu

SEQ ID NO: 1451389 - RNA, 19 nt, Artificial Sequence
  Description of Artificial Sequence: Synthetic oligonucleotide
cucuuaacuguccucugcu

SEQ ID NO: 1451390 - RNA, 19 nt, Artificial Sequence
  Description of Artificial Sequence: Synthetic oligonucleotide
gcagaguuugcccagguau

SEQ ID NO: 1451391 - RNA, 19 nt, Artificial Sequence
  Description of Artificial Sequence: Synthetic oligonucleotide
cucggagcuaaggcugugc

SEQ ID NO: 1451392 - RNA, 19 nt, Artificial Sequence
  Description of Artificial Sequence: Synthetic oligonucleotide
ccauaugggauggcaaagc

SEQ ID NO: 1451393 - RNA, 19 nt, Artificial Sequence
  Description of Artificial Sequence: Synthetic oligonucleotide
ugacuguguuaaguacaac

SEQ ID NO: 1451394 - RNA, 19 nt, Artificial Sequence
  Description of Artificial Sequence: Synthetic oligonucleotide
uaaugggcacgggaugcuc

SEQ ID NO: 1451395 - RNA, 19 nt, Artificial Sequence
  Description of Artificial Sequence: Synthetic oligonucleotide
uacaacccaguagguggca

SEQ ID NO: 1451396 - RNA, 19 nt, Artificial Sequence
  Description of Artificial Sequence: Synthetic oligonucleotide
aguugauaauaaagaucau

SEQ ID NO: 1451397 - RNA, 19 nt, Artificial Sequence
  Description of Artificial Sequence: Synthetic oligonucleotide
gaaaguccacacggcaaaa

SEQ ID NO: 1451398 - RNA, 19 nt, Artificial Sequence
  Description of Artificial Sequence: Synthetic oligonucleotide
acgggaugcucugugucgu

SEQ ID NO: 1451399 - RNA, 19 nt, Artificial Sequence
  Description of Artificial Sequence: Synthetic oligonucleotide
caaaaccagcugggugugg

SEQ ID NO: 1451400 - RNA, 19 nt, Artificial Sequence
  Description of Artificial Sequence: Synthetic oligonucleotide
cuugcguaugcaaggaguu

SEQ ID NO: 1451401 - RNA, 19 nt, Artificial Sequence
  Description of Artificial Sequence: Synthetic oligonucleotide
uacggggaacggacucucu

SEQ ID NO: 1451402 - RNA, 19 nt, Artificial Sequence
  Description of Artificial Sequence: Synthetic oligonucleotide
ccaguguagaacuugcgua

SEQ ID NO: 1451403 - RNA, 19 nt, Artificial Sequence
  Description of Artificial Sequence: Synthetic oligonucleotide
gccgugaaccccuucugac

SEQ ID NO: 1451404 - RNA, 19 nt, Artificial Sequence
  Description of Artificial Sequence: Synthetic oligonucleotide
cacgcagaguuugcccagg

SEQ ID NO: 1451405 - RNA, 19 nt, Artificial Sequence
  Description of Artificial Sequence: Synthetic oligonucleotide
cuucguaagaaggcuauau

SEQ ID NO: 1451406 - RNA, 19 nt, Artificial Sequence
  Description of Artificial Sequence: Synthetic oligonucleotide
gacuucguaagaaggcuau

SEQ ID NO: 1451407 - RNA, 19 nt, Artificial Sequence
  Description of Artificial Sequence: Synthetic oligonucleotide
gguguguugacaaguguua

SEQ ID NO: 1451408 - RNA, 19 nt, Artificial Sequence
  Description of Artificial Sequence: Synthetic oligonucleotide
acggacucucugcucuuaa

SEQ ID NO: 1451409 - RNA, 19 nt, Artificial Sequence
  Description of Artificial Sequence: Synthetic oligonucleotide
ggauccacaugauugcaau

SEQ ID NO: 1451410 - RNA, 19 nt, Artificial Sequence
  Description of Artificial Sequence: Synthetic oligonucleotide
cugcugacuauauaacguu

SEQ ID NO: 1451411 - RNA, 19 nt, Artificial Sequence
  Description of Artificial Sequence: Synthetic oligonucleotide
aacggacucucugcucuua

SEQ ID NO: 1451412 - RNA, 19 nt, Artificial Sequence
  Description of Artificial Sequence: Synthetic oligonucleotide
caaaugcccuguuuguaau

SEQ ID NO: 1451413 - RNA, 19 nt, Artificial Sequence
  Description of Artificial Sequence: Synthetic oligonucleotide
caccccaacucaauauaua

SEQ ID NO: 1451414 - RNA, 19 nt, Artificial Sequence
  Description of Artificial Sequence: Synthetic oligonucleotide
ccuuccaugcgacaccaca

SEQ ID NO: 1451415 - RNA, 19 nt, Artificial Sequence
  Description of Artificial Sequence: Synthetic oligonucleotide
cccauaugggauggcaaag

SEQ ID NO: 1451416 - RNA, 19 nt, Artificial Sequence
  Description of Artificial Sequence: Synthetic oligonucleotide
ccccucaacaugguggaag

SEQ ID NO: 1451417 - RNA, 19 nt, Artificial Sequence
  Description of Artificial Sequence: Synthetic oligonucleotide
guguuaaguacaacccagu

SEQ ID NO: 1451418 - RNA, 19 nt, Artificial Sequence
  Description of Artificial Sequence: Synthetic oligonucleotide
ggcaggaauuuaaucuaca

SEQ ID NO: 1451419 - RNA, 19 nt, Artificial Sequence
  Description of Artificial Sequence: Synthetic oligonucleotide
aagugccggccaucaucau

SEQ ID NO: 1451420 - RNA, 19 nt, Artificial Sequence
  Description of Artificial Sequence: Synthetic oligonucleotide
cauccuccgagagguccag

SEQ ID NO: 1451421 - RNA, 19 nt, Artificial Sequence
  Description of Artificial Sequence: Synthetic oligonucleotide
agcuaaggcugugcaaguu

SEQ ID NO: 1451422 - RNA, 19 nt, Artificial Sequence
  Description of Artificial Sequence: Synthetic oligonucleotide
acuucguaagaaggcuaua

SEQ ID NO: 1451423 - RNA, 19 nt, Artificial Sequence
  Description of Artificial Sequence: Synthetic oligonucleotide
cugacuauauaacguuauu

SEQ ID NO: 1451424 - RNA, 19 nt, Artificial Sequence
  Description of Artificial Sequence: Synthetic oligonucleotide
augggauggcaaagcacau

SEQ ID NO: 1451425 - RNA, 19 nt, Artificial Sequence
  Description of Artificial Sequence: Synthetic oligonucleotide
gaaucacacuaagcuucaa

SEQ ID NO: 1451426 - RNA, 19 nt, Artificial Sequence
  Description of Artificial Sequence: Synthetic oligonucleotide
uccgcaagugccggccauc

SEQ ID NO: 1451427 - RNA, 19 nt, Artificial Sequence
  Description of Artificial Sequence: Synthetic oligonucleotide
cagugcuuucuacggagcu

SEQ ID NO: 1451428 - RNA, 19 nt, Artificial Sequence
  Description of Artificial Sequence: Synthetic oligonucleotide
caaguacggggaacggacu

SEQ ID NO: 1451429 - RNA, 19 nt, Artificial Sequence
  Description of Artificial Sequence: Synthetic oligonucleotide
gggcacgggaugcucugug

SEQ ID NO: 1451430 - RNA, 19 nt, Artificial Sequence
  Description of Artificial Sequence: Synthetic oligonucleotide
gcgacaccacagaaagacc

SEQ ID NO: 1451431 - RNA, 19 nt, Artificial Sequence
  Description of Artificial Sequence: Synthetic oligonucleotide
gcugacuauauaacguuau

SEQ ID NO: 1451432 - RNA, 19 nt, Artificial Sequence
  Description of Artificial Sequence: Synthetic oligonucleotide
ugggcacgggaugcucugu

SEQ ID NO: 1451433 - RNA, 19 nt, Artificial Sequence
  Description of Artificial Sequence: Synthetic oligonucleotide
ccaugcgacaccacagaaa

SEQ ID NO: 1451434 - RNA, 19 nt, Artificial Sequence
  Description of Artificial Sequence: Synthetic oligonucleotide
cagcccucagacgucaaua

SEQ ID NO: 1451435 - RNA, 19 nt, Artificial Sequence
  Description of Artificial Sequence: Synthetic oligonucleotide
augcgacaccacagaaaga

SEQ ID NO: 1451436 - RNA, 19 nt, Artificial Sequence
  Description of Artificial Sequence: Synthetic oligonucleotide
gugaaccccuucugacugu

SEQ ID NO: 1451437 - RNA, 19 nt, Artificial Sequence
  Description of Artificial Sequence: Synthetic oligonucleotide
cgaugagagcaauauagau

SEQ ID NO: 1451438 - RNA, 19 nt, Artificial Sequence
  Description of Artificial Sequence: Synthetic oligonucleotide
gagcucagucgugcuaggu

SEQ ID NO: 1451439 - RNA, 19 nt, Artificial Sequence
  Description of Artificial Sequence: Synthetic oligonucleotide
cggacucucugcucuuaac

SEQ ID NO: 1451440 - RNA, 19 nt, Artificial Sequence
  Description of Artificial Sequence: Synthetic oligonucleotide
auauugccgugaaccccuu

SEQ ID NO: 1451441 - RNA, 19 nt, Artificial Sequence
  Description of Artificial Sequence: Synthetic oligonucleotide
cgagagguccagcauccca

SEQ ID NO: 1451442 - RNA, 19 nt, Artificial Sequence
  Description of Artificial Sequence: Synthetic oligonucleotide
cggccaucaucauuacuga

SEQ ID NO: 1451443 - RNA, 19 nt, Artificial Sequence
  Description of Artificial Sequence: Synthetic oligonucleotide
ccgugaaccccuucugacu

SEQ ID NO: 1451444 - RNA, 19 nt, Artificial Sequence
  Description of Artificial Sequence: Synthetic oligonucleotide
ccaccccaacucaauauau

SEQ ID NO: 1451445 - RNA, 19 nt, Artificial Sequence
  Description of Artificial Sequence: Synthetic oligonucleotide
ccgagucaucacuguucuc

SEQ ID NO: 1451446 - RNA, 19 nt, Artificial Sequence
  Description of Artificial Sequence: Synthetic oligonucleotide
gcuuucuacggagcucagu

SEQ ID NO: 1451447 - RNA, 19 nt, Artificial Sequence
  Description of Artificial Sequence: Synthetic oligonucleotide
gggcuggacauggauuuau

SEQ ID NO: 1451448 - RNA, 19 nt, Artificial Sequence
  Description of Artificial Sequence: Synthetic oligonucleotide
ccgagagguccagcauccc

SEQ ID NO: 1451449 - RNA, 19 nt, Artificial Sequence
  Description of Artificial Sequence: Synthetic oligonucleotide
cuccgcaagugccggccau

SEQ ID NO: 1451450 - RNA, 19 nt, Artificial Sequence
  Description of Artificial Sequence: Synthetic oligonucleotide
cggagcuaaggcugugcaa

SEQ ID NO: 1451451 - RNA, 19 nt, Artificial Sequence
  Description of Artificial Sequence: Synthetic oligonucleotide
ccgcaagugccggccauca

SEQ ID NO: 1451452 - RNA, 19 nt, Artificial Sequence
  Description of Artificial Sequence: Synthetic oligonucleotide
gcguaugcaaggaguucau

SEQ ID NO: 1451453 - RNA, 19 nt, Artificial Sequence
  Description of Artificial Sequence: Synthetic oligonucleotide
cgugcuaggucugcaccaa

SEQ ID NO: 1451454 - RNA, 19 nt, Artificial Sequence
  Description of Artificial Sequence: Synthetic oligonucleotide
ccuccgagagguccagcau

SEQ ID NO: 1451455 - RNA, 19 nt, Artificial Sequence
  Description of Artificial Sequence: Synthetic oligonucleotide
gggugugguggcagcgccu

SEQ ID NO: 1451456 - RNA, 19 nt, Artificial Sequence
  Description of Artificial Sequence: Synthetic oligonucleotide
cgcagaguuugcccaggua

SEQ ID NO: 1451457 - RNA, 19 nt, Artificial Sequence
  Description of Artificial Sequence: Synthetic oligonucleotide
cguaugcaaggaguucauu

SEQ ID NO: 1451458 - RNA, 19 nt, Artificial Sequence
  Description of Artificial Sequence: Synthetic oligonucleotide
cgcaagugccggccaucau

SEQ ID NO: 1451459 - RNA, 19 nt, Artificial Sequence
  Description of Artificial Sequence: Synthetic oligonucleotide
aaguauacaaguuauaguc

SEQ ID NO: 1451460 - RNA, 19 nt, Artificial Sequence
  Description of Artificial Sequence: Synthetic oligonucleotide
uauauaucaagcuugguag

SEQ ID NO: 1451461 - RNA, 19 nt, Artificial Sequence
  Description of Artificial Sequence: Synthetic oligonucleotide
uuuacgacgauucauuucc

SEQ ID NO: 1451462 - RNA, 19 nt, Artificial Sequence
  Description of Artificial Sequence: Synthetic oligonucleotide
aacgaggucccacaaaagc

SEQ ID NO: 1451463 - RNA, 19 nt, Artificial Sequence
  Description of Artificial Sequence: Synthetic oligonucleotide
acaaauaacaugcugcauc

SEQ ID NO: 1451464 - RNA, 19 nt, Artificial Sequence
  Description of Artificial Sequence: Synthetic oligonucleotide
aacuagcagacacaaauuc

SEQ ID NO: 1451465 - RNA, 19 nt, Artificial Sequence
  Description of Artificial Sequence: Synthetic oligonucleotide
agauacgugauccaugugg

SEQ ID NO: 1451466 - RNA, 19 nt, Artificial Sequence
  Description of Artificial Sequence: Synthetic oligonucleotide
gauucauuuccuuucggcg

SEQ ID NO: 1451467 - RNA, 19 nt, Artificial Sequence
  Description of Artificial Sequence: Synthetic oligonucleotide
uuuucguuuagucagguuc

SEQ ID NO: 1451468 - RNA, 19 nt, Artificial Sequence
  Description of Artificial Sequence: Synthetic oligonucleotide
auaucccucguacaaaacc

SEQ ID NO: 1451469 - RNA, 19 nt, Artificial Sequence
  Description of Artificial Sequence: Synthetic oligonucleotide
gauuuaucgaaacuagcag

SEQ ID NO: 1451470 - RNA, 19 nt, Artificial Sequence
  Description of Artificial Sequence: Synthetic oligonucleotide
aagagauaugucucaauag

SEQ ID NO: 1451471 - RNA, 19 nt, Artificial Sequence
  Description of Artificial Sequence: Synthetic oligonucleotide
aacagauuguguuuguucu

SEQ ID NO: 1451472 - RNA, 19 nt, Artificial Sequence
  Description of Artificial Sequence: Synthetic oligonucleotide
aaucuuaaccucuccauca

SEQ ID NO: 1451473 - RNA, 19 nt, Artificial Sequence
  Description of Artificial Sequence: Synthetic oligonucleotide
uacuaugaaaccagagucg

SEQ ID NO: 1451474 - RNA, 19 nt, Artificial Sequence
  Description of Artificial Sequence: Synthetic oligonucleotide
auaucgaaaguauacaagu

SEQ ID NO: 1451475 - RNA, 19 nt, Artificial Sequence
  Description of Artificial Sequence: Synthetic oligonucleotide
aauagauuuaucgaaacua

SEQ ID NO: 1451476 - RNA, 19 nt, Artificial Sequence
  Description of Artificial Sequence: Synthetic oligonucleotide
uuuaucgaaacuagcagac

SEQ ID NO: 1451477 - RNA, 19 nt, Artificial Sequence
  Description of Artificial Sequence: Synthetic oligonucleotide
ucuuacauauucucguggg

SEQ ID NO: 1451478 - RNA, 19 nt, Artificial Sequence
  Description of Artificial Sequence: Synthetic oligonucleotide
uuuuguaugguagacuucc

SEQ ID NO: 1451479 - RNA, 19 nt, Artificial Sequence
  Description of Artificial Sequence: Synthetic oligonucleotide
auaggguuccaacagauug

SEQ ID NO: 1451480 - RNA, 19 nt, Artificial Sequence
  Description of Artificial Sequence: Synthetic oligonucleotide
aauaacaugcugcauccgu

SEQ ID NO: 1451481 - RNA, 19 nt, Artificial Sequence
  Description of Artificial Sequence: Synthetic oligonucleotide
aauggaaagcuuccauagg

SEQ ID NO: 1451482 - RNA, 19 nt, Artificial Sequence
  Description of Artificial Sequence: Synthetic oligonucleotide
auucauuuccuuucggcgg

SEQ ID NO: 1451483 - RNA, 19 nt, Artificial Sequence
  Description of Artificial Sequence: Synthetic oligonucleotide
ucuaauagauuuaucgaaa

SEQ ID NO: 1451484 - RNA, 19 nt, Artificial Sequence
  Description of Artificial Sequence: Synthetic oligonucleotide
uucuaauagauuuaucgaa

SEQ ID NO: 1451485 - RNA, 19 nt, Artificial Sequence
  Description of Artificial Sequence: Synthetic oligonucleotide
uaucgaaacuagcagacac

SEQ ID NO: 1451486 - RNA, 19 nt, Artificial Sequence
  Description of Artificial Sequence: Synthetic oligonucleotide
auuuaucgaaacuagcaga

SEQ ID NO: 1451487 - RNA, 19 nt, Artificial Sequence
  Description of Artificial Sequence: Synthetic oligonucleotide
aguauacaaguuauagucc

SEQ ID NO: 1451488 - RNA, 19 nt, Artificial Sequence
  Description of Artificial Sequence: Synthetic oligonucleotide
aagcacacccaguuucucc

SEQ ID NO: 1451489 - RNA, 19 nt, Artificial Sequence
  Description of Artificial Sequence: Synthetic oligonucleotide
uuucguuuagucagguucc

SEQ ID NO: 1451490 - RNA, 19 nt, Artificial Sequence
  Description of Artificial Sequence: Synthetic oligonucleotide
ugaaaccagagucgggucg

SEQ ID NO: 1451491 - RNA, 19 nt, Artificial Sequence
  Description of Artificial Sequence: Synthetic oligonucleotide
cauaucgaaaguauacaag

SEQ ID NO: 1451492 - RNA, 19 nt, Artificial Sequence
  Description of Artificial Sequence: Synthetic oligonucleotide
ucaaguaccgcagauacgu

SEQ ID NO: 1451493 - RNA, 19 nt, Artificial Sequence
  Description of Artificial Sequence: Synthetic oligonucleotide
ucuuggaacucucuggaug

SEQ ID NO: 1451494 - RNA, 19 nt, Artificial Sequence
  Description of Artificial Sequence: Synthetic oligonucleotide
uaaccucuccaucacaugc

SEQ ID NO: 1451495 - RNA, 19 nt, Artificial Sequence
  Description of Artificial Sequence: Synthetic oligonucleotide
acugcuuauacugucaaag

SEQ ID NO: 1451496 - RNA, 19 nt, Artificial Sequence
  Description of Artificial Sequence: Synthetic oligonucleotide
aguucauugagcauauagg

SEQ ID NO: 1451497 - RNA, 19 nt, Artificial Sequence
  Description of Artificial Sequence: Synthetic oligonucleotide
agucgggucguuuauuuac

SEQ ID NO: 1451498 - RNA, 19 nt, Artificial Sequence
  Description of Artificial Sequence: Synthetic oligonucleotide
aaagcgagugcauaucccu

SEQ ID NO: 1451499 - RNA, 19 nt, Artificial Sequence
  Description of Artificial Sequence: Synthetic oligonucleotide
aauugacuccaucacggug

SEQ ID NO: 1451500 - RNA, 19 nt, Artificial Sequence
  Description of Artificial Sequence: Synthetic oligonucleotide
uucaaaaggauguaaggua

SEQ ID NO: 1451501 - RNA, 19 nt, Artificial Sequence
  Description of Artificial Sequence: Synthetic oligonucleotide
uguaugguagacuucccug

SEQ ID NO: 1451502 - RNA, 19 nt, Artificial Sequence
  Description of Artificial Sequence: Synthetic oligonucleotide
ucgaaaguauacaaguuau

SEQ ID NO: 1451503 - RNA, 19 nt, Artificial Sequence
  Description of Artificial Sequence: Synthetic oligonucleotide
auauaucaagcuugguagg

SEQ ID NO: 1451504 - RNA, 19 nt, Artificial Sequence
  Description of Artificial Sequence: Synthetic oligonucleotide
aauccguuugacaugcggg

SEQ ID NO: 1451505 - RNA, 19 nt, Artificial Sequence
  Description of Artificial Sequence: Synthetic oligonucleotide
aaaagcgagugcauauccc

SEQ ID NO: 1451506 - RNA, 19 nt, Artificial Sequence
  Description of Artificial Sequence: Synthetic oligonucleotide
uagauuucgggagaugccg

SEQ ID NO: 1451507 - RNA, 19 nt, Artificial Sequence
  Description of Artificial Sequence: Synthetic oligonucleotide
auuggcugcgguaaaaugg

SEQ ID NO: 1451508 - RNA, 19 nt, Artificial Sequence
  Description of Artificial Sequence: Synthetic oligonucleotide
uuccauaggguuccaacag

SEQ ID NO: 1451509 - RNA, 19 nt, Artificial Sequence
  Description of Artificial Sequence: Synthetic oligonucleotide
ucucauauccaagacgacc

SEQ ID NO: 1451510 - RNA, 19 nt, Artificial Sequence
  Description of Artificial Sequence: Synthetic oligonucleotide
agcaauccguuugacaugc

SEQ ID NO: 1451511 - RNA, 19 nt, Artificial Sequence
  Description of Artificial Sequence: Synthetic oligonucleotide
cuagaauuguguguagugg

SEQ ID NO: 1451512 - RNA, 19 nt, Artificial Sequence
  Description of Artificial Sequence: Synthetic oligonucleotide
aucauaguuucuuggaacu

SEQ ID NO: 1451513 - RNA, 19 nt, Artificial Sequence
  Description of Artificial Sequence: Synthetic oligonucleotide
agugcacgcauaucgaaag

SEQ ID NO: 1451514 - RNA, 19 nt, Artificial Sequence
  Description of Artificial Sequence: Synthetic oligonucleotide
gguuauaaucguuugcugc

SEQ ID NO: 1451515 - RNA, 19 nt, Artificial Sequence
  Description of Artificial Sequence: Synthetic oligonucleotide
gacgauucauuuccuuucg

SEQ ID NO: 1451516 - RNA, 19 nt, Artificial Sequence
  Description of Artificial Sequence: Synthetic oligonucleotide
caaauucuuugccagucgg

SEQ ID NO: 1451517 - RNA, 19 nt, Artificial Sequence
  Description of Artificial Sequence: Synthetic oligonucleotide
uaucaagcuugguaggaag

SEQ ID NO: 1451518 - RNA, 19 nt, Artificial Sequence
  Description of Artificial Sequence: Synthetic oligonucleotide
ugcgguaaaauggaaagcu

SEQ ID NO: 1451519 - RNA, 19 nt, Artificial Sequence
  Description of Artificial Sequence: Synthetic oligonucleotide
agauuuaucgaaacuagca

SEQ ID NO: 1451520 - RNA, 19 nt, Artificial Sequence
  Description of Artificial Sequence: Synthetic oligonucleotide
ucuuuccuagaauugugug

SEQ ID NO: 1451521 - RNA, 19 nt, Artificial Sequence
  Description of Artificial Sequence: Synthetic oligonucleotide
aaaggcggggucuuuccag

SEQ ID NO: 1451522 - RNA, 19 nt, Artificial Sequence
  Description of Artificial Sequence: Synthetic oligonucleotide
uuucccgugauguaagcac

SEQ ID NO: 1451523 - RNA, 19 nt, Artificial Sequence
  Description of Artificial Sequence: Synthetic oligonucleotide
acuauguuccuaucagaag

SEQ ID NO: 1451524 - RNA, 19 nt, Artificial Sequence
  Description of Artificial Sequence: Synthetic oligonucleotide
uucauuuccuuucggcggc

SEQ ID NO: 1451525 - RNA, 19 nt, Artificial Sequence
  Description of Artificial Sequence: Synthetic oligonucleotide
ugaucaaugccaguguaca

SEQ ID NO: 1451526 - RNA, 19 nt, Artificial Sequence
  Description of Artificial Sequence: Synthetic oligonucleotide
aaaaggauguaagguagga

SEQ ID NO: 1451527 - RNA, 19 nt, Artificial Sequence
  Description of Artificial Sequence: Synthetic oligonucleotide
aaguaccgcagauacguga

SEQ ID NO: 1451528 - RNA, 19 nt, Artificial Sequence
  Description of Artificial Sequence: Synthetic oligonucleotide
guucucauauccaagacga

SEQ ID NO: 1451529 - RNA, 19 nt, Artificial Sequence
  Description of Artificial Sequence: Synthetic oligonucleotide
aagcucuuacauauucucg

SEQ ID NO: 1451530 - RNA, 19 nt, Artificial Sequence
  Description of Artificial Sequence: Synthetic oligonucleotide
aucgaaaguauacaaguua

SEQ ID NO: 1451531 - RNA, 19 nt, Artificial Sequence
  Description of Artificial Sequence: Synthetic oligonucleotide
cauccguuuuguaugguag

SEQ ID NO: 1451532 - RNA, 19 nt, Artificial Sequence
  Description of Artificial Sequence: Synthetic oligonucleotide
caaaaggauguaagguagg

SEQ ID NO: 1451533 - RNA, 19 nt, Artificial Sequence
  Description of Artificial Sequence: Synthetic oligonucleotide
cucuuacauauucucgugg

SEQ ID NO: 1451534 - RNA, 19 nt, Artificial Sequence
  Description of Artificial Sequence: Synthetic oligonucleotide
aacuucugguuauaaucgu

SEQ ID NO: 1451535 - RNA, 19 nt, Artificial Sequence
  Description of Artificial Sequence: Synthetic oligonucleotide
acgcauaucgaaaguauac

SEQ ID NO: 1451536 - RNA, 19 nt, Artificial Sequence
  Description of Artificial Sequence: Synthetic oligonucleotide
uuggcugcgguaaaaugga

SEQ ID NO: 1451537 - RNA, 19 nt, Artificial Sequence
  Description of Artificial Sequence: Synthetic oligonucleotide
uacgugauccauguggacc

SEQ ID NO: 1451538 - RNA, 19 nt, Artificial Sequence
  Description of Artificial Sequence: Synthetic oligonucleotide
ugacaugcgggugauacug

SEQ ID NO: 1451539 - RNA, 19 nt, Artificial Sequence
  Description of Artificial Sequence: Synthetic oligonucleotide
gugaugaucaaugccagug

SEQ ID NO: 1451540 - RNA, 19 nt, Artificial Sequence
  Description of Artificial Sequence: Synthetic oligonucleotide
guaugguagacuucccugc

SEQ ID NO: 1451541 - RNA, 19 nt, Artificial Sequence
  Description of Artificial Sequence: Synthetic oligonucleotide
ugaugaucaaugccagugu

SEQ ID NO: 1451542 - RNA, 19 nt, Artificial Sequence
  Description of Artificial Sequence: Synthetic oligonucleotide
ugucauacaguacuauguu

SEQ ID NO: 1451543 - RNA, 19 nt, Artificial Sequence
  Description of Artificial Sequence: Synthetic oligonucleotide
uguaagguaggaucauagu

SEQ ID NO: 1451544 - RNA, 19 nt, Artificial Sequence
  Description of Artificial Sequence: Synthetic oligonucleotide
aucacggugaccauccagg

SEQ ID NO: 1451545 - RNA, 19 nt, Artificial Sequence
  Description of Artificial Sequence: Synthetic oligonucleotide
agacccacacauaauguac

SEQ ID NO: 1451546 - RNA, 19 nt, Artificial Sequence
  Description of Artificial Sequence: Synthetic oligonucleotide
acuugcuguccacacgugg

SEQ ID NO: 1451547 - RNA, 19 nt, Artificial Sequence
  Description of Artificial Sequence: Synthetic oligonucleotide
uucccaagagauaugucuc

SEQ ID NO: 1451548 - RNA, 19 nt, Artificial Sequence
  Description of Artificial Sequence: Synthetic oligonucleotide
augucgagcaauccguuug

SEQ ID NO: 1451549 - RNA, 19 nt, Artificial Sequence
  Description of Artificial Sequence: Synthetic oligonucleotide
ucgugcgaacacauuuucg

SEQ ID NO: 1451550 - RNA, 19 nt, Artificial Sequence
  Description of Artificial Sequence: Synthetic oligonucleotide
agcgagugcauaucccucg

SEQ ID NO: 1451551 - RNA, 19 nt, Artificial Sequence
  Description of Artificial Sequence: Synthetic oligonucleotide
uucugguuauaaucguuug

SEQ ID NO: 1451552 - RNA, 19 nt, Artificial Sequence
  Description of Artificial Sequence: Synthetic oligonucleotide
uuguaugguagacuucccu

SEQ ID NO: 1451553 - RNA, 19 nt, Artificial Sequence
  Description of Artificial Sequence: Synthetic oligonucleotide
aaauaacaugcugcauccg

SEQ ID NO: 1451554 - RNA, 19 nt, Artificial Sequence
  Description of Artificial Sequence: Synthetic oligonucleotide
gagugcauaucccucguac

SEQ ID NO: 1451555 - RNA, 19 nt, Artificial Sequence
  Description of Artificial Sequence: Synthetic oligonucleotide
cugcuuauacugucaaagc

SEQ ID NO: 1451556 - RNA, 19 nt, Artificial Sequence
  Description of Artificial Sequence: Synthetic oligonucleotide
cuguagauagauuucggga

SEQ ID NO: 1451557 - RNA, 19 nt, Artificial Sequence
  Description of Artificial Sequence: Synthetic oligonucleotide
uccugaaucuggcuguaga

SEQ ID NO: 1451558 - RNA, 19 nt, Artificial Sequence
  Description of Artificial Sequence: Synthetic oligonucleotide
agguuccaaaucuuaaccu

SEQ ID NO: 1451559 - RNA, 19 nt, Artificial Sequence
  Description of Artificial Sequence: Synthetic oligonucleotide
gaugcaaggaaugguuuug

SEQ ID NO: 1451560 - RNA, 19 nt, Artificial Sequence
  Description of Artificial Sequence: Synthetic oligonucleotide
aucgugcgaacacauuuuc

SEQ ID NO: 1451561 - RNA, 19 nt, Artificial Sequence
  Description of Artificial Sequence: Synthetic oligonucleotide
gcugcgguaaaauggaaag

SEQ ID NO: 1451562 - RNA, 19 nt, Artificial Sequence
  Description of Artificial Sequence: Synthetic oligonucleotide
acagucgucaggcucuuug

SEQ ID NO: 1451563 - RNA, 19 nt, Artificial Sequence
  Description of Artificial Sequence: Synthetic oligonucleotide
caauccguuugacaugcgg

SEQ ID NO: 1451564 - RNA, 19 nt, Artificial Sequence
  Description of Artificial Sequence: Synthetic oligonucleotide
guaguccacaucaaguacc

SEQ ID NO: 1451565 - RNA, 19 nt, Artificial Sequence
  Description of Artificial Sequence: Synthetic oligonucleotide
aucucggcggcuccggccc

SEQ ID NO: 1451566 - RNA, 19 nt, Artificial Sequence
  Description of Artificial Sequence: Synthetic oligonucleotide
gcuugcuauguuuacgacg

SEQ ID NO: 1451567 - RNA, 19 nt, Artificial Sequence
  Description of Artificial Sequence: Synthetic oligonucleotide
uuuguaugguagacuuccc

SEQ ID NO: 1451568 - RNA, 19 nt, Artificial Sequence
  Description of Artificial Sequence: Synthetic oligonucleotide
acuacgugcuucuuccucu

SEQ ID NO: 1451569 - RNA, 19 nt, Artificial Sequence
  Description of Artificial Sequence: Synthetic oligonucleotide
ucaugcgcuuguaucgugc

SEQ ID NO: 1451570 - RNA, 19 nt, Artificial Sequence
  Description of Artificial Sequence: Synthetic oligonucleotide
acgaggucccacaaaagcg

SEQ ID NO: 1451571 - RNA, 19 nt, Artificial Sequence
  Description of Artificial Sequence: Synthetic oligonucleotide
ggcaauugacuccaucacg

SEQ ID NO: 1451572 - RNA, 19 nt, Artificial Sequence
  Description of Artificial Sequence: Synthetic oligonucleotide
auacaaguuauaguccuca

SEQ ID NO: 1451573 - RNA, 19 nt, Artificial Sequence
  Description of Artificial Sequence: Synthetic oligonucleotide
guaggaucauaguuucuug

SEQ ID NO: 1451574 - RNA, 19 nt, Artificial Sequence
  Description of Artificial Sequence: Synthetic oligonucleotide
guuauaaucguuugcugcu

SEQ ID NO: 1451575 - RNA, 19 nt, Artificial Sequence
  Description of Artificial Sequence: Synthetic oligonucleotide
agucgucaggcucuuuggg

SEQ ID NO: 1451576 - RNA, 19 nt, Artificial Sequence
  Description of Artificial Sequence: Synthetic oligonucleotide
augaucaaugccaguguac

SEQ ID NO: 1451577 - RNA, 19 nt, Artificial Sequence
  Description of Artificial Sequence: Synthetic oligonucleotide
cauugagcauauaggguug

SEQ ID NO: 1451578 - RNA, 19 nt, Artificial Sequence
  Description of Artificial Sequence: Synthetic oligonucleotide
augcauuggcuuuccacag

SEQ ID NO: 1451579 - RNA, 19 nt, Artificial Sequence
  Description of Artificial Sequence: Synthetic oligonucleotide
acaacugccacuacgugcu

SEQ ID NO: 1451580 - RNA, 19 nt, Artificial Sequence
  Description of Artificial Sequence: Synthetic oligonucleotide
uaccgcagauacgugaucc

SEQ ID NO: 1451581 - RNA, 19 nt, Artificial Sequence
  Description of Artificial Sequence: Synthetic oligonucleotide
acgugauccauguggacca

SEQ ID NO: 1451582 - RNA, 19 nt, Artificial Sequence
  Description of Artificial Sequence: Synthetic oligonucleotide
ucgaaacuagcagacacaa

SEQ ID NO: 1451583 - RNA, 19 nt, Artificial Sequence
  Description of Artificial Sequence: Synthetic oligonucleotide
augcaaggaaugguuuugc

SEQ ID NO: 1451584 - RNA, 19 nt, Artificial Sequence
  Description of Artificial Sequence: Synthetic oligonucleotide
cucguuccaauuugguagc

SEQ ID NO: 1451585 - RNA, 19 nt, Artificial Sequence
  Description of Artificial Sequence: Synthetic oligonucleotide
aaucuggcuguagauagau

SEQ ID NO: 1451586 - RNA, 19 nt, Artificial Sequence
  Description of Artificial Sequence: Synthetic oligonucleotide
ucacggugaccauccaggg

SEQ ID NO: 1451587 - RNA, 19 nt, Artificial Sequence
  Description of Artificial Sequence: Synthetic oligonucleotide
aggcuugcuauguuuacga

SEQ ID NO: 1451588 - RNA, 19 nt, Artificial Sequence
  Description of Artificial Sequence: Synthetic oligonucleotide
gauacgugauccaugugga

SEQ ID NO: 1451589 - RNA, 19 nt, Artificial Sequence
  Description of Artificial Sequence: Synthetic oligonucleotide
uguguaguggcuccuccuc

SEQ ID NO: 1451590 - RNA, 19 nt, Artificial Sequence
  Description of Artificial Sequence: Synthetic oligonucleotide
uaauguacuugcugucaga

SEQ ID NO: 1451591 - RNA, 19 nt, Artificial Sequence
  Description of Artificial Sequence: Synthetic oligonucleotide
ccuucaugcgcuuguaucg

SEQ ID NO: 1451592 - RNA, 19 nt, Artificial Sequence
  Description of Artificial Sequence: Synthetic oligonucleotide
cuuuguucaucccaaaugu

SEQ ID NO: 1451593 - RNA, 19 nt, Artificial Sequence
  Description of Artificial Sequence: Synthetic oligonucleotide
agugcauaucccucguaca

SEQ ID NO: 1451594 - RNA, 19 nt, Artificial Sequence
  Description of Artificial Sequence: Synthetic oligonucleotide
auacgugauccauguggac

SEQ ID NO: 1451595 - RNA, 19 nt, Artificial Sequence
  Description of Artificial Sequence: Synthetic oligonucleotide
ugccgcaugucauacagua

SEQ ID NO: 1451596 - RNA, 19 nt, Artificial Sequence
  Description of Artificial Sequence: Synthetic oligonucleotide
ugucgagcaauccguuuga

SEQ ID NO: 1451597 - RNA, 19 nt, Artificial Sequence
  Description of Artificial Sequence: Synthetic oligonucleotide
ugcgaacacauuuucguuu

SEQ ID NO: 1451598 - RNA, 19 nt, Artificial Sequence
  Description of Artificial Sequence: Synthetic oligonucleotide
acagauccaggcuugcuau

SEQ ID NO: 1451599 - RNA, 19 nt, Artificial Sequence
  Description of Artificial Sequence: Synthetic oligonucleotide
auccguuugacaugcgggu

SEQ ID NO: 1451600 - RNA, 19 nt, Artificial Sequence
  Description of Artificial Sequence: Synthetic oligonucleotide
uacuugcugucagaggucc

SEQ ID NO: 1451601 - RNA, 19 nt, Artificial Sequence
  Description of Artificial Sequence: Synthetic oligonucleotide
acaguacuauguuccuauc

SEQ ID NO: 1451602 - RNA, 19 nt, Artificial Sequence
  Description of Artificial Sequence: Synthetic oligonucleotide
guuuacgacgauucauuuc

SEQ ID NO: 1451603 - RNA, 19 nt, Artificial Sequence
  Description of Artificial Sequence: Synthetic oligonucleotide
caagagauaugucucaaua

SEQ ID NO: 1451604 - RNA, 19 nt, Artificial Sequence
  Description of Artificial Sequence: Synthetic oligonucleotide
acagacggauguucauuuc

SEQ ID NO: 1451605 - RNA, 19 nt, Artificial Sequence
  Description of Artificial Sequence: Synthetic oligonucleotide
uuguaucgugcgaacacau

SEQ ID NO: 1451606 - RNA, 19 nt, Artificial Sequence
  Description of Artificial Sequence: Synthetic oligonucleotide
ucccaagagauaugucuca

SEQ ID NO: 1451607 - RNA, 19 nt, Artificial Sequence
  Description of Artificial Sequence: Synthetic oligonucleotide
ugucucaauaggguuaaau

SEQ ID NO: 1451608 - RNA, 19 nt, Artificial Sequence
  Description of Artificial Sequence: Synthetic oligonucleotide
uaucgugcgaacacauuuu

SEQ ID NO: 1451609 - RNA, 19 nt, Artificial Sequence
  Description of Artificial Sequence: Synthetic oligonucleotide
auugagcauauaggguugg

SEQ ID NO: 1451610 - RNA, 19 nt, Artificial Sequence
  Description of Artificial Sequence: Synthetic oligonucleotide
uguuuacgacgauucauuu

SEQ ID NO: 1451611 - RNA, 19 nt, Artificial Sequence
  Description of Artificial Sequence: Synthetic oligonucleotide
gaugaucaaugccagugua

SEQ ID NO: 1451612 - RNA, 19 nt, Artificial Sequence
  Description of Artificial Sequence: Synthetic oligonucleotide
gguuccaaaucuuaaccuc

SEQ ID NO: 1451613 - RNA, 19 nt, Artificial Sequence
  Description of Artificial Sequence: Synthetic oligonucleotide
cauuggcugcgguaaaaug

SEQ ID NO: 1451614 - RNA, 19 nt, Artificial Sequence
  Description of Artificial Sequence: Synthetic oligonucleotide
agauucuaauagauuuauc

SEQ ID NO: 1451615 - RNA, 19 nt, Artificial Sequence
  Description of Artificial Sequence: Synthetic oligonucleotide
uuuucccgugauguaagca

SEQ ID NO: 1451616 - RNA, 19 nt, Artificial Sequence
  Description of Artificial Sequence: Synthetic oligonucleotide
ucgggucguuuauuuacag

SEQ ID NO: 1451617 - RNA, 19 nt, Artificial Sequence
  Description of Artificial Sequence: Synthetic oligonucleotide
auauaggguugguucuuug

SEQ ID NO: 1451618 - RNA, 19 nt, Artificial Sequence
  Description of Artificial Sequence: Synthetic oligonucleotide
uuaucgaaacuagcagaca

SEQ ID NO: 1451619 - RNA, 19 nt, Artificial Sequence
  Description of Artificial Sequence: Synthetic oligonucleotide
acauuuucguuuagucagg

SEQ ID NO: 1451620 - RNA, 19 nt, Artificial Sequence
  Description of Artificial Sequence: Synthetic oligonucleotide
cucguacaaaaccuucaug

SEQ ID NO: 1451621 - RNA, 19 nt, Artificial Sequence
  Description of Artificial Sequence: Synthetic oligonucleotide
ccacacguggcaaaggcgg

SEQ ID NO: 1451622 - RNA, 19 nt, Artificial Sequence
  Description of Artificial Sequence: Synthetic oligonucleotide
guaggaagacaaaacauua

SEQ ID NO: 1451623 - RNA, 19 nt, Artificial Sequence
  Description of Artificial Sequence: Synthetic oligonucleotide
aaacgaggucccacaaaag

SEQ ID NO: 1451624 - RNA, 19 nt, Artificial Sequence
  Description of Artificial Sequence: Synthetic oligonucleotide
uuugggugcuuugccaggc

SEQ ID NO: 1451625 - RNA, 19 nt, Artificial Sequence
  Description of Artificial Sequence: Synthetic oligonucleotide
caguguacacugucuuucc

SEQ ID NO: 1451626 - RNA, 19 nt, Artificial Sequence
  Description of Artificial Sequence: Synthetic oligonucleotide
gcgagcuuccuucaugacg

SEQ ID NO: 1451627 - RNA, 19 nt, Artificial Sequence
  Description of Artificial Sequence: Synthetic oligonucleotide
auauccaagacgaccuucu

SEQ ID NO: 1451628 - RNA, 19 nt, Artificial Sequence
  Description of Artificial Sequence: Synthetic oligonucleotide
guaagguaggaucauaguu

SEQ ID NO: 1451629 - RNA, 19 nt, Artificial Sequence
  Description of Artificial Sequence: Synthetic oligonucleotide
cauuuaaagcucuuacaua

SEQ ID NO: 1451630 - RNA, 19 nt, Artificial Sequence
  Description of Artificial Sequence: Synthetic oligonucleotide
cagucgucaggcucuuugg

SEQ ID NO: 1451631 - RNA, 19 nt, Artificial Sequence
  Description of Artificial Sequence: Synthetic oligonucleotide
auaguccucauuggcugcg

SEQ ID NO: 1451632 - RNA, 19 nt, Artificial Sequence
  Description of Artificial Sequence: Synthetic oligonucleotide
uucuccgaugcauuggcuu

SEQ ID NO: 1451633 - RNA, 19 nt, Artificial Sequence
  Description of Artificial Sequence: Synthetic oligonucleotide
cuggcuguagauagauuuc

SEQ ID NO: 1451634 - RNA, 19 nt, Artificial Sequence
  Description of Artificial Sequence: Synthetic oligonucleotide
acgacgauucauuuccuuu

SEQ ID NO: 1451635 - RNA, 19 nt, Artificial Sequence
  Description of Artificial Sequence: Synthetic oligonucleotide
gccacuacgugcuucuucc

SEQ ID NO: 1451636 - RNA, 19 nt, Artificial Sequence
  Description of Artificial Sequence: Synthetic oligonucleotide
agcagcaaauaauuauaua

SEQ ID NO: 1451637 - RNA, 19 nt, Artificial Sequence
  Description of Artificial Sequence: Synthetic oligonucleotide
gcuauguuuacgacgauuc

SEQ ID NO: 1451638 - RNA, 19 nt, Artificial Sequence
  Description of Artificial Sequence: Synthetic oligonucleotide
auuuccuuucggcggcgag

SEQ ID NO: 1451639 - RNA, 19 nt, Artificial Sequence
  Description of Artificial Sequence: Synthetic oligonucleotide
auccguuuuguaugguaga

SEQ ID NO: 1451640 - RNA, 19 nt, Artificial Sequence
  Description of Artificial Sequence: Synthetic oligonucleotide
gccgaugucgagcaauccg

SEQ ID NO: 1451641 - RNA, 19 nt, Artificial Sequence
  Description of Artificial Sequence: Synthetic oligonucleotide
aagccccaguucauugagc

SEQ ID NO: 1451642 - RNA, 19 nt, Artificial Sequence
  Description of Artificial Sequence: Synthetic oligonucleotide
agaauuguguguaguggcu

SEQ ID NO: 1451643 - RNA, 19 nt, Artificial Sequence
  Description of Artificial Sequence: Synthetic oligonucleotide
uccuagaauuguguguagu

SEQ ID NO: 1451644 - RNA, 19 nt, Artificial Sequence
  Description of Artificial Sequence: Synthetic oligonucleotide
uucucauauccaagacgac

SEQ ID NO: 1451645 - RNA, 19 nt, Artificial Sequence
  Description of Artificial Sequence: Synthetic oligonucleotide
uugccagucggagaguagu

SEQ ID NO: 1451646 - RNA, 19 nt, Artificial Sequence
  Description of Artificial Sequence: Synthetic oligonucleotide
uagucgucgggguuccggc

SEQ ID NO: 1451647 - RNA, 19 nt, Artificial Sequence
  Description of Artificial Sequence: Synthetic oligonucleotide
ucccucguacaaaaccuuc

SEQ ID NO: 1451648 - RNA, 19 nt, Artificial Sequence
  Description of Artificial Sequence: Synthetic oligonucleotide
cauaucccucguacaaaac

SEQ ID NO: 1451649 - RNA, 19 nt, Artificial Sequence
  Description of Artificial Sequence: Synthetic oligonucleotide
agagucgggucguuuauuu

SEQ ID NO: 1451650 - RNA, 19 nt, Artificial Sequence
  Description of Artificial Sequence: Synthetic oligonucleotide
uacaaguuauaguccucau

SEQ ID NO: 1451651 - RNA, 19 nt, Artificial Sequence
  Description of Artificial Sequence: Synthetic oligonucleotide
agcuucccaagagauaugu

SEQ ID NO: 1451652 - RNA, 19 nt, Artificial Sequence
  Description of Artificial Sequence: Synthetic oligonucleotide
caggcuugcuauguuuacg

SEQ ID NO: 1451653 - RNA, 19 nt, Artificial Sequence
  Description of Artificial Sequence: Synthetic oligonucleotide
cuuacauauucucguggga

SEQ ID NO: 1451654 - RNA, 19 nt, Artificial Sequence
  Description of Artificial Sequence: Synthetic oligonucleotide
uucaugcgcuuguaucgug

SEQ ID NO: 1451655 - RNA, 19 nt, Artificial Sequence
  Description of Artificial Sequence: Synthetic oligonucleotide
ugccaggcaauugacucca

SEQ ID NO: 1451656 - RNA, 19 nt, Artificial Sequence
  Description of Artificial Sequence: Synthetic oligonucleotide
uuacgacgauucauuuccu

SEQ ID NO: 1451657 - RNA, 19 nt, Artificial Sequence
  Description of Artificial Sequence: Synthetic oligonucleotide
uuucuccgaugcauuggcu

SEQ ID NO: 1451658 - RNA, 19 nt, Artificial Sequence
  Description of Artificial Sequence: Synthetic oligonucleotide
cuuucggcggcgagcuucc

SEQ ID NO: 1451659 - RNA, 19 nt, Artificial Sequence
  Description of Artificial Sequence: Synthetic oligonucleotide
cuuggaacucucuggaugu

SEQ ID NO: 1451660 - RNA, 19 nt, Artificial Sequence
  Description of Artificial Sequence: Synthetic oligonucleotide
ugucaaagccccaguucau

SEQ ID NO: 1451661 - RNA, 19 nt, Artificial Sequence
  Description of Artificial Sequence: Synthetic oligonucleotide
uugacaugcgggugauacu

SEQ ID NO: 1451662 - RNA, 19 nt, Artificial Sequence
  Description of Artificial Sequence: Synthetic oligonucleotide
auacugucaaagccccagu

SEQ ID NO: 1451663 - RNA, 19 nt, Artificial Sequence
  Description of Artificial Sequence: Synthetic oligonucleotide
uguaucgugcgaacacauu

SEQ ID NO: 1451664 - RNA, 19 nt, Artificial Sequence
  Description of Artificial Sequence: Synthetic oligonucleotide
ucggagaguaguccacauc

SEQ ID NO: 1451665 - RNA, 19 nt, Artificial Sequence
  Description of Artificial Sequence: Synthetic oligonucleotide
gucucaauaggguuaaauu

SEQ ID NO: 1451666 - RNA, 19 nt, Artificial Sequence
  Description of Artificial Sequence: Synthetic oligonucleotide
guagucgucgggguuccgg

SEQ ID NO: 1451667 - RNA, 19 nt, Artificial Sequence
  Description of Artificial Sequence: Synthetic oligonucleotide
caggggaguugcuugccgc

SEQ ID NO: 1451668 - RNA, 19 nt, Artificial Sequence
  Description of Artificial Sequence: Synthetic oligonucleotide
cauauccaagacgaccuuc

SEQ ID NO: 1451669 - RNA, 19 nt, Artificial Sequence
  Description of Artificial Sequence: Synthetic oligonucleotide
gauuguguuuguucucaua

SEQ ID NO: 1451670 - RNA, 19 nt, Artificial Sequence
  Description of Artificial Sequence: Synthetic oligonucleotide
gucguuuauuuacagaguu

SEQ ID NO: 1451671 - RNA, 19 nt, Artificial Sequence
  Description of Artificial Sequence: Synthetic oligonucleotide
gcauaucgaaaguauacaa

SEQ ID NO: 1451672 - RNA, 19 nt, Artificial Sequence
  Description of Artificial Sequence: Synthetic oligonucleotide
cugcgguaaaauggaaagc

SEQ ID NO: 1451673 - RNA, 19 nt, Artificial Sequence
  Description of Artificial Sequence: Synthetic oligonucleotide
cagacggauguucauuuca

SEQ ID NO: 1451674 - RNA, 19 nt, Artificial Sequence
  Description of Artificial Sequence: Synthetic oligonucleotide
ugcgggugauacugaaacu

SEQ ID NO: 1451675 - RNA, 19 nt, Artificial Sequence
  Description of Artificial Sequence: Synthetic oligonucleotide
gugcauaucccucguacaa

SEQ ID NO: 1451676 - RNA, 19 nt, Artificial Sequence
  Description of Artificial Sequence: Synthetic oligonucleotide
ugccacuacgugcuucuuc

SEQ ID NO: 1451677 - RNA, 19 nt, Artificial Sequence
  Description of Artificial Sequence: Synthetic oligonucleotide
aucgaaacuagcagacaca

SEQ ID NO: 1451678 - RNA, 19 nt, Artificial Sequence
  Description of Artificial Sequence: Synthetic oligonucleotide
ugcauaucccucguacaaa

SEQ ID NO: 1451679 - RNA, 19 nt, Artificial Sequence
  Description of Artificial Sequence: Synthetic oligonucleotide
ugcuauguuuacgacgauu

SEQ ID NO: 1451680 - RNA, 19 nt, Artificial Sequence
  Description of Artificial Sequence: Synthetic oligonucleotide
uccguuugacaugcgggug

SEQ ID NO: 1451681 - RNA, 19 nt, Artificial Sequence
  Description of Artificial Sequence: Synthetic oligonucleotide
uuauaaucguuugcugcuu

SEQ ID NO: 1451682 - RNA, 19 nt, Artificial Sequence
  Description of Artificial Sequence: Synthetic oligonucleotide
gcuuccauaggguuccaac

SEQ ID NO: 1451683 - RNA, 19 nt, Artificial Sequence
  Description of Artificial Sequence: Synthetic oligonucleotide
guaucgugcgaacacauuu

SEQ ID NO: 1451684 - RNA, 19 nt, Artificial Sequence
  Description of Artificial Sequence: Synthetic oligonucleotide
agcuuggucucgcggacgu

SEQ ID NO: 1451685 - RNA, 19 nt, Artificial Sequence
  Description of Artificial Sequence: Synthetic oligonucleotide
aucaagcuugguaggaaga

SEQ ID NO: 1451686 - RNA, 19 nt, Artificial Sequence
  Description of Artificial Sequence: Synthetic oligonucleotide
ucauuuccuuucggcggcg

SEQ ID NO: 1451687 - RNA, 19 nt, Artificial Sequence
  Description of Artificial Sequence: Synthetic oligonucleotide
ucgcggacguagucgucgg

SEQ ID NO: 1451688 - RNA, 19 nt, Artificial Sequence
  Description of Artificial Sequence: Synthetic oligonucleotide
ugggugcuuugccaggcaa

SEQ ID NO: 1451689 - RNA, 19 nt, Artificial Sequence
  Description of Artificial Sequence: Synthetic oligonucleotide
cuuguaucgugcgaacaca

SEQ ID NO: 1451690 - RNA, 19 nt, Artificial Sequence
  Description of Artificial Sequence: Synthetic oligonucleotide
uucguuuagucagguucca

SEQ ID NO: 1451691 - RNA, 19 nt, Artificial Sequence
  Description of Artificial Sequence: Synthetic oligonucleotide
uccacagacggauguucau

SEQ ID NO: 1451692 - RNA, 19 nt, Artificial Sequence
  Description of Artificial Sequence: Synthetic oligonucleotide
ccgugauguaagcacaccc

SEQ ID NO: 1451693 - RNA, 19 nt, Artificial Sequence
  Description of Artificial Sequence: Synthetic oligonucleotide
ggaucauaguuucuuggaa

SEQ ID NO: 1451694 - RNA, 19 nt, Artificial Sequence
  Description of Artificial Sequence: Synthetic oligonucleotide
cacuacgugcuucuuccuc

SEQ ID NO: 1451695 - RNA, 19 nt, Artificial Sequence
  Description of Artificial Sequence: Synthetic oligonucleotide
acguagucgucgggguucc

SEQ ID NO: 1451696 - RNA, 19 nt, Artificial Sequence
  Description of Artificial Sequence: Synthetic oligonucleotide
agauuguguuuguucucau

SEQ ID NO: 1451697 - RNA, 19 nt, Artificial Sequence
  Description of Artificial Sequence: Synthetic oligonucleotide
uacgacgauucauuuccuu

SEQ ID NO: 1451698 - RNA, 19 nt, Artificial Sequence
  Description of Artificial Sequence: Synthetic oligonucleotide
aguaccgcagauacgugau

SEQ ID NO: 1451699 - RNA, 19 nt, Artificial Sequence
  Description of Artificial Sequence: Synthetic oligonucleotide
caaguaccgcagauacgug

SEQ ID NO: 1451700 - RNA, 19 nt, Artificial Sequence
  Description of Artificial Sequence: Synthetic oligonucleotide
auaacaugcugcauccguu

SEQ ID NO: 1451701 - RNA, 19 nt, Artificial Sequence
  Description of Artificial Sequence: Synthetic oligonucleotide
ugccagucggagaguaguc

SEQ ID NO: 1451702 - RNA, 19 nt, Artificial Sequence
  Description of Artificial Sequence: Synthetic oligonucleotide
aggggaguugcuugccgca

SEQ ID NO: 1451703 - RNA, 19 nt, Artificial Sequence
  Description of Artificial Sequence: Synthetic oligonucleotide
gcaaggaaugguuuugcaa

SEQ ID NO: 1451704 - RNA, 19 nt, Artificial Sequence
  Description of Artificial Sequence: Synthetic oligonucleotide
accgcagauacgugaucca

SEQ ID NO: 1451705 - RNA, 19 nt, Artificial Sequence
  Description of Artificial Sequence: Synthetic oligonucleotide
cagucggagaguaguccac

SEQ ID NO: 1451706 - RNA, 19 nt, Artificial Sequence
  Description of Artificial Sequence: Synthetic oligonucleotide
cgguaaaauggaaagcuuc

SEQ ID NO: 1451707 - RNA, 19 nt, Artificial Sequence
  Description of Artificial Sequence: Synthetic oligonucleotide
augccgaugucgagcaauc

SEQ ID NO: 1451708 - RNA, 19 nt, Artificial Sequence
  Description of Artificial Sequence: Synthetic oligonucleotide
acauauucucgugggacuu

SEQ ID NO: 1451709 - RNA, 19 nt, Artificial Sequence
  Description of Artificial Sequence: Synthetic oligonucleotide
cauaguuucuuggaacucu

SEQ ID NO: 1451710 - RNA, 19 nt, Artificial Sequence
  Description of Artificial Sequence: Synthetic oligonucleotide
uuggucucgcggacguagu

SEQ ID NO: 1451711 - RNA, 19 nt, Artificial Sequence
  Description of Artificial Sequence: Synthetic oligonucleotide
cacaagcagcaaauaauua

SEQ ID NO: 1451712 - RNA, 19 nt, Artificial Sequence
  Description of Artificial Sequence: Synthetic oligonucleotide
uccgaugcauuggcuuucc

SEQ ID NO: 1451713 - RNA, 19 nt, Artificial Sequence
  Description of Artificial Sequence: Synthetic oligonucleotide
acccacacauaauguacuu

SEQ ID NO: 1451714 - RNA, 19 nt, Artificial Sequence
  Description of Artificial Sequence: Synthetic oligonucleotide
cuacgugcuucuuccucuc

SEQ ID NO: 1451715 - RNA, 19 nt, Artificial Sequence
  Description of Artificial Sequence: Synthetic oligonucleotide
cacgcauaucgaaaguaua

SEQ ID NO: 1451716 - RNA, 19 nt, Artificial Sequence
  Description of Artificial Sequence: Synthetic oligonucleotide
agucggagaguaguccaca

SEQ ID NO: 1451717 - RNA, 19 nt, Artificial Sequence
  Description of Artificial Sequence: Synthetic oligonucleotide
uugccgcaugucauacagu

SEQ ID NO: 1451718 - RNA, 19 nt, Artificial Sequence
  Description of Artificial Sequence: Synthetic oligonucleotide
cacucguuccaauuuggua

SEQ ID NO: 1451719 - RNA, 19 nt, Artificial Sequence
  Description of Artificial Sequence: Synthetic oligonucleotide
caagcuugguaggaagaca

SEQ ID NO: 1451720 - RNA, 19 nt, Artificial Sequence
  Description of Artificial Sequence: Synthetic oligonucleotide
uggucucgcggacguaguc

SEQ ID NO: 1451721 - RNA, 19 nt, Artificial Sequence
  Description of Artificial Sequence: Synthetic oligonucleotide
cacagauccaggcuugcua

SEQ ID NO: 1451722 - RNA, 19 nt, Artificial Sequence
  Description of Artificial Sequence: Synthetic oligonucleotide
aguccucauuggcugcggu

SEQ ID NO: 1451723 - RNA, 19 nt, Artificial Sequence
  Description of Artificial Sequence: Synthetic oligonucleotide
gcaaaggcggggucuuucc

SEQ ID NO: 1451724 - RNA, 19 nt, Artificial Sequence
  Description of Artificial Sequence: Synthetic oligonucleotide
cagugcacgcauaucgaaa

SEQ ID NO: 1451725 - RNA, 19 nt, Artificial Sequence
  Description of Artificial Sequence: Synthetic oligonucleotide
ggcuuuuguccacaggaaa

SEQ ID NO: 1451726 - RNA, 19 nt, Artificial Sequence
  Description of Artificial Sequence: Synthetic oligonucleotide
uucgggagaugccgauguc

SEQ ID NO: 1451727 - RNA, 19 nt, Artificial Sequence
  Description of Artificial Sequence: Synthetic oligonucleotide
ugccgaugucgagcaaucc

SEQ ID NO: 1451728 - RNA, 19 nt, Artificial Sequence
  Description of Artificial Sequence: Synthetic oligonucleotide
agucgucgggguuccggcu

SEQ ID NO: 1451729 - RNA, 19 nt, Artificial Sequence
  Description of Artificial Sequence: Synthetic oligonucleotide
ucguuuagucagguuccaa

SEQ ID NO: 1451730 - RNA, 19 nt, Artificial Sequence
  Description of Artificial Sequence: Synthetic oligonucleotide
gaugccgaugucgagcaau

SEQ ID NO: 1451731 - RNA, 19 nt, Artificial Sequence
  Description of Artificial Sequence: Synthetic oligonucleotide
cgaugcauuggcuuuccac

SEQ ID NO: 1451732 - RNA, 19 nt, Artificial Sequence
  Description of Artificial Sequence: Synthetic oligonucleotide
cagauacgugauccaugug

SEQ ID NO: 1451733 - RNA, 19 nt, Artificial Sequence
  Description of Artificial Sequence: Synthetic oligonucleotide
ucguuccaauuugguagca

SEQ ID NO: 1451734 - RNA, 19 nt, Artificial Sequence
  Description of Artificial Sequence: Synthetic oligonucleotide
gauuucgggagaugccgau

SEQ ID NO: 1451735 - RNA, 19 nt, Artificial Sequence
  Description of Artificial Sequence: Synthetic oligonucleotide
cgacgauucauuuccuuuc

SEQ ID NO: 1451736 - RNA, 19 nt, Artificial Sequence
  Description of Artificial Sequence: Synthetic oligonucleotide
gcggacguagucgucgggg

SEQ ID NO: 1451737 - RNA, 19 nt, Artificial Sequence
  Description of Artificial Sequence: Synthetic oligonucleotide
gggguuccggcucagcauc

SEQ ID NO: 1451738 - RNA, 19 nt, Artificial Sequence
  Description of Artificial Sequence: Synthetic oligonucleotide
gucgggucguuuauuuaca

SEQ ID NO: 1451739 - RNA, 19 nt, Artificial Sequence
  Description of Artificial Sequence: Synthetic oligonucleotide
gaugucgagcaauccguuu

SEQ ID NO: 1451740 - RNA, 19 nt, Artificial Sequence
  Description of Artificial Sequence: Synthetic oligonucleotide
cagcuucccaagagauaug

SEQ ID NO: 1451741 - RNA, 19 nt, Artificial Sequence
  Description of Artificial Sequence: Synthetic oligonucleotide
gcgaacacauuuucguuua

SEQ ID NO: 1451742 - RNA, 19 nt, Artificial Sequence
  Description of Artificial Sequence: Synthetic oligonucleotide
ggcuugcuauguuuacgac

SEQ ID NO: 1451743 - RNA, 19 nt, Artificial Sequence
  Description of Artificial Sequence: Synthetic oligonucleotide
gacaugcgggugauacuga

SEQ ID NO: 1451744 - RNA, 19 nt, Artificial Sequence
  Description of Artificial Sequence: Synthetic oligonucleotide
caugcgggugauacugaaa

SEQ ID NO: 1451745 - RNA, 19 nt, Artificial Sequence
  Description of Artificial Sequence: Synthetic oligonucleotide
cgugauguaagcacaccca

SEQ ID NO: 1451746 - RNA, 19 nt, Artificial Sequence
  Description of Artificial Sequence: Synthetic oligonucleotide
guaccgcagauacgugauc

SEQ ID NO: 1451747 - RNA, 19 nt, Artificial Sequence
  Description of Artificial Sequence: Synthetic oligonucleotide
uucggcggcgagcuuccuu

SEQ ID NO: 1451748 - RNA, 19 nt, Artificial Sequence
  Description of Artificial Sequence: Synthetic oligonucleotide
cuccgaugcauuggcuuuc

SEQ ID NO: 1451749 - RNA, 19 nt, Artificial Sequence
  Description of Artificial Sequence: Synthetic oligonucleotide
caugcugcauccguuuugu

SEQ ID NO: 1451750 - RNA, 19 nt, Artificial Sequence
  Description of Artificial Sequence: Synthetic oligonucleotide
cacggugaccauccaggga

SEQ ID NO: 1451751 - RNA, 19 nt, Artificial Sequence
  Description of Artificial Sequence: Synthetic oligonucleotide
cacaucaaguaccgcagau

SEQ ID NO: 1451752 - RNA, 19 nt, Artificial Sequence
  Description of Artificial Sequence: Synthetic oligonucleotide
agguaggaucauaguuucu

SEQ ID NO: 1451753 - RNA, 19 nt, Artificial Sequence
  Description of Artificial Sequence: Synthetic oligonucleotide
cguuuagucagguuccaaa

SEQ ID NO: 1451754 - RNA, 19 nt, Artificial Sequence
  Description of Artificial Sequence: Synthetic oligonucleotide
cgcagauacgugauccaug

SEQ ID NO: 1451755 - RNA, 19 nt, Artificial Sequence
  Description of Artificial Sequence: Synthetic oligonucleotide
cucauuggcugcgguaaaa

SEQ ID NO: 1451756 - RNA, 19 nt, Artificial Sequence
  Description of Artificial Sequence: Synthetic oligonucleotide
gcauccguuuuguauggua

SEQ ID NO: 1451757 - RNA, 19 nt, Artificial Sequence
  Description of Artificial Sequence: Synthetic oligonucleotide
ccgcaugucauacaguacu

SEQ ID NO: 1451758 - RNA, 19 nt, Artificial Sequence
  Description of Artificial Sequence: Synthetic oligonucleotide
aucccucguacaaaaccuu

SEQ ID NO: 1451759 - RNA, 19 nt, Artificial Sequence
  Description of Artificial Sequence: Synthetic oligonucleotide
cccucguacaaaaccuuca

SEQ ID NO: 1451760 - RNA, 19 nt, Artificial Sequence
  Description of Artificial Sequence: Synthetic oligonucleotide
gugcgaacacauuuucguu

SEQ ID NO: 1451761 - RNA, 19 nt, Artificial Sequence
  Description of Artificial Sequence: Synthetic oligonucleotide
cauuuucguuuagucaggu

SEQ ID NO: 1451762 - RNA, 19 nt, Artificial Sequence
  Description of Artificial Sequence: Synthetic oligonucleotide
agcuugguaggaagacaaa

SEQ ID NO: 1451763 - RNA, 19 nt, Artificial Sequence
  Description of Artificial Sequence: Synthetic oligonucleotide
cgugcgaacacauuuucgu

SEQ ID NO: 1451764 - RNA, 19 nt, Artificial Sequence
  Description of Artificial Sequence: Synthetic oligonucleotide
ccuuucggcggcgagcuuc

SEQ ID NO: 1451765 - RNA, 19 nt, Artificial Sequence
  Description of Artificial Sequence: Synthetic oligonucleotide
ggcugcgguaaaauggaaa

SEQ ID NO: 1451766 - RNA, 19 nt, Artificial Sequence
  Description of Artificial Sequence: Synthetic oligonucleotide
cuucaugcgcuuguaucgu

SEQ ID NO: 1451767 - RNA, 19 nt, Artificial Sequence
  Description of Artificial Sequence: Synthetic oligonucleotide
cguuuuguaugguagacuu

SEQ ID NO: 1451768 - RNA, 19 nt, Artificial Sequence
  Description of Artificial Sequence: Synthetic oligonucleotide
caucagacccacacauaau

SEQ ID NO: 1451769 - RNA, 19 nt, Artificial Sequence
  Description of Artificial Sequence: Synthetic oligonucleotide
gugcacgcauaucgaaagu

SEQ ID NO: 1451770 - RNA, 19 nt, Artificial Sequence
  Description of Artificial Sequence: Synthetic oligonucleotide
ccguuugacaugcggguga

SEQ ID NO: 1451771 - RNA, 19 nt, Artificial Sequence
  Description of Artificial Sequence: Synthetic oligonucleotide
cauaggguuccaacagauu

SEQ ID NO: 1451772 - RNA, 19 nt, Artificial Sequence
  Description of Artificial Sequence: Synthetic oligonucleotide
agaugccgaugucgagcaa

SEQ ID NO: 1451773 - RNA, 19 nt, Artificial Sequence
  Description of Artificial Sequence: Synthetic oligonucleotide
ggucguuuauuuacagagu

SEQ ID NO: 1451774 - RNA, 19 nt, Artificial Sequence
  Description of Artificial Sequence: Synthetic oligonucleotide
cgcauaucgaaaguauaca

SEQ ID NO: 1451775 - RNA, 19 nt, Artificial Sequence
  Description of Artificial Sequence: Synthetic oligonucleotide
gucggagaguaguccacau

SEQ ID NO: 1451776 - RNA, 19 nt, Artificial Sequence
  Description of Artificial Sequence: Synthetic oligonucleotide
ccgaugucgagcaauccgu

SEQ ID NO: 1451777 - RNA, 19 nt, Artificial Sequence
  Description of Artificial Sequence: Synthetic oligonucleotide
ccagugcacgcauaucgaa

SEQ ID NO: 1451778 - RNA, 19 nt, Artificial Sequence
  Description of Artificial Sequence: Synthetic oligonucleotide
aacagucgucaggcucuuu

SEQ ID NO: 1451779 - RNA, 19 nt, Artificial Sequence
  Description of Artificial Sequence: Synthetic oligonucleotide
gcgggugauacugaaacuu

SEQ ID NO: 1451780 - RNA, 19 nt, Artificial Sequence
  Description of Artificial Sequence: Synthetic oligonucleotide
gcaauccguuugacaugcg

SEQ ID NO: 1451781 - RNA, 19 nt, Artificial Sequence
  Description of Artificial Sequence: Synthetic oligonucleotide
gccgcaugucauacaguac

SEQ ID NO: 1451782 - RNA, 19 nt, Artificial Sequence
  Description of Artificial Sequence: Synthetic oligonucleotide
cauauaggguugguucuuu

SEQ ID NO: 1451783 - RNA, 19 nt, Artificial Sequence
  Description of Artificial Sequence: Synthetic oligonucleotide
gcacgcauaucgaaaguau

SEQ ID NO: 1451784 - RNA, 19 nt, Artificial Sequence
  Description of Artificial Sequence: Synthetic oligonucleotide
ccacaucaaguaccgcaga

SEQ ID NO: 1451785 - RNA, 19 nt, Artificial Sequence
  Description of Artificial Sequence: Synthetic oligonucleotide
uuucggcggcgagcuuccu

SEQ ID NO: 1451786 - RNA, 19 nt, Artificial Sequence
  Description of Artificial Sequence: Synthetic oligonucleotide
cgggucguuuauuuacaga

SEQ ID NO: 1451787 - RNA, 19 nt, Artificial Sequence
  Description of Artificial Sequence: Synthetic oligonucleotide
gggugauacugaaacuuuu

SEQ ID NO: 1451788 - RNA, 19 nt, Artificial Sequence
  Description of Artificial Sequence: Synthetic oligonucleotide
cccaagagauaugucucaa

SEQ ID NO: 1451789 - RNA, 19 nt, Artificial Sequence
  Description of Artificial Sequence: Synthetic oligonucleotide
gcgagugcauaucccucgu

SEQ ID NO: 1451790 - RNA, 19 nt, Artificial Sequence
  Description of Artificial Sequence: Synthetic oligonucleotide
gcgguaaaauggaaagcuu

SEQ ID NO: 1451791 - RNA, 19 nt, Artificial Sequence
  Description of Artificial Sequence: Synthetic oligonucleotide
gaacagucgucaggcucuu

SEQ ID NO: 1451792 - RNA, 19 nt, Artificial Sequence
  Description of Artificial Sequence: Synthetic oligonucleotide
gcauauaggguugguucuu

SEQ ID NO: 1451793 - RNA, 19 nt, Artificial Sequence
  Description of Artificial Sequence: Synthetic oligonucleotide
ggacguagucgucgggguu

SEQ ID NO: 1451794 - RNA, 19 nt, Artificial Sequence
  Description of Artificial Sequence: Synthetic oligonucleotide
ccucauuggcugcgguaaa

SEQ ID NO: 1451795 - RNA, 19 nt, Artificial Sequence
  Description of Artificial Sequence: Synthetic oligonucleotide
cucggcggcuccggcccuc

SEQ ID NO: 1451796 - RNA, 19 nt, Artificial Sequence
  Description of Artificial Sequence: Synthetic oligonucleotide
cgcggacguagucgucggg

SEQ ID NO: 1451797 - RNA, 19 nt, Artificial Sequence
  Description of Artificial Sequence: Synthetic oligonucleotide
cgcuuguaucgugcgaaca

SEQ ID NO: 1451798 - RNA, 19 nt, Artificial Sequence
  Description of Artificial Sequence: Synthetic oligonucleotide
cagagucgggucguuuauu

SEQ ID NO: 1451799 - RNA, 19 nt, Artificial Sequence
  Description of Artificial Sequence: Synthetic oligonucleotide
cgggugauacugaaacuuu

SEQ ID NO: 1451800 - RNA, 19 nt, Artificial Sequence
  Description of Artificial Sequence: Synthetic oligonucleotide
ccgaugcauuggcuuucca

SEQ ID NO: 1451801 - RNA, 19 nt, Artificial Sequence
  Description of Artificial Sequence: Synthetic oligonucleotide
ccacagacggauguucauu

SEQ ID NO: 1451802 - RNA, 19 nt, Artificial Sequence
  Description of Artificial Sequence: Synthetic oligonucleotide
cggacguagucgucggggu

SEQ ID NO: 1451803 - RNA, 19 nt, Artificial Sequence
  Description of Artificial Sequence: Synthetic oligonucleotide
ccacuacgugcuucuuccu

SEQ ID NO: 1451804 - RNA, 19 nt, Artificial Sequence
  Description of Artificial Sequence: Synthetic oligonucleotide
ggcggcgagcuuccuucau

SEQ ID NO: 1451805 - RNA, 19 nt, Artificial Sequence
  Description of Artificial Sequence: Synthetic oligonucleotide
cguagucgucgggguuccg

SEQ ID NO: 1451806 - RNA, 19 nt, Artificial Sequence
  Description of Artificial Sequence: Synthetic oligonucleotide
ccgcagauacgugauccau

SEQ ID NO: 1451807 - RNA, 19 nt, Artificial Sequence
  Description of Artificial Sequence: Synthetic oligonucleotide
cgaugucgagcaauccguu

SEQ ID NO: 1451808 - RNA, 19 nt, Artificial Sequence
  Description of Artificial Sequence: Synthetic oligonucleotide
cugccacuacgugcuucuu

SEQ ID NO: 1451809 - RNA, 19 nt, Artificial Sequence
  Description of Artificial Sequence: Synthetic oligonucleotide
cgucgggguuccggcucag

SEQ ID NO: 1451810 - RNA, 19 nt, Artificial Sequence
  Description of Artificial Sequence: Synthetic oligonucleotide
cggcggcgagcuuccuuca

SEQ ID NO: 1451811 - RNA, 19 nt, Artificial Sequence
  Description of Artificial Sequence: Synthetic oligonucleotide
ucaagaagcaauaacugug

SEQ ID NO: 1451812 - RNA, 19 nt, Artificial Sequence
  Description of Artificial Sequence: Synthetic oligonucleotide
uucauuauaacugaguuuc

SEQ ID NO: 1451813 - RNA, 19 nt, Artificial Sequence
  Description of Artificial Sequence: Synthetic oligonucleotide
auuguugucuaccugggac

SEQ ID NO: 1451814 - RNA, 19 nt, Artificial Sequence
  Description of Artificial Sequence: Synthetic oligonucleotide
cauggaaugcccuagaaac

SEQ ID NO: 1451815 - RNA, 19 nt, Artificial Sequence
  Description of Artificial Sequence: Synthetic oligonucleotide
uuuuaguagcuuuucagcc

SEQ ID NO: 1451816 - RNA, 19 nt, Artificial Sequence
  Description of Artificial Sequence: Synthetic oligonucleotide
gauaggaugguauggcugg

SEQ ID NO: 1451817 - RNA, 19 nt, Artificial Sequence
  Description of Artificial Sequence: Synthetic oligonucleotide
aaugguagguaguucugcg

SEQ ID NO: 1451818 - RNA, 19 nt, Artificial Sequence
  Description of Artificial Sequence: Synthetic oligonucleotide
agcgauacaaaucccugcc

SEQ ID NO: 1451819 - RNA, 19 nt, Artificial Sequence
  Description of Artificial Sequence: Synthetic oligonucleotide
ugagucuuggcuuucuagg

SEQ ID NO: 1451820 - RNA, 19 nt, Artificial Sequence
  Description of Artificial Sequence: Synthetic oligonucleotide
auauaucagacucagcucu

SEQ ID NO: 1451821 - RNA, 19 nt, Artificial Sequence
  Description of Artificial Sequence: Synthetic oligonucleotide
guagcuuuggccuuggcag

SEQ ID NO: 1451822 - RNA, 19 nt, Artificial Sequence
  Description of Artificial Sequence: Synthetic oligonucleotide
aggauuacuacagagaaug

SEQ ID NO: 1451823 - RNA, 19 nt, Artificial Sequence
  Description of Artificial Sequence: Synthetic oligonucleotide
cuugucaacucucaguggg

SEQ ID NO: 1451824 - RNA, 19 nt, Artificial Sequence
  Description of Artificial Sequence: Synthetic oligonucleotide
aguccaucaacguuugugg

SEQ ID NO: 1451825 - RNA, 19 nt, Artificial Sequence
  Description of Artificial Sequence: Synthetic oligonucleotide
ucucaagaagcaauaacug

SEQ ID NO: 1451826 - RNA, 19 nt, Artificial Sequence
  Description of Artificial Sequence: Synthetic oligonucleotide
uuuuguuccguucuccacc

SEQ ID NO: 1451827 - RNA, 19 nt, Artificial Sequence
  Description of Artificial Sequence: Synthetic oligonucleotide
ucuucauuauaacugaguu

SEQ ID NO: 1451828 - RNA, 19 nt, Artificial Sequence
  Description of Artificial Sequence: Synthetic oligonucleotide
accaacaccagaaaauggc

SEQ ID NO: 1451829 - RNA, 19 nt, Artificial Sequence
  Description of Artificial Sequence: Synthetic oligonucleotide
uuugcaacuccucaggcuc

SEQ ID NO: 1451830 - RNA, 19 nt, Artificial Sequence
  Description of Artificial Sequence: Synthetic oligonucleotide
gaacucuggaacucgagcc

SEQ ID NO: 1451831 - RNA, 19 nt, Artificial Sequence
  Description of Artificial Sequence: Synthetic oligonucleotide
aaagacaccugggauacag

SEQ ID NO: 1451832 - RNA, 19 nt, Artificial Sequence
  Description of Artificial Sequence: Synthetic oligonucleotide
uuuaguagcuuuucagcca

SEQ ID NO: 1451833 - RNA, 19 nt, Artificial Sequence
  Description of Artificial Sequence: Synthetic oligonucleotide
aacuaccucaacucgguca

SEQ ID NO: 1451834 - RNA, 19 nt, Artificial Sequence
  Description of Artificial Sequence: Synthetic oligonucleotide
ucuuacgccacaaguuccg

SEQ ID NO: 1451835 - RNA, 19 nt, Artificial Sequence
  Description of Artificial Sequence: Synthetic oligonucleotide
aacucggucagccuugcug

SEQ ID NO: 1451836 - RNA, 19 nt, Artificial Sequence
  Description of Artificial Sequence: Synthetic oligonucleotide
ucgagccuggaucucaugg

SEQ ID NO: 1451837 - RNA, 19 nt, Artificial Sequence
  Description of Artificial Sequence: Synthetic oligonucleotide
ugugaccacagcaugcugc

SEQ ID NO: 1451838 - RNA, 19 nt, Artificial Sequence
  Description of Artificial Sequence: Synthetic oligonucleotide
acaacuacaagcacagggg

SEQ ID NO: 1451839 - RNA, 19 nt, Artificial Sequence
  Description of Artificial Sequence: Synthetic oligonucleotide
aacguuuguggcuggaacu

SEQ ID NO: 1451840 - RNA, 19 nt, Artificial Sequence
  Description of Artificial Sequence: Synthetic oligonucleotide
aaguccaucaacguuugug

SEQ ID NO: 1451841 - RNA, 19 nt, Artificial Sequence
  Description of Artificial Sequence: Synthetic oligonucleotide
aaucggaauuguugucuac

SEQ ID NO: 1451842 - RNA, 19 nt, Artificial Sequence
  Description of Artificial Sequence: Synthetic oligonucleotide
aacagaggugacaaugcac

SEQ ID NO: 1451843 - RNA, 19 nt, Artificial Sequence
  Description of Artificial Sequence: Synthetic oligonucleotide
acuaccucaacucggucag

SEQ ID NO: 1451844 - RNA, 19 nt, Artificial Sequence
  Description of Artificial Sequence: Synthetic oligonucleotide
aucggaauuguugucuacc

SEQ ID NO: 1451845 - RNA, 19 nt, Artificial Sequence
  Description of Artificial Sequence: Synthetic oligonucleotide
ugcugcaaaaccaccgucc

SEQ ID NO: 1451846 - RNA, 19 nt, Artificial Sequence
  Description of Artificial Sequence: Synthetic oligonucleotide
ugucuuacgccacaaguuc

SEQ ID NO: 1451847 - RNA, 19 nt, Artificial Sequence
  Description of Artificial Sequence: Synthetic oligonucleotide
cuggguaguucacugaggg

SEQ ID NO: 1451848 - RNA, 19 nt, Artificial Sequence
  Description of Artificial Sequence: Synthetic oligonucleotide
ugacaaugcacauggcgag

SEQ ID NO: 1451849 - RNA, 19 nt, Artificial Sequence
  Description of Artificial Sequence: Synthetic oligonucleotide
aaaugucggcuccagagau

SEQ ID NO: 1451850 - RNA, 19 nt, Artificial Sequence
  Description of Artificial Sequence: Synthetic oligonucleotide
ugggagaaacuacaggcca

SEQ ID NO: 1451851 - RNA, 19 nt, Artificial Sequence
  Description of Artificial Sequence: Synthetic oligonucleotide
gacaggcugagugauacgg

SEQ ID NO: 1451852 - RNA, 19 nt, Artificial Sequence
  Description of Artificial Sequence: Synthetic oligonucleotide
agaaaucggaauuguuguc

SEQ ID NO: 1451853 - RNA, 19 nt, Artificial Sequence
  Description of Artificial Sequence: Synthetic oligonucleotide
agaagcaauaacugugcug

SEQ ID NO: 1451854 - RNA, 19 nt, Artificial Sequence
  Description of Artificial Sequence: Synthetic oligonucleotide
uggaccuugggugacacag

SEQ ID NO: 1451855 - RNA, 19 nt, Artificial Sequence
  Description of Artificial Sequence: Synthetic oligonucleotide
augguagguaguucugcgc

SEQ ID NO: 1451856 - RNA, 19 nt, Artificial Sequence
  Description of Artificial Sequence: Synthetic oligonucleotide
uggaacucgagccuggauc

SEQ ID NO: 1451857 - RNA, 19 nt, Artificial Sequence
  Description of Artificial Sequence: Synthetic oligonucleotide
cuuacgaugggcgucuucc

SEQ ID NO: 1451858 - RNA, 19 nt, Artificial Sequence
  Description of Artificial Sequence: Synthetic oligonucleotide
aaggggauaggaugguaug

SEQ ID NO: 1451859 - RNA, 19 nt, Artificial Sequence
  Description of Artificial Sequence: Synthetic oligonucleotide
ugguagguaguucugcgca

SEQ ID NO: 1451860 - RNA, 19 nt, Artificial Sequence
  Description of Artificial Sequence: Synthetic oligonucleotide
agguggaucuaucacaggu

SEQ ID NO: 1451861 - RNA, 19 nt, Artificial Sequence
  Description of Artificial Sequence: Synthetic oligonucleotide
gauacaaaucccugccaug

SEQ ID NO: 1451862 - RNA, 19 nt, Artificial Sequence
  Description of Artificial Sequence: Synthetic oligonucleotide
acagcaugcugcauguucc

SEQ ID NO: 1451863 - RNA, 19 nt, Artificial Sequence
  Description of Artificial Sequence: Synthetic oligonucleotide
gagauaguuggugagcgcc

SEQ ID NO: 1451864 - RNA, 19 nt, Artificial Sequence
  Description of Artificial Sequence: Synthetic oligonucleotide
agagauaguuggugagcgc

SEQ ID NO: 1451865 - RNA, 19 nt, Artificial Sequence
  Description of Artificial Sequence: Synthetic oligonucleotide
ugaugggaggaaacacugg

SEQ ID NO: 1451866 - RNA, 19 nt, Artificial Sequence
  Description of Artificial Sequence: Synthetic oligonucleotide
aacucuggaacucgagccu

SEQ ID NO: 1451867 - RNA, 19 nt, Artificial Sequence
  Description of Artificial Sequence: Synthetic oligonucleotide
aagaagcaauaacugugcu

SEQ ID NO: 1451868 - RNA, 19 nt, Artificial Sequence
  Description of Artificial Sequence: Synthetic oligonucleotide
ggguaguucacugagggcg

SEQ ID NO: 1451869 - RNA, 19 nt, Artificial Sequence
  Description of Artificial Sequence: Synthetic oligonucleotide
uggaaugcccuagaaacug

SEQ ID NO: 1451870 - RNA, 19 nt, Artificial Sequence
  Description of Artificial Sequence: Synthetic oligonucleotide
uucaaacaacuacaagcac

SEQ ID NO: 1451871 - RNA, 19 nt, Artificial Sequence
  Description of Artificial Sequence: Synthetic oligonucleotide
gcaaaugucggcuccagag

SEQ ID NO: 1451872 - RNA, 19 nt, Artificial Sequence
  Description of Artificial Sequence: Synthetic oligonucleotide
ugggaggaaacacugguua

SEQ ID NO: 1451873 - RNA, 19 nt, Artificial Sequence
  Description of Artificial Sequence: Synthetic oligonucleotide
auuacuacagagaauguuu

SEQ ID NO: 1451874 - RNA, 19 nt, Artificial Sequence
  Description of Artificial Sequence: Synthetic oligonucleotide
cuuccuggacaccagguag

SEQ ID NO: 1451875 - RNA, 19 nt, Artificial Sequence
  Description of Artificial Sequence: Synthetic oligonucleotide
aggacaggcugagugauac

SEQ ID NO: 1451876 - RNA, 19 nt, Artificial Sequence
  Description of Artificial Sequence: Synthetic oligonucleotide
uacuacagagaauguuucc

SEQ ID NO: 1451877 - RNA, 19 nt, Artificial Sequence
  Description of Artificial Sequence: Synthetic oligonucleotide
aggccguuuaaggacaggc

SEQ ID NO: 1451878 - RNA, 19 nt, Artificial Sequence
  Description of Artificial Sequence: Synthetic oligonucleotide
aaguacugugagcagccca

SEQ ID NO: 1451879 - RNA, 19 nt, Artificial Sequence
  Description of Artificial Sequence: Synthetic oligonucleotide
uuguugucuaccugggaca

SEQ ID NO: 1451880 - RNA, 19 nt, Artificial Sequence
  Description of Artificial Sequence: Synthetic oligonucleotide
caaggauuacuacagagaa

SEQ ID NO: 1451881 - RNA, 19 nt, Artificial Sequence
  Description of Artificial Sequence: Synthetic oligonucleotide
aagcaauaacugugcugcg

SEQ ID NO: 1451882 - RNA, 19 nt, Artificial Sequence
  Description of Artificial Sequence: Synthetic oligonucleotide
gaaacggcaggaugccagg

SEQ ID NO: 1451883 - RNA, 19 nt, Artificial Sequence
  Description of Artificial Sequence: Synthetic oligonucleotide
uuuguuccguucuccacca

SEQ ID NO: 1451884 - RNA, 19 nt, Artificial Sequence
  Description of Artificial Sequence: Synthetic oligonucleotide
cucuacuggcaaaugucgg

SEQ ID NO: 1451885 - RNA, 19 nt, Artificial Sequence
  Description of Artificial Sequence: Synthetic oligonucleotide
uuauuccagcugaagggga

SEQ ID NO: 1451886 - RNA, 19 nt, Artificial Sequence
  Description of Artificial Sequence: Synthetic oligonucleotide
ucuacauugcggacggguc

SEQ ID NO: 1451887 - RNA, 19 nt, Artificial Sequence
  Description of Artificial Sequence: Synthetic oligonucleotide
ugcaaaaccaccguccaau

SEQ ID NO: 1451888 - RNA, 19 nt, Artificial Sequence
  Description of Artificial Sequence: Synthetic oligonucleotide
aaaucggaauuguugucua

SEQ ID NO: 1451889 - RNA, 19 nt, Artificial Sequence
  Description of Artificial Sequence: Synthetic oligonucleotide
uccaaaguccaucaacguu

SEQ ID NO: 1451890 - RNA, 19 nt, Artificial Sequence
  Description of Artificial Sequence: Synthetic oligonucleotide
uacgccacaaguuccgaac

SEQ ID NO: 1451891 - RNA, 19 nt, Artificial Sequence
  Description of Artificial Sequence: Synthetic oligonucleotide
ugcugugaccacagcaugc

SEQ ID NO: 1451892 - RNA, 19 nt, Artificial Sequence
  Description of Artificial Sequence: Synthetic oligonucleotide
uagguaguucugcgcaggg

SEQ ID NO: 1451893 - RNA, 19 nt, Artificial Sequence
  Description of Artificial Sequence: Synthetic oligonucleotide
ccagaaaucggaauuguug

SEQ ID NO: 1451894 - RNA, 19 nt, Artificial Sequence
  Description of Artificial Sequence: Synthetic oligonucleotide
gacgggucucucaagaagc

SEQ ID NO: 1451895 - RNA, 19 nt, Artificial Sequence
  Description of Artificial Sequence: Synthetic oligonucleotide
cauuauaacugaguuucug

SEQ ID NO: 1451896 - RNA, 19 nt, Artificial Sequence
  Description of Artificial Sequence: Synthetic oligonucleotide
uauucacggaggcucuggc

SEQ ID NO: 1451897 - RNA, 19 nt, Artificial Sequence
  Description of Artificial Sequence: Synthetic oligonucleotide
cuaucacagguaaaagguc

SEQ ID NO: 1451898 - RNA, 19 nt, Artificial Sequence
  Description of Artificial Sequence: Synthetic oligonucleotide
cauauauaucagacucagc

SEQ ID NO: 1451899 - RNA, 19 nt, Artificial Sequence
  Description of Artificial Sequence: Synthetic oligonucleotide
gaggcugucagcugaggac

SEQ ID NO: 1451900 - RNA, 19 nt, Artificial Sequence
  Description of Artificial Sequence: Synthetic oligonucleotide
agcgguuagucuccuuugg

SEQ ID NO: 1451901 - RNA, 19 nt, Artificial Sequence
  Description of Artificial Sequence: Synthetic oligonucleotide
gguaaaaggucuccccagg

SEQ ID NO: 1451902 - RNA, 19 nt, Artificial Sequence
  Description of Artificial Sequence: Synthetic oligonucleotide
accagaaaauggcuugucu

SEQ ID NO: 1451903 - RNA, 19 nt, Artificial Sequence
  Description of Artificial Sequence: Synthetic oligonucleotide
ugggcgucuucccagaaau

SEQ ID NO: 1451904 - RNA, 19 nt, Artificial Sequence
  Description of Artificial Sequence: Synthetic oligonucleotide
uucaguacugccccacgaa

SEQ ID NO: 1451905 - RNA, 19 nt, Artificial Sequence
  Description of Artificial Sequence: Synthetic oligonucleotide
aacugaguuucugccaaug

SEQ ID NO: 1451906 - RNA, 19 nt, Artificial Sequence
  Description of Artificial Sequence: Synthetic oligonucleotide
agccaaacccaacauggcu

SEQ ID NO: 1451907 - RNA, 19 nt, Artificial Sequence
  Description of Artificial Sequence: Synthetic oligonucleotide
caccguccaaucuugcugc

SEQ ID NO: 1451908 - RNA, 19 nt, Artificial Sequence
  Description of Artificial Sequence: Synthetic oligonucleotide
ugauucugaaccaccuuuu

SEQ ID NO: 1451909 - RNA, 19 nt, Artificial Sequence
  Description of Artificial Sequence: Synthetic oligonucleotide
ucccugauucugaaccacc

SEQ ID NO: 1451910 - RNA, 19 nt, Artificial Sequence
  Description of Artificial Sequence: Synthetic oligonucleotide
ggcgucuucccagaaaucg

SEQ ID NO: 1451911 - RNA, 19 nt, Artificial Sequence
  Description of Artificial Sequence: Synthetic oligonucleotide
aggggauaggaugguaugg

SEQ ID NO: 1451912 - RNA, 19 nt, Artificial Sequence
  Description of Artificial Sequence: Synthetic oligonucleotide
cagcgauacaaaucccugc

SEQ ID NO: 1451913 - RNA, 19 nt, Artificial Sequence
  Description of Artificial Sequence: Synthetic oligonucleotide
uauuccagcugaaggggau

SEQ ID NO: 1451914 - RNA, 19 nt, Artificial Sequence
  Description of Artificial Sequence: Synthetic oligonucleotide
auauucacggaggcucugg

SEQ ID NO: 1451915 - RNA, 19 nt, Artificial Sequence
  Description of Artificial Sequence: Synthetic oligonucleotide
uacgaugggcgucuuccca

SEQ ID NO: 1451916 - RNA, 19 nt, Artificial Sequence
  Description of Artificial Sequence: Synthetic oligonucleotide
agcccgucuuugcaacucc

SEQ ID NO: 1451917 - RNA, 19 nt, Artificial Sequence
  Description of Artificial Sequence: Synthetic oligonucleotide
augccgacgugcugugacc

SEQ ID NO: 1451918 - RNA, 19 nt, Artificial Sequence
  Description of Artificial Sequence: Synthetic oligonucleotide
acguuuguggcuggaacuc

SEQ ID NO: 1451919 - RNA, 19 nt, Artificial Sequence
  Description of Artificial Sequence: Synthetic oligonucleotide
caacguuuguggcuggaac

SEQ ID NO: 1451920 - RNA, 19 nt, Artificial Sequence
  Description of Artificial Sequence: Synthetic oligonucleotide
auucaguacugccccacga

SEQ ID NO: 1451921 - RNA, 19 nt, Artificial Sequence
  Description of Artificial Sequence: Synthetic oligonucleotide
ugaguugagucuuggcuuu

SEQ ID NO: 1451922 - RNA, 19 nt, Artificial Sequence
  Description of Artificial Sequence: Synthetic oligonucleotide
ucuucccagaaaucggaau

SEQ ID NO: 1451923 - RNA, 19 nt, Artificial Sequence
  Description of Artificial Sequence: Synthetic oligonucleotide
gugacagaaccagugccgg

SEQ ID NO: 1451924 - RNA, 19 nt, Artificial Sequence
  Description of Artificial Sequence: Synthetic oligonucleotide
guuagucuccuuuggcgac

SEQ ID NO: 1451925 - RNA, 19 nt, Artificial Sequence
  Description of Artificial Sequence: Synthetic oligonucleotide
aaaccaccguccaaucuug

SEQ ID NO: 1451926 - RNA, 19 nt, Artificial Sequence
  Description of Artificial Sequence: Synthetic oligonucleotide
acgaugggcgucuucccag

SEQ ID NO: 1451927 - RNA, 19 nt, Artificial Sequence
  Description of Artificial Sequence: Synthetic oligonucleotide
uaccucaacucggucagcc

SEQ ID NO: 1451928 - RNA, 19 nt, Artificial Sequence
  Description of Artificial Sequence: Synthetic oligonucleotide
acgugcugugaccacagca

SEQ ID NO: 1451929 - RNA, 19 nt, Artificial Sequence
  Description of Artificial Sequence: Synthetic oligonucleotide
ucggcuccagagauaguug

SEQ ID NO: 1451930 - RNA, 19 nt, Artificial Sequence
  Description of Artificial Sequence: Synthetic oligonucleotide
aaucccugccaugccgacg

SEQ ID NO: 1451931 - RNA, 19 nt, Artificial Sequence
  Description of Artificial Sequence: Synthetic oligonucleotide
guagguaguucugcgcagg

SEQ ID NO: 1451932 - RNA, 19 nt, Artificial Sequence
  Description of Artificial Sequence: Synthetic oligonucleotide
auaucagacucagcucuuc

SEQ ID NO: 1451933 - RNA, 19 nt, Artificial Sequence
  Description of Artificial Sequence: Synthetic oligonucleotide
cagaaaucggaauuguugu

SEQ ID NO: 1451934 - RNA, 19 nt, Artificial Sequence
  Description of Artificial Sequence: Synthetic oligonucleotide
gcugcauguucccaucugg

SEQ ID NO: 1451935 - RNA, 19 nt, Artificial Sequence
  Description of Artificial Sequence: Synthetic oligonucleotide
uccaaaggggacuuuucuu

SEQ ID NO: 1451936 - RNA, 19 nt, Artificial Sequence
  Description of Artificial Sequence: Synthetic oligonucleotide
aaugcccuagaaacugcug

SEQ ID NO: 1451937 - RNA, 19 nt, Artificial Sequence
  Description of Artificial Sequence: Synthetic oligonucleotide
gacucgggcacagcgauac

SEQ ID NO: 1451938 - RNA, 19 nt, Artificial Sequence
  Description of Artificial Sequence: Synthetic oligonucleotide
gaugcuuacgaugggcguc

SEQ ID NO: 1451939 - RNA, 19 nt, Artificial Sequence
  Description of Artificial Sequence: Synthetic oligonucleotide
uggcuucuuauuccagcug

SEQ ID NO: 1451940 - RNA, 19 nt, Artificial Sequence
  Description of Artificial Sequence: Synthetic oligonucleotide
guggaucuaucacagguaa

SEQ ID NO: 1451941 - RNA, 19 nt, Artificial Sequence
  Description of Artificial Sequence: Synthetic oligonucleotide
uuacgaugggcgucuuccc

SEQ ID NO: 1451942 - RNA, 19 nt, Artificial Sequence
  Description of Artificial Sequence: Synthetic oligonucleotide
uguugucuaccugggacac

SEQ ID NO: 1451943 - RNA, 19 nt, Artificial Sequence
  Description of Artificial Sequence: Synthetic oligonucleotide
aagcucauggggacauggg

SEQ ID NO: 1451944 - RNA, 19 nt, Artificial Sequence
  Description of Artificial Sequence: Synthetic oligonucleotide
aagacaccugggauacagg

SEQ ID NO: 1451945 - RNA, 19 nt, Artificial Sequence
  Description of Artificial Sequence: Synthetic oligonucleotide
caugccgacgugcugugac

SEQ ID NO: 1451946 - RNA, 19 nt, Artificial Sequence
  Description of Artificial Sequence: Synthetic oligonucleotide
gccguuuaaggacaggcug

SEQ ID NO: 1451947 - RNA, 19 nt, Artificial Sequence
  Description of Artificial Sequence: Synthetic oligonucleotide
gaagggcggcgaaagcucg

SEQ ID NO: 1451948 - RNA, 19 nt, Artificial Sequence
  Description of Artificial Sequence: Synthetic oligonucleotide
cucaacucggucagccuug

SEQ ID NO: 1451949 - RNA, 19 nt, Artificial Sequence
  Description of Artificial Sequence: Synthetic oligonucleotide
uugggugacacagguagaa

SEQ ID NO: 1451950 - RNA, 19 nt, Artificial Sequence
  Description of Artificial Sequence: Synthetic oligonucleotide
gauaguuggugagcgccug

SEQ ID NO: 1451951 - RNA, 19 nt, Artificial Sequence
  Description of Artificial Sequence: Synthetic oligonucleotide
acagcgauacaaaucccug

SEQ ID NO: 1451952 - RNA, 19 nt, Artificial Sequence
  Description of Artificial Sequence: Synthetic oligonucleotide
aggcucuacuggcaaaugu

SEQ ID NO: 1451953 - RNA, 19 nt, Artificial Sequence
  Description of Artificial Sequence: Synthetic oligonucleotide
ucugucugaguugagucuu

SEQ ID NO: 1451954 - RNA, 19 nt, Artificial Sequence
  Description of Artificial Sequence: Synthetic oligonucleotide
uuccguucuccaccaacac

SEQ ID NO: 1451955 - RNA, 19 nt, Artificial Sequence
  Description of Artificial Sequence: Synthetic oligonucleotide
gguuacacauccuugucaa

SEQ ID NO: 1451956 - RNA, 19 nt, Artificial Sequence
  Description of Artificial Sequence: Synthetic oligonucleotide
ggaaacacugguuacacau

SEQ ID NO: 1451957 - RNA, 19 nt, Artificial Sequence
  Description of Artificial Sequence: Synthetic oligonucleotide
uggguaguucacugagggc

SEQ ID NO: 1451958 - RNA, 19 nt, Artificial Sequence
  Description of Artificial Sequence: Synthetic oligonucleotide
cuugucuuacgccacaagu

SEQ ID NO: 1451959 - RNA, 19 nt, Artificial Sequence
  Description of Artificial Sequence: Synthetic oligonucleotide
uuagucuccuuuggcgacc

SEQ ID NO: 1451960 - RNA, 19 nt, Artificial Sequence
  Description of Artificial Sequence: Synthetic oligonucleotide
gcucuacuggcaaaugucg

SEQ ID NO: 1451961 - RNA, 19 nt, Artificial Sequence
  Description of Artificial Sequence: Synthetic oligonucleotide
auccgcagcccgucuuugc

SEQ ID NO: 1451962 - RNA, 19 nt, Artificial Sequence
  Description of Artificial Sequence: Synthetic oligonucleotide
ggaucuaucacagguaaaa

SEQ ID NO: 1451963 - RNA, 19 nt, Artificial Sequence
  Description of Artificial Sequence: Synthetic oligonucleotide
gguuagucuccuuuggcga

SEQ ID NO: 1451964 - RNA, 19 nt, Artificial Sequence
  Description of Artificial Sequence: Synthetic oligonucleotide
gaaagcucgggacugggau

SEQ ID NO: 1451965 - RNA, 19 nt, Artificial Sequence
  Description of Artificial Sequence: Synthetic oligonucleotide
aaggauuacuacagagaau

SEQ ID NO: 1451966 - RNA, 19 nt, Artificial Sequence
  Description of Artificial Sequence: Synthetic oligonucleotide
uggaucuaucacagguaaa

SEQ ID NO: 1451967 - RNA, 19 nt, Artificial Sequence
  Description of Artificial Sequence: Synthetic oligonucleotide
caggggacggaggaaacgc

SEQ ID NO: 1451968 - RNA, 19 nt, Artificial Sequence
  Description of Artificial Sequence: Synthetic oligonucleotide
caggaugcuuacgaugggc

SEQ ID NO: 1451969 - RNA, 19 nt, Artificial Sequence
  Description of Artificial Sequence: Synthetic oligonucleotide
auugcggacgggucucuca

SEQ ID NO: 1451970 - RNA, 19 nt, Artificial Sequence
  Description of Artificial Sequence: Synthetic oligonucleotide
ucgggcacagcgauacaaa

SEQ ID NO: 1451971 - RNA, 19 nt, Artificial Sequence
  Description of Artificial Sequence: Synthetic oligonucleotide
gcaauaacugugcugcguc

SEQ ID NO: 1451972 - RNA, 19 nt, Artificial Sequence
  Description of Artificial Sequence: Synthetic oligonucleotide
ugccaugccgacgugcugu

SEQ ID NO: 1451973 - RNA, 19 nt, Artificial Sequence
  Description of Artificial Sequence: Synthetic oligonucleotide
gguagcuuuggccuuggca

SEQ ID NO: 1451974 - RNA, 19 nt, Artificial Sequence
  Description of Artificial Sequence: Synthetic oligonucleotide
gucuuacgccacaaguucc

SEQ ID NO: 1451975 - RNA, 19 nt, Artificial Sequence
  Description of Artificial Sequence: Synthetic oligonucleotide
ggcuucuuauuccagcuga

SEQ ID NO: 1451976 - RNA, 19 nt, Artificial Sequence
  Description of Artificial Sequence: Synthetic oligonucleotide
ggacgggucucucaagaag

SEQ ID NO: 1451977 - RNA, 19 nt, Artificial Sequence
  Description of Artificial Sequence: Synthetic oligonucleotide
gaggaaacgcagguggauc

SEQ ID NO: 1451978 - RNA, 19 nt, Artificial Sequence
  Description of Artificial Sequence: Synthetic oligonucleotide
ggacacaccgggcacgaag

SEQ ID NO: 1451979 - RNA, 19 nt, Artificial Sequence
  Description of Artificial Sequence: Synthetic oligonucleotide
cugguuacacauccuuguc

SEQ ID NO: 1451980 - RNA, 19 nt, Artificial Sequence
  Description of Artificial Sequence: Synthetic oligonucleotide
ggugcccagcuuuuguucc

SEQ ID NO: 1451981 - RNA, 19 nt, Artificial Sequence
  Description of Artificial Sequence: Synthetic oligonucleotide
ccgaacuaccucaacucgg

SEQ ID NO: 1451982 - RNA, 19 nt, Artificial Sequence
  Description of Artificial Sequence: Synthetic oligonucleotide
ggauaggaugguauggcug

SEQ ID NO: 1451983 - RNA, 19 nt, Artificial Sequence
  Description of Artificial Sequence: Synthetic oligonucleotide
caaucuugcugccauauau

SEQ ID NO: 1451984 - RNA, 19 nt, Artificial Sequence
  Description of Artificial Sequence: Synthetic oligonucleotide
gauuacuacagagaauguu

SEQ ID NO: 1451985 - RNA, 19 nt, Artificial Sequence
  Description of Artificial Sequence: Synthetic oligonucleotide
aggaaacacugguuacaca

SEQ ID NO: 1451986 - RNA, 19 nt, Artificial Sequence
  Description of Artificial Sequence: Synthetic oligonucleotide
uuacgccacaaguuccgaa

SEQ ID NO: 1451987 - RNA, 19 nt, Artificial Sequence
  Description of Artificial Sequence: Synthetic oligonucleotide
aacuacaagcacaggggua

SEQ ID NO: 1451988 - RNA, 19 nt, Artificial Sequence
  Description of Artificial Sequence: Synthetic oligonucleotide
uugcggacgggucucucaa

SEQ ID NO: 1451989 - RNA, 19 nt, Artificial Sequence
  Description of Artificial Sequence: Synthetic oligonucleotide
gucugaguugagucuuggc

SEQ ID NO: 1451990 - RNA, 19 nt, Artificial Sequence
  Description of Artificial Sequence: Synthetic oligonucleotide
aacuacaggccagggacuu

SEQ ID NO: 1451991 - RNA, 19 nt, Artificial Sequence
  Description of Artificial Sequence: Synthetic oligonucleotide
gcauguucccaucuggaca

SEQ ID NO: 1451992 - RNA, 19 nt, Artificial Sequence
  Description of Artificial Sequence: Synthetic oligonucleotide
gguagguaguucugcgcag

SEQ ID NO: 1451993 - RNA, 19 nt, Artificial Sequence
  Description of Artificial Sequence: Synthetic oligonucleotide
caaaucccugccaugccga

SEQ ID NO: 1451994 - RNA, 19 nt, Artificial Sequence
  Description of Artificial Sequence: Synthetic oligonucleotide
cacagggguaccagcacuc

SEQ ID NO: 1451995 - RNA, 19 nt, Artificial Sequence
  Description of Artificial Sequence: Synthetic oligonucleotide
ugcgcagggcauucaguac

SEQ ID NO: 1451996 - RNA, 19 nt, Artificial Sequence
  Description of Artificial Sequence: Synthetic oligonucleotide
aagauccgcagcccgucuu

SEQ ID NO: 1451997 - RNA, 19 nt, Artificial Sequence
  Description of Artificial Sequence: Synthetic oligonucleotide
ggcgaggccguuuaaggac

SEQ ID NO: 1451998 - RNA, 19 nt, Artificial Sequence
  Description of Artificial Sequence: Synthetic oligonucleotide
agggguaccagcacucucu

SEQ ID NO: 1451999 - RNA, 19 nt, Artificial Sequence
  Description of Artificial Sequence: Synthetic oligonucleotide
acgccacaaguuccgaacu

SEQ ID NO: 1452000 - RNA, 19 nt, Artificial Sequence
  Description of Artificial Sequence: Synthetic oligonucleotide
ucaagauccgcagcccguc

SEQ ID NO: 1452001 - RNA, 19 nt, Artificial Sequence
  Description of Artificial Sequence: Synthetic oligonucleotide
uacauugcggacgggucuc

SEQ ID NO: 1452002 - RNA, 19 nt, Artificial Sequence
  Description of Artificial Sequence: Synthetic oligonucleotide
cagcaugcugcauguuccc

SEQ ID NO: 1452003 - RNA, 19 nt, Artificial Sequence
  Description of Artificial Sequence: Synthetic oligonucleotide
ucaacguuuguggcuggaa

SEQ ID NO: 1452004 - RNA, 19 nt, Artificial Sequence
  Description of Artificial Sequence: Synthetic oligonucleotide
gccaaacccaacauggcug

SEQ ID NO: 1452005 - RNA, 19 nt, Artificial Sequence
  Description of Artificial Sequence: Synthetic oligonucleotide
gcaaggauuacuacagaga

SEQ ID NO: 1452006 - RNA, 19 nt, Artificial Sequence
  Description of Artificial Sequence: Synthetic oligonucleotide
cagcgguuagucuccuuug

SEQ ID NO: 1452007 - RNA, 19 nt, Artificial Sequence
  Description of Artificial Sequence: Synthetic oligonucleotide
cgguuagucuccuuuggcg

SEQ ID NO: 1452008 - RNA, 19 nt, Artificial Sequence
  Description of Artificial Sequence: Synthetic oligonucleotide
ugcgucagccagugcuugc

SEQ ID NO: 1452009 - RNA, 19 nt, Artificial Sequence
  Description of Artificial Sequence: Synthetic oligonucleotide
aaacggcaggaugccagga

SEQ ID NO: 1452010 - RNA, 19 nt, Artificial Sequence
  Description of Artificial Sequence: Synthetic oligonucleotide
ggcugacacgaccacauca

SEQ ID NO: 1452011 - RNA, 19 nt, Artificial Sequence
  Description of Artificial Sequence: Synthetic oligonucleotide
ugauacggggccagcgguu

SEQ ID NO: 1452012 - RNA, 19 nt, Artificial Sequence
  Description of Artificial Sequence: Synthetic oligonucleotide
cugagugauacggggccag

SEQ ID NO: 1452013 - RNA, 19 nt, Artificial Sequence
  Description of Artificial Sequence: Synthetic oligonucleotide
ggggauaggaugguauggc

SEQ ID NO: 1452014 - RNA, 19 nt, Artificial Sequence
  Description of Artificial Sequence: Synthetic oligonucleotide
gaacuaccucaacucgguc

SEQ ID NO: 1452015 - RNA, 19 nt, Artificial Sequence
  Description of Artificial Sequence: Synthetic oligonucleotide
ucaacucggucagccuugc

SEQ ID NO: 1452016 - RNA, 19 nt, Artificial Sequence
  Description of Artificial Sequence: Synthetic oligonucleotide
ggcucuucagcaggggacg

SEQ ID NO: 1452017 - RNA, 19 nt, Artificial Sequence
  Description of Artificial Sequence: Synthetic oligonucleotide
gaccuugggugacacaggu

SEQ ID NO: 1452018 - RNA, 19 nt, Artificial Sequence
  Description of Artificial Sequence: Synthetic oligonucleotide
augcuuacgaugggcgucu

SEQ ID NO: 1452019 - RNA, 19 nt, Artificial Sequence
  Description of Artificial Sequence: Synthetic oligonucleotide
acugagggcgaaggcugac

SEQ ID NO: 1452020 - RNA, 19 nt, Artificial Sequence
  Description of Artificial Sequence: Synthetic oligonucleotide
agauaguuggugagcgccu

SEQ ID NO: 1452021 - RNA, 19 nt, Artificial Sequence
  Description of Artificial Sequence: Synthetic oligonucleotide
cugucugaguugagucuug

SEQ ID NO: 1452022 - RNA, 19 nt, Artificial Sequence
  Description of Artificial Sequence: Synthetic oligonucleotide
ccacaaguuccgaacuacc

SEQ ID NO: 1452023 - RNA, 19 nt, Artificial Sequence
  Description of Artificial Sequence: Synthetic oligonucleotide
ccucugucugaguugaguc

SEQ ID NO: 1452024 - RNA, 19 nt, Artificial Sequence
  Description of Artificial Sequence: Synthetic oligonucleotide
cacaaguuccgaacuaccu

SEQ ID NO: 1452025 - RNA, 19 nt, Artificial Sequence
  Description of Artificial Sequence: Synthetic oligonucleotide
cuuugcaacuccucaggcu

SEQ ID NO: 1452026 - RNA, 19 nt, Artificial Sequence
  Description of Artificial Sequence: Synthetic oligonucleotide
caccagguagcuuuggccu

SEQ ID NO: 1452027 - RNA, 19 nt, Artificial Sequence
  Description of Artificial Sequence: Synthetic oligonucleotide
aguugagucuuggcuuucu

SEQ ID NO: 1452028 - RNA, 19 nt, Artificial Sequence
  Description of Artificial Sequence: Synthetic oligonucleotide
cacaccgggcacgaagggc

SEQ ID NO: 1452029 - RNA, 19 nt, Artificial Sequence
  Description of Artificial Sequence: Synthetic oligonucleotide
accucaacucggucagccu

SEQ ID NO: 1452030 - RNA, 19 nt, Artificial Sequence
  Description of Artificial Sequence: Synthetic oligonucleotide
gggagaaacuacaggccag

SEQ ID NO: 1452031 - RNA, 19 nt, Artificial Sequence
  Description of Artificial Sequence: Synthetic oligonucleotide
ugccgacgugcugugacca

SEQ ID NO: 1452032 - RNA, 19 nt, Artificial Sequence
  Description of Artificial Sequence: Synthetic oligonucleotide
aaaagacaccugggauaca

SEQ ID NO: 1452033 - RNA, 19 nt, Artificial Sequence
  Description of Artificial Sequence: Synthetic oligonucleotide
cugggauacagggcuuccc

SEQ ID NO: 1452034 - RNA, 19 nt, Artificial Sequence
  Description of Artificial Sequence: Synthetic oligonucleotide
ugcggacgggucucucaag

SEQ ID NO: 1452035 - RNA, 19 nt, Artificial Sequence
  Description of Artificial Sequence: Synthetic oligonucleotide
gccaaugguagguaguucu

SEQ ID NO: 1452036 - RNA, 19 nt, Artificial Sequence
  Description of Artificial Sequence: Synthetic oligonucleotide
ggaacucgagccuggaucu

SEQ ID NO: 1452037 - RNA, 19 nt, Artificial Sequence
  Description of Artificial Sequence: Synthetic oligonucleotide
gccccaaguacugugagca

SEQ ID NO: 1452038 - RNA, 19 nt, Artificial Sequence
  Description of Artificial Sequence: Synthetic oligonucleotide
caaguacugugagcagccc

SEQ ID NO: 1452039 - RNA, 19 nt, Artificial Sequence
  Description of Artificial Sequence: Synthetic oligonucleotide
uugcggcagccgcacgugc

SEQ ID NO: 1452040 - RNA, 19 nt, Artificial Sequence
  Description of Artificial Sequence: Synthetic oligonucleotide
ugaggacaaggaagcucau

SEQ ID NO: 1452041 - RNA, 19 nt, Artificial Sequence
  Description of Artificial Sequence: Synthetic oligonucleotide
ccaccguccaaucuugcug

SEQ ID NO: 1452042 - RNA, 19 nt, Artificial Sequence
  Description of Artificial Sequence: Synthetic oligonucleotide
ggcucuacuggcaaauguc

SEQ ID NO: 1452043 - RNA, 19 nt, Artificial Sequence
  Description of Artificial Sequence: Synthetic oligonucleotide
cuugggugacacagguaga

SEQ ID NO: 1452044 - RNA, 19 nt, Artificial Sequence
  Description of Artificial Sequence: Synthetic oligonucleotide
cacgaagggcggcgaaagc

SEQ ID NO: 1452045 - RNA, 19 nt, Artificial Sequence
  Description of Artificial Sequence: Synthetic oligonucleotide
agggcggcgaaagcucggg

SEQ ID NO: 1452046 - RNA, 19 nt, Artificial Sequence
  Description of Artificial Sequence: Synthetic oligonucleotide
auacggggccagcgguuag

SEQ ID NO: 1452047 - RNA, 19 nt, Artificial Sequence
  Description of Artificial Sequence: Synthetic oligonucleotide
ccaaugguagguaguucug

SEQ ID NO: 1452048 - RNA, 19 nt, Artificial Sequence
  Description of Artificial Sequence: Synthetic oligonucleotide
cauauucacggaggcucug

SEQ ID NO: 1452049 - RNA, 19 nt, Artificial Sequence
  Description of Artificial Sequence: Synthetic oligonucleotide
gaggccguuuaaggacagg

SEQ ID NO: 1452050 - RNA, 19 nt, Artificial Sequence
  Description of Artificial Sequence: Synthetic oligonucleotide
caacuacaagcacaggggu

SEQ ID NO: 1452051 - RNA, 19 nt, Artificial Sequence
  Description of Artificial Sequence: Synthetic oligonucleotide
cccaaguacugugagcagc

SEQ ID NO: 1452052 - RNA, 19 nt, Artificial Sequence
  Description of Artificial Sequence: Synthetic oligonucleotide
aaugucggcuccagagaua

SEQ ID NO: 1452053 - RNA, 19 nt, Artificial Sequence
  Description of Artificial Sequence: Synthetic oligonucleotide
gcgguuagucuccuuuggc

SEQ ID NO: 1452054 - RNA, 19 nt, Artificial Sequence
  Description of Artificial Sequence: Synthetic oligonucleotide
agauccgcagcccgucuuu

SEQ ID NO: 1452055 - RNA, 19 nt, Artificial Sequence
  Description of Artificial Sequence: Synthetic oligonucleotide
gacagaaccagugccggau

SEQ ID NO: 1452056 - RNA, 19 nt, Artificial Sequence
  Description of Artificial Sequence: Synthetic oligonucleotide
gacgugcugugaccacagc

SEQ ID NO: 1452057 - RNA, 19 nt, Artificial Sequence
  Description of Artificial Sequence: Synthetic oligonucleotide
gcgucuucccagaaaucgg

SEQ ID NO: 1452058 - RNA, 19 nt, Artificial Sequence
  Description of Artificial Sequence: Synthetic oligonucleotide
agugcuugcggcagccgca

SEQ ID NO: 1452059 - RNA, 19 nt, Artificial Sequence
  Description of Artificial Sequence: Synthetic oligonucleotide
cuggaacucuggaacucga

SEQ ID NO: 1452060 - RNA, 19 nt, Artificial Sequence
  Description of Artificial Sequence: Synthetic oligonucleotide
ugggacacaccgggcacga

SEQ ID NO: 1452061 - RNA, 19 nt, Artificial Sequence
  Description of Artificial Sequence: Synthetic oligonucleotide
cuggacaacagaggugaca

SEQ ID NO: 1452062 - RNA, 19 nt, Artificial Sequence
  Description of Artificial Sequence: Synthetic oligonucleotide
aaguuccgaacuaccucaa

SEQ ID NO: 1452063 - RNA, 19 nt, Artificial Sequence
  Description of Artificial Sequence: Synthetic oligonucleotide
ggaaugcccuagaaacugc

SEQ ID NO: 1452064 - RNA, 19 nt, Artificial Sequence
  Description of Artificial Sequence: Synthetic oligonucleotide
cagcuuuuguuccguucuc

SEQ ID NO: 1452065 - RNA, 19 nt, Artificial Sequence
  Description of Artificial Sequence: Synthetic oligonucleotide
gauccgcagcccgucuuug

SEQ ID NO: 1452066 - RNA, 19 nt, Artificial Sequence
  Description of Artificial Sequence: Synthetic oligonucleotide
cuacauugcggacgggucu

SEQ ID NO: 1452067 - RNA, 19 nt, Artificial Sequence
  Description of Artificial Sequence: Synthetic oligonucleotide
ugccggauccaaaguccau

SEQ ID NO: 1452068 - RNA, 19 nt, Artificial Sequence
  Description of Artificial Sequence: Synthetic oligonucleotide
guauggcugggagaaacua

SEQ ID NO: 1452069 - RNA, 19 nt, Artificial Sequence
  Description of Artificial Sequence: Synthetic oligonucleotide
ucucuacauugcggacggg

SEQ ID NO: 1452070 - RNA, 19 nt, Artificial Sequence
  Description of Artificial Sequence: Synthetic oligonucleotide
cuugcggcagccgcacgug

SEQ ID NO: 1452071 - RNA, 19 nt, Artificial Sequence
  Description of Artificial Sequence: Synthetic oligonucleotide
gccacaaguuccgaacuac

SEQ ID NO: 1452072 - RNA, 19 nt, Artificial Sequence
  Description of Artificial Sequence: Synthetic oligonucleotide
gcaaaaccaccguccaauc

SEQ ID NO: 1452073 - RNA, 19 nt, Artificial Sequence
  Description of Artificial Sequence: Synthetic oligonucleotide
aucaacguuuguggcugga

SEQ ID NO: 1452074 - RNA, 19 nt, Artificial Sequence
  Description of Artificial Sequence: Synthetic oligonucleotide
gauacggggccagcgguua

SEQ ID NO: 1452075 - RNA, 19 nt, Artificial Sequence
  Description of Artificial Sequence: Synthetic oligonucleotide
ggggacggaggaaacgcag

SEQ ID NO: 1452076 - RNA, 19 nt, Artificial Sequence
  Description of Artificial Sequence: Synthetic oligonucleotide
acggggccagcgguuaguc

SEQ ID NO: 1452077 - RNA, 19 nt, Artificial Sequence
  Description of Artificial Sequence: Synthetic oligonucleotide
caccagaaaauggcuuguc

SEQ ID NO: 1452078 - RNA, 19 nt, Artificial Sequence
  Description of Artificial Sequence: Synthetic oligonucleotide
acuacaggccagggacuug

SEQ ID NO: 1452079 - RNA, 19 nt, Artificial Sequence
  Description of Artificial Sequence: Synthetic oligonucleotide
guugagucuuggcuuucua

SEQ ID NO: 1452080 - RNA, 19 nt, Artificial Sequence
  Description of Artificial Sequence: Synthetic oligonucleotide
caccgggcacgaagggcgg

SEQ ID NO: 1452081 - RNA, 19 nt, Artificial Sequence
  Description of Artificial Sequence: Synthetic oligonucleotide
gcacgaagggcggcgaaag

SEQ ID NO: 1452082 - RNA, 19 nt, Artificial Sequence
  Description of Artificial Sequence: Synthetic oligonucleotide
gugauacggggccagcggu

SEQ ID NO: 1452083 - RNA, 19 nt, Artificial Sequence
  Description of Artificial Sequence: Synthetic oligonucleotide
acgggucucucaagaagca

SEQ ID NO: 1452084 - RNA, 19 nt, Artificial Sequence
  Description of Artificial Sequence: Synthetic oligonucleotide
ggaccuugggugacacagg

SEQ ID NO: 1452085 - RNA, 19 nt, Artificial Sequence
  Description of Artificial Sequence: Synthetic oligonucleotide
gcgucagccagugcuugcg

SEQ ID NO: 1452086 - RNA, 19 nt, Artificial Sequence
  Description of Artificial Sequence: Synthetic oligonucleotide
gguaguucacugagggcga

SEQ ID NO: 1452087 - RNA, 19 nt, Artificial Sequence
  Description of Artificial Sequence: Synthetic oligonucleotide
cucuacauugcggacgggu

SEQ ID NO: 1452088 - RNA, 19 nt, Artificial Sequence
  Description of Artificial Sequence: Synthetic oligonucleotide
uacggggccagcgguuagu

SEQ ID NO: 1452089 - RNA, 19 nt, Artificial Sequence
  Description of Artificial Sequence: Synthetic oligonucleotide
ugacucgggcacagcgaua

SEQ ID NO: 1452090 - RNA, 19 nt, Artificial Sequence
  Description of Artificial Sequence: Synthetic oligonucleotide
gcgauacaaaucccugcca

SEQ ID NO: 1452091 - RNA, 19 nt, Artificial Sequence
  Description of Artificial Sequence: Synthetic oligonucleotide
cagguagcuuuggccuugg

SEQ ID NO: 1452092 - RNA, 19 nt, Artificial Sequence
  Description of Artificial Sequence: Synthetic oligonucleotide
cucgggcacagcgauacaa

SEQ ID NO: 1452093 - RNA, 19 nt, Artificial Sequence
  Description of Artificial Sequence: Synthetic oligonucleotide
cucaagauccgcagcccgu

SEQ ID NO: 1452094 - RNA, 19 nt, Artificial Sequence
  Description of Artificial Sequence: Synthetic oligonucleotide
gucggcuccagagauaguu

SEQ ID NO: 1452095 - RNA, 19 nt, Artificial Sequence
  Description of Artificial Sequence: Synthetic oligonucleotide
gaguugagucuuggcuuuc

SEQ ID NO: 1452096 - RNA, 19 nt, Artificial Sequence
  Description of Artificial Sequence: Synthetic oligonucleotide
caggcucuacuggcaaaug

SEQ ID NO: 1452097 - RNA, 19 nt, Artificial Sequence
  Description of Artificial Sequence: Synthetic oligonucleotide
ugucggcuccagagauagu

SEQ ID NO: 1452098 - RNA, 19 nt, Artificial Sequence
  Description of Artificial Sequence: Synthetic oligonucleotide
aaccagugccggauccaaa

SEQ ID NO: 1452099 - RNA, 19 nt, Artificial Sequence
  Description of Artificial Sequence: Synthetic oligonucleotide
cacauggcgaggccguuua

SEQ ID NO: 1452100 - RNA, 19 nt, Artificial Sequence
  Description of Artificial Sequence: Synthetic oligonucleotide
ugcaacuccucaggcucua

SEQ ID NO: 1452101 - RNA, 19 nt, Artificial Sequence
  Description of Artificial Sequence: Synthetic oligonucleotide
gugccggauccaaagucca

SEQ ID NO: 1452102 - RNA, 19 nt, Artificial Sequence
  Description of Artificial Sequence: Synthetic oligonucleotide
cacucucuuccuggacacc

SEQ ID NO: 1452103 - RNA, 19 nt, Artificial Sequence
  Description of Artificial Sequence: Synthetic oligonucleotide
uaguucugcgcagggcauu

SEQ ID NO: 1452104 - RNA, 19 nt, Artificial Sequence
  Description of Artificial Sequence: Synthetic oligonucleotide
gcauucaguacugccccac

SEQ ID NO: 1452105 - RNA, 19 nt, Artificial Sequence
  Description of Artificial Sequence: Synthetic oligonucleotide
cugcgucagccagugcuug

SEQ ID NO: 1452106 - RNA, 19 nt, Artificial Sequence
  Description of Artificial Sequence: Synthetic oligonucleotide
gguggaucuaucacaggua

SEQ ID NO: 1452107 - RNA, 19 nt, Artificial Sequence
  Description of Artificial Sequence: Synthetic oligonucleotide
ggcgaaagcucgggacugg

SEQ ID NO: 1452108 - RNA, 19 nt, Artificial Sequence
  Description of Artificial Sequence: Synthetic oligonucleotide
gaaacgcagguggaucuau

SEQ ID NO: 1452109 - RNA, 19 nt, Artificial Sequence
  Description of Artificial Sequence: Synthetic oligonucleotide
gcgaaggcugacacgacca

SEQ ID NO: 1452110 - RNA, 19 nt, Artificial Sequence
  Description of Artificial Sequence: Synthetic oligonucleotide
gcggacgggucucucaaga

SEQ ID NO: 1452111 - RNA, 19 nt, Artificial Sequence
  Description of Artificial Sequence: Synthetic oligonucleotide
cuuacgccacaaguuccga

SEQ ID NO: 1452112 - RNA, 19 nt, Artificial Sequence
  Description of Artificial Sequence: Synthetic oligonucleotide
aggggacggaggaaacgca

SEQ ID NO: 1452113 - RNA, 19 nt, Artificial Sequence
  Description of Artificial Sequence: Synthetic oligonucleotide
ccggauccaaaguccauca

SEQ ID NO: 1452114 - RNA, 19 nt, Artificial Sequence
  Description of Artificial Sequence: Synthetic oligonucleotide
cagcccgucuuugcaacuc

SEQ ID NO: 1452115 - RNA, 19 nt, Artificial Sequence
  Description of Artificial Sequence: Synthetic oligonucleotide
ggucucucaagaagcaaua

SEQ ID NO: 1452116 - RNA, 19 nt, Artificial Sequence
  Description of Artificial Sequence: Synthetic oligonucleotide
ccgucuuugcaacuccuca

SEQ ID NO: 1452117 - RNA, 19 nt, Artificial Sequence
  Description of Artificial Sequence: Synthetic oligonucleotide
gaaccaccuuuuaguagcu

SEQ ID NO: 1452118 - RNA, 19 nt, Artificial Sequence
  Description of Artificial Sequence: Synthetic oligonucleotide
cugcaaaaccaccguccaa

SEQ ID NO: 1452119 - RNA, 19 nt, Artificial Sequence
  Description of Artificial Sequence: Synthetic oligonucleotide
ggacggaggaaacgcaggu

SEQ ID NO: 1452120 - RNA, 19 nt, Artificial Sequence
  Description of Artificial Sequence: Synthetic oligonucleotide
ggaugcuuacgaugggcgu

SEQ ID NO: 1452121 - RNA, 19 nt, Artificial Sequence
  Description of Artificial Sequence: Synthetic oligonucleotide
gccggauccaaaguccauc

SEQ ID NO: 1452122 - RNA, 19 nt, Artificial Sequence
  Description of Artificial Sequence: Synthetic oligonucleotide
acauggcgaggccguuuaa

SEQ ID NO: 1452123 - RNA, 19 nt, Artificial Sequence
  Description of Artificial Sequence: Synthetic oligonucleotide
acucgggcacagcgauaca

SEQ ID NO: 1452124 - RNA, 19 nt, Artificial Sequence
  Description of Artificial Sequence: Synthetic oligonucleotide
acauugcggacgggucucu

SEQ ID NO: 1452125 - RNA, 19 nt, Artificial Sequence
  Description of Artificial Sequence: Synthetic oligonucleotide
cugagggcgaaggcugaca

SEQ ID NO: 1452126 - RNA, 19 nt, Artificial Sequence
  Description of Artificial Sequence: Synthetic oligonucleotide
ggcauucaguacugcccca

SEQ ID NO: 1452127 - RNA, 19 nt, Artificial Sequence
  Description of Artificial Sequence: Synthetic oligonucleotide
gcgcagggcauucaguacu

SEQ ID NO: 1452128 - RNA, 19 nt, Artificial Sequence
  Description of Artificial Sequence: Synthetic oligonucleotide
gcacagcgauacaaauccc

SEQ ID NO: 1452129 - RNA, 19 nt, Artificial Sequence
  Description of Artificial Sequence: Synthetic oligonucleotide
cgucuucccagaaaucgga

SEQ ID NO: 1452130 - RNA, 19 nt, Artificial Sequence
  Description of Artificial Sequence: Synthetic oligonucleotide
ucccugccaugccgacgug

SEQ ID NO: 1452131 - RNA, 19 nt, Artificial Sequence
  Description of Artificial Sequence: Synthetic oligonucleotide
cccgucuuugcaacuccuc

SEQ ID NO: 1452132 - RNA, 19 nt, Artificial Sequence
  Description of Artificial Sequence: Synthetic oligonucleotide
cauugcggacgggucucuc

SEQ ID NO: 1452133 - RNA, 19 nt, Artificial Sequence
  Description of Artificial Sequence: Synthetic oligonucleotide
gcugacucgggcacagcga

SEQ ID NO: 1452134 - RNA, 19 nt, Artificial Sequence
  Description of Artificial Sequence: Synthetic oligonucleotide
gccaugccgacgugcugug

SEQ ID NO: 1452135 - RNA, 19 nt, Artificial Sequence
  Description of Artificial Sequence: Synthetic oligonucleotide
guuuaaggacaggcugagu

SEQ ID NO: 1452136 - RNA, 19 nt, Artificial Sequence
  Description of Artificial Sequence: Synthetic oligonucleotide
gcuuacgaugggcgucuuc

SEQ ID NO: 1452137 - RNA, 19 nt, Artificial Sequence
  Description of Artificial Sequence: Synthetic oligonucleotide
gcugagugauacggggcca

SEQ ID NO: 1452138 - RNA, 19 nt, Artificial Sequence
  Description of Artificial Sequence: Synthetic oligonucleotide
guaguucugcgcagggcau

SEQ ID NO: 1452139 - RNA, 19 nt, Artificial Sequence
  Description of Artificial Sequence: Synthetic oligonucleotide
gcggcgaaagcucgggacu

SEQ ID NO: 1452140 - RNA, 19 nt, Artificial Sequence
  Description of Artificial Sequence: Synthetic oligonucleotide
cugccccacgaaguuucuc

SEQ ID NO: 1452141 - RNA, 19 nt, Artificial Sequence
  Description of Artificial Sequence: Synthetic oligonucleotide
ggguaccagcacucucuuc

SEQ ID NO: 1452142 - RNA, 19 nt, Artificial Sequence
  Description of Artificial Sequence: Synthetic oligonucleotide
cugccaaugguagguaguu

SEQ ID NO: 1452143 - RNA, 19 nt, Artificial Sequence
  Description of Artificial Sequence: Synthetic oligonucleotide
caagauccgcagcccgucu

SEQ ID NO: 1452144 - RNA, 19 nt, Artificial Sequence
  Description of Artificial Sequence: Synthetic oligonucleotide
cccacgaaguuucuccucu

SEQ ID NO: 1452145 - RNA, 19 nt, Artificial Sequence
  Description of Artificial Sequence: Synthetic oligonucleotide
guucugcgcagggcauuca

SEQ ID NO: 1452146 - RNA, 19 nt, Artificial Sequence
  Description of Artificial Sequence: Synthetic oligonucleotide
accuugggugacacaggua

SEQ ID NO: 1452147 - RNA, 19 nt, Artificial Sequence
  Description of Artificial Sequence: Synthetic oligonucleotide
cgaacuaccucaacucggu

SEQ ID NO: 1452148 - RNA, 19 nt, Artificial Sequence
  Description of Artificial Sequence: Synthetic oligonucleotide
ggccguuuaaggacaggcu

SEQ ID NO: 1452149 - RNA, 19 nt, Artificial Sequence
  Description of Artificial Sequence: Synthetic oligonucleotide
ggaggaaacgcagguggau

SEQ ID NO: 1452150 - RNA, 19 nt, Artificial Sequence
  Description of Artificial Sequence: Synthetic oligonucleotide
ggaaacgcagguggaucua

SEQ ID NO: 1452151 - RNA, 19 nt, Artificial Sequence
  Description of Artificial Sequence: Synthetic oligonucleotide
cgaggccguuuaaggacag

SEQ ID NO: 1452152 - RNA, 19 nt, Artificial Sequence
  Description of Artificial Sequence: Synthetic oligonucleotide
ccccuggcaaggauuacua

SEQ ID NO: 1452153 - RNA, 19 nt, Artificial Sequence
  Description of Artificial Sequence: Synthetic oligonucleotide
gccgacgugcugugaccac

SEQ ID NO: 1452154 - RNA, 19 nt, Artificial Sequence
  Description of Artificial Sequence: Synthetic oligonucleotide
ccagugcuugcggcagccg

SEQ ID NO: 1452155 - RNA, 19 nt, Artificial Sequence
  Description of Artificial Sequence: Synthetic oligonucleotide
cuggaacucgagccuggau

SEQ ID NO: 1452156 - RNA, 19 nt, Artificial Sequence
  Description of Artificial Sequence: Synthetic oligonucleotide
ugcuuacgaugggcgucuu

SEQ ID NO: 1452157 - RNA, 19 nt, Artificial Sequence
  Description of Artificial Sequence: Synthetic oligonucleotide
ccaaucuugcugccauaua

SEQ ID NO: 1452158 - RNA, 19 nt, Artificial Sequence
  Description of Artificial Sequence: Synthetic oligonucleotide
gggcgucuucccagaaauc

SEQ ID NO: 1452159 - RNA, 19 nt, Artificial Sequence
  Description of Artificial Sequence: Synthetic oligonucleotide
ggacaacagaggugacaau

SEQ ID NO: 1452160 - RNA, 19 nt, Artificial Sequence
  Description of Artificial Sequence: Synthetic oligonucleotide
gggcggcgaaagcucggga

SEQ ID NO: 1452161 - RNA, 19 nt, Artificial Sequence
  Description of Artificial Sequence: Synthetic oligonucleotide
cggcgaaagcucgggacug

SEQ ID NO: 1452162 - RNA, 19 nt, Artificial Sequence
  Description of Artificial Sequence: Synthetic oligonucleotide
ccgacgugcugugaccaca

SEQ ID NO: 1452163 - RNA, 19 nt, Artificial Sequence
  Description of Artificial Sequence: Synthetic oligonucleotide
gcagcccgucuuugcaacu

SEQ ID NO: 1452164 - RNA, 19 nt, Artificial Sequence
  Description of Artificial Sequence: Synthetic oligonucleotide
caccugggauacagggcuu

SEQ ID NO: 1452165 - RNA, 19 nt, Artificial Sequence
  Description of Artificial Sequence: Synthetic oligonucleotide
caacucggucagccuugcu

SEQ ID NO: 1452166 - RNA, 19 nt, Artificial Sequence
  Description of Artificial Sequence: Synthetic oligonucleotide
ccguccaaucuugcugcca

SEQ ID NO: 1452167 - RNA, 19 nt, Artificial Sequence
  Description of Artificial Sequence: Synthetic oligonucleotide
cgccacaaguuccgaacua

SEQ ID NO: 1452168 - RNA, 19 nt, Artificial Sequence
  Description of Artificial Sequence: Synthetic oligonucleotide
cgggcacagcgauacaaau

SEQ ID NO: 1452169 - RNA, 19 nt, Artificial Sequence
  Description of Artificial Sequence: Synthetic oligonucleotide
gcccgucuuugcaacuccu

SEQ ID NO: 1452170 - RNA, 19 nt, Artificial Sequence
  Description of Artificial Sequence: Synthetic oligonucleotide
gggacacaccgggcacgaa

SEQ ID NO: 1452171 - RNA, 19 nt, Artificial Sequence
  Description of Artificial Sequence: Synthetic oligonucleotide
ccaugccgacgugcuguga

SEQ ID NO: 1452172 - RNA, 19 nt, Artificial Sequence
  Description of Artificial Sequence: Synthetic oligonucleotide
gcccagcuuuuguuccguu

SEQ ID NO: 1452173 - RNA, 19 nt, Artificial Sequence
  Description of Artificial Sequence: Synthetic oligonucleotide
cggggccagcgguuagucu

SEQ ID NO: 1452174 - RNA, 19 nt, Artificial Sequence
  Description of Artificial Sequence: Synthetic oligonucleotide
aauacuagaaaguagugcc

SEQ ID NO: 1452175 - RNA, 19 nt, Artificial Sequence
  Description of Artificial Sequence: Synthetic oligonucleotide
acuaauuucaguucgaucg

SEQ ID NO: 1452176 - RNA, 19 nt, Artificial Sequence
  Description of Artificial Sequence: Synthetic oligonucleotide
aauauauguucauaaacuc

SEQ ID NO: 1452177 - RNA, 19 nt, Artificial Sequence
  Description of Artificial Sequence: Synthetic oligonucleotide
aauauaguagagcaggauc

SEQ ID NO: 1452178 - RNA, 19 nt, Artificial Sequence
  Description of Artificial Sequence: Synthetic oligonucleotide
aauagauaacuuuagggug

SEQ ID NO: 1452179 - RNA, 19 nt, Artificial Sequence
  Description of Artificial Sequence: Synthetic oligonucleotide
acacauaguaauuauagac

SEQ ID NO: 1452180 - RNA, 19 nt, Artificial Sequence
  Description of Artificial Sequence: Synthetic oligonucleotide
uaggcuaccagcaauauag

SEQ ID NO: 1452181 - RNA, 19 nt, Artificial Sequence
  Description of Artificial Sequence: Synthetic oligonucleotide
acaauagauaacuuuaggg

SEQ ID NO: 1452182 - RNA, 19 nt, Artificial Sequence
  Description of Artificial Sequence: Synthetic oligonucleotide
uuauaucaagaacugaagg

SEQ ID NO: 1452183 - RNA, 19 nt, Artificial Sequence
  Description of Artificial Sequence: Synthetic oligonucleotide
aaauacuagaaaguagugc

SEQ ID NO: 1452184 - RNA, 19 nt, Artificial Sequence
  Description of Artificial Sequence: Synthetic oligonucleotide
auugguguuacauuuguac

SEQ ID NO: 1452185 - RNA, 19 nt, Artificial Sequence
  Description of Artificial Sequence: Synthetic oligonucleotide
uuuagaugcauauucaaca

SEQ ID NO: 1452186 - RNA, 19 nt, Artificial Sequence
  Description of Artificial Sequence: Synthetic oligonucleotide
ucuuauaagggcuaauuag

SEQ ID NO: 1452187 - RNA, 19 nt, Artificial Sequence
  Description of Artificial Sequence: Synthetic oligonucleotide
aaaggaauauuccacuaag

SEQ ID NO: 1452188 - RNA, 19 nt, Artificial Sequence
  Description of Artificial Sequence: Synthetic oligonucleotide
uguuucaagaaguugagca

SEQ ID NO: 1452189 - RNA, 19 nt, Artificial Sequence
  Description of Artificial Sequence: Synthetic oligonucleotide
aacaauagauaacuuuagg

SEQ ID NO: 1452190 - RNA, 19 nt, Artificial Sequence
  Description of Artificial Sequence: Synthetic oligonucleotide
aaguaaaguuuucuccucc

SEQ ID NO: 1452191 - RNA, 19 nt, Artificial Sequence
  Description of Artificial Sequence: Synthetic oligonucleotide
aaagcuagcaguuucaaua

SEQ ID NO: 1452192 - RNA, 19 nt, Artificial Sequence
  Description of Artificial Sequence: Synthetic oligonucleotide
cuugcauuaaucuuucccg

SEQ ID NO: 1452193 - RNA, 19 nt, Artificial Sequence
  Description of Artificial Sequence: Synthetic oligonucleotide
aggaaaucgaacuaauuuc

SEQ ID NO: 1452194 - RNA, 19 nt, Artificial Sequence
  Description of Artificial Sequence: Synthetic oligonucleotide
uugacaaagcuucacaagc

SEQ ID NO: 1452195 - RNA, 19 nt, Artificial Sequence
  Description of Artificial Sequence: Synthetic oligonucleotide
uauaucaagaacugaagga

SEQ ID NO: 1452196 - RNA, 19 nt, Artificial Sequence
  Description of Artificial Sequence: Synthetic oligonucleotide
ucuuuuaauguccagucug

SEQ ID NO: 1452197 - RNA, 19 nt, Artificial Sequence
  Description of Artificial Sequence: Synthetic oligonucleotide
uuugucuggguacacauag

SEQ ID NO: 1452198 - RNA, 19 nt, Artificial Sequence
  Description of Artificial Sequence: Synthetic oligonucleotide
ucgaacuaauuucaguucg

SEQ ID NO: 1452199 - RNA, 19 nt, Artificial Sequence
  Description of Artificial Sequence: Synthetic oligonucleotide
uauucaacacggaacauug

SEQ ID NO: 1452200 - RNA, 19 nt, Artificial Sequence
  Description of Artificial Sequence: Synthetic oligonucleotide
aaagagcguagcuccaucc

SEQ ID NO: 1452201 - RNA, 19 nt, Artificial Sequence
  Description of Artificial Sequence: Synthetic oligonucleotide
aauguaguaucuaugaacu

SEQ ID NO: 1452202 - RNA, 19 nt, Artificial Sequence
  Description of Artificial Sequence: Synthetic oligonucleotide
uccacgucaauaaagcuag

SEQ ID NO: 1452203 - RNA, 19 nt, Artificial Sequence
  Description of Artificial Sequence: Synthetic oligonucleotide
aaucgaacuaauuucaguu

SEQ ID NO: 1452204 - RNA, 19 nt, Artificial Sequence
  Description of Artificial Sequence: Synthetic oligonucleotide
auuauagacugucauguag

SEQ ID NO: 1452205 - RNA, 19 nt, Artificial Sequence
  Description of Artificial Sequence: Synthetic oligonucleotide
uucauaaacacgucuagca

SEQ ID NO: 1452206 - RNA, 19 nt, Artificial Sequence
  Description of Artificial Sequence: Synthetic oligonucleotide
aaacugaguauguauggag

SEQ ID NO: 1452207 - RNA, 19 nt, Artificial Sequence
  Description of Artificial Sequence: Synthetic oligonucleotide
uuauagacugucauguagc

SEQ ID NO: 1452208 - RNA, 19 nt, Artificial Sequence
  Description of Artificial Sequence: Synthetic oligonucleotide
acauaguaauuauagacug

SEQ ID NO: 1452209 - RNA, 19 nt, Artificial Sequence
  Description of Artificial Sequence: Synthetic oligonucleotide
aguagugccaucuuucauc

SEQ ID NO: 1452210 - RNA, 19 nt, Artificial Sequence
  Description of Artificial Sequence: Synthetic oligonucleotide
aaucuuucccgggagaaac

SEQ ID NO: 1452211 - RNA, 19 nt, Artificial Sequence
  Description of Artificial Sequence: Synthetic oligonucleotide
aacuaauuucaguucgauc

SEQ ID NO: 1452212 - RNA, 19 nt, Artificial Sequence
  Description of Artificial Sequence: Synthetic oligonucleotide
ucauccacgucaauaaagc

SEQ ID NO: 1452213 - RNA, 19 nt, Artificial Sequence
  Description of Artificial Sequence: Synthetic oligonucleotide
ugaaauggagucaguauca

SEQ ID NO: 1452214 - RNA, 19 nt, Artificial Sequence
  Description of Artificial Sequence: Synthetic oligonucleotide
caauguaguaucuaugaac

SEQ ID NO: 1452215 - RNA, 19 nt, Artificial Sequence
  Description of Artificial Sequence: Synthetic oligonucleotide
aaaucgaacuaauuucagu

SEQ ID NO: 1452216 - RNA, 19 nt, Artificial Sequence
  Description of Artificial Sequence: Synthetic oligonucleotide
aguaauuauagacugucau

SEQ ID NO: 1452217 - RNA, 19 nt, Artificial Sequence
  Description of Artificial Sequence: Synthetic oligonucleotide
uucuguauuguucagcauc

SEQ ID NO: 1452218 - RNA, 19 nt, Artificial Sequence
  Description of Artificial Sequence: Synthetic oligonucleotide
aacauuguugauaggcuac

SEQ ID NO: 1452219 - RNA, 19 nt, Artificial Sequence
  Description of Artificial Sequence: Synthetic oligonucleotide
aaacagggcaaaucuugac

SEQ ID NO: 1452220 - RNA, 19 nt, Artificial Sequence
  Description of Artificial Sequence: Synthetic oligonucleotide
guuacauuuguacucggcc

SEQ ID NO: 1452221 - RNA, 19 nt, Artificial Sequence
  Description of Artificial Sequence: Synthetic oligonucleotide
aggaauauuccacuaagga

SEQ ID NO: 1452222 - RNA, 19 nt, Artificial Sequence
  Description of Artificial Sequence: Synthetic oligonucleotide
aaguucuaaugucauucuc

SEQ ID NO: 1452223 - RNA, 19 nt, Artificial Sequence
  Description of Artificial Sequence: Synthetic oligonucleotide
agagcugauggguauacuc

SEQ ID NO: 1452224 - RNA, 19 nt, Artificial Sequence
  Description of Artificial Sequence: Synthetic oligonucleotide
guaauuauagacugucaug

SEQ ID NO: 1452225 - RNA, 19 nt, Artificial Sequence
  Description of Artificial Sequence: Synthetic oligonucleotide
auauacaaucucucaaaag

SEQ ID NO: 1452226 - RNA, 19 nt, Artificial Sequence
  Description of Artificial Sequence: Synthetic oligonucleotide
aacagggcaaaucuugaca

SEQ ID NO: 1452227 - RNA, 19 nt, Artificial Sequence
  Description of Artificial Sequence: Synthetic oligonucleotide
uauuucacaagccaucuuu

SEQ ID NO: 1452228 - RNA, 19 nt, Artificial Sequence
  Description of Artificial Sequence: Synthetic oligonucleotide
auagauaacuuuagggugg

SEQ ID NO: 1452229 - RNA, 19 nt, Artificial Sequence
  Description of Artificial Sequence: Synthetic oligonucleotide
aaaguucuaaugucauucu

SEQ ID NO: 1452230 - RNA, 19 nt, Artificial Sequence
  Description of Artificial Sequence: Synthetic oligonucleotide
ucaacacggaacauuguug

SEQ ID NO: 1452231 - RNA, 19 nt, Artificial Sequence
  Description of Artificial Sequence: Synthetic oligonucleotide
ugauuugucugauuuuccc

SEQ ID NO: 1452232 - RNA, 19 nt, Artificial Sequence
  Description of Artificial Sequence: Synthetic oligonucleotide
uccacuaaggagaacaaua

SEQ ID NO: 1452233 - RNA, 19 nt, Artificial Sequence
  Description of Artificial Sequence: Synthetic oligonucleotide
aagaaacugaguauguaug

SEQ ID NO: 1452234 - RNA, 19 nt, Artificial Sequence
  Description of Artificial Sequence: Synthetic oligonucleotide
uugcauuaaucuuucccgg

SEQ ID NO: 1452235 - RNA, 19 nt, Artificial Sequence
  Description of Artificial Sequence: Synthetic oligonucleotide
uuagaugcauauucaacac

SEQ ID NO: 1452236 - RNA, 19 nt, Artificial Sequence
  Description of Artificial Sequence: Synthetic oligonucleotide
caacuuuagaugcauauuc

SEQ ID NO: 1452237 - RNA, 19 nt, Artificial Sequence
  Description of Artificial Sequence: Synthetic oligonucleotide
cauaaacacgucuagcaug

SEQ ID NO: 1452238 - RNA, 19 nt, Artificial Sequence
  Description of Artificial Sequence: Synthetic oligonucleotide
acgucaauaaagcuagcag

SEQ ID NO: 1452239 - RNA, 19 nt, Artificial Sequence
  Description of Artificial Sequence: Synthetic oligonucleotide
uguugcuuauuuauuuuga

SEQ ID NO: 1452240 - RNA, 19 nt, Artificial Sequence
  Description of Artificial Sequence: Synthetic oligonucleotide
ucugacuuacacguggccg

SEQ ID NO: 1452241 - RNA, 19 nt, Artificial Sequence
  Description of Artificial Sequence: Synthetic oligonucleotide
cuuuagaugcauauucaac

SEQ ID NO: 1452242 - RNA, 19 nt, Artificial Sequence
  Description of Artificial Sequence: Synthetic oligonucleotide
ccuacggucgcaaagagcg

SEQ ID NO: 1452243 - RNA, 19 nt, Artificial Sequence
  Description of Artificial Sequence: Synthetic oligonucleotide
aguucgaucgcuguauugg

SEQ ID NO: 1452244 - RNA, 19 nt, Artificial Sequence
  Description of Artificial Sequence: Synthetic oligonucleotide
aucgaacuaauuucaguuc

SEQ ID NO: 1452245 - RNA, 19 nt, Artificial Sequence
  Description of Artificial Sequence: Synthetic oligonucleotide
uuauaagggcuaauuaguc

SEQ ID NO: 1452246 - RNA, 19 nt, Artificial Sequence
  Description of Artificial Sequence: Synthetic oligonucleotide
cacggaacauuguugauag

SEQ ID NO: 1452247 - RNA, 19 nt, Artificial Sequence
  Description of Artificial Sequence: Synthetic oligonucleotide
guaucuaugaacuguuuca

SEQ ID NO: 1452248 - RNA, 19 nt, Artificial Sequence
  Description of Artificial Sequence: Synthetic oligonucleotide
uauagacugucauguagcc

SEQ ID NO: 1452249 - RNA, 19 nt, Artificial Sequence
  Description of Artificial Sequence: Synthetic oligonucleotide
aaggaauauuccacuaagg

SEQ ID NO: 1452250 - RNA, 19 nt, Artificial Sequence
  Description of Artificial Sequence: Synthetic oligonucleotide
agcuguuauaucaagaacu

SEQ ID NO: 1452251 - RNA, 19 nt, Artificial Sequence
  Description of Artificial Sequence: Synthetic oligonucleotide
uuguauugccauaucuuca

SEQ ID NO: 1452252 - RNA, 19 nt, Artificial Sequence
  Description of Artificial Sequence: Synthetic oligonucleotide
auuguugauaggcuaccag

SEQ ID NO: 1452253 - RNA, 19 nt, Artificial Sequence
  Description of Artificial Sequence: Synthetic oligonucleotide
ucuagcauguugcuuauuu

SEQ ID NO: 1452254 - RNA, 19 nt, Artificial Sequence
  Description of Artificial Sequence: Synthetic oligonucleotide
gauggguauacucaggaaa

SEQ ID NO: 1452255 - RNA, 19 nt, Artificial Sequence
  Description of Artificial Sequence: Synthetic oligonucleotide
guuauaucaagaacugaag

SEQ ID NO: 1452256 - RNA, 19 nt, Artificial Sequence
  Description of Artificial Sequence: Synthetic oligonucleotide
ugcacucuuauauuccacc

SEQ ID NO: 1452257 - RNA, 19 nt, Artificial Sequence
  Description of Artificial Sequence: Synthetic oligonucleotide
uugcuuauuuauuuugaac

SEQ ID NO: 1452258 - RNA, 19 nt, Artificial Sequence
  Description of Artificial Sequence: Synthetic oligonucleotide
ugauauucucgaaagccuc

SEQ ID NO: 1452259 - RNA, 19 nt, Artificial Sequence
  Description of Artificial Sequence: Synthetic oligonucleotide
ucuucuuuuaauguccagu

SEQ ID NO: 1452260 - RNA, 19 nt, Artificial Sequence
  Description of Artificial Sequence: Synthetic oligonucleotide
uguuacauuuguacucggc

SEQ ID NO: 1452261 - RNA, 19 nt, Artificial Sequence
  Description of Artificial Sequence: Synthetic oligonucleotide
gaacaauagauaacuuuag

SEQ ID NO: 1452262 - RNA, 19 nt, Artificial Sequence
  Description of Artificial Sequence: Synthetic oligonucleotide
uauacucaggaaagaaagu

SEQ ID NO: 1452263 - RNA, 19 nt, Artificial Sequence
  Description of Artificial Sequence: Synthetic oligonucleotide
ucgcaaagagcguagcucc

SEQ ID NO: 1452264 - RNA, 19 nt, Artificial Sequence
  Description of Artificial Sequence: Synthetic oligonucleotide
uacacauaguaauuauaga

SEQ ID NO: 1452265 - RNA, 19 nt, Artificial Sequence
  Description of Artificial Sequence: Synthetic oligonucleotide
acucuuauauuccaccaga

SEQ ID NO: 1452266 - RNA, 19 nt, Artificial Sequence
  Description of Artificial Sequence: Synthetic oligonucleotide
aucaacuuuagaugcauau

SEQ ID NO: 1452267 - RNA, 19 nt, Artificial Sequence
  Description of Artificial Sequence: Synthetic oligonucleotide
ugcuuguauugccauaucu

SEQ ID NO: 1452268 - RNA, 19 nt, Artificial Sequence
  Description of Artificial Sequence: Synthetic oligonucleotide
auauaguagagcaggaucu

SEQ ID NO: 1452269 - RNA, 19 nt, Artificial Sequence
  Description of Artificial Sequence: Synthetic oligonucleotide
ccaucuuucaucauccacg

SEQ ID NO: 1452270 - RNA, 19 nt, Artificial Sequence
  Description of Artificial Sequence: Synthetic oligonucleotide
ucuagacaguauuuuaaaa

SEQ ID NO: 1452271 - RNA, 19 nt, Artificial Sequence
  Description of Artificial Sequence: Synthetic oligonucleotide
uuucauaaacacgucuagc

SEQ ID NO: 1452272 - RNA, 19 nt, Artificial Sequence
  Description of Artificial Sequence: Synthetic oligonucleotide
cuaauuucaguucgaucgc

SEQ ID NO: 1452273 - RNA, 19 nt, Artificial Sequence
  Description of Artificial Sequence: Synthetic oligonucleotide
cacgcuuaucucuaucugg

SEQ ID NO: 1452274 - RNA, 19 nt, Artificial Sequence
  Description of Artificial Sequence: Synthetic oligonucleotide
ugugcaaaacccaggugga

SEQ ID NO: 1452275 - RNA, 19 nt, Artificial Sequence
  Description of Artificial Sequence: Synthetic oligonucleotide
caauagauaacuuuagggu

SEQ ID NO: 1452276 - RNA, 19 nt, Artificial Sequence
  Description of Artificial Sequence: Synthetic oligonucleotide
ggaguaggguuccaaaugg

SEQ ID NO: 1452277 - RNA, 19 nt, Artificial Sequence
  Description of Artificial Sequence: Synthetic oligonucleotide
uacucggccaauuucuucu

SEQ ID NO: 1452278 - RNA, 19 nt, Artificial Sequence
  Description of Artificial Sequence: Synthetic oligonucleotide
uucaacacggaacauuguu

SEQ ID NO: 1452279 - RNA, 19 nt, Artificial Sequence
  Description of Artificial Sequence: Synthetic oligonucleotide
gucaguaucagcaucugac

SEQ ID NO: 1452280 - RNA, 19 nt, Artificial Sequence
  Description of Artificial Sequence: Synthetic oligonucleotide
uaguaauuauagacuguca

SEQ ID NO: 1452281 - RNA, 19 nt, Artificial Sequence
  Description of Artificial Sequence: Synthetic oligonucleotide
cuuaguuuuacauagcuuu

SEQ ID NO: 1452282 - RNA, 19 nt, Artificial Sequence
  Description of Artificial Sequence: Synthetic oligonucleotide
aacuuuaggguggucaggu

SEQ ID NO: 1452283 - RNA, 19 nt, Artificial Sequence
  Description of Artificial Sequence: Synthetic oligonucleotide
ucucgaaagccucuacaug

SEQ ID NO: 1452284 - RNA, 19 nt, Artificial Sequence
  Description of Artificial Sequence: Synthetic oligonucleotide
agcacaaagucucuuaguu

SEQ ID NO: 1452285 - RNA, 19 nt, Artificial Sequence
  Description of Artificial Sequence: Synthetic oligonucleotide
aacucuagacaguauuuua

SEQ ID NO: 1452286 - RNA, 19 nt, Artificial Sequence
  Description of Artificial Sequence: Synthetic oligonucleotide
uccuguuggacaagaaacu

SEQ ID NO: 1452287 - RNA, 19 nt, Artificial Sequence
  Description of Artificial Sequence: Synthetic oligonucleotide
acauuguugauaggcuacc

SEQ ID NO: 1452288 - RNA, 19 nt, Artificial Sequence
  Description of Artificial Sequence: Synthetic oligonucleotide
aucugacuuacacguggcc

SEQ ID NO: 1452289 - RNA, 19 nt, Artificial Sequence
  Description of Artificial Sequence: Synthetic oligonucleotide
uagcauguugcuuauuuau

SEQ ID NO: 1452290 - RNA, 19 nt, Artificial Sequence
  Description of Artificial Sequence: Synthetic oligonucleotide
gaaaucgaacuaauuucag

SEQ ID NO: 1452291 - RNA, 19 nt, Artificial Sequence
  Description of Artificial Sequence: Synthetic oligonucleotide
uacauuuguacucggccaa

SEQ ID NO: 1452292 - RNA, 19 nt, Artificial Sequence
  Description of Artificial Sequence: Synthetic oligonucleotide
ucgugcugcacgcuuaucu

SEQ ID NO: 1452293 - RNA, 19 nt, Artificial Sequence
  Description of Artificial Sequence: Synthetic oligonucleotide
ugucuggguacacauagua

SEQ ID NO: 1452294 - RNA, 19 nt, Artificial Sequence
  Description of Artificial Sequence: Synthetic oligonucleotide
agguggaaugauuugucug

SEQ ID NO: 1452295 - RNA, 19 nt, Artificial Sequence
  Description of Artificial Sequence: Synthetic oligonucleotide
auggcccugaccuugaaau

SEQ ID NO: 1452296 - RNA, 19 nt, Artificial Sequence
  Description of Artificial Sequence: Synthetic oligonucleotide
ucgaucgcuguauuggugu

SEQ ID NO: 1452297 - RNA, 19 nt, Artificial Sequence
  Description of Artificial Sequence: Synthetic oligonucleotide
ugcacgcuuaucucuaucu

SEQ ID NO: 1452298 - RNA, 19 nt, Artificial Sequence
  Description of Artificial Sequence: Synthetic oligonucleotide
auaaacacgucuagcaugu

SEQ ID NO: 1452299 - RNA, 19 nt, Artificial Sequence
  Description of Artificial Sequence: Synthetic oligonucleotide
cauuaaucuuucccgggag

SEQ ID NO: 1452300 - RNA, 19 nt, Artificial Sequence
  Description of Artificial Sequence: Synthetic oligonucleotide
ucuuaguuuuacauagcuu

SEQ ID NO: 1452301 - RNA, 19 nt, Artificial Sequence
  Description of Artificial Sequence: Synthetic oligonucleotide
ugagcgagucgcucgauga

SEQ ID NO: 1452302 - RNA, 19 nt, Artificial Sequence
  Description of Artificial Sequence: Synthetic oligonucleotide
aagcacaaagucucuuagu

SEQ ID NO: 1452303 - RNA, 19 nt, Artificial Sequence
  Description of Artificial Sequence: Synthetic oligonucleotide
gcuaccagcaauauaguag

SEQ ID NO: 1452304 - RNA, 19 nt, Artificial Sequence
  Description of Artificial Sequence: Synthetic oligonucleotide
cuuauaagggcuaauuagu

SEQ ID NO: 1452305 - RNA, 19 nt, Artificial Sequence
  Description of Artificial Sequence: Synthetic oligonucleotide
auggguauacucaggaaag

SEQ ID NO: 1452306 - RNA, 19 nt, Artificial Sequence
  Description of Artificial Sequence: Synthetic oligonucleotide
uggauggaucuucagcugu

SEQ ID NO: 1452307 - RNA, 19 nt, Artificial Sequence
  Description of Artificial Sequence: Synthetic oligonucleotide
aaucucucaaaaggaauau

SEQ ID NO: 1452308 - RNA, 19 nt, Artificial Sequence
  Description of Artificial Sequence: Synthetic oligonucleotide
uccauccuuauuauacuuc

SEQ ID NO: 1452309 - RNA, 19 nt, Artificial Sequence
  Description of Artificial Sequence: Synthetic oligonucleotide
gguguuacauuuguacucg

SEQ ID NO: 1452310 - RNA, 19 nt, Artificial Sequence
  Description of Artificial Sequence: Synthetic oligonucleotide
uuuccgagcugugagggcc

SEQ ID NO: 1452311 - RNA, 19 nt, Artificial Sequence
  Description of Artificial Sequence: Synthetic oligonucleotide
auuaaucuuucccgggaga

SEQ ID NO: 1452312 - RNA, 19 nt, Artificial Sequence
  Description of Artificial Sequence: Synthetic oligonucleotide
aagagcguagcuccauccu

SEQ ID NO: 1452313 - RNA, 19 nt, Artificial Sequence
  Description of Artificial Sequence: Synthetic oligonucleotide
auucucgaaagccucuaca

SEQ ID NO: 1452314 - RNA, 19 nt, Artificial Sequence
  Description of Artificial Sequence: Synthetic oligonucleotide
uauauuccaccagaaauuu

SEQ ID NO: 1452315 - RNA, 19 nt, Artificial Sequence
  Description of Artificial Sequence: Synthetic oligonucleotide
uucaggaaaucgaacuaau

SEQ ID NO: 1452316 - RNA, 19 nt, Artificial Sequence
  Description of Artificial Sequence: Synthetic oligonucleotide
uuaaucuuucccgggagaa

SEQ ID NO: 1452317 - RNA, 19 nt, Artificial Sequence
  Description of Artificial Sequence: Synthetic oligonucleotide
gcaucugacuuacacgugg

SEQ ID NO: 1452318 - RNA, 19 nt, Artificial Sequence
  Description of Artificial Sequence: Synthetic oligonucleotide
aauauuccacuaaggagaa

SEQ ID NO: 1452319 - RNA, 19 nt, Artificial Sequence
  Description of Artificial Sequence: Synthetic oligonucleotide
uaucuaugaacuguuucaa

SEQ ID NO: 1452320 - RNA, 19 nt, Artificial Sequence
  Description of Artificial Sequence: Synthetic oligonucleotide
guagccuacggucgcaaag

SEQ ID NO: 1452321 - RNA, 19 nt, Artificial Sequence
  Description of Artificial Sequence: Synthetic oligonucleotide
gcauauucaacacggaaca

SEQ ID NO: 1452322 - RNA, 19 nt, Artificial Sequence
  Description of Artificial Sequence: Synthetic oligonucleotide
cuaaggagaacaauagaua

SEQ ID NO: 1452323 - RNA, 19 nt, Artificial Sequence
  Description of Artificial Sequence: Synthetic oligonucleotide
gaugacacgccgguagucc

SEQ ID NO: 1452324 - RNA, 19 nt, Artificial Sequence
  Description of Artificial Sequence: Synthetic oligonucleotide
acgucuagcauguugcuua

SEQ ID NO: 1452325 - RNA, 19 nt, Artificial Sequence
  Description of Artificial Sequence: Synthetic oligonucleotide
ucuuucccgggagaaacag

SEQ ID NO: 1452326 - RNA, 19 nt, Artificial Sequence
  Description of Artificial Sequence: Synthetic oligonucleotide
uucgaucgcuguauuggug

SEQ ID NO: 1452327 - RNA, 19 nt, Artificial Sequence
  Description of Artificial Sequence: Synthetic oligonucleotide
caacacggaacauuguuga

SEQ ID NO: 1452328 - RNA, 19 nt, Artificial Sequence
  Description of Artificial Sequence: Synthetic oligonucleotide
uucucaagaucuucaggaa

SEQ ID NO: 1452329 - RNA, 19 nt, Artificial Sequence
  Description of Artificial Sequence: Synthetic oligonucleotide
cacucuuauauuccaccag

SEQ ID NO: 1452330 - RNA, 19 nt, Artificial Sequence
  Description of Artificial Sequence: Synthetic oligonucleotide
gaaacugaguauguaugga

SEQ ID NO: 1452331 - RNA, 19 nt, Artificial Sequence
  Description of Artificial Sequence: Synthetic oligonucleotide
acgccgguaguccuccacc

SEQ ID NO: 1452332 - RNA, 19 nt, Artificial Sequence
  Description of Artificial Sequence: Synthetic oligonucleotide
gaacauuguugauaggcua

SEQ ID NO: 1452333 - RNA, 19 nt, Artificial Sequence
  Description of Artificial Sequence: Synthetic oligonucleotide
agucucuuaguuuuacaua

SEQ ID NO: 1452334 - RNA, 19 nt, Artificial Sequence
  Description of Artificial Sequence: Synthetic oligonucleotide
ucuuggcaagaucucucug

SEQ ID NO: 1452335 - RNA, 19 nt, Artificial Sequence
  Description of Artificial Sequence: Synthetic oligonucleotide
guagugccaucuuucauca

SEQ ID NO: 1452336 - RNA, 19 nt, Artificial Sequence
  Description of Artificial Sequence: Synthetic oligonucleotide
uauucucgaaagccucuac

SEQ ID NO: 1452337 - RNA, 19 nt, Artificial Sequence
  Description of Artificial Sequence: Synthetic oligonucleotide
aaguagugccaucuuucau

SEQ ID NO: 1452338 - RNA, 19 nt, Artificial Sequence
  Description of Artificial Sequence: Synthetic oligonucleotide
aaaucuugacaaagcuuca

SEQ ID NO: 1452339 - RNA, 19 nt, Artificial Sequence
  Description of Artificial Sequence: Synthetic oligonucleotide
uaaagcuagcaguuucaau

SEQ ID NO: 1452340 - RNA, 19 nt, Artificial Sequence
  Description of Artificial Sequence: Synthetic oligonucleotide
uacuagaaaguagugccau

SEQ ID NO: 1452341 - RNA, 19 nt, Artificial Sequence
  Description of Artificial Sequence: Synthetic oligonucleotide
cuguugugcuuguauugcc

SEQ ID NO: 1452342 - RNA, 19 nt, Artificial Sequence
  Description of Artificial Sequence: Synthetic oligonucleotide
ggucugaagccuuucauga

SEQ ID NO: 1452343 - RNA, 19 nt, Artificial Sequence
  Description of Artificial Sequence: Synthetic oligonucleotide
uucaguucgaucgcuguau

SEQ ID NO: 1452344 - RNA, 19 nt, Artificial Sequence
  Description of Artificial Sequence: Synthetic oligonucleotide
caaucucucaaaaggaaua

SEQ ID NO: 1452345 - RNA, 19 nt, Artificial Sequence
  Description of Artificial Sequence: Synthetic oligonucleotide
gagucgcucgaugacacgc

SEQ ID NO: 1452346 - RNA, 19 nt, Artificial Sequence
  Description of Artificial Sequence: Synthetic oligonucleotide
ccacuaaggagaacaauag

SEQ ID NO: 1452347 - RNA, 19 nt, Artificial Sequence
  Description of Artificial Sequence: Synthetic oligonucleotide
ucaacuuuagaugcauauu

SEQ ID NO: 1452348 - RNA, 19 nt, Artificial Sequence
  Description of Artificial Sequence: Synthetic oligonucleotide
cucgaaagccucuacaugu

SEQ ID NO: 1452349 - RNA, 19 nt, Artificial Sequence
  Description of Artificial Sequence: Synthetic oligonucleotide
ucggccaauuucuucucca

SEQ ID NO: 1452350 - RNA, 19 nt, Artificial Sequence
  Description of Artificial Sequence: Synthetic oligonucleotide
cuuucccgggagaaacagg

SEQ ID NO: 1452351 - RNA, 19 nt, Artificial Sequence
  Description of Artificial Sequence: Synthetic oligonucleotide
cagcuguuauaucaagaac

SEQ ID NO: 1452352 - RNA, 19 nt, Artificial Sequence
  Description of Artificial Sequence: Synthetic oligonucleotide
aucauuuguguuugugcaa

SEQ ID NO: 1452353 - RNA, 19 nt, Artificial Sequence
  Description of Artificial Sequence: Synthetic oligonucleotide
aacacggaacauuguugau

SEQ ID NO: 1452354 - RNA, 19 nt, Artificial Sequence
  Description of Artificial Sequence: Synthetic oligonucleotide
ucagaccuuuguaaccaaa

SEQ ID NO: 1452355 - RNA, 19 nt, Artificial Sequence
  Description of Artificial Sequence: Synthetic oligonucleotide
uauugguguuacauuugua

SEQ ID NO: 1452356 - RNA, 19 nt, Artificial Sequence
  Description of Artificial Sequence: Synthetic oligonucleotide
ugcaaaacccagguggaau

SEQ ID NO: 1452357 - RNA, 19 nt, Artificial Sequence
  Description of Artificial Sequence: Synthetic oligonucleotide
ucgaaagccucuacauguc

SEQ ID NO: 1452358 - RNA, 19 nt, Artificial Sequence
  Description of Artificial Sequence: Synthetic oligonucleotide
cugauggguauacucagga

SEQ ID NO: 1452359 - RNA, 19 nt, Artificial Sequence
  Description of Artificial Sequence: Synthetic oligonucleotide
uuuugucuggguacacaua

SEQ ID NO: 1452360 - RNA, 19 nt, Artificial Sequence
  Description of Artificial Sequence: Synthetic oligonucleotide
cuguuggacaagaaacuga

SEQ ID NO: 1452361 - RNA, 19 nt, Artificial Sequence
  Description of Artificial Sequence: Synthetic oligonucleotide
cuccugagcgagucgcucg

SEQ ID NO: 1452362 - RNA, 19 nt, Artificial Sequence
  Description of Artificial Sequence: Synthetic oligonucleotide
uuaccagcagucgaagaau

SEQ ID NO: 1452363 - RNA, 19 nt, Artificial Sequence
  Description of Artificial Sequence: Synthetic oligonucleotide
ugacuuacacguggccggg

SEQ ID NO: 1452364 - RNA, 19 nt, Artificial Sequence
  Description of Artificial Sequence: Synthetic oligonucleotide
acucuagacaguauuuuaa

SEQ ID NO: 1452365 - RNA, 19 nt, Artificial Sequence
  Description of Artificial Sequence: Synthetic oligonucleotide
agucaguaucagcaucuga

SEQ ID NO: 1452366 - RNA, 19 nt, Artificial Sequence
  Description of Artificial Sequence: Synthetic oligonucleotide
guguuacauuuguacucgg

SEQ ID NO: 1452367 - RNA, 19 nt, Artificial Sequence
  Description of Artificial Sequence: Synthetic oligonucleotide
aagggcuaauuagucuucu

SEQ ID NO: 1452368 - RNA, 19 nt, Artificial Sequence
  Description of Artificial Sequence: Synthetic oligonucleotide
uagccuacggucgcaaaga

SEQ ID NO: 1452369 - RNA, 19 nt, Artificial Sequence
  Description of Artificial Sequence: Synthetic oligonucleotide
cacaaagucucuuaguuuu

SEQ ID NO: 1452370 - RNA, 19 nt, Artificial Sequence
  Description of Artificial Sequence: Synthetic oligonucleotide
caagaaacugaguauguau

SEQ ID NO: 1452371 - RNA, 19 nt, Artificial Sequence
  Description of Artificial Sequence: Synthetic oligonucleotide
acaaagcuucacaagcaca

SEQ ID NO: 1452372 - RNA, 19 nt, Artificial Sequence
  Description of Artificial Sequence: Synthetic oligonucleotide
cagcaucugacuuacacgu

SEQ ID NO: 1452373 - RNA, 19 nt, Artificial Sequence
  Description of Artificial Sequence: Synthetic oligonucleotide
gaauccuugcauuaaucuu

SEQ ID NO: 1452374 - RNA, 19 nt, Artificial Sequence
  Description of Artificial Sequence: Synthetic oligonucleotide
uuuuaauguccagucugua

SEQ ID NO: 1452375 - RNA, 19 nt, Artificial Sequence
  Description of Artificial Sequence: Synthetic oligonucleotide
uagauaacuuuaggguggu

SEQ ID NO: 1452376 - RNA, 19 nt, Artificial Sequence
  Description of Artificial Sequence: Synthetic oligonucleotide
gucgcaaagagcguagcuc

SEQ ID NO: 1452377 - RNA, 19 nt, Artificial Sequence
  Description of Artificial Sequence: Synthetic oligonucleotide
agucgcucgaugacacgcc

SEQ ID NO: 1452378 - RNA, 19 nt, Artificial Sequence
  Description of Artificial Sequence: Synthetic oligonucleotide
caggaaaucgaacuaauuu

SEQ ID NO: 1452379 - RNA, 19 nt, Artificial Sequence
  Description of Artificial Sequence: Synthetic oligonucleotide
gucgcucgaugacacgccg

SEQ ID NO: 1452380 - RNA, 19 nt, Artificial Sequence
  Description of Artificial Sequence: Synthetic oligonucleotide
ggcccugaccuugaaaugg

SEQ ID NO: 1452381 - RNA, 19 nt, Artificial Sequence
  Description of Artificial Sequence: Synthetic oligonucleotide
cuuuuaauguccagucugu

SEQ ID NO: 1452382 - RNA, 19 nt, Artificial Sequence
  Description of Artificial Sequence: Synthetic oligonucleotide
uugucuggguacacauagu

SEQ ID NO: 1452383 - RNA, 19 nt, Artificial Sequence
  Description of Artificial Sequence: Synthetic oligonucleotide
guauugguguuacauuugu

SEQ ID NO: 1452384 - RNA, 19 nt, Artificial Sequence
  Description of Artificial Sequence: Synthetic oligonucleotide
auaaagcuagcaguuucaa

SEQ ID NO: 1452385 - RNA, 19 nt, Artificial Sequence
  Description of Artificial Sequence: Synthetic oligonucleotide
acgcuuaucucuaucuggu

SEQ ID NO: 1452386 - RNA, 19 nt, Artificial Sequence
  Description of Artificial Sequence: Synthetic oligonucleotide
auccacgucaauaaagcua

SEQ ID NO: 1452387 - RNA, 19 nt, Artificial Sequence
  Description of Artificial Sequence: Synthetic oligonucleotide
uaguaucuaugaacuguuu

SEQ ID NO: 1452388 - RNA, 19 nt, Artificial Sequence
  Description of Artificial Sequence: Synthetic oligonucleotide
cacuaaggagaacaauaga

SEQ ID NO: 1452389 - RNA, 19 nt, Artificial Sequence
  Description of Artificial Sequence: Synthetic oligonucleotide
agccuacggucgcaaagag

SEQ ID NO: 1452390 - RNA, 19 nt, Artificial Sequence
  Description of Artificial Sequence: Synthetic oligonucleotide
gagcaggaucuucagaccu

SEQ ID NO: 1452391 - RNA, 19 nt, Artificial Sequence
  Description of Artificial Sequence: Synthetic oligonucleotide
cagaccuuuguaaccaaaa

SEQ ID NO: 1452392 - RNA, 19 nt, Artificial Sequence
  Description of Artificial Sequence: Synthetic oligonucleotide
cucuuauauuccaccagaa

SEQ ID NO: 1452393 - RNA, 19 nt, Artificial Sequence
  Description of Artificial Sequence: Synthetic oligonucleotide
augacacgccgguaguccu

SEQ ID NO: 1452394 - RNA, 19 nt, Artificial Sequence
  Description of Artificial Sequence: Synthetic oligonucleotide
uucccgggagaaacagggc

SEQ ID NO: 1452395 - RNA, 19 nt, Artificial Sequence
  Description of Artificial Sequence: Synthetic oligonucleotide
uaaucuuucccgggagaaa

SEQ ID NO: 1452396 - RNA, 19 nt, Artificial Sequence
  Description of Artificial Sequence: Synthetic oligonucleotide
caaagagcguagcuccauc

SEQ ID NO: 1452397 - RNA, 19 nt, Artificial Sequence
  Description of Artificial Sequence: Synthetic oligonucleotide
auaggcuaccagcaauaua

SEQ ID NO: 1452398 - RNA, 19 nt, Artificial Sequence
  Description of Artificial Sequence: Synthetic oligonucleotide
agagcguagcuccauccuu

SEQ ID NO: 1452399 - RNA, 19 nt, Artificial Sequence
  Description of Artificial Sequence: Synthetic oligonucleotide
uggcccugaccuugaaaug

SEQ ID NO: 1452400 - RNA, 19 nt, Artificial Sequence
  Description of Artificial Sequence: Synthetic oligonucleotide
caguucgaucgcuguauug

SEQ ID NO: 1452401 - RNA, 19 nt, Artificial Sequence
  Description of Artificial Sequence: Synthetic oligonucleotide
acacggaacauuguugaua

SEQ ID NO: 1452402 - RNA, 19 nt, Artificial Sequence
  Description of Artificial Sequence: Synthetic oligonucleotide
uuccgagcugugagggccc

SEQ ID NO: 1452403 - RNA, 19 nt, Artificial Sequence
  Description of Artificial Sequence: Synthetic oligonucleotide
gcauuaaucuuucccggga

SEQ ID NO: 1452404 - RNA, 19 nt, Artificial Sequence
  Description of Artificial Sequence: Synthetic oligonucleotide
gcgcucuucuagcagcucg

SEQ ID NO: 1452405 - RNA, 19 nt, Artificial Sequence
  Description of Artificial Sequence: Synthetic oligonucleotide
acggaacauuguugauagg

SEQ ID NO: 1452406 - RNA, 19 nt, Artificial Sequence
  Description of Artificial Sequence: Synthetic oligonucleotide
cuacaugucaugucagccu

SEQ ID NO: 1452407 - RNA, 19 nt, Artificial Sequence
  Description of Artificial Sequence: Synthetic oligonucleotide
gauauucucgaaagccucu

SEQ ID NO: 1452408 - RNA, 19 nt, Artificial Sequence
  Description of Artificial Sequence: Synthetic oligonucleotide
acacgucuagcauguugcu

SEQ ID NO: 1452409 - RNA, 19 nt, Artificial Sequence
  Description of Artificial Sequence: Synthetic oligonucleotide
uacggucgcaaagagcgua

SEQ ID NO: 1452410 - RNA, 19 nt, Artificial Sequence
  Description of Artificial Sequence: Synthetic oligonucleotide
acuuacacguggccggguu

SEQ ID NO: 1452411 - RNA, 19 nt, Artificial Sequence
  Description of Artificial Sequence: Synthetic oligonucleotide
gagcgagucgcucgaugac

SEQ ID NO: 1452412 - RNA, 19 nt, Artificial Sequence
  Description of Artificial Sequence: Synthetic oligonucleotide
caucuuucaucauccacgu

SEQ ID NO: 1452413 - RNA, 19 nt, Artificial Sequence
  Description of Artificial Sequence: Synthetic oligonucleotide
uguagccuacggucgcaaa

SEQ ID NO: 1452414 - RNA, 19 nt, Artificial Sequence
  Description of Artificial Sequence: Synthetic oligonucleotide
agcuagcaguuucaauaaa

SEQ ID NO: 1452415 - RNA, 19 nt, Artificial Sequence
  Description of Artificial Sequence: Synthetic oligonucleotide
gacugucauguagccuacg

SEQ ID NO: 1452416 - RNA, 19 nt, Artificial Sequence
  Description of Artificial Sequence: Synthetic oligonucleotide
acguggccggguuuugucu

SEQ ID NO: 1452417 - RNA, 19 nt, Artificial Sequence
  Description of Artificial Sequence: Synthetic oligonucleotide
cuccacugcacucuuauau

SEQ ID NO: 1452418 - RNA, 19 nt, Artificial Sequence
  Description of Artificial Sequence: Synthetic oligonucleotide
agcgagucgcucgaugaca

SEQ ID NO: 1452419 - RNA, 19 nt, Artificial Sequence
  Description of Artificial Sequence: Synthetic oligonucleotide
cugagcgagucgcucgaug

SEQ ID NO: 1452420 - RNA, 19 nt, Artificial Sequence
  Description of Artificial Sequence: Synthetic oligonucleotide
gucagccuuauagaucuga

SEQ ID NO: 1452421 - RNA, 19 nt, Artificial Sequence
  Description of Artificial Sequence: Synthetic oligonucleotide
ugacacgccgguaguccuc

SEQ ID NO: 1452422 - RNA, 19 nt, Artificial Sequence
  Description of Artificial Sequence: Synthetic oligonucleotide
uuacacguggccggguuuu

SEQ ID NO: 1452423 - RNA, 19 nt, Artificial Sequence
  Description of Artificial Sequence: Synthetic oligonucleotide
auauucucgaaagccucua

SEQ ID NO: 1452424 - RNA, 19 nt, Artificial Sequence
  Description of Artificial Sequence: Synthetic oligonucleotide
cauugaauccuugcauuaa

SEQ ID NO: 1452425 - RNA, 19 nt, Artificial Sequence
  Description of Artificial Sequence: Synthetic oligonucleotide
ugucagccuuauagaucug

SEQ ID NO: 1452426 - RNA, 19 nt, Artificial Sequence
  Description of Artificial Sequence: Synthetic oligonucleotide
agaugcaauguaguaucua

SEQ ID NO: 1452427 - RNA, 19 nt, Artificial Sequence
  Description of Artificial Sequence: Synthetic oligonucleotide
aagcgcucuucuagcagcu

SEQ ID NO: 1452428 - RNA, 19 nt, Artificial Sequence
  Description of Artificial Sequence: Synthetic oligonucleotide
gcugauggguauacucagg

SEQ ID NO: 1452429 - RNA, 19 nt, Artificial Sequence
  Description of Artificial Sequence: Synthetic oligonucleotide
ccuguuggacaagaaacug

SEQ ID NO: 1452430 - RNA, 19 nt, Artificial Sequence
  Description of Artificial Sequence: Synthetic oligonucleotide
gcacgcuuaucucuaucug

SEQ ID NO: 1452431 - RNA, 19 nt, Artificial Sequence
  Description of Artificial Sequence: Synthetic oligonucleotide
cacguggccggguuuuguc

SEQ ID NO: 1452432 - RNA, 19 nt, Artificial Sequence
  Description of Artificial Sequence: Synthetic oligonucleotide
ccagguggaaugauuuguc

SEQ ID NO: 1452433 - RNA, 19 nt, Artificial Sequence
  Description of Artificial Sequence: Synthetic oligonucleotide
ccggguuuugucuggguac

SEQ ID NO: 1452434 - RNA, 19 nt, Artificial Sequence
  Description of Artificial Sequence: Synthetic oligonucleotide
agcguagcuccauccuuau

SEQ ID NO: 1452435 - RNA, 19 nt, Artificial Sequence
  Description of Artificial Sequence: Synthetic oligonucleotide
cauuguugauaggcuacca

SEQ ID NO: 1452436 - RNA, 19 nt, Artificial Sequence
  Description of Artificial Sequence: Synthetic oligonucleotide
gguacacauaguaauuaua

SEQ ID NO: 1452437 - RNA, 19 nt, Artificial Sequence
  Description of Artificial Sequence: Synthetic oligonucleotide
agggcuaauuagucuucuu

SEQ ID NO: 1452438 - RNA, 19 nt, Artificial Sequence
  Description of Artificial Sequence: Synthetic oligonucleotide
guucgaucgcuguauuggu

SEQ ID NO: 1452439 - RNA, 19 nt, Artificial Sequence
  Description of Artificial Sequence: Synthetic oligonucleotide
ucuccacugcacucuuaua

SEQ ID NO: 1452440 - RNA, 19 nt, Artificial Sequence
  Description of Artificial Sequence: Synthetic oligonucleotide
caggaucuucagaccuuug

SEQ ID NO: 1452441 - RNA, 19 nt, Artificial Sequence
  Description of Artificial Sequence: Synthetic oligonucleotide
ugagcaccauggcccugac

SEQ ID NO: 1452442 - RNA, 19 nt, Artificial Sequence
  Description of Artificial Sequence: Synthetic oligonucleotide
acauuuguacucggccaau

SEQ ID NO: 1452443 - RNA, 19 nt, Artificial Sequence
  Description of Artificial Sequence: Synthetic oligonucleotide
ccuuauagaucugaaaagu

SEQ ID NO: 1452444 - RNA, 19 nt, Artificial Sequence
  Description of Artificial Sequence: Synthetic oligonucleotide
uagcuuuuggauggaucuu

SEQ ID NO: 1452445 - RNA, 19 nt, Artificial Sequence
  Description of Artificial Sequence: Synthetic oligonucleotide
cauccacgucaauaaagcu

SEQ ID NO: 1452446 - RNA, 19 nt, Artificial Sequence
  Description of Artificial Sequence: Synthetic oligonucleotide
ggguauacucaggaaagaa

SEQ ID NO: 1452447 - RNA, 19 nt, Artificial Sequence
  Description of Artificial Sequence: Synthetic oligonucleotide
cugcacgcuuaucucuauc

SEQ ID NO: 1452448 - RNA, 19 nt, Artificial Sequence
  Description of Artificial Sequence: Synthetic oligonucleotide
gcauguugcuuauuuauuu

SEQ ID NO: 1452449 - RNA, 19 nt, Artificial Sequence
  Description of Artificial Sequence: Synthetic oligonucleotide
gagcguagcuccauccuua

SEQ ID NO: 1452450 - RNA, 19 nt, Artificial Sequence
  Description of Artificial Sequence: Synthetic oligonucleotide
cgucaauaaagcuagcagu

SEQ ID NO: 1452451 - RNA, 19 nt, Artificial Sequence
  Description of Artificial Sequence: Synthetic oligonucleotide
cagguggaaugauuugucu

SEQ ID NO: 1452452 - RNA, 19 nt, Artificial Sequence
  Description of Artificial Sequence: Synthetic oligonucleotide
gauaggcuaccagcaauau

SEQ ID NO: 1452453 - RNA, 19 nt, Artificial Sequence
  Description of Artificial Sequence: Synthetic oligonucleotide
cacgccgguaguccuccac

SEQ ID NO: 1452454 - RNA, 19 nt, Artificial Sequence
  Description of Artificial Sequence: Synthetic oligonucleotide
caauauaguagagcaggau

SEQ ID NO: 1452455 - RNA, 19 nt, Artificial Sequence
  Description of Artificial Sequence: Synthetic oligonucleotide
gcagucgaagaauuucaua

SEQ ID NO: 1452456 - RNA, 19 nt, Artificial Sequence
  Description of Artificial Sequence: Synthetic oligonucleotide
guaggguuccaaauggcuu

SEQ ID NO: 1452457 - RNA, 19 nt, Artificial Sequence
  Description of Artificial Sequence: Synthetic oligonucleotide
gaucgcuguauugguguua

SEQ ID NO: 1452458 - RNA, 19 nt, Artificial Sequence
  Description of Artificial Sequence: Synthetic oligonucleotide
ucgcuguauugguguuaca

SEQ ID NO: 1452459 - RNA, 19 nt, Artificial Sequence
  Description of Artificial Sequence: Synthetic oligonucleotide
ccgguaguccuccaccaac

SEQ ID NO: 1452460 - RNA, 19 nt, Artificial Sequence
  Description of Artificial Sequence: Synthetic oligonucleotide
gugcugcacgcuuaucucu

SEQ ID NO: 1452461 - RNA, 19 nt, Artificial Sequence
  Description of Artificial Sequence: Synthetic oligonucleotide
cagggcaaaucuugacaaa

SEQ ID NO: 1452462 - RNA, 19 nt, Artificial Sequence
  Description of Artificial Sequence: Synthetic oligonucleotide
aggcuaccagcaauauagu

SEQ ID NO: 1452463 - RNA, 19 nt, Artificial Sequence
  Description of Artificial Sequence: Synthetic oligonucleotide
gggcccgcggcugaggaag

SEQ ID NO: 1452464 - RNA, 19 nt, Artificial Sequence
  Description of Artificial Sequence: Synthetic oligonucleotide
gcaucacucaugucaguua

SEQ ID NO: 1452465 - RNA, 19 nt, Artificial Sequence
  Description of Artificial Sequence: Synthetic oligonucleotide
ggguacacauaguaauuau

SEQ ID NO: 1452466 - RNA, 19 nt, Artificial Sequence
  Description of Artificial Sequence: Synthetic oligonucleotide
cauguagccuacggucgca

SEQ ID NO: 1452467 - RNA, 19 nt, Artificial Sequence
  Description of Artificial Sequence: Synthetic oligonucleotide
augucaugucagccuuaua

SEQ ID NO: 1452468 - RNA, 19 nt, Artificial Sequence
  Description of Artificial Sequence: Synthetic oligonucleotide
cgugcugcacgcuuaucuc

SEQ ID NO: 1452469 - RNA, 19 nt, Artificial Sequence
  Description of Artificial Sequence: Synthetic oligonucleotide
acacguggccggguuuugu

SEQ ID NO: 1452470 - RNA, 19 nt, Artificial Sequence
  Description of Artificial Sequence: Synthetic oligonucleotide
uaaacacgucuagcauguu

SEQ ID NO: 1452471 - RNA, 19 nt, Artificial Sequence
  Description of Artificial Sequence: Synthetic oligonucleotide
gcgagucgcucgaugacac

SEQ ID NO: 1452472 - RNA, 19 nt, Artificial Sequence
  Description of Artificial Sequence: Synthetic oligonucleotide
ggucgcaaagagcguagcu

SEQ ID NO: 1452473 - RNA, 19 nt, Artificial Sequence
  Description of Artificial Sequence: Synthetic oligonucleotide
gccuacggucgcaaagagc

SEQ ID NO: 1452474 - RNA, 19 nt, Artificial Sequence
  Description of Artificial Sequence: Synthetic oligonucleotide
caugucaugucagccuuau

SEQ ID NO: 1452475 - RNA, 19 nt, Artificial Sequence
  Description of Artificial Sequence: Synthetic oligonucleotide
cauauucaacacggaacau

SEQ ID NO: 1452476 - RNA, 19 nt, Artificial Sequence
  Description of Artificial Sequence: Synthetic oligonucleotide
gccggguuuugucugggua

SEQ ID NO: 1452477 - RNA, 19 nt, Artificial Sequence
  Description of Artificial Sequence: Synthetic oligonucleotide
ccacgucaauaaagcuagc

SEQ ID NO: 1452478 - RNA, 19 nt, Artificial Sequence
  Description of Artificial Sequence: Synthetic oligonucleotide
ccagccauuuccgagcugu

SEQ ID NO: 1452479 - RNA, 19 nt, Artificial Sequence
  Description of Artificial Sequence: Synthetic oligonucleotide
cuuacacguggccggguuu

SEQ ID NO: 1452480 - RNA, 19 nt, Artificial Sequence
  Description of Artificial Sequence: Synthetic oligonucleotide
cccgggagaaacagggcaa

SEQ ID NO: 1452481 - RNA, 19 nt, Artificial Sequence
  Description of Artificial Sequence: Synthetic oligonucleotide
cgagucgcucgaugacacg

SEQ ID NO: 1452482 - RNA, 19 nt, Artificial Sequence
  Description of Artificial Sequence: Synthetic oligonucleotide
cuacggucgcaaagagcgu

SEQ ID NO: 1452483 - RNA, 19 nt, Artificial Sequence
  Description of Artificial Sequence: Synthetic oligonucleotide
cucgugcugcacgcuuauc

SEQ ID NO: 1452484 - RNA, 19 nt, Artificial Sequence
  Description of Artificial Sequence: Synthetic oligonucleotide
ggagaacaauagauaacuu

SEQ ID NO: 1452485 - RNA, 19 nt, Artificial Sequence
  Description of Artificial Sequence: Synthetic oligonucleotide
acacgccgguaguccucca

SEQ ID NO: 1452486 - RNA, 19 nt, Artificial Sequence
  Description of Artificial Sequence: Synthetic oligonucleotide
gcccugaccuugaaaugga

SEQ ID NO: 1452487 - RNA, 19 nt, Artificial Sequence
  Description of Artificial Sequence: Synthetic oligonucleotide
gacuuacacguggccgggu

SEQ ID NO: 1452488 - RNA, 19 nt, Artificial Sequence
  Description of Artificial Sequence: Synthetic oligonucleotide
cacuccugagcgagucgcu

SEQ ID NO: 1452489 - RNA, 19 nt, Artificial Sequence
  Description of Artificial Sequence: Synthetic oligonucleotide
cccagguggaaugauuugu

SEQ ID NO: 1452490 - RNA, 19 nt, Artificial Sequence
  Description of Artificial Sequence: Synthetic oligonucleotide
cacgucuagcauguugcuu

SEQ ID NO: 1452491 - RNA, 19 nt, Artificial Sequence
  Description of Artificial Sequence: Synthetic oligonucleotide
cccgcggcugaggaaggac

SEQ ID NO: 1452492 - RNA, 19 nt, Artificial Sequence
  Description of Artificial Sequence: Synthetic oligonucleotide
ggcccgcggcugaggaagg

SEQ ID NO: 1452493 - RNA, 19 nt, Artificial Sequence
  Description of Artificial Sequence: Synthetic oligonucleotide
cgcuguauugguguuacau

SEQ ID NO: 1452494 - RNA, 19 nt, Artificial Sequence
  Description of Artificial Sequence: Synthetic oligonucleotide
gcugcacgcuuaucucuau

SEQ ID NO: 1452495 - RNA, 19 nt, Artificial Sequence
  Description of Artificial Sequence: Synthetic oligonucleotide
cgcucgaugacacgccggu

SEQ ID NO: 1452496 - RNA, 19 nt, Artificial Sequence
  Description of Artificial Sequence: Synthetic oligonucleotide
gucuagcauguugcuuauu

SEQ ID NO: 1452497 - RNA, 19 nt, Artificial Sequence
  Description of Artificial Sequence: Synthetic oligonucleotide
cgucuagcauguugcuuau

SEQ ID NO: 1452498 - RNA, 19 nt, Artificial Sequence
  Description of Artificial Sequence: Synthetic oligonucleotide
gcccgcggcugaggaagga

SEQ ID NO: 1452499 - RNA, 19 nt, Artificial Sequence
  Description of Artificial Sequence: Synthetic oligonucleotide
cgcuuaucucuaucugguu

SEQ ID NO: 1452500 - RNA, 19 nt, Artificial Sequence
  Description of Artificial Sequence: Synthetic oligonucleotide
ccugagcgagucgcucgau

SEQ ID NO: 1452501 - RNA, 19 nt, Artificial Sequence
  Description of Artificial Sequence: Synthetic oligonucleotide
aauucaacagcuuuguucc

SEQ ID NO: 1452502 - RNA, 19 nt, Artificial Sequence
  Description of Artificial Sequence: Synthetic oligonucleotide
uuuacuguaaucaaacacc

SEQ ID NO: 1452503 - RNA, 19 nt, Artificial Sequence
  Description of Artificial Sequence: Synthetic oligonucleotide
uuuuaaguaauauuguaca

SEQ ID NO: 1452504 - RNA, 19 nt, Artificial Sequence
  Description of Artificial Sequence: Synthetic oligonucleotide
uauuguacagcauucagcc

SEQ ID NO: 1452505 - RNA, 19 nt, Artificial Sequence
  Description of Artificial Sequence: Synthetic oligonucleotide
uucauagucucucagauga

SEQ ID NO: 1452506 - RNA, 19 nt, Artificial Sequence
  Description of Artificial Sequence: Synthetic oligonucleotide
ugccuuuuaaguaauauug

SEQ ID NO: 1452507 - RNA, 19 nt, Artificial Sequence
  Description of Artificial Sequence: Synthetic oligonucleotide
uguauuuaggguccaaggg

SEQ ID NO: 1452508 - RNA, 19 nt, Artificial Sequence
  Description of Artificial Sequence: Synthetic oligonucleotide
uguucgaugagcaaggcug

SEQ ID NO: 1452509 - RNA, 19 nt, Artificial Sequence
  Description of Artificial Sequence: Synthetic oligonucleotide
aagugaauuggcaagauuc

SEQ ID NO: 1452510 - RNA, 19 nt, Artificial Sequence
  Description of Artificial Sequence: Synthetic oligonucleotide
aagaaggcuguucaacucc

SEQ ID NO: 1452511 - RNA, 19 nt, Artificial Sequence
  Description of Artificial Sequence: Synthetic oligonucleotide
uauaguagcauucggcuag

SEQ ID NO: 1452512 - RNA, 19 nt, Artificial Sequence
  Description of Artificial Sequence: Synthetic oligonucleotide
ugaagcugcuaucacaugg

SEQ ID NO: 1452513 - RNA, 19 nt, Artificial Sequence
  Description of Artificial Sequence: Synthetic oligonucleotide
auaaucuucuagcauauag

SEQ ID NO: 1452514 - RNA, 19 nt, Artificial Sequence
  Description of Artificial Sequence: Synthetic oligonucleotide
uuuccuauagagcucaaug

SEQ ID NO: 1452515 - RNA, 19 nt, Artificial Sequence
  Description of Artificial Sequence: Synthetic oligonucleotide
aguagaucucaacugaggg

SEQ ID NO: 1452516 - RNA, 19 nt, Artificial Sequence
  Description of Artificial Sequence: Synthetic oligonucleotide
uucaagaaugcgcucacgg

SEQ ID NO: 1452517 - RNA, 19 nt, Artificial Sequence
  Description of Artificial Sequence: Synthetic oligonucleotide
aaugcggugagcuucuuug

SEQ ID NO: 1452518 - RNA, 19 nt, Artificial Sequence
  Description of Artificial Sequence: Synthetic oligonucleotide
uuuaaguaauauuguacag

SEQ ID NO: 1452519 - RNA, 19 nt, Artificial Sequence
  Description of Artificial Sequence: Synthetic oligonucleotide
uuacacuucaagaaugcgc

SEQ ID NO: 1452520 - RNA, 19 nt, Artificial Sequence
  Description of Artificial Sequence: Synthetic oligonucleotide
aaggacagaaguuauaguu

SEQ ID NO: 1452521 - RNA, 19 nt, Artificial Sequence
  Description of Artificial Sequence: Synthetic oligonucleotide
uugucgaucggcaaaguag

SEQ ID NO: 1452522 - RNA, 19 nt, Artificial Sequence
  Description of Artificial Sequence: Synthetic oligonucleotide
uuccuauagagcucaaugg

SEQ ID NO: 1452523 - RNA, 19 nt, Artificial Sequence
  Description of Artificial Sequence: Synthetic oligonucleotide
aacgaguagaucucaacug

SEQ ID NO: 1452524 - RNA, 19 nt, Artificial Sequence
  Description of Artificial Sequence: Synthetic oligonucleotide
uacacuucaagaaugcgcu

SEQ ID NO: 1452525 - RNA, 19 nt, Artificial Sequence
  Description of Artificial Sequence: Synthetic oligonucleotide
agugucaacauaucccucg

SEQ ID NO: 1452526 - RNA, 19 nt, Artificial Sequence
  Description of Artificial Sequence: Synthetic oligonucleotide
accuagcuaacagagaucc

SEQ ID NO: 1452527 - RNA, 19 nt, Artificial Sequence
  Description of Artificial Sequence: Synthetic oligonucleotide
ugcagugucaacauauccc

SEQ ID NO: 1452528 - RNA, 19 nt, Artificial Sequence
  Description of Artificial Sequence: Synthetic oligonucleotide
aguaauauuguacagcauu

SEQ ID NO: 1452529 - RNA, 19 nt, Artificial Sequence
  Description of Artificial Sequence: Synthetic oligonucleotide
uuaauuuccaaugcgguga

SEQ ID NO: 1452530 - RNA, 19 nt, Artificial Sequence
  Description of Artificial Sequence: Synthetic oligonucleotide
ugagcaagaacguagugcu

SEQ ID NO: 1452531 - RNA, 19 nt, Artificial Sequence
  Description of Artificial Sequence: Synthetic oligonucleotide
ucaaugaucgggcuuccgg

SEQ ID NO: 1452532 - RNA, 19 nt, Artificial Sequence
  Description of Artificial Sequence: Synthetic oligonucleotide
uauuuaggguccaagggug

SEQ ID NO: 1452533 - RNA, 19 nt, Artificial Sequence
  Description of Artificial Sequence: Synthetic oligonucleotide
gauacugccagguauaaaa

SEQ ID NO: 1452534 - RNA, 19 nt, Artificial Sequence
  Description of Artificial Sequence: Synthetic oligonucleotide
auuggcaagauucucuaag

SEQ ID NO: 1452535 - RNA, 19 nt, Artificial Sequence
  Description of Artificial Sequence: Synthetic oligonucleotide
guagcauucggcuaggcgc

SEQ ID NO: 1452536 - RNA, 19 nt, Artificial Sequence
  Description of Artificial Sequence: Synthetic oligonucleotide
uccuauagagcucaauggc

SEQ ID NO: 1452537 - RNA, 19 nt, Artificial Sequence
  Description of Artificial Sequence: Synthetic oligonucleotide
aggaacaucaucaacauga

SEQ ID NO: 1452538 - RNA, 19 nt, Artificial Sequence
  Description of Artificial Sequence: Synthetic oligonucleotide
aaugugaugcauaccuagc

SEQ ID NO: 1452539 - RNA, 19 nt, Artificial Sequence
  Description of Artificial Sequence: Synthetic oligonucleotide
uguaccaauagaauugcaa

SEQ ID NO: 1452540 - RNA, 19 nt, Artificial Sequence
  Description of Artificial Sequence: Synthetic oligonucleotide
acacgcaaaggcuucgucc

SEQ ID NO: 1452541 - RNA, 19 nt, Artificial Sequence
  Description of Artificial Sequence: Synthetic oligonucleotide
uaccaauagaauugcaaag

SEQ ID NO: 1452542 - RNA, 19 nt, Artificial Sequence
  Description of Artificial Sequence: Synthetic oligonucleotide
auauuguacagcauucagc

SEQ ID NO: 1452543 - RNA, 19 nt, Artificial Sequence
  Description of Artificial Sequence: Synthetic oligonucleotide
uaacagagauccaauuucc

SEQ ID NO: 1452544 - RNA, 19 nt, Artificial Sequence
  Description of Artificial Sequence: Synthetic oligonucleotide
aguacguacagcuucuuca

SEQ ID NO: 1452545 - RNA, 19 nt, Artificial Sequence
  Description of Artificial Sequence: Synthetic oligonucleotide
auuaauuuccaaugcggug

SEQ ID NO: 1452546 - RNA, 19 nt, Artificial Sequence
  Description of Artificial Sequence: Synthetic oligonucleotide
agaauugcaaagaacuaac

SEQ ID NO: 1452547 - RNA, 19 nt, Artificial Sequence
  Description of Artificial Sequence: Synthetic oligonucleotide
uuauucuacugaacugugg

SEQ ID NO: 1452548 - RNA, 19 nt, Artificial Sequence
  Description of Artificial Sequence: Synthetic oligonucleotide
uacuguucgaugagcaagg

SEQ ID NO: 1452549 - RNA, 19 nt, Artificial Sequence
  Description of Artificial Sequence: Synthetic oligonucleotide
acuaguuguagaaagaacu

SEQ ID NO: 1452550 - RNA, 19 nt, Artificial Sequence
  Description of Artificial Sequence: Synthetic oligonucleotide
aauguauuuaggguccaag

SEQ ID NO: 1452551 - RNA, 19 nt, Artificial Sequence
  Description of Artificial Sequence: Synthetic oligonucleotide
agugguacaaggucaaugu

SEQ ID NO: 1452552 - RNA, 19 nt, Artificial Sequence
  Description of Artificial Sequence: Synthetic oligonucleotide
gucaacauaucccucguag

SEQ ID NO: 1452553 - RNA, 19 nt, Artificial Sequence
  Description of Artificial Sequence: Synthetic oligonucleotide
uuccugagcaagaacguag

SEQ ID NO: 1452554 - RNA, 19 nt, Artificial Sequence
  Description of Artificial Sequence: Synthetic oligonucleotide
uuugccacacgauacugcc

SEQ ID NO: 1452555 - RNA, 19 nt, Artificial Sequence
  Description of Artificial Sequence: Synthetic oligonucleotide
auaccuagcuaacagagau

SEQ ID NO: 1452556 - RNA, 19 nt, Artificial Sequence
  Description of Artificial Sequence: Synthetic oligonucleotide
guaccaaaagcucugcuug

SEQ ID NO: 1452557 - RNA, 19 nt, Artificial Sequence
  Description of Artificial Sequence: Synthetic oligonucleotide
ugguuacacuucaagaaug

SEQ ID NO: 1452558 - RNA, 19 nt, Artificial Sequence
  Description of Artificial Sequence: Synthetic oligonucleotide
ucccuucuuuucuugaccg

SEQ ID NO: 1452559 - RNA, 19 nt, Artificial Sequence
  Description of Artificial Sequence: Synthetic oligonucleotide
ugcaaucuuauacaucagu

SEQ ID NO: 1452560 - RNA, 19 nt, Artificial Sequence
  Description of Artificial Sequence: Synthetic oligonucleotide
ucugugcuauuucuggaag

SEQ ID NO: 1452561 - RNA, 19 nt, Artificial Sequence
  Description of Artificial Sequence: Synthetic oligonucleotide
ugcuauuucuggaagcaac

SEQ ID NO: 1452562 - RNA, 19 nt, Artificial Sequence
  Description of Artificial Sequence: Synthetic oligonucleotide
aguagcauucggcuaggcg

SEQ ID NO: 1452563 - RNA, 19 nt, Artificial Sequence
  Description of Artificial Sequence: Synthetic oligonucleotide
auaaaagcuuuugaacagg

SEQ ID NO: 1452564 - RNA, 19 nt, Artificial Sequence
  Description of Artificial Sequence: Synthetic oligonucleotide
cuagcauauaguagcauuc

SEQ ID NO: 1452565 - RNA, 19 nt, Artificial Sequence
  Description of Artificial Sequence: Synthetic oligonucleotide
agcuuuguuccauugguug

SEQ ID NO: 1452566 - RNA, 19 nt, Artificial Sequence
  Description of Artificial Sequence: Synthetic oligonucleotide
agcauauaguagcauucgg

SEQ ID NO: 1452567 - RNA, 19 nt, Artificial Sequence
  Description of Artificial Sequence: Synthetic oligonucleotide
auagcuggcuuuccuauag

SEQ ID NO: 1452568 - RNA, 19 nt, Artificial Sequence
  Description of Artificial Sequence: Synthetic oligonucleotide
uagucucucagaugaagag

SEQ ID NO: 1452569 - RNA, 19 nt, Artificial Sequence
  Description of Artificial Sequence: Synthetic oligonucleotide
ugucgaucggcaaaguagu

SEQ ID NO: 1452570 - RNA, 19 nt, Artificial Sequence
  Description of Artificial Sequence: Synthetic oligonucleotide
ucucuaaugauuccaguuu

SEQ ID NO: 1452571 - RNA, 19 nt, Artificial Sequence
  Description of Artificial Sequence: Synthetic oligonucleotide
aaaggacagaaguuauagu

SEQ ID NO: 1452572 - RNA, 19 nt, Artificial Sequence
  Description of Artificial Sequence: Synthetic oligonucleotide
uuuggucauugcaacaaac

SEQ ID NO: 1452573 - RNA, 19 nt, Artificial Sequence
  Description of Artificial Sequence: Synthetic oligonucleotide
agugcuagcaacgaguaga

SEQ ID NO: 1452574 - RNA, 19 nt, Artificial Sequence
  Description of Artificial Sequence: Synthetic oligonucleotide
aaaauagcuggcuuuccua

SEQ ID NO: 1452575 - RNA, 19 nt, Artificial Sequence
  Description of Artificial Sequence: Synthetic oligonucleotide
ugguugguuacacuucaag

SEQ ID NO: 1452576 - RNA, 19 nt, Artificial Sequence
  Description of Artificial Sequence: Synthetic oligonucleotide
uugagguguacgcaggugu

SEQ ID NO: 1452577 - RNA, 19 nt, Artificial Sequence
  Description of Artificial Sequence: Synthetic oligonucleotide
ugguacaaggucaauguau

SEQ ID NO: 1452578 - RNA, 19 nt, Artificial Sequence
  Description of Artificial Sequence: Synthetic oligonucleotide
uucaacuccgacuuccugu

SEQ ID NO: 1452579 - RNA, 19 nt, Artificial Sequence
  Description of Artificial Sequence: Synthetic oligonucleotide
agucucucagaugaagagc

SEQ ID NO: 1452580 - RNA, 19 nt, Artificial Sequence
  Description of Artificial Sequence: Synthetic oligonucleotide
ugguacucaaugaucgggc

SEQ ID NO: 1452581 - RNA, 19 nt, Artificial Sequence
  Description of Artificial Sequence: Synthetic oligonucleotide
aaugaucgggcuuccggug

SEQ ID NO: 1452582 - RNA, 19 nt, Artificial Sequence
  Description of Artificial Sequence: Synthetic oligonucleotide
uuggcaagauucucuaagc

SEQ ID NO: 1452583 - RNA, 19 nt, Artificial Sequence
  Description of Artificial Sequence: Synthetic oligonucleotide
augcauaccuagcuaacag

SEQ ID NO: 1452584 - RNA, 19 nt, Artificial Sequence
  Description of Artificial Sequence: Synthetic oligonucleotide
ugacaguacguacagcuuc

SEQ ID NO: 1452585 - RNA, 19 nt, Artificial Sequence
  Description of Artificial Sequence: Synthetic oligonucleotide
ucuagcauauaguagcauu

SEQ ID NO: 1452586 - RNA, 19 nt, Artificial Sequence
  Description of Artificial Sequence: Synthetic oligonucleotide
ucaagaaugcgcucacggc

SEQ ID NO: 1452587 - RNA, 19 nt, Artificial Sequence
  Description of Artificial Sequence: Synthetic oligonucleotide
uagcauauaguagcauucg

SEQ ID NO: 1452588 - RNA, 19 nt, Artificial Sequence
  Description of Artificial Sequence: Synthetic oligonucleotide
ugccaauucaacagcuuug

SEQ ID NO: 1452589 - RNA, 19 nt, Artificial Sequence
  Description of Artificial Sequence: Synthetic oligonucleotide
acuugugguuuucuggaag

SEQ ID NO: 1452590 - RNA, 19 nt, Artificial Sequence
  Description of Artificial Sequence: Synthetic oligonucleotide
gaagcugcuaucacauggg

SEQ ID NO: 1452591 - RNA, 19 nt, Artificial Sequence
  Description of Artificial Sequence: Synthetic oligonucleotide
ucaacauaucccucguaga

SEQ ID NO: 1452592 - RNA, 19 nt, Artificial Sequence
  Description of Artificial Sequence: Synthetic oligonucleotide
ugugcuauuucuggaagca

SEQ ID NO: 1452593 - RNA, 19 nt, Artificial Sequence
  Description of Artificial Sequence: Synthetic oligonucleotide
uguucacacauuccaacuc

SEQ ID NO: 1452594 - RNA, 19 nt, Artificial Sequence
  Description of Artificial Sequence: Synthetic oligonucleotide
aacuccgacuuccuguugu

SEQ ID NO: 1452595 - RNA, 19 nt, Artificial Sequence
  Description of Artificial Sequence: Synthetic oligonucleotide
caggcauugucugugaacc

SEQ ID NO: 1452596 - RNA, 19 nt, Artificial Sequence
  Description of Artificial Sequence: Synthetic oligonucleotide
ucugcauccccagaguacc

SEQ ID NO: 1452597 - RNA, 19 nt, Artificial Sequence
  Description of Artificial Sequence: Synthetic oligonucleotide
auuuccaaugcggugagcu

SEQ ID NO: 1452598 - RNA, 19 nt, Artificial Sequence
  Description of Artificial Sequence: Synthetic oligonucleotide
acgaguagaucucaacuga

SEQ ID NO: 1452599 - RNA, 19 nt, Artificial Sequence
  Description of Artificial Sequence: Synthetic oligonucleotide
ugaaccgacuaguuguaga

SEQ ID NO: 1452600 - RNA, 19 nt, Artificial Sequence
  Description of Artificial Sequence: Synthetic oligonucleotide
aaugcauguuggcaguuuu

SEQ ID NO: 1452601 - RNA, 19 nt, Artificial Sequence
  Description of Artificial Sequence: Synthetic oligonucleotide
ucuaaugauuccaguuuaa

SEQ ID NO: 1452602 - RNA, 19 nt, Artificial Sequence
  Description of Artificial Sequence: Synthetic oligonucleotide
ugaccgugugaucugauua

SEQ ID NO: 1452603 - RNA, 19 nt, Artificial Sequence
  Description of Artificial Sequence: Synthetic oligonucleotide
augugaugcauaccuagcu

SEQ ID NO: 1452604 - RNA, 19 nt, Artificial Sequence
  Description of Artificial Sequence: Synthetic oligonucleotide
ugcauaccuagcuaacaga

SEQ ID NO: 1452605 - RNA, 19 nt, Artificial Sequence
  Description of Artificial Sequence: Synthetic oligonucleotide
agcaagaacguagugcuug

SEQ ID NO: 1452606 - RNA, 19 nt, Artificial Sequence
  Description of Artificial Sequence: Synthetic oligonucleotide
ucuucacacgcaaaggcuu

SEQ ID NO: 1452607 - RNA, 19 nt, Artificial Sequence
  Description of Artificial Sequence: Synthetic oligonucleotide
uucuuugccacacgauacu

SEQ ID NO: 1452608 - RNA, 19 nt, Artificial Sequence
  Description of Artificial Sequence: Synthetic oligonucleotide
agauccaauuuccuucaug

SEQ ID NO: 1452609 - RNA, 19 nt, Artificial Sequence
  Description of Artificial Sequence: Synthetic oligonucleotide
uacaaggucaauguauuua

SEQ ID NO: 1452610 - RNA, 19 nt, Artificial Sequence
  Description of Artificial Sequence: Synthetic oligonucleotide
uacuguaaucaaacacccc

SEQ ID NO: 1452611 - RNA, 19 nt, Artificial Sequence
  Description of Artificial Sequence: Synthetic oligonucleotide
uccaguaagccagccaaag

SEQ ID NO: 1452612 - RNA, 19 nt, Artificial Sequence
  Description of Artificial Sequence: Synthetic oligonucleotide
ucagaugaagagcugucuu

SEQ ID NO: 1452613 - RNA, 19 nt, Artificial Sequence
  Description of Artificial Sequence: Synthetic oligonucleotide
aucaacaugauaaauccuu

SEQ ID NO: 1452614 - RNA, 19 nt, Artificial Sequence
  Description of Artificial Sequence: Synthetic oligonucleotide
cuagcaacgaguagaucuc

SEQ ID NO: 1452615 - RNA, 19 nt, Artificial Sequence
  Description of Artificial Sequence: Synthetic oligonucleotide
cuuugccacacgauacugc

SEQ ID NO: 1452616 - RNA, 19 nt, Artificial Sequence
  Description of Artificial Sequence: Synthetic oligonucleotide
aggguguaccaauagaauu

SEQ ID NO: 1452617 - RNA, 19 nt, Artificial Sequence
  Description of Artificial Sequence: Synthetic oligonucleotide
cauauaguagcauucggcu

SEQ ID NO: 1452618 - RNA, 19 nt, Artificial Sequence
  Description of Artificial Sequence: Synthetic oligonucleotide
caugauaaauccuuucucu

SEQ ID NO: 1452619 - RNA, 19 nt, Artificial Sequence
  Description of Artificial Sequence: Synthetic oligonucleotide
cugguacucaaugaucggg

SEQ ID NO: 1452620 - RNA, 19 nt, Artificial Sequence
  Description of Artificial Sequence: Synthetic oligonucleotide
uacucaaugaucgggcuuc

SEQ ID NO: 1452621 - RNA, 19 nt, Artificial Sequence
  Description of Artificial Sequence: Synthetic oligonucleotide
cucaacugagggaaugaug

SEQ ID NO: 1452622 - RNA, 19 nt, Artificial Sequence
  Description of Artificial Sequence: Synthetic oligonucleotide
ugaauggcuuuacuguaau

SEQ ID NO: 1452623 - RNA, 19 nt, Artificial Sequence
  Description of Artificial Sequence: Synthetic oligonucleotide
uuguucuucuccaguaaau

SEQ ID NO: 1452624 - RNA, 19 nt, Artificial Sequence
  Description of Artificial Sequence: Synthetic oligonucleotide
caaggguguaccaauagaa

SEQ ID NO: 1452625 - RNA, 19 nt, Artificial Sequence
  Description of Artificial Sequence: Synthetic oligonucleotide
augaucgggcuuccggugg

SEQ ID NO: 1452626 - RNA, 19 nt, Artificial Sequence
  Description of Artificial Sequence: Synthetic oligonucleotide
uuugucgaucggcaaagua

SEQ ID NO: 1452627 - RNA, 19 nt, Artificial Sequence
  Description of Artificial Sequence: Synthetic oligonucleotide
ugcggugagcuucuuugcc

SEQ ID NO: 1452628 - RNA, 19 nt, Artificial Sequence
  Description of Artificial Sequence: Synthetic oligonucleotide
cugauuccugccuuuuaag

SEQ ID NO: 1452629 - RNA, 19 nt, Artificial Sequence
  Description of Artificial Sequence: Synthetic oligonucleotide
aguaagccagccaaagcag

SEQ ID NO: 1452630 - RNA, 19 nt, Artificial Sequence
  Description of Artificial Sequence: Synthetic oligonucleotide
aauuuccaaugcggugagc

SEQ ID NO: 1452631 - RNA, 19 nt, Artificial Sequence
  Description of Artificial Sequence: Synthetic oligonucleotide
ucucagaugaagagcuguc

SEQ ID NO: 1452632 - RNA, 19 nt, Artificial Sequence
  Description of Artificial Sequence: Synthetic oligonucleotide
gaaccgacuaguuguagaa

SEQ ID NO: 1452633 - RNA, 19 nt, Artificial Sequence
  Description of Artificial Sequence: Synthetic oligonucleotide
cuuuguuccauugguugag

SEQ ID NO: 1452634 - RNA, 19 nt, Artificial Sequence
  Description of Artificial Sequence: Synthetic oligonucleotide
uguacagcauucagccacu

SEQ ID NO: 1452635 - RNA, 19 nt, Artificial Sequence
  Description of Artificial Sequence: Synthetic oligonucleotide
aauuggcaagauucucuaa

SEQ ID NO: 1452636 - RNA, 19 nt, Artificial Sequence
  Description of Artificial Sequence: Synthetic oligonucleotide
acacgauacugccagguau

SEQ ID NO: 1452637 - RNA, 19 nt, Artificial Sequence
  Description of Artificial Sequence: Synthetic oligonucleotide
guauuuaggguccaagggu

SEQ ID NO: 1452638 - RNA, 19 nt, Artificial Sequence
  Description of Artificial Sequence: Synthetic oligonucleotide
guagaucucaacugaggga

SEQ ID NO: 1452639 - RNA, 19 nt, Artificial Sequence
  Description of Artificial Sequence: Synthetic oligonucleotide
uccugagcaagaacguagu

SEQ ID NO: 1452640 - RNA, 19 nt, Artificial Sequence
  Description of Artificial Sequence: Synthetic oligonucleotide
guagagcugccgcugggcg

SEQ ID NO: 1452641 - RNA, 19 nt, Artificial Sequence
  Description of Artificial Sequence: Synthetic oligonucleotide
uagcauucggcuaggcgcu

SEQ ID NO: 1452642 - RNA, 19 nt, Artificial Sequence
  Description of Artificial Sequence: Synthetic oligonucleotide
uugcaacaaacagugguac

SEQ ID NO: 1452643 - RNA, 19 nt, Artificial Sequence
  Description of Artificial Sequence: Synthetic oligonucleotide
gacuaguuguagaaagaac

SEQ ID NO: 1452644 - RNA, 19 nt, Artificial Sequence
  Description of Artificial Sequence: Synthetic oligonucleotide
gauuaauuuccaaugcggu

SEQ ID NO: 1452645 - RNA, 19 nt, Artificial Sequence
  Description of Artificial Sequence: Synthetic oligonucleotide
guacguacagcuucuucac

SEQ ID NO: 1452646 - RNA, 19 nt, Artificial Sequence
  Description of Artificial Sequence: Synthetic oligonucleotide
guacagcuucuucacacgc

SEQ ID NO: 1452647 - RNA, 19 nt, Artificial Sequence
  Description of Artificial Sequence: Synthetic oligonucleotide
gcuagcaacgaguagaucu

SEQ ID NO: 1452648 - RNA, 19 nt, Artificial Sequence
  Description of Artificial Sequence: Synthetic oligonucleotide
auauaguagcauucggcua

SEQ ID NO: 1452649 - RNA, 19 nt, Artificial Sequence
  Description of Artificial Sequence: Synthetic oligonucleotide
gaucucaacugagggaaug

SEQ ID NO: 1452650 - RNA, 19 nt, Artificial Sequence
  Description of Artificial Sequence: Synthetic oligonucleotide
guagugcuugcacacuuug

SEQ ID NO: 1452651 - RNA, 19 nt, Artificial Sequence
  Description of Artificial Sequence: Synthetic oligonucleotide
caagaaggcuguucaacuc

SEQ ID NO: 1452652 - RNA, 19 nt, Artificial Sequence
  Description of Artificial Sequence: Synthetic oligonucleotide
ucguccuuuucuuugccuc

SEQ ID NO: 1452653 - RNA, 19 nt, Artificial Sequence
  Description of Artificial Sequence: Synthetic oligonucleotide
aauagcuggcuuuccuaua

SEQ ID NO: 1452654 - RNA, 19 nt, Artificial Sequence
  Description of Artificial Sequence: Synthetic oligonucleotide
agugaauuggcaagauucu

SEQ ID NO: 1452655 - RNA, 19 nt, Artificial Sequence
  Description of Artificial Sequence: Synthetic oligonucleotide
aagcugcuaucacaugggu

SEQ ID NO: 1452656 - RNA, 19 nt, Artificial Sequence
  Description of Artificial Sequence: Synthetic oligonucleotide
ugucugugaaccgacuagu

SEQ ID NO: 1452657 - RNA, 19 nt, Artificial Sequence
  Description of Artificial Sequence: Synthetic oligonucleotide
gguugguuacacuucaaga

SEQ ID NO: 1452658 - RNA, 19 nt, Artificial Sequence
  Description of Artificial Sequence: Synthetic oligonucleotide
gcauaccuagcuaacagag

SEQ ID NO: 1452659 - RNA, 19 nt, Artificial Sequence
  Description of Artificial Sequence: Synthetic oligonucleotide
gaauugcaaagaacuaaca

SEQ ID NO: 1452660 - RNA, 19 nt, Artificial Sequence
  Description of Artificial Sequence: Synthetic oligonucleotide
gaugcauaccuagcuaaca

SEQ ID NO: 1452661 - RNA, 19 nt, Artificial Sequence
  Description of Artificial Sequence: Synthetic oligonucleotide
uacgcagguguccaccgcu

SEQ ID NO: 1452662 - RNA, 19 nt, Artificial Sequence
  Description of Artificial Sequence: Synthetic oligonucleotide
gugaugcauaccuagcuaa

SEQ ID NO: 1452663 - RNA, 19 nt, Artificial Sequence
  Description of Artificial Sequence: Synthetic oligonucleotide
uucacacgcaaaggcuucg

SEQ ID NO: 1452664 - RNA, 19 nt, Artificial Sequence
  Description of Artificial Sequence: Synthetic oligonucleotide
gcauauaguagcauucggc

SEQ ID NO: 1452665 - RNA, 19 nt, Artificial Sequence
  Description of Artificial Sequence: Synthetic oligonucleotide
ugagguguacgcagguguc

SEQ ID NO: 1452666 - RNA, 19 nt, Artificial Sequence
  Description of Artificial Sequence: Synthetic oligonucleotide
aggcuguucaacuccgacu

SEQ ID NO: 1452667 - RNA, 19 nt, Artificial Sequence
  Description of Artificial Sequence: Synthetic oligonucleotide
uucggcuaggcgcuccuga

SEQ ID NO: 1452668 - RNA, 19 nt, Artificial Sequence
  Description of Artificial Sequence: Synthetic oligonucleotide
aucugcauccccagaguac

SEQ ID NO: 1452669 - RNA, 19 nt, Artificial Sequence
  Description of Artificial Sequence: Synthetic oligonucleotide
ugugaaccgacuaguugua

SEQ ID NO: 1452670 - RNA, 19 nt, Artificial Sequence
  Description of Artificial Sequence: Synthetic oligonucleotide
auugguugagguguacgca

SEQ ID NO: 1452671 - RNA, 19 nt, Artificial Sequence
  Description of Artificial Sequence: Synthetic oligonucleotide
aaggguguaccaauagaau

SEQ ID NO: 1452672 - RNA, 19 nt, Artificial Sequence
  Description of Artificial Sequence: Synthetic oligonucleotide
caacaaacagugguacaag

SEQ ID NO: 1452673 - RNA, 19 nt, Artificial Sequence
  Description of Artificial Sequence: Synthetic oligonucleotide
cugugaaccgacuaguugu

SEQ ID NO: 1452674 - RNA, 19 nt, Artificial Sequence
  Description of Artificial Sequence: Synthetic oligonucleotide
cuuccucuuccaguaagcc

SEQ ID NO: 1452675 - RNA, 19 nt, Artificial Sequence
  Description of Artificial Sequence: Synthetic oligonucleotide
uuccaaugcggugagcuuc

SEQ ID NO: 1452676 - RNA, 19 nt, Artificial Sequence
  Description of Artificial Sequence: Synthetic oligonucleotide
ucacggcuuguucacacau

SEQ ID NO: 1452677 - RNA, 19 nt, Artificial Sequence
  Description of Artificial Sequence: Synthetic oligonucleotide
ggugaagauuuccagggca

SEQ ID NO: 1452678 - RNA, 19 nt, Artificial Sequence
  Description of Artificial Sequence: Synthetic oligonucleotide
auuguacagcauucagcca

SEQ ID NO: 1452679 - RNA, 19 nt, Artificial Sequence
  Description of Artificial Sequence: Synthetic oligonucleotide
agcuuuugaacagguacca

SEQ ID NO: 1452680 - RNA, 19 nt, Artificial Sequence
  Description of Artificial Sequence: Synthetic oligonucleotide
caguuuagcugcaucaaaa

SEQ ID NO: 1452681 - RNA, 19 nt, Artificial Sequence
  Description of Artificial Sequence: Synthetic oligonucleotide
gcccucauaaucuucuagc

SEQ ID NO: 1452682 - RNA, 19 nt, Artificial Sequence
  Description of Artificial Sequence: Synthetic oligonucleotide
ucuaagcccucauaaucuu

SEQ ID NO: 1452683 - RNA, 19 nt, Artificial Sequence
  Description of Artificial Sequence: Synthetic oligonucleotide
acacuucaagaaugcgcuc

SEQ ID NO: 1452684 - RNA, 19 nt, Artificial Sequence
  Description of Artificial Sequence: Synthetic oligonucleotide
auugcaacaaacaguggua

SEQ ID NO: 1452685 - RNA, 19 nt, Artificial Sequence
  Description of Artificial Sequence: Synthetic oligonucleotide
uuguuccauugguugaggu

SEQ ID NO: 1452686 - RNA, 19 nt, Artificial Sequence
  Description of Artificial Sequence: Synthetic oligonucleotide
accuucaagaaggcuguuc

SEQ ID NO: 1452687 - RNA, 19 nt, Artificial Sequence
  Description of Artificial Sequence: Synthetic oligonucleotide
ucguagagcugccgcuggg

SEQ ID NO: 1452688 - RNA, 19 nt, Artificial Sequence
  Description of Artificial Sequence: Synthetic oligonucleotide
cuugaauggcuuuacugua

SEQ ID NO: 1452689 - RNA, 19 nt, Artificial Sequence
  Description of Artificial Sequence: Synthetic oligonucleotide
cagccacuuuugucgaucg

SEQ ID NO: 1452690 - RNA, 19 nt, Artificial Sequence
  Description of Artificial Sequence: Synthetic oligonucleotide
aaagcagaaguggccucug

SEQ ID NO: 1452691 - RNA, 19 nt, Artificial Sequence
  Description of Artificial Sequence: Synthetic oligonucleotide
cuucacacgcaaaggcuuc

SEQ ID NO: 1452692 - RNA, 19 nt, Artificial Sequence
  Description of Artificial Sequence: Synthetic oligonucleotide
acuccgacuuccuguuguc

SEQ ID NO: 1452693 - RNA, 19 nt, Artificial Sequence
  Description of Artificial Sequence: Synthetic oligonucleotide
cuaagcccucauaaucuuc

SEQ ID NO: 1452694 - RNA, 19 nt, Artificial Sequence
  Description of Artificial Sequence: Synthetic oligonucleotide
gagggucucuaaugauucc

SEQ ID NO: 1452695 - RNA, 19 nt, Artificial Sequence
  Description of Artificial Sequence: Synthetic oligonucleotide
ccccagaguaccuugaaug

SEQ ID NO: 1452696 - RNA, 19 nt, Artificial Sequence
  Description of Artificial Sequence: Synthetic oligonucleotide
aagauucucuaagcccuca

SEQ ID NO: 1452697 - RNA, 19 nt, Artificial Sequence
  Description of Artificial Sequence: Synthetic oligonucleotide
uaccuagcuaacagagauc

SEQ ID NO: 1452698 - RNA, 19 nt, Artificial Sequence
  Description of Artificial Sequence: Synthetic oligonucleotide
cagugguacaaggucaaug

SEQ ID NO: 1452699 - RNA, 19 nt, Artificial Sequence
  Description of Artificial Sequence: Synthetic oligonucleotide
ugccagguauaaaaugcuu

SEQ ID NO: 1452700 - RNA, 19 nt, Artificial Sequence
  Description of Artificial Sequence: Synthetic oligonucleotide
ugaucgggcuuccgguggc

SEQ ID NO: 1452701 - RNA, 19 nt, Artificial Sequence
  Description of Artificial Sequence: Synthetic oligonucleotide
gguguaccaauagaauugc

SEQ ID NO: 1452702 - RNA, 19 nt, Artificial Sequence
  Description of Artificial Sequence: Synthetic oligonucleotide
gagugcuagcaacgaguag

SEQ ID NO: 1452703 - RNA, 19 nt, Artificial Sequence
  Description of Artificial Sequence: Synthetic oligonucleotide
auaguagcauucggcuagg

SEQ ID NO: 1452704 - RNA, 19 nt, Artificial Sequence
  Description of Artificial Sequence: Synthetic oligonucleotide
agcuaacagagauccaauu

SEQ ID NO: 1452705 - RNA, 19 nt, Artificial Sequence
  Description of Artificial Sequence: Synthetic oligonucleotide
gauucucuaagcccucaua

SEQ ID NO: 1452706 - RNA, 19 nt, Artificial Sequence
  Description of Artificial Sequence: Synthetic oligonucleotide
aguaccuugaauggcuuua

SEQ ID NO: 1452707 - RNA, 19 nt, Artificial Sequence
  Description of Artificial Sequence: Synthetic oligonucleotide
agggucucuaaugauucca

SEQ ID NO: 1452708 - RNA, 19 nt, Artificial Sequence
  Description of Artificial Sequence: Synthetic oligonucleotide
caagaaugcgcucacggcu

SEQ ID NO: 1452709 - RNA, 19 nt, Artificial Sequence
  Description of Artificial Sequence: Synthetic oligonucleotide
uuaggguccaaggguguac

SEQ ID NO: 1452710 - RNA, 19 nt, Artificial Sequence
  Description of Artificial Sequence: Synthetic oligonucleotide
cucuaaugauuccaguuua

SEQ ID NO: 1452711 - RNA, 19 nt, Artificial Sequence
  Description of Artificial Sequence: Synthetic oligonucleotide
aagcagaaguggccucuga

SEQ ID NO: 1452712 - RNA, 19 nt, Artificial Sequence
  Description of Artificial Sequence: Synthetic oligonucleotide
aagaaugcgcucacggcuu

SEQ ID NO: 1452713 - RNA, 19 nt, Artificial Sequence
  Description of Artificial Sequence: Synthetic oligonucleotide
caacgaguagaucucaacu

SEQ ID NO: 1452714 - RNA, 19 nt, Artificial Sequence
  Description of Artificial Sequence: Synthetic oligonucleotide
cucguagagcugccgcugg

SEQ ID NO: 1452715 - RNA, 19 nt, Artificial Sequence
  Description of Artificial Sequence: Synthetic oligonucleotide
uaucccucguagagcugcc

SEQ ID NO: 1452716 - RNA, 19 nt, Artificial Sequence
  Description of Artificial Sequence: Synthetic oligonucleotide
gugcuugcacacuuugcac

SEQ ID NO: 1452717 - RNA, 19 nt, Artificial Sequence
  Description of Artificial Sequence: Synthetic oligonucleotide
ggguuuuggucauugcaac

SEQ ID NO: 1452718 - RNA, 19 nt, Artificial Sequence
  Description of Artificial Sequence: Synthetic oligonucleotide
cuucaagaaugcgcucacg

SEQ ID NO: 1452719 - RNA, 19 nt, Artificial Sequence
  Description of Artificial Sequence: Synthetic oligonucleotide
uccaccgcugccuuugguu

SEQ ID NO: 1452720 - RNA, 19 nt, Artificial Sequence
  Description of Artificial Sequence: Synthetic oligonucleotide
gcuaucacauggguuuugg

SEQ ID NO: 1452721 - RNA, 19 nt, Artificial Sequence
  Description of Artificial Sequence: Synthetic oligonucleotide
gagguguacgcaggugucc

SEQ ID NO: 1452722 - RNA, 19 nt, Artificial Sequence
  Description of Artificial Sequence: Synthetic oligonucleotide
agccacuuuugucgaucgg

SEQ ID NO: 1452723 - RNA, 19 nt, Artificial Sequence
  Description of Artificial Sequence: Synthetic oligonucleotide
ugucaacauaucccucgua

SEQ ID NO: 1452724 - RNA, 19 nt, Artificial Sequence
  Description of Artificial Sequence: Synthetic oligonucleotide
augcgcucacggcuuguuc

SEQ ID NO: 1452725 - RNA, 19 nt, Artificial Sequence
  Description of Artificial Sequence: Synthetic oligonucleotide
agaaugcgcucacggcuug

SEQ ID NO: 1452726 - RNA, 19 nt, Artificial Sequence
  Description of Artificial Sequence: Synthetic oligonucleotide
aucggcaaaguagucucca

SEQ ID NO: 1452727 - RNA, 19 nt, Artificial Sequence
  Description of Artificial Sequence: Synthetic oligonucleotide
gaaguuauaguugcugauu

SEQ ID NO: 1452728 - RNA, 19 nt, Artificial Sequence
  Description of Artificial Sequence: Synthetic oligonucleotide
gaucggcaaaguagucucc

SEQ ID NO: 1452729 - RNA, 19 nt, Artificial Sequence
  Description of Artificial Sequence: Synthetic oligonucleotide
gguggcaaugcauguuggc

SEQ ID NO: 1452730 - RNA, 19 nt, Artificial Sequence
  Description of Artificial Sequence: Synthetic oligonucleotide
cagaguaccuugaauggcu

SEQ ID NO: 1452731 - RNA, 19 nt, Artificial Sequence
  Description of Artificial Sequence: Synthetic oligonucleotide
cagagugcuagcaacgagu

SEQ ID NO: 1452732 - RNA, 19 nt, Artificial Sequence
  Description of Artificial Sequence: Synthetic oligonucleotide
uugguugguuacacuucaa

SEQ ID NO: 1452733 - RNA, 19 nt, Artificial Sequence
  Description of Artificial Sequence: Synthetic oligonucleotide
uugaccgugugaucugauu

SEQ ID NO: 1452734 - RNA, 19 nt, Artificial Sequence
  Description of Artificial Sequence: Synthetic oligonucleotide
aaccgacuaguuguagaaa

SEQ ID NO: 1452735 - RNA, 19 nt, Artificial Sequence
  Description of Artificial Sequence: Synthetic oligonucleotide
ugccuuugguugguuacac

SEQ ID NO: 1452736 - RNA, 19 nt, Artificial Sequence
  Description of Artificial Sequence: Synthetic oligonucleotide
guugagguguacgcaggug

SEQ ID NO: 1452737 - RNA, 19 nt, Artificial Sequence
  Description of Artificial Sequence: Synthetic oligonucleotide
gcugcuaucacauggguuu

SEQ ID NO: 1452738 - RNA, 19 nt, Artificial Sequence
  Description of Artificial Sequence: Synthetic oligonucleotide
uuuaggguccaagggugua

SEQ ID NO: 1452739 - RNA, 19 nt, Artificial Sequence
  Description of Artificial Sequence: Synthetic oligonucleotide
uuccgguggcaaugcaugu

SEQ ID NO: 1452740 - RNA, 19 nt, Artificial Sequence
  Description of Artificial Sequence: Synthetic oligonucleotide
uagcaacgaguagaucuca

SEQ ID NO: 1452741 - RNA, 19 nt, Artificial Sequence
  Description of Artificial Sequence: Synthetic oligonucleotide
caguacguacagcuucuuc

SEQ ID NO: 1452742 - RNA, 19 nt, Artificial Sequence
  Description of Artificial Sequence: Synthetic oligonucleotide
gcuuuacuguaaucaaaca

SEQ ID NO: 1452743 - RNA, 19 nt, Artificial Sequence
  Description of Artificial Sequence: Synthetic oligonucleotide
uccugauuccugccuuuua

SEQ ID NO: 1452744 - RNA, 19 nt, Artificial Sequence
  Description of Artificial Sequence: Synthetic oligonucleotide
uuuugucgaucggcaaagu

SEQ ID NO: 1452745 - RNA, 19 nt, Artificial Sequence
  Description of Artificial Sequence: Synthetic oligonucleotide
acccagaacugguacucaa

SEQ ID NO: 1452746 - RNA, 19 nt, Artificial Sequence
  Description of Artificial Sequence: Synthetic oligonucleotide
guaagccagccaaagcaga

SEQ ID NO: 1452747 - RNA, 19 nt, Artificial Sequence
  Description of Artificial Sequence: Synthetic oligonucleotide
auacugccagguauaaaau

SEQ ID NO: 1452748 - RNA, 19 nt, Artificial Sequence
  Description of Artificial Sequence: Synthetic oligonucleotide
agagugcuagcaacgagua

SEQ ID NO: 1452749 - RNA, 19 nt, Artificial Sequence
  Description of Artificial Sequence: Synthetic oligonucleotide
cacgauacugccagguaua

SEQ ID NO: 1452750 - RNA, 19 nt, Artificial Sequence
  Description of Artificial Sequence: Synthetic oligonucleotide
agguguacgcaggugucca

SEQ ID NO: 1452751 - RNA, 19 nt, Artificial Sequence
  Description of Artificial Sequence: Synthetic oligonucleotide
cacgcaaaggcuucguccu

SEQ ID NO: 1452752 - RNA, 19 nt, Artificial Sequence
  Description of Artificial Sequence: Synthetic oligonucleotide
gaagugaauuggcaagauu

SEQ ID NO: 1452753 - RNA, 19 nt, Artificial Sequence
  Description of Artificial Sequence: Synthetic oligonucleotide
cucaaugaucgggcuuccg

SEQ ID NO: 1452754 - RNA, 19 nt, Artificial Sequence
  Description of Artificial Sequence: Synthetic oligonucleotide
gucuucaaugcagugucaa

SEQ ID NO: 1452755 - RNA, 19 nt, Artificial Sequence
  Description of Artificial Sequence: Synthetic oligonucleotide
gggucucuaaugauuccag

SEQ ID NO: 1452756 - RNA, 19 nt, Artificial Sequence
  Description of Artificial Sequence: Synthetic oligonucleotide
gugaaccgacuaguuguag

SEQ ID NO: 1452757 - RNA, 19 nt, Artificial Sequence
  Description of Artificial Sequence: Synthetic oligonucleotide
aggagacugucaucugcau

SEQ ID NO: 1452758 - RNA, 19 nt, Artificial Sequence
  Description of Artificial Sequence: Synthetic oligonucleotide
aaugcgcucacggcuuguu

SEQ ID NO: 1452759 - RNA, 19 nt, Artificial Sequence
  Description of Artificial Sequence: Synthetic oligonucleotide
guucgaugagcaaggcuga

SEQ ID NO: 1452760 - RNA, 19 nt, Artificial Sequence
  Description of Artificial Sequence: Synthetic oligonucleotide
cguacagcuucuucacacg

SEQ ID NO: 1452761 - RNA, 19 nt, Artificial Sequence
  Description of Artificial Sequence: Synthetic oligonucleotide
cacacgcaaaggcuucguc

SEQ ID NO: 1452762 - RNA, 19 nt, Artificial Sequence
  Description of Artificial Sequence: Synthetic oligonucleotide
gacaguacguacagcuucu

SEQ ID NO: 1452763 - RNA, 19 nt, Artificial Sequence
  Description of Artificial Sequence: Synthetic oligonucleotide
uguugucuuuuggggugug

SEQ ID NO: 1452764 - RNA, 19 nt, Artificial Sequence
  Description of Artificial Sequence: Synthetic oligonucleotide
ucggcuaggcgcuccugau

SEQ ID NO: 1452765 - RNA, 19 nt, Artificial Sequence
  Description of Artificial Sequence: Synthetic oligonucleotide
cgaguagaucucaacugag

SEQ ID NO: 1452766 - RNA, 19 nt, Artificial Sequence
  Description of Artificial Sequence: Synthetic oligonucleotide
guacgcagguguccaccgc

SEQ ID NO: 1452767 - RNA, 19 nt, Artificial Sequence
  Description of Artificial Sequence: Synthetic oligonucleotide
cgaucggcaaaguagucuc

SEQ ID NO: 1452768 - RNA, 19 nt, Artificial Sequence
  Description of Artificial Sequence: Synthetic oligonucleotide
ccaggcauugucugugaac

SEQ ID NO: 1452769 - RNA, 19 nt, Artificial Sequence
  Description of Artificial Sequence: Synthetic oligonucleotide
cagauccagaaggaacauc

SEQ ID NO: 1452770 - RNA, 19 nt, Artificial Sequence
  Description of Artificial Sequence: Synthetic oligonucleotide
gcuaacagagauccaauuu

SEQ ID NO: 1452771 - RNA, 19 nt, Artificial Sequence
  Description of Artificial Sequence: Synthetic oligonucleotide
gugguacaaggucaaugua

SEQ ID NO: 1452772 - RNA, 19 nt, Artificial Sequence
  Description of Artificial Sequence: Synthetic oligonucleotide
aggguccaaggguguacca

SEQ ID NO: 1452773 - RNA, 19 nt, Artificial Sequence
  Description of Artificial Sequence: Synthetic oligonucleotide
acauuccaacucucacaaa

SEQ ID NO: 1452774 - RNA, 19 nt, Artificial Sequence
  Description of Artificial Sequence: Synthetic oligonucleotide
gcucacggcuuguucacac

SEQ ID NO: 1452775 - RNA, 19 nt, Artificial Sequence
  Description of Artificial Sequence: Synthetic oligonucleotide
cacuuuugucgaucggcaa

SEQ ID NO: 1452776 - RNA, 19 nt, Artificial Sequence
  Description of Artificial Sequence: Synthetic oligonucleotide
ggcuguucaacuccgacuu

SEQ ID NO: 1452777 - RNA, 19 nt, Artificial Sequence
  Description of Artificial Sequence: Synthetic oligonucleotide
aucccucguagagcugccg

SEQ ID NO: 1452778 - RNA, 19 nt, Artificial Sequence
  Description of Artificial Sequence: Synthetic oligonucleotide
acgauacugccagguauaa

SEQ ID NO: 1452779 - RNA, 19 nt, Artificial Sequence
  Description of Artificial Sequence: Synthetic oligonucleotide
gcagguguccaccgcugcc

SEQ ID NO: 1452780 - RNA, 19 nt, Artificial Sequence
  Description of Artificial Sequence: Synthetic oligonucleotide
cucacggcuuguucacaca

SEQ ID NO: 1452781 - RNA, 19 nt, Artificial Sequence
  Description of Artificial Sequence: Synthetic oligonucleotide
ugcauccccagaguaccuu

SEQ ID NO: 1452782 - RNA, 19 nt, Artificial Sequence
  Description of Artificial Sequence: Synthetic oligonucleotide
gguacucaaugaucgggcu

SEQ ID NO: 1452783 - RNA, 19 nt, Artificial Sequence
  Description of Artificial Sequence: Synthetic oligonucleotide
uccgguggcaaugcauguu

SEQ ID NO: 1452784 - RNA, 19 nt, Artificial Sequence
  Description of Artificial Sequence: Synthetic oligonucleotide
gcaaucuuauacaucaguu

SEQ ID NO: 1452785 - RNA, 19 nt, Artificial Sequence
  Description of Artificial Sequence: Synthetic oligonucleotide
agcugcuaucacauggguu

SEQ ID NO: 1452786 - RNA, 19 nt, Artificial Sequence
  Description of Artificial Sequence: Synthetic oligonucleotide
agcaacgaguagaucucaa

SEQ ID NO: 1452787 - RNA, 19 nt, Artificial Sequence
  Description of Artificial Sequence: Synthetic oligonucleotide
agaguaccuugaauggcuu

SEQ ID NO: 1452788 - RNA, 19 nt, Artificial Sequence
  Description of Artificial Sequence: Synthetic oligonucleotide
cuggaagcaacuugugguu

SEQ ID NO: 1452789 - RNA, 19 nt, Artificial Sequence
  Description of Artificial Sequence: Synthetic oligonucleotide
gguacaaggucaauguauu

SEQ ID NO: 1452790 - RNA, 19 nt, Artificial Sequence
  Description of Artificial Sequence: Synthetic oligonucleotide
ccaaggguguaccaauaga

SEQ ID NO: 1452791 - RNA, 19 nt, Artificial Sequence
  Description of Artificial Sequence: Synthetic oligonucleotide
acuuucccacgcugugcau

SEQ ID NO: 1452792 - RNA, 19 nt, Artificial Sequence
  Description of Artificial Sequence: Synthetic oligonucleotide
ccugauuccugccuuuuaa

SEQ ID NO: 1452793 - RNA, 19 nt, Artificial Sequence
  Description of Artificial Sequence: Synthetic oligonucleotide
caacuccgacuuccuguug

SEQ ID NO: 1452794 - RNA, 19 nt, Artificial Sequence
  Description of Artificial Sequence: Synthetic oligonucleotide
ugcuagcaacgaguagauc

SEQ ID NO: 1452795 - RNA, 19 nt, Artificial Sequence
  Description of Artificial Sequence: Synthetic oligonucleotide
cucagaugaagagcugucu

SEQ ID NO: 1452796 - RNA, 19 nt, Artificial Sequence
  Description of Artificial Sequence: Synthetic oligonucleotide
ccugagcaagaacguagug

SEQ ID NO: 1452797 - RNA, 19 nt, Artificial Sequence
  Description of Artificial Sequence: Synthetic oligonucleotide
agcauucggcuaggcgcuc

SEQ ID NO: 1452798 - RNA, 19 nt, Artificial Sequence
  Description of Artificial Sequence: Synthetic oligonucleotide
ggcgcuccugauuccugcc

SEQ ID NO: 1452799 - RNA, 19 nt, Artificial Sequence
  Description of Artificial Sequence: Synthetic oligonucleotide
ccgacuaguuguagaaaga

SEQ ID NO: 1452800 - RNA, 19 nt, Artificial Sequence
  Description of Artificial Sequence: Synthetic oligonucleotide
cacacccagaacugguacu

SEQ ID NO: 1452801 - RNA, 19 nt, Artificial Sequence
  Description of Artificial Sequence: Synthetic oligonucleotide
cacacgauacugccaggua

SEQ ID NO: 1452802 - RNA, 19 nt, Artificial Sequence
  Description of Artificial Sequence: Synthetic oligonucleotide
gccuuuuaaguaauauugu

SEQ ID NO: 1452803 - RNA, 19 nt, Artificial Sequence
  Description of Artificial Sequence: Synthetic oligonucleotide
cauugucugugaaccgacu

SEQ ID NO: 1452804 - RNA, 19 nt, Artificial Sequence
  Description of Artificial Sequence: Synthetic oligonucleotide
caagaacguagugcuugca

SEQ ID NO: 1452805 - RNA, 19 nt, Artificial Sequence
  Description of Artificial Sequence: Synthetic oligonucleotide
gucgaucggcaaaguaguc

SEQ ID NO: 1452806 - RNA, 19 nt, Artificial Sequence
  Description of Artificial Sequence: Synthetic oligonucleotide
ggcaaugcauguuggcagu

SEQ ID NO: 1452807 - RNA, 19 nt, Artificial Sequence
  Description of Artificial Sequence: Synthetic oligonucleotide
agaucucaacugagggaau

SEQ ID NO: 1452808 - RNA, 19 nt, Artificial Sequence
  Description of Artificial Sequence: Synthetic oligonucleotide
gguguacgcagguguccac

SEQ ID NO: 1452809 - RNA, 19 nt, Artificial Sequence
  Description of Artificial Sequence: Synthetic oligonucleotide
acagugguacaaggucaau

SEQ ID NO: 1452810 - RNA, 19 nt, Artificial Sequence
  Description of Artificial Sequence: Synthetic oligonucleotide
ggucucuaaugauuccagu

SEQ ID NO: 1452811 - RNA, 19 nt, Artificial Sequence
  Description of Artificial Sequence: Synthetic oligonucleotide
acgcaaaggcuucguccuu

SEQ ID NO: 1452812 - RNA, 19 nt, Artificial Sequence
  Description of Artificial Sequence: Synthetic oligonucleotide
auucggcuaggcgcuccug

SEQ ID NO: 1452813 - RNA, 19 nt, Artificial Sequence
  Description of Artificial Sequence: Synthetic oligonucleotide
ggcaaggucuucauacugu

SEQ ID NO: 1452814 - RNA, 19 nt, Artificial Sequence
  Description of Artificial Sequence: Synthetic oligonucleotide
cgcugggcgagaaugaaaa

SEQ ID NO: 1452815 - RNA, 19 nt, Artificial Sequence
  Description of Artificial Sequence: Synthetic oligonucleotide
acaguacguacagcuucuu

SEQ ID NO: 1452816 - RNA, 19 nt, Artificial Sequence
  Description of Artificial Sequence: Synthetic oligonucleotide
gcgcucacggcuuguucac

SEQ ID NO: 1452817 - RNA, 19 nt, Artificial Sequence
  Description of Artificial Sequence: Synthetic oligonucleotide
gaucgggcuuccgguggca

SEQ ID NO: 1452818 - RNA, 19 nt, Artificial Sequence
  Description of Artificial Sequence: Synthetic oligonucleotide
cggcuuguucacacauucc

SEQ ID NO: 1452819 - RNA, 19 nt, Artificial Sequence
  Description of Artificial Sequence: Synthetic oligonucleotide
aaguggccucugaauucuu

SEQ ID NO: 1452820 - RNA, 19 nt, Artificial Sequence
  Description of Artificial Sequence: Synthetic oligonucleotide
gugcuagcaacgaguagau

SEQ ID NO: 1452821 - RNA, 19 nt, Artificial Sequence
  Description of Artificial Sequence: Synthetic oligonucleotide
ccucguagagcugccgcug

SEQ ID NO: 1452822 - RNA, 19 nt, Artificial Sequence
  Description of Artificial Sequence: Synthetic oligonucleotide
cagcuuuguuccauugguu

SEQ ID NO: 1452823 - RNA, 19 nt, Artificial Sequence
  Description of Artificial Sequence: Synthetic oligonucleotide
ggguccaaggguguaccaa

SEQ ID NO: 1452824 - RNA, 19 nt, Artificial Sequence
  Description of Artificial Sequence: Synthetic oligonucleotide
guugucuuuuggggugugu

SEQ ID NO: 1452825 - RNA, 19 nt, Artificial Sequence
  Description of Artificial Sequence: Synthetic oligonucleotide
gcauucggcuaggcgcucc

SEQ ID NO: 1452826 - RNA, 19 nt, Artificial Sequence
  Description of Artificial Sequence: Synthetic oligonucleotide
ggaagugaauuggcaagau

SEQ ID NO: 1452827 - RNA, 19 nt, Artificial Sequence
  Description of Artificial Sequence: Synthetic oligonucleotide
cuugaccgugugaucugau

SEQ ID NO: 1452828 - RNA, 19 nt, Artificial Sequence
  Description of Artificial Sequence: Synthetic oligonucleotide
cauucggcuaggcgcuccu

SEQ ID NO: 1452829 - RNA, 19 nt, Artificial Sequence
  Description of Artificial Sequence: Synthetic oligonucleotide
gaaugcgcucacggcuugu

SEQ ID NO: 1452830 - RNA, 19 nt, Artificial Sequence
  Description of Artificial Sequence: Synthetic oligonucleotide
ccugccuuuuaaguaauau

SEQ ID NO: 1452831 - RNA, 19 nt, Artificial Sequence
  Description of Artificial Sequence: Synthetic oligonucleotide
cugcauccccagaguaccu

SEQ ID NO: 1452832 - RNA, 19 nt, Artificial Sequence
  Description of Artificial Sequence: Synthetic oligonucleotide
cgcagguguccaccgcugc

SEQ ID NO: 1452833 - RNA, 19 nt, Artificial Sequence
  Description of Artificial Sequence: Synthetic oligonucleotide
uucccacgcugugcauuuu

SEQ ID NO: 1452834 - RNA, 19 nt, Artificial Sequence
  Description of Artificial Sequence: Synthetic oligonucleotide
gagcaagaacguagugcuu

SEQ ID NO: 1452835 - RNA, 19 nt, Artificial Sequence
  Description of Artificial Sequence: Synthetic oligonucleotide
ccacacgauacugccaggu

SEQ ID NO: 1452836 - RNA, 19 nt, Artificial Sequence
  Description of Artificial Sequence: Synthetic oligonucleotide
ccgcugggcgagaaugaaa

SEQ ID NO: 1452837 - RNA, 19 nt, Artificial Sequence
  Description of Artificial Sequence: Synthetic oligonucleotide
gcgcuccugauuccugccu

SEQ ID NO: 1452838 - RNA, 19 nt, Artificial Sequence
  Description of Artificial Sequence: Synthetic oligonucleotide
ccgacuuccuguugucuuu

SEQ ID NO: 1452839 - RNA, 19 nt, Artificial Sequence
  Description of Artificial Sequence: Synthetic oligonucleotide
gcaaugcauguuggcaguu

SEQ ID NO: 1452840 - RNA, 19 nt, Artificial Sequence
  Description of Artificial Sequence: Synthetic oligonucleotide
cgauacugccagguauaaa

SEQ ID NO: 1452841 - RNA, 19 nt, Artificial Sequence
  Description of Artificial Sequence: Synthetic oligonucleotide
cguagugcuugcacacuuu

SEQ ID NO: 1452842 - RNA, 19 nt, Artificial Sequence
  Description of Artificial Sequence: Synthetic oligonucleotide
cgcucacggcuuguucaca

SEQ ID NO: 1452843 - RNA, 19 nt, Artificial Sequence
  Description of Artificial Sequence: Synthetic oligonucleotide
cggcuaggcgcuccugauu

SEQ ID NO: 1452844 - RNA, 19 nt, Artificial Sequence
  Description of Artificial Sequence: Synthetic oligonucleotide
ccgcugccuuugguugguu

SEQ ID NO: 1452845 - RNA, 19 nt, Artificial Sequence
  Description of Artificial Sequence: Synthetic oligonucleotide
aauaacaaaauguucaagg

SEQ ID NO: 1452846 - RNA, 19 nt, Artificial Sequence
  Description of Artificial Sequence: Synthetic oligonucleotide
gauuaaauaguguugagug

SEQ ID NO: 1452847 - RNA, 19 nt, Artificial Sequence
  Description of Artificial Sequence: Synthetic oligonucleotide
aaauacaaagcucacacgu

SEQ ID NO: 1452848 - RNA, 19 nt, Artificial Sequence
  Description of Artificial Sequence: Synthetic oligonucleotide
caucuuuuagauuaaauag

SEQ ID NO: 1452849 - RNA, 19 nt, Artificial Sequence
  Description of Artificial Sequence: Synthetic oligonucleotide
aauguucaagguuuuacag

SEQ ID NO: 1452850 - RNA, 19 nt, Artificial Sequence
  Description of Artificial Sequence: Synthetic oligonucleotide
ucuuuuagauuaaauagug

SEQ ID NO: 1452851 - RNA, 19 nt, Artificial Sequence
  Description of Artificial Sequence: Synthetic oligonucleotide
aaaauguucaagguuuuac

SEQ ID NO: 1452852 - RNA, 19 nt, Artificial Sequence
  Description of Artificial Sequence: Synthetic oligonucleotide
uaagguuuucauaaaauac

SEQ ID NO: 1452853 - RNA, 19 nt, Artificial Sequence
  Description of Artificial Sequence: Synthetic oligonucleotide
cacguaauugucuacaucc

SEQ ID NO: 1452854 - RNA, 19 nt, Artificial Sequence
  Description of Artificial Sequence: Synthetic oligonucleotide
aaaauacaaagcucacacg

SEQ ID NO: 1452855 - RNA, 19 nt, Artificial Sequence
  Description of Artificial Sequence: Synthetic oligonucleotide
ugugguaucuuuugggugg

SEQ ID NO: 1452856 - RNA, 19 nt, Artificial Sequence
  Description of Artificial Sequence: Synthetic oligonucleotide
uuuacuugcgucuucaccu

SEQ ID NO: 1452857 - RNA, 19 nt, Artificial Sequence
  Description of Artificial Sequence: Synthetic oligonucleotide
uccaccacaaaacagaauc

SEQ ID NO: 1452858 - RNA, 19 nt, Artificial Sequence
  Description of Artificial Sequence: Synthetic oligonucleotide
ucuacauccaccacaaaac

SEQ ID NO: 1452859 - RNA, 19 nt, Artificial Sequence
  Description of Artificial Sequence: Synthetic oligonucleotide
aaauaagugguuagcacac

SEQ ID NO: 1452860 - RNA, 19 nt, Artificial Sequence
  Description of Artificial Sequence: Synthetic oligonucleotide
aaauguucaagguuuuaca

SEQ ID NO: 1452861 - RNA, 19 nt, Artificial Sequence
  Description of Artificial Sequence: Synthetic oligonucleotide
acaguugaccagcauaccc

SEQ ID NO: 1452862 - RNA, 19 nt, Artificial Sequence
  Description of Artificial Sequence: Synthetic oligonucleotide
guacuugucaaacucauug

SEQ ID NO: 1452863 - RNA, 19 nt, Artificial Sequence
  Description of Artificial Sequence: Synthetic oligonucleotide
gaaucaaauaagugguuag

SEQ ID NO: 1452864 - RNA, 19 nt, Artificial Sequence
  Description of Artificial Sequence: Synthetic oligonucleotide
uacccugucugucugaggg

SEQ ID NO: 1452865 - RNA, 19 nt, Artificial Sequence
  Description of Artificial Sequence: Synthetic oligonucleotide
ugaggguuucuucaaaugc

SEQ ID NO: 1452866 - RNA, 19 nt, Artificial Sequence
  Description of Artificial Sequence: Synthetic oligonucleotide
ucagcauggauuuucuugc

SEQ ID NO: 1452867 - RNA, 19 nt, Artificial Sequence
  Description of Artificial Sequence: Synthetic oligonucleotide
uucucauucagagagcucc

SEQ ID NO: 1452868 - RNA, 19 nt, Artificial Sequence
  Description of Artificial Sequence: Synthetic oligonucleotide
uccaaguccccuaugaaca

SEQ ID NO: 1452869 - RNA, 19 nt, Artificial Sequence
  Description of Artificial Sequence: Synthetic oligonucleotide
uuagcacacaaacacauau

SEQ ID NO: 1452870 - RNA, 19 nt, Artificial Sequence
  Description of Artificial Sequence: Synthetic oligonucleotide
cucacgagcauccucaugc

SEQ ID NO: 1452871 - RNA, 19 nt, Artificial Sequence
  Description of Artificial Sequence: Synthetic oligonucleotide
uugauggacaauuuccuug

SEQ ID NO: 1452872 - RNA, 19 nt, Artificial Sequence
  Description of Artificial Sequence: Synthetic oligonucleotide
cacauuagcaucucugggg

SEQ ID NO: 1452873 - RNA, 19 nt, Artificial Sequence
  Description of Artificial Sequence: Synthetic oligonucleotide
uuaagguuuucauaaaaua

SEQ ID NO: 1452874 - RNA, 19 nt, Artificial Sequence
  Description of Artificial Sequence: Synthetic oligonucleotide
aaauaacaaaauguucaag

SEQ ID NO: 1452875 - RNA, 19 nt, Artificial Sequence
  Description of Artificial Sequence: Synthetic oligonucleotide
ucaaauaagugguuagcac

SEQ ID NO: 1452876 - RNA, 19 nt, Artificial Sequence
  Description of Artificial Sequence: Synthetic oligonucleotide
ucuucuggggcucagcaug

SEQ ID NO: 1452877 - RNA, 19 nt, Artificial Sequence
  Description of Artificial Sequence: Synthetic oligonucleotide
acugcaguugcagugagac

SEQ ID NO: 1452878 - RNA, 19 nt, Artificial Sequence
  Description of Artificial Sequence: Synthetic oligonucleotide
uacuugucaaacucauugg

SEQ ID NO: 1452879 - RNA, 19 nt, Artificial Sequence
  Description of Artificial Sequence: Synthetic oligonucleotide
agcacauuagcaucucugg

SEQ ID NO: 1452880 - RNA, 19 nt, Artificial Sequence
  Description of Artificial Sequence: Synthetic oligonucleotide
ucggcugacagguaauugg

SEQ ID NO: 1452881 - RNA, 19 nt, Artificial Sequence
  Description of Artificial Sequence: Synthetic oligonucleotide
aacaucuuguacuugucaa

SEQ ID NO: 1452882 - RNA, 19 nt, Artificial Sequence
  Description of Artificial Sequence: Synthetic oligonucleotide
uccccuaugaacaucuugu

SEQ ID NO: 1452883 - RNA, 19 nt, Artificial Sequence
  Description of Artificial Sequence: Synthetic oligonucleotide
ugagugugguaucuuuugg

SEQ ID NO: 1452884 - RNA, 19 nt, Artificial Sequence
  Description of Artificial Sequence: Synthetic oligonucleotide
uguucaagguuuuacaguu

SEQ ID NO: 1452885 - RNA, 19 nt, Artificial Sequence
  Description of Artificial Sequence: Synthetic oligonucleotide
ucuccuugagcucacgagc

SEQ ID NO: 1452886 - RNA, 19 nt, Artificial Sequence
  Description of Artificial Sequence: Synthetic oligonucleotide
uugucaagagaacuggcga

SEQ ID NO: 1452887 - RNA, 19 nt, Artificial Sequence
  Description of Artificial Sequence: Synthetic oligonucleotide
uguucggauaucuuccgag

SEQ ID NO: 1452888 - RNA, 19 nt, Artificial Sequence
  Description of Artificial Sequence: Synthetic oligonucleotide
aucguugucuuccuucugg

SEQ ID NO: 1452889 - RNA, 19 nt, Artificial Sequence
  Description of Artificial Sequence: Synthetic oligonucleotide
caggagaggguuaaagugg

SEQ ID NO: 1452890 - RNA, 19 nt, Artificial Sequence
  Description of Artificial Sequence: Synthetic oligonucleotide
gagugugguaucuuuuggg

SEQ ID NO: 1452891 - RNA, 19 nt, Artificial Sequence
  Description of Artificial Sequence: Synthetic oligonucleotide
acuaaggacauucuccacu

SEQ ID NO: 1452892 - RNA, 19 nt, Artificial Sequence
  Description of Artificial Sequence: Synthetic oligonucleotide
aaacagaaucaaauaagug

SEQ ID NO: 1452893 - RNA, 19 nt, Artificial Sequence
  Description of Artificial Sequence: Synthetic oligonucleotide
uuuucuuaaugugugugug

SEQ ID NO: 1452894 - RNA, 19 nt, Artificial Sequence
  Description of Artificial Sequence: Synthetic oligonucleotide
agggucucgagcuuguggg

SEQ ID NO: 1452895 - RNA, 19 nt, Artificial Sequence
  Description of Artificial Sequence: Synthetic oligonucleotide
guggacuucauuuucacga

SEQ ID NO: 1452896 - RNA, 19 nt, Artificial Sequence
  Description of Artificial Sequence: Synthetic oligonucleotide
uggcaagagccucuguucg

SEQ ID NO: 1452897 - RNA, 19 nt, Artificial Sequence
  Description of Artificial Sequence: Synthetic oligonucleotide
auugccccugaauacagag

SEQ ID NO: 1452898 - RNA, 19 nt, Artificial Sequence
  Description of Artificial Sequence: Synthetic oligonucleotide
auguccaugagcaggcucc

SEQ ID NO: 1452899 - RNA, 19 nt, Artificial Sequence
  Description of Artificial Sequence: Synthetic oligonucleotide
uucuuaaugugugugugug

SEQ ID NO: 1452900 - RNA, 19 nt, Artificial Sequence
  Description of Artificial Sequence: Synthetic oligonucleotide
ugcuugucaagagaacugg

SEQ ID NO: 1452901 - RNA, 19 nt, Artificial Sequence
  Description of Artificial Sequence: Synthetic oligonucleotide
guaauugucuacauccacc

SEQ ID NO: 1452902 - RNA, 19 nt, Artificial Sequence
  Description of Artificial Sequence: Synthetic oligonucleotide
cuuaaugugugugugugug

SEQ ID NO: 1452903 - RNA, 19 nt, Artificial Sequence
  Description of Artificial Sequence: Synthetic oligonucleotide
ucuguucggauaucuuccg

SEQ ID NO: 1452904 - RNA, 19 nt, Artificial Sequence
  Description of Artificial Sequence: Synthetic oligonucleotide
acgagcauccucaugcugc

SEQ ID NO: 1452905 - RNA, 19 nt, Artificial Sequence
  Description of Artificial Sequence: Synthetic oligonucleotide
uuucaggagaggguuaaag

SEQ ID NO: 1452906 - RNA, 19 nt, Artificial Sequence
  Description of Artificial Sequence: Synthetic oligonucleotide
gagcucacugaucagggcc

SEQ ID NO: 1452907 - RNA, 19 nt, Artificial Sequence
  Description of Artificial Sequence: Synthetic oligonucleotide
ugacuucauacccugucug

SEQ ID NO: 1452908 - RNA, 19 nt, Artificial Sequence
  Description of Artificial Sequence: Synthetic oligonucleotide
cuugagcucacgagcaucc

SEQ ID NO: 1452909 - RNA, 19 nt, Artificial Sequence
  Description of Artificial Sequence: Synthetic oligonucleotide
ugccccugaauacagaguc

SEQ ID NO: 1452910 - RNA, 19 nt, Artificial Sequence
  Description of Artificial Sequence: Synthetic oligonucleotide
uccggguccaaaaugucug

SEQ ID NO: 1452911 - RNA, 19 nt, Artificial Sequence
  Description of Artificial Sequence: Synthetic oligonucleotide
uucaggagaggguuaaagu

SEQ ID NO: 1452912 - RNA, 19 nt, Artificial Sequence
  Description of Artificial Sequence: Synthetic oligonucleotide
agauuaaauaguguugagu

SEQ ID NO: 1452913 - RNA, 19 nt, Artificial Sequence
  Description of Artificial Sequence: Synthetic oligonucleotide
aggaguguggacuucauuu

SEQ ID NO: 1452914 - RNA, 19 nt, Artificial Sequence
  Description of Artificial Sequence: Synthetic oligonucleotide
agugugguaucuuuugggu

SEQ ID NO: 1452915 - RNA, 19 nt, Artificial Sequence
  Description of Artificial Sequence: Synthetic oligonucleotide
ugcgccacuuuccuuaagc

SEQ ID NO: 1452916 - RNA, 19 nt, Artificial Sequence
  Description of Artificial Sequence: Synthetic oligonucleotide
acauuagcaucucugggga

SEQ ID NO: 1452917 - RNA, 19 nt, Artificial Sequence
  Description of Artificial Sequence: Synthetic oligonucleotide
auaguguugagugugguau

SEQ ID NO: 1452918 - RNA, 19 nt, Artificial Sequence
  Description of Artificial Sequence: Synthetic oligonucleotide
guucggauaucuuccgagg

SEQ ID NO: 1452919 - RNA, 19 nt, Artificial Sequence
  Description of Artificial Sequence: Synthetic oligonucleotide
uaaugugugugugugugug

SEQ ID NO: 1452920 - RNA, 19 nt, Artificial Sequence
  Description of Artificial Sequence: Synthetic oligonucleotide
auguucaagguuuuacagu

SEQ ID NO: 1452921 - RNA, 19 nt, Artificial Sequence
  Description of Artificial Sequence: Synthetic oligonucleotide
ugggucuuucaggagaggg

SEQ ID NO: 1452922 - RNA, 19 nt, Artificial Sequence
  Description of Artificial Sequence: Synthetic oligonucleotide
aucaaauaagugguuagca

SEQ ID NO: 1452923 - RNA, 19 nt, Artificial Sequence
  Description of Artificial Sequence: Synthetic oligonucleotide
gagugagagcaguagguug

SEQ ID NO: 1452924 - RNA, 19 nt, Artificial Sequence
  Description of Artificial Sequence: Synthetic oligonucleotide
aggguuaaaguggagaggu

SEQ ID NO: 1452925 - RNA, 19 nt, Artificial Sequence
  Description of Artificial Sequence: Synthetic oligonucleotide
cuugucaucgcuccucuug

SEQ ID NO: 1452926 - RNA, 19 nt, Artificial Sequence
  Description of Artificial Sequence: Synthetic oligonucleotide
agagauuugucuugaugga

SEQ ID NO: 1452927 - RNA, 19 nt, Artificial Sequence
  Description of Artificial Sequence: Synthetic oligonucleotide
uccugaguucuaccgacag

SEQ ID NO: 1452928 - RNA, 19 nt, Artificial Sequence
  Description of Artificial Sequence: Synthetic oligonucleotide
gauccugaguucuaccgac

SEQ ID NO: 1452929 - RNA, 19 nt, Artificial Sequence
  Description of Artificial Sequence: Synthetic oligonucleotide
uuucuuaaugugugugugu

SEQ ID NO: 1452930 - RNA, 19 nt, Artificial Sequence
  Description of Artificial Sequence: Synthetic oligonucleotide
aagcacauuagcaucucug

SEQ ID NO: 1452931 - RNA, 19 nt, Artificial Sequence
  Description of Artificial Sequence: Synthetic oligonucleotide
acacguaauugucuacauc

SEQ ID NO: 1452932 - RNA, 19 nt, Artificial Sequence
  Description of Artificial Sequence: Synthetic oligonucleotide
acgggagucacauggccgg

SEQ ID NO: 1452933 - RNA, 19 nt, Artificial Sequence
  Description of Artificial Sequence: Synthetic oligonucleotide
uuguacuugucaaacucau

SEQ ID NO: 1452934 - RNA, 19 nt, Artificial Sequence
  Description of Artificial Sequence: Synthetic oligonucleotide
aaacugcaguugcagugag

SEQ ID NO: 1452935 - RNA, 19 nt, Artificial Sequence
  Description of Artificial Sequence: Synthetic oligonucleotide
uucggauaucuuccgaggu

SEQ ID NO: 1452936 - RNA, 19 nt, Artificial Sequence
  Description of Artificial Sequence: Synthetic oligonucleotide
aguccgagggaagugacuc

SEQ ID NO: 1452937 - RNA, 19 nt, Artificial Sequence
  Description of Artificial Sequence: Synthetic oligonucleotide
ucgaugaggaguguggacu

SEQ ID NO: 1452938 - RNA, 19 nt, Artificial Sequence
  Description of Artificial Sequence: Synthetic oligonucleotide
aaauugccccugaauacag

SEQ ID NO: 1452939 - RNA, 19 nt, Artificial Sequence
  Description of Artificial Sequence: Synthetic oligonucleotide
ugguuagcacacaaacaca

SEQ ID NO: 1452940 - RNA, 19 nt, Artificial Sequence
  Description of Artificial Sequence: Synthetic oligonucleotide
cuccucuugacuucauacc

SEQ ID NO: 1452941 - RNA, 19 nt, Artificial Sequence
  Description of Artificial Sequence: Synthetic oligonucleotide
auuuucacgaagugcuggu

SEQ ID NO: 1452942 - RNA, 19 nt, Artificial Sequence
  Description of Artificial Sequence: Synthetic oligonucleotide
cucguugacguccucuugc

SEQ ID NO: 1452943 - RNA, 19 nt, Artificial Sequence
  Description of Artificial Sequence: Synthetic oligonucleotide
gaaauugccccugaauaca

SEQ ID NO: 1452944 - RNA, 19 nt, Artificial Sequence
  Description of Artificial Sequence: Synthetic oligonucleotide
aagcucacacguaauuguc

SEQ ID NO: 1452945 - RNA, 19 nt, Artificial Sequence
  Description of Artificial Sequence: Synthetic oligonucleotide
auaagugguuagcacacaa

SEQ ID NO: 1452946 - RNA, 19 nt, Artificial Sequence
  Description of Artificial Sequence: Synthetic oligonucleotide
aaugugugugugugugugu

SEQ ID NO: 1452947 - RNA, 19 nt, Artificial Sequence
  Description of Artificial Sequence: Synthetic oligonucleotide
cuugacuucauacccuguc

SEQ ID NO: 1452948 - RNA, 19 nt, Artificial Sequence
  Description of Artificial Sequence: Synthetic oligonucleotide
ugggugaggcuuccgauga

SEQ ID NO: 1452949 - RNA, 19 nt, Artificial Sequence
  Description of Artificial Sequence: Synthetic oligonucleotide
gaacaucuuguacuuguca

SEQ ID NO: 1452950 - RNA, 19 nt, Artificial Sequence
  Description of Artificial Sequence: Synthetic oligonucleotide
gaggcguccagagagugag

SEQ ID NO: 1452951 - RNA, 19 nt, Artificial Sequence
  Description of Artificial Sequence: Synthetic oligonucleotide
gaggguuaaaguggagagg

SEQ ID NO: 1452952 - RNA, 19 nt, Artificial Sequence
  Description of Artificial Sequence: Synthetic oligonucleotide
cugacagguaauuggccag

SEQ ID NO: 1452953 - RNA, 19 nt, Artificial Sequence
  Description of Artificial Sequence: Synthetic oligonucleotide
uaggccacuaaggacauuc

SEQ ID NO: 1452954 - RNA, 19 nt, Artificial Sequence
  Description of Artificial Sequence: Synthetic oligonucleotide
ggaaauugccccugaauac

SEQ ID NO: 1452955 - RNA, 19 nt, Artificial Sequence
  Description of Artificial Sequence: Synthetic oligonucleotide
cuagauccugaguucuacc

SEQ ID NO: 1452956 - RNA, 19 nt, Artificial Sequence
  Description of Artificial Sequence: Synthetic oligonucleotide
uccaucguugucuuccuuc

SEQ ID NO: 1452957 - RNA, 19 nt, Artificial Sequence
  Description of Artificial Sequence: Synthetic oligonucleotide
acacuugaccugcuccugg

SEQ ID NO: 1452958 - RNA, 19 nt, Artificial Sequence
  Description of Artificial Sequence: Synthetic oligonucleotide
agauuugucuugauggaca

SEQ ID NO: 1452959 - RNA, 19 nt, Artificial Sequence
  Description of Artificial Sequence: Synthetic oligonucleotide
agaaucaaauaagugguua

SEQ ID NO: 1452960 - RNA, 19 nt, Artificial Sequence
  Description of Artificial Sequence: Synthetic oligonucleotide
gagaggucaagguugggaa

SEQ ID NO: 1452961 - RNA, 19 nt, Artificial Sequence
  Description of Artificial Sequence: Synthetic oligonucleotide
accuaggccacuaaggaca

SEQ ID NO: 1452962 - RNA, 19 nt, Artificial Sequence
  Description of Artificial Sequence: Synthetic oligonucleotide
ugggaaauugccccugaau

SEQ ID NO: 1452963 - RNA, 19 nt, Artificial Sequence
  Description of Artificial Sequence: Synthetic oligonucleotide
gaggcuuccgaugagcuca

SEQ ID NO: 1452964 - RNA, 19 nt, Artificial Sequence
  Description of Artificial Sequence: Synthetic oligonucleotide
uuaaugugugugugugugu

SEQ ID NO: 1452965 - RNA, 19 nt, Artificial Sequence
  Description of Artificial Sequence: Synthetic oligonucleotide
cuuccgaggucuucugggg

SEQ ID NO: 1452966 - RNA, 19 nt, Artificial Sequence
  Description of Artificial Sequence: Synthetic oligonucleotide
ucuuaaugugugugugugu

SEQ ID NO: 1452967 - RNA, 19 nt, Artificial Sequence
  Description of Artificial Sequence: Synthetic oligonucleotide
ugaaguccgagggaaguga

SEQ ID NO: 1452968 - RNA, 19 nt, Artificial Sequence
  Description of Artificial Sequence: Synthetic oligonucleotide
cugcuugucaagagaacug

SEQ ID NO: 1452969 - RNA, 19 nt, Artificial Sequence
  Description of Artificial Sequence: Synthetic oligonucleotide
cuugcgucuucaccuaggc

SEQ ID NO: 1452970 - RNA, 19 nt, Artificial Sequence
  Description of Artificial Sequence: Synthetic oligonucleotide
uucacgaagugcugguagu

SEQ ID NO: 1452971 - RNA, 19 nt, Artificial Sequence
  Description of Artificial Sequence: Synthetic oligonucleotide
guccaaguccccuaugaac

SEQ ID NO: 1452972 - RNA, 19 nt, Artificial Sequence
  Description of Artificial Sequence: Synthetic oligonucleotide
aguucuaccgacaggcuca

SEQ ID NO: 1452973 - RNA, 19 nt, Artificial Sequence
  Description of Artificial Sequence: Synthetic oligonucleotide
uuugggucuggcugggaga

SEQ ID NO: 1452974 - RNA, 19 nt, Artificial Sequence
  Description of Artificial Sequence: Synthetic oligonucleotide
aggacaguugaccagcaua

SEQ ID NO: 1452975 - RNA, 19 nt, Artificial Sequence
  Description of Artificial Sequence: Synthetic oligonucleotide
aauacaaagcucacacgua

SEQ ID NO: 1452976 - RNA, 19 nt, Artificial Sequence
  Description of Artificial Sequence: Synthetic oligonucleotide
cacgggagucacauggccg

SEQ ID NO: 1452977 - RNA, 19 nt, Artificial Sequence
  Description of Artificial Sequence: Synthetic oligonucleotide
cugaggguuucuucaaaug

SEQ ID NO: 1452978 - RNA, 19 nt, Artificial Sequence
  Description of Artificial Sequence: Synthetic oligonucleotide
ucaagguuuuacaguuuuc

SEQ ID NO: 1452979 - RNA, 19 nt, Artificial Sequence
  Description of Artificial Sequence: Synthetic oligonucleotide
ucgagcuugugggugaggc

SEQ ID NO: 1452980 - RNA, 19 nt, Artificial Sequence
  Description of Artificial Sequence: Synthetic oligonucleotide
agauccugaguucuaccga

SEQ ID NO: 1452981 - RNA, 19 nt, Artificial Sequence
  Description of Artificial Sequence: Synthetic oligonucleotide
accgcuuccuugucaucgc

SEQ ID NO: 1452982 - RNA, 19 nt, Artificial Sequence
  Description of Artificial Sequence: Synthetic oligonucleotide
uuccgcugcucgaugagga

SEQ ID NO: 1452983 - RNA, 19 nt, Artificial Sequence
  Description of Artificial Sequence: Synthetic oligonucleotide
ucaucgcuccucuugacuu

SEQ ID NO: 1452984 - RNA, 19 nt, Artificial Sequence
  Description of Artificial Sequence: Synthetic oligonucleotide
gagauuugucuugauggac

SEQ ID NO: 1452985 - RNA, 19 nt, Artificial Sequence
  Description of Artificial Sequence: Synthetic oligonucleotide
gagggaagugacuccagca

SEQ ID NO: 1452986 - RNA, 19 nt, Artificial Sequence
  Description of Artificial Sequence: Synthetic oligonucleotide
gaguucuaccgacaggcuc

SEQ ID NO: 1452987 - RNA, 19 nt, Artificial Sequence
  Description of Artificial Sequence: Synthetic oligonucleotide
uguugagugugguaucuuu

SEQ ID NO: 1452988 - RNA, 19 nt, Artificial Sequence
  Description of Artificial Sequence: Synthetic oligonucleotide
gagaggguuaaaguggaga

SEQ ID NO: 1452989 - RNA, 19 nt, Artificial Sequence
  Description of Artificial Sequence: Synthetic oligonucleotide
auaucuuccgaggucuucu

SEQ ID NO: 1452990 - RNA, 19 nt, Artificial Sequence
  Description of Artificial Sequence: Synthetic oligonucleotide
ucauucagagagcuccuuu

SEQ ID NO: 1452991 - RNA, 19 nt, Artificial Sequence
  Description of Artificial Sequence: Synthetic oligonucleotide
aucuuccgaggucuucugg

SEQ ID NO: 1452992 - RNA, 19 nt, Artificial Sequence
  Description of Artificial Sequence: Synthetic oligonucleotide
cuucaccuaggccacuaag

SEQ ID NO: 1452993 - RNA, 19 nt, Artificial Sequence
  Description of Artificial Sequence: Synthetic oligonucleotide
aggauggccagcacugcgc

SEQ ID NO: 1452994 - RNA, 19 nt, Artificial Sequence
  Description of Artificial Sequence: Synthetic oligonucleotide
ucucauucagagagcuccu

SEQ ID NO: 1452995 - RNA, 19 nt, Artificial Sequence
  Description of Artificial Sequence: Synthetic oligonucleotide
gucaagguugggaaauugc

SEQ ID NO: 1452996 - RNA, 19 nt, Artificial Sequence
  Description of Artificial Sequence: Synthetic oligonucleotide
acgaagugcugguaguccu

SEQ ID NO: 1452997 - RNA, 19 nt, Artificial Sequence
  Description of Artificial Sequence: Synthetic oligonucleotide
uuccgaugagcucagccuu

SEQ ID NO: 1452998 - RNA, 19 nt, Artificial Sequence
  Description of Artificial Sequence: Synthetic oligonucleotide
aucuugucauccagcuucc

SEQ ID NO: 1452999 - RNA, 19 nt, Artificial Sequence
  Description of Artificial Sequence: Synthetic oligonucleotide
gcacauuagcaucucuggg

SEQ ID NO: 1453000 - RNA, 19 nt, Artificial Sequence
  Description of Artificial Sequence: Synthetic oligonucleotide
uuucucguugacguccucu

SEQ ID NO: 1453001 - RNA, 19 nt, Artificial Sequence
  Description of Artificial Sequence: Synthetic oligonucleotide
agugguuagcacacaaaca

SEQ ID NO: 1453002 - RNA, 19 nt, Artificial Sequence
  Description of Artificial Sequence: Synthetic oligonucleotide
uuagcaucucuggggaaca

SEQ ID NO: 1453003 - RNA, 19 nt, Artificial Sequence
  Description of Artificial Sequence: Synthetic oligonucleotide
gaggccugcuugucaagag

SEQ ID NO: 1453004 - RNA, 19 nt, Artificial Sequence
  Description of Artificial Sequence: Synthetic oligonucleotide
ucuugccuagauccugagu

SEQ ID NO: 1453005 - RNA, 19 nt, Artificial Sequence
  Description of Artificial Sequence: Synthetic oligonucleotide
cuacauccaccacaaaaca

SEQ ID NO: 1453006 - RNA, 19 nt, Artificial Sequence
  Description of Artificial Sequence: Synthetic oligonucleotide
uacuugcgucuucaccuag

SEQ ID NO: 1453007 - RNA, 19 nt, Artificial Sequence
  Description of Artificial Sequence: Synthetic oligonucleotide
ucguugucuuccuucugga

SEQ ID NO: 1453008 - RNA, 19 nt, Artificial Sequence
  Description of Artificial Sequence: Synthetic oligonucleotide
aguguugagugugguaucu

SEQ ID NO: 1453009 - RNA, 19 nt, Artificial Sequence
  Description of Artificial Sequence: Synthetic oligonucleotide
ugaguucuaccgacaggcu

SEQ ID NO: 1453010 - RNA, 19 nt, Artificial Sequence
  Description of Artificial Sequence: Synthetic oligonucleotide
gggaaauugccccugaaua

SEQ ID NO: 1453011 - RNA, 19 nt, Artificial Sequence
  Description of Artificial Sequence: Synthetic oligonucleotide
cuuugcgccacuuuccuua

SEQ ID NO: 1453012 - RNA, 19 nt, Artificial Sequence
  Description of Artificial Sequence: Synthetic oligonucleotide
augugugugugugugugug

SEQ ID NO: 1453013 - RNA, 19 nt, Artificial Sequence
  Description of Artificial Sequence: Synthetic oligonucleotide
cuugccuagauccugaguu

SEQ ID NO: 1453014 - RNA, 19 nt, Artificial Sequence
  Description of Artificial Sequence: Synthetic oligonucleotide
uguacuugucaaacucauu

SEQ ID NO: 1453015 - RNA, 19 nt, Artificial Sequence
  Description of Artificial Sequence: Synthetic oligonucleotide
cauacccaccgcuuccuug

SEQ ID NO: 1453016 - RNA, 19 nt, Artificial Sequence
  Description of Artificial Sequence: Synthetic oligonucleotide
caucucuggggaacagacc

SEQ ID NO: 1453017 - RNA, 19 nt, Artificial Sequence
  Description of Artificial Sequence: Synthetic oligonucleotide
cugccagagauuugucuug

SEQ ID NO: 1453018 - RNA, 19 nt, Artificial Sequence
  Description of Artificial Sequence: Synthetic oligonucleotide
ugugugugugugugugucu

SEQ ID NO: 1453019 - RNA, 19 nt, Artificial Sequence
  Description of Artificial Sequence: Synthetic oligonucleotide
guccccuaugaacaucuug

SEQ ID NO: 1453020 - RNA, 19 nt, Artificial Sequence
  Description of Artificial Sequence: Synthetic oligonucleotide
guugcagugagacaucuuu

SEQ ID NO: 1453021 - RNA, 19 nt, Artificial Sequence
  Description of Artificial Sequence: Synthetic oligonucleotide
guaacccacaguucaaacu

SEQ ID NO: 1453022 - RNA, 19 nt, Artificial Sequence
  Description of Artificial Sequence: Synthetic oligonucleotide
uggggcucagcauggauuu

SEQ ID NO: 1453023 - RNA, 19 nt, Artificial Sequence
  Description of Artificial Sequence: Synthetic oligonucleotide
uccgagggaagugacucca

SEQ ID NO: 1453024 - RNA, 19 nt, Artificial Sequence
  Description of Artificial Sequence: Synthetic oligonucleotide
auugggcuugcagagcuca

SEQ ID NO: 1453025 - RNA, 19 nt, Artificial Sequence
  Description of Artificial Sequence: Synthetic oligonucleotide
cucacacguaauugucuac

SEQ ID NO: 1453026 - RNA, 19 nt, Artificial Sequence
  Description of Artificial Sequence: Synthetic oligonucleotide
ugaccagcauacccaccgc

SEQ ID NO: 1453027 - RNA, 19 nt, Artificial Sequence
  Description of Artificial Sequence: Synthetic oligonucleotide
ucguugacguccucuugcu

SEQ ID NO: 1453028 - RNA, 19 nt, Artificial Sequence
  Description of Artificial Sequence: Synthetic oligonucleotide
ggacaguugaccagcauac

SEQ ID NO: 1453029 - RNA, 19 nt, Artificial Sequence
  Description of Artificial Sequence: Synthetic oligonucleotide
aguguggacuucauuuuca

SEQ ID NO: 1453030 - RNA, 19 nt, Artificial Sequence
  Description of Artificial Sequence: Synthetic oligonucleotide
gugggugaggcuuccgaug

SEQ ID NO: 1453031 - RNA, 19 nt, Artificial Sequence
  Description of Artificial Sequence: Synthetic oligonucleotide
acacacuguaguaggcagg

SEQ ID NO: 1453032 - RNA, 19 nt, Artificial Sequence
  Description of Artificial Sequence: Synthetic oligonucleotide
gcuccucuugacuucauac

SEQ ID NO: 1453033 - RNA, 19 nt, Artificial Sequence
  Description of Artificial Sequence: Synthetic oligonucleotide
ugugugugugugugugugu

SEQ ID NO: 1453034 - RNA, 19 nt, Artificial Sequence
  Description of Artificial Sequence: Synthetic oligonucleotide
ucgggcgaggcguccagag

SEQ ID NO: 1453035 - RNA, 19 nt, Artificial Sequence
  Description of Artificial Sequence: Synthetic oligonucleotide
ugccuagauccugaguucu

SEQ ID NO: 1453036 - RNA, 19 nt, Artificial Sequence
  Description of Artificial Sequence: Synthetic oligonucleotide
cacgaagugcugguagucc

SEQ ID NO: 1453037 - RNA, 19 nt, Artificial Sequence
  Description of Artificial Sequence: Synthetic oligonucleotide
guaucuuuugggugggucu

SEQ ID NO: 1453038 - RNA, 19 nt, Artificial Sequence
  Description of Artificial Sequence: Synthetic oligonucleotide
ccuaugaacaucuuguacu

SEQ ID NO: 1453039 - RNA, 19 nt, Artificial Sequence
  Description of Artificial Sequence: Synthetic oligonucleotide
uuaagcacauuagcaucuc

SEQ ID NO: 1453040 - RNA, 19 nt, Artificial Sequence
  Description of Artificial Sequence: Synthetic oligonucleotide
uuacuugcgucuucaccua

SEQ ID NO: 1453041 - RNA, 19 nt, Artificial Sequence
  Description of Artificial Sequence: Synthetic oligonucleotide
auacccugucugucugagg

SEQ ID NO: 1453042 - RNA, 19 nt, Artificial Sequence
  Description of Artificial Sequence: Synthetic oligonucleotide
uucucguugacguccucuu

SEQ ID NO: 1453043 - RNA, 19 nt, Artificial Sequence
  Description of Artificial Sequence: Synthetic oligonucleotide
cagcauggauuuucuugcc

SEQ ID NO: 1453044 - RNA, 19 nt, Artificial Sequence
  Description of Artificial Sequence: Synthetic oligonucleotide
gggcgaggcguccagagag

SEQ ID NO: 1453045 - RNA, 19 nt, Artificial Sequence
  Description of Artificial Sequence: Synthetic oligonucleotide
ugcgcgcucccuccggucc

SEQ ID NO: 1453046 - RNA, 19 nt, Artificial Sequence
  Description of Artificial Sequence: Synthetic oligonucleotide
gauaucuuccgaggucuuc

SEQ ID NO: 1453047 - RNA, 19 nt, Artificial Sequence
  Description of Artificial Sequence: Synthetic oligonucleotide
agaggucaagguugggaaa

SEQ ID NO: 1453048 - RNA, 19 nt, Artificial Sequence
  Description of Artificial Sequence: Synthetic oligonucleotide
gugugugugugugugugug

SEQ ID NO: 1453049 - RNA, 19 nt, Artificial Sequence
  Description of Artificial Sequence: Synthetic oligonucleotide
uggaguccggguccaaaau

SEQ ID NO: 1453050 - RNA, 19 nt, Artificial Sequence
  Description of Artificial Sequence: Synthetic oligonucleotide
ggaacagacccuccaucag

SEQ ID NO: 1453051 - RNA, 19 nt, Artificial Sequence
  Description of Artificial Sequence: Synthetic oligonucleotide
acuugcgucuucaccuagg

SEQ ID NO: 1453052 - RNA, 19 nt, Artificial Sequence
  Description of Artificial Sequence: Synthetic oligonucleotide
uugggaaauugccccugaa

SEQ ID NO: 1453053 - RNA, 19 nt, Artificial Sequence
  Description of Artificial Sequence: Synthetic oligonucleotide
uaucuuuugggugggucuu

SEQ ID NO: 1453054 - RNA, 19 nt, Artificial Sequence
  Description of Artificial Sequence: Synthetic oligonucleotide
ucacgagcauccucaugcu

SEQ ID NO: 1453055 - RNA, 19 nt, Artificial Sequence
  Description of Artificial Sequence: Synthetic oligonucleotide
guuaaaguggagaggucaa

SEQ ID NO: 1453056 - RNA, 19 nt, Artificial Sequence
  Description of Artificial Sequence: Synthetic oligonucleotide
ucauacccugucugucuga

SEQ ID NO: 1453057 - RNA, 19 nt, Artificial Sequence
  Description of Artificial Sequence: Synthetic oligonucleotide
gcuuccgaugagcucagcc

SEQ ID NO: 1453058 - RNA, 19 nt, Artificial Sequence
  Description of Artificial Sequence: Synthetic oligonucleotide
ccccacgggagucacaugg

SEQ ID NO: 1453059 - RNA, 19 nt, Artificial Sequence
  Description of Artificial Sequence: Synthetic oligonucleotide
ggacuucauuuucacgaag

SEQ ID NO: 1453060 - RNA, 19 nt, Artificial Sequence
  Description of Artificial Sequence: Synthetic oligonucleotide
ugaggcuuccgaugagcuc

SEQ ID NO: 1453061 - RNA, 19 nt, Artificial Sequence
  Description of Artificial Sequence: Synthetic oligonucleotide
gccacuuuccuuaagcaca

SEQ ID NO: 1453062 - RNA, 19 nt, Artificial Sequence
  Description of Artificial Sequence: Synthetic oligonucleotide
cacuaaggacauucuccac

SEQ ID NO: 1453063 - RNA, 19 nt, Artificial Sequence
  Description of Artificial Sequence: Synthetic oligonucleotide
ucuucaccuaggccacuaa

SEQ ID NO: 1453064 - RNA, 19 nt, Artificial Sequence
  Description of Artificial Sequence: Synthetic oligonucleotide
ugccagagauuugucuuga

SEQ ID NO: 1453065 - RNA, 19 nt, Artificial Sequence
  Description of Artificial Sequence: Synthetic oligonucleotide
cucccuccgguccagguuc

SEQ ID NO: 1453066 - RNA, 19 nt, Artificial Sequence
  Description of Artificial Sequence: Synthetic oligonucleotide
ccagagauuugucuugaug

SEQ ID NO: 1453067 - RNA, 19 nt, Artificial Sequence
  Description of Artificial Sequence: Synthetic oligonucleotide
gacuucauacccugucugu

SEQ ID NO: 1453068 - RNA, 19 nt, Artificial Sequence
  Description of Artificial Sequence: Synthetic oligonucleotide
gagucacauggccggugag

SEQ ID NO: 1453069 - RNA, 19 nt, Artificial Sequence
  Description of Artificial Sequence: Synthetic oligonucleotide
gugguaucuuuuggguggg

SEQ ID NO: 1453070 - RNA, 19 nt, Artificial Sequence
  Description of Artificial Sequence: Synthetic oligonucleotide
aauugccccugaauacaga

SEQ ID NO: 1453071 - RNA, 19 nt, Artificial Sequence
  Description of Artificial Sequence: Synthetic oligonucleotide
ggcaagagccucuguucgg

SEQ ID NO: 1453072 - RNA, 19 nt, Artificial Sequence
  Description of Artificial Sequence: Synthetic oligonucleotide
uuugcgccacuuuccuuaa

SEQ ID NO: 1453073 - RNA, 19 nt, Artificial Sequence
  Description of Artificial Sequence: Synthetic oligonucleotide
ugucaucgcuccucuugac

SEQ ID NO: 1453074 - RNA, 19 nt, Artificial Sequence
  Description of Artificial Sequence: Synthetic oligonucleotide
cuuccgaugagcucagccu

SEQ ID NO: 1453075 - RNA, 19 nt, Artificial Sequence
  Description of Artificial Sequence: Synthetic oligonucleotide
agagugagagcaguagguu

SEQ ID NO: 1453076 - RNA, 19 nt, Artificial Sequence
  Description of Artificial Sequence: Synthetic oligonucleotide
cuucucauucagagagcuc

SEQ ID NO: 1453077 - RNA, 19 nt, Artificial Sequence
  Description of Artificial Sequence: Synthetic oligonucleotide
ccucuguucggauaucuuc

SEQ ID NO: 1453078 - RNA, 19 nt, Artificial Sequence
  Description of Artificial Sequence: Synthetic oligonucleotide
acguaauugucuacaucca

SEQ ID NO: 1453079 - RNA, 19 nt, Artificial Sequence
  Description of Artificial Sequence: Synthetic oligonucleotide
ugaggaguguggacuucau

SEQ ID NO: 1453080 - RNA, 19 nt, Artificial Sequence
  Description of Artificial Sequence: Synthetic oligonucleotide
ggaagugacuccagcagac

SEQ ID NO: 1453081 - RNA, 19 nt, Artificial Sequence
  Description of Artificial Sequence: Synthetic oligonucleotide
agcaguagguugaccaccu

SEQ ID NO: 1453082 - RNA, 19 nt, Artificial Sequence
  Description of Artificial Sequence: Synthetic oligonucleotide
uuuucacgaagugcuggua

SEQ ID NO: 1453083 - RNA, 19 nt, Artificial Sequence
  Description of Artificial Sequence: Synthetic oligonucleotide
cuuucuucuuuacuugcgu

SEQ ID NO: 1453084 - RNA, 19 nt, Artificial Sequence
  Description of Artificial Sequence: Synthetic oligonucleotide
cugaaguccgagggaagug

SEQ ID NO: 1453085 - RNA, 19 nt, Artificial Sequence
  Description of Artificial Sequence: Synthetic oligonucleotide
cccaguaacccacaguuca

SEQ ID NO: 1453086 - RNA, 19 nt, Artificial Sequence
  Description of Artificial Sequence: Synthetic oligonucleotide
gcccaauuugaucuuguca

SEQ ID NO: 1453087 - RNA, 19 nt, Artificial Sequence
  Description of Artificial Sequence: Synthetic oligonucleotide
ccucuuugcgccacuuucc

SEQ ID NO: 1453088 - RNA, 19 nt, Artificial Sequence
  Description of Artificial Sequence: Synthetic oligonucleotide
cacaguucaaacugcaguu

SEQ ID NO: 1453089 - RNA, 19 nt, Artificial Sequence
  Description of Artificial Sequence: Synthetic oligonucleotide
cccuaugaacaucuuguac

SEQ ID NO: 1453090 - RNA, 19 nt, Artificial Sequence
  Description of Artificial Sequence: Synthetic oligonucleotide
auggauuuucuugccuaga

SEQ ID NO: 1453091 - RNA, 19 nt, Artificial Sequence
  Description of Artificial Sequence: Synthetic oligonucleotide
cuaugaacaucuuguacuu

SEQ ID NO: 1453092 - RNA, 19 nt, Artificial Sequence
  Description of Artificial Sequence: Synthetic oligonucleotide
agaggccugcuugucaaga

SEQ ID NO: 1453093 - RNA, 19 nt, Artificial Sequence
  Description of Artificial Sequence: Synthetic oligonucleotide
aguccggguccaaaauguc

SEQ ID NO: 1453094 - RNA, 19 nt, Artificial Sequence
  Description of Artificial Sequence: Synthetic oligonucleotide
ugggcuugcagagcucacu

SEQ ID NO: 1453095 - RNA, 19 nt, Artificial Sequence
  Description of Artificial Sequence: Synthetic oligonucleotide
aaguccgagggaagugacu

SEQ ID NO: 1453096 - RNA, 19 nt, Artificial Sequence
  Description of Artificial Sequence: Synthetic oligonucleotide
aggcucaugggugaggcuu

SEQ ID NO: 1453097 - RNA, 19 nt, Artificial Sequence
  Description of Artificial Sequence: Synthetic oligonucleotide
guguguguguguguguguc

SEQ ID NO: 1453098 - RNA, 19 nt, Artificial Sequence
  Description of Artificial Sequence: Synthetic oligonucleotide
cuccuggcccaauuugauc

SEQ ID NO: 1453099 - RNA, 19 nt, Artificial Sequence
  Description of Artificial Sequence: Synthetic oligonucleotide
caucgcuccucuugacuuc

SEQ ID NO: 1453100 - RNA, 19 nt, Artificial Sequence
  Description of Artificial Sequence: Synthetic oligonucleotide
gcugcagacacacuguagu

SEQ ID NO: 1453101 - RNA, 19 nt, Artificial Sequence
  Description of Artificial Sequence: Synthetic oligonucleotide
gaguccggguccaaaaugu

SEQ ID NO: 1453102 - RNA, 19 nt, Artificial Sequence
  Description of Artificial Sequence: Synthetic oligonucleotide
cuucauacccugucugucu

SEQ ID NO: 1453103 - RNA, 19 nt, Artificial Sequence
  Description of Artificial Sequence: Synthetic oligonucleotide
gggcuugcagagcucacug

SEQ ID NO: 1453104 - RNA, 19 nt, Artificial Sequence
  Description of Artificial Sequence: Synthetic oligonucleotide
uccgaugagcucagccuuu

SEQ ID NO: 1453105 - RNA, 19 nt, Artificial Sequence
  Description of Artificial Sequence: Synthetic oligonucleotide
cacgagcauccucaugcug

SEQ ID NO: 1453106 - RNA, 19 nt, Artificial Sequence
  Description of Artificial Sequence: Synthetic oligonucleotide
ugcucggcugacagguaau

SEQ ID NO: 1453107 - RNA, 19 nt, Artificial Sequence
  Description of Artificial Sequence: Synthetic oligonucleotide
ucucgagcuugugggugag

SEQ ID NO: 1453108 - RNA, 19 nt, Artificial Sequence
  Description of Artificial Sequence: Synthetic oligonucleotide
cucggcugacagguaauug

SEQ ID NO: 1453109 - RNA, 19 nt, Artificial Sequence
  Description of Artificial Sequence: Synthetic oligonucleotide
cguaauugucuacauccac

SEQ ID NO: 1453110 - RNA, 19 nt, Artificial Sequence
  Description of Artificial Sequence: Synthetic oligonucleotide
gucucgagcuuguggguga

SEQ ID NO: 1453111 - RNA, 19 nt, Artificial Sequence
  Description of Artificial Sequence: Synthetic oligonucleotide
gacagguaauuggccagga

SEQ ID NO: 1453112 - RNA, 19 nt, Artificial Sequence
  Description of Artificial Sequence: Synthetic oligonucleotide
caucguugucuuccuucug

SEQ ID NO: 1453113 - RNA, 19 nt, Artificial Sequence
  Description of Artificial Sequence: Synthetic oligonucleotide
ccugaguucuaccgacagg

SEQ ID NO: 1453114 - RNA, 19 nt, Artificial Sequence
  Description of Artificial Sequence: Synthetic oligonucleotide
gguaucuuuuggguggguc

SEQ ID NO: 1453115 - RNA, 19 nt, Artificial Sequence
  Description of Artificial Sequence: Synthetic oligonucleotide
ccccugaauacagaguccc

SEQ ID NO: 1453116 - RNA, 19 nt, Artificial Sequence
  Description of Artificial Sequence: Synthetic oligonucleotide
ggucaagguugggaaauug

SEQ ID NO: 1453117 - RNA, 19 nt, Artificial Sequence
  Description of Artificial Sequence: Synthetic oligonucleotide
ugugugugugugugucuuu

SEQ ID NO: 1453118 - RNA, 19 nt, Artificial Sequence
  Description of Artificial Sequence: Synthetic oligonucleotide
aacugcaguugcagugaga

SEQ ID NO: 1453119 - RNA, 19 nt, Artificial Sequence
  Description of Artificial Sequence: Synthetic oligonucleotide
gguaauuggccaggauggc

SEQ ID NO: 1453120 - RNA, 19 nt, Artificial Sequence
  Description of Artificial Sequence: Synthetic oligonucleotide
ucuuugcgccacuuuccuu

SEQ ID NO: 1453121 - RNA, 19 nt, Artificial Sequence
  Description of Artificial Sequence: Synthetic oligonucleotide
agagagcuccuuucuucuu

SEQ ID NO: 1453122 - RNA, 19 nt, Artificial Sequence
  Description of Artificial Sequence: Synthetic oligonucleotide
gucugccagagauuugucu

SEQ ID NO: 1453123 - RNA, 19 nt, Artificial Sequence
  Description of Artificial Sequence: Synthetic oligonucleotide
ugucuacauccaccacaaa

SEQ ID NO: 1453124 - RNA, 19 nt, Artificial Sequence
  Description of Artificial Sequence: Synthetic oligonucleotide
gcuugucaagagaacuggc

SEQ ID NO: 1453125 - RNA, 19 nt, Artificial Sequence
  Description of Artificial Sequence: Synthetic oligonucleotide
acucgggcgaggcguccag

SEQ ID NO: 1453126 - RNA, 19 nt, Artificial Sequence
  Description of Artificial Sequence: Synthetic oligonucleotide
gguuagcacacaaacacau

SEQ ID NO: 1453127 - RNA, 19 nt, Artificial Sequence
  Description of Artificial Sequence: Synthetic oligonucleotide
cuggaguccggguccaaaa

SEQ ID NO: 1453128 - RNA, 19 nt, Artificial Sequence
  Description of Artificial Sequence: Synthetic oligonucleotide
uccacucgggcgaggcguc

SEQ ID NO: 1453129 - RNA, 19 nt, Artificial Sequence
  Description of Artificial Sequence: Synthetic oligonucleotide
ggagucacauggccgguga

SEQ ID NO: 1453130 - RNA, 19 nt, Artificial Sequence
  Description of Artificial Sequence: Synthetic oligonucleotide
caaguccccuaugaacauc

SEQ ID NO: 1453131 - RNA, 19 nt, Artificial Sequence
  Description of Artificial Sequence: Synthetic oligonucleotide
cauugggcuugcagagcuc

SEQ ID NO: 1453132 - RNA, 19 nt, Artificial Sequence
  Description of Artificial Sequence: Synthetic oligonucleotide
gucaucgcuccucuugacu

SEQ ID NO: 1453133 - RNA, 19 nt, Artificial Sequence
  Description of Artificial Sequence: Synthetic oligonucleotide
auuugucuugauggacaau

SEQ ID NO: 1453134 - RNA, 19 nt, Artificial Sequence
  Description of Artificial Sequence: Synthetic oligonucleotide
cuugggccugaaguccgag

SEQ ID NO: 1453135 - RNA, 19 nt, Artificial Sequence
  Description of Artificial Sequence: Synthetic oligonucleotide
acugcgcgcucccuccggu

SEQ ID NO: 1453136 - RNA, 19 nt, Artificial Sequence
  Description of Artificial Sequence: Synthetic oligonucleotide
ggucucgagcuugugggug

SEQ ID NO: 1453137 - RNA, 19 nt, Artificial Sequence
  Description of Artificial Sequence: Synthetic oligonucleotide
cuguucggauaucuuccga

SEQ ID NO: 1453138 - RNA, 19 nt, Artificial Sequence
  Description of Artificial Sequence: Synthetic oligonucleotide
cugcagacacacuguagua

SEQ ID NO: 1453139 - RNA, 19 nt, Artificial Sequence
  Description of Artificial Sequence: Synthetic oligonucleotide
ugucugucugaggguuucu

SEQ ID NO: 1453140 - RNA, 19 nt, Artificial Sequence
  Description of Artificial Sequence: Synthetic oligonucleotide
acccaccgcuuccuuguca

SEQ ID NO: 1453141 - RNA, 19 nt, Artificial Sequence
  Description of Artificial Sequence: Synthetic oligonucleotide
ggcugacagguaauuggcc

SEQ ID NO: 1453142 - RNA, 19 nt, Artificial Sequence
  Description of Artificial Sequence: Synthetic oligonucleotide
ccacgggagucacauggcc

SEQ ID NO: 1453143 - RNA, 19 nt, Artificial Sequence
  Description of Artificial Sequence: Synthetic oligonucleotide
cacugcgcgcucccuccgg

SEQ ID NO: 1453144 - RNA, 19 nt, Artificial Sequence
  Description of Artificial Sequence: Synthetic oligonucleotide
ccagcauacccaccgcuuc

SEQ ID NO: 1453145 - RNA, 19 nt, Artificial Sequence
  Description of Artificial Sequence: Synthetic oligonucleotide
cacauggccggugagggcu

SEQ ID NO: 1453146 - RNA, 19 nt, Artificial Sequence
  Description of Artificial Sequence: Synthetic oligonucleotide
cccugaauacagagucccc

SEQ ID NO: 1453147 - RNA, 19 nt, Artificial Sequence
  Description of Artificial Sequence: Synthetic oligonucleotide
auccugaguucuaccgaca

SEQ ID NO: 1453148 - RNA, 19 nt, Artificial Sequence
  Description of Artificial Sequence: Synthetic oligonucleotide
cugcucggcugacagguaa

SEQ ID NO: 1453149 - RNA, 19 nt, Artificial Sequence
  Description of Artificial Sequence: Synthetic oligonucleotide
cucuuugcgccacuuuccu

SEQ ID NO: 1453150 - RNA, 19 nt, Artificial Sequence
  Description of Artificial Sequence: Synthetic oligonucleotide
accagcauacccaccgcuu

SEQ ID NO: 1453151 - RNA, 19 nt, Artificial Sequence
  Description of Artificial Sequence: Synthetic oligonucleotide
ugggagaggccugcuuguc

SEQ ID NO: 1453152 - RNA, 19 nt, Artificial Sequence
  Description of Artificial Sequence: Synthetic oligonucleotide
uggagcugcucggcugaca

SEQ ID NO: 1453153 - RNA, 19 nt, Artificial Sequence
  Description of Artificial Sequence: Synthetic oligonucleotide
ggcccaauuugaucuuguc

SEQ ID NO: 1453154 - RNA, 19 nt, Artificial Sequence
  Description of Artificial Sequence: Synthetic oligonucleotide
caguaacccacaguucaaa

SEQ ID NO: 1453155 - RNA, 19 nt, Artificial Sequence
  Description of Artificial Sequence: Synthetic oligonucleotide
ucccuccgguccagguucu

SEQ ID NO: 1453156 - RNA, 19 nt, Artificial Sequence
  Description of Artificial Sequence: Synthetic oligonucleotide
cgagcauccucaugcugcc

SEQ ID NO: 1453157 - RNA, 19 nt, Artificial Sequence
  Description of Artificial Sequence: Synthetic oligonucleotide
cgccacuuuccuuaagcac

SEQ ID NO: 1453158 - RNA, 19 nt, Artificial Sequence
  Description of Artificial Sequence: Synthetic oligonucleotide
ccacaguucaaacugcagu

SEQ ID NO: 1453159 - RNA, 19 nt, Artificial Sequence
  Description of Artificial Sequence: Synthetic oligonucleotide
uacccaccgcuuccuuguc

SEQ ID NO: 1453160 - RNA, 19 nt, Artificial Sequence
  Description of Artificial Sequence: Synthetic oligonucleotide
gcgccacuuuccuuaagca

SEQ ID NO: 1453161 - RNA, 19 nt, Artificial Sequence
  Description of Artificial Sequence: Synthetic oligonucleotide
guugagugugguaucuuuu

SEQ ID NO: 1453162 - RNA, 19 nt, Artificial Sequence
  Description of Artificial Sequence: Synthetic oligonucleotide
ccggguccaaaaugucugc

SEQ ID NO: 1453163 - RNA, 19 nt, Artificial Sequence
  Description of Artificial Sequence: Synthetic oligonucleotide
gcaagagccucuguucgga

SEQ ID NO: 1453164 - RNA, 19 nt, Artificial Sequence
  Description of Artificial Sequence: Synthetic oligonucleotide
cucgagcuugugggugagg

SEQ ID NO: 1453165 - RNA, 19 nt, Artificial Sequence
  Description of Artificial Sequence: Synthetic oligonucleotide
ggagaggguuaaaguggag

SEQ ID NO: 1453166 - RNA, 19 nt, Artificial Sequence
  Description of Artificial Sequence: Synthetic oligonucleotide
cgagggaagugacuccagc

SEQ ID NO: 1453167 - RNA, 19 nt, Artificial Sequence
  Description of Artificial Sequence: Synthetic oligonucleotide
ugguaucuuuugggugggu

SEQ ID NO: 1453168 - RNA, 19 nt, Artificial Sequence
  Description of Artificial Sequence: Synthetic oligonucleotide
auccaccacaaaacagaau

SEQ ID NO: 1453169 - RNA, 19 nt, Artificial Sequence
  Description of Artificial Sequence: Synthetic oligonucleotide
gggcucagcauggauuuuc

SEQ ID NO: 1453170 - RNA, 19 nt, Artificial Sequence
  Description of Artificial Sequence: Synthetic oligonucleotide
gugaggcuuccgaugagcu

SEQ ID NO: 1453171 - RNA, 19 nt, Artificial Sequence
  Description of Artificial Sequence: Synthetic oligonucleotide
cccacgggagucacauggc

SEQ ID NO: 1453172 - RNA, 19 nt, Artificial Sequence
  Description of Artificial Sequence: Synthetic oligonucleotide
guccggguccaaaaugucu

SEQ ID NO: 1453173 - RNA, 19 nt, Artificial Sequence
  Description of Artificial Sequence: Synthetic oligonucleotide
aucuuuugggugggucuuu

SEQ ID NO: 1453174 - RNA, 19 nt, Artificial Sequence
  Description of Artificial Sequence: Synthetic oligonucleotide
cuggggcucagcauggauu

SEQ ID NO: 1453175 - RNA, 19 nt, Artificial Sequence
  Description of Artificial Sequence: Synthetic oligonucleotide
ggucuuucaggagaggguu

SEQ ID NO: 1453176 - RNA, 19 nt, Artificial Sequence
  Description of Artificial Sequence: Synthetic oligonucleotide
aguugcagugagacaucuu

SEQ ID NO: 1453177 - RNA, 19 nt, Artificial Sequence
  Description of Artificial Sequence: Synthetic oligonucleotide
cugggagaggccugcuugu

SEQ ID NO: 1453178 - RNA, 19 nt, Artificial Sequence
  Description of Artificial Sequence: Synthetic oligonucleotide
uucuaccgacaggcucaug

SEQ ID NO: 1453179 - RNA, 19 nt, Artificial Sequence
  Description of Artificial Sequence: Synthetic oligonucleotide
gcgucuucaccuaggccac

SEQ ID NO: 1453180 - RNA, 19 nt, Artificial Sequence
  Description of Artificial Sequence: Synthetic oligonucleotide
gucuucuggggcucagcau

SEQ ID NO: 1453181 - RNA, 19 nt, Artificial Sequence
  Description of Artificial Sequence: Synthetic oligonucleotide
gggagucacauggccggug

SEQ ID NO: 1453182 - RNA, 19 nt, Artificial Sequence
  Description of Artificial Sequence: Synthetic oligonucleotide
agcagacacuugaccugcu

SEQ ID NO: 1453183 - RNA, 19 nt, Artificial Sequence
  Description of Artificial Sequence: Synthetic oligonucleotide
ccaguaacccacaguucaa

SEQ ID NO: 1453184 - RNA, 19 nt, Artificial Sequence
  Description of Artificial Sequence: Synthetic oligonucleotide
gcacugcgcgcucccuccg

SEQ ID NO: 1453185 - RNA, 19 nt, Artificial Sequence
  Description of Artificial Sequence: Synthetic oligonucleotide
gcgaggcguccagagagug

SEQ ID NO: 1453186 - RNA, 19 nt, Artificial Sequence
  Description of Artificial Sequence: Synthetic oligonucleotide
ggguuaaaguggagagguc

SEQ ID NO: 1453187 - RNA, 19 nt, Artificial Sequence
  Description of Artificial Sequence: Synthetic oligonucleotide
gugugugugugugugucuu

SEQ ID NO: 1453188 - RNA, 19 nt, Artificial Sequence
  Description of Artificial Sequence: Synthetic oligonucleotide
ccgagggaagugacuccag

SEQ ID NO: 1453189 - RNA, 19 nt, Artificial Sequence
  Description of Artificial Sequence: Synthetic oligonucleotide
caguugcagugagacaucu

SEQ ID NO: 1453190 - RNA, 19 nt, Artificial Sequence
  Description of Artificial Sequence: Synthetic oligonucleotide
ccccaguaacccacaguuc

SEQ ID NO: 1453191 - RNA, 19 nt, Artificial Sequence
  Description of Artificial Sequence: Synthetic oligonucleotide
gggccugaaguccgaggga

SEQ ID NO: 1453192 - RNA, 19 nt, Artificial Sequence
  Description of Artificial Sequence: Synthetic oligonucleotide
cugcgcgcucccuccgguc

SEQ ID NO: 1453193 - RNA, 19 nt, Artificial Sequence
  Description of Artificial Sequence: Synthetic oligonucleotide
gugugugugugugucuuuu

SEQ ID NO: 1453194 - RNA, 19 nt, Artificial Sequence
  Description of Artificial Sequence: Synthetic oligonucleotide
gggucuuucaggagagggu

SEQ ID NO: 1453195 - RNA, 19 nt, Artificial Sequence
  Description of Artificial Sequence: Synthetic oligonucleotide
gcaguugcagugagacauc

SEQ ID NO: 1453196 - RNA, 19 nt, Artificial Sequence
  Description of Artificial Sequence: Synthetic oligonucleotide
uucuggaguccggguccaa

SEQ ID NO: 1453197 - RNA, 19 nt, Artificial Sequence
  Description of Artificial Sequence: Synthetic oligonucleotide
gccugcuugucaagagaac

SEQ ID NO: 1453198 - RNA, 19 nt, Artificial Sequence
  Description of Artificial Sequence: Synthetic oligonucleotide
ugacguccucuugcuccuc

SEQ ID NO: 1453199 - RNA, 19 nt, Artificial Sequence
  Description of Artificial Sequence: Synthetic oligonucleotide
guucaagguuuuacaguuu

SEQ ID NO: 1453200 - RNA, 19 nt, Artificial Sequence
  Description of Artificial Sequence: Synthetic oligonucleotide
caugcugcccagccagaau

SEQ ID NO: 1453201 - RNA, 19 nt, Artificial Sequence
  Description of Artificial Sequence: Synthetic oligonucleotide
gguccaucguugucuuccu

SEQ ID NO: 1453202 - RNA, 19 nt, Artificial Sequence
  Description of Artificial Sequence: Synthetic oligonucleotide
gcucaugggugaggcuuug

SEQ ID NO: 1453203 - RNA, 19 nt, Artificial Sequence
  Description of Artificial Sequence: Synthetic oligonucleotide
cgcuuccuugucaucgcuc

SEQ ID NO: 1453204 - RNA, 19 nt, Artificial Sequence
  Description of Artificial Sequence: Synthetic oligonucleotide
caagagccucuguucggau

SEQ ID NO: 1453205 - RNA, 19 nt, Artificial Sequence
  Description of Artificial Sequence: Synthetic oligonucleotide
ccccuaugaacaucuugua

SEQ ID NO: 1453206 - RNA, 19 nt, Artificial Sequence
  Description of Artificial Sequence: Synthetic oligonucleotide
gggagauggccccugccuu

SEQ ID NO: 1453207 - RNA, 19 nt, Artificial Sequence
  Description of Artificial Sequence: Synthetic oligonucleotide
ccugaaguccgagggaagu

SEQ ID NO: 1453208 - RNA, 19 nt, Artificial Sequence
  Description of Artificial Sequence: Synthetic oligonucleotide
aggcguccagagagugaga

SEQ ID NO: 1453209 - RNA, 19 nt, Artificial Sequence
  Description of Artificial Sequence: Synthetic oligonucleotide
cacucgggcgaggcgucca

SEQ ID NO: 1453210 - RNA, 19 nt, Artificial Sequence
  Description of Artificial Sequence: Synthetic oligonucleotide
gggucucgagcuugugggu

SEQ ID NO: 1453211 - RNA, 19 nt, Artificial Sequence
  Description of Artificial Sequence: Synthetic oligonucleotide
cggauaucuuccgaggucu

SEQ ID NO: 1453212 - RNA, 19 nt, Artificial Sequence
  Description of Artificial Sequence: Synthetic oligonucleotide
guucuaccgacaggcucau

SEQ ID NO: 1453213 - RNA, 19 nt, Artificial Sequence
  Description of Artificial Sequence: Synthetic oligonucleotide
cucauucagagagcuccuu

SEQ ID NO: 1453214 - RNA, 19 nt, Artificial Sequence
  Description of Artificial Sequence: Synthetic oligonucleotide
guguugagugugguaucuu

SEQ ID NO: 1453215 - RNA, 19 nt, Artificial Sequence
  Description of Artificial Sequence: Synthetic oligonucleotide
ccaaguccccuaugaacau

SEQ ID NO: 1453216 - RNA, 19 nt, Artificial Sequence
  Description of Artificial Sequence: Synthetic oligonucleotide
ccuugggccugaaguccga

SEQ ID NO: 1453217 - RNA, 19 nt, Artificial Sequence
  Description of Artificial Sequence: Synthetic oligonucleotide
ccaccgcuuccuugucauc

SEQ ID NO: 1453218 - RNA, 19 nt, Artificial Sequence
  Description of Artificial Sequence: Synthetic oligonucleotide
cccaccgcuuccuugucau

SEQ ID NO: 1453219 - RNA, 19 nt, Artificial Sequence
  Description of Artificial Sequence: Synthetic oligonucleotide
gccuagauccugaguucua

SEQ ID NO: 1453220 - RNA, 19 nt, Artificial Sequence
  Description of Artificial Sequence: Synthetic oligonucleotide
ccuaggccacuaaggacau

SEQ ID NO: 1453221 - RNA, 19 nt, Artificial Sequence
  Description of Artificial Sequence: Synthetic oligonucleotide
cgaggcguccagagaguga

SEQ ID NO: 1453222 - RNA, 19 nt, Artificial Sequence
  Description of Artificial Sequence: Synthetic oligonucleotide
gccagagauuugucuugau

SEQ ID NO: 1453223 - RNA, 19 nt, Artificial Sequence
  Description of Artificial Sequence: Synthetic oligonucleotide
ccacucgggcgaggcgucc

SEQ ID NO: 1453224 - RNA, 19 nt, Artificial Sequence
  Description of Artificial Sequence: Synthetic oligonucleotide
gcgcgcucccuccggucca

SEQ ID NO: 1453225 - RNA, 19 nt, Artificial Sequence
  Description of Artificial Sequence: Synthetic oligonucleotide
ccaugagcaggcucccuuu

SEQ ID NO: 1453226 - RNA, 19 nt, Artificial Sequence
  Description of Artificial Sequence: Synthetic oligonucleotide
gcucccuccgguccagguu

SEQ ID NO: 1453227 - RNA, 19 nt, Artificial Sequence
  Description of Artificial Sequence: Synthetic oligonucleotide
ggauaucuuccgaggucuu

SEQ ID NO: 1453228 - RNA, 19 nt, Artificial Sequence
  Description of Artificial Sequence: Synthetic oligonucleotide
ggcgaggcguccagagagu

SEQ ID NO: 1453229 - RNA, 19 nt, Artificial Sequence
  Description of Artificial Sequence: Synthetic oligonucleotide
cgagcuugugggugaggcu

SEQ ID NO: 1453230 - RNA, 19 nt, Artificial Sequence
  Description of Artificial Sequence: Synthetic oligonucleotide
gcucggcugacagguaauu

SEQ ID NO: 1453231 - RNA, 19 nt, Artificial Sequence
  Description of Artificial Sequence: Synthetic oligonucleotide
gcgcucccuccgguccagg

SEQ ID NO: 1453232 - RNA, 19 nt, Artificial Sequence
  Description of Artificial Sequence: Synthetic oligonucleotide
gccucuguucggauaucuu

SEQ ID NO: 1453233 - RNA, 19 nt, Artificial Sequence
  Description of Artificial Sequence: Synthetic oligonucleotide
ccgcugcucgaugaggagu

SEQ ID NO: 1453234 - RNA, 19 nt, Artificial Sequence
  Description of Artificial Sequence: Synthetic oligonucleotide
gcugcucgaugaggagugu

SEQ ID NO: 1453235 - RNA, 19 nt, Artificial Sequence
  Description of Artificial Sequence: Synthetic oligonucleotide
cuaggccacuaaggacauu

SEQ ID NO: 1453236 - RNA, 19 nt, Artificial Sequence
  Description of Artificial Sequence: Synthetic oligonucleotide
cgcgcucccuccgguccag

SEQ ID NO: 1453237 - RNA, 19 nt, Artificial Sequence
  Description of Artificial Sequence: Synthetic oligonucleotide
ccuugucaucgcuccucuu

SEQ ID NO: 1453238 - RNA, 19 nt, Artificial Sequence
  Description of Artificial Sequence: Synthetic oligonucleotide
ccgaugagcucagccuuuu

SEQ ID NO: 1453239 - RNA, 19 nt, Artificial Sequence
  Description of Artificial Sequence: Synthetic oligonucleotide
ggggcucagcauggauuuu

SEQ ID NO: 1453240 - RNA, 19 nt, Artificial Sequence
  Description of Artificial Sequence: Synthetic oligonucleotide
cgggagucacauggccggu

SEQ ID NO: 1453241 - RNA, 19 nt, Artificial Sequence
  Description of Artificial Sequence: Synthetic oligonucleotide
aaagcaaccaacagcaucc

SEQ ID NO: 1453242 - RNA, 19 nt, Artificial Sequence
  Description of Artificial Sequence: Synthetic oligonucleotide
aaagauguaucucuugauc

SEQ ID NO: 1453243 - RNA, 19 nt, Artificial Sequence
  Description of Artificial Sequence: Synthetic oligonucleotide
aauguggcaggacuugggc

SEQ ID NO: 1453244 - RNA, 19 nt, Artificial Sequence
  Description of Artificial Sequence: Synthetic oligonucleotide
aagauguaucucuugaucu

SEQ ID NO: 1453245 - RNA, 19 nt, Artificial Sequence
  Description of Artificial Sequence: Synthetic oligonucleotide
aaauaacgguugcauaugg

SEQ ID NO: 1453246 - RNA, 19 nt, Artificial Sequence
  Description of Artificial Sequence: Synthetic oligonucleotide
  modified_base (3)..(3): a, c, u, g, unknown or other
  modified_base (15)..(15): a, c, u, g, unknown or other
ucncuuuucacacunuccc

SEQ ID NO: 1453247 - RNA, 19 nt, Artificial Sequence
  Description of Artificial Sequence: Synthetic oligonucleotide
gaacuugugacagacacgg

SEQ ID NO: 1453248 - RNA, 19 nt, Artificial Sequence
  Description of Artificial Sequence: Synthetic oligonucleotide
ugaaauaacgguugcauau

SEQ ID NO: 1453249 - RNA, 19 nt, Artificial Sequence
  Description of Artificial Sequence: Synthetic oligonucleotide
uguggcacaggccagaacu

SEQ ID NO: 1453250 - RNA, 19 nt, Artificial Sequence
  Description of Artificial Sequence: Synthetic oligonucleotide
uagcagaagaacugaaggg

SEQ ID NO: 1453251 - RNA, 19 nt, Artificial Sequence
  Description of Artificial Sequence: Synthetic oligonucleotide
uuaucuuugugucccuggg

SEQ ID NO: 1453252 - RNA, 19 nt, Artificial Sequence
  Description of Artificial Sequence: Synthetic oligonucleotide
auaacgguugcauauggug

SEQ ID NO: 1453253 - RNA, 19 nt, Artificial Sequence
  Description of Artificial Sequence: Synthetic oligonucleotide
  modified_base (4)..(4): a, c, u, g, unknown or other
  modified_base (16)..(16): a, c, u, g, unknown or other
cucncuuuucacacunucc

SEQ ID NO: 1453254 - RNA, 19 nt, Artificial Sequence
  Description of Artificial Sequence: Synthetic oligonucleotide
ugaguuacugucauagaac

SEQ ID NO: 1453255 - RNA, 19 nt, Artificial Sequence
  Description of Artificial Sequence: Synthetic oligonucleotide
guuacugucauagaacuug

SEQ ID NO: 1453256 - RNA, 19 nt, Artificial Sequence
  Description of Artificial Sequence: Synthetic oligonucleotide
agguguguccaucuggagc

SEQ ID NO: 1453257 - RNA, 19 nt, Artificial Sequence
  Description of Artificial Sequence: Synthetic oligonucleotide
agacuagcaaaucuugguc

SEQ ID NO: 1453258 - RNA, 19 nt, Artificial Sequence
  Description of Artificial Sequence: Synthetic oligonucleotide
  modified_base (9)..(9): a, c, u, g, unknown or other
uucacacunucccacgucc

SEQ ID NO: 1453259 - RNA, 19 nt, Artificial Sequence
  Description of Artificial Sequence: Synthetic oligonucleotide
uaacgguugcauauggugc

SEQ ID NO: 1453260 - RNA, 19 nt, Artificial Sequence
  Description of Artificial Sequence: Synthetic oligonucleotide
acaccugcggcucaugggc

SEQ ID NO: 1453261 - RNA, 19 nt, Artificial Sequence
  Description of Artificial Sequence: Synthetic oligonucleotide
cagacauagcccaucacgg

SEQ ID NO: 1453262 - RNA, 19 nt, Artificial Sequence
  Description of Artificial Sequence: Synthetic oligonucleotide
gaucaggucucccauguag

SEQ ID NO: 1453263 - RNA, 19 nt, Artificial Sequence
  Description of Artificial Sequence: Synthetic oligonucleotide
uguugcaccagcguuuugg

SEQ ID NO: 1453264 - RNA, 19 nt, Artificial Sequence
  Description of Artificial Sequence: Synthetic oligonucleotide
cugucauagaacuugugac

SEQ ID NO: 1453265 - RNA, 19 nt, Artificial Sequence
  Description of Artificial Sequence: Synthetic oligonucleotide
  modified_base (19)..(19): a, c, u, g, unknown or other
ugugcuucucucuugcucn

SEQ ID NO: 1453266 - RNA, 19 nt, Artificial Sequence
  Description of Artificial Sequence: Synthetic oligonucleotide
gaugucucgaggcaugggc

SEQ ID NO: 1453267 - RNA, 19 nt, Artificial Sequence
  Description of Artificial Sequence: Synthetic oligonucleotide
ucuaaagauguaucucuug

SEQ ID NO: 1453268 - RNA, 19 nt, Artificial Sequence
  Description of Artificial Sequence: Synthetic oligonucleotide
uccccugucucccagagga

SEQ ID NO: 1453269 - RNA, 19 nt, Artificial Sequence
  Description of Artificial Sequence: Synthetic oligonucleotide
ugcauauggugcagaaggg

SEQ ID NO: 1453270 - RNA, 19 nt, Artificial Sequence
  Description of Artificial Sequence: Synthetic oligonucleotide
ucuugaucucaccugcuug

SEQ ID NO: 1453271 - RNA, 19 nt, Artificial Sequence
  Description of Artificial Sequence: Synthetic oligonucleotide
aacgguugcauauggugca

SEQ ID NO: 1453272 - RNA, 19 nt, Artificial Sequence
  Description of Artificial Sequence: Synthetic oligonucleotide
cuugaucucaccugcuugc

SEQ ID NO: 1453273 - RNA, 19 nt, Artificial Sequence
  Description of Artificial Sequence: Synthetic oligonucleotide
cauguaguacaccuggcag

SEQ ID NO: 1453274 - RNA, 19 nt, Artificial Sequence
  Description of Artificial Sequence: Synthetic oligonucleotide
ugaucacucucaaagcaac

SEQ ID NO: 1453275 - RNA, 19 nt, Artificial Sequence
  Description of Artificial Sequence: Synthetic oligonucleotide
uucgccaugccauuugggc

SEQ ID NO: 1453276 - RNA, 19 nt, Artificial Sequence
  Description of Artificial Sequence: Synthetic oligonucleotide
gaagggucugcuuggagug

SEQ ID NO: 1453277 - RNA, 19 nt, Artificial Sequence
  Description of Artificial Sequence: Synthetic oligonucleotide
cugcauuuccccaagccgc

SEQ ID NO: 1453278 - RNA, 19 nt, Artificial Sequence
  Description of Artificial Sequence: Synthetic oligonucleotide
uucuucuucuucuucuuga

SEQ ID NO: 1453279 - RNA, 19 nt, Artificial Sequence
  Description of Artificial Sequence: Synthetic oligonucleotide
ugguuguuccuuuucaagu

SEQ ID NO: 1453280 - RNA, 19 nt, Artificial Sequence
  Description of Artificial Sequence: Synthetic oligonucleotide
ugaagggucugcuuggagu

SEQ ID NO: 1453281 - RNA, 19 nt, Artificial Sequence
  Description of Artificial Sequence: Synthetic oligonucleotide
uuuucgaggggucuugaaa

SEQ ID NO: 1453282 - RNA, 19 nt, Artificial Sequence
  Description of Artificial Sequence: Synthetic oligonucleotide
uuguuuggcgaucuugugu

SEQ ID NO: 1453283 - RNA, 19 nt, Artificial Sequence
  Description of Artificial Sequence: Synthetic oligonucleotide
  modified_base (12)..(12): a, c, u, g, unknown or other
cuuuucacacunucccacg

SEQ ID NO: 1453284 - RNA, 19 nt, Artificial Sequence
  Description of Artificial Sequence: Synthetic oligonucleotide
gcagacauagcccaucacg

SEQ ID NO: 1453285 - RNA, 19 nt, Artificial Sequence
  Description of Artificial Sequence: Synthetic oligonucleotide
cuuuucaagugucuucagc

SEQ ID NO: 1453286 - RNA, 19 nt, Artificial Sequence
  Description of Artificial Sequence: Synthetic oligonucleotide
gacgguugcgguucugugg

SEQ ID NO: 1453287 - RNA, 19 nt, Artificial Sequence
  Description of Artificial Sequence: Synthetic oligonucleotide
ugaagugguccuccucugg

SEQ ID NO: 1453288 - RNA, 19 nt, Artificial Sequence
  Description of Artificial Sequence: Synthetic oligonucleotide
uugaucacucucaaagcaa

SEQ ID NO: 1453289 - RNA, 19 nt, Artificial Sequence
  Description of Artificial Sequence: Synthetic oligonucleotide
uuccucuaaagauguaucu

SEQ ID NO: 1453290 - RNA, 19 nt, Artificial Sequence
  Description of Artificial Sequence: Synthetic oligonucleotide
gaaauaacgguugcauaug

SEQ ID NO: 1453291 - RNA, 19 nt, Artificial Sequence
  Description of Artificial Sequence: Synthetic oligonucleotide
ucaaagugggccagggacu

SEQ ID NO: 1453292 - RNA, 19 nt, Artificial Sequence
  Description of Artificial Sequence: Synthetic oligonucleotide
ugaacagcgcagucaaagc

SEQ ID NO: 1453293 - RNA, 19 nt, Artificial Sequence
  Description of Artificial Sequence: Synthetic oligonucleotide
uguuuggcgaucuuguguu

SEQ ID NO: 1453294 - RNA, 19 nt, Artificial Sequence
  Description of Artificial Sequence: Synthetic oligonucleotide
gaucuuguguuccuguguc

SEQ ID NO: 1453295 - RNA, 19 nt, Artificial Sequence
  Description of Artificial Sequence: Synthetic oligonucleotide
ugagcgucugacauguggu

SEQ ID NO: 1453296 - RNA, 19 nt, Artificial Sequence
  Description of Artificial Sequence: Synthetic oligonucleotide
uccgacgccucaaaggucu

SEQ ID NO: 1453297 - RNA, 19 nt, Artificial Sequence
  Description of Artificial Sequence: Synthetic oligonucleotide
uugaucgcacaccugcggc

SEQ ID NO: 1453298 - RNA, 19 nt, Artificial Sequence
  Description of Artificial Sequence: Synthetic oligonucleotide
ugcugcauuuccccaagcc

SEQ ID NO: 1453299 - RNA, 19 nt, Artificial Sequence
  Description of Artificial Sequence: Synthetic oligonucleotide
agacauagcccaucacggg

SEQ ID NO: 1453300 - RNA, 19 nt, Artificial Sequence
  Description of Artificial Sequence: Synthetic oligonucleotide
caaagcaaccaacagcauc

SEQ ID NO: 1453301 - RNA, 19 nt, Artificial Sequence
  Description of Artificial Sequence: Synthetic oligonucleotide
auuugggcagacuagcaaa

SEQ ID NO: 1453302 - RNA, 19 nt, Artificial Sequence
  Description of Artificial Sequence: Synthetic oligonucleotide
uuggccuuaucuuuguguc

SEQ ID NO: 1453303 - RNA, 19 nt, Artificial Sequence
  Description of Artificial Sequence: Synthetic oligonucleotide
agaacugacgcuugcucug

SEQ ID NO: 1453304 - RNA, 19 nt, Artificial Sequence
  Description of Artificial Sequence: Synthetic oligonucleotide
aaauguggcaggacuuggg

SEQ ID NO: 1453305 - RNA, 19 nt, Artificial Sequence
  Description of Artificial Sequence: Synthetic oligonucleotide
cugagcgucugacaugugg

SEQ ID NO: 1453306 - RNA, 19 nt, Artificial Sequence
  Description of Artificial Sequence: Synthetic oligonucleotide
cuugaucacucucaaagca

SEQ ID NO: 1453307 - RNA, 19 nt, Artificial Sequence
  Description of Artificial Sequence: Synthetic oligonucleotide
agcguuuuggaggaggcuc

SEQ ID NO: 1453308 - RNA, 19 nt, Artificial Sequence
  Description of Artificial Sequence: Synthetic oligonucleotide
gaggggucuugaaauaacg

SEQ ID NO: 1453309 - RNA, 19 nt, Artificial Sequence
  Description of Artificial Sequence: Synthetic oligonucleotide
auuccucuaaagauguauc

SEQ ID NO: 1453310 - RNA, 19 nt, Artificial Sequence
  Description of Artificial Sequence: Synthetic oligonucleotide
gugaacagcgcagucaaag

SEQ ID NO: 1453311 - RNA, 19 nt, Artificial Sequence
  Description of Artificial Sequence: Synthetic oligonucleotide
cugacgcuugcucuggugg

SEQ ID NO: 1453312 - RNA, 19 nt, Artificial Sequence
  Description of Artificial Sequence: Synthetic oligonucleotide
ucucagggauuguuuggcg

SEQ ID NO: 1453313 - RNA, 19 nt, Artificial Sequence
  Description of Artificial Sequence: Synthetic oligonucleotide
uguaguacaccuggcaggu

SEQ ID NO: 1453314 - RNA, 19 nt, Artificial Sequence
  Description of Artificial Sequence: Synthetic oligonucleotide
guugaucgcacaccugcgg

SEQ ID NO: 1453315 - RNA, 19 nt, Artificial Sequence
  Description of Artificial Sequence: Synthetic oligonucleotide
cuucucugaugucuguucc

SEQ ID NO: 1453316 - RNA, 19 nt, Artificial Sequence
  Description of Artificial Sequence: Synthetic oligonucleotide
acaccauaugccguguugg

SEQ ID NO: 1453317 - RNA, 19 nt, Artificial Sequence
  Description of Artificial Sequence: Synthetic oligonucleotide
gaacagcgcagucaaagca

SEQ ID NO: 1453318 - RNA, 19 nt, Artificial Sequence
  Description of Artificial Sequence: Synthetic oligonucleotide
uguuccuguguccugcggu

SEQ ID NO: 1453319 - RNA, 19 nt, Artificial Sequence
  Description of Artificial Sequence: Synthetic oligonucleotide
agcgucugacauguggucc

SEQ ID NO: 1453320 - RNA, 19 nt, Artificial Sequence
  Description of Artificial Sequence: Synthetic oligonucleotide
agccguaauccugaguuac

SEQ ID NO: 1453321 - RNA, 19 nt, Artificial Sequence
  Description of Artificial Sequence: Synthetic oligonucleotide
uguaucucuugaucucacc

SEQ ID NO: 1453322 - RNA, 19 nt, Artificial Sequence
  Description of Artificial Sequence: Synthetic oligonucleotide
ucaagugucuucagcuccu

SEQ ID NO: 1453323 - RNA, 19 nt, Artificial Sequence
  Description of Artificial Sequence: Synthetic oligonucleotide
gaucucaccugcuugcaga

SEQ ID NO: 1453324 - RNA, 19 nt, Artificial Sequence
  Description of Artificial Sequence: Synthetic oligonucleotide
uugaaauaacgguugcaua

SEQ ID NO: 1453325 - RNA, 19 nt, Artificial Sequence
  Description of Artificial Sequence: Synthetic oligonucleotide
uuucaagugucuucagcuc

SEQ ID NO: 1453326 - RNA, 19 nt, Artificial Sequence
  Description of Artificial Sequence: Synthetic oligonucleotide
  modified_base (7)..(7): a, c, u, g, unknown or other
  modified_base (19)..(19): a, c, u, g, unknown or other
uugcucncuuuucacacun

SEQ ID NO: 1453327 - RNA, 19 nt, Artificial Sequence
  Description of Artificial Sequence: Synthetic oligonucleotide
  modified_base (5)..(5): a, c, u, g, unknown or other
cacunucccacguccaggc

SEQ ID NO: 1453328 - RNA, 19 nt, Artificial Sequence
  Description of Artificial Sequence: Synthetic oligonucleotide
gaguuacugucauagaacu

SEQ ID NO: 1453329 - RNA, 19 nt, Artificial Sequence
  Description of Artificial Sequence: Synthetic oligonucleotide
  modified_base (4)..(4): a, c, u, g, unknown or other
acunucccacguccaggcc

SEQ ID NO: 1453330 - RNA, 19 nt, Artificial Sequence
  Description of Artificial Sequence: Synthetic oligonucleotide
ucccugggacuucacaugc

SEQ ID NO: 1453331 - RNA, 19 nt, Artificial Sequence
  Description of Artificial Sequence: Synthetic oligonucleotide
uaucuuugugucccuggga

SEQ ID NO: 1453332 - RNA, 19 nt, Artificial Sequence
  Description of Artificial Sequence: Synthetic oligonucleotide
ucuucagguguguccaucu

SEQ ID NO: 1453333 - RNA, 19 nt, Artificial Sequence
  Description of Artificial Sequence: Synthetic oligonucleotide
ucuugaaauaacgguugca

SEQ ID NO: 1453334 - RNA, 19 nt, Artificial Sequence
  Description of Artificial Sequence: Synthetic oligonucleotide
uggcuggugguuccgacgc

SEQ ID NO: 1453335 - RNA, 19 nt, Artificial Sequence
  Description of Artificial Sequence: Synthetic oligonucleotide
ugacgcuugcucugguggg

SEQ ID NO: 1453336 - RNA, 19 nt, Artificial Sequence
  Description of Artificial Sequence: Synthetic oligonucleotide
ugaucucaccugcuugcag

SEQ ID NO: 1453337 - RNA, 19 nt, Artificial Sequence
  Description of Artificial Sequence: Synthetic oligonucleotide
gguuguuccuuuucaagug

SEQ ID NO: 1453338 - RNA, 19 nt, Artificial Sequence
  Description of Artificial Sequence: Synthetic oligonucleotide
auuguuuggcgaucuugug

SEQ ID NO: 1453339 - RNA, 19 nt, Artificial Sequence
  Description of Artificial Sequence: Synthetic oligonucleotide
aggucucccauguaguaca

SEQ ID NO: 1453340 - RNA, 19 nt, Artificial Sequence
  Description of Artificial Sequence: Synthetic oligonucleotide
uuugggcagacuagcaaau

SEQ ID NO: 1453341 - RNA, 19 nt, Artificial Sequence
  Description of Artificial Sequence: Synthetic oligonucleotide
cacucucaaagcaaccaac

SEQ ID NO: 1453342 - RNA, 19 nt, Artificial Sequence
  Description of Artificial Sequence: Synthetic oligonucleotide
ucuuguguuccuguguccu

SEQ ID NO: 1453343 - RNA, 19 nt, Artificial Sequence
  Description of Artificial Sequence: Synthetic oligonucleotide
aauaacgguugcauauggu

SEQ ID NO: 1453344 - RNA, 19 nt, Artificial Sequence
  Description of Artificial Sequence: Synthetic oligonucleotide
cugaguuacugucauagaa

SEQ ID NO: 1453345 - RNA, 19 nt, Artificial Sequence
  Description of Artificial Sequence: Synthetic oligonucleotide
gacacggcagacauagccc

SEQ ID NO: 1453346 - RNA, 19 nt, Artificial Sequence
  Description of Artificial Sequence: Synthetic oligonucleotide
  modified_base (11)..(11): a, c, u, g, unknown or other
ucucuugcucncuuuucac

SEQ ID NO: 1453347 - RNA, 19 nt, Artificial Sequence
  Description of Artificial Sequence: Synthetic oligonucleotide
uuuggaggaggcucuucug

SEQ ID NO: 1453348 - RNA, 19 nt, Artificial Sequence
  Description of Artificial Sequence: Synthetic oligonucleotide
gacuagcaaaucuuggucu

SEQ ID NO: 1453349 - RNA, 19 nt, Artificial Sequence
  Description of Artificial Sequence: Synthetic oligonucleotide
  modified_base (7)..(7): a, c, u, g, unknown or other
cacacunucccacguccag

SEQ ID NO: 1453350 - RNA, 19 nt, Artificial Sequence
  Description of Artificial Sequence: Synthetic oligonucleotide
agaacuugugacagacacg

SEQ ID NO: 1453351 - RNA, 19 nt, Artificial Sequence
  Description of Artificial Sequence: Synthetic oligonucleotide
agaagggucucagggauug

SEQ ID NO: 1453352 - RNA, 19 nt, Artificial Sequence
  Description of Artificial Sequence: Synthetic oligonucleotide
uguccugcggugcuggauc

SEQ ID NO: 1453353 - RNA, 19 nt, Artificial Sequence
  Description of Artificial Sequence: Synthetic oligonucleotide
  modified_base (2)..(2): a, c, u, g, unknown or other
  modified_base (14)..(14): a, c, u, g, unknown or other
cncuuuucacacunuccca

SEQ ID NO: 1453354 - RNA, 19 nt, Artificial Sequence
  Description of Artificial Sequence: Synthetic oligonucleotide
uccucuaaagauguaucuc

SEQ ID NO: 1453355 - RNA, 19 nt, Artificial Sequence
  Description of Artificial Sequence: Synthetic oligonucleotide
uguguuccuguguccugcg

SEQ ID NO: 1453356 - RNA, 19 nt, Artificial Sequence
  Description of Artificial Sequence: Synthetic oligonucleotide
ucgccaugccauuugggca

SEQ ID NO: 1453357 - RNA, 19 nt, Artificial Sequence
  Description of Artificial Sequence: Synthetic oligonucleotide
gucuugaaauaacgguugc

SEQ ID NO: 1453358 - RNA, 19 nt, Artificial Sequence
  Description of Artificial Sequence: Synthetic oligonucleotide
auccacugugaugaagugg

SEQ ID NO: 1453359 - RNA, 19 nt, Artificial Sequence
  Description of Artificial Sequence: Synthetic oligonucleotide
ugcugagcgucugacaugu

SEQ ID NO: 1453360 - RNA, 19 nt, Artificial Sequence
  Description of Artificial Sequence: Synthetic oligonucleotide
  modified_base (8)..(8): a, c, u, g, unknown or other
ucacacunucccacgucca

SEQ ID NO: 1453361 - RNA, 19 nt, Artificial Sequence
  Description of Artificial Sequence: Synthetic oligonucleotide
ucauagaacuugugacaga

SEQ ID NO: 1453362 - RNA, 19 nt, Artificial Sequence
  Description of Artificial Sequence: Synthetic oligonucleotide
cauucgccaugccauuugg

SEQ ID NO: 1453363 - RNA, 19 nt, Artificial Sequence
  Description of Artificial Sequence: Synthetic oligonucleotide
ugcuggaucaggucuccca

SEQ ID NO: 1453364 - RNA, 19 nt, Artificial Sequence
  Description of Artificial Sequence: Synthetic oligonucleotide
acuagcaaaucuuggucuu

SEQ ID NO: 1453365 - RNA, 19 nt, Artificial Sequence
  Description of Artificial Sequence: Synthetic oligonucleotide
agcgcagucaaagcauuuc

SEQ ID NO: 1453366 - RNA, 19 nt, Artificial Sequence
  Description of Artificial Sequence: Synthetic oligonucleotide
accauaugccguguugggg

SEQ ID NO: 1453367 - RNA, 19 nt, Artificial Sequence
  Description of Artificial Sequence: Synthetic oligonucleotide
uuguguuccuguguccugc

SEQ ID NO: 1453368 - RNA, 19 nt, Artificial Sequence
  Description of Artificial Sequence: Synthetic oligonucleotide
gacuugcagugagagagcc

SEQ ID NO: 1453369 - RNA, 19 nt, Artificial Sequence
  Description of Artificial Sequence: Synthetic oligonucleotide
acguccaggccaucagugg

SEQ ID NO: 1453370 - RNA, 19 nt, Artificial Sequence
  Description of Artificial Sequence: Synthetic oligonucleotide
agacuuguggcuggaaaug

SEQ ID NO: 1453371 - RNA, 19 nt, Artificial Sequence
  Description of Artificial Sequence: Synthetic oligonucleotide
ugcauuuccccaagccgcu

SEQ ID NO: 1453372 - RNA, 19 nt, Artificial Sequence
  Description of Artificial Sequence: Synthetic oligonucleotide
ugggccuggaucugcagac

SEQ ID NO: 1453373 - RNA, 19 nt, Artificial Sequence
  Description of Artificial Sequence: Synthetic oligonucleotide
uagcaaaucuuggucuuca

SEQ ID NO: 1453374 - RNA, 19 nt, Artificial Sequence
  Description of Artificial Sequence: Synthetic oligonucleotide
caccauaugccguguuggg

SEQ ID NO: 1453375 - RNA, 19 nt, Artificial Sequence
  Description of Artificial Sequence: Synthetic oligonucleotide
aaagcauuucgggcguuga

SEQ ID NO: 1453376 - RNA, 19 nt, Artificial Sequence
  Description of Artificial Sequence: Synthetic oligonucleotide
  modified_base (13)..(13): a, c, u, g, unknown or other
ucucucuugcucncuuuuc

SEQ ID NO: 1453377 - RNA, 19 nt, Artificial Sequence
  Description of Artificial Sequence: Synthetic oligonucleotide
cucgagugcugcauuuccc

SEQ ID NO: 1453378 - RNA, 19 nt, Artificial Sequence
  Description of Artificial Sequence: Synthetic oligonucleotide
uccugugcuucuucagacc

SEQ ID NO: 1453379 - RNA, 19 nt, Artificial Sequence
  Description of Artificial Sequence: Synthetic oligonucleotide
cuggcaagaccuccucugg

SEQ ID NO: 1453380 - RNA, 19 nt, Artificial Sequence
  Description of Artificial Sequence: Synthetic oligonucleotide
gaucacucucaaagcaacc

SEQ ID NO: 1453381 - RNA, 19 nt, Artificial Sequence
  Description of Artificial Sequence: Synthetic oligonucleotide
aacuugugacagacacggc

SEQ ID NO: 1453382 - RNA, 19 nt, Artificial Sequence
  Description of Artificial Sequence: Synthetic oligonucleotide
ggucuugaaauaacgguug

SEQ ID NO: 1453383 - RNA, 19 nt, Artificial Sequence
  Description of Artificial Sequence: Synthetic oligonucleotide
uucucugaugucuguuccu

SEQ ID NO: 1453384 - RNA, 19 nt, Artificial Sequence
  Description of Artificial Sequence: Synthetic oligonucleotide
gaacugacgcuugcucugg

SEQ ID NO: 1453385 - RNA, 19 nt, Artificial Sequence
  Description of Artificial Sequence: Synthetic oligonucleotide
gauuguuuggcgaucuugu

SEQ ID NO: 1453386 - RNA, 19 nt, Artificial Sequence
  Description of Artificial Sequence: Synthetic oligonucleotide
uggccuuaucuuugugucc

SEQ ID NO: 1453387 - RNA, 19 nt, Artificial Sequence
  Description of Artificial Sequence: Synthetic oligonucleotide
agugguccuccucugggcu

SEQ ID NO: 1453388 - RNA, 19 nt, Artificial Sequence
  Description of Artificial Sequence: Synthetic oligonucleotide
cuucuucuucuucuucuug

SEQ ID NO: 1453389 - RNA, 19 nt, Artificial Sequence
  Description of Artificial Sequence: Synthetic oligonucleotide
  modified_base (6)..(6): a, c, u, g, unknown or other
acacunucccacguccagg

SEQ ID NO: 1453390 - RNA, 19 nt, Artificial Sequence
  Description of Artificial Sequence: Synthetic oligonucleotide
cacaccauaugccguguug

SEQ ID NO: 1453391 - RNA, 19 nt, Artificial Sequence
  Description of Artificial Sequence: Synthetic oligonucleotide
guuccuguguccugcggug

SEQ ID NO: 1453392 - RNA, 19 nt, Artificial Sequence
  Description of Artificial Sequence: Synthetic oligonucleotide
uaggcccuuucucugugga

SEQ ID NO: 1453393 - RNA, 19 nt, Artificial Sequence
  Description of Artificial Sequence: Synthetic oligonucleotide
ugguuccgacgccucaaag

SEQ ID NO: 1453394 - RNA, 19 nt, Artificial Sequence
  Description of Artificial Sequence: Synthetic oligonucleotide
cugaaacuccugcuggcug

SEQ ID NO: 1453395 - RNA, 19 nt, Artificial Sequence
  Description of Artificial Sequence: Synthetic oligonucleotide
accagcguuuuggaggagg

SEQ ID NO: 1453396 - RNA, 19 nt, Artificial Sequence
  Description of Artificial Sequence: Synthetic oligonucleotide
ucuucuucuucuucuucuu

SEQ ID NO: 1453397 - RNA, 19 nt, Artificial Sequence
  Description of Artificial Sequence: Synthetic oligonucleotide
auauggugcagaagggucu

SEQ ID NO: 1453398 - RNA, 19 nt, Artificial Sequence
  Description of Artificial Sequence: Synthetic oligonucleotide
cacguccaggccaucagug

SEQ ID NO: 1453399 - RNA, 19 nt, Artificial Sequence
  Description of Artificial Sequence: Synthetic oligonucleotide
ggucucagggauuguuugg

SEQ ID NO: 1453400 - RNA, 19 nt, Artificial Sequence
  Description of Artificial Sequence: Synthetic oligonucleotide
gacgccucaaaggucucag

SEQ ID NO: 1453401 - RNA, 19 nt, Artificial Sequence
  Description of Artificial Sequence: Synthetic oligonucleotide
ggcacuggggucucauucg

SEQ ID NO: 1453402 - RNA, 19 nt, Artificial Sequence
  Description of Artificial Sequence: Synthetic oligonucleotide
gaucuggggucuguguuug

SEQ ID NO: 1453403 - RNA, 19 nt, Artificial Sequence
  Description of Artificial Sequence: Synthetic oligonucleotide
ucucuugaucucaccugcu

SEQ ID NO: 1453404 - RNA, 19 nt, Artificial Sequence
  Description of Artificial Sequence: Synthetic oligonucleotide
auguaucucuugaucucac

SEQ ID NO: 1453405 - RNA, 19 nt, Artificial Sequence
  Description of Artificial Sequence: Synthetic oligonucleotide
  modified_base (2)..(2): a, c, u, g, unknown or other
unucccacguccaggccau

SEQ ID NO: 1453406 - RNA, 19 nt, Artificial Sequence
  Description of Artificial Sequence: Synthetic oligonucleotide
gucucagggauuguuuggc

SEQ ID NO: 1453407 - RNA, 19 nt, Artificial Sequence
  Description of Artificial Sequence: Synthetic oligonucleotide
ugcccuguaggcccuuucu

SEQ ID NO: 1453408 - RNA, 19 nt, Artificial Sequence
  Description of Artificial Sequence: Synthetic oligonucleotide
auuucgggcguugaucgca

SEQ ID NO: 1453409 - RNA, 19 nt, Artificial Sequence
  Description of Artificial Sequence: Synthetic oligonucleotide
gagagagccguaauccuga

SEQ ID NO: 1453410 - RNA, 19 nt, Artificial Sequence
  Description of Artificial Sequence: Synthetic oligonucleotide
ucaugggccugguggcagg

SEQ ID NO: 1453411 - RNA, 19 nt, Artificial Sequence
  Description of Artificial Sequence: Synthetic oligonucleotide
  modified_base (3)..(3): a, c, u, g, unknown or other
cunucccacguccaggcca

SEQ ID NO: 1453412 - RNA, 19 nt, Artificial Sequence
  Description of Artificial Sequence: Synthetic oligonucleotide
ugacgguugcgguucugug

SEQ ID NO: 1453413 - RNA, 19 nt, Artificial Sequence
  Description of Artificial Sequence: Synthetic oligonucleotide
uugcaccagcguuuuggag

SEQ ID NO: 1453414 - RNA, 19 nt, Artificial Sequence
  Description of Artificial Sequence: Synthetic oligonucleotide
gcgcagucaaagcauuucg

SEQ ID NO: 1453415 - RNA, 19 nt, Artificial Sequence
  Description of Artificial Sequence: Synthetic oligonucleotide
ugaucuggggucuguguuu

SEQ ID NO: 1453416 - RNA, 19 nt, Artificial Sequence
  Description of Artificial Sequence: Synthetic oligonucleotide
uggaggaggcucuucuguc

SEQ ID NO: 1453417 - RNA, 19 nt, Artificial Sequence
  Description of Artificial Sequence: Synthetic oligonucleotide
cagugagagagccguaauc

SEQ ID NO: 1453418 - RNA, 19 nt, Artificial Sequence
  Description of Artificial Sequence: Synthetic oligonucleotide
gaggugaacagcgcaguca

SEQ ID NO: 1453419 - RNA, 19 nt, Artificial Sequence
  Description of Artificial Sequence: Synthetic oligonucleotide
uuucgggcguugaucgcac

SEQ ID NO: 1453420 - RNA, 19 nt, Artificial Sequence
  Description of Artificial Sequence: Synthetic oligonucleotide
acugacgcuugcucuggug

SEQ ID NO: 1453421 - RNA, 19 nt, Artificial Sequence
  Description of Artificial Sequence: Synthetic oligonucleotide
ucugggcccuuccauuccu

SEQ ID NO: 1453422 - RNA, 19 nt, Artificial Sequence
  Description of Artificial Sequence: Synthetic oligonucleotide
gacgcuugcucuggugggg

SEQ ID NO: 1453423 - RNA, 19 nt, Artificial Sequence
  Description of Artificial Sequence: Synthetic oligonucleotide
cauccacugugaugaagug

SEQ ID NO: 1453424 - RNA, 19 nt, Artificial Sequence
  Description of Artificial Sequence: Synthetic oligonucleotide
cuugaaauaacgguugcau

SEQ ID NO: 1453425 - RNA, 19 nt, Artificial Sequence
  Description of Artificial Sequence: Synthetic oligonucleotide
ucaaagcaaccaacagcau

SEQ ID NO: 1453426 - RNA, 19 nt, Artificial Sequence
  Description of Artificial Sequence: Synthetic oligonucleotide
ugcagugagagagccguaa

SEQ ID NO: 1453427 - RNA, 19 nt, Artificial Sequence
  Description of Artificial Sequence: Synthetic oligonucleotide
ggacuuuugcuuguggcug

SEQ ID NO: 1453428 - RNA, 19 nt, Artificial Sequence
  Description of Artificial Sequence: Synthetic oligonucleotide
aggcccuuucucuguggac

SEQ ID NO: 1453429 - RNA, 19 nt, Artificial Sequence
  Description of Artificial Sequence: Synthetic oligonucleotide
ggccuuaucuuuguguccc

SEQ ID NO: 1453430 - RNA, 19 nt, Artificial Sequence
  Description of Artificial Sequence: Synthetic oligonucleotide
aggcucaggcacugggguc

SEQ ID NO: 1453431 - RNA, 19 nt, Artificial Sequence
  Description of Artificial Sequence: Synthetic oligonucleotide
cucagggauuguuuggcga

SEQ ID NO: 1453432 - RNA, 19 nt, Artificial Sequence
  Description of Artificial Sequence: Synthetic oligonucleotide
guaggcccuuucucugugg

SEQ ID NO: 1453433 - RNA, 19 nt, Artificial Sequence
  Description of Artificial Sequence: Synthetic oligonucleotide
uugaucucaccugcuugca

SEQ ID NO: 1453434 - RNA, 19 nt, Artificial Sequence
  Description of Artificial Sequence: Synthetic oligonucleotide
agagagccguaauccugag

SEQ ID NO: 1453435 - RNA, 19 nt, Artificial Sequence
  Description of Artificial Sequence: Synthetic oligonucleotide
ugaccucuuggcugguggu

SEQ ID NO: 1453436 - RNA, 19 nt, Artificial Sequence
  Description of Artificial Sequence: Synthetic oligonucleotide
ucagaccccucuguggggu

SEQ ID NO: 1453437 - RNA, 19 nt, Artificial Sequence
  Description of Artificial Sequence: Synthetic oligonucleotide
cauuucgggcguugaucgc

SEQ ID NO: 1453438 - RNA, 19 nt, Artificial Sequence
  Description of Artificial Sequence: Synthetic oligonucleotide
cauuugggcagacuagcaa

SEQ ID NO: 1453439 - RNA, 19 nt, Artificial Sequence
  Description of Artificial Sequence: Synthetic oligonucleotide
cuugcagugagagagccgu

SEQ ID NO: 1453440 - RNA, 19 nt, Artificial Sequence
  Description of Artificial Sequence: Synthetic oligonucleotide
cuuggcuggugguuccgac

SEQ ID NO: 1453441 - RNA, 19 nt, Artificial Sequence
  Description of Artificial Sequence: Synthetic oligonucleotide
uucauugcuuugggcaccu

SEQ ID NO: 1453442 - RNA, 19 nt, Artificial Sequence
  Description of Artificial Sequence: Synthetic oligonucleotide
cucccauguaguacaccug

SEQ ID NO: 1453443 - RNA, 19 nt, Artificial Sequence
  Description of Artificial Sequence: Synthetic oligonucleotide
gcuagaggugaacagcgca

SEQ ID NO: 1453444 - RNA, 19 nt, Artificial Sequence
  Description of Artificial Sequence: Synthetic oligonucleotide
ugugugcuucucucuugcu

SEQ ID NO: 1453445 - RNA, 19 nt, Artificial Sequence
  Description of Artificial Sequence: Synthetic oligonucleotide
aacugacgcuugcucuggu

SEQ ID NO: 1453446 - RNA, 19 nt, Artificial Sequence
  Description of Artificial Sequence: Synthetic oligonucleotide
gagcgucugacaugugguc

SEQ ID NO: 1453447 - RNA, 19 nt, Artificial Sequence
  Description of Artificial Sequence: Synthetic oligonucleotide
acgccucaaaggucucagg

SEQ ID NO: 1453448 - RNA, 19 nt, Artificial Sequence
  Description of Artificial Sequence: Synthetic oligonucleotide
auucgccaugccauuuggg

SEQ ID NO: 1453449 - RNA, 19 nt, Artificial Sequence
  Description of Artificial Sequence: Synthetic oligonucleotide
caugcuccacaaacuuuuc

SEQ ID NO: 1453450 - RNA, 19 nt, Artificial Sequence
  Description of Artificial Sequence: Synthetic oligonucleotide
uuggugcugagcgucugac

SEQ ID NO: 1453451 - RNA, 19 nt, Artificial Sequence
  Description of Artificial Sequence: Synthetic oligonucleotide
ucucgaggcaugggcagca

SEQ ID NO: 1453452 - RNA, 19 nt, Artificial Sequence
  Description of Artificial Sequence: Synthetic oligonucleotide
ccgcuguuggugcugagcg

SEQ ID NO: 1453453 - RNA, 19 nt, Artificial Sequence
  Description of Artificial Sequence: Synthetic oligonucleotide
cucuucuucuucuucuucu

SEQ ID NO: 1453454 - RNA, 19 nt, Artificial Sequence
  Description of Artificial Sequence: Synthetic oligonucleotide
uugcgguucuguggcacag

SEQ ID NO: 1453455 - RNA, 19 nt, Artificial Sequence
  Description of Artificial Sequence: Synthetic oligonucleotide
acggcagacauagcccauc

SEQ ID NO: 1453456 - RNA, 19 nt, Artificial Sequence
  Description of Artificial Sequence: Synthetic oligonucleotide
ccuuccauuccucuaaaga

SEQ ID NO: 1453457 - RNA, 19 nt, Artificial Sequence
  Description of Artificial Sequence: Synthetic oligonucleotide
gagugcugcauuuccccaa

SEQ ID NO: 1453458 - RNA, 19 nt, Artificial Sequence
  Description of Artificial Sequence: Synthetic oligonucleotide
ggucucauucgccaugcca

SEQ ID NO: 1453459 - RNA, 19 nt, Artificial Sequence
  Description of Artificial Sequence: Synthetic oligonucleotide
cuagcaaaucuuggucuuc

SEQ ID NO: 1453460 - RNA, 19 nt, Artificial Sequence
  Description of Artificial Sequence: Synthetic oligonucleotide
  modified_base (6)..(6): a, c, u, g, unknown or other
  modified_base (18)..(18): a, c, u, g, unknown or other
ugcucncuuuucacacunu

SEQ ID NO: 1453461 - RNA, 19 nt, Artificial Sequence
  Description of Artificial Sequence: Synthetic oligonucleotide
ucuggcucgagugcugcau

SEQ ID NO: 1453462 - RNA, 19 nt, Artificial Sequence
  Description of Artificial Sequence: Synthetic oligonucleotide
caggucucccauguaguac

SEQ ID NO: 1453463 - RNA, 19 nt, Artificial Sequence
  Description of Artificial Sequence: Synthetic oligonucleotide
gagcugaccccuguggcca

SEQ ID NO: 1453464 - RNA, 19 nt, Artificial Sequence
  Description of Artificial Sequence: Synthetic oligonucleotide
ugcgguucuguggcacagg

SEQ ID NO: 1453465 - RNA, 19 nt, Artificial Sequence
  Description of Artificial Sequence: Synthetic oligonucleotide
uuugaccucuuggcuggug

SEQ ID NO: 1453466 - RNA, 19 nt, Artificial Sequence
  Description of Artificial Sequence: Synthetic oligonucleotide
ggggucuugaaauaacggu

SEQ ID NO: 1453467 - RNA, 19 nt, Artificial Sequence
  Description of Artificial Sequence: Synthetic oligonucleotide
ugggcccuuccauuccucu

SEQ ID NO: 1453468 - RNA, 19 nt, Artificial Sequence
  Description of Artificial Sequence: Synthetic oligonucleotide
agggacuugcagugagaga

SEQ ID NO: 1453469 - RNA, 19 nt, Artificial Sequence
  Description of Artificial Sequence: Synthetic oligonucleotide
augucucgaggcaugggca

SEQ ID NO: 1453470 - RNA, 19 nt, Artificial Sequence
  Description of Artificial Sequence: Synthetic oligonucleotide
cagguguguccaucuggag

SEQ ID NO: 1453471 - RNA, 19 nt, Artificial Sequence
  Description of Artificial Sequence: Synthetic oligonucleotide
  modified_base (5)..(5): a, c, u, g, unknown or other
  modified_base (17)..(17): a, c, u, g, unknown or other
gcucncuuuucacacunuc

SEQ ID NO: 1453472 - RNA, 19 nt, Artificial Sequence
  Description of Artificial Sequence: Synthetic oligonucleotide
uuccgacgccucaaagguc

SEQ ID NO: 1453473 - RNA, 19 nt, Artificial Sequence
  Description of Artificial Sequence: Synthetic oligonucleotide
gcucgagugcugcauuucc

SEQ ID NO: 1453474 - RNA, 19 nt, Artificial Sequence
  Description of Artificial Sequence: Synthetic oligonucleotide
gccauuugggcagacuagc

SEQ ID NO: 1453475 - RNA, 19 nt, Artificial Sequence
  Description of Artificial Sequence: Synthetic oligonucleotide
cagaagaacugaagggucu

SEQ ID NO: 1453476 - RNA, 19 nt, Artificial Sequence
  Description of Artificial Sequence: Synthetic oligonucleotide
caggugacgguugcgguuc

SEQ ID NO: 1453477 - RNA, 19 nt, Artificial Sequence
  Description of Artificial Sequence: Synthetic oligonucleotide
gaucugcagacuuguggcu

SEQ ID NO: 1453478 - RNA, 19 nt, Artificial Sequence
  Description of Artificial Sequence: Synthetic oligonucleotide
gccguguuggggcuguaag

SEQ ID NO: 1453479 - RNA, 19 nt, Artificial Sequence
  Description of Artificial Sequence: Synthetic oligonucleotide
gaucgcacaccugcggcuc

SEQ ID NO: 1453480 - RNA, 19 nt, Artificial Sequence
  Description of Artificial Sequence: Synthetic oligonucleotide
uuccuguguccugcggugc

SEQ ID NO: 1453481 - RNA, 19 nt, Artificial Sequence
  Description of Artificial Sequence: Synthetic oligonucleotide
cagaacugacgcuugcucu

SEQ ID NO: 1453482 - RNA, 19 nt, Artificial Sequence
  Description of Artificial Sequence: Synthetic oligonucleotide
cgcagucaaagcauuucgg

SEQ ID NO: 1453483 - RNA, 19 nt, Artificial Sequence
  Description of Artificial Sequence: Synthetic oligonucleotide
aaagugggccagggacuug

SEQ ID NO: 1453484 - RNA, 19 nt, Artificial Sequence
  Description of Artificial Sequence: Synthetic oligonucleotide
cucaugggccugguggcag

SEQ ID NO: 1453485 - RNA, 19 nt, Artificial Sequence
  Description of Artificial Sequence: Synthetic oligonucleotide
ccagcguuuuggaggaggc

SEQ ID NO: 1453486 - RNA, 19 nt, Artificial Sequence
  Description of Artificial Sequence: Synthetic oligonucleotide
gucucauucgccaugccau

SEQ ID NO: 1453487 - RNA, 19 nt, Artificial Sequence
  Description of Artificial Sequence: Synthetic oligonucleotide
uugcuuuggugcugucauc

SEQ ID NO: 1453488 - RNA, 19 nt, Artificial Sequence
  Description of Artificial Sequence: Synthetic oligonucleotide
cauuccucuaaagauguau

SEQ ID NO: 1453489 - RNA, 19 nt, Artificial Sequence
  Description of Artificial Sequence: Synthetic oligonucleotide
gucaaagcauuucgggcgu

SEQ ID NO: 1453490 - RNA, 19 nt, Artificial Sequence
  Description of Artificial Sequence: Synthetic oligonucleotide
aguccacaccauaugccgu

SEQ ID NO: 1453491 - RNA, 19 nt, Artificial Sequence
  Description of Artificial Sequence: Synthetic oligonucleotide
ccucuaaagauguaucucu

SEQ ID NO: 1453492 - RNA, 19 nt, Artificial Sequence
  Description of Artificial Sequence: Synthetic oligonucleotide
acgguugcauauggugcag

SEQ ID NO: 1453493 - RNA, 19 nt, Artificial Sequence
  Description of Artificial Sequence: Synthetic oligonucleotide
cuuggagugugugcuucuc

SEQ ID NO: 1453494 - RNA, 19 nt, Artificial Sequence
  Description of Artificial Sequence: Synthetic oligonucleotide
acugaagggucugcuugga

SEQ ID NO: 1453495 - RNA, 19 nt, Artificial Sequence
  Description of Artificial Sequence: Synthetic oligonucleotide
ggcugguuguuccuuuuca

SEQ ID NO: 1453496 - RNA, 19 nt, Artificial Sequence
  Description of Artificial Sequence: Synthetic oligonucleotide
cggcucaugggccuggugg

SEQ ID NO: 1453497 - RNA, 19 nt, Artificial Sequence
  Description of Artificial Sequence: Synthetic oligonucleotide
gcuuguggcugcccuguag

SEQ ID NO: 1453498 - RNA, 19 nt, Artificial Sequence
  Description of Artificial Sequence: Synthetic oligonucleotide
ucuguggcacaggccagaa

SEQ ID NO: 1453499 - RNA, 19 nt, Artificial Sequence
  Description of Artificial Sequence: Synthetic oligonucleotide
gcgguucuguggcacaggc

SEQ ID NO: 1453500 - RNA, 19 nt, Artificial Sequence
  Description of Artificial Sequence: Synthetic oligonucleotide
gcgaucuuguguuccugug

SEQ ID NO: 1453501 - RNA, 19 nt, Artificial Sequence
  Description of Artificial Sequence: Synthetic oligonucleotide
uccccaagccgcuguuggu

SEQ ID NO: 1453502 - RNA, 19 nt, Artificial Sequence
  Description of Artificial Sequence: Synthetic oligonucleotide
auuuccccaagccgcuguu

SEQ ID NO: 1453503 - RNA, 19 nt, Artificial Sequence
  Description of Artificial Sequence: Synthetic oligonucleotide
aguuacugucauagaacuu

SEQ ID NO: 1453504 - RNA, 19 nt, Artificial Sequence
  Description of Artificial Sequence: Synthetic oligonucleotide
cgccucaaaggucucaggc

SEQ ID NO: 1453505 - RNA, 19 nt, Artificial Sequence
  Description of Artificial Sequence: Synthetic oligonucleotide
cuuuucgaggggucuugaa

SEQ ID NO: 1453506 - RNA, 19 nt, Artificial Sequence
  Description of Artificial Sequence: Synthetic oligonucleotide
gcuguuggugcugagcguc

SEQ ID NO: 1453507 - RNA, 19 nt, Artificial Sequence
  Description of Artificial Sequence: Synthetic oligonucleotide
gccaucaguggaugccucc

SEQ ID NO: 1453508 - RNA, 19 nt, Artificial Sequence
  Description of Artificial Sequence: Synthetic oligonucleotide
agguguugcaccagcguuu

SEQ ID NO: 1453509 - RNA, 19 nt, Artificial Sequence
  Description of Artificial Sequence: Synthetic oligonucleotide
gugucccugggacuucaca

SEQ ID NO: 1453510 - RNA, 19 nt, Artificial Sequence
  Description of Artificial Sequence: Synthetic oligonucleotide
uggcucgagugcugcauuu

SEQ ID NO: 1453511 - RNA, 19 nt, Artificial Sequence
  Description of Artificial Sequence: Synthetic oligonucleotide
ccauguaguacaccuggca

SEQ ID NO: 1453512 - RNA, 19 nt, Artificial Sequence
  Description of Artificial Sequence: Synthetic oligonucleotide
  modified_base (17)..(17): a, c, u, g, unknown or other
ugcuucucucuugcucncu

SEQ ID NO: 1453513 - RNA, 19 nt, Artificial Sequence
  Description of Artificial Sequence: Synthetic oligonucleotide
gcacuggggucucauucgc

SEQ ID NO: 1453514 - RNA, 19 nt, Artificial Sequence
  Description of Artificial Sequence: Synthetic oligonucleotide
gaggcaugggcagcaggga

SEQ ID NO: 1453515 - RNA, 19 nt, Artificial Sequence
  Description of Artificial Sequence: Synthetic oligonucleotide
gagccguaauccugaguua

SEQ ID NO: 1453516 - RNA, 19 nt, Artificial Sequence
  Description of Artificial Sequence: Synthetic oligonucleotide
cagacacggcagacauagc

SEQ ID NO: 1453517 - RNA, 19 nt, Artificial Sequence
  Description of Artificial Sequence: Synthetic oligonucleotide
cguugaucgcacaccugcg

SEQ ID NO: 1453518 - RNA, 19 nt, Artificial Sequence
  Description of Artificial Sequence: Synthetic oligonucleotide
  modified_base (8)..(8): a, c, u, g, unknown or other
cuugcucncuuuucacacu

SEQ ID NO: 1453519 - RNA, 19 nt, Artificial Sequence
  Description of Artificial Sequence: Synthetic oligonucleotide
gucucgaggcaugggcagc

SEQ ID NO: 1453520 - RNA, 19 nt, Artificial Sequence
  Description of Artificial Sequence: Synthetic oligonucleotide
ccguaauccugaguuacug

SEQ ID NO: 1453521 - RNA, 19 nt, Artificial Sequence
  Description of Artificial Sequence: Synthetic oligonucleotide
cacaaacuuuucgaggggu

SEQ ID NO: 1453522 - RNA, 19 nt, Artificial Sequence
  Description of Artificial Sequence: Synthetic oligonucleotide
uuuugaccucuuggcuggu

SEQ ID NO: 1453523 - RNA, 19 nt, Artificial Sequence
  Description of Artificial Sequence: Synthetic oligonucleotide
ggggucucauucgccaugc

SEQ ID NO: 1453524 - RNA, 19 nt, Artificial Sequence
  Description of Artificial Sequence: Synthetic oligonucleotide
uucgggcguugaucgcaca

SEQ ID NO: 1453525 - RNA, 19 nt, Artificial Sequence
  Description of Artificial Sequence: Synthetic oligonucleotide
cagggauuguuuggcgauc

SEQ ID NO: 1453526 - RNA, 19 nt, Artificial Sequence
  Description of Artificial Sequence: Synthetic oligonucleotide
ggcccuuccauuccucuaa

SEQ ID NO: 1453527 - RNA, 19 nt, Artificial Sequence
  Description of Artificial Sequence: Synthetic oligonucleotide
ggacuugcagugagagagc

SEQ ID NO: 1453528 - RNA, 19 nt, Artificial Sequence
  Description of Artificial Sequence: Synthetic oligonucleotide
  modified_base (19)..(19): a, c, u, g, unknown or other
gcaagaccuccucugguun

SEQ ID NO: 1453529 - RNA, 19 nt, Artificial Sequence
  Description of Artificial Sequence: Synthetic oligonucleotide
gguugcgguucuguggcac

SEQ ID NO: 1453530 - RNA, 19 nt, Artificial Sequence
  Description of Artificial Sequence: Synthetic oligonucleotide
cauaugccguguuggggcu

SEQ ID NO: 1453531 - RNA, 19 nt, Artificial Sequence
  Description of Artificial Sequence: Synthetic oligonucleotide
gagagccguaauccugagu

SEQ ID NO: 1453532 - RNA, 19 nt, Artificial Sequence
  Description of Artificial Sequence: Synthetic oligonucleotide
ucaaagcauuucgggcguu

SEQ ID NO: 1453533 - RNA, 19 nt, Artificial Sequence
  Description of Artificial Sequence: Synthetic oligonucleotide
cgaggggucuugaaauaac

SEQ ID NO: 1453534 - RNA, 19 nt, Artificial Sequence
  Description of Artificial Sequence: Synthetic oligonucleotide
guaagucucugggcccuuc

SEQ ID NO: 1453535 - RNA, 19 nt, Artificial Sequence
  Description of Artificial Sequence: Synthetic oligonucleotide
gcagguucucaaagugggc

SEQ ID NO: 1453536 - RNA, 19 nt, Artificial Sequence
  Description of Artificial Sequence: Synthetic oligonucleotide
aggccagaacugacgcuug

SEQ ID NO: 1453537 - RNA, 19 nt, Artificial Sequence
  Description of Artificial Sequence: Synthetic oligonucleotide
ccugcggugcuggaucagg

SEQ ID NO: 1453538 - RNA, 19 nt, Artificial Sequence
  Description of Artificial Sequence: Synthetic oligonucleotide
ucauugcuuugggcaccug

SEQ ID NO: 1453539 - RNA, 19 nt, Artificial Sequence
  Description of Artificial Sequence: Synthetic oligonucleotide
ccucuucuucuucuucuuc

SEQ ID NO: 1453540 - RNA, 19 nt, Artificial Sequence
  Description of Artificial Sequence: Synthetic oligonucleotide
ccugggucuucucugaugu

SEQ ID NO: 1453541 - RNA, 19 nt, Artificial Sequence
  Description of Artificial Sequence: Synthetic oligonucleotide
ccauuugggcagacuagca

SEQ ID NO: 1453542 - RNA, 19 nt, Artificial Sequence
  Description of Artificial Sequence: Synthetic oligonucleotide
cauuuccccaagccgcugu

SEQ ID NO: 1453543 - RNA, 19 nt, Artificial Sequence
  Description of Artificial Sequence: Synthetic oligonucleotide
ugccguguuggggcuguaa

SEQ ID NO: 1453544 - RNA, 19 nt, Artificial Sequence
  Description of Artificial Sequence: Synthetic oligonucleotide
gugguuccgacgccucaaa

SEQ ID NO: 1453545 - RNA, 19 nt, Artificial Sequence
  Description of Artificial Sequence: Synthetic oligonucleotide
aggugacgguugcgguucu

SEQ ID NO: 1453546 - RNA, 19 nt, Artificial Sequence
  Description of Artificial Sequence: Synthetic oligonucleotide
cugcccuguaggcccuuuc

SEQ ID NO: 1453547 - RNA, 19 nt, Artificial Sequence
  Description of Artificial Sequence: Synthetic oligonucleotide
guguugcaccagcguuuug

SEQ ID NO: 1453548 - RNA, 19 nt, Artificial Sequence
  Description of Artificial Sequence: Synthetic oligonucleotide
ggcccuuucucuguggacu

SEQ ID NO: 1453549 - RNA, 19 nt, Artificial Sequence
  Description of Artificial Sequence: Synthetic oligonucleotide
aggucuggcucgagugcug

SEQ ID NO: 1453550 - RNA, 19 nt, Artificial Sequence
  Description of Artificial Sequence: Synthetic oligonucleotide
gccggccuugcagauguag

SEQ ID NO: 1453551 - RNA, 19 nt, Artificial Sequence
  Description of Artificial Sequence: Synthetic oligonucleotide
gcauauggugcagaagggu

SEQ ID NO: 1453552 - RNA, 19 nt, Artificial Sequence
  Description of Artificial Sequence: Synthetic oligonucleotide
gcccuuucucuguggacuc

SEQ ID NO: 1453553 - RNA, 19 nt, Artificial Sequence
  Description of Artificial Sequence: Synthetic oligonucleotide
gcccuguaggcccuuucuc

SEQ ID NO: 1453554 - RNA, 19 nt, Artificial Sequence
  Description of Artificial Sequence: Synthetic oligonucleotide
ccuugcagauguagcagaa

SEQ ID NO: 1453555 - RNA, 19 nt, Artificial Sequence
  Description of Artificial Sequence: Synthetic oligonucleotide
gccgcuguuggugcugagc

SEQ ID NO: 1453556 - RNA, 19 nt, Artificial Sequence
  Description of Artificial Sequence: Synthetic oligonucleotide
cucuugaucucaccugcuu

SEQ ID NO: 1453557 - RNA, 19 nt, Artificial Sequence
  Description of Artificial Sequence: Synthetic oligonucleotide
gugacgguugcgguucugu

SEQ ID NO: 1453558 - RNA, 19 nt, Artificial Sequence
  Description of Artificial Sequence: Synthetic oligonucleotide
ggcgaucuuguguuccugu

SEQ ID NO: 1453559 - RNA, 19 nt, Artificial Sequence
  Description of Artificial Sequence: Synthetic oligonucleotide
cuguaagucucugggcccu

SEQ ID NO: 1453560 - RNA, 19 nt, Artificial Sequence
  Description of Artificial Sequence: Synthetic oligonucleotide
gugggguccuccccugucu

SEQ ID NO: 1453561 - RNA, 19 nt, Artificial Sequence
  Description of Artificial Sequence: Synthetic oligonucleotide
gggcguugaucgcacaccu

SEQ ID NO: 1453562 - RNA, 19 nt, Artificial Sequence
  Description of Artificial Sequence: Synthetic oligonucleotide
gcgucugacaugugguccu

SEQ ID NO: 1453563 - RNA, 19 nt, Artificial Sequence
  Description of Artificial Sequence: Synthetic oligonucleotide
ggcaagaccuccucugguu

SEQ ID NO: 1453564 - RNA, 19 nt, Artificial Sequence
  Description of Artificial Sequence: Synthetic oligonucleotide
gcagguguugcaccagcgu

SEQ ID NO: 1453565 - RNA, 19 nt, Artificial Sequence
  Description of Artificial Sequence: Synthetic oligonucleotide
ggugguuccgacgccucaa

SEQ ID NO: 1453566 - RNA, 19 nt, Artificial Sequence
  Description of Artificial Sequence: Synthetic oligonucleotide
ggcuggugguuccgacgcc

SEQ ID NO: 1453567 - RNA, 19 nt, Artificial Sequence
  Description of Artificial Sequence: Synthetic oligonucleotide
ggcguugaucgcacaccug

SEQ ID NO: 1453568 - RNA, 19 nt, Artificial Sequence
  Description of Artificial Sequence: Synthetic oligonucleotide
gggucucauucgccaugcc

SEQ ID NO: 1453569 - RNA, 19 nt, Artificial Sequence
  Description of Artificial Sequence: Synthetic oligonucleotide
ggucucccauguaguacac

SEQ ID NO: 1453570 - RNA, 19 nt, Artificial Sequence
  Description of Artificial Sequence: Synthetic oligonucleotide
cugcuggcucuggcaagac

SEQ ID NO: 1453571 - RNA, 19 nt, Artificial Sequence
  Description of Artificial Sequence: Synthetic oligonucleotide
ucgcacaccugcggcucau

SEQ ID NO: 1453572 - RNA, 19 nt, Artificial Sequence
  Description of Artificial Sequence: Synthetic oligonucleotide
ggcucgagugcugcauuuc

SEQ ID NO: 1453573 - RNA, 19 nt, Artificial Sequence
  Description of Artificial Sequence: Synthetic oligonucleotide
caaagugggccagggacuu

SEQ ID NO: 1453574 - RNA, 19 nt, Artificial Sequence
  Description of Artificial Sequence: Synthetic oligonucleotide
gcauuuccccaagccgcug

SEQ ID NO: 1453575 - RNA, 19 nt, Artificial Sequence
  Description of Artificial Sequence: Synthetic oligonucleotide
ccacugugaugaagugguc

SEQ ID NO: 1453576 - RNA, 19 nt, Artificial Sequence
  Description of Artificial Sequence: Synthetic oligonucleotide
cgggcguugaucgcacacc

SEQ ID NO: 1453577 - RNA, 19 nt, Artificial Sequence
  Description of Artificial Sequence: Synthetic oligonucleotide
ccugucucccagaggaacu

SEQ ID NO: 1453578 - RNA, 19 nt, Artificial Sequence
  Description of Artificial Sequence: Synthetic oligonucleotide
caggcaggucuggcucgag

SEQ ID NO: 1453579 - RNA, 19 nt, Artificial Sequence
  Description of Artificial Sequence: Synthetic oligonucleotide
caacagcauccacugugau

SEQ ID NO: 1453580 - RNA, 19 nt, Artificial Sequence
  Description of Artificial Sequence: Synthetic oligonucleotide
gcuuggagugugugcuucu

SEQ ID NO: 1453581 - RNA, 19 nt, Artificial Sequence
  Description of Artificial Sequence: Synthetic oligonucleotide
gcagugagagagccguaau

SEQ ID NO: 1453582 - RNA, 19 nt, Artificial Sequence
  Description of Artificial Sequence: Synthetic oligonucleotide
ggugacgguugcgguucug

SEQ ID NO: 1453583 - RNA, 19 nt, Artificial Sequence
  Description of Artificial Sequence: Synthetic oligonucleotide
gggcagacuagcaaaucuu

SEQ ID NO: 1453584 - RNA, 19 nt, Artificial Sequence
  Description of Artificial Sequence: Synthetic oligonucleotide
gguccuccccugucuccca

SEQ ID NO: 1453585 - RNA, 19 nt, Artificial Sequence
  Description of Artificial Sequence: Synthetic oligonucleotide
gcguuuuggaggaggcucu

SEQ ID NO: 1453586 - RNA, 19 nt, Artificial Sequence
  Description of Artificial Sequence: Synthetic oligonucleotide
ggccaucaguggaugccuc

SEQ ID NO: 1453587 - RNA, 19 nt, Artificial Sequence
  Description of Artificial Sequence: Synthetic oligonucleotide
cucauucgccaugccauuu

SEQ ID NO: 1453588 - RNA, 19 nt, Artificial Sequence
  Description of Artificial Sequence: Synthetic oligonucleotide
gggcccuuccauuccucua

SEQ ID NO: 1453589 - RNA, 19 nt, Artificial Sequence
  Description of Artificial Sequence: Synthetic oligonucleotide
gguguugcaccagcguuuu

SEQ ID NO: 1453590 - RNA, 19 nt, Artificial Sequence
  Description of Artificial Sequence: Synthetic oligonucleotide
gcuggugguuccgacgccu

SEQ ID NO: 1453591 - RNA, 19 nt, Artificial Sequence
  Description of Artificial Sequence: Synthetic oligonucleotide
ggaugccuccuggcucuug

SEQ ID NO: 1453592 - RNA, 19 nt, Artificial Sequence
  Description of Artificial Sequence: Synthetic oligonucleotide
cacggcagacauagcccau

SEQ ID NO: 1453593 - RNA, 19 nt, Artificial Sequence
  Description of Artificial Sequence: Synthetic oligonucleotide
gccguaauccugaguuacu

SEQ ID NO: 1453594 - RNA, 19 nt, Artificial Sequence
  Description of Artificial Sequence: Synthetic oligonucleotide
cggcagacauagcccauca

SEQ ID NO: 1453595 - RNA, 19 nt, Artificial Sequence
  Description of Artificial Sequence: Synthetic oligonucleotide
ccaucaguggaugccuccu

SEQ ID NO: 1453596 - RNA, 19 nt, Artificial Sequence
  Description of Artificial Sequence: Synthetic oligonucleotide
ccgacgccucaaaggucuc

SEQ ID NO: 1453597 - RNA, 19 nt, Artificial Sequence
  Description of Artificial Sequence: Synthetic oligonucleotide
ggaucuggggcuggacuuu

SEQ ID NO: 1453598 - RNA, 19 nt, Artificial Sequence
  Description of Artificial Sequence: Synthetic oligonucleotide
gcugagcgucugacaugug

SEQ ID NO: 1453599 - RNA, 19 nt, Artificial Sequence
  Description of Artificial Sequence: Synthetic oligonucleotide
gggauuguuuggcgaucuu

SEQ ID NO: 1453600 - RNA, 19 nt, Artificial Sequence
  Description of Artificial Sequence: Synthetic oligonucleotide
cugaccccuguggccaggu

SEQ ID NO: 1453601 - RNA, 19 nt, Artificial Sequence
  Description of Artificial Sequence: Synthetic oligonucleotide
ccaugccauuugggcagac

SEQ ID NO: 1453602 - RNA, 19 nt, Artificial Sequence
  Description of Artificial Sequence: Synthetic oligonucleotide
ccacguccaggccaucagu

SEQ ID NO: 1453603 - RNA, 19 nt, Artificial Sequence
  Description of Artificial Sequence: Synthetic oligonucleotide
cgguugcauauggugcaga

SEQ ID NO: 1453604 - RNA, 19 nt, Artificial Sequence
  Description of Artificial Sequence: Synthetic oligonucleotide
cgacgccucaaaggucuca

SEQ ID NO: 1453605 - RNA, 19 nt, Artificial Sequence
  Description of Artificial Sequence: Synthetic oligonucleotide
agccggccuugcagaugua

SEQ ID NO: 1453606 - RNA, 19 nt, Artificial Sequence
  Description of Artificial Sequence: Synthetic oligonucleotide
cgguugcgguucuguggca

SEQ ID NO: 1453607 - RNA, 19 nt, Artificial Sequence
  Description of Artificial Sequence: Synthetic oligonucleotide
ccacaccauaugccguguu

SEQ ID NO: 1453608 - RNA, 19 nt, Artificial Sequence
  Description of Artificial Sequence: Synthetic oligonucleotide
gcugcccuguaggcccuuu

SEQ ID NO: 1453609 - RNA, 19 nt, Artificial Sequence
  Description of Artificial Sequence: Synthetic oligonucleotide
  modified_base (1)..(1): a, c, u, g, unknown or other
  modified_base (13)..(13): a, c, u, g, unknown or other
ncuuuucacacunucccac

SEQ ID NO: 1453610 - RNA, 19 nt, Artificial Sequence
  Description of Artificial Sequence: Synthetic oligonucleotide
uauagaauaaacuuguucu

SEQ ID NO: 1453611 - RNA, 19 nt, Artificial Sequence
  Description of Artificial Sequence: Synthetic oligonucleotide
aagauagcagcagagaucc

SEQ ID NO: 1453612 - RNA, 19 nt, Artificial Sequence
  Description of Artificial Sequence: Synthetic oligonucleotide
ugaacaaucauguuuaaug

SEQ ID NO: 1453613 - RNA, 19 nt, Artificial Sequence
  Description of Artificial Sequence: Synthetic oligonucleotide
uguuuauagaauaaacuug

SEQ ID NO: 1453614 - RNA, 19 nt, Artificial Sequence
  Description of Artificial Sequence: Synthetic oligonucleotide
ucauguaaacccuauaagc

SEQ ID NO: 1453615 - RNA, 19 nt, Artificial Sequence
  Description of Artificial Sequence: Synthetic oligonucleotide
cauguaaacccuauaagcc

SEQ ID NO: 1453616 - RNA, 19 nt, Artificial Sequence
  Description of Artificial Sequence: Synthetic oligonucleotide
uggaaucucauguaaaccc

SEQ ID NO: 1453617 - RNA, 19 nt, Artificial Sequence
  Description of Artificial Sequence: Synthetic oligonucleotide
uuauagaauaaacuuguuc

SEQ ID NO: 1453618 - RNA, 19 nt, Artificial Sequence
  Description of Artificial Sequence: Synthetic oligonucleotide
aacccuauaagccaacccu

SEQ ID NO: 1453619 - RNA, 19 nt, Artificial Sequence
  Description of Artificial Sequence: Synthetic oligonucleotide
acagugacaaccgaggugg

SEQ ID NO: 1453620 - RNA, 19 nt, Artificial Sequence
  Description of Artificial Sequence: Synthetic oligonucleotide
ucugugaauaucucguucc

SEQ ID NO: 1453621 - RNA, 19 nt, Artificial Sequence
  Description of Artificial Sequence: Synthetic oligonucleotide
ugaagcaccucacagggug

SEQ ID NO: 1453622 - RNA, 19 nt, Artificial Sequence
  Description of Artificial Sequence: Synthetic oligonucleotide
uaagucaaccagcacagug

SEQ ID NO: 1453623 - RNA, 19 nt, Artificial Sequence
  Description of Artificial Sequence: Synthetic oligonucleotide
ucucauguaaacccuauaa

SEQ ID NO: 1453624 - RNA, 19 nt, Artificial Sequence
  Description of Artificial Sequence: Synthetic oligonucleotide
ucagccauccaguugauac

SEQ ID NO: 1453625 - RNA, 19 nt, Artificial Sequence
  Description of Artificial Sequence: Synthetic oligonucleotide
uggugaguaaaccuggccc

SEQ ID NO: 1453626 - RNA, 19 nt, Artificial Sequence
  Description of Artificial Sequence: Synthetic oligonucleotide
uauaagccaacccuggccu

SEQ ID NO: 1453627 - RNA, 19 nt, Artificial Sequence
  Description of Artificial Sequence: Synthetic oligonucleotide
ucaccauacagguaccagg

SEQ ID NO: 1453628 - RNA, 19 nt, Artificial Sequence
  Description of Artificial Sequence: Synthetic oligonucleotide
accucagagauuucuuugc

SEQ ID NO: 1453629 - RNA, 19 nt, Artificial Sequence
  Description of Artificial Sequence: Synthetic oligonucleotide
aguacggccaccucgcgcg

SEQ ID NO: 1453630 - RNA, 19 nt, Artificial Sequence
  Description of Artificial Sequence: Synthetic oligonucleotide
gugaauaucucguuccucc

SEQ ID NO: 1453631 - RNA, 19 nt, Artificial Sequence
  Description of Artificial Sequence: Synthetic oligonucleotide
uuuacuguucaguucauua

SEQ ID NO: 1453632 - RNA, 19 nt, Artificial Sequence
  Description of Artificial Sequence: Synthetic oligonucleotide
aaggucccgagcuccaccc

SEQ ID NO: 1453633 - RNA, 19 nt, Artificial Sequence
  Description of Artificial Sequence: Synthetic oligonucleotide
uaggugacagacuugagaa

SEQ ID NO: 1453634 - RNA, 19 nt, Artificial Sequence
  Description of Artificial Sequence: Synthetic oligonucleotide
uacgccacaucacagcucc

SEQ ID NO: 1453635 - RNA, 19 nt, Artificial Sequence
  Description of Artificial Sequence: Synthetic oligonucleotide
agaagaaguaacaucuccg

SEQ ID NO: 1453636 - RNA, 19 nt, Artificial Sequence
  Description of Artificial Sequence: Synthetic oligonucleotide
aggaagguuucccuagagc

SEQ ID NO: 1453637 - RNA, 19 nt, Artificial Sequence
  Description of Artificial Sequence: Synthetic oligonucleotide
uugaccacucgcuuuauga

SEQ ID NO: 1453638 - RNA, 19 nt, Artificial Sequence
  Description of Artificial Sequence: Synthetic oligonucleotide
gaaguuggccacuggauug

SEQ ID NO: 1453639 - RNA, 19 nt, Artificial Sequence
  Description of Artificial Sequence: Synthetic oligonucleotide
uauuggaaaugucacuggu

SEQ ID NO: 1453640 - RNA, 19 nt, Artificial Sequence
  Description of Artificial Sequence: Synthetic oligonucleotide
cucauguaaacccuauaag

SEQ ID NO: 1453641 - RNA, 19 nt, Artificial Sequence
  Description of Artificial Sequence: Synthetic oligonucleotide
auguaaacccuauaagcca

SEQ ID NO: 1453642 - RNA, 19 nt, Artificial Sequence
  Description of Artificial Sequence: Synthetic oligonucleotide
uguaaacccuauaagccaa

SEQ ID NO: 1453643 - RNA, 19 nt, Artificial Sequence
  Description of Artificial Sequence: Synthetic oligonucleotide
auaggugacagacuugaga

SEQ ID NO: 1453644 - RNA, 19 nt, Artificial Sequence
  Description of Artificial Sequence: Synthetic oligonucleotide
gagcgcauagcguagccgg

SEQ ID NO: 1453645 - RNA, 19 nt, Artificial Sequence
  Description of Artificial Sequence: Synthetic oligonucleotide
aguaagucaaccagcacag

SEQ ID NO: 1453646 - RNA, 19 nt, Artificial Sequence
  Description of Artificial Sequence: Synthetic oligonucleotide
uauccuccagguaguagcg

SEQ ID NO: 1453647 - RNA, 19 nt, Artificial Sequence
  Description of Artificial Sequence: Synthetic oligonucleotide
cuauaagccaacccuggcc

SEQ ID NO: 1453648 - RNA, 19 nt, Artificial Sequence
  Description of Artificial Sequence: Synthetic oligonucleotide
uccgguauggccccacacg

SEQ ID NO: 1453649 - RNA, 19 nt, Artificial Sequence
  Description of Artificial Sequence: Synthetic oligonucleotide
aauaucucguuccucccau

SEQ ID NO: 1453650 - RNA, 19 nt, Artificial Sequence
  Description of Artificial Sequence: Synthetic oligonucleotide
gaccacucgcuuuaugagg

SEQ ID NO: 1453651 - RNA, 19 nt, Artificial Sequence
  Description of Artificial Sequence: Synthetic oligonucleotide
aacaaucauguuuaauguu

SEQ ID NO: 1453652 - RNA, 19 nt, Artificial Sequence
  Description of Artificial Sequence: Synthetic oligonucleotide
uugauacgccacaucacag

SEQ ID NO: 1453653 - RNA, 19 nt, Artificial Sequence
  Description of Artificial Sequence: Synthetic oligonucleotide
cuggauugagggcauagcc

SEQ ID NO: 1453654 - RNA, 19 nt, Artificial Sequence
  Description of Artificial Sequence: Synthetic oligonucleotide
agaggagaaccacucggac

SEQ ID NO: 1453655 - RNA, 19 nt, Artificial Sequence
  Description of Artificial Sequence: Synthetic oligonucleotide
gauagcagcagagauccug

SEQ ID NO: 1453656 - RNA, 19 nt, Artificial Sequence
  Description of Artificial Sequence: Synthetic oligonucleotide
caaugggagaagaaguaac

SEQ ID NO: 1453657 - RNA, 19 nt, Artificial Sequence
  Description of Artificial Sequence: Synthetic oligonucleotide
ugauacgccacaucacagc

SEQ ID NO: 1453658 - RNA, 19 nt, Artificial Sequence
  Description of Artificial Sequence: Synthetic oligonucleotide
agauggagggcacuccuuc

SEQ ID NO: 1453659 - RNA, 19 nt, Artificial Sequence
  Description of Artificial Sequence: Synthetic oligonucleotide
uaucucguuccucccaugc

SEQ ID NO: 1453660 - RNA, 19 nt, Artificial Sequence
  Description of Artificial Sequence: Synthetic oligonucleotide
uucaggagacccagaagcc

SEQ ID NO: 1453661 - RNA, 19 nt, Artificial Sequence
  Description of Artificial Sequence: Synthetic oligonucleotide
ugaggaaacuccuucugaa

SEQ ID NO: 1453662 - RNA, 19 nt, Artificial Sequence
  Description of Artificial Sequence: Synthetic oligonucleotide
ugaccacucgcuuuaugag

SEQ ID NO: 1453663 - RNA, 19 nt, Artificial Sequence
  Description of Artificial Sequence: Synthetic oligonucleotide
guugauacgccacaucaca

SEQ ID NO: 1453664 - RNA, 19 nt, Artificial Sequence
  Description of Artificial Sequence: Synthetic oligonucleotide
auagaauaaacuuguucuu

SEQ ID NO: 1453665 - RNA, 19 nt, Artificial Sequence
  Description of Artificial Sequence: Synthetic oligonucleotide
uuuaugaggaaggucccga

SEQ ID NO: 1453666 - RNA, 19 nt, Artificial Sequence
  Description of Artificial Sequence: Synthetic oligonucleotide
uuuuaguacuccauucauu

SEQ ID NO: 1453667 - RNA, 19 nt, Artificial Sequence
  Description of Artificial Sequence: Synthetic oligonucleotide
uuacuguucaguucauuau

SEQ ID NO: 1453668 - RNA, 19 nt, Artificial Sequence
  Description of Artificial Sequence: Synthetic oligonucleotide
caguaagucaaccagcaca

SEQ ID NO: 1453669 - RNA, 19 nt, Artificial Sequence
  Description of Artificial Sequence: Synthetic oligonucleotide
gcuagugaggccuuuuagg

SEQ ID NO: 1453670 - RNA, 19 nt, Artificial Sequence
  Description of Artificial Sequence: Synthetic oligonucleotide
agguauaggugacagacuu

SEQ ID NO: 1453671 - RNA, 19 nt, Artificial Sequence
  Description of Artificial Sequence: Synthetic oligonucleotide
uuugcauucugagucugug

SEQ ID NO: 1453672 - RNA, 19 nt, Artificial Sequence
  Description of Artificial Sequence: Synthetic oligonucleotide
ggugcuucucaccauacag

SEQ ID NO: 1453673 - RNA, 19 nt, Artificial Sequence
  Description of Artificial Sequence: Synthetic oligonucleotide
ucaguucauuaugaacugg

SEQ ID NO: 1453674 - RNA, 19 nt, Artificial Sequence
  Description of Artificial Sequence: Synthetic oligonucleotide
ucauuucccggacgugugg

SEQ ID NO: 1453675 - RNA, 19 nt, Artificial Sequence
  Description of Artificial Sequence: Synthetic oligonucleotide
uggauguuauuggaaaugu

SEQ ID NO: 1453676 - RNA, 19 nt, Artificial Sequence
  Description of Artificial Sequence: Synthetic oligonucleotide
auuggaaaugucacugguc

SEQ ID NO: 1453677 - RNA, 19 nt, Artificial Sequence
  Description of Artificial Sequence: Synthetic oligonucleotide
aagaggccgcgguagcgcg

SEQ ID NO: 1453678 - RNA, 19 nt, Artificial Sequence
  Description of Artificial Sequence: Synthetic oligonucleotide
ugacuucacccacucacca

SEQ ID NO: 1453679 - RNA, 19 nt, Artificial Sequence
  Description of Artificial Sequence: Synthetic oligonucleotide
auuucccggacguguggcc

SEQ ID NO: 1453680 - RNA, 19 nt, Artificial Sequence
  Description of Artificial Sequence: Synthetic oligonucleotide
agcaagcaguaagucaacc

SEQ ID NO: 1453681 - RNA, 19 nt, Artificial Sequence
  Description of Artificial Sequence: Synthetic oligonucleotide
agcguagccgguccucugc

SEQ ID NO: 1453682 - RNA, 19 nt, Artificial Sequence
  Description of Artificial Sequence: Synthetic oligonucleotide
uggagggcacuccuucacg

SEQ ID NO: 1453683 - RNA, 19 nt, Artificial Sequence
  Description of Artificial Sequence: Synthetic oligonucleotide
uauaggugacagacuugag

SEQ ID NO: 1453684 - RNA, 19 nt, Artificial Sequence
  Description of Artificial Sequence: Synthetic oligonucleotide
auggagggcacuccuucac

SEQ ID NO: 1453685 - RNA, 19 nt, Artificial Sequence
  Description of Artificial Sequence: Synthetic oligonucleotide
cuggaaucucauguaaacc

SEQ ID NO: 1453686 - RNA, 19 nt, Artificial Sequence
  Description of Artificial Sequence: Synthetic oligonucleotide
uggaaaugucacuggucag

SEQ ID NO: 1453687 - RNA, 19 nt, Artificial Sequence
  Description of Artificial Sequence: Synthetic oligonucleotide
aguugauacgccacaucac

SEQ ID NO: 1453688 - RNA, 19 nt, Artificial Sequence
  Description of Artificial Sequence: Synthetic oligonucleotide
cgguaguugaccaugaggc

SEQ ID NO: 1453689 - RNA, 19 nt, Artificial Sequence
  Description of Artificial Sequence: Synthetic oligonucleotide
gauggaaguuggccacugg

SEQ ID NO: 1453690 - RNA, 19 nt, Artificial Sequence
  Description of Artificial Sequence: Synthetic oligonucleotide
cugacuucacccacucacc

SEQ ID NO: 1453691 - RNA, 19 nt, Artificial Sequence
  Description of Artificial Sequence: Synthetic oligonucleotide
uggaaguuggccacuggau

SEQ ID NO: 1453692 - RNA, 19 nt, Artificial Sequence
  Description of Artificial Sequence: Synthetic oligonucleotide
gcucucgugaacugggucg

SEQ ID NO: 1453693 - RNA, 19 nt, Artificial Sequence
  Description of Artificial Sequence: Synthetic oligonucleotide
uaaacccuauaagccaacc

SEQ ID NO: 1453694 - RNA, 19 nt, Artificial Sequence
  Description of Artificial Sequence: Synthetic oligonucleotide
gguauggccccacacgccg

SEQ ID NO: 1453695 - RNA, 19 nt, Artificial Sequence
  Description of Artificial Sequence: Synthetic oligonucleotide
ggucaagagacacagcaca

SEQ ID NO: 1453696 - RNA, 19 nt, Artificial Sequence
  Description of Artificial Sequence: Synthetic oligonucleotide
cugcacauucaggagaccc

SEQ ID NO: 1453697 - RNA, 19 nt, Artificial Sequence
  Description of Artificial Sequence: Synthetic oligonucleotide
gaauaucucguuccuccca

SEQ ID NO: 1453698 - RNA, 19 nt, Artificial Sequence
  Description of Artificial Sequence: Synthetic oligonucleotide
cuuuaugaggaaggucccg

SEQ ID NO: 1453699 - RNA, 19 nt, Artificial Sequence
  Description of Artificial Sequence: Synthetic oligonucleotide
acaggagcuagugaggccu

SEQ ID NO: 1453700 - RNA, 19 nt, Artificial Sequence
  Description of Artificial Sequence: Synthetic oligonucleotide
cagccauccaguugauacg

SEQ ID NO: 1453701 - RNA, 19 nt, Artificial Sequence
  Description of Artificial Sequence: Synthetic oligonucleotide
gaggagaaccacucggaca

SEQ ID NO: 1453702 - RNA, 19 nt, Artificial Sequence
  Description of Artificial Sequence: Synthetic oligonucleotide
agguaguagcgguaguuga

SEQ ID NO: 1453703 - RNA, 19 nt, Artificial Sequence
  Description of Artificial Sequence: Synthetic oligonucleotide
gugacaaccgagguggggc

SEQ ID NO: 1453704 - RNA, 19 nt, Artificial Sequence
  Description of Artificial Sequence: Synthetic oligonucleotide
cagaucggcgcgcaguugc

SEQ ID NO: 1453705 - RNA, 19 nt, Artificial Sequence
  Description of Artificial Sequence: Synthetic oligonucleotide
guaguagcgguaguugacc

SEQ ID NO: 1453706 - RNA, 19 nt, Artificial Sequence
  Description of Artificial Sequence: Synthetic oligonucleotide
guaguugaccaugaggcca

SEQ ID NO: 1453707 - RNA, 19 nt, Artificial Sequence
  Description of Artificial Sequence: Synthetic oligonucleotide
acgagcgcauagcguagcc

SEQ ID NO: 1453708 - RNA, 19 nt, Artificial Sequence
  Description of Artificial Sequence: Synthetic oligonucleotide
cauacagguaccaggcaca

SEQ ID NO: 1453709 - RNA, 19 nt, Artificial Sequence
  Description of Artificial Sequence: Synthetic oligonucleotide
auaagccaacccuggccuc

SEQ ID NO: 1453710 - RNA, 19 nt, Artificial Sequence
  Description of Artificial Sequence: Synthetic oligonucleotide
uaguagcgguaguugacca

SEQ ID NO: 1453711 - RNA, 19 nt, Artificial Sequence
  Description of Artificial Sequence: Synthetic oligonucleotide
ggaagguuucccuagagcu

SEQ ID NO: 1453712 - RNA, 19 nt, Artificial Sequence
  Description of Artificial Sequence: Synthetic oligonucleotide
ggauugagggcauagccuc

SEQ ID NO: 1453713 - RNA, 19 nt, Artificial Sequence
  Description of Artificial Sequence: Synthetic oligonucleotide
ccagguauaggugacagac

SEQ ID NO: 1453714 - RNA, 19 nt, Artificial Sequence
  Description of Artificial Sequence: Synthetic oligonucleotide
auacagguaccaggcacac

SEQ ID NO: 1453715 - RNA, 19 nt, Artificial Sequence
  Description of Artificial Sequence: Synthetic oligonucleotide
gauacgccacaucacagcu

SEQ ID NO: 1453716 - RNA, 19 nt, Artificial Sequence
  Description of Artificial Sequence: Synthetic oligonucleotide
guagcgguaguugaccaug

SEQ ID NO: 1453717 - RNA, 19 nt, Artificial Sequence
  Description of Artificial Sequence: Synthetic oligonucleotide
aaucucauguaaacccuau

SEQ ID NO: 1453718 - RNA, 19 nt, Artificial Sequence
  Description of Artificial Sequence: Synthetic oligonucleotide
guggugaguaaaccuggcc

SEQ ID NO: 1453719 - RNA, 19 nt, Artificial Sequence
  Description of Artificial Sequence: Synthetic oligonucleotide
ugacaaccgagguggggcc

SEQ ID NO: 1453720 - RNA, 19 nt, Artificial Sequence
  Description of Artificial Sequence: Synthetic oligonucleotide
uguugaggcuuguauccuc

SEQ ID NO: 1453721 - RNA, 19 nt, Artificial Sequence
  Description of Artificial Sequence: Synthetic oligonucleotide
gucugugaauaucucguuc

SEQ ID NO: 1453722 - RNA, 19 nt, Artificial Sequence
  Description of Artificial Sequence: Synthetic oligonucleotide
gucaagagacacagcacag

SEQ ID NO: 1453723 - RNA, 19 nt, Artificial Sequence
  Description of Artificial Sequence: Synthetic oligonucleotide
cucuggauguuauuggaaa

SEQ ID NO: 1453724 - RNA, 19 nt, Artificial Sequence
  Description of Artificial Sequence: Synthetic oligonucleotide
cugcgccuccagcagaucg

SEQ ID NO: 1453725 - RNA, 19 nt, Artificial Sequence
  Description of Artificial Sequence: Synthetic oligonucleotide
gaauccagguauaggugac

SEQ ID NO: 1453726 - RNA, 19 nt, Artificial Sequence
  Description of Artificial Sequence: Synthetic oligonucleotide
guacuccauucauuucccg

SEQ ID NO: 1453727 - RNA, 19 nt, Artificial Sequence
  Description of Artificial Sequence: Synthetic oligonucleotide
agggcacuccuucacgaug

SEQ ID NO: 1453728 - RNA, 19 nt, Artificial Sequence
  Description of Artificial Sequence: Synthetic oligonucleotide
uuucagauggagggcacuc

SEQ ID NO: 1453729 - RNA, 19 nt, Artificial Sequence
  Description of Artificial Sequence: Synthetic oligonucleotide
ugugaauaucucguuccuc

SEQ ID NO: 1453730 - RNA, 19 nt, Artificial Sequence
  Description of Artificial Sequence: Synthetic oligonucleotide
agugacaaccgaggugggg

SEQ ID NO: 1453731 - RNA, 19 nt, Artificial Sequence
  Description of Artificial Sequence: Synthetic oligonucleotide
ccugacaaggcuccugugg

SEQ ID NO: 1453732 - RNA, 19 nt, Artificial Sequence
  Description of Artificial Sequence: Synthetic oligonucleotide
ggugaguaaaccuggccca

SEQ ID NO: 1453733 - RNA, 19 nt, Artificial Sequence
  Description of Artificial Sequence: Synthetic oligonucleotide
auccaguugauacgccaca

SEQ ID NO: 1453734 - RNA, 19 nt, Artificial Sequence
  Description of Artificial Sequence: Synthetic oligonucleotide
accucgcgcgaacugcugg

SEQ ID NO: 1453735 - RNA, 19 nt, Artificial Sequence
  Description of Artificial Sequence: Synthetic oligonucleotide
cacacgccgcuucaugucc

SEQ ID NO: 1453736 - RNA, 19 nt, Artificial Sequence
  Description of Artificial Sequence: Synthetic oligonucleotide
cuggcccaucagaagacag

SEQ ID NO: 1453737 - RNA, 19 nt, Artificial Sequence
  Description of Artificial Sequence: Synthetic oligonucleotide
gaagaggccgcgguagcgc

SEQ ID NO: 1453738 - RNA, 19 nt, Artificial Sequence
  Description of Artificial Sequence: Synthetic oligonucleotide
agccagaggagaaccacuc

SEQ ID NO: 1453739 - RNA, 19 nt, Artificial Sequence
  Description of Artificial Sequence: Synthetic oligonucleotide
agccucggugcuucucacc

SEQ ID NO: 1453740 - RNA, 19 nt, Artificial Sequence
  Description of Artificial Sequence: Synthetic oligonucleotide
aagcaccucacagggugag

SEQ ID NO: 1453741 - RNA, 19 nt, Artificial Sequence
  Description of Artificial Sequence: Synthetic oligonucleotide
gacguguggccccuccacc

SEQ ID NO: 1453742 - RNA, 19 nt, Artificial Sequence
  Description of Artificial Sequence: Synthetic oligonucleotide
ucgugaacugggucgccug

SEQ ID NO: 1453743 - RNA, 19 nt, Artificial Sequence
  Description of Artificial Sequence: Synthetic oligonucleotide
caggugacccgcuccagac

SEQ ID NO: 1453744 - RNA, 19 nt, Artificial Sequence
  Description of Artificial Sequence: Synthetic oligonucleotide
cucaccauacagguaccag

SEQ ID NO: 1453745 - RNA, 19 nt, Artificial Sequence
  Description of Artificial Sequence: Synthetic oligonucleotide
ugcucucgugaacuggguc

SEQ ID NO: 1453746 - RNA, 19 nt, Artificial Sequence
  Description of Artificial Sequence: Synthetic oligonucleotide
uuucccggacguguggccc

SEQ ID NO: 1453747 - RNA, 19 nt, Artificial Sequence
  Description of Artificial Sequence: Synthetic oligonucleotide
gaaggccuccaagugagga

SEQ ID NO: 1453748 - RNA, 19 nt, Artificial Sequence
  Description of Artificial Sequence: Synthetic oligonucleotide
gauggagggcacuccuuca

SEQ ID NO: 1453749 - RNA, 19 nt, Artificial Sequence
  Description of Artificial Sequence: Synthetic oligonucleotide
uagcgguaguugaccauga

SEQ ID NO: 1453750 - RNA, 19 nt, Artificial Sequence
  Description of Artificial Sequence: Synthetic oligonucleotide
acaggaugcacggccucac

SEQ ID NO: 1453751 - RNA, 19 nt, Artificial Sequence
  Description of Artificial Sequence: Synthetic oligonucleotide
cgcaguugcaccaggaagc

SEQ ID NO: 1453752 - RNA, 19 nt, Artificial Sequence
  Description of Artificial Sequence: Synthetic oligonucleotide
gaugcacggccucacucuc

SEQ ID NO: 1453753 - RNA, 19 nt, Artificial Sequence
  Description of Artificial Sequence: Synthetic oligonucleotide
acccuauaagccaacccug

SEQ ID NO: 1453754 - RNA, 19 nt, Artificial Sequence
  Description of Artificial Sequence: Synthetic oligonucleotide
cauuucccggacguguggc

SEQ ID NO: 1453755 - RNA, 19 nt, Artificial Sequence
  Description of Artificial Sequence: Synthetic oligonucleotide
cauuaguggccccugaagu

SEQ ID NO: 1453756 - RNA, 19 nt, Artificial Sequence
  Description of Artificial Sequence: Synthetic oligonucleotide
ccauacagguaccaggcac

SEQ ID NO: 1453757 - RNA, 19 nt, Artificial Sequence
  Description of Artificial Sequence: Synthetic oligonucleotide
agcgguaguugaccaugag

SEQ ID NO: 1453758 - RNA, 19 nt, Artificial Sequence
  Description of Artificial Sequence: Synthetic oligonucleotide
cacaggagcuagugaggcc

SEQ ID NO: 1453759 - RNA, 19 nt, Artificial Sequence
  Description of Artificial Sequence: Synthetic oligonucleotide
auaucucguuccucccaug

SEQ ID NO: 1453760 - RNA, 19 nt, Artificial Sequence
  Description of Artificial Sequence: Synthetic oligonucleotide
ucggugcuucucaccauac

SEQ ID NO: 1453761 - RNA, 19 nt, Artificial Sequence
  Description of Artificial Sequence: Synthetic oligonucleotide
aguucauuaugaacuggaa

SEQ ID NO: 1453762 - RNA, 19 nt, Artificial Sequence
  Description of Artificial Sequence: Synthetic oligonucleotide
cccuauaagccaacccugg

SEQ ID NO: 1453763 - RNA, 19 nt, Artificial Sequence
  Description of Artificial Sequence: Synthetic oligonucleotide
ucucaccauacagguacca

SEQ ID NO: 1453764 - RNA, 19 nt, Artificial Sequence
  Description of Artificial Sequence: Synthetic oligonucleotide
ugagugccaggugacccgc

SEQ ID NO: 1453765 - RNA, 19 nt, Artificial Sequence
  Description of Artificial Sequence: Synthetic oligonucleotide
aggcuguaggaagguuucc

SEQ ID NO: 1453766 - RNA, 19 nt, Artificial Sequence
  Description of Artificial Sequence: Synthetic oligonucleotide
cacuggauugagggcauag

SEQ ID NO: 1453767 - RNA, 19 nt, Artificial Sequence
  Description of Artificial Sequence: Synthetic oligonucleotide
guaggaagguuucccuaga

SEQ ID NO: 1453768 - RNA, 19 nt, Artificial Sequence
  Description of Artificial Sequence: Synthetic oligonucleotide
caccucacagggugagugc

SEQ ID NO: 1453769 - RNA, 19 nt, Artificial Sequence
  Description of Artificial Sequence: Synthetic oligonucleotide
acguguggccccuccacca

SEQ ID NO: 1453770 - RNA, 19 nt, Artificial Sequence
  Description of Artificial Sequence: Synthetic oligonucleotide
aucucauguaaacccuaua

SEQ ID NO: 1453771 - RNA, 19 nt, Artificial Sequence
  Description of Artificial Sequence: Synthetic oligonucleotide
cuugaccacucgcuuuaug

SEQ ID NO: 1453772 - RNA, 19 nt, Artificial Sequence
  Description of Artificial Sequence: Synthetic oligonucleotide
cccaucagaagacagccuc

SEQ ID NO: 1453773 - RNA, 19 nt, Artificial Sequence
  Description of Artificial Sequence: Synthetic oligonucleotide
cuugaugcucucgugaacu

SEQ ID NO: 1453774 - RNA, 19 nt, Artificial Sequence
  Description of Artificial Sequence: Synthetic oligonucleotide
cagacucaggaagccagag

SEQ ID NO: 1453775 - RNA, 19 nt, Artificial Sequence
  Description of Artificial Sequence: Synthetic oligonucleotide
gcgcaguugcaccaggaag

SEQ ID NO: 1453776 - RNA, 19 nt, Artificial Sequence
  Description of Artificial Sequence: Synthetic oligonucleotide
uccaguugauacgccacau

SEQ ID NO: 1453777 - RNA, 19 nt, Artificial Sequence
  Description of Artificial Sequence: Synthetic oligonucleotide
cuguuucagauggagggca

SEQ ID NO: 1453778 - RNA, 19 nt, Artificial Sequence
  Description of Artificial Sequence: Synthetic oligonucleotide
acggccaccucgcgcgaac

SEQ ID NO: 1453779 - RNA, 19 nt, Artificial Sequence
  Description of Artificial Sequence: Synthetic oligonucleotide
ucgcuuuaugaggaagguc

SEQ ID NO: 1453780 - RNA, 19 nt, Artificial Sequence
  Description of Artificial Sequence: Synthetic oligonucleotide
gaaucucauguaaacccua

SEQ ID NO: 1453781 - RNA, 19 nt, Artificial Sequence
  Description of Artificial Sequence: Synthetic oligonucleotide
ucgcgcgaacugcuggcgc

SEQ ID NO: 1453782 - RNA, 19 nt, Artificial Sequence
  Description of Artificial Sequence: Synthetic oligonucleotide
agccuccuuucugagcagg

SEQ ID NO: 1453783 - RNA, 19 nt, Artificial Sequence
  Description of Artificial Sequence: Synthetic oligonucleotide
ugggucgccugugaccuca

SEQ ID NO: 1453784 - RNA, 19 nt, Artificial Sequence
  Description of Artificial Sequence: Synthetic oligonucleotide
auacgccacaucacagcuc

SEQ ID NO: 1453785 - RNA, 19 nt, Artificial Sequence
  Description of Artificial Sequence: Synthetic oligonucleotide
agcagaucggcgcgcaguu

SEQ ID NO: 1453786 - RNA, 19 nt, Artificial Sequence
  Description of Artificial Sequence: Synthetic oligonucleotide
cuuggugaauccagguaua

SEQ ID NO: 1453787 - RNA, 19 nt, Artificial Sequence
  Description of Artificial Sequence: Synthetic oligonucleotide
ugaguaaaccuggcccauc

SEQ ID NO: 1453788 - RNA, 19 nt, Artificial Sequence
  Description of Artificial Sequence: Synthetic oligonucleotide
gaagcgcacgccgccgucc

SEQ ID NO: 1453789 - RNA, 19 nt, Artificial Sequence
  Description of Artificial Sequence: Synthetic oligonucleotide
gcggcacgagcgcauagcg

SEQ ID NO: 1453790 - RNA, 19 nt, Artificial Sequence
  Description of Artificial Sequence: Synthetic oligonucleotide
ccgguauggccccacacgc

SEQ ID NO: 1453791 - RNA, 19 nt, Artificial Sequence
  Description of Artificial Sequence: Synthetic oligonucleotide
gguauaggugacagacuug

SEQ ID NO: 1453792 - RNA, 19 nt, Artificial Sequence
  Description of Artificial Sequence: Synthetic oligonucleotide
gcuuuaugaggaagguccc

SEQ ID NO: 1453793 - RNA, 19 nt, Artificial Sequence
  Description of Artificial Sequence: Synthetic oligonucleotide
acggccucacucucacuga

SEQ ID NO: 1453794 - RNA, 19 nt, Artificial Sequence
  Description of Artificial Sequence: Synthetic oligonucleotide
uagcguagccgguccucug

SEQ ID NO: 1453795 - RNA, 19 nt, Artificial Sequence
  Description of Artificial Sequence: Synthetic oligonucleotide
gagcuagugaggccuuuua

SEQ ID NO: 1453796 - RNA, 19 nt, Artificial Sequence
  Description of Artificial Sequence: Synthetic oligonucleotide
cuccgguauggccccacac

SEQ ID NO: 1453797 - RNA, 19 nt, Artificial Sequence
  Description of Artificial Sequence: Synthetic oligonucleotide
gguagcgcggcacgagcgc

SEQ ID NO: 1453798 - RNA, 19 nt, Artificial Sequence
  Description of Artificial Sequence: Synthetic oligonucleotide
cccugcacauucaggagac

SEQ ID NO: 1453799 - RNA, 19 nt, Artificial Sequence
  Description of Artificial Sequence: Synthetic oligonucleotide
cucgcgcgaacugcuggcg

SEQ ID NO: 1453800 - RNA, 19 nt, Artificial Sequence
  Description of Artificial Sequence: Synthetic oligonucleotide
uagccucggugcuucucac

SEQ ID NO: 1453801 - RNA, 19 nt, Artificial Sequence
  Description of Artificial Sequence: Synthetic oligonucleotide
ggauguuauuggaaauguc

SEQ ID NO: 1453802 - RNA, 19 nt, Artificial Sequence
  Description of Artificial Sequence: Synthetic oligonucleotide
aucuccgguauggccccac

SEQ ID NO: 1453803 - RNA, 19 nt, Artificial Sequence
  Description of Artificial Sequence: Synthetic oligonucleotide
gguggagcaaugggagaag

SEQ ID NO: 1453804 - RNA, 19 nt, Artificial Sequence
  Description of Artificial Sequence: Synthetic oligonucleotide
agaaggccuccaagugagg

SEQ ID NO: 1453805 - RNA, 19 nt, Artificial Sequence
  Description of Artificial Sequence: Synthetic oligonucleotide
agccucauuaguggccccu

SEQ ID NO: 1453806 - RNA, 19 nt, Artificial Sequence
  Description of Artificial Sequence: Synthetic oligonucleotide
cacgagcgcauagcguagc

SEQ ID NO: 1453807 - RNA, 19 nt, Artificial Sequence
  Description of Artificial Sequence: Synthetic oligonucleotide
cucagagauuucuuugcau

SEQ ID NO: 1453808 - RNA, 19 nt, Artificial Sequence
  Description of Artificial Sequence: Synthetic oligonucleotide
cacucggacagcaugcuuu

SEQ ID NO: 1453809 - RNA, 19 nt, Artificial Sequence
  Description of Artificial Sequence: Synthetic oligonucleotide
gaggccuuuuaggcugcug

SEQ ID NO: 1453810 - RNA, 19 nt, Artificial Sequence
  Description of Artificial Sequence: Synthetic oligonucleotide
ggacguguggccccuccac

SEQ ID NO: 1453811 - RNA, 19 nt, Artificial Sequence
  Description of Artificial Sequence: Synthetic oligonucleotide
cacauucaggagacccaga

SEQ ID NO: 1453812 - RNA, 19 nt, Artificial Sequence
  Description of Artificial Sequence: Synthetic oligonucleotide
ggccuuuuaggcugcuguc

SEQ ID NO: 1453813 - RNA, 19 nt, Artificial Sequence
  Description of Artificial Sequence: Synthetic oligonucleotide
cacucaccacugcucagga

SEQ ID NO: 1453814 - RNA, 19 nt, Artificial Sequence
  Description of Artificial Sequence: Synthetic oligonucleotide
guugcaccaggaagcgcac

SEQ ID NO: 1453815 - RNA, 19 nt, Artificial Sequence
  Description of Artificial Sequence: Synthetic oligonucleotide
cauagccucggugcuucuc

SEQ ID NO: 1453816 - RNA, 19 nt, Artificial Sequence
  Description of Artificial Sequence: Synthetic oligonucleotide
gaucggcgcgcaguugcac

SEQ ID NO: 1453817 - RNA, 19 nt, Artificial Sequence
  Description of Artificial Sequence: Synthetic oligonucleotide
ggaugcacggccucacucu

SEQ ID NO: 1453818 - RNA, 19 nt, Artificial Sequence
  Description of Artificial Sequence: Synthetic oligonucleotide
gcuccagacucaggaagcc

SEQ ID NO: 1453819 - RNA, 19 nt, Artificial Sequence
  Description of Artificial Sequence: Synthetic oligonucleotide
gcugauggaguagaagaua

SEQ ID NO: 1453820 - RNA, 19 nt, Artificial Sequence
  Description of Artificial Sequence: Synthetic oligonucleotide
guauggccccacacgccgc

SEQ ID NO: 1453821 - RNA, 19 nt, Artificial Sequence
  Description of Artificial Sequence: Synthetic oligonucleotide
gccuuuuaggcugcuguca

SEQ ID NO: 1453822 - RNA, 19 nt, Artificial Sequence
  Description of Artificial Sequence: Synthetic oligonucleotide
gccgcgguagcgcggcacg

SEQ ID NO: 1453823 - RNA, 19 nt, Artificial Sequence
  Description of Artificial Sequence: Synthetic oligonucleotide
uagcgcggcacgagcgcau

SEQ ID NO: 1453824 - RNA, 19 nt, Artificial Sequence
  Description of Artificial Sequence: Synthetic oligonucleotide
ccucagagauuucuuugca

SEQ ID NO: 1453825 - RNA, 19 nt, Artificial Sequence
  Description of Artificial Sequence: Synthetic oligonucleotide
cacaggaugcacggccuca

SEQ ID NO: 1453826 - RNA, 19 nt, Artificial Sequence
  Description of Artificial Sequence: Synthetic oligonucleotide
agaggccgcgguagcgcgg

SEQ ID NO: 1453827 - RNA, 19 nt, Artificial Sequence
  Description of Artificial Sequence: Synthetic oligonucleotide
ccucgcgcgaacugcuggc

SEQ ID NO: 1453828 - RNA, 19 nt, Artificial Sequence
  Description of Artificial Sequence: Synthetic oligonucleotide
caccucgcgcgaacugcug

SEQ ID NO: 1453829 - RNA, 19 nt, Artificial Sequence
  Description of Artificial Sequence: Synthetic oligonucleotide
gccaccucgcgcgaacugc

SEQ ID NO: 1453830 - RNA, 19 nt, Artificial Sequence
  Description of Artificial Sequence: Synthetic oligonucleotide
agcgcauagcguagccggu

SEQ ID NO: 1453831 - RNA, 19 nt, Artificial Sequence
  Description of Artificial Sequence: Synthetic oligonucleotide
guagcgcggcacgagcgca

SEQ ID NO: 1453832 - RNA, 19 nt, Artificial Sequence
  Description of Artificial Sequence: Synthetic oligonucleotide
cuccagacucaggaagcca

SEQ ID NO: 1453833 - RNA, 19 nt, Artificial Sequence
  Description of Artificial Sequence: Synthetic oligonucleotide
guuucagauggagggcacu

SEQ ID NO: 1453834 - RNA, 19 nt, Artificial Sequence
  Description of Artificial Sequence: Synthetic oligonucleotide
cagcuguggcuucccugac

SEQ ID NO: 1453835 - RNA, 19 nt, Artificial Sequence
  Description of Artificial Sequence: Synthetic oligonucleotide
agaucggcgcgcaguugca

SEQ ID NO: 1453836 - RNA, 19 nt, Artificial Sequence
  Description of Artificial Sequence: Synthetic oligonucleotide
ccgccguccagcuugcuga

SEQ ID NO: 1453837 - RNA, 19 nt, Artificial Sequence
  Description of Artificial Sequence: Synthetic oligonucleotide
gagggcacuccuucacgau

SEQ ID NO: 1453838 - RNA, 19 nt, Artificial Sequence
  Description of Artificial Sequence: Synthetic oligonucleotide
gcguagccgguccucugcc

SEQ ID NO: 1453839 - RNA, 19 nt, Artificial Sequence
  Description of Artificial Sequence: Synthetic oligonucleotide
caaccgagguggggccucc

SEQ ID NO: 1453840 - RNA, 19 nt, Artificial Sequence
  Description of Artificial Sequence: Synthetic oligonucleotide
acacgccgcuucaugucca

SEQ ID NO: 1453841 - RNA, 19 nt, Artificial Sequence
  Description of Artificial Sequence: Synthetic oligonucleotide
ccacacgccgcuucauguc

SEQ ID NO: 1453842 - RNA, 19 nt, Artificial Sequence
  Description of Artificial Sequence: Synthetic oligonucleotide
gggucaggcugauggagua

SEQ ID NO: 1453843 - RNA, 19 nt, Artificial Sequence
  Description of Artificial Sequence: Synthetic oligonucleotide
gcacgagcgcauagcguag

SEQ ID NO: 1453844 - RNA, 19 nt, Artificial Sequence
  Description of Artificial Sequence: Synthetic oligonucleotide
ccugugaccucagagauuu

SEQ ID NO: 1453845 - RNA, 19 nt, Artificial Sequence
  Description of Artificial Sequence: Synthetic oligonucleotide
cccuugaugcucucgugaa

SEQ ID NO: 1453846 - RNA, 19 nt, Artificial Sequence
  Description of Artificial Sequence: Synthetic oligonucleotide
gcacagugacaaccgaggu

SEQ ID NO: 1453847 - RNA, 19 nt, Artificial Sequence
  Description of Artificial Sequence: Synthetic oligonucleotide
ggccaccucgcgcgaacug

SEQ ID NO: 1453848 - RNA, 19 nt, Artificial Sequence
  Description of Artificial Sequence: Synthetic oligonucleotide
guggggccuccggagugcc

SEQ ID NO: 1453849 - RNA, 19 nt, Artificial Sequence
  Description of Artificial Sequence: Synthetic oligonucleotide
cgagcgcauagcguagccg

SEQ ID NO: 1453850 - RNA, 19 nt, Artificial Sequence
  Description of Artificial Sequence: Synthetic oligonucleotide
cugaagcaccucacagggu

SEQ ID NO: 1453851 - RNA, 19 nt, Artificial Sequence
  Description of Artificial Sequence: Synthetic oligonucleotide
gguaccaggcacacagccu

SEQ ID NO: 1453852 - RNA, 19 nt, Artificial Sequence
  Description of Artificial Sequence: Synthetic oligonucleotide
guaagucaaccagcacagu

SEQ ID NO: 1453853 - RNA, 19 nt, Artificial Sequence
  Description of Artificial Sequence: Synthetic oligonucleotide
gugaguaaaccuggcccau

SEQ ID NO: 1453854 - RNA, 19 nt, Artificial Sequence
  Description of Artificial Sequence: Synthetic oligonucleotide
gacaaccgagguggggccu

SEQ ID NO: 1453855 - RNA, 19 nt, Artificial Sequence
  Description of Artificial Sequence: Synthetic oligonucleotide
cucgugaacugggucgccu

SEQ ID NO: 1453856 - RNA, 19 nt, Artificial Sequence
  Description of Artificial Sequence: Synthetic oligonucleotide
guacggccaccucgcgcga

SEQ ID NO: 1453857 - RNA, 19 nt, Artificial Sequence
  Description of Artificial Sequence: Synthetic oligonucleotide
gugacccgcuccagacuca

SEQ ID NO: 1453858 - RNA, 19 nt, Artificial Sequence
  Description of Artificial Sequence: Synthetic oligonucleotide
ccguccagcuugcugaugu

SEQ ID NO: 1453859 - RNA, 19 nt, Artificial Sequence
  Description of Artificial Sequence: Synthetic oligonucleotide
ccaggugacccgcuccaga

SEQ ID NO: 1453860 - RNA, 19 nt, Artificial Sequence
  Description of Artificial Sequence: Synthetic oligonucleotide
cagcagaucggcgcgcagu

SEQ ID NO: 1453861 - RNA, 19 nt, Artificial Sequence
  Description of Artificial Sequence: Synthetic oligonucleotide
gcagaucggcgcgcaguug

SEQ ID NO: 1453862 - RNA, 19 nt, Artificial Sequence
  Description of Artificial Sequence: Synthetic oligonucleotide
ccugcacauucaggagacc

SEQ ID NO: 1453863 - RNA, 19 nt, Artificial Sequence
  Description of Artificial Sequence: Synthetic oligonucleotide
ccggacguguggccccucc

SEQ ID NO: 1453864 - RNA, 19 nt, Artificial Sequence
  Description of Artificial Sequence: Synthetic oligonucleotide
gcgcauagcguagccgguc

SEQ ID NO: 1453865 - RNA, 19 nt, Artificial Sequence
  Description of Artificial Sequence: Synthetic oligonucleotide
gcuucucaccauacaggua

SEQ ID NO: 1453866 - RNA, 19 nt, Artificial Sequence
  Description of Artificial Sequence: Synthetic oligonucleotide
gcgcggcacgagcgcauag

SEQ ID NO: 1453867 - RNA, 19 nt, Artificial Sequence
  Description of Artificial Sequence: Synthetic oligonucleotide
cccacacgccgcuucaugu

SEQ ID NO: 1453868 - RNA, 19 nt, Artificial Sequence
  Description of Artificial Sequence: Synthetic oligonucleotide
agcgcggcacgagcgcaua

SEQ ID NO: 1453869 - RNA, 19 nt, Artificial Sequence
  Description of Artificial Sequence: Synthetic oligonucleotide
cgcggcacgagcgcauagc

SEQ ID NO: 1453870 - RNA, 19 nt, Artificial Sequence
  Description of Artificial Sequence: Synthetic oligonucleotide
ggucgccugugaccucaga

SEQ ID NO: 1453871 - RNA, 19 nt, Artificial Sequence
  Description of Artificial Sequence: Synthetic oligonucleotide
cgcgcgaacugcuggcgca

SEQ ID NO: 1453872 - RNA, 19 nt, Artificial Sequence
  Description of Artificial Sequence: Synthetic oligonucleotide
acgccacaucacagcucca

SEQ ID NO: 1453873 - RNA, 19 nt, Artificial Sequence
  Description of Artificial Sequence: Synthetic oligonucleotide
ggcacuccuucacgaugcu

SEQ ID NO: 1453874 - RNA, 19 nt, Artificial Sequence
  Description of Artificial Sequence: Synthetic oligonucleotide
ggagcuagugaggccuuuu

SEQ ID NO: 1453875 - RNA, 19 nt, Artificial Sequence
  Description of Artificial Sequence: Synthetic oligonucleotide
gcgcgcaguugcaccagga

SEQ ID NO: 1453876 - RNA, 19 nt, Artificial Sequence
  Description of Artificial Sequence: Synthetic oligonucleotide
cacgccgcuucauguccau

SEQ ID NO: 1453877 - RNA, 19 nt, Artificial Sequence
  Description of Artificial Sequence: Synthetic oligonucleotide
caucuccgguauggcccca

SEQ ID NO: 1453878 - RNA, 19 nt, Artificial Sequence
  Description of Artificial Sequence: Synthetic oligonucleotide
ccaccucgcgcgaacugcu

SEQ ID NO: 1453879 - RNA, 19 nt, Artificial Sequence
  Description of Artificial Sequence: Synthetic oligonucleotide
cgcgcaguugcaccaggaa

SEQ ID NO: 1453880 - RNA, 19 nt, Artificial Sequence
  Description of Artificial Sequence: Synthetic oligonucleotide
cgcgaacugcuggcgcagc

SEQ ID NO: 1453881 - RNA, 19 nt, Artificial Sequence
  Description of Artificial Sequence: Synthetic oligonucleotide
cagaagccacuuggugaau

SEQ ID NO: 1453882 - RNA, 19 nt, Artificial Sequence
  Description of Artificial Sequence: Synthetic oligonucleotide
cggacguguggccccucca

SEQ ID NO: 1453883 - RNA, 19 nt, Artificial Sequence
  Description of Artificial Sequence: Synthetic oligonucleotide
gcacggccucacucucacu

SEQ ID NO: 1453884 - RNA, 19 nt, Artificial Sequence
  Description of Artificial Sequence: Synthetic oligonucleotide
cguagccgguccucugccu

SEQ ID NO: 1453885 - RNA, 19 nt, Artificial Sequence
  Description of Artificial Sequence: Synthetic oligonucleotide
cggcacgagcgcauagcgu

SEQ ID NO: 1453886 - RNA, 19 nt, Artificial Sequence
  Description of Artificial Sequence: Synthetic oligonucleotide
cccggacguguggccccuc

SEQ ID NO: 1453887 - RNA, 19 nt, Artificial Sequence
  Description of Artificial Sequence: Synthetic oligonucleotide
cggccaccucgcgcgaacu

SEQ ID NO: 1453888 - RNA, 19 nt, Artificial Sequence
  Description of Artificial Sequence: Synthetic oligonucleotide
agauuuucaccaucuagcc

SEQ ID NO: 1453889 - RNA, 19 nt, Artificial Sequence
  Description of Artificial Sequence: Synthetic oligonucleotide
gacagcuuugaacagaugc

SEQ ID NO: 1453890 - RNA, 19 nt, Artificial Sequence
  Description of Artificial Sequence: Synthetic oligonucleotide
accgcuauccuucacgugc

SEQ ID NO: 1453891 - RNA, 19 nt, Artificial Sequence
  Description of Artificial Sequence: Synthetic oligonucleotide
ugagauuuucaccaucuag

SEQ ID NO: 1453892 - RNA, 19 nt, Artificial Sequence
  Description of Artificial Sequence: Synthetic oligonucleotide
aagcaggccacagagaugg

SEQ ID NO: 1453893 - RNA, 19 nt, Artificial Sequence
  Description of Artificial Sequence: Synthetic oligonucleotide
uuugguaugaugagggugu

SEQ ID NO: 1453894 - RNA, 19 nt, Artificial Sequence
  Description of Artificial Sequence: Synthetic oligonucleotide
aaaacgcgccagcaaaccc

SEQ ID NO: 1453895 - RNA, 19 nt, Artificial Sequence
  Description of Artificial Sequence: Synthetic oligonucleotide
aguguggugaaaugguagc

SEQ ID NO: 1453896 - RNA, 19 nt, Artificial Sequence
  Description of Artificial Sequence: Synthetic oligonucleotide
caaaagaucagcugaggcc

SEQ ID NO: 1453897 - RNA, 19 nt, Artificial Sequence
  Description of Artificial Sequence: Synthetic oligonucleotide
ugugaugggagucugagua

SEQ ID NO: 1453898 - RNA, 19 nt, Artificial Sequence
  Description of Artificial Sequence: Synthetic oligonucleotide
uuuccuacauucagugugg

SEQ ID NO: 1453899 - RNA, 19 nt, Artificial Sequence
  Description of Artificial Sequence: Synthetic oligonucleotide
aaaugguagcuucagccug

SEQ ID NO: 1453900 - RNA, 19 nt, Artificial Sequence
  Description of Artificial Sequence: Synthetic oligonucleotide
ucagagaucggccaaucug

SEQ ID NO: 1453901 - RNA, 19 nt, Artificial Sequence
  Description of Artificial Sequence: Synthetic oligonucleotide
uugacucccauuaaggcac

SEQ ID NO: 1453902 - RNA, 19 nt, Artificial Sequence
  Description of Artificial Sequence: Synthetic oligonucleotide
agaucggccaaucuggguc

SEQ ID NO: 1453903 - RNA, 19 nt, Artificial Sequence
  Description of Artificial Sequence: Synthetic oligonucleotide
gaaggguuuggacacaggc

SEQ ID NO: 1453904 - RNA, 19 nt, Artificial Sequence
  Description of Artificial Sequence: Synthetic oligonucleotide
uuauccucgagucuagccu

SEQ ID NO: 1453905 - RNA, 19 nt, Artificial Sequence
  Description of Artificial Sequence: Synthetic oligonucleotide
agaucaguggcagugguac

SEQ ID NO: 1453906 - RNA, 19 nt, Artificial Sequence
  Description of Artificial Sequence: Synthetic oligonucleotide
uucuauuuggcgcuccagc

SEQ ID NO: 1453907 - RNA, 19 nt, Artificial Sequence
  Description of Artificial Sequence: Synthetic oligonucleotide
cagagaucggccaaucugg

SEQ ID NO: 1453908 - RNA, 19 nt, Artificial Sequence
  Description of Artificial Sequence: Synthetic oligonucleotide
aguagaugaccagugcugc

SEQ ID NO: 1453909 - RNA, 19 nt, Artificial Sequence
  Description of Artificial Sequence: Synthetic oligonucleotide
auugacucccauuaaggca

SEQ ID NO: 1453910 - RNA, 19 nt, Artificial Sequence
  Description of Artificial Sequence: Synthetic oligonucleotide
aagggucuggacuuggcug

SEQ ID NO: 1453911 - RNA, 19 nt, Artificial Sequence
  Description of Artificial Sequence: Synthetic oligonucleotide
cacaaaguagccauagcac

SEQ ID NO: 1453912 - RNA, 19 nt, Artificial Sequence
  Description of Artificial Sequence: Synthetic oligonucleotide
gaacacgaggaccacuagg

SEQ ID NO: 1453913 - RNA, 19 nt, Artificial Sequence
  Description of Artificial Sequence: Synthetic oligonucleotide
ugggaugguggugugaugg

SEQ ID NO: 1453914 - RNA, 19 nt, Artificial Sequence
  Description of Artificial Sequence: Synthetic oligonucleotide
uuugcuuuggcugcaggag

SEQ ID NO: 1453915 - RNA, 19 nt, Artificial Sequence
  Description of Artificial Sequence: Synthetic oligonucleotide
caugagacccagaagcagc

SEQ ID NO: 1453916 - RNA, 19 nt, Artificial Sequence
  Description of Artificial Sequence: Synthetic oligonucleotide
auggacugccaugugagcc

SEQ ID NO: 1453917 - RNA, 19 nt, Artificial Sequence
  Description of Artificial Sequence: Synthetic oligonucleotide
ucuugagggacuugggaug

SEQ ID NO: 1453918 - RNA, 19 nt, Artificial Sequence
  Description of Artificial Sequence: Synthetic oligonucleotide
ucaccaggcccacaaaacc

SEQ ID NO: 1453919 - RNA, 19 nt, Artificial Sequence
  Description of Artificial Sequence: Synthetic oligonucleotide
agucuagccucuccugucc

SEQ ID NO: 1453920 - RNA, 19 nt, Artificial Sequence
  Description of Artificial Sequence: Synthetic oligonucleotide
gauuuucaccaucuagccc

SEQ ID NO: 1453921 - RNA, 19 nt, Artificial Sequence
  Description of Artificial Sequence: Synthetic oligonucleotide
gauaggacugggaugauga

SEQ ID NO: 1453922 - RNA, 19 nt, Artificial Sequence
  Description of Artificial Sequence: Synthetic oligonucleotide
uuuuguaaggcagcagcag

SEQ ID NO: 1453923 - RNA, 19 nt, Artificial Sequence
  Description of Artificial Sequence: Synthetic oligonucleotide
uuuggacacaggcaaggca

SEQ ID NO: 1453924 - RNA, 19 nt, Artificial Sequence
  Description of Artificial Sequence: Synthetic oligonucleotide
aaacgcgccagcaaacccg

SEQ ID NO: 1453925 - RNA, 19 nt, Artificial Sequence
  Description of Artificial Sequence: Synthetic oligonucleotide
ucucacuuauccucgaguc

SEQ ID NO: 1453926 - RNA, 19 nt, Artificial Sequence
  Description of Artificial Sequence: Synthetic oligonucleotide
guagccauagcacacuuuc

SEQ ID NO: 1453927 - RNA, 19 nt, Artificial Sequence
  Description of Artificial Sequence: Synthetic oligonucleotide
ugggauaucccugucauuc

SEQ ID NO: 1453928 - RNA, 19 nt, Artificial Sequence
  Description of Artificial Sequence: Synthetic oligonucleotide
cuuauccucgagucuagcc

SEQ ID NO: 1453929 - RNA, 19 nt, Artificial Sequence
  Description of Artificial Sequence: Synthetic oligonucleotide
ugugggauaucccugucau

SEQ ID NO: 1453930 - RNA, 19 nt, Artificial Sequence
  Description of Artificial Sequence: Synthetic oligonucleotide
ugggagucugaguaggaag

SEQ ID NO: 1453931 - RNA, 19 nt, Artificial Sequence
  Description of Artificial Sequence: Synthetic oligonucleotide
augacgaugaguggaagag

SEQ ID NO: 1453932 - RNA, 19 nt, Artificial Sequence
  Description of Artificial Sequence: Synthetic oligonucleotide
uaacagaacccagaugugc

SEQ ID NO: 1453933 - RNA, 19 nt, Artificial Sequence
  Description of Artificial Sequence: Synthetic oligonucleotide
agggguaaaggggugaagg

SEQ ID NO: 1453934 - RNA, 19 nt, Artificial Sequence
  Description of Artificial Sequence: Synthetic oligonucleotide
cagguuaaucaucauggag

SEQ ID NO: 1453935 - RNA, 19 nt, Artificial Sequence
  Description of Artificial Sequence: Synthetic oligonucleotide
uauuuggcgcuccagcccu

SEQ ID NO: 1453936 - RNA, 19 nt, Artificial Sequence
  Description of Artificial Sequence: Synthetic oligonucleotide
cacuuuccuacauucagug

SEQ ID NO: 1453937 - RNA, 19 nt, Artificial Sequence
  Description of Artificial Sequence: Synthetic oligonucleotide
uucacgugcgacuucgcug

SEQ ID NO: 1453938 - RNA, 19 nt, Artificial Sequence
  Description of Artificial Sequence: Synthetic oligonucleotide
uggaguguggugaaauggu

SEQ ID NO: 1453939 - RNA, 19 nt, Artificial Sequence
  Description of Artificial Sequence: Synthetic oligonucleotide
ugugagccugccauguuug

SEQ ID NO: 1453940 - RNA, 19 nt, Artificial Sequence
  Description of Artificial Sequence: Synthetic oligonucleotide
aggguuuggacacaggcaa

SEQ ID NO: 1453941 - RNA, 19 nt, Artificial Sequence
  Description of Artificial Sequence: Synthetic oligonucleotide
cuucuguuggccagguggg

SEQ ID NO: 1453942 - RNA, 19 nt, Artificial Sequence
  Description of Artificial Sequence: Synthetic oligonucleotide
cugggugagauuuucacca

SEQ ID NO: 1453943 - RNA, 19 nt, Artificial Sequence
  Description of Artificial Sequence: Synthetic oligonucleotide
agugagccggcucagcaag

SEQ ID NO: 1453944 - RNA, 19 nt, Artificial Sequence
  Description of Artificial Sequence: Synthetic oligonucleotide
ugggucaaaagaucagcug

SEQ ID NO: 1453945 - RNA, 19 nt, Artificial Sequence
  Description of Artificial Sequence: Synthetic oligonucleotide
aacagaacccagaugugca

SEQ ID NO: 1453946 - RNA, 19 nt, Artificial Sequence
  Description of Artificial Sequence: Synthetic oligonucleotide
ucucgauaggacugggaug

SEQ ID NO: 1453947 - RNA, 19 nt, Artificial Sequence
  Description of Artificial Sequence: Synthetic oligonucleotide
agguguguccccgagcccc

SEQ ID NO: 1453948 - RNA, 19 nt, Artificial Sequence
  Description of Artificial Sequence: Synthetic oligonucleotide
cucugaaaucacaugcaug

SEQ ID NO: 1453949 - RNA, 19 nt, Artificial Sequence
  Description of Artificial Sequence: Synthetic oligonucleotide
accaucuagccccagggca

SEQ ID NO: 1453950 - RNA, 19 nt, Artificial Sequence
  Description of Artificial Sequence: Synthetic oligonucleotide
cuggaguguggugaaaugg

SEQ ID NO: 1453951 - RNA, 19 nt, Artificial Sequence
  Description of Artificial Sequence: Synthetic oligonucleotide
gcuauugacucccauuaag

SEQ ID NO: 1453952 - RNA, 19 nt, Artificial Sequence
  Description of Artificial Sequence: Synthetic oligonucleotide
aagggacuacucuuucuga

SEQ ID NO: 1453953 - RNA, 19 nt, Artificial Sequence
  Description of Artificial Sequence: Synthetic oligonucleotide
gaugacgaugaguggaaga

SEQ ID NO: 1453954 - RNA, 19 nt, Artificial Sequence
  Description of Artificial Sequence: Synthetic oligonucleotide
auggagaucaguggcagug

SEQ ID NO: 1453955 - RNA, 19 nt, Artificial Sequence
  Description of Artificial Sequence: Synthetic oligonucleotide
augauggacugccauguga

SEQ ID NO: 1453956 - RNA, 19 nt, Artificial Sequence
  Description of Artificial Sequence: Synthetic oligonucleotide
gauccguccuagcaaggcc

SEQ ID NO: 1453957 - RNA, 19 nt, Artificial Sequence
  Description of Artificial Sequence: Synthetic oligonucleotide
gacgaugaguggaagagga

SEQ ID NO: 1453958 - RNA, 19 nt, Artificial Sequence
  Description of Artificial Sequence: Synthetic oligonucleotide
ugacgaugaguggaagagg

SEQ ID NO: 1453959 - RNA, 19 nt, Artificial Sequence
  Description of Artificial Sequence: Synthetic oligonucleotide
uagaugaccagugcugcug

SEQ ID NO: 1453960 - RNA, 19 nt, Artificial Sequence
  Description of Artificial Sequence: Synthetic oligonucleotide
aagaagagagcuggagugu

SEQ ID NO: 1453961 - RNA, 19 nt, Artificial Sequence
  Description of Artificial Sequence: Synthetic oligonucleotide
ugaaggguuuggacacagg

SEQ ID NO: 1453962 - RNA, 19 nt, Artificial Sequence
  Description of Artificial Sequence: Synthetic oligonucleotide
uccuccauacuccggggug

SEQ ID NO: 1453963 - RNA, 19 nt, Artificial Sequence
  Description of Artificial Sequence: Synthetic oligonucleotide
aacgcgccagcaaacccgc

SEQ ID NO: 1453964 - RNA, 19 nt, Artificial Sequence
  Description of Artificial Sequence: Synthetic oligonucleotide
ucuucuauuuggcgcucca

SEQ ID NO: 1453965 - RNA, 19 nt, Artificial Sequence
  Description of Artificial Sequence: Synthetic oligonucleotide
aggacugggaugaugacga

SEQ ID NO: 1453966 - RNA, 19 nt, Artificial Sequence
  Description of Artificial Sequence: Synthetic oligonucleotide
uauccagcgucuccuucag

SEQ ID NO: 1453967 - RNA, 19 nt, Artificial Sequence
  Description of Artificial Sequence: Synthetic oligonucleotide
gaaaugguagcuucagccu

SEQ ID NO: 1453968 - RNA, 19 nt, Artificial Sequence
  Description of Artificial Sequence: Synthetic oligonucleotide
uauccucgagucuagccuc

SEQ ID NO: 1453969 - RNA, 19 nt, Artificial Sequence
  Description of Artificial Sequence: Synthetic oligonucleotide
cucgauaggacugggauga

SEQ ID NO: 1453970 - RNA, 19 nt, Artificial Sequence
  Description of Artificial Sequence: Synthetic oligonucleotide
gucaaaagaucagcugagg

SEQ ID NO: 1453971 - RNA, 19 nt, Artificial Sequence
  Description of Artificial Sequence: Synthetic oligonucleotide
caggauccguccuagcaag

SEQ ID NO: 1453972 - RNA, 19 nt, Artificial Sequence
  Description of Artificial Sequence: Synthetic oligonucleotide
gggucaaaagaucagcuga

SEQ ID NO: 1453973 - RNA, 19 nt, Artificial Sequence
  Description of Artificial Sequence: Synthetic oligonucleotide
cucaccaggcccacaaaac

SEQ ID NO: 1453974 - RNA, 19 nt, Artificial Sequence
  Description of Artificial Sequence: Synthetic oligonucleotide
gguagcuucagccuggaaa

SEQ ID NO: 1453975 - RNA, 19 nt, Artificial Sequence
  Description of Artificial Sequence: Synthetic oligonucleotide
cacucaacaacugggcagc

SEQ ID NO: 1453976 - RNA, 19 nt, Artificial Sequence
  Description of Artificial Sequence: Synthetic oligonucleotide
acugccaugugagccugcc

SEQ ID NO: 1453977 - RNA, 19 nt, Artificial Sequence
  Description of Artificial Sequence: Synthetic oligonucleotide
uucagagaucggccaaucu

SEQ ID NO: 1453978 - RNA, 19 nt, Artificial Sequence
  Description of Artificial Sequence: Synthetic oligonucleotide
uagccauagcacacuuucc

SEQ ID NO: 1453979 - RNA, 19 nt, Artificial Sequence
  Description of Artificial Sequence: Synthetic oligonucleotide
acaaagaggacaagcuuca

SEQ ID NO: 1453980 - RNA, 19 nt, Artificial Sequence
  Description of Artificial Sequence: Synthetic oligonucleotide
gauggcugaugagauggcc

SEQ ID NO: 1453981 - RNA, 19 nt, Artificial Sequence
  Description of Artificial Sequence: Synthetic oligonucleotide
gaaaggccuuuuguaaggc

SEQ ID NO: 1453982 - RNA, 19 nt, Artificial Sequence
  Description of Artificial Sequence: Synthetic oligonucleotide
cuagggacuagugcagggg

SEQ ID NO: 1453983 - RNA, 19 nt, Artificial Sequence
  Description of Artificial Sequence: Synthetic oligonucleotide
guggugaaaugguagcuuc

SEQ ID NO: 1453984 - RNA, 19 nt, Artificial Sequence
  Description of Artificial Sequence: Synthetic oligonucleotide
aggacgaacacgaggacca

SEQ ID NO: 1453985 - RNA, 19 nt, Artificial Sequence
  Description of Artificial Sequence: Synthetic oligonucleotide
gagagcuggagugugguga

SEQ ID NO: 1453986 - RNA, 19 nt, Artificial Sequence
  Description of Artificial Sequence: Synthetic oligonucleotide
uggagaucaguggcagugg

SEQ ID NO: 1453987 - RNA, 19 nt, Artificial Sequence
  Description of Artificial Sequence: Synthetic oligonucleotide
cuccggggugccuuggucg

SEQ ID NO: 1453988 - RNA, 19 nt, Artificial Sequence
  Description of Artificial Sequence: Synthetic oligonucleotide
gcacucaacaacugggcag

SEQ ID NO: 1453989 - RNA, 19 nt, Artificial Sequence
  Description of Artificial Sequence: Synthetic oligonucleotide
acuuauccucgagucuagc

SEQ ID NO: 1453990 - RNA, 19 nt, Artificial Sequence
  Description of Artificial Sequence: Synthetic oligonucleotide
gugaugggagucugaguag

SEQ ID NO: 1453991 - RNA, 19 nt, Artificial Sequence
  Description of Artificial Sequence: Synthetic oligonucleotide
gaguaggaagaagagagcu

SEQ ID NO: 1453992 - RNA, 19 nt, Artificial Sequence
  Description of Artificial Sequence: Synthetic oligonucleotide
guugggauucugcaaggga

SEQ ID NO: 1453993 - RNA, 19 nt, Artificial Sequence
  Description of Artificial Sequence: Synthetic oligonucleotide
acuuuccuacauucagugu

SEQ ID NO: 1453994 - RNA, 19 nt, Artificial Sequence
  Description of Artificial Sequence: Synthetic oligonucleotide
ugcuauugacucccauuaa

SEQ ID NO: 1453995 - RNA, 19 nt, Artificial Sequence
  Description of Artificial Sequence: Synthetic oligonucleotide
aaguagccauagcacacuu

SEQ ID NO: 1453996 - RNA, 19 nt, Artificial Sequence
  Description of Artificial Sequence: Synthetic oligonucleotide
uccuacauucaguguggca

SEQ ID NO: 1453997 - RNA, 19 nt, Artificial Sequence
  Description of Artificial Sequence: Synthetic oligonucleotide
agggacuacucuuucugaa

SEQ ID NO: 1453998 - RNA, 19 nt, Artificial Sequence
  Description of Artificial Sequence: Synthetic oligonucleotide
ggucaaaagaucagcugag

SEQ ID NO: 1453999 - RNA, 19 nt, Artificial Sequence
  Description of Artificial Sequence: Synthetic oligonucleotide
cacagaccucaccaggccc

SEQ ID NO: 1454000 - RNA, 19 nt, Artificial Sequence
  Description of Artificial Sequence: Synthetic oligonucleotide
cacgaggaccacuaggaca

SEQ ID NO: 1454001 - RNA, 19 nt, Artificial Sequence
  Description of Artificial Sequence: Synthetic oligonucleotide
ugaugacgaugaguggaag

SEQ ID NO: 1454002 - RNA, 19 nt, Artificial Sequence
  Description of Artificial Sequence: Synthetic oligonucleotide
ggcacuuguaacagaaccc

SEQ ID NO: 1454003 - RNA, 19 nt, Artificial Sequence
  Description of Artificial Sequence: Synthetic oligonucleotide
gaccaagccuaggagcaag

SEQ ID NO: 1454004 - RNA, 19 nt, Artificial Sequence
  Description of Artificial Sequence: Synthetic oligonucleotide
gagucuagccucuccuguc

SEQ ID NO: 1454005 - RNA, 19 nt, Artificial Sequence
  Description of Artificial Sequence: Synthetic oligonucleotide
cucaccuuagcuuccaggu

SEQ ID NO: 1454006 - RNA, 19 nt, Artificial Sequence
  Description of Artificial Sequence: Synthetic oligonucleotide
gagccagugagccggcuca

SEQ ID NO: 1454007 - RNA, 19 nt, Artificial Sequence
  Description of Artificial Sequence: Synthetic oligonucleotide
ugagccugccauguuugug

SEQ ID NO: 1454008 - RNA, 19 nt, Artificial Sequence
  Description of Artificial Sequence: Synthetic oligonucleotide
guaacagaacccagaugug

SEQ ID NO: 1454009 - RNA, 19 nt, Artificial Sequence
  Description of Artificial Sequence: Synthetic oligonucleotide
cacuuauccucgagucuag

SEQ ID NO: 1454010 - RNA, 19 nt, Artificial Sequence
  Description of Artificial Sequence: Synthetic oligonucleotide
cagcuagggacuagugcag

SEQ ID NO: 1454011 - RNA, 19 nt, Artificial Sequence
  Description of Artificial Sequence: Synthetic oligonucleotide
gccaccgcuauccuucacg

SEQ ID NO: 1454012 - RNA, 19 nt, Artificial Sequence
  Description of Artificial Sequence: Synthetic oligonucleotide
cacugcugugcaauaagga

SEQ ID NO: 1454013 - RNA, 19 nt, Artificial Sequence
  Description of Artificial Sequence: Synthetic oligonucleotide
agcccucucaccuuagcuu

SEQ ID NO: 1454014 - RNA, 19 nt, Artificial Sequence
  Description of Artificial Sequence: Synthetic oligonucleotide
agccugccauguuuguguc

SEQ ID NO: 1454015 - RNA, 19 nt, Artificial Sequence
  Description of Artificial Sequence: Synthetic oligonucleotide
ucccauuaaggcacuugua

SEQ ID NO: 1454016 - RNA, 19 nt, Artificial Sequence
  Description of Artificial Sequence: Synthetic oligonucleotide
augugagccugccauguuu

SEQ ID NO: 1454017 - RNA, 19 nt, Artificial Sequence
  Description of Artificial Sequence: Synthetic oligonucleotide
ccagguguguccccgagcc

SEQ ID NO: 1454018 - RNA, 19 nt, Artificial Sequence
  Description of Artificial Sequence: Synthetic oligonucleotide
gucuggacuuggcuggggc

SEQ ID NO: 1454019 - RNA, 19 nt, Artificial Sequence
  Description of Artificial Sequence: Synthetic oligonucleotide
ccauagcacacuuuccuac

SEQ ID NO: 1454020 - RNA, 19 nt, Artificial Sequence
  Description of Artificial Sequence: Synthetic oligonucleotide
agcuagggacuagugcagg

SEQ ID NO: 1454021 - RNA, 19 nt, Artificial Sequence
  Description of Artificial Sequence: Synthetic oligonucleotide
gagccugccauguuugugu

SEQ ID NO: 1454022 - RNA, 19 nt, Artificial Sequence
  Description of Artificial Sequence: Synthetic oligonucleotide
guccuagcaaggccaagac

SEQ ID NO: 1454023 - RNA, 19 nt, Artificial Sequence
  Description of Artificial Sequence: Synthetic oligonucleotide
ucuagccucuccugucccu

SEQ ID NO: 1454024 - RNA, 19 nt, Artificial Sequence
  Description of Artificial Sequence: Synthetic oligonucleotide
uaucccugucauucuuccu

SEQ ID NO: 1454025 - RNA, 19 nt, Artificial Sequence
  Description of Artificial Sequence: Synthetic oligonucleotide
uccggggugccuuggucgc

SEQ ID NO: 1454026 - RNA, 19 nt, Artificial Sequence
  Description of Artificial Sequence: Synthetic oligonucleotide
ccacugcugugcaauaagg

SEQ ID NO: 1454027 - RNA, 19 nt, Artificial Sequence
  Description of Artificial Sequence: Synthetic oligonucleotide
uguuuguguccugcuccag

SEQ ID NO: 1454028 - RNA, 19 nt, Artificial Sequence
  Description of Artificial Sequence: Synthetic oligonucleotide
uagcacacuuuccuacauu

SEQ ID NO: 1454029 - RNA, 19 nt, Artificial Sequence
  Description of Artificial Sequence: Synthetic oligonucleotide
gaacccagaugugcaggcc

SEQ ID NO: 1454030 - RNA, 19 nt, Artificial Sequence
  Description of Artificial Sequence: Synthetic oligonucleotide
ccaagaccaagccuaggag

SEQ ID NO: 1454031 - RNA, 19 nt, Artificial Sequence
  Description of Artificial Sequence: Synthetic oligonucleotide
ugcagggguaaagggguga

SEQ ID NO: 1454032 - RNA, 19 nt, Artificial Sequence
  Description of Artificial Sequence: Synthetic oligonucleotide
ugagggugucacuguggga

SEQ ID NO: 1454033 - RNA, 19 nt, Artificial Sequence
  Description of Artificial Sequence: Synthetic oligonucleotide
ucaaggacugggugagauu

SEQ ID NO: 1454034 - RNA, 19 nt, Artificial Sequence
  Description of Artificial Sequence: Synthetic oligonucleotide
uuccuacauucaguguggc

SEQ ID NO: 1454035 - RNA, 19 nt, Artificial Sequence
  Description of Artificial Sequence: Synthetic oligonucleotide
gucuugagggacuugggau

SEQ ID NO: 1454036 - RNA, 19 nt, Artificial Sequence
  Description of Artificial Sequence: Synthetic oligonucleotide
gguuaaucaucauggagau

SEQ ID NO: 1454037 - RNA, 19 nt, Artificial Sequence
  Description of Artificial Sequence: Synthetic oligonucleotide
cugugcaauaaggaaggca

SEQ ID NO: 1454038 - RNA, 19 nt, Artificial Sequence
  Description of Artificial Sequence: Synthetic oligonucleotide
gaccacuaggacagcuuug

SEQ ID NO: 1454039 - RNA, 19 nt, Artificial Sequence
  Description of Artificial Sequence: Synthetic oligonucleotide
cuauccuucacgugcgacu

SEQ ID NO: 1454040 - RNA, 19 nt, Artificial Sequence
  Description of Artificial Sequence: Synthetic oligonucleotide
auccguccuagcaaggcca

SEQ ID NO: 1454041 - RNA, 19 nt, Artificial Sequence
  Description of Artificial Sequence: Synthetic oligonucleotide
ugggugagauuuucaccau

SEQ ID NO: 1454042 - RNA, 19 nt, Artificial Sequence
  Description of Artificial Sequence: Synthetic oligonucleotide
ugguaugaugaggguguca

SEQ ID NO: 1454043 - RNA, 19 nt, Artificial Sequence
  Description of Artificial Sequence: Synthetic oligonucleotide
augaugacgaugaguggaa

SEQ ID NO: 1454044 - RNA, 19 nt, Artificial Sequence
  Description of Artificial Sequence: Synthetic oligonucleotide
accaagccuaggagcaagg

SEQ ID NO: 1454045 - RNA, 19 nt, Artificial Sequence
  Description of Artificial Sequence: Synthetic oligonucleotide
caccuuagcuuccaggugu

SEQ ID NO: 1454046 - RNA, 19 nt, Artificial Sequence
  Description of Artificial Sequence: Synthetic oligonucleotide
ggggcugagcuucaaggac

SEQ ID NO: 1454047 - RNA, 19 nt, Artificial Sequence
  Description of Artificial Sequence: Synthetic oligonucleotide
auccuucacgugcgacuuc

SEQ ID NO: 1454048 - RNA, 19 nt, Artificial Sequence
  Description of Artificial Sequence: Synthetic oligonucleotide
cugggucaaaagaucagcu

SEQ ID NO: 1454049 - RNA, 19 nt, Artificial Sequence
  Description of Artificial Sequence: Synthetic oligonucleotide
caagggcccuguuucucac

SEQ ID NO: 1454050 - RNA, 19 nt, Artificial Sequence
  Description of Artificial Sequence: Synthetic oligonucleotide
ggagccaucccuugacuga

SEQ ID NO: 1454051 - RNA, 19 nt, Artificial Sequence
  Description of Artificial Sequence: Synthetic oligonucleotide
uccagcccucucaccuuag

SEQ ID NO: 1454052 - RNA, 19 nt, Artificial Sequence
  Description of Artificial Sequence: Synthetic oligonucleotide
uccguccuagcaaggccaa

SEQ ID NO: 1454053 - RNA, 19 nt, Artificial Sequence
  Description of Artificial Sequence: Synthetic oligonucleotide
ugacucccauuaaggcacu

SEQ ID NO: 1454054 - RNA, 19 nt, Artificial Sequence
  Description of Artificial Sequence: Synthetic oligonucleotide
acgaacacgaggaccacua

SEQ ID NO: 1454055 - RNA, 19 nt, Artificial Sequence
  Description of Artificial Sequence: Synthetic oligonucleotide
ccuccaagggcccuguuuc

SEQ ID NO: 1454056 - RNA, 19 nt, Artificial Sequence
  Description of Artificial Sequence: Synthetic oligonucleotide
acgaugaguggaagaggag

SEQ ID NO: 1454057 - RNA, 19 nt, Artificial Sequence
  Description of Artificial Sequence: Synthetic oligonucleotide
gaugggagucugaguagga

SEQ ID NO: 1454058 - RNA, 19 nt, Artificial Sequence
  Description of Artificial Sequence: Synthetic oligonucleotide
ggcacucaacaacugggca

SEQ ID NO: 1454059 - RNA, 19 nt, Artificial Sequence
  Description of Artificial Sequence: Synthetic oligonucleotide
cugugggauaucccuguca

SEQ ID NO: 1454060 - RNA, 19 nt, Artificial Sequence
  Description of Artificial Sequence: Synthetic oligonucleotide
agcgucuccuucagagauc

SEQ ID NO: 1454061 - RNA, 19 nt, Artificial Sequence
  Description of Artificial Sequence: Synthetic oligonucleotide
uccaagggcccuguuucuc

SEQ ID NO: 1454062 - RNA, 19 nt, Artificial Sequence
  Description of Artificial Sequence: Synthetic oligonucleotide
cuuggucgcucgccucugc

SEQ ID NO: 1454063 - RNA, 19 nt, Artificial Sequence
  Description of Artificial Sequence: Synthetic oligonucleotide
ggauccguccuagcaaggc

SEQ ID NO: 1454064 - RNA, 19 nt, Artificial Sequence
  Description of Artificial Sequence: Synthetic oligonucleotide
gcagguuaaucaucaugga

SEQ ID NO: 1454065 - RNA, 19 nt, Artificial Sequence
  Description of Artificial Sequence: Synthetic oligonucleotide
uacuccggggugccuuggu

SEQ ID NO: 1454066 - RNA, 19 nt, Artificial Sequence
  Description of Artificial Sequence: Synthetic oligonucleotide
cccuugacugagcaccugc

SEQ ID NO: 1454067 - RNA, 19 nt, Artificial Sequence
  Description of Artificial Sequence: Synthetic oligonucleotide
cuccauacuccggggugcc

SEQ ID NO: 1454068 - RNA, 19 nt, Artificial Sequence
  Description of Artificial Sequence: Synthetic oligonucleotide
aggauccguccuagcaagg

SEQ ID NO: 1454069 - RNA, 19 nt, Artificial Sequence
  Description of Artificial Sequence: Synthetic oligonucleotide
agccaccgcuauccuucac

SEQ ID NO: 1454070 - RNA, 19 nt, Artificial Sequence
  Description of Artificial Sequence: Synthetic oligonucleotide
ggugccuuggucgcucgcc

SEQ ID NO: 1454071 - RNA, 19 nt, Artificial Sequence
  Description of Artificial Sequence: Synthetic oligonucleotide
ccgcuauccuucacgugcg

SEQ ID NO: 1454072 - RNA, 19 nt, Artificial Sequence
  Description of Artificial Sequence: Synthetic oligonucleotide
cuucagccuggaaaggccu

SEQ ID NO: 1454073 - RNA, 19 nt, Artificial Sequence
  Description of Artificial Sequence: Synthetic oligonucleotide
cucuucucucagcuaggga

SEQ ID NO: 1454074 - RNA, 19 nt, Artificial Sequence
  Description of Artificial Sequence: Synthetic oligonucleotide
auacuccggggugccuugg

SEQ ID NO: 1454075 - RNA, 19 nt, Artificial Sequence
  Description of Artificial Sequence: Synthetic oligonucleotide
cucgagucuagccucuccu

SEQ ID NO: 1454076 - RNA, 19 nt, Artificial Sequence
  Description of Artificial Sequence: Synthetic oligonucleotide
cagcucagcucuuugguau

SEQ ID NO: 1454077 - RNA, 19 nt, Artificial Sequence
  Description of Artificial Sequence: Synthetic oligonucleotide
caccgcuauccuucacgug

SEQ ID NO: 1454078 - RNA, 19 nt, Artificial Sequence
  Description of Artificial Sequence: Synthetic oligonucleotide
cagggguaaaggggugaag

SEQ ID NO: 1454079 - RNA, 19 nt, Artificial Sequence
  Description of Artificial Sequence: Synthetic oligonucleotide
cagguguguccccgagccc

SEQ ID NO: 1454080 - RNA, 19 nt, Artificial Sequence
  Description of Artificial Sequence: Synthetic oligonucleotide
caggagaguugggauucug

SEQ ID NO: 1454081 - RNA, 19 nt, Artificial Sequence
  Description of Artificial Sequence: Synthetic oligonucleotide
ggugcuauugacucccauu

SEQ ID NO: 1454082 - RNA, 19 nt, Artificial Sequence
  Description of Artificial Sequence: Synthetic oligonucleotide
ccuguaacagggucucuga

SEQ ID NO: 1454083 - RNA, 19 nt, Artificial Sequence
  Description of Artificial Sequence: Synthetic oligonucleotide
ggucgcucgccucugccuc

SEQ ID NO: 1454084 - RNA, 19 nt, Artificial Sequence
  Description of Artificial Sequence: Synthetic oligonucleotide
ugguagcuucagccuggaa

SEQ ID NO: 1454085 - RNA, 19 nt, Artificial Sequence
  Description of Artificial Sequence: Synthetic oligonucleotide
aguagccauagcacacuuu

SEQ ID NO: 1454086 - RNA, 19 nt, Artificial Sequence
  Description of Artificial Sequence: Synthetic oligonucleotide
gguaaaggggugaaggguu

SEQ ID NO: 1454087 - RNA, 19 nt, Artificial Sequence
  Description of Artificial Sequence: Synthetic oligonucleotide
cuucacgugcgacuucgcu

SEQ ID NO: 1454088 - RNA, 19 nt, Artificial Sequence
  Description of Artificial Sequence: Synthetic oligonucleotide
gaugaccagugcugcugcu

SEQ ID NO: 1454089 - RNA, 19 nt, Artificial Sequence
  Description of Artificial Sequence: Synthetic oligonucleotide
aggaccacuaggacagcuu

SEQ ID NO: 1454090 - RNA, 19 nt, Artificial Sequence
  Description of Artificial Sequence: Synthetic oligonucleotide
ggagccagugagccggcuc

SEQ ID NO: 1454091 - RNA, 19 nt, Artificial Sequence
  Description of Artificial Sequence: Synthetic oligonucleotide
cagugagccggcucagcaa

SEQ ID NO: 1454092 - RNA, 19 nt, Artificial Sequence
  Description of Artificial Sequence: Synthetic oligonucleotide
augguagcuucagccugga

SEQ ID NO: 1454093 - RNA, 19 nt, Artificial Sequence
  Description of Artificial Sequence: Synthetic oligonucleotide
ggauucugcaagggacuac

SEQ ID NO: 1454094 - RNA, 19 nt, Artificial Sequence
  Description of Artificial Sequence: Synthetic oligonucleotide
gcuauccuucacgugcgac

SEQ ID NO: 1454095 - RNA, 19 nt, Artificial Sequence
  Description of Artificial Sequence: Synthetic oligonucleotide
ccuccauacuccggggugc

SEQ ID NO: 1454096 - RNA, 19 nt, Artificial Sequence
  Description of Artificial Sequence: Synthetic oligonucleotide
gaggaccacuaggacagcu

SEQ ID NO: 1454097 - RNA, 19 nt, Artificial Sequence
  Description of Artificial Sequence: Synthetic oligonucleotide
caaggcccggguggagggg

SEQ ID NO: 1454098 - RNA, 19 nt, Artificial Sequence
  Description of Artificial Sequence: Synthetic oligonucleotide
gccauagcacacuuuccua

SEQ ID NO: 1454099 - RNA, 19 nt, Artificial Sequence
  Description of Artificial Sequence: Synthetic oligonucleotide
ggguaaaggggugaagggu

SEQ ID NO: 1454100 - RNA, 19 nt, Artificial Sequence
  Description of Artificial Sequence: Synthetic oligonucleotide
uccauacuccggggugccu

SEQ ID NO: 1454101 - RNA, 19 nt, Artificial Sequence
  Description of Artificial Sequence: Synthetic oligonucleotide
gggacuagugcagggguaa

SEQ ID NO: 1454102 - RNA, 19 nt, Artificial Sequence
  Description of Artificial Sequence: Synthetic oligonucleotide
ggagaucaguggcaguggu

SEQ ID NO: 1454103 - RNA, 19 nt, Artificial Sequence
  Description of Artificial Sequence: Synthetic oligonucleotide
auccucgagucuagccucu

SEQ ID NO: 1454104 - RNA, 19 nt, Artificial Sequence
  Description of Artificial Sequence: Synthetic oligonucleotide
ccucgagucuagccucucc

SEQ ID NO: 1454105 - RNA, 19 nt, Artificial Sequence
  Description of Artificial Sequence: Synthetic oligonucleotide
ccuugacugagcaccugca

SEQ ID NO: 1454106 - RNA, 19 nt, Artificial Sequence
  Description of Artificial Sequence: Synthetic oligonucleotide
gagccccuggagccaguga

SEQ ID NO: 1454107 - RNA, 19 nt, Artificial Sequence
  Description of Artificial Sequence: Synthetic oligonucleotide
ccaggauccguccuagcaa

SEQ ID NO: 1454108 - RNA, 19 nt, Artificial Sequence
  Description of Artificial Sequence: Synthetic oligonucleotide
ggaguguggugaaauggua

SEQ ID NO: 1454109 - RNA, 19 nt, Artificial Sequence
  Description of Artificial Sequence: Synthetic oligonucleotide
ccagugagccggcucagca

SEQ ID NO: 1454110 - RNA, 19 nt, Artificial Sequence
  Description of Artificial Sequence: Synthetic oligonucleotide
ggucuggacuuggcugggg

SEQ ID NO: 1454111 - RNA, 19 nt, Artificial Sequence
  Description of Artificial Sequence: Synthetic oligonucleotide
agggacuagugcaggggua

SEQ ID NO: 1454112 - RNA, 19 nt, Artificial Sequence
  Description of Artificial Sequence: Synthetic oligonucleotide
gcugugcaauaaggaaggc

SEQ ID NO: 1454113 - RNA, 19 nt, Artificial Sequence
  Description of Artificial Sequence: Synthetic oligonucleotide
cccucucaccuuagcuucc

SEQ ID NO: 1454114 - RNA, 19 nt, Artificial Sequence
  Description of Artificial Sequence: Synthetic oligonucleotide
ccaagggcccuguuucuca

SEQ ID NO: 1454115 - RNA, 19 nt, Artificial Sequence
  Description of Artificial Sequence: Synthetic oligonucleotide
gggauaucccugucauucu

SEQ ID NO: 1454116 - RNA, 19 nt, Artificial Sequence
  Description of Artificial Sequence: Synthetic oligonucleotide
gcaagggacuacucuuucu

SEQ ID NO: 1454117 - RNA, 19 nt, Artificial Sequence
  Description of Artificial Sequence: Synthetic oligonucleotide
uccucgagucuagccucuc

SEQ ID NO: 1454118 - RNA, 19 nt, Artificial Sequence
  Description of Artificial Sequence: Synthetic oligonucleotide
ucgauaggacugggaugau

SEQ ID NO: 1454119 - RNA, 19 nt, Artificial Sequence
  Description of Artificial Sequence: Synthetic oligonucleotide
ggcccacaucaccuguaac

SEQ ID NO: 1454120 - RNA, 19 nt, Artificial Sequence
  Description of Artificial Sequence: Synthetic oligonucleotide
cgugcgacuucgcugaaaa

SEQ ID NO: 1454121 - RNA, 19 nt, Artificial Sequence
  Description of Artificial Sequence: Synthetic oligonucleotide
ggauaucccugucauucuu

SEQ ID NO: 1454122 - RNA, 19 nt, Artificial Sequence
  Description of Artificial Sequence: Synthetic oligonucleotide
cccuccaaccugcccuggg

SEQ ID NO: 1454123 - RNA, 19 nt, Artificial Sequence
  Description of Artificial Sequence: Synthetic oligonucleotide
cgaacacgaggaccacuag

SEQ ID NO: 1454124 - RNA, 19 nt, Artificial Sequence
  Description of Artificial Sequence: Synthetic oligonucleotide
cucccucgaagcucuucua

SEQ ID NO: 1454125 - RNA, 19 nt, Artificial Sequence
  Description of Artificial Sequence: Synthetic oligonucleotide
ggagccgaggccccuccaa

SEQ ID NO: 1454126 - RNA, 19 nt, Artificial Sequence
  Description of Artificial Sequence: Synthetic oligonucleotide
ucggccaaucugggucaaa

SEQ ID NO: 1454127 - RNA, 19 nt, Artificial Sequence
  Description of Artificial Sequence: Synthetic oligonucleotide
cuucaaggacugggugaga

SEQ ID NO: 1454128 - RNA, 19 nt, Artificial Sequence
  Description of Artificial Sequence: Synthetic oligonucleotide
ggugucacugugggauauc

SEQ ID NO: 1454129 - RNA, 19 nt, Artificial Sequence
  Description of Artificial Sequence: Synthetic oligonucleotide
cuccaagggcccuguuucu

SEQ ID NO: 1454130 - RNA, 19 nt, Artificial Sequence
  Description of Artificial Sequence: Synthetic oligonucleotide
acgugcgacuucgcugaaa

SEQ ID NO: 1454131 - RNA, 19 nt, Artificial Sequence
  Description of Artificial Sequence: Synthetic oligonucleotide
cgauaggacugggaugaug

SEQ ID NO: 1454132 - RNA, 19 nt, Artificial Sequence
  Description of Artificial Sequence: Synthetic oligonucleotide
agaccucaccaggcccaca

SEQ ID NO: 1454133 - RNA, 19 nt, Artificial Sequence
  Description of Artificial Sequence: Synthetic oligonucleotide
ggacgaacacgaggaccac

SEQ ID NO: 1454134 - RNA, 19 nt, Artificial Sequence
  Description of Artificial Sequence: Synthetic oligonucleotide
aucggccaaucugggucaa

SEQ ID NO: 1454135 - RNA, 19 nt, Artificial Sequence
  Description of Artificial Sequence: Synthetic oligonucleotide
cguccuagcaaggccaaga

SEQ ID NO: 1454136 - RNA, 19 nt, Artificial Sequence
  Description of Artificial Sequence: Synthetic oligonucleotide
gccccuggagccagugagc

SEQ ID NO: 1454137 - RNA, 19 nt, Artificial Sequence
  Description of Artificial Sequence: Synthetic oligonucleotide
gcagggguaaaggggugaa

SEQ ID NO: 1454138 - RNA, 19 nt, Artificial Sequence
  Description of Artificial Sequence: Synthetic oligonucleotide
gugggauaucccugucauu

SEQ ID NO: 1454139 - RNA, 19 nt, Artificial Sequence
  Description of Artificial Sequence: Synthetic oligonucleotide
ccaagccuaggagcaagga

SEQ ID NO: 1454140 - RNA, 19 nt, Artificial Sequence
  Description of Artificial Sequence: Synthetic oligonucleotide
acgcgccagcaaacccgcg

SEQ ID NO: 1454141 - RNA, 19 nt, Artificial Sequence
  Description of Artificial Sequence: Synthetic oligonucleotide
ccucccucgaagcucuucu

SEQ ID NO: 1454142 - RNA, 19 nt, Artificial Sequence
  Description of Artificial Sequence: Synthetic oligonucleotide
ccaccgcuauccuucacgu

SEQ ID NO: 1454143 - RNA, 19 nt, Artificial Sequence
  Description of Artificial Sequence: Synthetic oligonucleotide
gccuuggucgcucgccucu

SEQ ID NO: 1454144 - RNA, 19 nt, Artificial Sequence
  Description of Artificial Sequence: Synthetic oligonucleotide
ccgaggccccuccaaccug

SEQ ID NO: 1454145 - RNA, 19 nt, Artificial Sequence
  Description of Artificial Sequence: Synthetic oligonucleotide
caugugagccugccauguu

SEQ ID NO: 1454146 - RNA, 19 nt, Artificial Sequence
  Description of Artificial Sequence: Synthetic oligonucleotide
cuagccucuccugucccuu

SEQ ID NO: 1454147 - RNA, 19 nt, Artificial Sequence
  Description of Artificial Sequence: Synthetic oligonucleotide
ccccaggauccguccuagc

SEQ ID NO: 1454148 - RNA, 19 nt, Artificial Sequence
  Description of Artificial Sequence: Synthetic oligonucleotide
ccaugugagccugccaugu

SEQ ID NO: 1454149 - RNA, 19 nt, Artificial Sequence
  Description of Artificial Sequence: Synthetic oligonucleotide
ccuuggucgcucgccucug

SEQ ID NO: 1454150 - RNA, 19 nt, Artificial Sequence
  Description of Artificial Sequence: Synthetic oligonucleotide
cccgagccccuggagccag

SEQ ID NO: 1454151 - RNA, 19 nt, Artificial Sequence
  Description of Artificial Sequence: Synthetic oligonucleotide
cacgugcgacuucgcugaa

SEQ ID NO: 1454152 - RNA, 19 nt, Artificial Sequence
  Description of Artificial Sequence: Synthetic oligonucleotide
ccguccuagcaaggccaag

SEQ ID NO: 1454153 - RNA, 19 nt, Artificial Sequence
  Description of Artificial Sequence: Synthetic oligonucleotide
gacucccauuaaggcacuu

SEQ ID NO: 1454154 - RNA, 19 nt, Artificial Sequence
  Description of Artificial Sequence: Synthetic oligonucleotide
gguguguccccgagccccu

SEQ ID NO: 1454155 - RNA, 19 nt, Artificial Sequence
  Description of Artificial Sequence: Synthetic oligonucleotide
cgcuauccuucacgugcga

SEQ ID NO: 1454156 - RNA, 19 nt, Artificial Sequence
  Description of Artificial Sequence: Synthetic oligonucleotide
ccccgagccccuggagcca

SEQ ID NO: 1454157 - RNA, 19 nt, Artificial Sequence
  Description of Artificial Sequence: Synthetic oligonucleotide
ccgagccccuggagccagu

SEQ ID NO: 1454158 - RNA, 19 nt, Artificial Sequence
  Description of Artificial Sequence: Synthetic oligonucleotide
aaccauaucaaauccuucc

SEQ ID NO: 1454159 - RNA, 19 nt, Artificial Sequence
  Description of Artificial Sequence: Synthetic oligonucleotide
auaaaagggaccuaccagc

SEQ ID NO: 1454160 - RNA, 19 nt, Artificial Sequence
  Description of Artificial Sequence: Synthetic oligonucleotide
aaaacuguguuaaugcugc

SEQ ID NO: 1454161 - RNA, 19 nt, Artificial Sequence
  Description of Artificial Sequence: Synthetic oligonucleotide
auuuacagcugauagauag

SEQ ID NO: 1454162 - RNA, 19 nt, Artificial Sequence
  Description of Artificial Sequence: Synthetic oligonucleotide
caaauaaggauacuggucc

SEQ ID NO: 1454163 - RNA, 19 nt, Artificial Sequence
  Description of Artificial Sequence: Synthetic oligonucleotide
aacaaucucaguuguuggc

SEQ ID NO: 1454164 - RNA, 19 nt, Artificial Sequence
  Description of Artificial Sequence: Synthetic oligonucleotide
uguguuguuaacaagguaa

SEQ ID NO: 1454165 - RNA, 19 nt, Artificial Sequence
  Description of Artificial Sequence: Synthetic oligonucleotide
uuuaacucugcugagagcc

SEQ ID NO: 1454166 - RNA, 19 nt, Artificial Sequence
  Description of Artificial Sequence: Synthetic oligonucleotide
uguacugacauaagcagag

SEQ ID NO: 1454167 - RNA, 19 nt, Artificial Sequence
  Description of Artificial Sequence: Synthetic oligonucleotide
gacaagaacauguaagugc

SEQ ID NO: 1454168 - RNA, 19 nt, Artificial Sequence
  Description of Artificial Sequence: Synthetic oligonucleotide
aaccacgagacauagagcu

SEQ ID NO: 1454169 - RNA, 19 nt, Artificial Sequence
  Description of Artificial Sequence: Synthetic oligonucleotide
uuuguacugacauaagcag

SEQ ID NO: 1454170 - RNA, 19 nt, Artificial Sequence
  Description of Artificial Sequence: Synthetic oligonucleotide
uuaggugacguuuugagcu

SEQ ID NO: 1454171 - RNA, 19 nt, Artificial Sequence
  Description of Artificial Sequence: Synthetic oligonucleotide
ucuuuaacucugcugagag

SEQ ID NO: 1454172 - RNA, 19 nt, Artificial Sequence
  Description of Artificial Sequence: Synthetic oligonucleotide
uuuugcgccaguuacagca

SEQ ID NO: 1454173 - RNA, 19 nt, Artificial Sequence
  Description of Artificial Sequence: Synthetic oligonucleotide
aaagaaaccuaacggccgg

SEQ ID NO: 1454174 - RNA, 19 nt, Artificial Sequence
  Description of Artificial Sequence: Synthetic oligonucleotide
gauaaaagggaccuaccag

SEQ ID NO: 1454175 - RNA, 19 nt, Artificial Sequence
  Description of Artificial Sequence: Synthetic oligonucleotide
aauaggcagucuuuccucg

SEQ ID NO: 1454176 - RNA, 19 nt, Artificial Sequence
  Description of Artificial Sequence: Synthetic oligonucleotide
ggcaaauucaaucagauga

SEQ ID NO: 1454177 - RNA, 19 nt, Artificial Sequence
  Description of Artificial Sequence: Synthetic oligonucleotide
aaaagaaaccuaacggccg

SEQ ID NO: 1454178 - RNA, 19 nt, Artificial Sequence
  Description of Artificial Sequence: Synthetic oligonucleotide
ugaaugaaucuuuauucag

SEQ ID NO: 1454179 - RNA, 19 nt, Artificial Sequence
  Description of Artificial Sequence: Synthetic oligonucleotide
auaagcagaggacacgagg

SEQ ID NO: 1454180 - RNA, 19 nt, Artificial Sequence
  Description of Artificial Sequence: Synthetic oligonucleotide
gaggucauggucuucacgc

SEQ ID NO: 1454181 - RNA, 19 nt, Artificial Sequence
  Description of Artificial Sequence: Synthetic oligonucleotide
auagguagagcucaccaag

SEQ ID NO: 1454182 - RNA, 19 nt, Artificial Sequence
  Description of Artificial Sequence: Synthetic oligonucleotide
uguggaucaacugcaaccg

SEQ ID NO: 1454183 - RNA, 19 nt, Artificial Sequence
  Description of Artificial Sequence: Synthetic oligonucleotide
aguaacugcuccuuugguc

SEQ ID NO: 1454184 - RNA, 19 nt, Artificial Sequence
  Description of Artificial Sequence: Synthetic oligonucleotide
ugcuccuuuggucuuaucc

SEQ ID NO: 1454185 - RNA, 19 nt, Artificial Sequence
  Description of Artificial Sequence: Synthetic oligonucleotide
auguaagugcaccugauca

SEQ ID NO: 1454186 - RNA, 19 nt, Artificial Sequence
  Description of Artificial Sequence: Synthetic oligonucleotide
uggacguuggacaggagag

SEQ ID NO: 1454187 - RNA, 19 nt, Artificial Sequence
  Description of Artificial Sequence: Synthetic oligonucleotide
uacauaguaacuuggcuuc

SEQ ID NO: 1454188 - RNA, 19 nt, Artificial Sequence
  Description of Artificial Sequence: Synthetic oligonucleotide
uuggcaacaaucucaguug

SEQ ID NO: 1454189 - RNA, 19 nt, Artificial Sequence
  Description of Artificial Sequence: Synthetic oligonucleotide
guuuaggugacguuuugag

SEQ ID NO: 1454190 - RNA, 19 nt, Artificial Sequence
  Description of Artificial Sequence: Synthetic oligonucleotide
aucaucuaaggauuccuuc

SEQ ID NO: 1454191 - RNA, 19 nt, Artificial Sequence
  Description of Artificial Sequence: Synthetic oligonucleotide
ucgguuguggaucaacugc

SEQ ID NO: 1454192 - RNA, 19 nt, Artificial Sequence
  Description of Artificial Sequence: Synthetic oligonucleotide
acagcugauagauagcaca

SEQ ID NO: 1454193 - RNA, 19 nt, Artificial Sequence
  Description of Artificial Sequence: Synthetic oligonucleotide
caugcacuaagugacaagg

SEQ ID NO: 1454194 - RNA, 19 nt, Artificial Sequence
  Description of Artificial Sequence: Synthetic oligonucleotide
agagcuuauccugagcacc

SEQ ID NO: 1454195 - RNA, 19 nt, Artificial Sequence
  Description of Artificial Sequence: Synthetic oligonucleotide
ugugguaacccuuggacgu

SEQ ID NO: 1454196 - RNA, 19 nt, Artificial Sequence
  Description of Artificial Sequence: Synthetic oligonucleotide
augaaugaaucuuuauuca

SEQ ID NO: 1454197 - RNA, 19 nt, Artificial Sequence
  Description of Artificial Sequence: Synthetic oligonucleotide
aacccuuggacguuggaca

SEQ ID NO: 1454198 - RNA, 19 nt, Artificial Sequence
  Description of Artificial Sequence: Synthetic oligonucleotide
cuuuguacugacauaagca

SEQ ID NO: 1454199 - RNA, 19 nt, Artificial Sequence
  Description of Artificial Sequence: Synthetic oligonucleotide
agcacccugaauuuucugg

SEQ ID NO: 1454200 - RNA, 19 nt, Artificial Sequence
  Description of Artificial Sequence: Synthetic oligonucleotide
aacauguaagugcaccuga

SEQ ID NO: 1454201 - RNA, 19 nt, Artificial Sequence
  Description of Artificial Sequence: Synthetic oligonucleotide
uguguuaaugcugccauug

SEQ ID NO: 1454202 - RNA, 19 nt, Artificial Sequence
  Description of Artificial Sequence: Synthetic oligonucleotide
ugcacuaagugacaaggac

SEQ ID NO: 1454203 - RNA, 19 nt, Artificial Sequence
  Description of Artificial Sequence: Synthetic oligonucleotide
gauagugcuggcuacagaa

SEQ ID NO: 1454204 - RNA, 19 nt, Artificial Sequence
  Description of Artificial Sequence: Synthetic oligonucleotide
agagccugcugauacgccc

SEQ ID NO: 1454205 - RNA, 19 nt, Artificial Sequence
  Description of Artificial Sequence: Synthetic oligonucleotide
ugaucuuggacguucugug

SEQ ID NO: 1454206 - RNA, 19 nt, Artificial Sequence
  Description of Artificial Sequence: Synthetic oligonucleotide
agaucucaaauaaggauac

SEQ ID NO: 1454207 - RNA, 19 nt, Artificial Sequence
  Description of Artificial Sequence: Synthetic oligonucleotide
aucaacugcaaccgacgcc

SEQ ID NO: 1454208 - RNA, 19 nt, Artificial Sequence
  Description of Artificial Sequence: Synthetic oligonucleotide
uuggcaacagcaaucugug

SEQ ID NO: 1454209 - RNA, 19 nt, Artificial Sequence
  Description of Artificial Sequence: Synthetic oligonucleotide
auaucaaauccuuccaccu

SEQ ID NO: 1454210 - RNA, 19 nt, Artificial Sequence
  Description of Artificial Sequence: Synthetic oligonucleotide
uuuaggugacguuuugagc

SEQ ID NO: 1454211 - RNA, 19 nt, Artificial Sequence
  Description of Artificial Sequence: Synthetic oligonucleotide
gcugauucagaauaggcag

SEQ ID NO: 1454212 - RNA, 19 nt, Artificial Sequence
  Description of Artificial Sequence: Synthetic oligonucleotide
uacugacauaagcagagga

SEQ ID NO: 1454213 - RNA, 19 nt, Artificial Sequence
  Description of Artificial Sequence: Synthetic oligonucleotide
aaaccuaacggccgggaga

SEQ ID NO: 1454214 - RNA, 19 nt, Artificial Sequence
  Description of Artificial Sequence: Synthetic oligonucleotide
ugaaccauaucaaauccuu

SEQ ID NO: 1454215 - RNA, 19 nt, Artificial Sequence
  Description of Artificial Sequence: Synthetic oligonucleotide
aguacgugacucgaugugc

SEQ ID NO: 1454216 - RNA, 19 nt, Artificial Sequence
  Description of Artificial Sequence: Synthetic oligonucleotide
cuaagugacaaggacuagg

SEQ ID NO: 1454217 - RNA, 19 nt, Artificial Sequence
  Description of Artificial Sequence: Synthetic oligonucleotide
cuuaaaggaggcagcauug

SEQ ID NO: 1454218 - RNA, 19 nt, Artificial Sequence
  Description of Artificial Sequence: Synthetic oligonucleotide
uguuaaugcugccauugac

SEQ ID NO: 1454219 - RNA, 19 nt, Artificial Sequence
  Description of Artificial Sequence: Synthetic oligonucleotide
uccacuccaaccacgagac

SEQ ID NO: 1454220 - RNA, 19 nt, Artificial Sequence
  Description of Artificial Sequence: Synthetic oligonucleotide
aaacuguguuaaugcugcc

SEQ ID NO: 1454221 - RNA, 19 nt, Artificial Sequence
  Description of Artificial Sequence: Synthetic oligonucleotide
agguguguuguuaacaagg

SEQ ID NO: 1454222 - RNA, 19 nt, Artificial Sequence
  Description of Artificial Sequence: Synthetic oligonucleotide
uagaguacgugacucgaug

SEQ ID NO: 1454223 - RNA, 19 nt, Artificial Sequence
  Description of Artificial Sequence: Synthetic oligonucleotide
gagauacuggucuaccagc

SEQ ID NO: 1454224 - RNA, 19 nt, Artificial Sequence
  Description of Artificial Sequence: Synthetic oligonucleotide
acugacauaagcagaggac

SEQ ID NO: 1454225 - RNA, 19 nt, Artificial Sequence
  Description of Artificial Sequence: Synthetic oligonucleotide
uuccacuccaaccacgaga

SEQ ID NO: 1454226 - RNA, 19 nt, Artificial Sequence
  Description of Artificial Sequence: Synthetic oligonucleotide
gaugucacccgccaucacc

SEQ ID NO: 1454227 - RNA, 19 nt, Artificial Sequence
  Description of Artificial Sequence: Synthetic oligonucleotide
ugacguuuugagcucagac

SEQ ID NO: 1454228 - RNA, 19 nt, Artificial Sequence
  Description of Artificial Sequence: Synthetic oligonucleotide
agcauugcggaacacugag

SEQ ID NO: 1454229 - RNA, 19 nt, Artificial Sequence
  Description of Artificial Sequence: Synthetic oligonucleotide
acugaguagaugucacccg

SEQ ID NO: 1454230 - RNA, 19 nt, Artificial Sequence
  Description of Artificial Sequence: Synthetic oligonucleotide
ucuuuugcgccaguuacag

SEQ ID NO: 1454231 - RNA, 19 nt, Artificial Sequence
  Description of Artificial Sequence: Synthetic oligonucleotide
uuacagcugauagauagca

SEQ ID NO: 1454232 - RNA, 19 nt, Artificial Sequence
  Description of Artificial Sequence: Synthetic oligonucleotide
uggcugauucagaauaggc

SEQ ID NO: 1454233 - RNA, 19 nt, Artificial Sequence
  Description of Artificial Sequence: Synthetic oligonucleotide
cuugcuagacgugaggaag

SEQ ID NO: 1454234 - RNA, 19 nt, Artificial Sequence
  Description of Artificial Sequence: Synthetic oligonucleotide
cugugguaacccuuggacg

SEQ ID NO: 1454235 - RNA, 19 nt, Artificial Sequence
  Description of Artificial Sequence: Synthetic oligonucleotide
aaccuaacggccgggagag

SEQ ID NO: 1454236 - RNA, 19 nt, Artificial Sequence
  Description of Artificial Sequence: Synthetic oligonucleotide
ugguccuuuguacugacau

SEQ ID NO: 1454237 - RNA, 19 nt, Artificial Sequence
  Description of Artificial Sequence: Synthetic oligonucleotide
uggaucaacugcaaccgac

SEQ ID NO: 1454238 - RNA, 19 nt, Artificial Sequence
  Description of Artificial Sequence: Synthetic oligonucleotide
ccaaccacgagacauagag

SEQ ID NO: 1454239 - RNA, 19 nt, Artificial Sequence
  Description of Artificial Sequence: Synthetic oligonucleotide
gacauuuacagcugauaga

SEQ ID NO: 1454240 - RNA, 19 nt, Artificial Sequence
  Description of Artificial Sequence: Synthetic oligonucleotide
gaggauaaaagggaccuac

SEQ ID NO: 1454241 - RNA, 19 nt, Artificial Sequence
  Description of Artificial Sequence: Synthetic oligonucleotide
gcugauagauagcacaaag

SEQ ID NO: 1454242 - RNA, 19 nt, Artificial Sequence
  Description of Artificial Sequence: Synthetic oligonucleotide
acaagcugcaccauccgac

SEQ ID NO: 1454243 - RNA, 19 nt, Artificial Sequence
  Description of Artificial Sequence: Synthetic oligonucleotide
ggcaacagcaaucuguggc

SEQ ID NO: 1454244 - RNA, 19 nt, Artificial Sequence
  Description of Artificial Sequence: Synthetic oligonucleotide
agagcaaguccgcacgauc

SEQ ID NO: 1454245 - RNA, 19 nt, Artificial Sequence
  Description of Artificial Sequence: Synthetic oligonucleotide
gacauaagcagaggacacg

SEQ ID NO: 1454246 - RNA, 19 nt, Artificial Sequence
  Description of Artificial Sequence: Synthetic oligonucleotide
ucagugucaucguagccga

SEQ ID NO: 1454247 - RNA, 19 nt, Artificial Sequence
  Description of Artificial Sequence: Synthetic oligonucleotide
gaucaacugcaaccgacgc

SEQ ID NO: 1454248 - RNA, 19 nt, Artificial Sequence
  Description of Artificial Sequence: Synthetic oligonucleotide
accauaucaaauccuucca

SEQ ID NO: 1454249 - RNA, 19 nt, Artificial Sequence
  Description of Artificial Sequence: Synthetic oligonucleotide
agugcauuuucuacuccgc

SEQ ID NO: 1454250 - RNA, 19 nt, Artificial Sequence
  Description of Artificial Sequence: Synthetic oligonucleotide
uugcggaacacugaguaga

SEQ ID NO: 1454251 - RNA, 19 nt, Artificial Sequence
  Description of Artificial Sequence: Synthetic oligonucleotide
gcuacagaauccuuggccc

SEQ ID NO: 1454252 - RNA, 19 nt, Artificial Sequence
  Description of Artificial Sequence: Synthetic oligonucleotide
agccuuacauaguaacuug

SEQ ID NO: 1454253 - RNA, 19 nt, Artificial Sequence
  Description of Artificial Sequence: Synthetic oligonucleotide
ugaguagaugucacccgcc

SEQ ID NO: 1454254 - RNA, 19 nt, Artificial Sequence
  Description of Artificial Sequence: Synthetic oligonucleotide
agcuagaguacgugacucg

SEQ ID NO: 1454255 - RNA, 19 nt, Artificial Sequence
  Description of Artificial Sequence: Synthetic oligonucleotide
auagcuagaguacgugacu

SEQ ID NO: 1454256 - RNA, 19 nt, Artificial Sequence
  Description of Artificial Sequence: Synthetic oligonucleotide
uugcuagacgugaggaagc

SEQ ID NO: 1454257 - RNA, 19 nt, Artificial Sequence
  Description of Artificial Sequence: Synthetic oligonucleotide
cucgucagugucaucguag

SEQ ID NO: 1454258 - RNA, 19 nt, Artificial Sequence
  Description of Artificial Sequence: Synthetic oligonucleotide
ucaugcacuaagugacaag

SEQ ID NO: 1454259 - RNA, 19 nt, Artificial Sequence
  Description of Artificial Sequence: Synthetic oligonucleotide
uguaagugcaccugaucau

SEQ ID NO: 1454260 - RNA, 19 nt, Artificial Sequence
  Description of Artificial Sequence: Synthetic oligonucleotide
gaaaccuaacggccgggag

SEQ ID NO: 1454261 - RNA, 19 nt, Artificial Sequence
  Description of Artificial Sequence: Synthetic oligonucleotide
ggacucgucagugucaucg

SEQ ID NO: 1454262 - RNA, 19 nt, Artificial Sequence
  Description of Artificial Sequence: Synthetic oligonucleotide
uuggcugauucagaauagg

SEQ ID NO: 1454263 - RNA, 19 nt, Artificial Sequence
  Description of Artificial Sequence: Synthetic oligonucleotide
caccugaucaugcacuaag

SEQ ID NO: 1454264 - RNA, 19 nt, Artificial Sequence
  Description of Artificial Sequence: Synthetic oligonucleotide
gacuugguccucuccacgc

SEQ ID NO: 1454265 - RNA, 19 nt, Artificial Sequence
  Description of Artificial Sequence: Synthetic oligonucleotide
agacacuuccuuaaaggag

SEQ ID NO: 1454266 - RNA, 19 nt, Artificial Sequence
  Description of Artificial Sequence: Synthetic oligonucleotide
uucagaauaggcagucuuu

SEQ ID NO: 1454267 - RNA, 19 nt, Artificial Sequence
  Description of Artificial Sequence: Synthetic oligonucleotide
aacuguguuaaugcugcca

SEQ ID NO: 1454268 - RNA, 19 nt, Artificial Sequence
  Description of Artificial Sequence: Synthetic oligonucleotide
ggagauacuggucuaccag

SEQ ID NO: 1454269 - RNA, 19 nt, Artificial Sequence
  Description of Artificial Sequence: Synthetic oligonucleotide
ugcugauacgcccgggagc

SEQ ID NO: 1454270 - RNA, 19 nt, Artificial Sequence
  Description of Artificial Sequence: Synthetic oligonucleotide
auacugguccuuuguacug

SEQ ID NO: 1454271 - RNA, 19 nt, Artificial Sequence
  Description of Artificial Sequence: Synthetic oligonucleotide
ugacucgaugugcucagca

SEQ ID NO: 1454272 - RNA, 19 nt, Artificial Sequence
  Description of Artificial Sequence: Synthetic oligonucleotide
gaguacgugacucgaugug

SEQ ID NO: 1454273 - RNA, 19 nt, Artificial Sequence
  Description of Artificial Sequence: Synthetic oligonucleotide
ggaccuaccagccaguuga

SEQ ID NO: 1454274 - RNA, 19 nt, Artificial Sequence
  Description of Artificial Sequence: Synthetic oligonucleotide
agaguacgugacucgaugu

SEQ ID NO: 1454275 - RNA, 19 nt, Artificial Sequence
  Description of Artificial Sequence: Synthetic oligonucleotide
gcuggccugaucuuggacg

SEQ ID NO: 1454276 - RNA, 19 nt, Artificial Sequence
  Description of Artificial Sequence: Synthetic oligonucleotide
guaacugcuccuuuggucu

SEQ ID NO: 1454277 - RNA, 19 nt, Artificial Sequence
  Description of Artificial Sequence: Synthetic oligonucleotide
ucgucagugucaucguagc

SEQ ID NO: 1454278 - RNA, 19 nt, Artificial Sequence
  Description of Artificial Sequence: Synthetic oligonucleotide
cuuuaacucugcugagagc

SEQ ID NO: 1454279 - RNA, 19 nt, Artificial Sequence
  Description of Artificial Sequence: Synthetic oligonucleotide
gagugagagggagauacug

SEQ ID NO: 1454280 - RNA, 19 nt, Artificial Sequence
  Description of Artificial Sequence: Synthetic oligonucleotide
ugauucagaauaggcaguc

SEQ ID NO: 1454281 - RNA, 19 nt, Artificial Sequence
  Description of Artificial Sequence: Synthetic oligonucleotide
uccuuuguacugacauaag

SEQ ID NO: 1454282 - RNA, 19 nt, Artificial Sequence
  Description of Artificial Sequence: Synthetic oligonucleotide
acauaagcagaggacacga

SEQ ID NO: 1454283 - RNA, 19 nt, Artificial Sequence
  Description of Artificial Sequence: Synthetic oligonucleotide
uaaggauacugguccuuug

SEQ ID NO: 1454284 - RNA, 19 nt, Artificial Sequence
  Description of Artificial Sequence: Synthetic oligonucleotide
uggcaaauucaaucagaug

SEQ ID NO: 1454285 - RNA, 19 nt, Artificial Sequence
  Description of Artificial Sequence: Synthetic oligonucleotide
ucgucacugcaucuuuugc

SEQ ID NO: 1454286 - RNA, 19 nt, Artificial Sequence
  Description of Artificial Sequence: Synthetic oligonucleotide
agggagauacuggucuacc

SEQ ID NO: 1454287 - RNA, 19 nt, Artificial Sequence
  Description of Artificial Sequence: Synthetic oligonucleotide
ucuacuccgcugcucacaa

SEQ ID NO: 1454288 - RNA, 19 nt, Artificial Sequence
  Description of Artificial Sequence: Synthetic oligonucleotide
cuuuccucgaucuugucua

SEQ ID NO: 1454289 - RNA, 19 nt, Artificial Sequence
  Description of Artificial Sequence: Synthetic oligonucleotide
aagaaaccuaacggccggg

SEQ ID NO: 1454290 - RNA, 19 nt, Artificial Sequence
  Description of Artificial Sequence: Synthetic oligonucleotide
gagagggagauacuggucu

SEQ ID NO: 1454291 - RNA, 19 nt, Artificial Sequence
  Description of Artificial Sequence: Synthetic oligonucleotide
gugucaucguagccgaugc

SEQ ID NO: 1454292 - RNA, 19 nt, Artificial Sequence
  Description of Artificial Sequence: Synthetic oligonucleotide
agcuugguggacagggacc

SEQ ID NO: 1454293 - RNA, 19 nt, Artificial Sequence
  Description of Artificial Sequence: Synthetic oligonucleotide
uagauagcacaaaggccac

SEQ ID NO: 1454294 - RNA, 19 nt, Artificial Sequence
  Description of Artificial Sequence: Synthetic oligonucleotide
cugacauaagcagaggaca

SEQ ID NO: 1454295 - RNA, 19 nt, Artificial Sequence
  Description of Artificial Sequence: Synthetic oligonucleotide
caucuuuaacucugcugag

SEQ ID NO: 1454296 - RNA, 19 nt, Artificial Sequence
  Description of Artificial Sequence: Synthetic oligonucleotide
gucuucacgccuuucucug

SEQ ID NO: 1454297 - RNA, 19 nt, Artificial Sequence
  Description of Artificial Sequence: Synthetic oligonucleotide
cgagacauagagcuuaucc

SEQ ID NO: 1454298 - RNA, 19 nt, Artificial Sequence
  Description of Artificial Sequence: Synthetic oligonucleotide
uuccuuaaaggaggcagca

SEQ ID NO: 1454299 - RNA, 19 nt, Artificial Sequence
  Description of Artificial Sequence: Synthetic oligonucleotide
gaaugaaucuuuauucagu

SEQ ID NO: 1454300 - RNA, 19 nt, Artificial Sequence
  Description of Artificial Sequence: Synthetic oligonucleotide
uuggcaagugcauuuucua

SEQ ID NO: 1454301 - RNA, 19 nt, Artificial Sequence
  Description of Artificial Sequence: Synthetic oligonucleotide
agguauuggcaacagcaau

SEQ ID NO: 1454302 - RNA, 19 nt, Artificial Sequence
  Description of Artificial Sequence: Synthetic oligonucleotide
gaacaaagagcaaguccgc

SEQ ID NO: 1454303 - RNA, 19 nt, Artificial Sequence
  Description of Artificial Sequence: Synthetic oligonucleotide
gacaaggacuagguuuagg

SEQ ID NO: 1454304 - RNA, 19 nt, Artificial Sequence
  Description of Artificial Sequence: Synthetic oligonucleotide
ugaugggcaucgcacuugu

SEQ ID NO: 1454305 - RNA, 19 nt, Artificial Sequence
  Description of Artificial Sequence: Synthetic oligonucleotide
ccuuuguacugacauaagc

SEQ ID NO: 1454306 - RNA, 19 nt, Artificial Sequence
  Description of Artificial Sequence: Synthetic oligonucleotide
gacgugaggaagccaucag

SEQ ID NO: 1454307 - RNA, 19 nt, Artificial Sequence
  Description of Artificial Sequence: Synthetic oligonucleotide
gacucgaugugcucagcac

SEQ ID NO: 1454308 - RNA, 19 nt, Artificial Sequence
  Description of Artificial Sequence: Synthetic oligonucleotide
ugauagugcuggcuacaga

SEQ ID NO: 1454309 - RNA, 19 nt, Artificial Sequence
  Description of Artificial Sequence: Synthetic oligonucleotide
ugugauagugcuggcuaca

SEQ ID NO: 1454310 - RNA, 19 nt, Artificial Sequence
  Description of Artificial Sequence: Synthetic oligonucleotide
caguuguuggcugauucag

SEQ ID NO: 1454311 - RNA, 19 nt, Artificial Sequence
  Description of Artificial Sequence: Synthetic oligonucleotide
cauugcggaacacugagua

SEQ ID NO: 1454312 - RNA, 19 nt, Artificial Sequence
  Description of Artificial Sequence: Synthetic oligonucleotide
uuauccugagcacccugaa

SEQ ID NO: 1454313 - RNA, 19 nt, Artificial Sequence
  Description of Artificial Sequence: Synthetic oligonucleotide
ugacuuggcaagugcauuu

SEQ ID NO: 1454314 - RNA, 19 nt, Artificial Sequence
  Description of Artificial Sequence: Synthetic oligonucleotide
uggacguucugugguaacc

SEQ ID NO: 1454315 - RNA, 19 nt, Artificial Sequence
  Description of Artificial Sequence: Synthetic oligonucleotide
ccuuacauaguaacuuggc

SEQ ID NO: 1454316 - RNA, 19 nt, Artificial Sequence
  Description of Artificial Sequence: Synthetic oligonucleotide
agugucaucguagccgaug

SEQ ID NO: 1454317 - RNA, 19 nt, Artificial Sequence
  Description of Artificial Sequence: Synthetic oligonucleotide
cugagcacccugaauuuuc

SEQ ID NO: 1454318 - RNA, 19 nt, Artificial Sequence
  Description of Artificial Sequence: Synthetic oligonucleotide
cucaaauaaggauacuggu

SEQ ID NO: 1454319 - RNA, 19 nt, Artificial Sequence
  Description of Artificial Sequence: Synthetic oligonucleotide
uguuguuaacaagguaauc

SEQ ID NO: 1454320 - RNA, 19 nt, Artificial Sequence
  Description of Artificial Sequence: Synthetic oligonucleotide
cauguaagugcaccugauc

SEQ ID NO: 1454321 - RNA, 19 nt, Artificial Sequence
  Description of Artificial Sequence: Synthetic oligonucleotide
ggcaaauuggccacccugg

SEQ ID NO: 1454322 - RNA, 19 nt, Artificial Sequence
  Description of Artificial Sequence: Synthetic oligonucleotide
acaagguaauccaucacau

SEQ ID NO: 1454323 - RNA, 19 nt, Artificial Sequence
  Description of Artificial Sequence: Synthetic oligonucleotide
caaccacgagacauagagc

SEQ ID NO: 1454324 - RNA, 19 nt, Artificial Sequence
  Description of Artificial Sequence: Synthetic oligonucleotide
gagcuuauccugagcaccc

SEQ ID NO: 1454325 - RNA, 19 nt, Artificial Sequence
  Description of Artificial Sequence: Synthetic oligonucleotide
acgugaggaagccaucaga

SEQ ID NO: 1454326 - RNA, 19 nt, Artificial Sequence
  Description of Artificial Sequence: Synthetic oligonucleotide
gcugauacgcccgggagcg

SEQ ID NO: 1454327 - RNA, 19 nt, Artificial Sequence
  Description of Artificial Sequence: Synthetic oligonucleotide
cacgaggucauagguagag

SEQ ID NO: 1454328 - RNA, 19 nt, Artificial Sequence
  Description of Artificial Sequence: Synthetic oligonucleotide
uuugcgccaguuacagcac

SEQ ID NO: 1454329 - RNA, 19 nt, Artificial Sequence
  Description of Artificial Sequence: Synthetic oligonucleotide
cucgguuguggaucaacug

SEQ ID NO: 1454330 - RNA, 19 nt, Artificial Sequence
  Description of Artificial Sequence: Synthetic oligonucleotide
acccuuggacguuggacag

SEQ ID NO: 1454331 - RNA, 19 nt, Artificial Sequence
  Description of Artificial Sequence: Synthetic oligonucleotide
gaguagaugucacccgcca

SEQ ID NO: 1454332 - RNA, 19 nt, Artificial Sequence
  Description of Artificial Sequence: Synthetic oligonucleotide
ggaucaacugcaaccgacg

SEQ ID NO: 1454333 - RNA, 19 nt, Artificial Sequence
  Description of Artificial Sequence: Synthetic oligonucleotide
ucuuauccaccaccccugu

SEQ ID NO: 1454334 - RNA, 19 nt, Artificial Sequence
  Description of Artificial Sequence: Synthetic oligonucleotide
gacguuggacaggagaguc

SEQ ID NO: 1454335 - RNA, 19 nt, Artificial Sequence
  Description of Artificial Sequence: Synthetic oligonucleotide
gcacuugucacagccacgg

SEQ ID NO: 1454336 - RNA, 19 nt, Artificial Sequence
  Description of Artificial Sequence: Synthetic oligonucleotide
uagcuagaguacgugacuc

SEQ ID NO: 1454337 - RNA, 19 nt, Artificial Sequence
  Description of Artificial Sequence: Synthetic oligonucleotide
ucuccacgcugccaguaac

SEQ ID NO: 1454338 - RNA, 19 nt, Artificial Sequence
  Description of Artificial Sequence: Synthetic oligonucleotide
ugcuagacgugaggaagcc

SEQ ID NO: 1454339 - RNA, 19 nt, Artificial Sequence
  Description of Artificial Sequence: Synthetic oligonucleotide
uagagcucaccaagggcaa

SEQ ID NO: 1454340 - RNA, 19 nt, Artificial Sequence
  Description of Artificial Sequence: Synthetic oligonucleotide
gaaccauaucaaauccuuc

SEQ ID NO: 1454341 - RNA, 19 nt, Artificial Sequence
  Description of Artificial Sequence: Synthetic oligonucleotide
ucuagccccuugcaggcau

SEQ ID NO: 1454342 - RNA, 19 nt, Artificial Sequence
  Description of Artificial Sequence: Synthetic oligonucleotide
gucuuauccaccaccccug

SEQ ID NO: 1454343 - RNA, 19 nt, Artificial Sequence
  Description of Artificial Sequence: Synthetic oligonucleotide
ucguagccgaugcuucucu

SEQ ID NO: 1454344 - RNA, 19 nt, Artificial Sequence
  Description of Artificial Sequence: Synthetic oligonucleotide
gguugcgggcgauagcuag

SEQ ID NO: 1454345 - RNA, 19 nt, Artificial Sequence
  Description of Artificial Sequence: Synthetic oligonucleotide
acugcaaccgacgccauuu

SEQ ID NO: 1454346 - RNA, 19 nt, Artificial Sequence
  Description of Artificial Sequence: Synthetic oligonucleotide
gaacaguggaauggagcug

SEQ ID NO: 1454347 - RNA, 19 nt, Artificial Sequence
  Description of Artificial Sequence: Synthetic oligonucleotide
guacugacauaagcagagg

SEQ ID NO: 1454348 - RNA, 19 nt, Artificial Sequence
  Description of Artificial Sequence: Synthetic oligonucleotide
uugcgccaguuacagcacc

SEQ ID NO: 1454349 - RNA, 19 nt, Artificial Sequence
  Description of Artificial Sequence: Synthetic oligonucleotide
cuaacggccgggagagcag

SEQ ID NO: 1454350 - RNA, 19 nt, Artificial Sequence
  Description of Artificial Sequence: Synthetic oligonucleotide
uugcgggcgauagcuagag

SEQ ID NO: 1454351 - RNA, 19 nt, Artificial Sequence
  Description of Artificial Sequence: Synthetic oligonucleotide
ucuuggacguucuguggua

SEQ ID NO: 1454352 - RNA, 19 nt, Artificial Sequence
  Description of Artificial Sequence: Synthetic oligonucleotide
cauaguaacuuggcuucug

SEQ ID NO: 1454353 - RNA, 19 nt, Artificial Sequence
  Description of Artificial Sequence: Synthetic oligonucleotide
uaggugacguuuugagcuc

SEQ ID NO: 1454354 - RNA, 19 nt, Artificial Sequence
  Description of Artificial Sequence: Synthetic oligonucleotide
cugcugauacgcccgggag

SEQ ID NO: 1454355 - RNA, 19 nt, Artificial Sequence
  Description of Artificial Sequence: Synthetic oligonucleotide
gugauagugcuggcuacag

SEQ ID NO: 1454356 - RNA, 19 nt, Artificial Sequence
  Description of Artificial Sequence: Synthetic oligonucleotide
gucagguugcgggcgauag

SEQ ID NO: 1454357 - RNA, 19 nt, Artificial Sequence
  Description of Artificial Sequence: Synthetic oligonucleotide
agaugucacccgccaucac

SEQ ID NO: 1454358 - RNA, 19 nt, Artificial Sequence
  Description of Artificial Sequence: Synthetic oligonucleotide
agcggagcuugguggacag

SEQ ID NO: 1454359 - RNA, 19 nt, Artificial Sequence
  Description of Artificial Sequence: Synthetic oligonucleotide
acuagguuuaggugacguu

SEQ ID NO: 1454360 - RNA, 19 nt, Artificial Sequence
  Description of Artificial Sequence: Synthetic oligonucleotide
cuuuugcgccaguuacagc

SEQ ID NO: 1454361 - RNA, 19 nt, Artificial Sequence
  Description of Artificial Sequence: Synthetic oligonucleotide
cgucacugcaucuuuugcg

SEQ ID NO: 1454362 - RNA, 19 nt, Artificial Sequence
  Description of Artificial Sequence: Synthetic oligonucleotide
agacgugaggaagccauca

SEQ ID NO: 1454363 - RNA, 19 nt, Artificial Sequence
  Description of Artificial Sequence: Synthetic oligonucleotide
cuugguccucuccacgcug

SEQ ID NO: 1454364 - RNA, 19 nt, Artificial Sequence
  Description of Artificial Sequence: Synthetic oligonucleotide
gccuuacauaguaacuugg

SEQ ID NO: 1454365 - RNA, 19 nt, Artificial Sequence
  Description of Artificial Sequence: Synthetic oligonucleotide
cuagacgugaggaagccau

SEQ ID NO: 1454366 - RNA, 19 nt, Artificial Sequence
  Description of Artificial Sequence: Synthetic oligonucleotide
gugacaaggacuagguuua

SEQ ID NO: 1454367 - RNA, 19 nt, Artificial Sequence
  Description of Artificial Sequence: Synthetic oligonucleotide
ugucaucguagccgaugcu

SEQ ID NO: 1454368 - RNA, 19 nt, Artificial Sequence
  Description of Artificial Sequence: Synthetic oligonucleotide
ugauacgcccgggagcgga

SEQ ID NO: 1454369 - RNA, 19 nt, Artificial Sequence
  Description of Artificial Sequence: Synthetic oligonucleotide
aucguagccgaugcuucuc

SEQ ID NO: 1454370 - RNA, 19 nt, Artificial Sequence
  Description of Artificial Sequence: Synthetic oligonucleotide
ggcugauucagaauaggca

SEQ ID NO: 1454371 - RNA, 19 nt, Artificial Sequence
  Description of Artificial Sequence: Synthetic oligonucleotide
uagucgucacugcaucuuu

SEQ ID NO: 1454372 - RNA, 19 nt, Artificial Sequence
  Description of Artificial Sequence: Synthetic oligonucleotide
accccagccuuacauagua

SEQ ID NO: 1454373 - RNA, 19 nt, Artificial Sequence
  Description of Artificial Sequence: Synthetic oligonucleotide
gcagcauugcggaacacug

SEQ ID NO: 1454374 - RNA, 19 nt, Artificial Sequence
  Description of Artificial Sequence: Synthetic oligonucleotide
uuggacguucugugguaac

SEQ ID NO: 1454375 - RNA, 19 nt, Artificial Sequence
  Description of Artificial Sequence: Synthetic oligonucleotide
cuccccaaaacuguguuaa

SEQ ID NO: 1454376 - RNA, 19 nt, Artificial Sequence
  Description of Artificial Sequence: Synthetic oligonucleotide
augaugggcaucgcacuug

SEQ ID NO: 1454377 - RNA, 19 nt, Artificial Sequence
  Description of Artificial Sequence: Synthetic oligonucleotide
gagaaauggucuccuggcu

SEQ ID NO: 1454378 - RNA, 19 nt, Artificial Sequence
  Description of Artificial Sequence: Synthetic oligonucleotide
acggaggucauggucuuca

SEQ ID NO: 1454379 - RNA, 19 nt, Artificial Sequence
  Description of Artificial Sequence: Synthetic oligonucleotide
uuucuacuccgcugcucac

SEQ ID NO: 1454380 - RNA, 19 nt, Artificial Sequence
  Description of Artificial Sequence: Synthetic oligonucleotide
uccaaccacgagacauaga

SEQ ID NO: 1454381 - RNA, 19 nt, Artificial Sequence
  Description of Artificial Sequence: Synthetic oligonucleotide
uagacgugaggaagccauc

SEQ ID NO: 1454382 - RNA, 19 nt, Artificial Sequence
  Description of Artificial Sequence: Synthetic oligonucleotide
agaaaccuaacggccggga

SEQ ID NO: 1454383 - RNA, 19 nt, Artificial Sequence
  Description of Artificial Sequence: Synthetic oligonucleotide
gagcacccugaauuuucug

SEQ ID NO: 1454384 - RNA, 19 nt, Artificial Sequence
  Description of Artificial Sequence: Synthetic oligonucleotide
cagcugauagauagcacaa

SEQ ID NO: 1454385 - RNA, 19 nt, Artificial Sequence
  Description of Artificial Sequence: Synthetic oligonucleotide
ugacaaggacuagguuuag

SEQ ID NO: 1454386 - RNA, 19 nt, Artificial Sequence
  Description of Artificial Sequence: Synthetic oligonucleotide
aagagcaaguccgcacgau

SEQ ID NO: 1454387 - RNA, 19 nt, Artificial Sequence
  Description of Artificial Sequence: Synthetic oligonucleotide
acucgguuguggaucaacu

SEQ ID NO: 1454388 - RNA, 19 nt, Artificial Sequence
  Description of Artificial Sequence: Synthetic oligonucleotide
caucucacacacagaucuc

SEQ ID NO: 1454389 - RNA, 19 nt, Artificial Sequence
  Description of Artificial Sequence: Synthetic oligonucleotide
gagggagauacuggucuac

SEQ ID NO: 1454390 - RNA, 19 nt, Artificial Sequence
  Description of Artificial Sequence: Synthetic oligonucleotide
ccaucucacacacagaucu

SEQ ID NO: 1454391 - RNA, 19 nt, Artificial Sequence
  Description of Artificial Sequence: Synthetic oligonucleotide
agagggagauacuggucua

SEQ ID NO: 1454392 - RNA, 19 nt, Artificial Sequence
  Description of Artificial Sequence: Synthetic oligonucleotide
accacacucgguuguggau

SEQ ID NO: 1454393 - RNA, 19 nt, Artificial Sequence
  Description of Artificial Sequence: Synthetic oligonucleotide
aucuuuugcgccaguuaca

SEQ ID NO: 1454394 - RNA, 19 nt, Artificial Sequence
  Description of Artificial Sequence: Synthetic oligonucleotide
acauaguaacuuggcuucu

SEQ ID NO: 1454395 - RNA, 19 nt, Artificial Sequence
  Description of Artificial Sequence: Synthetic oligonucleotide
ucacgccuuucucugccau

SEQ ID NO: 1454396 - RNA, 19 nt, Artificial Sequence
  Description of Artificial Sequence: Synthetic oligonucleotide
uacgugacucgaugugcuc

SEQ ID NO: 1454397 - RNA, 19 nt, Artificial Sequence
  Description of Artificial Sequence: Synthetic oligonucleotide
uggcuggcucagucgacug

SEQ ID NO: 1454398 - RNA, 19 nt, Artificial Sequence
  Description of Artificial Sequence: Synthetic oligonucleotide
aacugcaaccgacgccauu

SEQ ID NO: 1454399 - RNA, 19 nt, Artificial Sequence
  Description of Artificial Sequence: Synthetic oligonucleotide
ggucuuauccaccaccccu

SEQ ID NO: 1454400 - RNA, 19 nt, Artificial Sequence
  Description of Artificial Sequence: Synthetic oligonucleotide
guaauccaucacaucaucu

SEQ ID NO: 1454401 - RNA, 19 nt, Artificial Sequence
  Description of Artificial Sequence: Synthetic oligonucleotide
accugaucaugcacuaagu

SEQ ID NO: 1454402 - RNA, 19 nt, Artificial Sequence
  Description of Artificial Sequence: Synthetic oligonucleotide
ugcaucuuuugcgccaguu

SEQ ID NO: 1454403 - RNA, 19 nt, Artificial Sequence
  Description of Artificial Sequence: Synthetic oligonucleotide
ugggacucgucagugucau

SEQ ID NO: 1454404 - RNA, 19 nt, Artificial Sequence
  Description of Artificial Sequence: Synthetic oligonucleotide
uccuuaaaggaggcagcau

SEQ ID NO: 1454405 - RNA, 19 nt, Artificial Sequence
  Description of Artificial Sequence: Synthetic oligonucleotide
cacacucgguuguggauca

SEQ ID NO: 1454406 - RNA, 19 nt, Artificial Sequence
  Description of Artificial Sequence: Synthetic oligonucleotide
gacuagguuuaggugacgu

SEQ ID NO: 1454407 - RNA, 19 nt, Artificial Sequence
  Description of Artificial Sequence: Synthetic oligonucleotide
ugucacccgccaucacccc

SEQ ID NO: 1454408 - RNA, 19 nt, Artificial Sequence
  Description of Artificial Sequence: Synthetic oligonucleotide
cugauucagaauaggcagu

SEQ ID NO: 1454409 - RNA, 19 nt, Artificial Sequence
  Description of Artificial Sequence: Synthetic oligonucleotide
guguguuguuaacaaggua

SEQ ID NO: 1454410 - RNA, 19 nt, Artificial Sequence
  Description of Artificial Sequence: Synthetic oligonucleotide
acauguaagugcaccugau

SEQ ID NO: 1454411 - RNA, 19 nt, Artificial Sequence
  Description of Artificial Sequence: Synthetic oligonucleotide
auacgcccgggagcggagc

SEQ ID NO: 1454412 - RNA, 19 nt, Artificial Sequence
  Description of Artificial Sequence: Synthetic oligonucleotide
gauacgcccgggagcggag

SEQ ID NO: 1454413 - RNA, 19 nt, Artificial Sequence
  Description of Artificial Sequence: Synthetic oligonucleotide
uaacggccgggagagcaga

SEQ ID NO: 1454414 - RNA, 19 nt, Artificial Sequence
  Description of Artificial Sequence: Synthetic oligonucleotide
acgagacauagagcuuauc

SEQ ID NO: 1454415 - RNA, 19 nt, Artificial Sequence
  Description of Artificial Sequence: Synthetic oligonucleotide
gacguucugugguaacccu

SEQ ID NO: 1454416 - RNA, 19 nt, Artificial Sequence
  Description of Artificial Sequence: Synthetic oligonucleotide
agcugauagauagcacaaa

SEQ ID NO: 1454417 - RNA, 19 nt, Artificial Sequence
  Description of Artificial Sequence: Synthetic oligonucleotide
ccgggagagcagaacaaag

SEQ ID NO: 1454418 - RNA, 19 nt, Artificial Sequence
  Description of Artificial Sequence: Synthetic oligonucleotide
gggagauacuggucuacca

SEQ ID NO: 1454419 - RNA, 19 nt, Artificial Sequence
  Description of Artificial Sequence: Synthetic oligonucleotide
cacaagcugcaccauccga

SEQ ID NO: 1454420 - RNA, 19 nt, Artificial Sequence
  Description of Artificial Sequence: Synthetic oligonucleotide
gcgggcgauagcuagagua

SEQ ID NO: 1454421 - RNA, 19 nt, Artificial Sequence
  Description of Artificial Sequence: Synthetic oligonucleotide
agauagcacaaaggccaca

SEQ ID NO: 1454422 - RNA, 19 nt, Artificial Sequence
  Description of Artificial Sequence: Synthetic oligonucleotide
cacucgguuguggaucaac

SEQ ID NO: 1454423 - RNA, 19 nt, Artificial Sequence
  Description of Artificial Sequence: Synthetic oligonucleotide
agggcaaauuggccacccu

SEQ ID NO: 1454424 - RNA, 19 nt, Artificial Sequence
  Description of Artificial Sequence: Synthetic oligonucleotide
acggccgggagagcagaac

SEQ ID NO: 1454425 - RNA, 19 nt, Artificial Sequence
  Description of Artificial Sequence: Synthetic oligonucleotide
uccccaaaacuguguuaau

SEQ ID NO: 1454426 - RNA, 19 nt, Artificial Sequence
  Description of Artificial Sequence: Synthetic oligonucleotide
ggaccuucuggcuggcuca

SEQ ID NO: 1454427 - RNA, 19 nt, Artificial Sequence
  Description of Artificial Sequence: Synthetic oligonucleotide
guggaucaacugcaaccga

SEQ ID NO: 1454428 - RNA, 19 nt, Artificial Sequence
  Description of Artificial Sequence: Synthetic oligonucleotide
gaccuaccagccaguugag

SEQ ID NO: 1454429 - RNA, 19 nt, Artificial Sequence
  Description of Artificial Sequence: Synthetic oligonucleotide
cagcauugcggaacacuga

SEQ ID NO: 1454430 - RNA, 19 nt, Artificial Sequence
  Description of Artificial Sequence: Synthetic oligonucleotide
cuuggacguuggacaggag

SEQ ID NO: 1454431 - RNA, 19 nt, Artificial Sequence
  Description of Artificial Sequence: Synthetic oligonucleotide
aagggaccuaccagccagu

SEQ ID NO: 1454432 - RNA, 19 nt, Artificial Sequence
  Description of Artificial Sequence: Synthetic oligonucleotide
guaacccuuggacguugga

SEQ ID NO: 1454433 - RNA, 19 nt, Artificial Sequence
  Description of Artificial Sequence: Synthetic oligonucleotide
cauuuacagcugauagaua

SEQ ID NO: 1454434 - RNA, 19 nt, Artificial Sequence
  Description of Artificial Sequence: Synthetic oligonucleotide
cacaugaaugaaucuuuau

SEQ ID NO: 1454435 - RNA, 19 nt, Artificial Sequence
  Description of Artificial Sequence: Synthetic oligonucleotide
gcuagaguacgugacucga

SEQ ID NO: 1454436 - RNA, 19 nt, Artificial Sequence
  Description of Artificial Sequence: Synthetic oligonucleotide
ggcagucuuuccucgaucu

SEQ ID NO: 1454437 - RNA, 19 nt, Artificial Sequence
  Description of Artificial Sequence: Synthetic oligonucleotide
aggugacguuuugagcuca

SEQ ID NO: 1454438 - RNA, 19 nt, Artificial Sequence
  Description of Artificial Sequence: Synthetic oligonucleotide
gcgauagcuagaguacgug

SEQ ID NO: 1454439 - RNA, 19 nt, Artificial Sequence
  Description of Artificial Sequence: Synthetic oligonucleotide
caucuaaggauuccuucau

SEQ ID NO: 1454440 - RNA, 19 nt, Artificial Sequence
  Description of Artificial Sequence: Synthetic oligonucleotide
ugucacagccacggagguc

SEQ ID NO: 1454441 - RNA, 19 nt, Artificial Sequence
  Description of Artificial Sequence: Synthetic oligonucleotide
ucgaugugcucagcacagu

SEQ ID NO: 1454442 - RNA, 19 nt, Artificial Sequence
  Description of Artificial Sequence: Synthetic oligonucleotide
cucagucgacugaggauaa

SEQ ID NO: 1454443 - RNA, 19 nt, Artificial Sequence
  Description of Artificial Sequence: Synthetic oligonucleotide
cguuuugagcucagacugc

SEQ ID NO: 1454444 - RNA, 19 nt, Artificial Sequence
  Description of Artificial Sequence: Synthetic oligonucleotide
caagcugcaccauccgacu

SEQ ID NO: 1454445 - RNA, 19 nt, Artificial Sequence
  Description of Artificial Sequence: Synthetic oligonucleotide
cuacuccgcugcucacaag

SEQ ID NO: 1454446 - RNA, 19 nt, Artificial Sequence
  Description of Artificial Sequence: Synthetic oligonucleotide
cagguugcgggcgauagcu

SEQ ID NO: 1454447 - RNA, 19 nt, Artificial Sequence
  Description of Artificial Sequence: Synthetic oligonucleotide
aucucaguuguuggcugau

SEQ ID NO: 1454448 - RNA, 19 nt, Artificial Sequence
  Description of Artificial Sequence: Synthetic oligonucleotide
gcagaacaaagagcaaguc

SEQ ID NO: 1454449 - RNA, 19 nt, Artificial Sequence
  Description of Artificial Sequence: Synthetic oligonucleotide
gcacuaagugacaaggacu

SEQ ID NO: 1454450 - RNA, 19 nt, Artificial Sequence
  Description of Artificial Sequence: Synthetic oligonucleotide
agcuuauccugagcacccu

SEQ ID NO: 1454451 - RNA, 19 nt, Artificial Sequence
  Description of Artificial Sequence: Synthetic oligonucleotide
ugcgggcgauagcuagagu

SEQ ID NO: 1454452 - RNA, 19 nt, Artificial Sequence
  Description of Artificial Sequence: Synthetic oligonucleotide
gacucgucagugucaucgu

SEQ ID NO: 1454453 - RNA, 19 nt, Artificial Sequence
  Description of Artificial Sequence: Synthetic oligonucleotide
gggaccuaccagccaguug

SEQ ID NO: 1454454 - RNA, 19 nt, Artificial Sequence
  Description of Artificial Sequence: Synthetic oligonucleotide
ucagucgacugaggauaaa

SEQ ID NO: 1454455 - RNA, 19 nt, Artificial Sequence
  Description of Artificial Sequence: Synthetic oligonucleotide
acaguggaauggagcugag

SEQ ID NO: 1454456 - RNA, 19 nt, Artificial Sequence
  Description of Artificial Sequence: Synthetic oligonucleotide
gagcggagcuugguggaca

SEQ ID NO: 1454457 - RNA, 19 nt, Artificial Sequence
  Description of Artificial Sequence: Synthetic oligonucleotide
guacgugacucgaugugcu

SEQ ID NO: 1454458 - RNA, 19 nt, Artificial Sequence
  Description of Artificial Sequence: Synthetic oligonucleotide
caucaucuaaggauuccuu

SEQ ID NO: 1454459 - RNA, 19 nt, Artificial Sequence
  Description of Artificial Sequence: Synthetic oligonucleotide
cuuggacguucugugguaa

SEQ ID NO: 1454460 - RNA, 19 nt, Artificial Sequence
  Description of Artificial Sequence: Synthetic oligonucleotide
cgggcgauagcuagaguac

SEQ ID NO: 1454461 - RNA, 19 nt, Artificial Sequence
  Description of Artificial Sequence: Synthetic oligonucleotide
guugcgggcgauagcuaga

SEQ ID NO: 1454462 - RNA, 19 nt, Artificial Sequence
  Description of Artificial Sequence: Synthetic oligonucleotide
ccgacuccccaaaacugug

SEQ ID NO: 1454463 - RNA, 19 nt, Artificial Sequence
  Description of Artificial Sequence: Synthetic oligonucleotide
gugcaccugaucaugcacu

SEQ ID NO: 1454464 - RNA, 19 nt, Artificial Sequence
  Description of Artificial Sequence: Synthetic oligonucleotide
cagccuuacauaguaacuu

SEQ ID NO: 1454465 - RNA, 19 nt, Artificial Sequence
  Description of Artificial Sequence: Synthetic oligonucleotide
accuaacggccgggagagc

SEQ ID NO: 1454466 - RNA, 19 nt, Artificial Sequence
  Description of Artificial Sequence: Synthetic oligonucleotide
ccacacucgguuguggauc

SEQ ID NO: 1454467 - RNA, 19 nt, Artificial Sequence
  Description of Artificial Sequence: Synthetic oligonucleotide
ggugacguuuugagcucag

SEQ ID NO: 1454468 - RNA, 19 nt, Artificial Sequence
  Description of Artificial Sequence: Synthetic oligonucleotide
cugccccuugcuagacgug

SEQ ID NO: 1454469 - RNA, 19 nt, Artificial Sequence
  Description of Artificial Sequence: Synthetic oligonucleotide
ccccuugcuagacgugagg

SEQ ID NO: 1454470 - RNA, 19 nt, Artificial Sequence
  Description of Artificial Sequence: Synthetic oligonucleotide
ggagagucuggcauguagu

SEQ ID NO: 1454471 - RNA, 19 nt, Artificial Sequence
  Description of Artificial Sequence: Synthetic oligonucleotide
acguucugugguaacccuu

SEQ ID NO: 1454472 - RNA, 19 nt, Artificial Sequence
  Description of Artificial Sequence: Synthetic oligonucleotide
ggcauguagucuggagcug

SEQ ID NO: 1454473 - RNA, 19 nt, Artificial Sequence
  Description of Artificial Sequence: Synthetic oligonucleotide
cgauagcuagaguacguga

SEQ ID NO: 1454474 - RNA, 19 nt, Artificial Sequence
  Description of Artificial Sequence: Synthetic oligonucleotide
ggccugaucuuggacguuc

SEQ ID NO: 1454475 - RNA, 19 nt, Artificial Sequence
  Description of Artificial Sequence: Synthetic oligonucleotide
ccuaacggccgggagagca

SEQ ID NO: 1454476 - RNA, 19 nt, Artificial Sequence
  Description of Artificial Sequence: Synthetic oligonucleotide
agagcucaccaagggcaaa

SEQ ID NO: 1454477 - RNA, 19 nt, Artificial Sequence
  Description of Artificial Sequence: Synthetic oligonucleotide
agcucaccaagggcaaauu

SEQ ID NO: 1454478 - RNA, 19 nt, Artificial Sequence
  Description of Artificial Sequence: Synthetic oligonucleotide
acacgaggucauagguaga

SEQ ID NO: 1454479 - RNA, 19 nt, Artificial Sequence
  Description of Artificial Sequence: Synthetic oligonucleotide
gcugccccuugcuagacgu

SEQ ID NO: 1454480 - RNA, 19 nt, Artificial Sequence
  Description of Artificial Sequence: Synthetic oligonucleotide
accacgagacauagagcuu

SEQ ID NO: 1454481 - RNA, 19 nt, Artificial Sequence
  Description of Artificial Sequence: Synthetic oligonucleotide
cugauacgcccgggagcgg

SEQ ID NO: 1454482 - RNA, 19 nt, Artificial Sequence
  Description of Artificial Sequence: Synthetic oligonucleotide
gagcucaccaagggcaaau

SEQ ID NO: 1454483 - RNA, 19 nt, Artificial Sequence
  Description of Artificial Sequence: Synthetic oligonucleotide
ccuuggacguuggacagga

SEQ ID NO: 1454484 - RNA, 19 nt, Artificial Sequence
  Description of Artificial Sequence: Synthetic oligonucleotide
caccauccgacuccccaaa

SEQ ID NO: 1454485 - RNA, 19 nt, Artificial Sequence
  Description of Artificial Sequence: Synthetic oligonucleotide
gaugggcaucgcacuuguc

SEQ ID NO: 1454486 - RNA, 19 nt, Artificial Sequence
  Description of Artificial Sequence: Synthetic oligonucleotide
gccacggaggucauggucu

SEQ ID NO: 1454487 - RNA, 19 nt, Artificial Sequence
  Description of Artificial Sequence: Synthetic oligonucleotide
ccagccuuacauaguaacu

SEQ ID NO: 1454488 - RNA, 19 nt, Artificial Sequence
  Description of Artificial Sequence: Synthetic oligonucleotide
aacggccgggagagcagaa

SEQ ID NO: 1454489 - RNA, 19 nt, Artificial Sequence
  Description of Artificial Sequence: Synthetic oligonucleotide
gguuguggaucaacugcaa

SEQ ID NO: 1454490 - RNA, 19 nt, Artificial Sequence
  Description of Artificial Sequence: Synthetic oligonucleotide
ccuugcuagacgugaggaa

SEQ ID NO: 1454491 - RNA, 19 nt, Artificial Sequence
  Description of Artificial Sequence: Synthetic oligonucleotide
ggcagcauugcggaacacu

SEQ ID NO: 1454492 - RNA, 19 nt, Artificial Sequence
  Description of Artificial Sequence: Synthetic oligonucleotide
agggaccuaccagccaguu

SEQ ID NO: 1454493 - RNA, 19 nt, Artificial Sequence
  Description of Artificial Sequence: Synthetic oligonucleotide
ggcuggcucagucgacuga

SEQ ID NO: 1454494 - RNA, 19 nt, Artificial Sequence
  Description of Artificial Sequence: Synthetic oligonucleotide
gccacaugaaugaaucuuu

SEQ ID NO: 1454495 - RNA, 19 nt, Artificial Sequence
  Description of Artificial Sequence: Synthetic oligonucleotide
ggcucagucgacugaggau

SEQ ID NO: 1454496 - RNA, 19 nt, Artificial Sequence
  Description of Artificial Sequence: Synthetic oligonucleotide
cugacuuggcaagugcauu

SEQ ID NO: 1454497 - RNA, 19 nt, Artificial Sequence
  Description of Artificial Sequence: Synthetic oligonucleotide
gucuggcauguagucugga

SEQ ID NO: 1454498 - RNA, 19 nt, Artificial Sequence
  Description of Artificial Sequence: Synthetic oligonucleotide
ccgggagcggagcuuggug

SEQ ID NO: 1454499 - RNA, 19 nt, Artificial Sequence
  Description of Artificial Sequence: Synthetic oligonucleotide
gcuagacgugaggaagcca

SEQ ID NO: 1454500 - RNA, 19 nt, Artificial Sequence
  Description of Artificial Sequence: Synthetic oligonucleotide
cacgagacauagagcuuau

SEQ ID NO: 1454501 - RNA, 19 nt, Artificial Sequence
  Description of Artificial Sequence: Synthetic oligonucleotide
ggcgauagcuagaguacgu

SEQ ID NO: 1454502 - RNA, 19 nt, Artificial Sequence
  Description of Artificial Sequence: Synthetic oligonucleotide
gccccuugcuagacgugag

SEQ ID NO: 1454503 - RNA, 19 nt, Artificial Sequence
  Description of Artificial Sequence: Synthetic oligonucleotide
cccgccacaguagucguca

SEQ ID NO: 1454504 - RNA, 19 nt, Artificial Sequence
  Description of Artificial Sequence: Synthetic oligonucleotide
cccuuggacguuggacagg

SEQ ID NO: 1454505 - RNA, 19 nt, Artificial Sequence
  Description of Artificial Sequence: Synthetic oligonucleotide
cuguguuaaugcugccauu

SEQ ID NO: 1454506 - RNA, 19 nt, Artificial Sequence
  Description of Artificial Sequence: Synthetic oligonucleotide
cauugaccacagacuuggu

SEQ ID NO: 1454507 - RNA, 19 nt, Artificial Sequence
  Description of Artificial Sequence: Synthetic oligonucleotide
accuucuggcuggcucagu

SEQ ID NO: 1454508 - RNA, 19 nt, Artificial Sequence
  Description of Artificial Sequence: Synthetic oligonucleotide
gccgggagagcagaacaaa

SEQ ID NO: 1454509 - RNA, 19 nt, Artificial Sequence
  Description of Artificial Sequence: Synthetic oligonucleotide
ggacguuggacaggagagu

SEQ ID NO: 1454510 - RNA, 19 nt, Artificial Sequence
  Description of Artificial Sequence: Synthetic oligonucleotide
agguugcgggcgauagcua

SEQ ID NO: 1454511 - RNA, 19 nt, Artificial Sequence
  Description of Artificial Sequence: Synthetic oligonucleotide
cccuugcaggcauagguau

SEQ ID NO: 1454512 - RNA, 19 nt, Artificial Sequence
  Description of Artificial Sequence: Synthetic oligonucleotide
acacucgguuguggaucaa

SEQ ID NO: 1454513 - RNA, 19 nt, Artificial Sequence
  Description of Artificial Sequence: Synthetic oligonucleotide
cggccgggagagcagaaca

SEQ ID NO: 1454514 - RNA, 19 nt, Artificial Sequence
  Description of Artificial Sequence: Synthetic oligonucleotide
gggacucgucagugucauc

SEQ ID NO: 1454515 - RNA, 19 nt, Artificial Sequence
  Description of Artificial Sequence: Synthetic oligonucleotide
gcaccugaucaugcacuaa

SEQ ID NO: 1454516 - RNA, 19 nt, Artificial Sequence
  Description of Artificial Sequence: Synthetic oligonucleotide
gcauugcggaacacugagu

SEQ ID NO: 1454517 - RNA, 19 nt, Artificial Sequence
  Description of Artificial Sequence: Synthetic oligonucleotide
ccgccacaguagucgucac

SEQ ID NO: 1454518 - RNA, 19 nt, Artificial Sequence
  Description of Artificial Sequence: Synthetic oligonucleotide
cugcaaccgacgccauuuu

SEQ ID NO: 1454519 - RNA, 19 nt, Artificial Sequence
  Description of Artificial Sequence: Synthetic oligonucleotide
caacugcaaccgacgccau

SEQ ID NO: 1454520 - RNA, 19 nt, Artificial Sequence
  Description of Artificial Sequence: Synthetic oligonucleotide
ccccgccacaguagucguc

SEQ ID NO: 1454521 - RNA, 19 nt, Artificial Sequence
  Description of Artificial Sequence: Synthetic oligonucleotide
ggucagguugcgggcgaua

SEQ ID NO: 1454522 - RNA, 19 nt, Artificial Sequence
  Description of Artificial Sequence: Synthetic oligonucleotide
ccccagccuuacauaguaa

SEQ ID NO: 1454523 - RNA, 19 nt, Artificial Sequence
  Description of Artificial Sequence: Synthetic oligonucleotide
gccugaucuuggacguucu

SEQ ID NO: 1454524 - RNA, 19 nt, Artificial Sequence
  Description of Artificial Sequence: Synthetic oligonucleotide
cagugucaucguagccgau

SEQ ID NO: 1454525 - RNA, 19 nt, Artificial Sequence
  Description of Artificial Sequence: Synthetic oligonucleotide
cgccacaguagucgucacu

SEQ ID NO: 1454526 - RNA, 19 nt, Artificial Sequence
  Description of Artificial Sequence: Synthetic oligonucleotide
ccaccaccccugugauagu

SEQ ID NO: 1454527 - RNA, 19 nt, Artificial Sequence
  Description of Artificial Sequence: Synthetic oligonucleotide
cccgggagcggagcuuggu

SEQ ID NO: 1454528 - RNA, 19 nt, Artificial Sequence
  Description of Artificial Sequence: Synthetic oligonucleotide
cucuuaauaagcaaggugg

SEQ ID NO: 1454529 - RNA, 19 nt, Artificial Sequence
  Description of Artificial Sequence: Synthetic oligonucleotide
uuuacgugaacaccuaucg

SEQ ID NO: 1454530 - RNA, 19 nt, Artificial Sequence
  Description of Artificial Sequence: Synthetic oligonucleotide
guauauaucaucauagugg

SEQ ID NO: 1454531 - RNA, 19 nt, Artificial Sequence
  Description of Artificial Sequence: Synthetic oligonucleotide
uauauaucaucauaguggc

SEQ ID NO: 1454532 - RNA, 19 nt, Artificial Sequence
  Description of Artificial Sequence: Synthetic oligonucleotide
aaaauucuuaccgaaggac

SEQ ID NO: 1454533 - RNA, 19 nt, Artificial Sequence
  Description of Artificial Sequence: Synthetic oligonucleotide
aaacugaaccacuuuuccc

SEQ ID NO: 1454534 - RNA, 19 nt, Artificial Sequence
  Description of Artificial Sequence: Synthetic oligonucleotide
uauaucaucauaguggcug

SEQ ID NO: 1454535 - RNA, 19 nt, Artificial Sequence
  Description of Artificial Sequence: Synthetic oligonucleotide
aguauauaucaucauagug

SEQ ID NO: 1454536 - RNA, 19 nt, Artificial Sequence
  Description of Artificial Sequence: Synthetic oligonucleotide
uuaacuuucucucuuguuc

SEQ ID NO: 1454537 - RNA, 19 nt, Artificial Sequence
  Description of Artificial Sequence: Synthetic oligonucleotide
aaauucuuaccgaaggacg

SEQ ID NO: 1454538 - RNA, 19 nt, Artificial Sequence
  Description of Artificial Sequence: Synthetic oligonucleotide
aguacaucgugauagaagu

SEQ ID NO: 1454539 - RNA, 19 nt, Artificial Sequence
  Description of Artificial Sequence: Synthetic oligonucleotide
agaauggacaauuggcucg

SEQ ID NO: 1454540 - RNA, 19 nt, Artificial Sequence
  Description of Artificial Sequence: Synthetic oligonucleotide
auaguauauaucaucauag

SEQ ID NO: 1454541 - RNA, 19 nt, Artificial Sequence
  Description of Artificial Sequence: Synthetic oligonucleotide
aaacgugguaaacaugcuc

SEQ ID NO: 1454542 - RNA, 19 nt, Artificial Sequence
  Description of Artificial Sequence: Synthetic oligonucleotide
uaaacugaaccacuuuucc

SEQ ID NO: 1454543 - RNA, 19 nt, Artificial Sequence
  Description of Artificial Sequence: Synthetic oligonucleotide
uacgugaacaccuaucgcc

SEQ ID NO: 1454544 - RNA, 19 nt, Artificial Sequence
  Description of Artificial Sequence: Synthetic oligonucleotide
uguauaauggcuccggcuc

SEQ ID NO: 1454545 - RNA, 19 nt, Artificial Sequence
  Description of Artificial Sequence: Synthetic oligonucleotide
ugcaauguuuuccucuugg

SEQ ID NO: 1454546 - RNA, 19 nt, Artificial Sequence
  Description of Artificial Sequence: Synthetic oligonucleotide
aguacucuuacauccgugg

SEQ ID NO: 1454547 - RNA, 19 nt, Artificial Sequence
  Description of Artificial Sequence: Synthetic oligonucleotide
caugcucuuaauaagcaag

SEQ ID NO: 1454548 - RNA, 19 nt, Artificial Sequence
  Description of Artificial Sequence: Synthetic oligonucleotide
uggacaauuggcucgaucu

SEQ ID NO: 1454549 - RNA, 19 nt, Artificial Sequence
  Description of Artificial Sequence: Synthetic oligonucleotide
aacaccuaucgccaaaucu

SEQ ID NO: 1454550 - RNA, 19 nt, Artificial Sequence
  Description of Artificial Sequence: Synthetic oligonucleotide
uuaauaagcaaggugggac

SEQ ID NO: 1454551 - RNA, 19 nt, Artificial Sequence
  Description of Artificial Sequence: Synthetic oligonucleotide
aaccacuuuucccacguuc

SEQ ID NO: 1454552 - RNA, 19 nt, Artificial Sequence
  Description of Artificial Sequence: Synthetic oligonucleotide
ugauagaagucuaggaacu

SEQ ID NO: 1454553 - RNA, 19 nt, Artificial Sequence
  Description of Artificial Sequence: Synthetic oligonucleotide
uguauuccaggcuugaauc

SEQ ID NO: 1454554 - RNA, 19 nt, Artificial Sequence
  Description of Artificial Sequence: Synthetic oligonucleotide
cuuccugucaggcucaccg

SEQ ID NO: 1454555 - RNA, 19 nt, Artificial Sequence
  Description of Artificial Sequence: Synthetic oligonucleotide
agccuuguacuucuuaugg

SEQ ID NO: 1454556 - RNA, 19 nt, Artificial Sequence
  Description of Artificial Sequence: Synthetic oligonucleotide
ugaacugcgccucucacga

SEQ ID NO: 1454557 - RNA, 19 nt, Artificial Sequence
  Description of Artificial Sequence: Synthetic oligonucleotide
aaucgggcgagcuccugcc

SEQ ID NO: 1454558 - RNA, 19 nt, Artificial Sequence
  Description of Artificial Sequence: Synthetic oligonucleotide
cuccaguacucuuacaucc

SEQ ID NO: 1454559 - RNA, 19 nt, Artificial Sequence
  Description of Artificial Sequence: Synthetic oligonucleotide
ucuggagacugguagaugu

SEQ ID NO: 1454560 - RNA, 19 nt, Artificial Sequence
  Description of Artificial Sequence: Synthetic oligonucleotide
uugaaucagggucauaguc

SEQ ID NO: 1454561 - RNA, 19 nt, Artificial Sequence
  Description of Artificial Sequence: Synthetic oligonucleotide
gugauagaagucuaggaac

SEQ ID NO: 1454562 - RNA, 19 nt, Artificial Sequence
  Description of Artificial Sequence: Synthetic oligonucleotide
uuugugagacuucuucccc

SEQ ID NO: 1454563 - RNA, 19 nt, Artificial Sequence
  Description of Artificial Sequence: Synthetic oligonucleotide
uguguguguguguauaaug

SEQ ID NO: 1454564 - RNA, 19 nt, Artificial Sequence
  Description of Artificial Sequence: Synthetic oligonucleotide
uggcaguacaucgugauag

SEQ ID NO: 1454565 - RNA, 19 nt, Artificial Sequence
  Description of Artificial Sequence: Synthetic oligonucleotide
gcagaauucgcacugaagc

SEQ ID NO: 1454566 - RNA, 19 nt, Artificial Sequence
  Description of Artificial Sequence: Synthetic oligonucleotide
uacacauugccccucagau

SEQ ID NO: 1454567 - RNA, 19 nt, Artificial Sequence
  Description of Artificial Sequence: Synthetic oligonucleotide
uucgucacguguuugugag

SEQ ID NO: 1454568 - RNA, 19 nt, Artificial Sequence
  Description of Artificial Sequence: Synthetic oligonucleotide
aacgugguaaacaugcucu

SEQ ID NO: 1454569 - RNA, 19 nt, Artificial Sequence
  Description of Artificial Sequence: Synthetic oligonucleotide
uuauguuuacgugaacacc

SEQ ID NO: 1454570 - RNA, 19 nt, Artificial Sequence
  Description of Artificial Sequence: Synthetic oligonucleotide
uucuccaguacucuuacau

SEQ ID NO: 1454571 - RNA, 19 nt, Artificial Sequence
  Description of Artificial Sequence: Synthetic oligonucleotide
guuauguuuacgugaacac

SEQ ID NO: 1454572 - RNA, 19 nt, Artificial Sequence
  Description of Artificial Sequence: Synthetic oligonucleotide
uuuccaacucauuuucagc

SEQ ID NO: 1454573 - RNA, 19 nt, Artificial Sequence
  Description of Artificial Sequence: Synthetic oligonucleotide
ugguacugaacauacacau

SEQ ID NO: 1454574 - RNA, 19 nt, Artificial Sequence
  Description of Artificial Sequence: Synthetic oligonucleotide
ugcuugacagucuucuucc

SEQ ID NO: 1454575 - RNA, 19 nt, Artificial Sequence
  Description of Artificial Sequence: Synthetic oligonucleotide
uguguguguauaauggcuc

SEQ ID NO: 1454576 - RNA, 19 nt, Artificial Sequence
  Description of Artificial Sequence: Synthetic oligonucleotide
ucaccguuucucuuguagg

SEQ ID NO: 1454577 - RNA, 19 nt, Artificial Sequence
  Description of Artificial Sequence: Synthetic oligonucleotide
uacucuuacauccgugggc

SEQ ID NO: 1454578 - RNA, 19 nt, Artificial Sequence
  Description of Artificial Sequence: Synthetic oligonucleotide
aguuauguuuacgugaaca

SEQ ID NO: 1454579 - RNA, 19 nt, Artificial Sequence
  Description of Artificial Sequence: Synthetic oligonucleotide
guuggcuucccuaaauucg

SEQ ID NO: 1454580 - RNA, 19 nt, Artificial Sequence
  Description of Artificial Sequence: Synthetic oligonucleotide
uacaucgugauagaagucu

SEQ ID NO: 1454581 - RNA, 19 nt, Artificial Sequence
  Description of Artificial Sequence: Synthetic oligonucleotide
ugcgguuccaaguugcagc

SEQ ID NO: 1454582 - RNA, 19 nt, Artificial Sequence
  Description of Artificial Sequence: Synthetic oligonucleotide
cucaaaauucuuaccgaag

SEQ ID NO: 1454583 - RNA, 19 nt, Artificial Sequence
  Description of Artificial Sequence: Synthetic oligonucleotide
cuguagaauggacaauugg

SEQ ID NO: 1454584 - RNA, 19 nt, Artificial Sequence
  Description of Artificial Sequence: Synthetic oligonucleotide
ucuaggaacugcugauagg

SEQ ID NO: 1454585 - RNA, 19 nt, Artificial Sequence
  Description of Artificial Sequence: Synthetic oligonucleotide
uaauaagcaaggugggacu

SEQ ID NO: 1454586 - RNA, 19 nt, Artificial Sequence
  Description of Artificial Sequence: Synthetic oligonucleotide
acucuuacauccgugggcg

SEQ ID NO: 1454587 - RNA, 19 nt, Artificial Sequence
  Description of Artificial Sequence: Synthetic oligonucleotide
ucucaaaauucuuaccgaa

SEQ ID NO: 1454588 - RNA, 19 nt, Artificial Sequence
  Description of Artificial Sequence: Synthetic oligonucleotide
guguguguguguauaaugg

SEQ ID NO: 1454589 - RNA, 19 nt, Artificial Sequence
  Description of Artificial Sequence: Synthetic oligonucleotide
aauucuuaccgaaggacga

SEQ ID NO: 1454590 - RNA, 19 nt, Artificial Sequence
  Description of Artificial Sequence: Synthetic oligonucleotide
ugugaucccuucuucuucc

SEQ ID NO: 1454591 - RNA, 19 nt, Artificial Sequence
  Description of Artificial Sequence: Synthetic oligonucleotide
aaguuauguuuacgugaac

SEQ ID NO: 1454592 - RNA, 19 nt, Artificial Sequence
  Description of Artificial Sequence: Synthetic oligonucleotide
uucuugaccugccauagua

SEQ ID NO: 1454593 - RNA, 19 nt, Artificial Sequence
  Description of Artificial Sequence: Synthetic oligonucleotide
aauaauccacaaauugcca

SEQ ID NO: 1454594 - RNA, 19 nt, Artificial Sequence
  Description of Artificial Sequence: Synthetic oligonucleotide
ugaccuuaaacugaaccac

SEQ ID NO: 1454595 - RNA, 19 nt, Artificial Sequence
  Description of Artificial Sequence: Synthetic oligonucleotide
uugggauuucugaacacgu

SEQ ID NO: 1454596 - RNA, 19 nt, Artificial Sequence
  Description of Artificial Sequence: Synthetic oligonucleotide
auugcuccauuccaaacgu

SEQ ID NO: 1454597 - RNA, 19 nt, Artificial Sequence
  Description of Artificial Sequence: Synthetic oligonucleotide
cauucugccuuuaacuuuc

SEQ ID NO: 1454598 - RNA, 19 nt, Artificial Sequence
  Description of Artificial Sequence: Synthetic oligonucleotide
cuugcugcgccaauucugc

SEQ ID NO: 1454599 - RNA, 19 nt, Artificial Sequence
  Description of Artificial Sequence: Synthetic oligonucleotide
ucucaaucgggcgagcucc

SEQ ID NO: 1454600 - RNA, 19 nt, Artificial Sequence
  Description of Artificial Sequence: Synthetic oligonucleotide
aaaucugcaagcucccguu

SEQ ID NO: 1454601 - RNA, 19 nt, Artificial Sequence
  Description of Artificial Sequence: Synthetic oligonucleotide
aagucuaggaacugcugau

SEQ ID NO: 1454602 - RNA, 19 nt, Artificial Sequence
  Description of Artificial Sequence: Synthetic oligonucleotide
uguguauaauggcuccggc

SEQ ID NO: 1454603 - RNA, 19 nt, Artificial Sequence
  Description of Artificial Sequence: Synthetic oligonucleotide
uagaauggacaauuggcuc

SEQ ID NO: 1454604 - RNA, 19 nt, Artificial Sequence
  Description of Artificial Sequence: Synthetic oligonucleotide
ugcaucucucaaucgggcg

SEQ ID NO: 1454605 - RNA, 19 nt, Artificial Sequence
  Description of Artificial Sequence: Synthetic oligonucleotide
gaacuaguccaaucuggag

SEQ ID NO: 1454606 - RNA, 19 nt, Artificial Sequence
  Description of Artificial Sequence: Synthetic oligonucleotide
ucgugauagaagucuagga

SEQ ID NO: 1454607 - RNA, 19 nt, Artificial Sequence
  Description of Artificial Sequence: Synthetic oligonucleotide
guaaccauucuucauguaa

SEQ ID NO: 1454608 - RNA, 19 nt, Artificial Sequence
  Description of Artificial Sequence: Synthetic oligonucleotide
uuacgugaacaccuaucgc

SEQ ID NO: 1454609 - RNA, 19 nt, Artificial Sequence
  Description of Artificial Sequence: Synthetic oligonucleotide
aggacgaacuaguccaauc

SEQ ID NO: 1454610 - RNA, 19 nt, Artificial Sequence
  Description of Artificial Sequence: Synthetic oligonucleotide
uguggggaaguuauguuua

SEQ ID NO: 1454611 - RNA, 19 nt, Artificial Sequence
  Description of Artificial Sequence: Synthetic oligonucleotide
acgacuuuucgucacgugu

SEQ ID NO: 1454612 - RNA, 19 nt, Artificial Sequence
  Description of Artificial Sequence: Synthetic oligonucleotide
aucgugauagaagucuagg

SEQ ID NO: 1454613 - RNA, 19 nt, Artificial Sequence
  Description of Artificial Sequence: Synthetic oligonucleotide
ggaaguuauguuuacguga

SEQ ID NO: 1454614 - RNA, 19 nt, Artificial Sequence
  Description of Artificial Sequence: Synthetic oligonucleotide
uuggcuucccuaaauucgu

SEQ ID NO: 1454615 - RNA, 19 nt, Artificial Sequence
  Description of Artificial Sequence: Synthetic oligonucleotide
cuaucgccaaaucugcaag

SEQ ID NO: 1454616 - RNA, 19 nt, Artificial Sequence
  Description of Artificial Sequence: Synthetic oligonucleotide
gacgaacuaguccaaucug

SEQ ID NO: 1454617 - RNA, 19 nt, Artificial Sequence
  Description of Artificial Sequence: Synthetic oligonucleotide
agaauucgcacugaagcug

SEQ ID NO: 1454618 - RNA, 19 nt, Artificial Sequence
  Description of Artificial Sequence: Synthetic oligonucleotide
cugaccuuaaacugaacca

SEQ ID NO: 1454619 - RNA, 19 nt, Artificial Sequence
  Description of Artificial Sequence: Synthetic oligonucleotide
uuccaaacgugguaaacau

SEQ ID NO: 1454620 - RNA, 19 nt, Artificial Sequence
  Description of Artificial Sequence: Synthetic oligonucleotide
uccugcauugcuccauucc

SEQ ID NO: 1454621 - RNA, 19 nt, Artificial Sequence
  Description of Artificial Sequence: Synthetic oligonucleotide
aacugcgccucucacgacu

SEQ ID NO: 1454622 - RNA, 19 nt, Artificial Sequence
  Description of Artificial Sequence: Synthetic oligonucleotide
ugauuacuccugcucuucc

SEQ ID NO: 1454623 - RNA, 19 nt, Artificial Sequence
  Description of Artificial Sequence: Synthetic oligonucleotide
uguguguauaauggcuccg

SEQ ID NO: 1454624 - RNA, 19 nt, Artificial Sequence
  Description of Artificial Sequence: Synthetic oligonucleotide
ugauguggggaaguuaugu

SEQ ID NO: 1454625 - RNA, 19 nt, Artificial Sequence
  Description of Artificial Sequence: Synthetic oligonucleotide
ucuuaccgaaggacgaacu

SEQ ID NO: 1454626 - RNA, 19 nt, Artificial Sequence
  Description of Artificial Sequence: Synthetic oligonucleotide
acgaacuaguccaaucugg

SEQ ID NO: 1454627 - RNA, 19 nt, Artificial Sequence
  Description of Artificial Sequence: Synthetic oligonucleotide
uucuuuccguuuucgagcu

SEQ ID NO: 1454628 - RNA, 19 nt, Artificial Sequence
  Description of Artificial Sequence: Synthetic oligonucleotide
ucagaugcgguuccaaguu

SEQ ID NO: 1454629 - RNA, 19 nt, Artificial Sequence
  Description of Artificial Sequence: Synthetic oligonucleotide
uaccgaaggacgaacuagu

SEQ ID NO: 1454630 - RNA, 19 nt, Artificial Sequence
  Description of Artificial Sequence: Synthetic oligonucleotide
guacucuuacauccguggg

SEQ ID NO: 1454631 - RNA, 19 nt, Artificial Sequence
  Description of Artificial Sequence: Synthetic oligonucleotide
ucuuucuccaguacucuua

SEQ ID NO: 1454632 - RNA, 19 nt, Artificial Sequence
  Description of Artificial Sequence: Synthetic oligonucleotide
cuccucucaaaauucuuac

SEQ ID NO: 1454633 - RNA, 19 nt, Artificial Sequence
  Description of Artificial Sequence: Synthetic oligonucleotide
uccucucaaaauucuuacc

SEQ ID NO: 1454634 - RNA, 19 nt, Artificial Sequence
  Description of Artificial Sequence: Synthetic oligonucleotide
uauaauggcuccggcuccg

SEQ ID NO: 1454635 - RNA, 19 nt, Artificial Sequence
  Description of Artificial Sequence: Synthetic oligonucleotide
cucaccguuucucuuguag

SEQ ID NO: 1454636 - RNA, 19 nt, Artificial Sequence
  Description of Artificial Sequence: Synthetic oligonucleotide
cuuuccguuuucgagcugc

SEQ ID NO: 1454637 - RNA, 19 nt, Artificial Sequence
  Description of Artificial Sequence: Synthetic oligonucleotide
gaaguuauguuuacgugaa

SEQ ID NO: 1454638 - RNA, 19 nt, Artificial Sequence
  Description of Artificial Sequence: Synthetic oligonucleotide
agugcagccuuguacuucu

SEQ ID NO: 1454639 - RNA, 19 nt, Artificial Sequence
  Description of Artificial Sequence: Synthetic oligonucleotide
uucgcacugaagcugucgu

SEQ ID NO: 1454640 - RNA, 19 nt, Artificial Sequence
  Description of Artificial Sequence: Synthetic oligonucleotide
uaucgccaaaucugcaagc

SEQ ID NO: 1454641 - RNA, 19 nt, Artificial Sequence
  Description of Artificial Sequence: Synthetic oligonucleotide
ugauaggucucuucuucac

SEQ ID NO: 1454642 - RNA, 19 nt, Artificial Sequence
  Description of Artificial Sequence: Synthetic oligonucleotide
uacuucuuauggcucauuu

SEQ ID NO: 1454643 - RNA, 19 nt, Artificial Sequence
  Description of Artificial Sequence: Synthetic oligonucleotide
ucuucccucaguaaccauu

SEQ ID NO: 1454644 - RNA, 19 nt, Artificial Sequence
  Description of Artificial Sequence: Synthetic oligonucleotide
gugaacugcgccucucacg

SEQ ID NO: 1454645 - RNA, 19 nt, Artificial Sequence
  Description of Artificial Sequence: Synthetic oligonucleotide
uuucgucacguguuuguga

SEQ ID NO: 1454646 - RNA, 19 nt, Artificial Sequence
  Description of Artificial Sequence: Synthetic oligonucleotide
acgugaagaaaguugcaau

SEQ ID NO: 1454647 - RNA, 19 nt, Artificial Sequence
  Description of Artificial Sequence: Synthetic oligonucleotide
caccuaucgccaaaucugc

SEQ ID NO: 1454648 - RNA, 19 nt, Artificial Sequence
  Description of Artificial Sequence: Synthetic oligonucleotide
gcucuuaauaagcaaggug

SEQ ID NO: 1454649 - RNA, 19 nt, Artificial Sequence
  Description of Artificial Sequence: Synthetic oligonucleotide
ucuguuggcuucccuaaau

SEQ ID NO: 1454650 - RNA, 19 nt, Artificial Sequence
  Description of Artificial Sequence: Synthetic oligonucleotide
auggacaauuggcucgauc

SEQ ID NO: 1454651 - RNA, 19 nt, Artificial Sequence
  Description of Artificial Sequence: Synthetic oligonucleotide
gauagaagucuaggaacug

SEQ ID NO: 1454652 - RNA, 19 nt, Artificial Sequence
  Description of Artificial Sequence: Synthetic oligonucleotide
aggggcauggacugugauc

SEQ ID NO: 1454653 - RNA, 19 nt, Artificial Sequence
  Description of Artificial Sequence: Synthetic oligonucleotide
guauaauggcuccggcucc

SEQ ID NO: 1454654 - RNA, 19 nt, Artificial Sequence
  Description of Artificial Sequence: Synthetic oligonucleotide
guguguguauaauggcucc

SEQ ID NO: 1454655 - RNA, 19 nt, Artificial Sequence
  Description of Artificial Sequence: Synthetic oligonucleotide
cuucccucaguaaccauuc

SEQ ID NO: 1454656 - RNA, 19 nt, Artificial Sequence
  Description of Artificial Sequence: Synthetic oligonucleotide
uccaacucauuuucagccu

SEQ ID NO: 1454657 - RNA, 19 nt, Artificial Sequence
  Description of Artificial Sequence: Synthetic oligonucleotide
ggggcauggacugugaucc

SEQ ID NO: 1454658 - RNA, 19 nt, Artificial Sequence
  Description of Artificial Sequence: Synthetic oligonucleotide
ucuccaguacucuuacauc

SEQ ID NO: 1454659 - RNA, 19 nt, Artificial Sequence
  Description of Artificial Sequence: Synthetic oligonucleotide
auagucaucccuccugcau

SEQ ID NO: 1454660 - RNA, 19 nt, Artificial Sequence
  Description of Artificial Sequence: Synthetic oligonucleotide
caaaauucuuaccgaagga

SEQ ID NO: 1454661 - RNA, 19 nt, Artificial Sequence
  Description of Artificial Sequence: Synthetic oligonucleotide
uuuucgucacguguuugug

SEQ ID NO: 1454662 - RNA, 19 nt, Artificial Sequence
  Description of Artificial Sequence: Synthetic oligonucleotide
uugaccugccauaguauau

SEQ ID NO: 1454663 - RNA, 19 nt, Artificial Sequence
  Description of Artificial Sequence: Synthetic oligonucleotide
uuuggcuucggguccgacu

SEQ ID NO: 1454664 - RNA, 19 nt, Artificial Sequence
  Description of Artificial Sequence: Synthetic oligonucleotide
caucgugauagaagucuag

SEQ ID NO: 1454665 - RNA, 19 nt, Artificial Sequence
  Description of Artificial Sequence: Synthetic oligonucleotide
ucuugaccugccauaguau

SEQ ID NO: 1454666 - RNA, 19 nt, Artificial Sequence
  Description of Artificial Sequence: Synthetic oligonucleotide
guguguauaauggcuccgg

SEQ ID NO: 1454667 - RNA, 19 nt, Artificial Sequence
  Description of Artificial Sequence: Synthetic oligonucleotide
cccguuuuacuguagaaug

SEQ ID NO: 1454668 - RNA, 19 nt, Artificial Sequence
  Description of Artificial Sequence: Synthetic oligonucleotide
ugggacuugauguggggaa

SEQ ID NO: 1454669 - RNA, 19 nt, Artificial Sequence
  Description of Artificial Sequence: Synthetic oligonucleotide
ucacuguauuccaggcuug

SEQ ID NO: 1454670 - RNA, 19 nt, Artificial Sequence
  Description of Artificial Sequence: Synthetic oligonucleotide
acucuggcaguacaucgug

SEQ ID NO: 1454671 - RNA, 19 nt, Artificial Sequence
  Description of Artificial Sequence: Synthetic oligonucleotide
uguuuacgugaacaccuau

SEQ ID NO: 1454672 - RNA, 19 nt, Artificial Sequence
  Description of Artificial Sequence: Synthetic oligonucleotide
uggacugugaucccuucuu

SEQ ID NO: 1454673 - RNA, 19 nt, Artificial Sequence
  Description of Artificial Sequence: Synthetic oligonucleotide
uucgucuucuugaccugcc

SEQ ID NO: 1454674 - RNA, 19 nt, Artificial Sequence
  Description of Artificial Sequence: Synthetic oligonucleotide
auguggggaaguuauguuu

SEQ ID NO: 1454675 - RNA, 19 nt, Artificial Sequence
  Description of Artificial Sequence: Synthetic oligonucleotide
aauaagcaaggugggacuu

SEQ ID NO: 1454676 - RNA, 19 nt, Artificial Sequence
  Description of Artificial Sequence: Synthetic oligonucleotide
gugguaaacaugcucuuaa

SEQ ID NO: 1454677 - RNA, 19 nt, Artificial Sequence
  Description of Artificial Sequence: Synthetic oligonucleotide
uguguguguguguguauaa

SEQ ID NO: 1454678 - RNA, 19 nt, Artificial Sequence
  Description of Artificial Sequence: Synthetic oligonucleotide
cugcaucucucaaucgggc

SEQ ID NO: 1454679 - RNA, 19 nt, Artificial Sequence
  Description of Artificial Sequence: Synthetic oligonucleotide
ucucacgacuuuucgucac

SEQ ID NO: 1454680 - RNA, 19 nt, Artificial Sequence
  Description of Artificial Sequence: Synthetic oligonucleotide
gggaaguuauguuuacgug

SEQ ID NO: 1454681 - RNA, 19 nt, Artificial Sequence
  Description of Artificial Sequence: Synthetic oligonucleotide
auucgcacugaagcugucg

SEQ ID NO: 1454682 - RNA, 19 nt, Artificial Sequence
  Description of Artificial Sequence: Synthetic oligonucleotide
cugggcagaauucgcacug

SEQ ID NO: 1454683 - RNA, 19 nt, Artificial Sequence
  Description of Artificial Sequence: Synthetic oligonucleotide
ugugauuacuccugcucuu

SEQ ID NO: 1454684 - RNA, 19 nt, Artificial Sequence
  Description of Artificial Sequence: Synthetic oligonucleotide
cugguagaugucucuguug

SEQ ID NO: 1454685 - RNA, 19 nt, Artificial Sequence
  Description of Artificial Sequence: Synthetic oligonucleotide
caggcuugaaucaggguca

SEQ ID NO: 1454686 - RNA, 19 nt, Artificial Sequence
  Description of Artificial Sequence: Synthetic oligonucleotide
cuugauguggggaaguuau

SEQ ID NO: 1454687 - RNA, 19 nt, Artificial Sequence
  Description of Artificial Sequence: Synthetic oligonucleotide
ugcucuuaauaagcaaggu

SEQ ID NO: 1454688 - RNA, 19 nt, Artificial Sequence
  Description of Artificial Sequence: Synthetic oligonucleotide
cucacgacuuuucgucacg

SEQ ID NO: 1454689 - RNA, 19 nt, Artificial Sequence
  Description of Artificial Sequence: Synthetic oligonucleotide
aacucuggcaguacaucgu

SEQ ID NO: 1454690 - RNA, 19 nt, Artificial Sequence
  Description of Artificial Sequence: Synthetic oligonucleotide
guagaauggacaauuggcu

SEQ ID NO: 1454691 - RNA, 19 nt, Artificial Sequence
  Description of Artificial Sequence: Synthetic oligonucleotide
auaccaucguccauuaaaa

SEQ ID NO: 1454692 - RNA, 19 nt, Artificial Sequence
  Description of Artificial Sequence: Synthetic oligonucleotide
ucuuacauccgugggcggu

SEQ ID NO: 1454693 - RNA, 19 nt, Artificial Sequence
  Description of Artificial Sequence: Synthetic oligonucleotide
guuuacgugaacaccuauc

SEQ ID NO: 1454694 - RNA, 19 nt, Artificial Sequence
  Description of Artificial Sequence: Synthetic oligonucleotide
gacacugcuguacuucaaa

SEQ ID NO: 1454695 - RNA, 19 nt, Artificial Sequence
  Description of Artificial Sequence: Synthetic oligonucleotide
uucuuugcccugaauucuu

SEQ ID NO: 1454696 - RNA, 19 nt, Artificial Sequence
  Description of Artificial Sequence: Synthetic oligonucleotide
cugaaccacuuuucccacg

SEQ ID NO: 1454697 - RNA, 19 nt, Artificial Sequence
  Description of Artificial Sequence: Synthetic oligonucleotide
ucaucccuccugcauugcu

SEQ ID NO: 1454698 - RNA, 19 nt, Artificial Sequence
  Description of Artificial Sequence: Synthetic oligonucleotide
cuucggguccgacugcggc

SEQ ID NO: 1454699 - RNA, 19 nt, Artificial Sequence
  Description of Artificial Sequence: Synthetic oligonucleotide
aggcucaccguuucucuug

SEQ ID NO: 1454700 - RNA, 19 nt, Artificial Sequence
  Description of Artificial Sequence: Synthetic oligonucleotide
uucuuaccgaaggacgaac

SEQ ID NO: 1454701 - RNA, 19 nt, Artificial Sequence
  Description of Artificial Sequence: Synthetic oligonucleotide
cuuaauaagcaagguggga

SEQ ID NO: 1454702 - RNA, 19 nt, Artificial Sequence
  Description of Artificial Sequence: Synthetic oligonucleotide
cacugggcagaauucgcac

SEQ ID NO: 1454703 - RNA, 19 nt, Artificial Sequence
  Description of Artificial Sequence: Synthetic oligonucleotide
caguacucuuacauccgug

SEQ ID NO: 1454704 - RNA, 19 nt, Artificial Sequence
  Description of Artificial Sequence: Synthetic oligonucleotide
ugugugugugugugugugu

SEQ ID NO: 1454705 - RNA, 19 nt, Artificial Sequence
  Description of Artificial Sequence: Synthetic oligonucleotide
aucgccaaaucugcaagcu

SEQ ID NO: 1454706 - RNA, 19 nt, Artificial Sequence
  Description of Artificial Sequence: Synthetic oligonucleotide
caaucgggcgagcuccugc

SEQ ID NO: 1454707 - RNA, 19 nt, Artificial Sequence
  Description of Artificial Sequence: Synthetic oligonucleotide
cuaggaacugcugauaggu

SEQ ID NO: 1454708 - RNA, 19 nt, Artificial Sequence
  Description of Artificial Sequence: Synthetic oligonucleotide
gaauggacaauuggcucga

SEQ ID NO: 1454709 - RNA, 19 nt, Artificial Sequence
  Description of Artificial Sequence: Synthetic oligonucleotide
ugaccugccauaguauaua

SEQ ID NO: 1454710 - RNA, 19 nt, Artificial Sequence
  Description of Artificial Sequence: Synthetic oligonucleotide
agacugguagaugucucug

SEQ ID NO: 1454711 - RNA, 19 nt, Artificial Sequence
  Description of Artificial Sequence: Synthetic oligonucleotide
acguguuugugagacuucu

SEQ ID NO: 1454712 - RNA, 19 nt, Artificial Sequence
  Description of Artificial Sequence: Synthetic oligonucleotide
ucgccaaaucugcaagcuc

SEQ ID NO: 1454713 - RNA, 19 nt, Artificial Sequence
  Description of Artificial Sequence: Synthetic oligonucleotide
auaagcaaggugggacuug

SEQ ID NO: 1454714 - RNA, 19 nt, Artificial Sequence
  Description of Artificial Sequence: Synthetic oligonucleotide
cucuuggacacugcuguac

SEQ ID NO: 1454715 - RNA, 19 nt, Artificial Sequence
  Description of Artificial Sequence: Synthetic oligonucleotide
gugugugugugugugugug

SEQ ID NO: 1454716 - RNA, 19 nt, Artificial Sequence
  Description of Artificial Sequence: Synthetic oligonucleotide
uggacucaggcuccuucgu

SEQ ID NO: 1454717 - RNA, 19 nt, Artificial Sequence
  Description of Artificial Sequence: Synthetic oligonucleotide
uaauggcuccggcuccggc

SEQ ID NO: 1454718 - RNA, 19 nt, Artificial Sequence
  Description of Artificial Sequence: Synthetic oligonucleotide
ucccgcuuuggcuucgggu

SEQ ID NO: 1454719 - RNA, 19 nt, Artificial Sequence
  Description of Artificial Sequence: Synthetic oligonucleotide
cugauaggucucuucuuca

SEQ ID NO: 1454720 - RNA, 19 nt, Artificial Sequence
  Description of Artificial Sequence: Synthetic oligonucleotide
caucccuccugcauugcuc

SEQ ID NO: 1454721 - RNA, 19 nt, Artificial Sequence
  Description of Artificial Sequence: Synthetic oligonucleotide
ugcugcgccaauucugcau

SEQ ID NO: 1454722 - RNA, 19 nt, Artificial Sequence
  Description of Artificial Sequence: Synthetic oligonucleotide
cgaaggacgaacuagucca

SEQ ID NO: 1454723 - RNA, 19 nt, Artificial Sequence
  Description of Artificial Sequence: Synthetic oligonucleotide
cucgaucuuucuccaguac

SEQ ID NO: 1454724 - RNA, 19 nt, Artificial Sequence
  Description of Artificial Sequence: Synthetic oligonucleotide
ccucucacgacuuuucguc

SEQ ID NO: 1454725 - RNA, 19 nt, Artificial Sequence
  Description of Artificial Sequence: Synthetic oligonucleotide
cuugaccugccauaguaua

SEQ ID NO: 1454726 - RNA, 19 nt, Artificial Sequence
  Description of Artificial Sequence: Synthetic oligonucleotide
uucggguccgacugcggcu

SEQ ID NO: 1454727 - RNA, 19 nt, Artificial Sequence
  Description of Artificial Sequence: Synthetic oligonucleotide
aauucgcacugaagcuguc

SEQ ID NO: 1454728 - RNA, 19 nt, Artificial Sequence
  Description of Artificial Sequence: Synthetic oligonucleotide
gcaaggugggacuugaugu

SEQ ID NO: 1454729 - RNA, 19 nt, Artificial Sequence
  Description of Artificial Sequence: Synthetic oligonucleotide
uccaggggcauggacugug

SEQ ID NO: 1454730 - RNA, 19 nt, Artificial Sequence
  Description of Artificial Sequence: Synthetic oligonucleotide
acuuuucgucacguguuug

SEQ ID NO: 1454731 - RNA, 19 nt, Artificial Sequence
  Description of Artificial Sequence: Synthetic oligonucleotide
auccgugggcgguucuggg

SEQ ID NO: 1454732 - RNA, 19 nt, Artificial Sequence
  Description of Artificial Sequence: Synthetic oligonucleotide
uguguguguguguguguau

SEQ ID NO: 1454733 - RNA, 19 nt, Artificial Sequence
  Description of Artificial Sequence: Synthetic oligonucleotide
gucacugggcagaauucgc

SEQ ID NO: 1454734 - RNA, 19 nt, Artificial Sequence
  Description of Artificial Sequence: Synthetic oligonucleotide
ucucucaaucgggcgagcu

SEQ ID NO: 1454735 - RNA, 19 nt, Artificial Sequence
  Description of Artificial Sequence: Synthetic oligonucleotide
ccgaaggacgaacuagucc

SEQ ID NO: 1454736 - RNA, 19 nt, Artificial Sequence
  Description of Artificial Sequence: Synthetic oligonucleotide
cauugccccucagaugcgg

SEQ ID NO: 1454737 - RNA, 19 nt, Artificial Sequence
  Description of Artificial Sequence: Synthetic oligonucleotide
gaacaccuaucgccaaauc

SEQ ID NO: 1454738 - RNA, 19 nt, Artificial Sequence
  Description of Artificial Sequence: Synthetic oligonucleotide
ggugggacuugaugugggg

SEQ ID NO: 1454739 - RNA, 19 nt, Artificial Sequence
  Description of Artificial Sequence: Synthetic oligonucleotide
accgaaggacgaacuaguc

SEQ ID NO: 1454740 - RNA, 19 nt, Artificial Sequence
  Description of Artificial Sequence: Synthetic oligonucleotide
ugcugauaggucucuucuu

SEQ ID NO: 1454741 - RNA, 19 nt, Artificial Sequence
  Description of Artificial Sequence: Synthetic oligonucleotide
guguauaauggcuccggcu

SEQ ID NO: 1454742 - RNA, 19 nt, Artificial Sequence
  Description of Artificial Sequence: Synthetic oligonucleotide
ggggaaguuauguuuacgu

SEQ ID NO: 1454743 - RNA, 19 nt, Artificial Sequence
  Description of Artificial Sequence: Synthetic oligonucleotide
cucuuacauccgugggcgg

SEQ ID NO: 1454744 - RNA, 19 nt, Artificial Sequence
  Description of Artificial Sequence: Synthetic oligonucleotide
ucacgacuuuucgucacgu

SEQ ID NO: 1454745 - RNA, 19 nt, Artificial Sequence
  Description of Artificial Sequence: Synthetic oligonucleotide
cagaauucgcacugaagcu

SEQ ID NO: 1454746 - RNA, 19 nt, Artificial Sequence
  Description of Artificial Sequence: Synthetic oligonucleotide
ggcuucccuaaauucguug

SEQ ID NO: 1454747 - RNA, 19 nt, Artificial Sequence
  Description of Artificial Sequence: Synthetic oligonucleotide
ccugugauuacuccugcuc

SEQ ID NO: 1454748 - RNA, 19 nt, Artificial Sequence
  Description of Artificial Sequence: Synthetic oligonucleotide
cuggagacugguagauguc

SEQ ID NO: 1454749 - RNA, 19 nt, Artificial Sequence
  Description of Artificial Sequence: Synthetic oligonucleotide
aagcucccguuuuacugua

SEQ ID NO: 1454750 - RNA, 19 nt, Artificial Sequence
  Description of Artificial Sequence: Synthetic oligonucleotide
aucugcaagcucccguuuu

SEQ ID NO: 1454751 - RNA, 19 nt, Artificial Sequence
  Description of Artificial Sequence: Synthetic oligonucleotide
uccguuuccuccgucucuc

SEQ ID NO: 1454752 - RNA, 19 nt, Artificial Sequence
  Description of Artificial Sequence: Synthetic oligonucleotide
gaauucgcacugaagcugu

SEQ ID NO: 1454753 - RNA, 19 nt, Artificial Sequence
  Description of Artificial Sequence: Synthetic oligonucleotide
cuuuucgucacguguuugu

SEQ ID NO: 1454754 - RNA, 19 nt, Artificial Sequence
  Description of Artificial Sequence: Synthetic oligonucleotide
aaggacgaacuaguccaau

SEQ ID NO: 1454755 - RNA, 19 nt, Artificial Sequence
  Description of Artificial Sequence: Synthetic oligonucleotide
ucuuuccguuuucgagcug

SEQ ID NO: 1454756 - RNA, 19 nt, Artificial Sequence
  Description of Artificial Sequence: Synthetic oligonucleotide
ugacuccgacuucggcucc

SEQ ID NO: 1454757 - RNA, 19 nt, Artificial Sequence
  Description of Artificial Sequence: Synthetic oligonucleotide
ucccgcucuuuucucugcu

SEQ ID NO: 1454758 - RNA, 19 nt, Artificial Sequence
  Description of Artificial Sequence: Synthetic oligonucleotide
aguaaccauucuucaugua

SEQ ID NO: 1454759 - RNA, 19 nt, Artificial Sequence
  Description of Artificial Sequence: Synthetic oligonucleotide
cacgacuuuucgucacgug

SEQ ID NO: 1454760 - RNA, 19 nt, Artificial Sequence
  Description of Artificial Sequence: Synthetic oligonucleotide
caaguugcagcugaccuua

SEQ ID NO: 1454761 - RNA, 19 nt, Artificial Sequence
  Description of Artificial Sequence: Synthetic oligonucleotide
gauguggggaaguuauguu

SEQ ID NO: 1454762 - RNA, 19 nt, Artificial Sequence
  Description of Artificial Sequence: Synthetic oligonucleotide
augcgguuccaaguugcag

SEQ ID NO: 1454763 - RNA, 19 nt, Artificial Sequence
  Description of Artificial Sequence: Synthetic oligonucleotide
cuuaccgaaggacgaacua

SEQ ID NO: 1454764 - RNA, 19 nt, Artificial Sequence
  Description of Artificial Sequence: Synthetic oligonucleotide
uccuguuguuucugcuccu

SEQ ID NO: 1454765 - RNA, 19 nt, Artificial Sequence
  Description of Artificial Sequence: Synthetic oligonucleotide
accugccauaguauauauc

SEQ ID NO: 1454766 - RNA, 19 nt, Artificial Sequence
  Description of Artificial Sequence: Synthetic oligonucleotide
auauaucaucauaguggcu

SEQ ID NO: 1454767 - RNA, 19 nt, Artificial Sequence
  Description of Artificial Sequence: Synthetic oligonucleotide
ggacgaacuaguccaaucu

SEQ ID NO: 1454768 - RNA, 19 nt, Artificial Sequence
  Description of Artificial Sequence: Synthetic oligonucleotide
cucagaugcgguuccaagu

SEQ ID NO: 1454769 - RNA, 19 nt, Artificial Sequence
  Description of Artificial Sequence: Synthetic oligonucleotide
cucucacgacuuuucguca

SEQ ID NO: 1454770 - RNA, 19 nt, Artificial Sequence
  Description of Artificial Sequence: Synthetic oligonucleotide
gccaauucugcaucucuca

SEQ ID NO: 1454771 - RNA, 19 nt, Artificial Sequence
  Description of Artificial Sequence: Synthetic oligonucleotide
auaauggcuccggcuccgg

SEQ ID NO: 1454772 - RNA, 19 nt, Artificial Sequence
  Description of Artificial Sequence: Synthetic oligonucleotide
cacugcuguacuucaaaua

SEQ ID NO: 1454773 - RNA, 19 nt, Artificial Sequence
  Description of Artificial Sequence: Synthetic oligonucleotide
ggcagaauucgcacugaag

SEQ ID NO: 1454774 - RNA, 19 nt, Artificial Sequence
  Description of Artificial Sequence: Synthetic oligonucleotide
uccgugggcgguucugggu

SEQ ID NO: 1454775 - RNA, 19 nt, Artificial Sequence
  Description of Artificial Sequence: Synthetic oligonucleotide
gcaucucucaaucgggcga

SEQ ID NO: 1454776 - RNA, 19 nt, Artificial Sequence
  Description of Artificial Sequence: Synthetic oligonucleotide
gacugguagaugucucugu

SEQ ID NO: 1454777 - RNA, 19 nt, Artificial Sequence
  Description of Artificial Sequence: Synthetic oligonucleotide
aucucucaaucgggcgagc

SEQ ID NO: 1454778 - RNA, 19 nt, Artificial Sequence
  Description of Artificial Sequence: Synthetic oligonucleotide
acgugguaaacaugcucuu

SEQ ID NO: 1454779 - RNA, 19 nt, Artificial Sequence
  Description of Artificial Sequence: Synthetic oligonucleotide
cacguguuugugagacuuc

SEQ ID NO: 1454780 - RNA, 19 nt, Artificial Sequence
  Description of Artificial Sequence: Synthetic oligonucleotide
ucgcacugaagcugucguc

SEQ ID NO: 1454781 - RNA, 19 nt, Artificial Sequence
  Description of Artificial Sequence: Synthetic oligonucleotide
caagcucccguuuuacugu

SEQ ID NO: 1454782 - RNA, 19 nt, Artificial Sequence
  Description of Artificial Sequence: Synthetic oligonucleotide
cccgcuuuggcuucggguc

SEQ ID NO: 1454783 - RNA, 19 nt, Artificial Sequence
  Description of Artificial Sequence: Synthetic oligonucleotide
cucuuguucuucuuuccgu

SEQ ID NO: 1454784 - RNA, 19 nt, Artificial Sequence
  Description of Artificial Sequence: Synthetic oligonucleotide
ggcgguucuggguucugcc

SEQ ID NO: 1454785 - RNA, 19 nt, Artificial Sequence
  Description of Artificial Sequence: Synthetic oligonucleotide
aucuggagacugguagaug

SEQ ID NO: 1454786 - RNA, 19 nt, Artificial Sequence
  Description of Artificial Sequence: Synthetic oligonucleotide
ucgucacguguuugugaga

SEQ ID NO: 1454787 - RNA, 19 nt, Artificial Sequence
  Description of Artificial Sequence: Synthetic oligonucleotide
gaugcgguuccaaguugca

SEQ ID NO: 1454788 - RNA, 19 nt, Artificial Sequence
  Description of Artificial Sequence: Synthetic oligonucleotide
acuugauguggggaaguua

SEQ ID NO: 1454789 - RNA, 19 nt, Artificial Sequence
  Description of Artificial Sequence: Synthetic oligonucleotide
ccucagaugcgguuccaag

SEQ ID NO: 1454790 - RNA, 19 nt, Artificial Sequence
  Description of Artificial Sequence: Synthetic oligonucleotide
cuguauuccaggcuugaau

SEQ ID NO: 1454791 - RNA, 19 nt, Artificial Sequence
  Description of Artificial Sequence: Synthetic oligonucleotide
cugcugauaggucucuucu

SEQ ID NO: 1454792 - RNA, 19 nt, Artificial Sequence
  Description of Artificial Sequence: Synthetic oligonucleotide
gcugcgccaauucugcauc

SEQ ID NO: 1454793 - RNA, 19 nt, Artificial Sequence
  Description of Artificial Sequence: Synthetic oligonucleotide
uacauccgugggcgguucu

SEQ ID NO: 1454794 - RNA, 19 nt, Artificial Sequence
  Description of Artificial Sequence: Synthetic oligonucleotide
guacaucgugauagaaguc

SEQ ID NO: 1454795 - RNA, 19 nt, Artificial Sequence
  Description of Artificial Sequence: Synthetic oligonucleotide
ccuuguacuucuuauggcu

SEQ ID NO: 1454796 - RNA, 19 nt, Artificial Sequence
  Description of Artificial Sequence: Synthetic oligonucleotide
gccaagugccaccauuuuc

SEQ ID NO: 1454797 - RNA, 19 nt, Artificial Sequence
  Description of Artificial Sequence: Synthetic oligonucleotide
acaucgugauagaagucua

SEQ ID NO: 1454798 - RNA, 19 nt, Artificial Sequence
  Description of Artificial Sequence: Synthetic oligonucleotide
cuccauuccaaacguggua

SEQ ID NO: 1454799 - RNA, 19 nt, Artificial Sequence
  Description of Artificial Sequence: Synthetic oligonucleotide
uuccguuuucgagcugccu

SEQ ID NO: 1454800 - RNA, 19 nt, Artificial Sequence
  Description of Artificial Sequence: Synthetic oligonucleotide
gugggacuugaugugggga

SEQ ID NO: 1454801 - RNA, 19 nt, Artificial Sequence
  Description of Artificial Sequence: Synthetic oligonucleotide
gaaggacgaacuaguccaa

SEQ ID NO: 1454802 - RNA, 19 nt, Artificial Sequence
  Description of Artificial Sequence: Synthetic oligonucleotide
ggacugugaucccuucuuc

SEQ ID NO: 1454803 - RNA, 19 nt, Artificial Sequence
  Description of Artificial Sequence: Synthetic oligonucleotide
acauugccccucagaugcg

SEQ ID NO: 1454804 - RNA, 19 nt, Artificial Sequence
  Description of Artificial Sequence: Synthetic oligonucleotide
aauggacaauuggcucgau

SEQ ID NO: 1454805 - RNA, 19 nt, Artificial Sequence
  Description of Artificial Sequence: Synthetic oligonucleotide
ggcaguacaucgugauaga

SEQ ID NO: 1454806 - RNA, 19 nt, Artificial Sequence
  Description of Artificial Sequence: Synthetic oligonucleotide
uuacauccgugggcgguuc

SEQ ID NO: 1454807 - RNA, 19 nt, Artificial Sequence
  Description of Artificial Sequence: Synthetic oligonucleotide
gaccugccauaguauauau

SEQ ID NO: 1454808 - RNA, 19 nt, Artificial Sequence
  Description of Artificial Sequence: Synthetic oligonucleotide
guuccaaguugcagcugac

SEQ ID NO: 1454809 - RNA, 19 nt, Artificial Sequence
  Description of Artificial Sequence: Synthetic oligonucleotide
ccucaguaaccauucuuca

SEQ ID NO: 1454810 - RNA, 19 nt, Artificial Sequence
  Description of Artificial Sequence: Synthetic oligonucleotide
gaacugcgccucucacgac

SEQ ID NO: 1454811 - RNA, 19 nt, Artificial Sequence
  Description of Artificial Sequence: Synthetic oligonucleotide
guguguguguguguguaua

SEQ ID NO: 1454812 - RNA, 19 nt, Artificial Sequence
  Description of Artificial Sequence: Synthetic oligonucleotide
gugugugugugugugugua

SEQ ID NO: 1454813 - RNA, 19 nt, Artificial Sequence
  Description of Artificial Sequence: Synthetic oligonucleotide
cgucacguguuugugagac

SEQ ID NO: 1454814 - RNA, 19 nt, Artificial Sequence
  Description of Artificial Sequence: Synthetic oligonucleotide
ugcgccaauucugcaucuc

SEQ ID NO: 1454815 - RNA, 19 nt, Artificial Sequence
  Description of Artificial Sequence: Synthetic oligonucleotide
auguuuacgugaacaccua

SEQ ID NO: 1454816 - RNA, 19 nt, Artificial Sequence
  Description of Artificial Sequence: Synthetic oligonucleotide
caaacgugguaaacaugcu

SEQ ID NO: 1454817 - RNA, 19 nt, Artificial Sequence
  Description of Artificial Sequence: Synthetic oligonucleotide
gacuccgacuucggcuccc

SEQ ID NO: 1454818 - RNA, 19 nt, Artificial Sequence
  Description of Artificial Sequence: Synthetic oligonucleotide
ccuaucgccaaaucugcaa

SEQ ID NO: 1454819 - RNA, 19 nt, Artificial Sequence
  Description of Artificial Sequence: Synthetic oligonucleotide
accuaucgccaaaucugca

SEQ ID NO: 1454820 - RNA, 19 nt, Artificial Sequence
  Description of Artificial Sequence: Synthetic oligonucleotide
ugcgccucucacgacuuuu

SEQ ID NO: 1454821 - RNA, 19 nt, Artificial Sequence
  Description of Artificial Sequence: Synthetic oligonucleotide
cgaacuaguccaaucugga

SEQ ID NO: 1454822 - RNA, 19 nt, Artificial Sequence
  Description of Artificial Sequence: Synthetic oligonucleotide
cuucccauucugccuuuaa

SEQ ID NO: 1454823 - RNA, 19 nt, Artificial Sequence
  Description of Artificial Sequence: Synthetic oligonucleotide
ggucagugaacugcgccuc

SEQ ID NO: 1454824 - RNA, 19 nt, Artificial Sequence
  Description of Artificial Sequence: Synthetic oligonucleotide
auugccccucagaugcggu

SEQ ID NO: 1454825 - RNA, 19 nt, Artificial Sequence
  Description of Artificial Sequence: Synthetic oligonucleotide
cucccgcuuuggcuucggg

SEQ ID NO: 1454826 - RNA, 19 nt, Artificial Sequence
  Description of Artificial Sequence: Synthetic oligonucleotide
ggcucgaucuuucuccagu

SEQ ID NO: 1454827 - RNA, 19 nt, Artificial Sequence
  Description of Artificial Sequence: Synthetic oligonucleotide
ccucuugcugcgccaauuc

SEQ ID NO: 1454828 - RNA, 19 nt, Artificial Sequence
  Description of Artificial Sequence: Synthetic oligonucleotide
ccguuucucuuguaggaga

SEQ ID NO: 1454829 - RNA, 19 nt, Artificial Sequence
  Description of Artificial Sequence: Synthetic oligonucleotide
ccuccucucaaaauucuua

SEQ ID NO: 1454830 - RNA, 19 nt, Artificial Sequence
  Description of Artificial Sequence: Synthetic oligonucleotide
cguuguugggauuucugaa

SEQ ID NO: 1454831 - RNA, 19 nt, Artificial Sequence
  Description of Artificial Sequence: Synthetic oligonucleotide
cugccaagugccaccauuu

SEQ ID NO: 1454832 - RNA, 19 nt, Artificial Sequence
  Description of Artificial Sequence: Synthetic oligonucleotide
ccgcuuuggcuucgggucc

SEQ ID NO: 1454833 - RNA, 19 nt, Artificial Sequence
  Description of Artificial Sequence: Synthetic oligonucleotide
cuuuggcuucggguccgac

SEQ ID NO: 1454834 - RNA, 19 nt, Artificial Sequence
  Description of Artificial Sequence: Synthetic oligonucleotide
gugccaccauuuuccaacu

SEQ ID NO: 1454835 - RNA, 19 nt, Artificial Sequence
  Description of Artificial Sequence: Synthetic oligonucleotide
gcucgaucuuucuccagua

SEQ ID NO: 1454836 - RNA, 19 nt, Artificial Sequence
  Description of Artificial Sequence: Synthetic oligonucleotide
aggcuugaaucagggucau

SEQ ID NO: 1454837 - RNA, 19 nt, Artificial Sequence
  Description of Artificial Sequence: Synthetic oligonucleotide
uuccaggggcauggacugu

SEQ ID NO: 1454838 - RNA, 19 nt, Artificial Sequence
  Description of Artificial Sequence: Synthetic oligonucleotide
aaguugcagcugaccuuaa

SEQ ID NO: 1454839 - RNA, 19 nt, Artificial Sequence
  Description of Artificial Sequence: Synthetic oligonucleotide
gcaguacaucgugauagaa

SEQ ID NO: 1454840 - RNA, 19 nt, Artificial Sequence
  Description of Artificial Sequence: Synthetic oligonucleotide
ugccuccguuuccuccguc

SEQ ID NO: 1454841 - RNA, 19 nt, Artificial Sequence
  Description of Artificial Sequence: Synthetic oligonucleotide
gucagugaacugcgccucu

SEQ ID NO: 1454842 - RNA, 19 nt, Artificial Sequence
  Description of Artificial Sequence: Synthetic oligonucleotide
cgccaauucugcaucucuc

SEQ ID NO: 1454843 - RNA, 19 nt, Artificial Sequence
  Description of Artificial Sequence: Synthetic oligonucleotide
ccugcgguuccuccggcuc

SEQ ID NO: 1454844 - RNA, 19 nt, Artificial Sequence
  Description of Artificial Sequence: Synthetic oligonucleotide
gcgguuccaaguugcagcu

SEQ ID NO: 1454845 - RNA, 19 nt, Artificial Sequence
  Description of Artificial Sequence: Synthetic oligonucleotide
gggcagaauucgcacugaa

SEQ ID NO: 1454846 - RNA, 19 nt, Artificial Sequence
  Description of Artificial Sequence: Synthetic oligonucleotide
acugcgccucucacgacuu

SEQ ID NO: 1454847 - RNA, 19 nt, Artificial Sequence
  Description of Artificial Sequence: Synthetic oligonucleotide
guguguguguguguauaau

SEQ ID NO: 1454848 - RNA, 19 nt, Artificial Sequence
  Description of Artificial Sequence: Synthetic oligonucleotide
cgccucucacgacuuuucg

SEQ ID NO: 1454849 - RNA, 19 nt, Artificial Sequence
  Description of Artificial Sequence: Synthetic oligonucleotide
gucacguguuugugagacu

SEQ ID NO: 1454850 - RNA, 19 nt, Artificial Sequence
  Description of Artificial Sequence: Synthetic oligonucleotide
cuuggacacugcuguacuu

SEQ ID NO: 1454851 - RNA, 19 nt, Artificial Sequence
  Description of Artificial Sequence: Synthetic oligonucleotide
cuucuugaccugccauagu

SEQ ID NO: 1454852 - RNA, 19 nt, Artificial Sequence
  Description of Artificial Sequence: Synthetic oligonucleotide
ccuccguuuccuccgucuc

SEQ ID NO: 1454853 - RNA, 19 nt, Artificial Sequence
  Description of Artificial Sequence: Synthetic oligonucleotide
cuccguuuccuccgucucu

SEQ ID NO: 1454854 - RNA, 19 nt, Artificial Sequence
  Description of Artificial Sequence: Synthetic oligonucleotide
ggacaauuggcucgaucuu

SEQ ID NO: 1454855 - RNA, 19 nt, Artificial Sequence
  Description of Artificial Sequence: Synthetic oligonucleotide
gccucucacgacuuuucgu

SEQ ID NO: 1454856 - RNA, 19 nt, Artificial Sequence
  Description of Artificial Sequence: Synthetic oligonucleotide
gcgccaauucugcaucucu

SEQ ID NO: 1454857 - RNA, 19 nt, Artificial Sequence
  Description of Artificial Sequence: Synthetic oligonucleotide
cucaaucgggcgagcuccu

SEQ ID NO: 1454858 - RNA, 19 nt, Artificial Sequence
  Description of Artificial Sequence: Synthetic oligonucleotide
ggacuugauguggggaagu

SEQ ID NO: 1454859 - RNA, 19 nt, Artificial Sequence
  Description of Artificial Sequence: Synthetic oligonucleotide
ccguuuucgagcugccucu

SEQ ID NO: 1454860 - RNA, 19 nt, Artificial Sequence
  Description of Artificial Sequence: Synthetic oligonucleotide
ggcauggacugugaucccu

SEQ ID NO: 1454861 - RNA, 19 nt, Artificial Sequence
  Description of Artificial Sequence: Synthetic oligonucleotide
ggcucaccguuucucuugu

SEQ ID NO: 1454862 - RNA, 19 nt, Artificial Sequence
  Description of Artificial Sequence: Synthetic oligonucleotide
cugcgccaauucugcaucu

SEQ ID NO: 1454863 - RNA, 19 nt, Artificial Sequence
  Description of Artificial Sequence: Synthetic oligonucleotide
ccaguacucuuacauccgu

SEQ ID NO: 1454864 - RNA, 19 nt, Artificial Sequence
  Description of Artificial Sequence: Synthetic oligonucleotide
gccuccguuuccuccgucu

SEQ ID NO: 1454865 - RNA, 19 nt, Artificial Sequence
  Description of Artificial Sequence: Synthetic oligonucleotide
ggacacugcuguacuucaa

SEQ ID NO: 1454866 - RNA, 19 nt, Artificial Sequence
  Description of Artificial Sequence: Synthetic oligonucleotide
cuaguccaaucuggagacu

SEQ ID NO: 1454867 - RNA, 19 nt, Artificial Sequence
  Description of Artificial Sequence: Synthetic oligonucleotide
gggcgagcuccugccuccg

SEQ ID NO: 1454868 - RNA, 19 nt, Artificial Sequence
  Description of Artificial Sequence: Synthetic oligonucleotide
gcgccucucacgacuuuuc

SEQ ID NO: 1454869 - RNA, 19 nt, Artificial Sequence
  Description of Artificial Sequence: Synthetic oligonucleotide
cucuucccucaguaaccau

SEQ ID NO: 1454870 - RNA, 19 nt, Artificial Sequence
  Description of Artificial Sequence: Synthetic oligonucleotide
gcucccgcuuuggcuucgg

SEQ ID NO: 1454871 - RNA, 19 nt, Artificial Sequence
  Description of Artificial Sequence: Synthetic oligonucleotide
cgacuuuucgucacguguu

SEQ ID NO: 1454872 - RNA, 19 nt, Artificial Sequence
  Description of Artificial Sequence: Synthetic oligonucleotide
cgugggcgguucuggguuc

SEQ ID NO: 1454873 - RNA, 19 nt, Artificial Sequence
  Description of Artificial Sequence: Synthetic oligonucleotide
cgugguaaacaugcucuua

SEQ ID NO: 1454874 - RNA, 19 nt, Artificial Sequence
  Description of Artificial Sequence: Synthetic oligonucleotide
ccucuuggacacugcugua

SEQ ID NO: 1454875 - RNA, 19 nt, Artificial Sequence
  Description of Artificial Sequence: Synthetic oligonucleotide
ccugucaggcucaccguuu

SEQ ID NO: 1454876 - RNA, 19 nt, Artificial Sequence
  Description of Artificial Sequence: Synthetic oligonucleotide
gcgagcuccugccuccguu

SEQ ID NO: 1454877 - RNA, 19 nt, Artificial Sequence
  Description of Artificial Sequence: Synthetic oligonucleotide
cgucuucuugaccugccau

SEQ ID NO: 1454878 - RNA, 19 nt, Artificial Sequence
  Description of Artificial Sequence: Synthetic oligonucleotide
cuccucuugcugcgccaau

SEQ ID NO: 1454879 - RNA, 19 nt, Artificial Sequence
  Description of Artificial Sequence: Synthetic oligonucleotide
ccgacuucggcucccgcuu

SEQ ID NO: 1454880 - RNA, 19 nt, Artificial Sequence
  Description of Artificial Sequence: Synthetic oligonucleotide
gcucaccguuucucuugua

SEQ ID NO: 1454881 - RNA, 19 nt, Artificial Sequence
  Description of Artificial Sequence: Synthetic oligonucleotide
ccgugggcgguucuggguu

SEQ ID NO: 1454882 - RNA, 19 nt, Artificial Sequence
  Description of Artificial Sequence: Synthetic oligonucleotide
cguguuugugagacuucuu

SEQ ID NO: 1454883 - RNA, 19 nt, Artificial Sequence
  Description of Artificial Sequence: Synthetic oligonucleotide
ggcgagcuccugccuccgu

SEQ ID NO: 1454884 - RNA, 19 nt, Artificial Sequence
  Description of Artificial Sequence: Synthetic oligonucleotide
gucuggacucaggcuccuu

SEQ ID NO: 1454885 - RNA, 19 nt, Artificial Sequence
  Description of Artificial Sequence: Synthetic oligonucleotide
cugcgccucucacgacuuu

SEQ ID NO: 1454886 - RNA, 19 nt, Artificial Sequence
  Description of Artificial Sequence: Synthetic oligonucleotide
cguuuucgagcugccucuu

SEQ ID NO: 1454887 - RNA, 19 nt, Artificial Sequence
  Description of Artificial Sequence: Synthetic oligonucleotide
acaaaaucgaacucaaucc

SEQ ID NO: 1454888 - RNA, 19 nt, Artificial Sequence
  Description of Artificial Sequence: Synthetic oligonucleotide
aauauauaaagacgugcgc

SEQ ID NO: 1454889 - RNA, 19 nt, Artificial Sequence
  Description of Artificial Sequence: Synthetic oligonucleotide
aaaaccuaagucucaagac

SEQ ID NO: 1454890 - RNA, 19 nt, Artificial Sequence
  Description of Artificial Sequence: Synthetic oligonucleotide
uaaccaauauauaaagacg

SEQ ID NO: 1454891 - RNA, 19 nt, Artificial Sequence
  Description of Artificial Sequence: Synthetic oligonucleotide
auauauaaagacgugcgcc

SEQ ID NO: 1454892 - RNA, 19 nt, Artificial Sequence
  Description of Artificial Sequence: Synthetic oligonucleotide
guuuuaaugcaucauacag

SEQ ID NO: 1454893 - RNA, 19 nt, Artificial Sequence
  Description of Artificial Sequence: Synthetic oligonucleotide
caauauauaaagacgugcg

SEQ ID NO: 1454894 - RNA, 19 nt, Artificial Sequence
  Description of Artificial Sequence: Synthetic oligonucleotide
uaagucucaagacacauca

SEQ ID NO: 1454895 - RNA, 19 nt, Artificial Sequence
  Description of Artificial Sequence: Synthetic oligonucleotide
agauuuguauccuacagca

SEQ ID NO: 1454896 - RNA, 19 nt, Artificial Sequence
  Description of Artificial Sequence: Synthetic oligonucleotide
aaaccuaagucucaagaca

SEQ ID NO: 1454897 - RNA, 19 nt, Artificial Sequence
  Description of Artificial Sequence: Synthetic oligonucleotide
aguuagggaagaaugaggc

SEQ ID NO: 1454898 - RNA, 19 nt, Artificial Sequence
  Description of Artificial Sequence: Synthetic oligonucleotide
auagauuuguauccuacag

SEQ ID NO: 1454899 - RNA, 19 nt, Artificial Sequence
  Description of Artificial Sequence: Synthetic oligonucleotide
ugugauaugcucaggggag

SEQ ID NO: 1454900 - RNA, 19 nt, Artificial Sequence
  Description of Artificial Sequence: Synthetic oligonucleotide
cucuaaaucccucuggacg

SEQ ID NO: 1454901 - RNA, 19 nt, Artificial Sequence
  Description of Artificial Sequence: Synthetic oligonucleotide
ucguaaccaauauauaaag

SEQ ID NO: 1454902 - RNA, 19 nt, Artificial Sequence
  Description of Artificial Sequence: Synthetic oligonucleotide
auaaucggcaccucguaac

SEQ ID NO: 1454903 - RNA, 19 nt, Artificial Sequence
  Description of Artificial Sequence: Synthetic oligonucleotide
uauccuacagcacaguuuc

SEQ ID NO: 1454904 - RNA, 19 nt, Artificial Sequence
  Description of Artificial Sequence: Synthetic oligonucleotide
uucaaccaacaaaagaacc

SEQ ID NO: 1454905 - RNA, 19 nt, Artificial Sequence
  Description of Artificial Sequence: Synthetic oligonucleotide
aauagauuuguauccuaca

SEQ ID NO: 1454906 - RNA, 19 nt, Artificial Sequence
  Description of Artificial Sequence: Synthetic oligonucleotide
aaccaauauauaaagacgu

SEQ ID NO: 1454907 - RNA, 19 nt, Artificial Sequence
  Description of Artificial Sequence: Synthetic oligonucleotide
uacacugguauauuuaaga

SEQ ID NO: 1454908 - RNA, 19 nt, Artificial Sequence
  Description of Artificial Sequence: Synthetic oligonucleotide
cauagugucuuuaacuggc

SEQ ID NO: 1454909 - RNA, 19 nt, Artificial Sequence
  Description of Artificial Sequence: Synthetic oligonucleotide
acacugguauauuuaagac

SEQ ID NO: 1454910 - RNA, 19 nt, Artificial Sequence
  Description of Artificial Sequence: Synthetic oligonucleotide
ugccauagcgaccugaagc

SEQ ID NO: 1454911 - RNA, 19 nt, Artificial Sequence
  Description of Artificial Sequence: Synthetic oligonucleotide
aagaagguagcaggaaccc

SEQ ID NO: 1454912 - RNA, 19 nt, Artificial Sequence
  Description of Artificial Sequence: Synthetic oligonucleotide
aaccuaagucucaagacac

SEQ ID NO: 1454913 - RNA, 19 nt, Artificial Sequence
  Description of Artificial Sequence: Synthetic oligonucleotide
aaaggagagugcucuaaag

SEQ ID NO: 1454914 - RNA, 19 nt, Artificial Sequence
  Description of Artificial Sequence: Synthetic oligonucleotide
uagcucacgucauucaucg

SEQ ID NO: 1454915 - RNA, 19 nt, Artificial Sequence
  Description of Artificial Sequence: Synthetic oligonucleotide
uauauaaagacgugcgccu

SEQ ID NO: 1454916 - RNA, 19 nt, Artificial Sequence
  Description of Artificial Sequence: Synthetic oligonucleotide
uuuaacuggcaagaagugg

SEQ ID NO: 1454917 - RNA, 19 nt, Artificial Sequence
  Description of Artificial Sequence: Synthetic oligonucleotide
uagauuuguauccuacagc

SEQ ID NO: 1454918 - RNA, 19 nt, Artificial Sequence
  Description of Artificial Sequence: Synthetic oligonucleotide
ucauagugucuuuaacugg

SEQ ID NO: 1454919 - RNA, 19 nt, Artificial Sequence
  Description of Artificial Sequence: Synthetic oligonucleotide
aaugcaccacccucuuugc

SEQ ID NO: 1454920 - RNA, 19 nt, Artificial Sequence
  Description of Artificial Sequence: Synthetic oligonucleotide
gucauagugucuuuaacug

SEQ ID NO: 1454921 - RNA, 19 nt, Artificial Sequence
  Description of Artificial Sequence: Synthetic oligonucleotide
ggagacagcauugagaagg

SEQ ID NO: 1454922 - RNA, 19 nt, Artificial Sequence
  Description of Artificial Sequence: Synthetic oligonucleotide
aagacaguuacgucaccag

SEQ ID NO: 1454923 - RNA, 19 nt, Artificial Sequence
  Description of Artificial Sequence: Synthetic oligonucleotide
aacucaauccauccaagaa

SEQ ID NO: 1454924 - RNA, 19 nt, Artificial Sequence
  Description of Artificial Sequence: Synthetic oligonucleotide
auggacuacggcaagaagg

SEQ ID NO: 1454925 - RNA, 19 nt, Artificial Sequence
  Description of Artificial Sequence: Synthetic oligonucleotide
aaaucgaacucaauccauc

SEQ ID NO: 1454926 - RNA, 19 nt, Artificial Sequence
  Description of Artificial Sequence: Synthetic oligonucleotide
agagacuggcaauaggaag

SEQ ID NO: 1454927 - RNA, 19 nt, Artificial Sequence
  Description of Artificial Sequence: Synthetic oligonucleotide
aagugggcaggauucuugg

SEQ ID NO: 1454928 - RNA, 19 nt, Artificial Sequence
  Description of Artificial Sequence: Synthetic oligonucleotide
ugaguuagggaagaaugag

SEQ ID NO: 1454929 - RNA, 19 nt, Artificial Sequence
  Description of Artificial Sequence: Synthetic oligonucleotide
ugguauauuuaagacaaac

SEQ ID NO: 1454930 - RNA, 19 nt, Artificial Sequence
  Description of Artificial Sequence: Synthetic oligonucleotide
uggcaauaggaagaggugg

SEQ ID NO: 1454931 - RNA, 19 nt, Artificial Sequence
  Description of Artificial Sequence: Synthetic oligonucleotide
auucaaccaacaaaagaac

SEQ ID NO: 1454932 - RNA, 19 nt, Artificial Sequence
  Description of Artificial Sequence: Synthetic oligonucleotide
caugugauaugcucagggg

SEQ ID NO: 1454933 - RNA, 19 nt, Artificial Sequence
  Description of Artificial Sequence: Synthetic oligonucleotide
uucacauuacggaucguac

SEQ ID NO: 1454934 - RNA, 19 nt, Artificial Sequence
  Description of Artificial Sequence: Synthetic oligonucleotide
uggacuacggcaagaaggu

SEQ ID NO: 1454935 - RNA, 19 nt, Artificial Sequence
  Description of Artificial Sequence: Synthetic oligonucleotide
acaguuacgucaccagccg

SEQ ID NO: 1454936 - RNA, 19 nt, Artificial Sequence
  Description of Artificial Sequence: Synthetic oligonucleotide
aaccugaagacaguuacgu

SEQ ID NO: 1454937 - RNA, 19 nt, Artificial Sequence
  Description of Artificial Sequence: Synthetic oligonucleotide
caagaagugggcaggauuc

SEQ ID NO: 1454938 - RNA, 19 nt, Artificial Sequence
  Description of Artificial Sequence: Synthetic oligonucleotide
agcgaccugaagcaucugc

SEQ ID NO: 1454939 - RNA, 19 nt, Artificial Sequence
  Description of Artificial Sequence: Synthetic oligonucleotide
ucgaacucaauccauccaa

SEQ ID NO: 1454940 - RNA, 19 nt, Artificial Sequence
  Description of Artificial Sequence: Synthetic oligonucleotide
aaaauagauuuguauccua

SEQ ID NO: 1454941 - RNA, 19 nt, Artificial Sequence
  Description of Artificial Sequence: Synthetic oligonucleotide
uacggaucguacaacaaaa

SEQ ID NO: 1454942 - RNA, 19 nt, Artificial Sequence
  Description of Artificial Sequence: Synthetic oligonucleotide
acugugugccccuuuggcg

SEQ ID NO: 1454943 - RNA, 19 nt, Artificial Sequence
  Description of Artificial Sequence: Synthetic oligonucleotide
gaguuagggaagaaugagg

SEQ ID NO: 1454944 - RNA, 19 nt, Artificial Sequence
  Description of Artificial Sequence: Synthetic oligonucleotide
augugauaugcucagggga

SEQ ID NO: 1454945 - RNA, 19 nt, Artificial Sequence
  Description of Artificial Sequence: Synthetic oligonucleotide
uuacggaucguacaacaaa

SEQ ID NO: 1454946 - RNA, 19 nt, Artificial Sequence
  Description of Artificial Sequence: Synthetic oligonucleotide
uucaucgauaaaagaauau

SEQ ID NO: 1454947 - RNA, 19 nt, Artificial Sequence
  Description of Artificial Sequence: Synthetic oligonucleotide
gacaguuacgucaccagcc

SEQ ID NO: 1454948 - RNA, 19 nt, Artificial Sequence
  Description of Artificial Sequence: Synthetic oligonucleotide
auauggguugugcuguguc

SEQ ID NO: 1454949 - RNA, 19 nt, Artificial Sequence
  Description of Artificial Sequence: Synthetic oligonucleotide
caguucacauuacggaucg

SEQ ID NO: 1454950 - RNA, 19 nt, Artificial Sequence
  Description of Artificial Sequence: Synthetic oligonucleotide
uggguuuuaaugcaucaua

SEQ ID NO: 1454951 - RNA, 19 nt, Artificial Sequence
  Description of Artificial Sequence: Synthetic oligonucleotide
acugcaauugggcaccaug

SEQ ID NO: 1454952 - RNA, 19 nt, Artificial Sequence
  Description of Artificial Sequence: Synthetic oligonucleotide
ugcauaaucggcaccucgu

SEQ ID NO: 1454953 - RNA, 19 nt, Artificial Sequence
  Description of Artificial Sequence: Synthetic oligonucleotide
caaaaccuaagucucaaga

SEQ ID NO: 1454954 - RNA, 19 nt, Artificial Sequence
  Description of Artificial Sequence: Synthetic oligonucleotide
ggugaaaccugccaggggc

SEQ ID NO: 1454955 - RNA, 19 nt, Artificial Sequence
  Description of Artificial Sequence: Synthetic oligonucleotide
uaaucggcaccucguaacc

SEQ ID NO: 1454956 - RNA, 19 nt, Artificial Sequence
  Description of Artificial Sequence: Synthetic oligonucleotide
aaaugaggagacagcauug

SEQ ID NO: 1454957 - RNA, 19 nt, Artificial Sequence
  Description of Artificial Sequence: Synthetic oligonucleotide
cucaauccauccaagaaga

SEQ ID NO: 1454958 - RNA, 19 nt, Artificial Sequence
  Description of Artificial Sequence: Synthetic oligonucleotide
augcauaaucggcaccucg

SEQ ID NO: 1454959 - RNA, 19 nt, Artificial Sequence
  Description of Artificial Sequence: Synthetic oligonucleotide
gccacuauccacuggacgg

SEQ ID NO: 1454960 - RNA, 19 nt, Artificial Sequence
  Description of Artificial Sequence: Synthetic oligonucleotide
aaugcaucauacagaagga

SEQ ID NO: 1454961 - RNA, 19 nt, Artificial Sequence
  Description of Artificial Sequence: Synthetic oligonucleotide
aucucuaaaucccucugga

SEQ ID NO: 1454962 - RNA, 19 nt, Artificial Sequence
  Description of Artificial Sequence: Synthetic oligonucleotide
gaucguacaacaaaacaaa

SEQ ID NO: 1454963 - RNA, 19 nt, Artificial Sequence
  Description of Artificial Sequence: Synthetic oligonucleotide
acuacggcaagaagguagc

SEQ ID NO: 1454964 - RNA, 19 nt, Artificial Sequence
  Description of Artificial Sequence: Synthetic oligonucleotide
caaccuuccacauccuccc

SEQ ID NO: 1454965 - RNA, 19 nt, Artificial Sequence
  Description of Artificial Sequence: Synthetic oligonucleotide
agugacgacugugugcccc

SEQ ID NO: 1454966 - RNA, 19 nt, Artificial Sequence
  Description of Artificial Sequence: Synthetic oligonucleotide
uauggguugugcugugucc

SEQ ID NO: 1454967 - RNA, 19 nt, Artificial Sequence
  Description of Artificial Sequence: Synthetic oligonucleotide
acaaaacgacuauacaaaa

SEQ ID NO: 1454968 - RNA, 19 nt, Artificial Sequence
  Description of Artificial Sequence: Synthetic oligonucleotide
acgucauucaucgauaaaa

SEQ ID NO: 1454969 - RNA, 19 nt, Artificial Sequence
  Description of Artificial Sequence: Synthetic oligonucleotide
ucaacccaguguaaugugu

SEQ ID NO: 1454970 - RNA, 19 nt, Artificial Sequence
  Description of Artificial Sequence: Synthetic oligonucleotide
uggcuggaucucuaaaucc

SEQ ID NO: 1454971 - RNA, 19 nt, Artificial Sequence
  Description of Artificial Sequence: Synthetic oligonucleotide
auggguugugcuguguccc

SEQ ID NO: 1454972 - RNA, 19 nt, Artificial Sequence
  Description of Artificial Sequence: Synthetic oligonucleotide
aaagacgugcgccucgcau

SEQ ID NO: 1454973 - RNA, 19 nt, Artificial Sequence
  Description of Artificial Sequence: Synthetic oligonucleotide
ugcaauugggcaccaugug

SEQ ID NO: 1454974 - RNA, 19 nt, Artificial Sequence
  Description of Artificial Sequence: Synthetic oligonucleotide
agcauugagaaggagggcu

SEQ ID NO: 1454975 - RNA, 19 nt, Artificial Sequence
  Description of Artificial Sequence: Synthetic oligonucleotide
uccagugacgacugugugc

SEQ ID NO: 1454976 - RNA, 19 nt, Artificial Sequence
  Description of Artificial Sequence: Synthetic oligonucleotide
uuaaugcaucauacagaag

SEQ ID NO: 1454977 - RNA, 19 nt, Artificial Sequence
  Description of Artificial Sequence: Synthetic oligonucleotide
caaaaucgaacucaaucca

SEQ ID NO: 1454978 - RNA, 19 nt, Artificial Sequence
  Description of Artificial Sequence: Synthetic oligonucleotide
auaaagacgugcgccucgc

SEQ ID NO: 1454979 - RNA, 19 nt, Artificial Sequence
  Description of Artificial Sequence: Synthetic oligonucleotide
ugcaccacccucuuugccu

SEQ ID NO: 1454980 - RNA, 19 nt, Artificial Sequence
  Description of Artificial Sequence: Synthetic oligonucleotide
ucgcauauggguugugcug

SEQ ID NO: 1454981 - RNA, 19 nt, Artificial Sequence
  Description of Artificial Sequence: Synthetic oligonucleotide
aaaucccucuggacgcucc

SEQ ID NO: 1454982 - RNA, 19 nt, Artificial Sequence
  Description of Artificial Sequence: Synthetic oligonucleotide
agaagguagcaggaacccc

SEQ ID NO: 1454983 - RNA, 19 nt, Artificial Sequence
  Description of Artificial Sequence: Synthetic oligonucleotide
uucaacccaguguaaugug

SEQ ID NO: 1454984 - RNA, 19 nt, Artificial Sequence
  Description of Artificial Sequence: Synthetic oligonucleotide
uguauccuacagcacaguu

SEQ ID NO: 1454985 - RNA, 19 nt, Artificial Sequence
  Description of Artificial Sequence: Synthetic oligonucleotide
cuacacugguauauuuaag

SEQ ID NO: 1454986 - RNA, 19 nt, Artificial Sequence
  Description of Artificial Sequence: Synthetic oligonucleotide
auauaaagacgugcgccuc

SEQ ID NO: 1454987 - RNA, 19 nt, Artificial Sequence
  Description of Artificial Sequence: Synthetic oligonucleotide
cucuggacgcuccaucugg

SEQ ID NO: 1454988 - RNA, 19 nt, Artificial Sequence
  Description of Artificial Sequence: Synthetic oligonucleotide
uugcaaagugggcugcaug

SEQ ID NO: 1454989 - RNA, 19 nt, Artificial Sequence
  Description of Artificial Sequence: Synthetic oligonucleotide
ucucuaaaucccucuggac

SEQ ID NO: 1454990 - RNA, 19 nt, Artificial Sequence
  Description of Artificial Sequence: Synthetic oligonucleotide
uagcccagcacuccaugag

SEQ ID NO: 1454991 - RNA, 19 nt, Artificial Sequence
  Description of Artificial Sequence: Synthetic oligonucleotide
aucgcauauggguugugcu

SEQ ID NO: 1454992 - RNA, 19 nt, Artificial Sequence
  Description of Artificial Sequence: Synthetic oligonucleotide
uuaccaggagcagagacua

SEQ ID NO: 1454993 - RNA, 19 nt, Artificial Sequence
  Description of Artificial Sequence: Synthetic oligonucleotide
guaaugcauaaucggcacc

SEQ ID NO: 1454994 - RNA, 19 nt, Artificial Sequence
  Description of Artificial Sequence: Synthetic oligonucleotide
gaacucaauccauccaaga

SEQ ID NO: 1454995 - RNA, 19 nt, Artificial Sequence
  Description of Artificial Sequence: Synthetic oligonucleotide
aaagugggcugcauggacu

SEQ ID NO: 1454996 - RNA, 19 nt, Artificial Sequence
  Description of Artificial Sequence: Synthetic oligonucleotide
cauuacggaucguacaaca

SEQ ID NO: 1454997 - RNA, 19 nt, Artificial Sequence
  Description of Artificial Sequence: Synthetic oligonucleotide
cuuggucccaaaaccuaag

SEQ ID NO: 1454998 - RNA, 19 nt, Artificial Sequence
  Description of Artificial Sequence: Synthetic oligonucleotide
gugggcaggauucuuggug

SEQ ID NO: 1454999 - RNA, 19 nt, Artificial Sequence
  Description of Artificial Sequence: Synthetic oligonucleotide
cuaccagaugcagaggaag

SEQ ID NO: 1455000 - RNA, 19 nt, Artificial Sequence
  Description of Artificial Sequence: Synthetic oligonucleotide
ucuagcccagcacuccaug

SEQ ID NO: 1455001 - RNA, 19 nt, Artificial Sequence
  Description of Artificial Sequence: Synthetic oligonucleotide
gguaaugcauaaucggcac

SEQ ID NO: 1455002 - RNA, 19 nt, Artificial Sequence
  Description of Artificial Sequence: Synthetic oligonucleotide
agcugcucacugcaauugg

SEQ ID NO: 1455003 - RNA, 19 nt, Artificial Sequence
  Description of Artificial Sequence: Synthetic oligonucleotide
cucacugcaauugggcacc

SEQ ID NO: 1455004 - RNA, 19 nt, Artificial Sequence
  Description of Artificial Sequence: Synthetic oligonucleotide
gaagacaguuacgucacca

SEQ ID NO: 1455005 - RNA, 19 nt, Artificial Sequence
  Description of Artificial Sequence: Synthetic oligonucleotide
acauuacggaucguacaac

SEQ ID NO: 1455006 - RNA, 19 nt, Artificial Sequence
  Description of Artificial Sequence: Synthetic oligonucleotide
gucauucaucgauaaaaga

SEQ ID NO: 1455007 - RNA, 19 nt, Artificial Sequence
  Description of Artificial Sequence: Synthetic oligonucleotide
cugacugcucugucuagcc

SEQ ID NO: 1455008 - RNA, 19 nt, Artificial Sequence
  Description of Artificial Sequence: Synthetic oligonucleotide
cauagcgaccugaagcauc

SEQ ID NO: 1455009 - RNA, 19 nt, Artificial Sequence
  Description of Artificial Sequence: Synthetic oligonucleotide
uuggucccaaaaccuaagu

SEQ ID NO: 1455010 - RNA, 19 nt, Artificial Sequence
  Description of Artificial Sequence: Synthetic oligonucleotide
auagcucacgucauucauc

SEQ ID NO: 1455011 - RNA, 19 nt, Artificial Sequence
  Description of Artificial Sequence: Synthetic oligonucleotide
ccaugugauaugcucaggg

SEQ ID NO: 1455012 - RNA, 19 nt, Artificial Sequence
  Description of Artificial Sequence: Synthetic oligonucleotide
agacgugcgccucgcauag

SEQ ID NO: 1455013 - RNA, 19 nt, Artificial Sequence
  Description of Artificial Sequence: Synthetic oligonucleotide
ugauaugcucaggggagcc

SEQ ID NO: 1455014 - RNA, 19 nt, Artificial Sequence
  Description of Artificial Sequence: Synthetic oligonucleotide
cauucaucgauaaaagaau

SEQ ID NO: 1455015 - RNA, 19 nt, Artificial Sequence
  Description of Artificial Sequence: Synthetic oligonucleotide
uucccauucugcacuugug

SEQ ID NO: 1455016 - RNA, 19 nt, Artificial Sequence
  Description of Artificial Sequence: Synthetic oligonucleotide
aagacgugcgccucgcaua

SEQ ID NO: 1455017 - RNA, 19 nt, Artificial Sequence
  Description of Artificial Sequence: Synthetic oligonucleotide
gaucgcauauggguugugc

SEQ ID NO: 1455018 - RNA, 19 nt, Artificial Sequence
  Description of Artificial Sequence: Synthetic oligonucleotide
ucccaaaaccuaagucuca

SEQ ID NO: 1455019 - RNA, 19 nt, Artificial Sequence
  Description of Artificial Sequence: Synthetic oligonucleotide
aacuacacugguauauuua

SEQ ID NO: 1455020 - RNA, 19 nt, Artificial Sequence
  Description of Artificial Sequence: Synthetic oligonucleotide
ggcuccugaucgcauaugg

SEQ ID NO: 1455021 - RNA, 19 nt, Artificial Sequence
  Description of Artificial Sequence: Synthetic oligonucleotide
augaguuagggaagaauga

SEQ ID NO: 1455022 - RNA, 19 nt, Artificial Sequence
  Description of Artificial Sequence: Synthetic oligonucleotide
gcucuaaaggcuuccauca

SEQ ID NO: 1455023 - RNA, 19 nt, Artificial Sequence
  Description of Artificial Sequence: Synthetic oligonucleotide
ucuggacgcuccaucuggc

SEQ ID NO: 1455024 - RNA, 19 nt, Artificial Sequence
  Description of Artificial Sequence: Synthetic oligonucleotide
ggaucguacaacaaaacaa

SEQ ID NO: 1455025 - RNA, 19 nt, Artificial Sequence
  Description of Artificial Sequence: Synthetic oligonucleotide
gguuuuaaugcaucauaca

SEQ ID NO: 1455026 - RNA, 19 nt, Artificial Sequence
  Description of Artificial Sequence: Synthetic oligonucleotide
augcgugcgagcugcucac

SEQ ID NO: 1455027 - RNA, 19 nt, Artificial Sequence
  Description of Artificial Sequence: Synthetic oligonucleotide
ggucccaaaaccuaagucu

SEQ ID NO: 1455028 - RNA, 19 nt, Artificial Sequence
  Description of Artificial Sequence: Synthetic oligonucleotide
ugggcaccaugugauaugc

SEQ ID NO: 1455029 - RNA, 19 nt, Artificial Sequence
  Description of Artificial Sequence: Synthetic oligonucleotide
gucucaagacacaucagca

SEQ ID NO: 1455030 - RNA, 19 nt, Artificial Sequence
  Description of Artificial Sequence: Synthetic oligonucleotide
cuuuggcgggccaggaggc

SEQ ID NO: 1455031 - RNA, 19 nt, Artificial Sequence
  Description of Artificial Sequence: Synthetic oligonucleotide
ucacgucauucaucgauaa

SEQ ID NO: 1455032 - RNA, 19 nt, Artificial Sequence
  Description of Artificial Sequence: Synthetic oligonucleotide
cucacccuggaucagucuc

SEQ ID NO: 1455033 - RNA, 19 nt, Artificial Sequence
  Description of Artificial Sequence: Synthetic oligonucleotide
acuauccacuggacggucc

SEQ ID NO: 1455034 - RNA, 19 nt, Artificial Sequence
  Description of Artificial Sequence: Synthetic oligonucleotide
aguuacgucaccagccgug

SEQ ID NO: 1455035 - RNA, 19 nt, Artificial Sequence
  Description of Artificial Sequence: Synthetic oligonucleotide
aaaucuuguucaacccagu

SEQ ID NO: 1455036 - RNA, 19 nt, Artificial Sequence
  Description of Artificial Sequence: Synthetic oligonucleotide
uccuacagcacaguuucuc

SEQ ID NO: 1455037 - RNA, 19 nt, Artificial Sequence
  Description of Artificial Sequence: Synthetic oligonucleotide
acggaucguacaacaaaac

SEQ ID NO: 1455038 - RNA, 19 nt, Artificial Sequence
  Description of Artificial Sequence: Synthetic oligonucleotide
gguuaccaggagcagagac

SEQ ID NO: 1455039 - RNA, 19 nt, Artificial Sequence
  Description of Artificial Sequence: Synthetic oligonucleotide
aauugggcaccaugugaua

SEQ ID NO: 1455040 - RNA, 19 nt, Artificial Sequence
  Description of Artificial Sequence: Synthetic oligonucleotide
cugguaguugccauagcga

SEQ ID NO: 1455041 - RNA, 19 nt, Artificial Sequence
  Description of Artificial Sequence: Synthetic oligonucleotide
aagucucaagacacaucag

SEQ ID NO: 1455042 - RNA, 19 nt, Artificial Sequence
  Description of Artificial Sequence: Synthetic oligonucleotide
cucgaggggagguuaccag

SEQ ID NO: 1455043 - RNA, 19 nt, Artificial Sequence
  Description of Artificial Sequence: Synthetic oligonucleotide
gcuccugcaaaggagagug

SEQ ID NO: 1455044 - RNA, 19 nt, Artificial Sequence
  Description of Artificial Sequence: Synthetic oligonucleotide
uuguucaacccaguguaau

SEQ ID NO: 1455045 - RNA, 19 nt, Artificial Sequence
  Description of Artificial Sequence: Synthetic oligonucleotide
auagcgaccugaagcaucu

SEQ ID NO: 1455046 - RNA, 19 nt, Artificial Sequence
  Description of Artificial Sequence: Synthetic oligonucleotide
auucaucgauaaaagaaua

SEQ ID NO: 1455047 - RNA, 19 nt, Artificial Sequence
  Description of Artificial Sequence: Synthetic oligonucleotide
ccagugacgacugugugcc

SEQ ID NO: 1455048 - RNA, 19 nt, Artificial Sequence
  Description of Artificial Sequence: Synthetic oligonucleotide
aaucccucuggacgcucca

SEQ ID NO: 1455049 - RNA, 19 nt, Artificial Sequence
  Description of Artificial Sequence: Synthetic oligonucleotide
cuggagucuccaaaggcca

SEQ ID NO: 1455050 - RNA, 19 nt, Artificial Sequence
  Description of Artificial Sequence: Synthetic oligonucleotide
caccucguaaccaauauau

SEQ ID NO: 1455051 - RNA, 19 nt, Artificial Sequence
  Description of Artificial Sequence: Synthetic oligonucleotide
aggguaccuagggaccugc

SEQ ID NO: 1455052 - RNA, 19 nt, Artificial Sequence
  Description of Artificial Sequence: Synthetic oligonucleotide
ggaucucuaaaucccucug

SEQ ID NO: 1455053 - RNA, 19 nt, Artificial Sequence
  Description of Artificial Sequence: Synthetic oligonucleotide
gagcugcucacugcaauug

SEQ ID NO: 1455054 - RNA, 19 nt, Artificial Sequence
  Description of Artificial Sequence: Synthetic oligonucleotide
ucuggccccucucgagggg

SEQ ID NO: 1455055 - RNA, 19 nt, Artificial Sequence
  Description of Artificial Sequence: Synthetic oligonucleotide
aaucggcaccucguaacca

SEQ ID NO: 1455056 - RNA, 19 nt, Artificial Sequence
  Description of Artificial Sequence: Synthetic oligonucleotide
uuccagagacuggcaauag

SEQ ID NO: 1455057 - RNA, 19 nt, Artificial Sequence
  Description of Artificial Sequence: Synthetic oligonucleotide
ccuuuggcgggccaggagg

SEQ ID NO: 1455058 - RNA, 19 nt, Artificial Sequence
  Description of Artificial Sequence: Synthetic oligonucleotide
guuacgucaccagccgugc

SEQ ID NO: 1455059 - RNA, 19 nt, Artificial Sequence
  Description of Artificial Sequence: Synthetic oligonucleotide
guaccuagggaccugcacu

SEQ ID NO: 1455060 - RNA, 19 nt, Artificial Sequence
  Description of Artificial Sequence: Synthetic oligonucleotide
acgugcgccucgcauagcu

SEQ ID NO: 1455061 - RNA, 19 nt, Artificial Sequence
  Description of Artificial Sequence: Synthetic oligonucleotide
aucggcaccucguaaccaa

SEQ ID NO: 1455062 - RNA, 19 nt, Artificial Sequence
  Description of Artificial Sequence: Synthetic oligonucleotide
agagacuaccagaugcaga

SEQ ID NO: 1455063 - RNA, 19 nt, Artificial Sequence
  Description of Artificial Sequence: Synthetic oligonucleotide
cugguggugggaucccagc

SEQ ID NO: 1455064 - RNA, 19 nt, Artificial Sequence
  Description of Artificial Sequence: Synthetic oligonucleotide
aggagacagcauugagaag

SEQ ID NO: 1455065 - RNA, 19 nt, Artificial Sequence
  Description of Artificial Sequence: Synthetic oligonucleotide
cgucauucaucgauaaaag

SEQ ID NO: 1455066 - RNA, 19 nt, Artificial Sequence
  Description of Artificial Sequence: Synthetic oligonucleotide
gccauagcgaccugaagca

SEQ ID NO: 1455067 - RNA, 19 nt, Artificial Sequence
  Description of Artificial Sequence: Synthetic oligonucleotide
gcaauugggcaccauguga

SEQ ID NO: 1455068 - RNA, 19 nt, Artificial Sequence
  Description of Artificial Sequence: Synthetic oligonucleotide
gcccuguggcuccugaucg

SEQ ID NO: 1455069 - RNA, 19 nt, Artificial Sequence
  Description of Artificial Sequence: Synthetic oligonucleotide
gcgguaaugcauaaucggc

SEQ ID NO: 1455070 - RNA, 19 nt, Artificial Sequence
  Description of Artificial Sequence: Synthetic oligonucleotide
uaaagacgugcgccucgca

SEQ ID NO: 1455071 - RNA, 19 nt, Artificial Sequence
  Description of Artificial Sequence: Synthetic oligonucleotide
cagagacuaccagaugcag

SEQ ID NO: 1455072 - RNA, 19 nt, Artificial Sequence
  Description of Artificial Sequence: Synthetic oligonucleotide
aagaaccugaagacaguua

SEQ ID NO: 1455073 - RNA, 19 nt, Artificial Sequence
  Description of Artificial Sequence: Synthetic oligonucleotide
caugcgugcgagcugcuca

SEQ ID NO: 1455074 - RNA, 19 nt, Artificial Sequence
  Description of Artificial Sequence: Synthetic oligonucleotide
aucguacaacaaaacaaaa

SEQ ID NO: 1455075 - RNA, 19 nt, Artificial Sequence
  Description of Artificial Sequence: Synthetic oligonucleotide
ugcauggacuacggcaaga

SEQ ID NO: 1455076 - RNA, 19 nt, Artificial Sequence
  Description of Artificial Sequence: Synthetic oligonucleotide
guucacauuacggaucgua

SEQ ID NO: 1455077 - RNA, 19 nt, Artificial Sequence
  Description of Artificial Sequence: Synthetic oligonucleotide
gugauaugcucaggggagc

SEQ ID NO: 1455078 - RNA, 19 nt, Artificial Sequence
  Description of Artificial Sequence: Synthetic oligonucleotide
cuggacgcuccaucuggcc

SEQ ID NO: 1455079 - RNA, 19 nt, Artificial Sequence
  Description of Artificial Sequence: Synthetic oligonucleotide
auuacggaucguacaacaa

SEQ ID NO: 1455080 - RNA, 19 nt, Artificial Sequence
  Description of Artificial Sequence: Synthetic oligonucleotide
uagccacuauccacuggac

SEQ ID NO: 1455081 - RNA, 19 nt, Artificial Sequence
  Description of Artificial Sequence: Synthetic oligonucleotide
cauaaucggcaccucguaa

SEQ ID NO: 1455082 - RNA, 19 nt, Artificial Sequence
  Description of Artificial Sequence: Synthetic oligonucleotide
caauugggcaccaugugau

SEQ ID NO: 1455083 - RNA, 19 nt, Artificial Sequence
  Description of Artificial Sequence: Synthetic oligonucleotide
cugucuagcccagcacucc

SEQ ID NO: 1455084 - RNA, 19 nt, Artificial Sequence
  Description of Artificial Sequence: Synthetic oligonucleotide
uggcccuggcgcaugcgug

SEQ ID NO: 1455085 - RNA, 19 nt, Artificial Sequence
  Description of Artificial Sequence: Synthetic oligonucleotide
caggugugcggcuguggcc

SEQ ID NO: 1455086 - RNA, 19 nt, Artificial Sequence
  Description of Artificial Sequence: Synthetic oligonucleotide
guucaacccaguguaaugu

SEQ ID NO: 1455087 - RNA, 19 nt, Artificial Sequence
  Description of Artificial Sequence: Synthetic oligonucleotide
guccagugacgacugugug

SEQ ID NO: 1455088 - RNA, 19 nt, Artificial Sequence
  Description of Artificial Sequence: Synthetic oligonucleotide
ccugaucgcauauggguug

SEQ ID NO: 1455089 - RNA, 19 nt, Artificial Sequence
  Description of Artificial Sequence: Synthetic oligonucleotide
cgugcgguaaugcauaauc

SEQ ID NO: 1455090 - RNA, 19 nt, Artificial Sequence
  Description of Artificial Sequence: Synthetic oligonucleotide
ugaaaccugccaggggccu

SEQ ID NO: 1455091 - RNA, 19 nt, Artificial Sequence
  Description of Artificial Sequence: Synthetic oligonucleotide
cagagacuggcaauaggaa

SEQ ID NO: 1455092 - RNA, 19 nt, Artificial Sequence
  Description of Artificial Sequence: Synthetic oligonucleotide
gugcgccucgcauagcuca

SEQ ID NO: 1455093 - RNA, 19 nt, Artificial Sequence
  Description of Artificial Sequence: Synthetic oligonucleotide
auagugucuuuaacuggca

SEQ ID NO: 1455094 - RNA, 19 nt, Artificial Sequence
  Description of Artificial Sequence: Synthetic oligonucleotide
gguaccuagggaccugcac

SEQ ID NO: 1455095 - RNA, 19 nt, Artificial Sequence
  Description of Artificial Sequence: Synthetic oligonucleotide
ugcucaggggagcccugug

SEQ ID NO: 1455096 - RNA, 19 nt, Artificial Sequence
  Description of Artificial Sequence: Synthetic oligonucleotide
caacccaguguaaugugua

SEQ ID NO: 1455097 - RNA, 19 nt, Artificial Sequence
  Description of Artificial Sequence: Synthetic oligonucleotide
gcucaggggagcccugugg

SEQ ID NO: 1455098 - RNA, 19 nt, Artificial Sequence
  Description of Artificial Sequence: Synthetic oligonucleotide
guuaccaggagcagagacu

SEQ ID NO: 1455099 - RNA, 19 nt, Artificial Sequence
  Description of Artificial Sequence: Synthetic oligonucleotide
ccucgcauagcucacguca

SEQ ID NO: 1455100 - RNA, 19 nt, Artificial Sequence
  Description of Artificial Sequence: Synthetic oligonucleotide
ucaccagccgugcgguaau

SEQ ID NO: 1455101 - RNA, 19 nt, Artificial Sequence
  Description of Artificial Sequence: Synthetic oligonucleotide
aggcgguccagugacgacu

SEQ ID NO: 1455102 - RNA, 19 nt, Artificial Sequence
  Description of Artificial Sequence: Synthetic oligonucleotide
cuuguucaacccaguguaa

SEQ ID NO: 1455103 - RNA, 19 nt, Artificial Sequence
  Description of Artificial Sequence: Synthetic oligonucleotide
ugcgccucgcauagcucac

SEQ ID NO: 1455104 - RNA, 19 nt, Artificial Sequence
  Description of Artificial Sequence: Synthetic oligonucleotide
agacagcauugagaaggag

SEQ ID NO: 1455105 - RNA, 19 nt, Artificial Sequence
  Description of Artificial Sequence: Synthetic oligonucleotide
uucucccggagucgugaaa

SEQ ID NO: 1455106 - RNA, 19 nt, Artificial Sequence
  Description of Artificial Sequence: Synthetic oligonucleotide
gugcgagcugcucacugca

SEQ ID NO: 1455107 - RNA, 19 nt, Artificial Sequence
  Description of Artificial Sequence: Synthetic oligonucleotide
ccuagggaccugcacuucc

SEQ ID NO: 1455108 - RNA, 19 nt, Artificial Sequence
  Description of Artificial Sequence: Synthetic oligonucleotide
guugccauagcgaccugaa

SEQ ID NO: 1455109 - RNA, 19 nt, Artificial Sequence
  Description of Artificial Sequence: Synthetic oligonucleotide
ccccaggguaccuagggac

SEQ ID NO: 1455110 - RNA, 19 nt, Artificial Sequence
  Description of Artificial Sequence: Synthetic oligonucleotide
gcaauaggaagaggugggc

SEQ ID NO: 1455111 - RNA, 19 nt, Artificial Sequence
  Description of Artificial Sequence: Synthetic oligonucleotide
uaaaucccucuggacgcuc

SEQ ID NO: 1455112 - RNA, 19 nt, Artificial Sequence
  Description of Artificial Sequence: Synthetic oligonucleotide
accuaagucucaagacaca

SEQ ID NO: 1455113 - RNA, 19 nt, Artificial Sequence
  Description of Artificial Sequence: Synthetic oligonucleotide
ggaucagucucagcagggc

SEQ ID NO: 1455114 - RNA, 19 nt, Artificial Sequence
  Description of Artificial Sequence: Synthetic oligonucleotide
ucggcaccucguaaccaau

SEQ ID NO: 1455115 - RNA, 19 nt, Artificial Sequence
  Description of Artificial Sequence: Synthetic oligonucleotide
ucgcauagcucacgucauu

SEQ ID NO: 1455116 - RNA, 19 nt, Artificial Sequence
  Description of Artificial Sequence: Synthetic oligonucleotide
ugcgagcugcucacugcaa

SEQ ID NO: 1455117 - RNA, 19 nt, Artificial Sequence
  Description of Artificial Sequence: Synthetic oligonucleotide
cugcaaaggagagugcucu

SEQ ID NO: 1455118 - RNA, 19 nt, Artificial Sequence
  Description of Artificial Sequence: Synthetic oligonucleotide
gaggcgguccagugacgac

SEQ ID NO: 1455119 - RNA, 19 nt, Artificial Sequence
  Description of Artificial Sequence: Synthetic oligonucleotide
cguaaccaauauauaaaga

SEQ ID NO: 1455120 - RNA, 19 nt, Artificial Sequence
  Description of Artificial Sequence: Synthetic oligonucleotide
cucucgaggggagguuacc

SEQ ID NO: 1455121 - RNA, 19 nt, Artificial Sequence
  Description of Artificial Sequence: Synthetic oligonucleotide
ugaucgcauauggguugug

SEQ ID NO: 1455122 - RNA, 19 nt, Artificial Sequence
  Description of Artificial Sequence: Synthetic oligonucleotide
cauagcucacgucauucau

SEQ ID NO: 1455123 - RNA, 19 nt, Artificial Sequence
  Description of Artificial Sequence: Synthetic oligonucleotide
agaagugggcaggauucuu

SEQ ID NO: 1455124 - RNA, 19 nt, Artificial Sequence
  Description of Artificial Sequence: Synthetic oligonucleotide
caggggagcccuguggcuc

SEQ ID NO: 1455125 - RNA, 19 nt, Artificial Sequence
  Description of Artificial Sequence: Synthetic oligonucleotide
gguugugcugugucccuca

SEQ ID NO: 1455126 - RNA, 19 nt, Artificial Sequence
  Description of Artificial Sequence: Synthetic oligonucleotide
cacccuggaucagucucag

SEQ ID NO: 1455127 - RNA, 19 nt, Artificial Sequence
  Description of Artificial Sequence: Synthetic oligonucleotide
acgucaccagccgugcggu

SEQ ID NO: 1455128 - RNA, 19 nt, Artificial Sequence
  Description of Artificial Sequence: Synthetic oligonucleotide
gccagaagcgggguggggc

SEQ ID NO: 1455129 - RNA, 19 nt, Artificial Sequence
  Description of Artificial Sequence: Synthetic oligonucleotide
gcagagacuaccagaugca

SEQ ID NO: 1455130 - RNA, 19 nt, Artificial Sequence
  Description of Artificial Sequence: Synthetic oligonucleotide
guauccuacagcacaguuu

SEQ ID NO: 1455131 - RNA, 19 nt, Artificial Sequence
  Description of Artificial Sequence: Synthetic oligonucleotide
gaaaccugccaggggccuc

SEQ ID NO: 1455132 - RNA, 19 nt, Artificial Sequence
  Description of Artificial Sequence: Synthetic oligonucleotide
aggucccggccagaagcgg

SEQ ID NO: 1455133 - RNA, 19 nt, Artificial Sequence
  Description of Artificial Sequence: Synthetic oligonucleotide
cugguauauuuaagacaaa

SEQ ID NO: 1455134 - RNA, 19 nt, Artificial Sequence
  Description of Artificial Sequence: Synthetic oligonucleotide
ccccaaaugcaccacccuc

SEQ ID NO: 1455135 - RNA, 19 nt, Artificial Sequence
  Description of Artificial Sequence: Synthetic oligonucleotide
cacuauccacuggacgguc

SEQ ID NO: 1455136 - RNA, 19 nt, Artificial Sequence
  Description of Artificial Sequence: Synthetic oligonucleotide
cggaucguacaacaaaaca

SEQ ID NO: 1455137 - RNA, 19 nt, Artificial Sequence
  Description of Artificial Sequence: Synthetic oligonucleotide
cuauccacuggacgguccu

SEQ ID NO: 1455138 - RNA, 19 nt, Artificial Sequence
  Description of Artificial Sequence: Synthetic oligonucleotide
caggacaggguggggcuug

SEQ ID NO: 1455139 - RNA, 19 nt, Artificial Sequence
  Description of Artificial Sequence: Synthetic oligonucleotide
accucguaaccaauauaua

SEQ ID NO: 1455140 - RNA, 19 nt, Artificial Sequence
  Description of Artificial Sequence: Synthetic oligonucleotide
cacgucauucaucgauaaa

SEQ ID NO: 1455141 - RNA, 19 nt, Artificial Sequence
  Description of Artificial Sequence: Synthetic oligonucleotide
gggucaguuguggcucugg

SEQ ID NO: 1455142 - RNA, 19 nt, Artificial Sequence
  Description of Artificial Sequence: Synthetic oligonucleotide
agccgugcgguaaugcaua

SEQ ID NO: 1455143 - RNA, 19 nt, Artificial Sequence
  Description of Artificial Sequence: Synthetic oligonucleotide
cccggguccaaccuuccac

SEQ ID NO: 1455144 - RNA, 19 nt, Artificial Sequence
  Description of Artificial Sequence: Synthetic oligonucleotide
agcacuccaugaggaaaau

SEQ ID NO: 1455145 - RNA, 19 nt, Artificial Sequence
  Description of Artificial Sequence: Synthetic oligonucleotide
cuggcgcaugcgugcgagc

SEQ ID NO: 1455146 - RNA, 19 nt, Artificial Sequence
  Description of Artificial Sequence: Synthetic oligonucleotide
ucacugcaauugggcacca

SEQ ID NO: 1455147 - RNA, 19 nt, Artificial Sequence
  Description of Artificial Sequence: Synthetic oligonucleotide
cagugacgacugugugccc

SEQ ID NO: 1455148 - RNA, 19 nt, Artificial Sequence
  Description of Artificial Sequence: Synthetic oligonucleotide
gcauaaucggcaccucgua

SEQ ID NO: 1455149 - RNA, 19 nt, Artificial Sequence
  Description of Artificial Sequence: Synthetic oligonucleotide
gcgcaugcgugcgagcugc

SEQ ID NO: 1455150 - RNA, 19 nt, Artificial Sequence
  Description of Artificial Sequence: Synthetic oligonucleotide
gcaagaagugggcaggauu

SEQ ID NO: 1455151 - RNA, 19 nt, Artificial Sequence
  Description of Artificial Sequence: Synthetic oligonucleotide
ccuuggucccaaaaccuaa

SEQ ID NO: 1455152 - RNA, 19 nt, Artificial Sequence
  Description of Artificial Sequence: Synthetic oligonucleotide
cgugcgagcugcucacugc

SEQ ID NO: 1455153 - RNA, 19 nt, Artificial Sequence
  Description of Artificial Sequence: Synthetic oligonucleotide
gggagguuaccaggagcag

SEQ ID NO: 1455154 - RNA, 19 nt, Artificial Sequence
  Description of Artificial Sequence: Synthetic oligonucleotide
gcgugcgagcugcucacug

SEQ ID NO: 1455155 - RNA, 19 nt, Artificial Sequence
  Description of Artificial Sequence: Synthetic oligonucleotide
agguuaccaggagcagaga

SEQ ID NO: 1455156 - RNA, 19 nt, Artificial Sequence
  Description of Artificial Sequence: Synthetic oligonucleotide
cucgcauagcucacgucau

SEQ ID NO: 1455157 - RNA, 19 nt, Artificial Sequence
  Description of Artificial Sequence: Synthetic oligonucleotide
gugacgacugugugccccu

SEQ ID NO: 1455158 - RNA, 19 nt, Artificial Sequence
  Description of Artificial Sequence: Synthetic oligonucleotide
cccaaaugcaccacccucu

SEQ ID NO: 1455159 - RNA, 19 nt, Artificial Sequence
  Description of Artificial Sequence: Synthetic oligonucleotide
cagaagcgggguggggcug

SEQ ID NO: 1455160 - RNA, 19 nt, Artificial Sequence
  Description of Artificial Sequence: Synthetic oligonucleotide
ggcaccucguaaccaauau

SEQ ID NO: 1455161 - RNA, 19 nt, Artificial Sequence
  Description of Artificial Sequence: Synthetic oligonucleotide
ccagccgugcgguaaugca

SEQ ID NO: 1455162 - RNA, 19 nt, Artificial Sequence
  Description of Artificial Sequence: Synthetic oligonucleotide
ugcgugcgagcugcucacu

SEQ ID NO: 1455163 - RNA, 19 nt, Artificial Sequence
  Description of Artificial Sequence: Synthetic oligonucleotide
cuacggcaagaagguagca

SEQ ID NO: 1455164 - RNA, 19 nt, Artificial Sequence
  Description of Artificial Sequence: Synthetic oligonucleotide
uagcgaccugaagcaucug

SEQ ID NO: 1455165 - RNA, 19 nt, Artificial Sequence
  Description of Artificial Sequence: Synthetic oligonucleotide
ccucucgaggggagguuac

SEQ ID NO: 1455166 - RNA, 19 nt, Artificial Sequence
  Description of Artificial Sequence: Synthetic oligonucleotide
ggccaggcggggucaguug

SEQ ID NO: 1455167 - RNA, 19 nt, Artificial Sequence
  Description of Artificial Sequence: Synthetic oligonucleotide
ccggguccaaccuuccaca

SEQ ID NO: 1455168 - RNA, 19 nt, Artificial Sequence
  Description of Artificial Sequence: Synthetic oligonucleotide
ccuggcgcaugcgugcgag

SEQ ID NO: 1455169 - RNA, 19 nt, Artificial Sequence
  Description of Artificial Sequence: Synthetic oligonucleotide
cuaaaucccucuggacgcu

SEQ ID NO: 1455170 - RNA, 19 nt, Artificial Sequence
  Description of Artificial Sequence: Synthetic oligonucleotide
cagccgugcgguaaugcau

SEQ ID NO: 1455171 - RNA, 19 nt, Artificial Sequence
  Description of Artificial Sequence: Synthetic oligonucleotide
gacgugcgccucgcauagc

SEQ ID NO: 1455172 - RNA, 19 nt, Artificial Sequence
  Description of Artificial Sequence: Synthetic oligonucleotide
gcggggucaguuguggcuc

SEQ ID NO: 1455173 - RNA, 19 nt, Artificial Sequence
  Description of Artificial Sequence: Synthetic oligonucleotide
cccaaaaccuaagucucaa

SEQ ID NO: 1455174 - RNA, 19 nt, Artificial Sequence
  Description of Artificial Sequence: Synthetic oligonucleotide
cugaucgcauauggguugu

SEQ ID NO: 1455175 - RNA, 19 nt, Artificial Sequence
  Description of Artificial Sequence: Synthetic oligonucleotide
gcgaccugaagcaucugcu

SEQ ID NO: 1455176 - RNA, 19 nt, Artificial Sequence
  Description of Artificial Sequence: Synthetic oligonucleotide
cauauggguugugcugugu

SEQ ID NO: 1455177 - RNA, 19 nt, Artificial Sequence
  Description of Artificial Sequence: Synthetic oligonucleotide
caguuacgucaccagccgu

SEQ ID NO: 1455178 - RNA, 19 nt, Artificial Sequence
  Description of Artificial Sequence: Synthetic oligonucleotide
cccuuuggcgggccaggag

SEQ ID NO: 1455179 - RNA, 19 nt, Artificial Sequence
  Description of Artificial Sequence: Synthetic oligonucleotide
ggaucccagccagccuucc

SEQ ID NO: 1455180 - RNA, 19 nt, Artificial Sequence
  Description of Artificial Sequence: Synthetic oligonucleotide
cuggccccucucgagggga

SEQ ID NO: 1455181 - RNA, 19 nt, Artificial Sequence
  Description of Artificial Sequence: Synthetic oligonucleotide
ccaggcggggucaguugug

SEQ ID NO: 1455182 - RNA, 19 nt, Artificial Sequence
  Description of Artificial Sequence: Synthetic oligonucleotide
gcuugcaaagugggcugca

SEQ ID NO: 1455183 - RNA, 19 nt, Artificial Sequence
  Description of Artificial Sequence: Synthetic oligonucleotide
caccagccgugcgguaaug

SEQ ID NO: 1455184 - RNA, 19 nt, Artificial Sequence
  Description of Artificial Sequence: Synthetic oligonucleotide
gcccggaggcgguccagug

SEQ ID NO: 1455185 - RNA, 19 nt, Artificial Sequence
  Description of Artificial Sequence: Synthetic oligonucleotide
gugugccccuuuggcgggc

SEQ ID NO: 1455186 - RNA, 19 nt, Artificial Sequence
  Description of Artificial Sequence: Synthetic oligonucleotide
gccucgcauagcucacguc

SEQ ID NO: 1455187 - RNA, 19 nt, Artificial Sequence
  Description of Artificial Sequence: Synthetic oligonucleotide
ggccccucucgaggggagg

SEQ ID NO: 1455188 - RNA, 19 nt, Artificial Sequence
  Description of Artificial Sequence: Synthetic oligonucleotide
gccaggcggggucaguugu

SEQ ID NO: 1455189 - RNA, 19 nt, Artificial Sequence
  Description of Artificial Sequence: Synthetic oligonucleotide
ggcacaggugugcggcugu

SEQ ID NO: 1455190 - RNA, 19 nt, Artificial Sequence
  Description of Artificial Sequence: Synthetic oligonucleotide
cugcucacccuggaucagu

SEQ ID NO: 1455191 - RNA, 19 nt, Artificial Sequence
  Description of Artificial Sequence: Synthetic oligonucleotide
gccgugcgguaaugcauaa

SEQ ID NO: 1455192 - RNA, 19 nt, Artificial Sequence
  Description of Artificial Sequence: Synthetic oligonucleotide
gucuagcccagcacuccau

SEQ ID NO: 1455193 - RNA, 19 nt, Artificial Sequence
  Description of Artificial Sequence: Synthetic oligonucleotide
cagugcgcauggugguagu

SEQ ID NO: 1455194 - RNA, 19 nt, Artificial Sequence
  Description of Artificial Sequence: Synthetic oligonucleotide
gcaugcgugcgagcugcuc

SEQ ID NO: 1455195 - RNA, 19 nt, Artificial Sequence
  Description of Artificial Sequence: Synthetic oligonucleotide
cuggacgguccuccuuggu

SEQ ID NO: 1455196 - RNA, 19 nt, Artificial Sequence
  Description of Artificial Sequence: Synthetic oligonucleotide
ggacuacggcaagaaggua

SEQ ID NO: 1455197 - RNA, 19 nt, Artificial Sequence
  Description of Artificial Sequence: Synthetic oligonucleotide
cccggaggcgguccaguga

SEQ ID NO: 1455198 - RNA, 19 nt, Artificial Sequence
  Description of Artificial Sequence: Synthetic oligonucleotide
ccacuauccacuggacggu

SEQ ID NO: 1455199 - RNA, 19 nt, Artificial Sequence
  Description of Artificial Sequence: Synthetic oligonucleotide
ccaggguaccuagggaccu

SEQ ID NO: 1455200 - RNA, 19 nt, Artificial Sequence
  Description of Artificial Sequence: Synthetic oligonucleotide
cccucucgaggggagguua

SEQ ID NO: 1455201 - RNA, 19 nt, Artificial Sequence
  Description of Artificial Sequence: Synthetic oligonucleotide
gccuucccauucugcacuu

SEQ ID NO: 1455202 - RNA, 19 nt, Artificial Sequence
  Description of Artificial Sequence: Synthetic oligonucleotide
cggcaccucguaaccaaua

SEQ ID NO: 1455203 - RNA, 19 nt, Artificial Sequence
  Description of Artificial Sequence: Synthetic oligonucleotide
gccaggggccucccauggu

SEQ ID NO: 1455204 - RNA, 19 nt, Artificial Sequence
  Description of Artificial Sequence: Synthetic oligonucleotide
gccccucucgaggggaggu

SEQ ID NO: 1455205 - RNA, 19 nt, Artificial Sequence
  Description of Artificial Sequence: Synthetic oligonucleotide
cacugcaauugggcaccau

SEQ ID NO: 1455206 - RNA, 19 nt, Artificial Sequence
  Description of Artificial Sequence: Synthetic oligonucleotide
ccauagcgaccugaagcau

SEQ ID NO: 1455207 - RNA, 19 nt, Artificial Sequence
  Description of Artificial Sequence: Synthetic oligonucleotide
cccuggcgcaugcgugcga

SEQ ID NO: 1455208 - RNA, 19 nt, Artificial Sequence
  Description of Artificial Sequence: Synthetic oligonucleotide
cgccucgcauagcucacgu

SEQ ID NO: 1455209 - RNA, 19 nt, Artificial Sequence
  Description of Artificial Sequence: Synthetic oligonucleotide
gcgguccagugacgacugu

SEQ ID NO: 1455210 - RNA, 19 nt, Artificial Sequence
  Description of Artificial Sequence: Synthetic oligonucleotide
ccgugcgguaaugcauaau

SEQ ID NO: 1455211 - RNA, 19 nt, Artificial Sequence
  Description of Artificial Sequence: Synthetic oligonucleotide
ccccucucgaggggagguu

SEQ ID NO: 1455212 - RNA, 19 nt, Artificial Sequence
  Description of Artificial Sequence: Synthetic oligonucleotide
aaaacgaagaaauugaaug

SEQ ID NO: 1455213 - RNA, 19 nt, Artificial Sequence
  Description of Artificial Sequence: Synthetic oligonucleotide
aauaacggaagagacaucc

SEQ ID NO: 1455214 - RNA, 19 nt, Artificial Sequence
  Description of Artificial Sequence: Synthetic oligonucleotide
aauugaaugaacuaucacu

SEQ ID NO: 1455215 - RNA, 19 nt, Artificial Sequence
  Description of Artificial Sequence: Synthetic oligonucleotide
uuaauuuaaauaacggaag

SEQ ID NO: 1455216 - RNA, 19 nt, Artificial Sequence
  Description of Artificial Sequence: Synthetic oligonucleotide
aaaaggaggagccaaagca

SEQ ID NO: 1455217 - RNA, 19 nt, Artificial Sequence
  Description of Artificial Sequence: Synthetic oligonucleotide
uuuaaauaacggaagagac

SEQ ID NO: 1455218 - RNA, 19 nt, Artificial Sequence
  Description of Artificial Sequence: Synthetic oligonucleotide
ucuuaguucccacaggugg

SEQ ID NO: 1455219 - RNA, 19 nt, Artificial Sequence
  Description of Artificial Sequence: Synthetic oligonucleotide
aauaaguagugaugucucc

SEQ ID NO: 1455220 - RNA, 19 nt, Artificial Sequence
  Description of Artificial Sequence: Synthetic oligonucleotide
ugaaugaacuaucacuccg

SEQ ID NO: 1455221 - RNA, 19 nt, Artificial Sequence
  Description of Artificial Sequence: Synthetic oligonucleotide
aaucccugagacuucaggg

SEQ ID NO: 1455222 - RNA, 19 nt, Artificial Sequence
  Description of Artificial Sequence: Synthetic oligonucleotide
aaacgaagaaauugaauga

SEQ ID NO: 1455223 - RNA, 19 nt, Artificial Sequence
  Description of Artificial Sequence: Synthetic oligonucleotide
auugaaugaacuaucacuc

SEQ ID NO: 1455224 - RNA, 19 nt, Artificial Sequence
  Description of Artificial Sequence: Synthetic oligonucleotide
aagccuuauacaucgggcg

SEQ ID NO: 1455225 - RNA, 19 nt, Artificial Sequence
  Description of Artificial Sequence: Synthetic oligonucleotide
gauaccagcagacaaagga

SEQ ID NO: 1455226 - RNA, 19 nt, Artificial Sequence
  Description of Artificial Sequence: Synthetic oligonucleotide
ugagacuucagggauaggg

SEQ ID NO: 1455227 - RNA, 19 nt, Artificial Sequence
  Description of Artificial Sequence: Synthetic oligonucleotide
gaagggauugucaagcucg

SEQ ID NO: 1455228 - RNA, 19 nt, Artificial Sequence
  Description of Artificial Sequence: Synthetic oligonucleotide
aaagccuuauacaucgggc

SEQ ID NO: 1455229 - RNA, 19 nt, Artificial Sequence
  Description of Artificial Sequence: Synthetic oligonucleotide
ucuugagggaucuccaugg

SEQ ID NO: 1455230 - RNA, 19 nt, Artificial Sequence
  Description of Artificial Sequence: Synthetic oligonucleotide
uaaauaacggaagagacau

SEQ ID NO: 1455231 - RNA, 19 nt, Artificial Sequence
  Description of Artificial Sequence: Synthetic oligonucleotide
agaagagccaaagugcugc

SEQ ID NO: 1455232 - RNA, 19 nt, Artificial Sequence
  Description of Artificial Sequence: Synthetic oligonucleotide
uuugcaauugagcucugcc

SEQ ID NO: 1455233 - RNA, 19 nt, Artificial Sequence
  Description of Artificial Sequence: Synthetic oligonucleotide
aagaacacauccuggacga

SEQ ID NO: 1455234 - RNA, 19 nt, Artificial Sequence
  Description of Artificial Sequence: Synthetic oligonucleotide
acuccggaaagccuuauac

SEQ ID NO: 1455235 - RNA, 19 nt, Artificial Sequence
  Description of Artificial Sequence: Synthetic oligonucleotide
acuaucuuaguucccacag

SEQ ID NO: 1455236 - RNA, 19 nt, Artificial Sequence
  Description of Artificial Sequence: Synthetic oligonucleotide
gucacaauugcagagaccc

SEQ ID NO: 1455237 - RNA, 19 nt, Artificial Sequence
  Description of Artificial Sequence: Synthetic oligonucleotide
ugcaauugagcucugccgc

SEQ ID NO: 1455238 - RNA, 19 nt, Artificial Sequence
  Description of Artificial Sequence: Synthetic oligonucleotide
ucaauaaguagugaugucu

SEQ ID NO: 1455239 - RNA, 19 nt, Artificial Sequence
  Description of Artificial Sequence: Synthetic oligonucleotide
uccuggacgaagaaaauga

SEQ ID NO: 1455240 - RNA, 19 nt, Artificial Sequence
  Description of Artificial Sequence: Synthetic oligonucleotide
uaucuuaguucccacaggu

SEQ ID NO: 1455241 - RNA, 19 nt, Artificial Sequence
  Description of Artificial Sequence: Synthetic oligonucleotide
auagaagucaauaaguagu

SEQ ID NO: 1455242 - RNA, 19 nt, Artificial Sequence
  Description of Artificial Sequence: Synthetic oligonucleotide
auaaguagugaugucuccc

SEQ ID NO: 1455243 - RNA, 19 nt, Artificial Sequence
  Description of Artificial Sequence: Synthetic oligonucleotide
gaaagccuuauacaucggg

SEQ ID NO: 1455244 - RNA, 19 nt, Artificial Sequence
  Description of Artificial Sequence: Synthetic oligonucleotide
uauacaucgggcgauacca

SEQ ID NO: 1455245 - RNA, 19 nt, Artificial Sequence
  Description of Artificial Sequence: Synthetic oligonucleotide
aaaagaugguaggggaggc

SEQ ID NO: 1455246 - RNA, 19 nt, Artificial Sequence
  Description of Artificial Sequence: Synthetic oligonucleotide
gaagagacauccuuggcac

SEQ ID NO: 1455247 - RNA, 19 nt, Artificial Sequence
  Description of Artificial Sequence: Synthetic oligonucleotide
uucagagcccuauagaagu

SEQ ID NO: 1455248 - RNA, 19 nt, Artificial Sequence
  Description of Artificial Sequence: Synthetic oligonucleotide
gaaagcuggcaccuguucg

SEQ ID NO: 1455249 - RNA, 19 nt, Artificial Sequence
  Description of Artificial Sequence: Synthetic oligonucleotide
acuaucacuccggaaagcc

SEQ ID NO: 1455250 - RNA, 19 nt, Artificial Sequence
  Description of Artificial Sequence: Synthetic oligonucleotide
aggguuguagacaucaagc

SEQ ID NO: 1455251 - RNA, 19 nt, Artificial Sequence
  Description of Artificial Sequence: Synthetic oligonucleotide
agaaauugaaugaacuauc

SEQ ID NO: 1455252 - RNA, 19 nt, Artificial Sequence
  Description of Artificial Sequence: Synthetic oligonucleotide
aaggcaaguaaugacugag

SEQ ID NO: 1455253 - RNA, 19 nt, Artificial Sequence
  Description of Artificial Sequence: Synthetic oligonucleotide
gaaguucaggagaagagcc

SEQ ID NO: 1455254 - RNA, 19 nt, Artificial Sequence
  Description of Artificial Sequence: Synthetic oligonucleotide
guuguagacaucaagcgug

SEQ ID NO: 1455255 - RNA, 19 nt, Artificial Sequence
  Description of Artificial Sequence: Synthetic oligonucleotide
guggcuguggaauucagag

SEQ ID NO: 1455256 - RNA, 19 nt, Artificial Sequence
  Description of Artificial Sequence: Synthetic oligonucleotide
auccagagguaguacaugg

SEQ ID NO: 1455257 - RNA, 19 nt, Artificial Sequence
  Description of Artificial Sequence: Synthetic oligonucleotide
cucaccgucacaauugcag

SEQ ID NO: 1455258 - RNA, 19 nt, Artificial Sequence
  Description of Artificial Sequence: Synthetic oligonucleotide
aacaugcugcaguucucgc

SEQ ID NO: 1455259 - RNA, 19 nt, Artificial Sequence
  Description of Artificial Sequence: Synthetic oligonucleotide
auucccagcaccgcgacgc

SEQ ID NO: 1455260 - RNA, 19 nt, Artificial Sequence
  Description of Artificial Sequence: Synthetic oligonucleotide
aaugaacuaucacuccgga

SEQ ID NO: 1455261 - RNA, 19 nt, Artificial Sequence
  Description of Artificial Sequence: Synthetic oligonucleotide
gaaugaacuaucacuccgg

SEQ ID NO: 1455262 - RNA, 19 nt, Artificial Sequence
  Description of Artificial Sequence: Synthetic oligonucleotide
aguaaugacugagucacag

SEQ ID NO: 1455263 - RNA, 19 nt, Artificial Sequence
  Description of Artificial Sequence: Synthetic oligonucleotide
uagggacuaucuuaguucc

SEQ ID NO: 1455264 - RNA, 19 nt, Artificial Sequence
  Description of Artificial Sequence: Synthetic oligonucleotide
ucaagcguggcauacugcu

SEQ ID NO: 1455265 - RNA, 19 nt, Artificial Sequence
  Description of Artificial Sequence: Synthetic oligonucleotide
cucucgguucucaaaaggg

SEQ ID NO: 1455266 - RNA, 19 nt, Artificial Sequence
  Description of Artificial Sequence: Synthetic oligonucleotide
agucaauaaguagugaugu

SEQ ID NO: 1455267 - RNA, 19 nt, Artificial Sequence
  Description of Artificial Sequence: Synthetic oligonucleotide
ucagguuuagagucguggc

SEQ ID NO: 1455268 - RNA, 19 nt, Artificial Sequence
  Description of Artificial Sequence: Synthetic oligonucleotide
uaguacaugguggauacug

SEQ ID NO: 1455269 - RNA, 19 nt, Artificial Sequence
  Description of Artificial Sequence: Synthetic oligonucleotide
uuuagagucguggcugugg

SEQ ID NO: 1455270 - RNA, 19 nt, Artificial Sequence
  Description of Artificial Sequence: Synthetic oligonucleotide
uuauacaucgggcgauacc

SEQ ID NO: 1455271 - RNA, 19 nt, Artificial Sequence
  Description of Artificial Sequence: Synthetic oligonucleotide
gggauugucaagcucgucg

SEQ ID NO: 1455272 - RNA, 19 nt, Artificial Sequence
  Description of Artificial Sequence: Synthetic oligonucleotide
gaagaaauugaaugaacua

SEQ ID NO: 1455273 - RNA, 19 nt, Artificial Sequence
  Description of Artificial Sequence: Synthetic oligonucleotide
acggaagagacauccuugg

SEQ ID NO: 1455274 - RNA, 19 nt, Artificial Sequence
  Description of Artificial Sequence: Synthetic oligonucleotide
uccggaaagccuuauacau

SEQ ID NO: 1455275 - RNA, 19 nt, Artificial Sequence
  Description of Artificial Sequence: Synthetic oligonucleotide
caauaaguagugaugucuc

SEQ ID NO: 1455276 - RNA, 19 nt, Artificial Sequence
  Description of Artificial Sequence: Synthetic oligonucleotide
caucacaauucccagcacc

SEQ ID NO: 1455277 - RNA, 19 nt, Artificial Sequence
  Description of Artificial Sequence: Synthetic oligonucleotide
gaguaugugugccacccag

SEQ ID NO: 1455278 - RNA, 19 nt, Artificial Sequence
  Description of Artificial Sequence: Synthetic oligonucleotide
gaaauugaaugaacuauca

SEQ ID NO: 1455279 - RNA, 19 nt, Artificial Sequence
  Description of Artificial Sequence: Synthetic oligonucleotide
ucugcucugagccauguuu

SEQ ID NO: 1455280 - RNA, 19 nt, Artificial Sequence
  Description of Artificial Sequence: Synthetic oligonucleotide
aaaggcaaguaaugacuga

SEQ ID NO: 1455281 - RNA, 19 nt, Artificial Sequence
  Description of Artificial Sequence: Synthetic oligonucleotide
ucgguucucaaaaggguug

SEQ ID NO: 1455282 - RNA, 19 nt, Artificial Sequence
  Description of Artificial Sequence: Synthetic oligonucleotide
uaaguagugaugucucccu

SEQ ID NO: 1455283 - RNA, 19 nt, Artificial Sequence
  Description of Artificial Sequence: Synthetic oligonucleotide
gaggacuggacagagggag

SEQ ID NO: 1455284 - RNA, 19 nt, Artificial Sequence
  Description of Artificial Sequence: Synthetic oligonucleotide
cuuucgguugaguuccucc

SEQ ID NO: 1455285 - RNA, 19 nt, Artificial Sequence
  Description of Artificial Sequence: Synthetic oligonucleotide
acaaaggcaaguaaugacu

SEQ ID NO: 1455286 - RNA, 19 nt, Artificial Sequence
  Description of Artificial Sequence: Synthetic oligonucleotide
agagguaguacauggugga

SEQ ID NO: 1455287 - RNA, 19 nt, Artificial Sequence
  Description of Artificial Sequence: Synthetic oligonucleotide
ugagccauguuugcaauug

SEQ ID NO: 1455288 - RNA, 19 nt, Artificial Sequence
  Description of Artificial Sequence: Synthetic oligonucleotide
ucucgguucucaaaagggu

SEQ ID NO: 1455289 - RNA, 19 nt, Artificial Sequence
  Description of Artificial Sequence: Synthetic oligonucleotide
aguucgaacugcuggguug

SEQ ID NO: 1455290 - RNA, 19 nt, Artificial Sequence
  Description of Artificial Sequence: Synthetic oligonucleotide
cacaauucccagcaccgcg

SEQ ID NO: 1455291 - RNA, 19 nt, Artificial Sequence
  Description of Artificial Sequence: Synthetic oligonucleotide
guuuccacacagaacuugg

SEQ ID NO: 1455292 - RNA, 19 nt, Artificial Sequence
  Description of Artificial Sequence: Synthetic oligonucleotide
ggguuguagacaucaagcg

SEQ ID NO: 1455293 - RNA, 19 nt, Artificial Sequence
  Description of Artificial Sequence: Synthetic oligonucleotide
aacggaagagacauccuug

SEQ ID NO: 1455294 - RNA, 19 nt, Artificial Sequence
  Description of Artificial Sequence: Synthetic oligonucleotide
acgaagaaauugaaugaac

SEQ ID NO: 1455295 - RNA, 19 nt, Artificial Sequence
  Description of Artificial Sequence: Synthetic oligonucleotide
gucagguuuagagucgugg

SEQ ID NO: 1455296 - RNA, 19 nt, Artificial Sequence
  Description of Artificial Sequence: Synthetic oligonucleotide
uuagagucguggcugugga

SEQ ID NO: 1455297 - RNA, 19 nt, Artificial Sequence
  Description of Artificial Sequence: Synthetic oligonucleotide
gaagucaauaaguagugau

SEQ ID NO: 1455298 - RNA, 19 nt, Artificial Sequence
  Description of Artificial Sequence: Synthetic oligonucleotide
auggagauguccuggaaaa

SEQ ID NO: 1455299 - RNA, 19 nt, Artificial Sequence
  Description of Artificial Sequence: Synthetic oligonucleotide
ucaagcucgucggagucgg

SEQ ID NO: 1455300 - RNA, 19 nt, Artificial Sequence
  Description of Artificial Sequence: Synthetic oligonucleotide
ucgaguaugugugccaccc

SEQ ID NO: 1455301 - RNA, 19 nt, Artificial Sequence
  Description of Artificial Sequence: Synthetic oligonucleotide
cuauagaagucaauaagua

SEQ ID NO: 1455302 - RNA, 19 nt, Artificial Sequence
  Description of Artificial Sequence: Synthetic oligonucleotide
ggauugucaagcucgucgg

SEQ ID NO: 1455303 - RNA, 19 nt, Artificial Sequence
  Description of Artificial Sequence: Synthetic oligonucleotide
ggagccauaguucuugggc

SEQ ID NO: 1455304 - RNA, 19 nt, Artificial Sequence
  Description of Artificial Sequence: Synthetic oligonucleotide
uagacaucaagcguggcau

SEQ ID NO: 1455305 - RNA, 19 nt, Artificial Sequence
  Description of Artificial Sequence: Synthetic oligonucleotide
ucggugcuggaucacagcu

SEQ ID NO: 1455306 - RNA, 19 nt, Artificial Sequence
  Description of Artificial Sequence: Synthetic oligonucleotide
ucgguugaguuccuccugc

SEQ ID NO: 1455307 - RNA, 19 nt, Artificial Sequence
  Description of Artificial Sequence: Synthetic oligonucleotide
aguagugaugucucccuga

SEQ ID NO: 1455308 - RNA, 19 nt, Artificial Sequence
  Description of Artificial Sequence: Synthetic oligonucleotide
acccugguaugccaauggc

SEQ ID NO: 1455309 - RNA, 19 nt, Artificial Sequence
  Description of Artificial Sequence: Synthetic oligonucleotide
aaggaguggauccgcuuca

SEQ ID NO: 1455310 - RNA, 19 nt, Artificial Sequence
  Description of Artificial Sequence: Synthetic oligonucleotide
uaacggaagagacauccuu

SEQ ID NO: 1455311 - RNA, 19 nt, Artificial Sequence
  Description of Artificial Sequence: Synthetic oligonucleotide
agggauagggacuaucuua

SEQ ID NO: 1455312 - RNA, 19 nt, Artificial Sequence
  Description of Artificial Sequence: Synthetic oligonucleotide
gguaguacaugguggauac

SEQ ID NO: 1455313 - RNA, 19 nt, Artificial Sequence
  Description of Artificial Sequence: Synthetic oligonucleotide
aauucccagcaccgcgacg

SEQ ID NO: 1455314 - RNA, 19 nt, Artificial Sequence
  Description of Artificial Sequence: Synthetic oligonucleotide
guucugucgaguaugugug

SEQ ID NO: 1455315 - RNA, 19 nt, Artificial Sequence
  Description of Artificial Sequence: Synthetic oligonucleotide
cucccugaaucccugagac

SEQ ID NO: 1455316 - RNA, 19 nt, Artificial Sequence
  Description of Artificial Sequence: Synthetic oligonucleotide
ugguaugccaauggccugg

SEQ ID NO: 1455317 - RNA, 19 nt, Artificial Sequence
  Description of Artificial Sequence: Synthetic oligonucleotide
uucugaaauucuugaggga

SEQ ID NO: 1455318 - RNA, 19 nt, Artificial Sequence
  Description of Artificial Sequence: Synthetic oligonucleotide
auagacagcccaaagccug

SEQ ID NO: 1455319 - RNA, 19 nt, Artificial Sequence
  Description of Artificial Sequence: Synthetic oligonucleotide
ucugucgaguaugugugcc

SEQ ID NO: 1455320 - RNA, 19 nt, Artificial Sequence
  Description of Artificial Sequence: Synthetic oligonucleotide
acaauugcagagacccagc

SEQ ID NO: 1455321 - RNA, 19 nt, Artificial Sequence
  Description of Artificial Sequence: Synthetic oligonucleotide
aaaggaggagccaaagcau

SEQ ID NO: 1455322 - RNA, 19 nt, Artificial Sequence
  Description of Artificial Sequence: Synthetic oligonucleotide
gcuacagccguguuggugc

SEQ ID NO: 1455323 - RNA, 19 nt, Artificial Sequence
  Description of Artificial Sequence: Synthetic oligonucleotide
agguuuagagucguggcug

SEQ ID NO: 1455324 - RNA, 19 nt, Artificial Sequence
  Description of Artificial Sequence: Synthetic oligonucleotide
acugagucacagugggcuc

SEQ ID NO: 1455325 - RNA, 19 nt, Artificial Sequence
  Description of Artificial Sequence: Synthetic oligonucleotide
augagcacagcuacagccg

SEQ ID NO: 1455326 - RNA, 19 nt, Artificial Sequence
  Description of Artificial Sequence: Synthetic oligonucleotide
uacaucgggcgauaccagc

SEQ ID NO: 1455327 - RNA, 19 nt, Artificial Sequence
  Description of Artificial Sequence: Synthetic oligonucleotide
cucauaggcugguggaggc

SEQ ID NO: 1455328 - RNA, 19 nt, Artificial Sequence
  Description of Artificial Sequence: Synthetic oligonucleotide
cggaaagccuuauacaucg

SEQ ID NO: 1455329 - RNA, 19 nt, Artificial Sequence
  Description of Artificial Sequence: Synthetic oligonucleotide
guggcauacugcuggcugg

SEQ ID NO: 1455330 - RNA, 19 nt, Artificial Sequence
  Description of Artificial Sequence: Synthetic oligonucleotide
gccaaagugcugcacaucc

SEQ ID NO: 1455331 - RNA, 19 nt, Artificial Sequence
  Description of Artificial Sequence: Synthetic oligonucleotide
caacaugcugcaguucucg

SEQ ID NO: 1455332 - RNA, 19 nt, Artificial Sequence
  Description of Artificial Sequence: Synthetic oligonucleotide
ggagcaugagcacagcuac

SEQ ID NO: 1455333 - RNA, 19 nt, Artificial Sequence
  Description of Artificial Sequence: Synthetic oligonucleotide
aaauaacggaagagacauc

SEQ ID NO: 1455334 - RNA, 19 nt, Artificial Sequence
  Description of Artificial Sequence: Synthetic oligonucleotide
ugcucaccgucacaauugc

SEQ ID NO: 1455335 - RNA, 19 nt, Artificial Sequence
  Description of Artificial Sequence: Synthetic oligonucleotide
uucgguugaguuccuccug

SEQ ID NO: 1455336 - RNA, 19 nt, Artificial Sequence
  Description of Artificial Sequence: Synthetic oligonucleotide
caucaagcguggcauacug

SEQ ID NO: 1455337 - RNA, 19 nt, Artificial Sequence
  Description of Artificial Sequence: Synthetic oligonucleotide
cccuauagaagucaauaag

SEQ ID NO: 1455338 - RNA, 19 nt, Artificial Sequence
  Description of Artificial Sequence: Synthetic oligonucleotide
cuggguuggagaagacucc

SEQ ID NO: 1455339 - RNA, 19 nt, Artificial Sequence
  Description of Artificial Sequence: Synthetic oligonucleotide
gacuaucuuaguucccaca

SEQ ID NO: 1455340 - RNA, 19 nt, Artificial Sequence
  Description of Artificial Sequence: Synthetic oligonucleotide
cuugaggacuggacagagg

SEQ ID NO: 1455341 - RNA, 19 nt, Artificial Sequence
  Description of Artificial Sequence: Synthetic oligonucleotide
guucgaacugcuggguugg

SEQ ID NO: 1455342 - RNA, 19 nt, Artificial Sequence
  Description of Artificial Sequence: Synthetic oligonucleotide
agccuuauacaucgggcga

SEQ ID NO: 1455343 - RNA, 19 nt, Artificial Sequence
  Description of Artificial Sequence: Synthetic oligonucleotide
cugcucugagccauguuug

SEQ ID NO: 1455344 - RNA, 19 nt, Artificial Sequence
  Description of Artificial Sequence: Synthetic oligonucleotide
ugucaagcucgucggaguc

SEQ ID NO: 1455345 - RNA, 19 nt, Artificial Sequence
  Description of Artificial Sequence: Synthetic oligonucleotide
uacaaggaguggauccgcu

SEQ ID NO: 1455346 - RNA, 19 nt, Artificial Sequence
  Description of Artificial Sequence: Synthetic oligonucleotide
ucggagucggggaaugggu

SEQ ID NO: 1455347 - RNA, 19 nt, Artificial Sequence
  Description of Artificial Sequence: Synthetic oligonucleotide
uccagagguaguacauggu

SEQ ID NO: 1455348 - RNA, 19 nt, Artificial Sequence
  Description of Artificial Sequence: Synthetic oligonucleotide
ggcaaguaaugacugaguc

SEQ ID NO: 1455349 - RNA, 19 nt, Artificial Sequence
  Description of Artificial Sequence: Synthetic oligonucleotide
agaacucccuccggugugc

SEQ ID NO: 1455350 - RNA, 19 nt, Artificial Sequence
  Description of Artificial Sequence: Synthetic oligonucleotide
gguacaaggaguggauccg

SEQ ID NO: 1455351 - RNA, 19 nt, Artificial Sequence
  Description of Artificial Sequence: Synthetic oligonucleotide
gggauagggacuaucuuag

SEQ ID NO: 1455352 - RNA, 19 nt, Artificial Sequence
  Description of Artificial Sequence: Synthetic oligonucleotide
caccgucacaauugcagag

SEQ ID NO: 1455353 - RNA, 19 nt, Artificial Sequence
  Description of Artificial Sequence: Synthetic oligonucleotide
gagaacucccuccggugug

SEQ ID NO: 1455354 - RNA, 19 nt, Artificial Sequence
  Description of Artificial Sequence: Synthetic oligonucleotide
gacaucaagcguggcauac

SEQ ID NO: 1455355 - RNA, 19 nt, Artificial Sequence
  Description of Artificial Sequence: Synthetic oligonucleotide
ugaggacuggacagaggga

SEQ ID NO: 1455356 - RNA, 19 nt, Artificial Sequence
  Description of Artificial Sequence: Synthetic oligonucleotide
ucgggcgauaccagcagac

SEQ ID NO: 1455357 - RNA, 19 nt, Artificial Sequence
  Description of Artificial Sequence: Synthetic oligonucleotide
caggcgaggaaguucagga

SEQ ID NO: 1455358 - RNA, 19 nt, Artificial Sequence
  Description of Artificial Sequence: Synthetic oligonucleotide
agcguggcauacugcuggc

SEQ ID NO: 1455359 - RNA, 19 nt, Artificial Sequence
  Description of Artificial Sequence: Synthetic oligonucleotide
cacccugguaugccaaugg

SEQ ID NO: 1455360 - RNA, 19 nt, Artificial Sequence
  Description of Artificial Sequence: Synthetic oligonucleotide
aguaugugugccacccagg

SEQ ID NO: 1455361 - RNA, 19 nt, Artificial Sequence
  Description of Artificial Sequence: Synthetic oligonucleotide
gucaauaaguagugauguc

SEQ ID NO: 1455362 - RNA, 19 nt, Artificial Sequence
  Description of Artificial Sequence: Synthetic oligonucleotide
aucaagcguggcauacugc

SEQ ID NO: 1455363 - RNA, 19 nt, Artificial Sequence
  Description of Artificial Sequence: Synthetic oligonucleotide
agagucguggcuguggaau

SEQ ID NO: 1455364 - RNA, 19 nt, Artificial Sequence
  Description of Artificial Sequence: Synthetic oligonucleotide
ugagccacugcugguuucc

SEQ ID NO: 1455365 - RNA, 19 nt, Artificial Sequence
  Description of Artificial Sequence: Synthetic oligonucleotide
uucugucgaguaugugugc

SEQ ID NO: 1455366 - RNA, 19 nt, Artificial Sequence
  Description of Artificial Sequence: Synthetic oligonucleotide
ugucgaguaugugugccac

SEQ ID NO: 1455367 - RNA, 19 nt, Artificial Sequence
  Description of Artificial Sequence: Synthetic oligonucleotide
ugaaucccugagacuucag

SEQ ID NO: 1455368 - RNA, 19 nt, Artificial Sequence
  Description of Artificial Sequence: Synthetic oligonucleotide
ugcauuggcggcagcaguu

SEQ ID NO: 1455369 - RNA, 19 nt, Artificial Sequence
  Description of Artificial Sequence: Synthetic oligonucleotide
agcccuauagaagucaaua

SEQ ID NO: 1455370 - RNA, 19 nt, Artificial Sequence
  Description of Artificial Sequence: Synthetic oligonucleotide
gcucucgguucucaaaagg

SEQ ID NO: 1455371 - RNA, 19 nt, Artificial Sequence
  Description of Artificial Sequence: Synthetic oligonucleotide
gacugagucacagugggcu

SEQ ID NO: 1455372 - RNA, 19 nt, Artificial Sequence
  Description of Artificial Sequence: Synthetic oligonucleotide
uggacagagggagcugcgg

SEQ ID NO: 1455373 - RNA, 19 nt, Artificial Sequence
  Description of Artificial Sequence: Synthetic oligonucleotide
ugacugagucacagugggc

SEQ ID NO: 1455374 - RNA, 19 nt, Artificial Sequence
  Description of Artificial Sequence: Synthetic oligonucleotide
gccguguuggugcucaccg

SEQ ID NO: 1455375 - RNA, 19 nt, Artificial Sequence
  Description of Artificial Sequence: Synthetic oligonucleotide
cugccuuucgguugaguuc

SEQ ID NO: 1455376 - RNA, 19 nt, Artificial Sequence
  Description of Artificial Sequence: Synthetic oligonucleotide
aggcgaggaaguucaggag

SEQ ID NO: 1455377 - RNA, 19 nt, Artificial Sequence
  Description of Artificial Sequence: Synthetic oligonucleotide
uggauacugucuucugaaa

SEQ ID NO: 1455378 - RNA, 19 nt, Artificial Sequence
  Description of Artificial Sequence: Synthetic oligonucleotide
gcaaguaaugacugaguca

SEQ ID NO: 1455379 - RNA, 19 nt, Artificial Sequence
  Description of Artificial Sequence: Synthetic oligonucleotide
uggcauacugcuggcuggg

SEQ ID NO: 1455380 - RNA, 19 nt, Artificial Sequence
  Description of Artificial Sequence: Synthetic oligonucleotide
aggcucucgguucucaaaa

SEQ ID NO: 1455381 - RNA, 19 nt, Artificial Sequence
  Description of Artificial Sequence: Synthetic oligonucleotide
uucuugaggacuggacaga

SEQ ID NO: 1455382 - RNA, 19 nt, Artificial Sequence
  Description of Artificial Sequence: Synthetic oligonucleotide
cauuggcggcagcaguucg

SEQ ID NO: 1455383 - RNA, 19 nt, Artificial Sequence
  Description of Artificial Sequence: Synthetic oligonucleotide
agccauguuugcaauugag

SEQ ID NO: 1455384 - RNA, 19 nt, Artificial Sequence
  Description of Artificial Sequence: Synthetic oligonucleotide
ucacaauucccagcaccgc

SEQ ID NO: 1455385 - RNA, 19 nt, Artificial Sequence
  Description of Artificial Sequence: Synthetic oligonucleotide
gaacugcuggguuggagaa

SEQ ID NO: 1455386 - RNA, 19 nt, Artificial Sequence
  Description of Artificial Sequence: Synthetic oligonucleotide
auccgcuucagcaucacaa

SEQ ID NO: 1455387 - RNA, 19 nt, Artificial Sequence
  Description of Artificial Sequence: Synthetic oligonucleotide
uggauccgcuucagcauca

SEQ ID NO: 1455388 - RNA, 19 nt, Artificial Sequence
  Description of Artificial Sequence: Synthetic oligonucleotide
augaacuaucacuccggaa

SEQ ID NO: 1455389 - RNA, 19 nt, Artificial Sequence
  Description of Artificial Sequence: Synthetic oligonucleotide
ucggggaauggguucccgc

SEQ ID NO: 1455390 - RNA, 19 nt, Artificial Sequence
  Description of Artificial Sequence: Synthetic oligonucleotide
gugcucaccgucacaauug

SEQ ID NO: 1455391 - RNA, 19 nt, Artificial Sequence
  Description of Artificial Sequence: Synthetic oligonucleotide
gucggagucggggaauggg

SEQ ID NO: 1455392 - RNA, 19 nt, Artificial Sequence
  Description of Artificial Sequence: Synthetic oligonucleotide
aguacaugguggauacugu

SEQ ID NO: 1455393 - RNA, 19 nt, Artificial Sequence
  Description of Artificial Sequence: Synthetic oligonucleotide
gauugucaagcucgucgga

SEQ ID NO: 1455394 - RNA, 19 nt, Artificial Sequence
  Description of Artificial Sequence: Synthetic oligonucleotide
acgccagugaagagcaggg

SEQ ID NO: 1455395 - RNA, 19 nt, Artificial Sequence
  Description of Artificial Sequence: Synthetic oligonucleotide
ugcagagacccagccacug

SEQ ID NO: 1455396 - RNA, 19 nt, Artificial Sequence
  Description of Artificial Sequence: Synthetic oligonucleotide
cuggacagagggagcugcg

SEQ ID NO: 1455397 - RNA, 19 nt, Artificial Sequence
  Description of Artificial Sequence: Synthetic oligonucleotide
cuuauacaucgggcgauac

SEQ ID NO: 1455398 - RNA, 19 nt, Artificial Sequence
  Description of Artificial Sequence: Synthetic oligonucleotide
gagucggggaauggguucc

SEQ ID NO: 1455399 - RNA, 19 nt, Artificial Sequence
  Description of Artificial Sequence: Synthetic oligonucleotide
accgcgacgccagugaaga

SEQ ID NO: 1455400 - RNA, 19 nt, Artificial Sequence
  Description of Artificial Sequence: Synthetic oligonucleotide
cuccggaaagccuuauaca

SEQ ID NO: 1455401 - RNA, 19 nt, Artificial Sequence
  Description of Artificial Sequence: Synthetic oligonucleotide
guagugaugucucccugaa

SEQ ID NO: 1455402 - RNA, 19 nt, Artificial Sequence
  Description of Artificial Sequence: Synthetic oligonucleotide
ucgaacugcuggguuggag

SEQ ID NO: 1455403 - RNA, 19 nt, Artificial Sequence
  Description of Artificial Sequence: Synthetic oligonucleotide
agcaccgcgacgccaguga

SEQ ID NO: 1455404 - RNA, 19 nt, Artificial Sequence
  Description of Artificial Sequence: Synthetic oligonucleotide
gcaguucucgcucccggcg

SEQ ID NO: 1455405 - RNA, 19 nt, Artificial Sequence
  Description of Artificial Sequence: Synthetic oligonucleotide
aggggaggccaguuguucu

SEQ ID NO: 1455406 - RNA, 19 nt, Artificial Sequence
  Description of Artificial Sequence: Synthetic oligonucleotide
caucgggcgauaccagcag

SEQ ID NO: 1455407 - RNA, 19 nt, Artificial Sequence
  Description of Artificial Sequence: Synthetic oligonucleotide
gucaagcucgucggagucg

SEQ ID NO: 1455408 - RNA, 19 nt, Artificial Sequence
  Description of Artificial Sequence: Synthetic oligonucleotide
agggacuaucuuaguuccc

SEQ ID NO: 1455409 - RNA, 19 nt, Artificial Sequence
  Description of Artificial Sequence: Synthetic oligonucleotide
ggcgaggaaguucaggaga

SEQ ID NO: 1455410 - RNA, 19 nt, Artificial Sequence
  Description of Artificial Sequence: Synthetic oligonucleotide
gcuggguuggagaagacuc

SEQ ID NO: 1455411 - RNA, 19 nt, Artificial Sequence
  Description of Artificial Sequence: Synthetic oligonucleotide
aagggauugucaagcucgu

SEQ ID NO: 1455412 - RNA, 19 nt, Artificial Sequence
  Description of Artificial Sequence: Synthetic oligonucleotide
cugguaugccaauggccug

SEQ ID NO: 1455413 - RNA, 19 nt, Artificial Sequence
  Description of Artificial Sequence: Synthetic oligonucleotide
aagacuccggcagcaaauu

SEQ ID NO: 1455414 - RNA, 19 nt, Artificial Sequence
  Description of Artificial Sequence: Synthetic oligonucleotide
gccauguuugcaauugagc

SEQ ID NO: 1455415 - RNA, 19 nt, Artificial Sequence
  Description of Artificial Sequence: Synthetic oligonucleotide
gcggcaauggggcuggggc

SEQ ID NO: 1455416 - RNA, 19 nt, Artificial Sequence
  Description of Artificial Sequence: Synthetic oligonucleotide
ggggaauggguucccgccg

SEQ ID NO: 1455417 - RNA, 19 nt, Artificial Sequence
  Description of Artificial Sequence: Synthetic oligonucleotide
agguaguacaugguggaua

SEQ ID NO: 1455418 - RNA, 19 nt, Artificial Sequence
  Description of Artificial Sequence: Synthetic oligonucleotide
agccguguuggugcucacc

SEQ ID NO: 1455419 - RNA, 19 nt, Artificial Sequence
  Description of Artificial Sequence: Synthetic oligonucleotide
agccugagugcuguaggag

SEQ ID NO: 1455420 - RNA, 19 nt, Artificial Sequence
  Description of Artificial Sequence: Synthetic oligonucleotide
cauaggcugguggaggcuc

SEQ ID NO: 1455421 - RNA, 19 nt, Artificial Sequence
  Description of Artificial Sequence: Synthetic oligonucleotide
ucggcgguacaaggagugg

SEQ ID NO: 1455422 - RNA, 19 nt, Artificial Sequence
  Description of Artificial Sequence: Synthetic oligonucleotide
ccauguuugcaauugagcu

SEQ ID NO: 1455423 - RNA, 19 nt, Artificial Sequence
  Description of Artificial Sequence: Synthetic oligonucleotide
gcaauugagcucugccgcc

SEQ ID NO: 1455424 - RNA, 19 nt, Artificial Sequence
  Description of Artificial Sequence: Synthetic oligonucleotide
acaaggaguggauccgcuu

SEQ ID NO: 1455425 - RNA, 19 nt, Artificial Sequence
  Description of Artificial Sequence: Synthetic oligonucleotide
uugcagagacccagccacu

SEQ ID NO: 1455426 - RNA, 19 nt, Artificial Sequence
  Description of Artificial Sequence: Synthetic oligonucleotide
auaacggaagagacauccu

SEQ ID NO: 1455427 - RNA, 19 nt, Artificial Sequence
  Description of Artificial Sequence: Synthetic oligonucleotide
ugcugcacauccagaggua

SEQ ID NO: 1455428 - RNA, 19 nt, Artificial Sequence
  Description of Artificial Sequence: Synthetic oligonucleotide
caauucccagcaccgcgac

SEQ ID NO: 1455429 - RNA, 19 nt, Artificial Sequence
  Description of Artificial Sequence: Synthetic oligonucleotide
gguuguagacaucaagcgu

SEQ ID NO: 1455430 - RNA, 19 nt, Artificial Sequence
  Description of Artificial Sequence: Synthetic oligonucleotide
cccugguaugccaauggcc

SEQ ID NO: 1455431 - RNA, 19 nt, Artificial Sequence
  Description of Artificial Sequence: Synthetic oligonucleotide
gucggugcuggaucacagc

SEQ ID NO: 1455432 - RNA, 19 nt, Artificial Sequence
  Description of Artificial Sequence: Synthetic oligonucleotide
gucgaguaugugugccacc

SEQ ID NO: 1455433 - RNA, 19 nt, Artificial Sequence
  Description of Artificial Sequence: Synthetic oligonucleotide
cgguacaaggaguggaucc

SEQ ID NO: 1455434 - RNA, 19 nt, Artificial Sequence
  Description of Artificial Sequence: Synthetic oligonucleotide
gccaauggccuggaggacg

SEQ ID NO: 1455435 - RNA, 19 nt, Artificial Sequence
  Description of Artificial Sequence: Synthetic oligonucleotide
aggcaggcgaggaaguuca

SEQ ID NO: 1455436 - RNA, 19 nt, Artificial Sequence
  Description of Artificial Sequence: Synthetic oligonucleotide
gacuccggcagcaaauucu

SEQ ID NO: 1455437 - RNA, 19 nt, Artificial Sequence
  Description of Artificial Sequence: Synthetic oligonucleotide
gagcuuucuugaggacugg

SEQ ID NO: 1455438 - RNA, 19 nt, Artificial Sequence
  Description of Artificial Sequence: Synthetic oligonucleotide
auacaucgggcgauaccag

SEQ ID NO: 1455439 - RNA, 19 nt, Artificial Sequence
  Description of Artificial Sequence: Synthetic oligonucleotide
guaaugacugagucacagu

SEQ ID NO: 1455440 - RNA, 19 nt, Artificial Sequence
  Description of Artificial Sequence: Synthetic oligonucleotide
agucggggaauggguuccc

SEQ ID NO: 1455441 - RNA, 19 nt, Artificial Sequence
  Description of Artificial Sequence: Synthetic oligonucleotide
auggguucccgccgucucu

SEQ ID NO: 1455442 - RNA, 19 nt, Artificial Sequence
  Description of Artificial Sequence: Synthetic oligonucleotide
ugguuuccacacagaacuu

SEQ ID NO: 1455443 - RNA, 19 nt, Artificial Sequence
  Description of Artificial Sequence: Synthetic oligonucleotide
gggacuaucuuaguuccca

SEQ ID NO: 1455444 - RNA, 19 nt, Artificial Sequence
  Description of Artificial Sequence: Synthetic oligonucleotide
aguucucgcucccggcggu

SEQ ID NO: 1455445 - RNA, 19 nt, Artificial Sequence
  Description of Artificial Sequence: Synthetic oligonucleotide
aucgggcgauaccagcaga

SEQ ID NO: 1455446 - RNA, 19 nt, Artificial Sequence
  Description of Artificial Sequence: Synthetic oligonucleotide
aggcaaguaaugacugagu

SEQ ID NO: 1455447 - RNA, 19 nt, Artificial Sequence
  Description of Artificial Sequence: Synthetic oligonucleotide
ucauaggcugguggaggcu

SEQ ID NO: 1455448 - RNA, 19 nt, Artificial Sequence
  Description of Artificial Sequence: Synthetic oligonucleotide
ggcaaccaggagcaugagc

SEQ ID NO: 1455449 - RNA, 19 nt, Artificial Sequence
  Description of Artificial Sequence: Synthetic oligonucleotide
uaggggaggccaguuguuc

SEQ ID NO: 1455450 - RNA, 19 nt, Artificial Sequence
  Description of Artificial Sequence: Synthetic oligonucleotide
auugagcucugccgccccu

SEQ ID NO: 1455451 - RNA, 19 nt, Artificial Sequence
  Description of Artificial Sequence: Synthetic oligonucleotide
gauccgcuucagcaucaca

SEQ ID NO: 1455452 - RNA, 19 nt, Artificial Sequence
  Description of Artificial Sequence: Synthetic oligonucleotide
gcuguaggagccauaguuc

SEQ ID NO: 1455453 - RNA, 19 nt, Artificial Sequence
  Description of Artificial Sequence: Synthetic oligonucleotide
agaugguaggggaggccag

SEQ ID NO: 1455454 - RNA, 19 nt, Artificial Sequence
  Description of Artificial Sequence: Synthetic oligonucleotide
uugagcucugccgccccug

SEQ ID NO: 1455455 - RNA, 19 nt, Artificial Sequence
  Description of Artificial Sequence: Synthetic oligonucleotide
ugagugcuguaggagccau

SEQ ID NO: 1455456 - RNA, 19 nt, Artificial Sequence
  Description of Artificial Sequence: Synthetic oligonucleotide
cugucgaguaugugugcca

SEQ ID NO: 1455457 - RNA, 19 nt, Artificial Sequence
  Description of Artificial Sequence: Synthetic oligonucleotide
agggauugucaagcucguc

SEQ ID NO: 1455458 - RNA, 19 nt, Artificial Sequence
  Description of Artificial Sequence: Synthetic oligonucleotide
uucccagcaccgcgacgcc

SEQ ID NO: 1455459 - RNA, 19 nt, Artificial Sequence
  Description of Artificial Sequence: Synthetic oligonucleotide
ucgucggagucggggaaug

SEQ ID NO: 1455460 - RNA, 19 nt, Artificial Sequence
  Description of Artificial Sequence: Synthetic oligonucleotide
ggacuaucuuaguucccac

SEQ ID NO: 1455461 - RNA, 19 nt, Artificial Sequence
  Description of Artificial Sequence: Synthetic oligonucleotide
gaagacuccggcagcaaau

SEQ ID NO: 1455462 - RNA, 19 nt, Artificial Sequence
  Description of Artificial Sequence: Synthetic oligonucleotide
cuugagggaucuccaugga

SEQ ID NO: 1455463 - RNA, 19 nt, Artificial Sequence
  Description of Artificial Sequence: Synthetic oligonucleotide
ggacaucccaguggguggg

SEQ ID NO: 1455464 - RNA, 19 nt, Artificial Sequence
  Description of Artificial Sequence: Synthetic oligonucleotide
ggcggcagcaguucgaacu

SEQ ID NO: 1455465 - RNA, 19 nt, Artificial Sequence
  Description of Artificial Sequence: Synthetic oligonucleotide
gacaucccagugggugggg

SEQ ID NO: 1455466 - RNA, 19 nt, Artificial Sequence
  Description of Artificial Sequence: Synthetic oligonucleotide
guuuagagucguggcugug

SEQ ID NO: 1455467 - RNA, 19 nt, Artificial Sequence
  Description of Artificial Sequence: Synthetic oligonucleotide
cgaagaaauugaaugaacu

SEQ ID NO: 1455468 - RNA, 19 nt, Artificial Sequence
  Description of Artificial Sequence: Synthetic oligonucleotide
caccgcgacgccagugaag

SEQ ID NO: 1455469 - RNA, 19 nt, Artificial Sequence
  Description of Artificial Sequence: Synthetic oligonucleotide
cuggaggacgaagaacaca

SEQ ID NO: 1455470 - RNA, 19 nt, Artificial Sequence
  Description of Artificial Sequence: Synthetic oligonucleotide
agagcccuauagaagucaa

SEQ ID NO: 1455471 - RNA, 19 nt, Artificial Sequence
  Description of Artificial Sequence: Synthetic oligonucleotide
gggucaggacaucccagug

SEQ ID NO: 1455472 - RNA, 19 nt, Artificial Sequence
  Description of Artificial Sequence: Synthetic oligonucleotide
cuaucacuccggaaagccu

SEQ ID NO: 1455473 - RNA, 19 nt, Artificial Sequence
  Description of Artificial Sequence: Synthetic oligonucleotide
aaacuggguuuggggugug

SEQ ID NO: 1455474 - RNA, 19 nt, Artificial Sequence
  Description of Artificial Sequence: Synthetic oligonucleotide
cagguuuagagucguggcu

SEQ ID NO: 1455475 - RNA, 19 nt, Artificial Sequence
  Description of Artificial Sequence: Synthetic oligonucleotide
auuggcggcagcaguucga

SEQ ID NO: 1455476 - RNA, 19 nt, Artificial Sequence
  Description of Artificial Sequence: Synthetic oligonucleotide
guaugccaauggccuggag

SEQ ID NO: 1455477 - RNA, 19 nt, Artificial Sequence
  Description of Artificial Sequence: Synthetic oligonucleotide
ccaaagcauagacagccca

SEQ ID NO: 1455478 - RNA, 19 nt, Artificial Sequence
  Description of Artificial Sequence: Synthetic oligonucleotide
cagagcccuauagaaguca

SEQ ID NO: 1455479 - RNA, 19 nt, Artificial Sequence
  Description of Artificial Sequence: Synthetic oligonucleotide
ggaguggauccgcuucagc

SEQ ID NO: 1455480 - RNA, 19 nt, Artificial Sequence
  Description of Artificial Sequence: Synthetic oligonucleotide
cugggucggugcuggauca

SEQ ID NO: 1455481 - RNA, 19 nt, Artificial Sequence
  Description of Artificial Sequence: Synthetic oligonucleotide
gcccggagaacucccuccg

SEQ ID NO: 1455482 - RNA, 19 nt, Artificial Sequence
  Description of Artificial Sequence: Synthetic oligonucleotide
ggccaguuguucugucgag

SEQ ID NO: 1455483 - RNA, 19 nt, Artificial Sequence
  Description of Artificial Sequence: Synthetic oligonucleotide
cgaagaacacauccuggac

SEQ ID NO: 1455484 - RNA, 19 nt, Artificial Sequence
  Description of Artificial Sequence: Synthetic oligonucleotide
gcggcagcaguucgaacug

SEQ ID NO: 1455485 - RNA, 19 nt, Artificial Sequence
  Description of Artificial Sequence: Synthetic oligonucleotide
ccgucacaauugcagagac

SEQ ID NO: 1455486 - RNA, 19 nt, Artificial Sequence
  Description of Artificial Sequence: Synthetic oligonucleotide
cucgguucucaaaaggguu

SEQ ID NO: 1455487 - RNA, 19 nt, Artificial Sequence
  Description of Artificial Sequence: Synthetic oligonucleotide
aacuggguuuggggugugu

SEQ ID NO: 1455488 - RNA, 19 nt, Artificial Sequence
  Description of Artificial Sequence: Synthetic oligonucleotide
gcugggucggugcuggauc

SEQ ID NO: 1455489 - RNA, 19 nt, Artificial Sequence
  Description of Artificial Sequence: Synthetic oligonucleotide
cuccggcagcaaauucuug

SEQ ID NO: 1455490 - RNA, 19 nt, Artificial Sequence
  Description of Artificial Sequence: Synthetic oligonucleotide
ggcaauggggcuggggcug

SEQ ID NO: 1455491 - RNA, 19 nt, Artificial Sequence
  Description of Artificial Sequence: Synthetic oligonucleotide
gucggggaauggguucccg

SEQ ID NO: 1455492 - RNA, 19 nt, Artificial Sequence
  Description of Artificial Sequence: Synthetic oligonucleotide
caagcucgucggagucggg

SEQ ID NO: 1455493 - RNA, 19 nt, Artificial Sequence
  Description of Artificial Sequence: Synthetic oligonucleotide
ggguuggagaagacuccgg

SEQ ID NO: 1455494 - RNA, 19 nt, Artificial Sequence
  Description of Artificial Sequence: Synthetic oligonucleotide
ggucggugcuggaucacag

SEQ ID NO: 1455495 - RNA, 19 nt, Artificial Sequence
  Description of Artificial Sequence: Synthetic oligonucleotide
gcaaggcugaacugggcaa

SEQ ID NO: 1455496 - RNA, 19 nt, Artificial Sequence
  Description of Artificial Sequence: Synthetic oligonucleotide
gagcaugagcacagcuaca

SEQ ID NO: 1455497 - RNA, 19 nt, Artificial Sequence
  Description of Artificial Sequence: Synthetic oligonucleotide
ugccaauggccuggaggac

SEQ ID NO: 1455498 - RNA, 19 nt, Artificial Sequence
  Description of Artificial Sequence: Synthetic oligonucleotide
caaggcugaacugggcaaa

SEQ ID NO: 1455499 - RNA, 19 nt, Artificial Sequence
  Description of Artificial Sequence: Synthetic oligonucleotide
ucccggcgguccaacuccu

SEQ ID NO: 1455500 - RNA, 19 nt, Artificial Sequence
  Description of Artificial Sequence: Synthetic oligonucleotide
auaggcugguggaggcucu

SEQ ID NO: 1455501 - RNA, 19 nt, Artificial Sequence
  Description of Artificial Sequence: Synthetic oligonucleotide
cggggaauggguucccgcc

SEQ ID NO: 1455502 - RNA, 19 nt, Artificial Sequence
  Description of Artificial Sequence: Synthetic oligonucleotide
gaugguaggggaggccagu

SEQ ID NO: 1455503 - RNA, 19 nt, Artificial Sequence
  Description of Artificial Sequence: Synthetic oligonucleotide
gccccugcccuccacgccc

SEQ ID NO: 1455504 - RNA, 19 nt, Artificial Sequence
  Description of Artificial Sequence: Synthetic oligonucleotide
cagcaggaaggcggcggcg

SEQ ID NO: 1455505 - RNA, 19 nt, Artificial Sequence
  Description of Artificial Sequence: Synthetic oligonucleotide
cguguuggugcucaccguc

SEQ ID NO: 1455506 - RNA, 19 nt, Artificial Sequence
  Description of Artificial Sequence: Synthetic oligonucleotide
gguuuagagucguggcugu

SEQ ID NO: 1455507 - RNA, 19 nt, Artificial Sequence
  Description of Artificial Sequence: Synthetic oligonucleotide
gcgacgccagugaagagca

SEQ ID NO: 1455508 - RNA, 19 nt, Artificial Sequence
  Description of Artificial Sequence: Synthetic oligonucleotide
cgucacaauugcagagacc

SEQ ID NO: 1455509 - RNA, 19 nt, Artificial Sequence
  Description of Artificial Sequence: Synthetic oligonucleotide
ggggacaaaggcaaguaau

SEQ ID NO: 1455510 - RNA, 19 nt, Artificial Sequence
  Description of Artificial Sequence: Synthetic oligonucleotide
gaauggguucccgccgucu

SEQ ID NO: 1455511 - RNA, 19 nt, Artificial Sequence
  Description of Artificial Sequence: Synthetic oligonucleotide
ccaacuccucugccuuucg

SEQ ID NO: 1455512 - RNA, 19 nt, Artificial Sequence
  Description of Artificial Sequence: Synthetic oligonucleotide
gcaucacaauucccagcac

SEQ ID NO: 1455513 - RNA, 19 nt, Artificial Sequence
  Description of Artificial Sequence: Synthetic oligonucleotide
ccaguuguucugucgagua

SEQ ID NO: 1455514 - RNA, 19 nt, Artificial Sequence
  Description of Artificial Sequence: Synthetic oligonucleotide
ucacuccggaaagccuuau

SEQ ID NO: 1455515 - RNA, 19 nt, Artificial Sequence
  Description of Artificial Sequence: Synthetic oligonucleotide
cuguggaauucagagcccu

SEQ ID NO: 1455516 - RNA, 19 nt, Artificial Sequence
  Description of Artificial Sequence: Synthetic oligonucleotide
ggugcucaccgucacaauu

SEQ ID NO: 1455517 - RNA, 19 nt, Artificial Sequence
  Description of Artificial Sequence: Synthetic oligonucleotide
cgcgacgccagugaagagc

SEQ ID NO: 1455518 - RNA, 19 nt, Artificial Sequence
  Description of Artificial Sequence: Synthetic oligonucleotide
cugagugcuguaggagcca

SEQ ID NO: 1455519 - RNA, 19 nt, Artificial Sequence
  Description of Artificial Sequence: Synthetic oligonucleotide
agaacacauccuggacgaa

SEQ ID NO: 1455520 - RNA, 19 nt, Artificial Sequence
  Description of Artificial Sequence: Synthetic oligonucleotide
gagucguggcuguggaauu

SEQ ID NO: 1455521 - RNA, 19 nt, Artificial Sequence
  Description of Artificial Sequence: Synthetic oligonucleotide
aucacuccggaaagccuua

SEQ ID NO: 1455522 - RNA, 19 nt, Artificial Sequence
  Description of Artificial Sequence: Synthetic oligonucleotide
gcagagacccagccacuga

SEQ ID NO: 1455523 - RNA, 19 nt, Artificial Sequence
  Description of Artificial Sequence: Synthetic oligonucleotide
cacugcugguuuccacaca

SEQ ID NO: 1455524 - RNA, 19 nt, Artificial Sequence
  Description of Artificial Sequence: Synthetic oligonucleotide
cauccuggacgaagaaaau

SEQ ID NO: 1455525 - RNA, 19 nt, Artificial Sequence
  Description of Artificial Sequence: Synthetic oligonucleotide
cugcacauccagagguagu

SEQ ID NO: 1455526 - RNA, 19 nt, Artificial Sequence
  Description of Artificial Sequence: Synthetic oligonucleotide
cugcauuggcggcagcagu

SEQ ID NO: 1455527 - RNA, 19 nt, Artificial Sequence
  Description of Artificial Sequence: Synthetic oligonucleotide
gccccugcggcugcauugg

SEQ ID NO: 1455528 - RNA, 19 nt, Artificial Sequence
  Description of Artificial Sequence: Synthetic oligonucleotide
gagguaguacaugguggau

SEQ ID NO: 1455529 - RNA, 19 nt, Artificial Sequence
  Description of Artificial Sequence: Synthetic oligonucleotide
gccgccccugcccuccacg

SEQ ID NO: 1455530 - RNA, 19 nt, Artificial Sequence
  Description of Artificial Sequence: Synthetic oligonucleotide
ugggacccugaaggcauuu

SEQ ID NO: 1455531 - RNA, 19 nt, Artificial Sequence
  Description of Artificial Sequence: Synthetic oligonucleotide
ggaauggguucccgccguc

SEQ ID NO: 1455532 - RNA, 19 nt, Artificial Sequence
  Description of Artificial Sequence: Synthetic oligonucleotide
ggcggcaauggggcugggg

SEQ ID NO: 1455533 - RNA, 19 nt, Artificial Sequence
  Description of Artificial Sequence: Synthetic oligonucleotide
caguuguucugucgaguau

SEQ ID NO: 1455534 - RNA, 19 nt, Artificial Sequence
  Description of Artificial Sequence: Synthetic oligonucleotide
gguggcagggucaggacau

SEQ ID NO: 1455535 - RNA, 19 nt, Artificial Sequence
  Description of Artificial Sequence: Synthetic oligonucleotide
cccggagaacucccuccgg

SEQ ID NO: 1455536 - RNA, 19 nt, Artificial Sequence
  Description of Artificial Sequence: Synthetic oligonucleotide
gcauuggcggcagcaguuc

SEQ ID NO: 1455537 - RNA, 19 nt, Artificial Sequence
  Description of Artificial Sequence: Synthetic oligonucleotide
ggaggcucucgguucucaa

SEQ ID NO: 1455538 - RNA, 19 nt, Artificial Sequence
  Description of Artificial Sequence: Synthetic oligonucleotide
gguaugccaauggccugga

SEQ ID NO: 1455539 - RNA, 19 nt, Artificial Sequence
  Description of Artificial Sequence: Synthetic oligonucleotide
cagggauagggacuaucuu

SEQ ID NO: 1455540 - RNA, 19 nt, Artificial Sequence
  Description of Artificial Sequence: Synthetic oligonucleotide
cagcaccgcgacgccagug

SEQ ID NO: 1455541 - RNA, 19 nt, Artificial Sequence
  Description of Artificial Sequence: Synthetic oligonucleotide
cacuccggaaagccuuaua

SEQ ID NO: 1455542 - RNA, 19 nt, Artificial Sequence
  Description of Artificial Sequence: Synthetic oligonucleotide
gcgguacaaggaguggauc

SEQ ID NO: 1455543 - RNA, 19 nt, Artificial Sequence
  Description of Artificial Sequence: Synthetic oligonucleotide
gggaauggguucccgccgu

SEQ ID NO: 1455544 - RNA, 19 nt, Artificial Sequence
  Description of Artificial Sequence: Synthetic oligonucleotide
cuacagccguguuggugcu

SEQ ID NO: 1455545 - RNA, 19 nt, Artificial Sequence
  Description of Artificial Sequence: Synthetic oligonucleotide
guaguacaugguggauacu

SEQ ID NO: 1455546 - RNA, 19 nt, Artificial Sequence
  Description of Artificial Sequence: Synthetic oligonucleotide
gagugcuguaggagccaua

SEQ ID NO: 1455547 - RNA, 19 nt, Artificial Sequence
  Description of Artificial Sequence: Synthetic oligonucleotide
cagccguguuggugcucac

SEQ ID NO: 1455548 - RNA, 19 nt, Artificial Sequence
  Description of Artificial Sequence: Synthetic oligonucleotide
gagcccuauagaagucaau

SEQ ID NO: 1455549 - RNA, 19 nt, Artificial Sequence
  Description of Artificial Sequence: Synthetic oligonucleotide
caguucgaacugcuggguu

SEQ ID NO: 1455550 - RNA, 19 nt, Artificial Sequence
  Description of Artificial Sequence: Synthetic oligonucleotide
ucgcucccggcgguccaac

SEQ ID NO: 1455551 - RNA, 19 nt, Artificial Sequence
  Description of Artificial Sequence: Synthetic oligonucleotide
ccacccugguaugccaaug

SEQ ID NO: 1455552 - RNA, 19 nt, Artificial Sequence
  Description of Artificial Sequence: Synthetic oligonucleotide
gggucggugcuggaucaca

SEQ ID NO: 1455553 - RNA, 19 nt, Artificial Sequence
  Description of Artificial Sequence: Synthetic oligonucleotide
ggcggcccggagaacuccc

SEQ ID NO: 1455554 - RNA, 19 nt, Artificial Sequence
  Description of Artificial Sequence: Synthetic oligonucleotide
ccggcagcaaauucuugcu

SEQ ID NO: 1455555 - RNA, 19 nt, Artificial Sequence
  Description of Artificial Sequence: Synthetic oligonucleotide
gaacucccuccggugugcu

SEQ ID NO: 1455556 - RNA, 19 nt, Artificial Sequence
  Description of Artificial Sequence: Synthetic oligonucleotide
ucccgccgucucugcucug

SEQ ID NO: 1455557 - RNA, 19 nt, Artificial Sequence
  Description of Artificial Sequence: Synthetic oligonucleotide
ccgccccugcccuccacgc

SEQ ID NO: 1455558 - RNA, 19 nt, Artificial Sequence
  Description of Artificial Sequence: Synthetic oligonucleotide
gccaguuguucugucgagu

SEQ ID NO: 1455559 - RNA, 19 nt, Artificial Sequence
  Description of Artificial Sequence: Synthetic oligonucleotide
gccuuauacaucgggcgau

SEQ ID NO: 1455560 - RNA, 19 nt, Artificial Sequence
  Description of Artificial Sequence: Synthetic oligonucleotide
gcaguucgaacugcugggu

SEQ ID NO: 1455561 - RNA, 19 nt, Artificial Sequence
  Description of Artificial Sequence: Synthetic oligonucleotide
gcucaccgucacaauugca

SEQ ID NO: 1455562 - RNA, 19 nt, Artificial Sequence
  Description of Artificial Sequence: Synthetic oligonucleotide
ggcgguacaaggaguggau

SEQ ID NO: 1455563 - RNA, 19 nt, Artificial Sequence
  Description of Artificial Sequence: Synthetic oligonucleotide
gcuggguccuggaagggau

SEQ ID NO: 1455564 - RNA, 19 nt, Artificial Sequence
  Description of Artificial Sequence: Synthetic oligonucleotide
ccccugccgcagcaggaag

SEQ ID NO: 1455565 - RNA, 19 nt, Artificial Sequence
  Description of Artificial Sequence: Synthetic oligonucleotide
uggcggcaauggggcuggg

SEQ ID NO: 1455566 - RNA, 19 nt, Artificial Sequence
  Description of Artificial Sequence: Synthetic oligonucleotide
augggacccugaaggcauu

SEQ ID NO: 1455567 - RNA, 19 nt, Artificial Sequence
  Description of Artificial Sequence: Synthetic oligonucleotide
gguucccgccgucucugcu

SEQ ID NO: 1455568 - RNA, 19 nt, Artificial Sequence
  Description of Artificial Sequence: Synthetic oligonucleotide
gcaccgcgacgccagugaa

SEQ ID NO: 1455569 - RNA, 19 nt, Artificial Sequence
  Description of Artificial Sequence: Synthetic oligonucleotide
cgccagugaagagcagggc

SEQ ID NO: 1455570 - RNA, 19 nt, Artificial Sequence
  Description of Artificial Sequence: Synthetic oligonucleotide
cgucggagucggggaaugg

SEQ ID NO: 1455571 - RNA, 19 nt, Artificial Sequence
  Description of Artificial Sequence: Synthetic oligonucleotide
ccgcgacgccagugaagag

SEQ ID NO: 1455572 - RNA, 19 nt, Artificial Sequence
  Description of Artificial Sequence: Synthetic oligonucleotide
cgaguaugugugccaccca

SEQ ID NO: 1455573 - RNA, 19 nt, Artificial Sequence
  Description of Artificial Sequence: Synthetic oligonucleotide
cucgucggagucggggaau

SEQ ID NO: 1455574 - RNA, 19 nt, Artificial Sequence
  Description of Artificial Sequence: Synthetic oligonucleotide
cggcgguacaaggagugga

SEQ ID NO: 1455575 - RNA, 19 nt, Artificial Sequence
  Description of Artificial Sequence: Synthetic oligonucleotide
cucgcucccggcgguccaa

SEQ ID NO: 1455576 - RNA, 19 nt, Artificial Sequence
  Description of Artificial Sequence: Synthetic oligonucleotide
cucugcucugagccauguu

SEQ ID NO: 1455577 - RNA, 19 nt, Artificial Sequence
  Description of Artificial Sequence: Synthetic oligonucleotide
ccggcgguccaacuccucu

SEQ ID NO: 1455578 - RNA, 19 nt, Artificial Sequence
  Description of Artificial Sequence: Synthetic oligonucleotide
cagcuacagccguguuggu

SEQ ID NO: 1455579 - RNA, 19 nt, Artificial Sequence
  Description of Artificial Sequence: Synthetic oligonucleotide
gccccugccgcagcaggaa

SEQ ID NO: 1455580 - RNA, 19 nt, Artificial Sequence
  Description of Artificial Sequence: Synthetic oligonucleotide
cgccccugcccuccacgcc

SEQ ID NO: 1455581 - RNA, 19 nt, Artificial Sequence
  Description of Artificial Sequence: Synthetic oligonucleotide
cgggcgauaccagcagaca

SEQ ID NO: 1455582 - RNA, 19 nt, Artificial Sequence
  Description of Artificial Sequence: Synthetic oligonucleotide
ggcauacugcuggcugggu

SEQ ID NO: 1455583 - RNA, 19 nt, Artificial Sequence
  Description of Artificial Sequence: Synthetic oligonucleotide
ggcugggucggugcuggau

SEQ ID NO: 1455584 - RNA, 19 nt, Artificial Sequence
  Description of Artificial Sequence: Synthetic oligonucleotide
gcggcggcccggagaacuc

SEQ ID NO: 1455585 - RNA, 19 nt, Artificial Sequence
  Description of Artificial Sequence: Synthetic oligonucleotide
ccuccacgccccugccgca

SEQ ID NO: 1455586 - RNA, 19 nt, Artificial Sequence
  Description of Artificial Sequence: Synthetic oligonucleotide
ggguggcggcaauggggcu

SEQ ID NO: 1455587 - RNA, 19 nt, Artificial Sequence
  Description of Artificial Sequence: Synthetic oligonucleotide
cgguucucaaaaggguugu

SEQ ID NO: 1455588 - RNA, 19 nt, Artificial Sequence
  Description of Artificial Sequence: Synthetic oligonucleotide
ccguguuggugcucaccgu

SEQ ID NO: 1455589 - RNA, 19 nt, Artificial Sequence
  Description of Artificial Sequence: Synthetic oligonucleotide
gggacccugaaggcauuuu

SEQ ID NO: 1455590 - RNA, 19 nt, Artificial Sequence
  Description of Artificial Sequence: Synthetic oligonucleotide
cggcggcccggagaacucc

SEQ ID NO: 1455591 - RNA, 19 nt, Artificial Sequence
  Description of Artificial Sequence: Synthetic oligonucleotide
ccacgccccugccgcagca

SEQ ID NO: 1455592 - RNA, 19 nt, Artificial Sequence
  Description of Artificial Sequence: Synthetic oligonucleotide
gcguggcauacugcuggcu

SEQ ID NO: 1455593 - RNA, 19 nt, Artificial Sequence
  Description of Artificial Sequence: Synthetic oligonucleotide
cgguugaguuccuccugcu

SEQ ID NO: 1455594 - RNA, 19 nt, Artificial Sequence
  Description of Artificial Sequence: Synthetic oligonucleotide
cccacccugguaugccaau

SEQ ID NO: 1455595 - RNA, 19 nt, Artificial Sequence
  Description of Artificial Sequence: Synthetic oligonucleotide
gcggcccggagaacucccu

SEQ ID NO: 1455596 - RNA, 19 nt, Artificial Sequence
  Description of Artificial Sequence: Synthetic oligonucleotide
cgcucccggcgguccaacu

SEQ ID NO: 1455597 - RNA, 19 nt, Artificial Sequence
  Description of Artificial Sequence: Synthetic oligonucleotide
aguuaauucaaacaaguac

SEQ ID NO: 1455598 - RNA, 19 nt, Artificial Sequence
  Description of Artificial Sequence: Synthetic oligonucleotide
auaaauaccuaauuacuac

SEQ ID NO: 1455599 - RNA, 19 nt, Artificial Sequence
  Description of Artificial Sequence: Synthetic oligonucleotide
acaagaaacaaccagccgg

SEQ ID NO: 1455600 - RNA, 19 nt, Artificial Sequence
  Description of Artificial Sequence: Synthetic oligonucleotide
uacaaaacuagugagaugc

SEQ ID NO: 1455601 - RNA, 19 nt, Artificial Sequence
  Description of Artificial Sequence: Synthetic oligonucleotide
aaaauaagguaccuucggg

SEQ ID NO: 1455602 - RNA, 19 nt, Artificial Sequence
  Description of Artificial Sequence: Synthetic oligonucleotide
aacacaagaaacaaccagc

SEQ ID NO: 1455603 - RNA, 19 nt, Artificial Sequence
  Description of Artificial Sequence: Synthetic oligonucleotide
aauaauauuacaauacagu

SEQ ID NO: 1455604 - RNA, 19 nt, Artificial Sequence
  Description of Artificial Sequence: Synthetic oligonucleotide
aacggguuuaauuucacag

SEQ ID NO: 1455605 - RNA, 19 nt, Artificial Sequence
  Description of Artificial Sequence: Synthetic oligonucleotide
uauagguucagccuagugc

SEQ ID NO: 1455606 - RNA, 19 nt, Artificial Sequence
  Description of Artificial Sequence: Synthetic oligonucleotide
agcaacacaagaaacaacc

SEQ ID NO: 1455607 - RNA, 19 nt, Artificial Sequence
  Description of Artificial Sequence: Synthetic oligonucleotide
aaguuagucuuacuccucc

SEQ ID NO: 1455608 - RNA, 19 nt, Artificial Sequence
  Description of Artificial Sequence: Synthetic oligonucleotide
aaucccuugccacuggcgc

SEQ ID NO: 1455609 - RNA, 19 nt, Artificial Sequence
  Description of Artificial Sequence: Synthetic oligonucleotide
uuaugauuuaggaagauuu

SEQ ID NO: 1455610 - RNA, 19 nt, Artificial Sequence
  Description of Artificial Sequence: Synthetic oligonucleotide
ucauaaauaccuaauuacu

SEQ ID NO: 1455611 - RNA, 19 nt, Artificial Sequence
  Description of Artificial Sequence: Synthetic oligonucleotide
aauaagguaccuucgggug

SEQ ID NO: 1455612 - RNA, 19 nt, Artificial Sequence
  Description of Artificial Sequence: Synthetic oligonucleotide
ugugucuuagcugagacag

SEQ ID NO: 1455613 - RNA, 19 nt, Artificial Sequence
  Description of Artificial Sequence: Synthetic oligonucleotide
aaggugaccaaucgugagc

SEQ ID NO: 1455614 - RNA, 19 nt, Artificial Sequence
  Description of Artificial Sequence: Synthetic oligonucleotide
uaaaguagccccuaggcca

SEQ ID NO: 1455615 - RNA, 19 nt, Artificial Sequence
  Description of Artificial Sequence: Synthetic oligonucleotide
aaauaagguaccuucgggu

SEQ ID NO: 1455616 - RNA, 19 nt, Artificial Sequence
  Description of Artificial Sequence: Synthetic oligonucleotide
uuugcuuguacacacccag

SEQ ID NO: 1455617 - RNA, 19 nt, Artificial Sequence
  Description of Artificial Sequence: Synthetic oligonucleotide
aagagguuaaaacucccag

SEQ ID NO: 1455618 - RNA, 19 nt, Artificial Sequence
  Description of Artificial Sequence: Synthetic oligonucleotide
augaaaacgccacacacag

SEQ ID NO: 1455619 - RNA, 19 nt, Artificial Sequence
  Description of Artificial Sequence: Synthetic oligonucleotide
gauuacauuggagucaagg

SEQ ID NO: 1455620 - RNA, 19 nt, Artificial Sequence
  Description of Artificial Sequence: Synthetic oligonucleotide
auaauauuacaauacaguu

SEQ ID NO: 1455621 - RNA, 19 nt, Artificial Sequence
  Description of Artificial Sequence: Synthetic oligonucleotide
aagggaaaccgucaccucg

SEQ ID NO: 1455622 - RNA, 19 nt, Artificial Sequence
  Description of Artificial Sequence: Synthetic oligonucleotide
uuagucuuacuccuccugg

SEQ ID NO: 1455623 - RNA, 19 nt, Artificial Sequence
  Description of Artificial Sequence: Synthetic oligonucleotide
cuaaacugccccuagagug

SEQ ID NO: 1455624 - RNA, 19 nt, Artificial Sequence
  Description of Artificial Sequence: Synthetic oligonucleotide
aaggaauaaaacugccauc

SEQ ID NO: 1455625 - RNA, 19 nt, Artificial Sequence
  Description of Artificial Sequence: Synthetic oligonucleotide
uaucccuuaaaguagcccc

SEQ ID NO: 1455626 - RNA, 19 nt, Artificial Sequence
  Description of Artificial Sequence: Synthetic oligonucleotide
cuuaaaguagccccuaggc

SEQ ID NO: 1455627 - RNA, 19 nt, Artificial Sequence
  Description of Artificial Sequence: Synthetic oligonucleotide
guuaauucaaacaaguaca

SEQ ID NO: 1455628 - RNA, 19 nt, Artificial Sequence
  Description of Artificial Sequence: Synthetic oligonucleotide
ugguaagcuucaaagauug

SEQ ID NO: 1455629 - RNA, 19 nt, Artificial Sequence
  Description of Artificial Sequence: Synthetic oligonucleotide
caacuuguaagcuucaaac

SEQ ID NO: 1455630 - RNA, 19 nt, Artificial Sequence
  Description of Artificial Sequence: Synthetic oligonucleotide
uuaaaguagccccuaggcc

SEQ ID NO: 1455631 - RNA, 19 nt, Artificial Sequence
  Description of Artificial Sequence: Synthetic oligonucleotide
agaugacucgauuacauug

SEQ ID NO: 1455632 - RNA, 19 nt, Artificial Sequence
  Description of Artificial Sequence: Synthetic oligonucleotide
acguucucaacuuguaagc

SEQ ID NO: 1455633 - RNA, 19 nt, Artificial Sequence
  Description of Artificial Sequence: Synthetic oligonucleotide
aagaaggaauaaaacugcc

SEQ ID NO: 1455634 - RNA, 19 nt, Artificial Sequence
  Description of Artificial Sequence: Synthetic oligonucleotide
auagguucagccuagugca

SEQ ID NO: 1455635 - RNA, 19 nt, Artificial Sequence
  Description of Artificial Sequence: Synthetic oligonucleotide
ugcaaguuagucuuacucc

SEQ ID NO: 1455636 - RNA, 19 nt, Artificial Sequence
  Description of Artificial Sequence: Synthetic oligonucleotide
auugccucaaucccuugcc

SEQ ID NO: 1455637 - RNA, 19 nt, Artificial Sequence
  Description of Artificial Sequence: Synthetic oligonucleotide
uauucaagguaauaaaaua

SEQ ID NO: 1455638 - RNA, 19 nt, Artificial Sequence
  Description of Artificial Sequence: Synthetic oligonucleotide
ucggauaucccuuaaagua

SEQ ID NO: 1455639 - RNA, 19 nt, Artificial Sequence
  Description of Artificial Sequence: Synthetic oligonucleotide
gaagaaggaauaaaacugc

SEQ ID NO: 1455640 - RNA, 19 nt, Artificial Sequence
  Description of Artificial Sequence: Synthetic oligonucleotide
auuacauuggagucaaggu

SEQ ID NO: 1455641 - RNA, 19 nt, Artificial Sequence
  Description of Artificial Sequence: Synthetic oligonucleotide
agacagaugacucgauuac

SEQ ID NO: 1455642 - RNA, 19 nt, Artificial Sequence
  Description of Artificial Sequence: Synthetic oligonucleotide
aauucuucgcuucaugcau

SEQ ID NO: 1455643 - RNA, 19 nt, Artificial Sequence
  Description of Artificial Sequence: Synthetic oligonucleotide
uaugcuauagguucagccu

SEQ ID NO: 1455644 - RNA, 19 nt, Artificial Sequence
  Description of Artificial Sequence: Synthetic oligonucleotide
uaacgcacaccucagaggu

SEQ ID NO: 1455645 - RNA, 19 nt, Artificial Sequence
  Description of Artificial Sequence: Synthetic oligonucleotide
cuaugcuauagguucagcc

SEQ ID NO: 1455646 - RNA, 19 nt, Artificial Sequence
  Description of Artificial Sequence: Synthetic oligonucleotide
caaagauugccucaauccc

SEQ ID NO: 1455647 - RNA, 19 nt, Artificial Sequence
  Description of Artificial Sequence: Synthetic oligonucleotide
gaugacucgauuacauugg

SEQ ID NO: 1455648 - RNA, 19 nt, Artificial Sequence
  Description of Artificial Sequence: Synthetic oligonucleotide
agaaagagaaacugugucu

SEQ ID NO: 1455649 - RNA, 19 nt, Artificial Sequence
  Description of Artificial Sequence: Synthetic oligonucleotide
uaccuaauuacuacauuca

SEQ ID NO: 1455650 - RNA, 19 nt, Artificial Sequence
  Description of Artificial Sequence: Synthetic oligonucleotide
acacaagaaacaaccagcc

SEQ ID NO: 1455651 - RNA, 19 nt, Artificial Sequence
  Description of Artificial Sequence: Synthetic oligonucleotide
acucgauuacauuggaguc

SEQ ID NO: 1455652 - RNA, 19 nt, Artificial Sequence
  Description of Artificial Sequence: Synthetic oligonucleotide
aggaauaaaacugccauca

SEQ ID NO: 1455653 - RNA, 19 nt, Artificial Sequence
  Description of Artificial Sequence: Synthetic oligonucleotide
gaagugaagucaaagcuug

SEQ ID NO: 1455654 - RNA, 19 nt, Artificial Sequence
  Description of Artificial Sequence: Synthetic oligonucleotide
acugccaucagaaagagaa

SEQ ID NO: 1455655 - RNA, 19 nt, Artificial Sequence
  Description of Artificial Sequence: Synthetic oligonucleotide
auuggagucaaggugaugu

SEQ ID NO: 1455656 - RNA, 19 nt, Artificial Sequence
  Description of Artificial Sequence: Synthetic oligonucleotide
uuagcugagacagaugacu

SEQ ID NO: 1455657 - RNA, 19 nt, Artificial Sequence
  Description of Artificial Sequence: Synthetic oligonucleotide
uaggguugaaguuaagcac

SEQ ID NO: 1455658 - RNA, 19 nt, Artificial Sequence
  Description of Artificial Sequence: Synthetic oligonucleotide
ucccuuagccacaugcacg

SEQ ID NO: 1455659 - RNA, 19 nt, Artificial Sequence
  Description of Artificial Sequence: Synthetic oligonucleotide
uucagugcaaguuagucuu

SEQ ID NO: 1455660 - RNA, 19 nt, Artificial Sequence
  Description of Artificial Sequence: Synthetic oligonucleotide
guaugaaaacgccacacac

SEQ ID NO: 1455661 - RNA, 19 nt, Artificial Sequence
  Description of Artificial Sequence: Synthetic oligonucleotide
agcgguagcaauccagugg

SEQ ID NO: 1455662 - RNA, 19 nt, Artificial Sequence
  Description of Artificial Sequence: Synthetic oligonucleotide
ugcacggugggcaucagug

SEQ ID NO: 1455663 - RNA, 19 nt, Artificial Sequence
  Description of Artificial Sequence: Synthetic oligonucleotide
cacguucucaacuuguaag

SEQ ID NO: 1455664 - RNA, 19 nt, Artificial Sequence
  Description of Artificial Sequence: Synthetic oligonucleotide
uuucugacuccgcagcucc

SEQ ID NO: 1455665 - RNA, 19 nt, Artificial Sequence
  Description of Artificial Sequence: Synthetic oligonucleotide
agguuaaaacucccagggc

SEQ ID NO: 1455666 - RNA, 19 nt, Artificial Sequence
  Description of Artificial Sequence: Synthetic oligonucleotide
aguacaaaacuagugagau

SEQ ID NO: 1455667 - RNA, 19 nt, Artificial Sequence
  Description of Artificial Sequence: Synthetic oligonucleotide
ugaaagaguacagacugcu

SEQ ID NO: 1455668 - RNA, 19 nt, Artificial Sequence
  Description of Artificial Sequence: Synthetic oligonucleotide
uucaaagauugccucaauc

SEQ ID NO: 1455669 - RNA, 19 nt, Artificial Sequence
  Description of Artificial Sequence: Synthetic oligonucleotide
ucuaggguugaaguuaagc

SEQ ID NO: 1455670 - RNA, 19 nt, Artificial Sequence
  Description of Artificial Sequence: Synthetic oligonucleotide
aagucaaagcuugaguacu

SEQ ID NO: 1455671 - RNA, 19 nt, Artificial Sequence
  Description of Artificial Sequence: Synthetic oligonucleotide
aggugaccaaucgugagcc

SEQ ID NO: 1455672 - RNA, 19 nt, Artificial Sequence
  Description of Artificial Sequence: Synthetic oligonucleotide
aauaccuaauuacuacauu

SEQ ID NO: 1455673 - RNA, 19 nt, Artificial Sequence
  Description of Artificial Sequence: Synthetic oligonucleotide
caaacaaguacacuuagaa

SEQ ID NO: 1455674 - RNA, 19 nt, Artificial Sequence
  Description of Artificial Sequence: Synthetic oligonucleotide
agaagccuugacuagcuug

SEQ ID NO: 1455675 - RNA, 19 nt, Artificial Sequence
  Description of Artificial Sequence: Synthetic oligonucleotide
agugagaugccuccucggg

SEQ ID NO: 1455676 - RNA, 19 nt, Artificial Sequence
  Description of Artificial Sequence: Synthetic oligonucleotide
gacagcuccacucaucuuc

SEQ ID NO: 1455677 - RNA, 19 nt, Artificial Sequence
  Description of Artificial Sequence: Synthetic oligonucleotide
acaaguacacuuagaacgg

SEQ ID NO: 1455678 - RNA, 19 nt, Artificial Sequence
  Description of Artificial Sequence: Synthetic oligonucleotide
agaaacaaccagccggcuc

SEQ ID NO: 1455679 - RNA, 19 nt, Artificial Sequence
  Description of Artificial Sequence: Synthetic oligonucleotide
ucuaaacugccccuagagu

SEQ ID NO: 1455680 - RNA, 19 nt, Artificial Sequence
  Description of Artificial Sequence: Synthetic oligonucleotide
guagcaauccagugguggg

SEQ ID NO: 1455681 - RNA, 19 nt, Artificial Sequence
  Description of Artificial Sequence: Synthetic oligonucleotide
aaagauugccucaaucccu

SEQ ID NO: 1455682 - RNA, 19 nt, Artificial Sequence
  Description of Artificial Sequence: Synthetic oligonucleotide
aaacgccacacacagcggu

SEQ ID NO: 1455683 - RNA, 19 nt, Artificial Sequence
  Description of Artificial Sequence: Synthetic oligonucleotide
gaaggaauaaaacugccau

SEQ ID NO: 1455684 - RNA, 19 nt, Artificial Sequence
  Description of Artificial Sequence: Synthetic oligonucleotide
uagucuuacuccuccuggg

SEQ ID NO: 1455685 - RNA, 19 nt, Artificial Sequence
  Description of Artificial Sequence: Synthetic oligonucleotide
gaaggugaccaaucgugag

SEQ ID NO: 1455686 - RNA, 19 nt, Artificial Sequence
  Description of Artificial Sequence: Synthetic oligonucleotide
cuaacgcacaccucagagg

SEQ ID NO: 1455687 - RNA, 19 nt, Artificial Sequence
  Description of Artificial Sequence: Synthetic oligonucleotide
ugacuagcuugcaugcucc

SEQ ID NO: 1455688 - RNA, 19 nt, Artificial Sequence
  Description of Artificial Sequence: Synthetic oligonucleotide
uuagaacggguuuaauuuc

SEQ ID NO: 1455689 - RNA, 19 nt, Artificial Sequence
  Description of Artificial Sequence: Synthetic oligonucleotide
aaguuaagcacuggaucag

SEQ ID NO: 1455690 - RNA, 19 nt, Artificial Sequence
  Description of Artificial Sequence: Synthetic oligonucleotide
acuuagaacggguuuaauu

SEQ ID NO: 1455691 - RNA, 19 nt, Artificial Sequence
  Description of Artificial Sequence: Synthetic oligonucleotide
uucuucgcuucaugcaugg

SEQ ID NO: 1455692 - RNA, 19 nt, Artificial Sequence
  Description of Artificial Sequence: Synthetic oligonucleotide
aaauaccuaauuacuacau

SEQ ID NO: 1455693 - RNA, 19 nt, Artificial Sequence
  Description of Artificial Sequence: Synthetic oligonucleotide
aaguacaaaacuagugaga

SEQ ID NO: 1455694 - RNA, 19 nt, Artificial Sequence
  Description of Artificial Sequence: Synthetic oligonucleotide
gaagccuugacuagcuugc

SEQ ID NO: 1455695 - RNA, 19 nt, Artificial Sequence
  Description of Artificial Sequence: Synthetic oligonucleotide
gaaaccgucaccucggaua

SEQ ID NO: 1455696 - RNA, 19 nt, Artificial Sequence
  Description of Artificial Sequence: Synthetic oligonucleotide
uggacagcuccacucaucu

SEQ ID NO: 1455697 - RNA, 19 nt, Artificial Sequence
  Description of Artificial Sequence: Synthetic oligonucleotide
ugcugugcgggccauuucc

SEQ ID NO: 1455698 - RNA, 19 nt, Artificial Sequence
  Description of Artificial Sequence: Synthetic oligonucleotide
cuagugagaugccuccucg

SEQ ID NO: 1455699 - RNA, 19 nt, Artificial Sequence
  Description of Artificial Sequence: Synthetic oligonucleotide
cauaaauaccuaauuacua

SEQ ID NO: 1455700 - RNA, 19 nt, Artificial Sequence
  Description of Artificial Sequence: Synthetic oligonucleotide
uugacuagcuugcaugcuc

SEQ ID NO: 1455701 - RNA, 19 nt, Artificial Sequence
  Description of Artificial Sequence: Synthetic oligonucleotide
ucuauguguuccugguaag

SEQ ID NO: 1455702 - RNA, 19 nt, Artificial Sequence
  Description of Artificial Sequence: Synthetic oligonucleotide
auauucaagguaauaaaau

SEQ ID NO: 1455703 - RNA, 19 nt, Artificial Sequence
  Description of Artificial Sequence: Synthetic oligonucleotide
ugcuauagguucagccuag

SEQ ID NO: 1455704 - RNA, 19 nt, Artificial Sequence
  Description of Artificial Sequence: Synthetic oligonucleotide
aaaacucccagggcugcgg

SEQ ID NO: 1455705 - RNA, 19 nt, Artificial Sequence
  Description of Artificial Sequence: Synthetic oligonucleotide
ugacucgauuacauuggag

SEQ ID NO: 1455706 - RNA, 19 nt, Artificial Sequence
  Description of Artificial Sequence: Synthetic oligonucleotide
ugccaauggcgcaggaagg

SEQ ID NO: 1455707 - RNA, 19 nt, Artificial Sequence
  Description of Artificial Sequence: Synthetic oligonucleotide
acgcacaccucagaggugc

SEQ ID NO: 1455708 - RNA, 19 nt, Artificial Sequence
  Description of Artificial Sequence: Synthetic oligonucleotide
uacagacugcugcuaagug

SEQ ID NO: 1455709 - RNA, 19 nt, Artificial Sequence
  Description of Artificial Sequence: Synthetic oligonucleotide
uauguguuccugguaagcu

SEQ ID NO: 1455710 - RNA, 19 nt, Artificial Sequence
  Description of Artificial Sequence: Synthetic oligonucleotide
aaacucccagggcugcggg

SEQ ID NO: 1455711 - RNA, 19 nt, Artificial Sequence
  Description of Artificial Sequence: Synthetic oligonucleotide
ucgaggcacagcaacacaa

SEQ ID NO: 1455712 - RNA, 19 nt, Artificial Sequence
  Description of Artificial Sequence: Synthetic oligonucleotide
cacaagaaacaaccagccg

SEQ ID NO: 1455713 - RNA, 19 nt, Artificial Sequence
  Description of Artificial Sequence: Synthetic oligonucleotide
auaagguaccuucgggugu

SEQ ID NO: 1455714 - RNA, 19 nt, Artificial Sequence
  Description of Artificial Sequence: Synthetic oligonucleotide
acuggcgccuaucugucuc

SEQ ID NO: 1455715 - RNA, 19 nt, Artificial Sequence
  Description of Artificial Sequence: Synthetic oligonucleotide
cacagcaucuaaacugccc

SEQ ID NO: 1455716 - RNA, 19 nt, Artificial Sequence
  Description of Artificial Sequence: Synthetic oligonucleotide
guggcuaacgcacaccuca

SEQ ID NO: 1455717 - RNA, 19 nt, Artificial Sequence
  Description of Artificial Sequence: Synthetic oligonucleotide
acaggcuacggcaagaagu

SEQ ID NO: 1455718 - RNA, 19 nt, Artificial Sequence
  Description of Artificial Sequence: Synthetic oligonucleotide
gagacagaugacucgauua

SEQ ID NO: 1455719 - RNA, 19 nt, Artificial Sequence
  Description of Artificial Sequence: Synthetic oligonucleotide
cuuagaacggguuuaauuu

SEQ ID NO: 1455720 - RNA, 19 nt, Artificial Sequence
  Description of Artificial Sequence: Synthetic oligonucleotide
ucucccuuagccacaugca

SEQ ID NO: 1455721 - RNA, 19 nt, Artificial Sequence
  Description of Artificial Sequence: Synthetic oligonucleotide
caggcuacggcaagaagug

SEQ ID NO: 1455722 - RNA, 19 nt, Artificial Sequence
  Description of Artificial Sequence: Synthetic oligonucleotide
uuuaugauuuaggaagauu

SEQ ID NO: 1455723 - RNA, 19 nt, Artificial Sequence
  Description of Artificial Sequence: Synthetic oligonucleotide
cuaggccagugcauggugg

SEQ ID NO: 1455724 - RNA, 19 nt, Artificial Sequence
  Description of Artificial Sequence: Synthetic oligonucleotide
aaacugccccuagagugac

SEQ ID NO: 1455725 - RNA, 19 nt, Artificial Sequence
  Description of Artificial Sequence: Synthetic oligonucleotide
uagugcaagggaaaccguc

SEQ ID NO: 1455726 - RNA, 19 nt, Artificial Sequence
  Description of Artificial Sequence: Synthetic oligonucleotide
ugauguccucucuggagcc

SEQ ID NO: 1455727 - RNA, 19 nt, Artificial Sequence
  Description of Artificial Sequence: Synthetic oligonucleotide
uagugagaugccuccucgg

SEQ ID NO: 1455728 - RNA, 19 nt, Artificial Sequence
  Description of Artificial Sequence: Synthetic oligonucleotide
ugucuuagcugagacagau

SEQ ID NO: 1455729 - RNA, 19 nt, Artificial Sequence
  Description of Artificial Sequence: Synthetic oligonucleotide
uuaaaacucccagggcugc

SEQ ID NO: 1455730 - RNA, 19 nt, Artificial Sequence
  Description of Artificial Sequence: Synthetic oligonucleotide
guaagcuucaaaccuccca

SEQ ID NO: 1455731 - RNA, 19 nt, Artificial Sequence
  Description of Artificial Sequence: Synthetic oligonucleotide
guagggcacacacaaguac

SEQ ID NO: 1455732 - RNA, 19 nt, Artificial Sequence
  Description of Artificial Sequence: Synthetic oligonucleotide
acaaaacuagugagaugcc

SEQ ID NO: 1455733 - RNA, 19 nt, Artificial Sequence
  Description of Artificial Sequence: Synthetic oligonucleotide
agcuccgccaugcugugag

SEQ ID NO: 1455734 - RNA, 19 nt, Artificial Sequence
  Description of Artificial Sequence: Synthetic oligonucleotide
gguagcaauccaguggugg

SEQ ID NO: 1455735 - RNA, 19 nt, Artificial Sequence
  Description of Artificial Sequence: Synthetic oligonucleotide
uggagucaaggugaugucc

SEQ ID NO: 1455736 - RNA, 19 nt, Artificial Sequence
  Description of Artificial Sequence: Synthetic oligonucleotide
ccuaauuacuacauucaac

SEQ ID NO: 1455737 - RNA, 19 nt, Artificial Sequence
  Description of Artificial Sequence: Synthetic oligonucleotide
uguaagcuucaaaccuccc

SEQ ID NO: 1455738 - RNA, 19 nt, Artificial Sequence
  Description of Artificial Sequence: Synthetic oligonucleotide
agcacuggaucagacagug

SEQ ID NO: 1455739 - RNA, 19 nt, Artificial Sequence
  Description of Artificial Sequence: Synthetic oligonucleotide
ucgauuacauuggagucaa

SEQ ID NO: 1455740 - RNA, 19 nt, Artificial Sequence
  Description of Artificial Sequence: Synthetic oligonucleotide
gcuaacgcacaccucagag

SEQ ID NO: 1455741 - RNA, 19 nt, Artificial Sequence
  Description of Artificial Sequence: Synthetic oligonucleotide
ucaaucccuugccacuggc

SEQ ID NO: 1455742 - RNA, 19 nt, Artificial Sequence
  Description of Artificial Sequence: Synthetic oligonucleotide
ccuagugcaagggaaaccg

SEQ ID NO: 1455743 - RNA, 19 nt, Artificial Sequence
  Description of Artificial Sequence: Synthetic oligonucleotide
aggggugggaggcaucuag

SEQ ID NO: 1455744 - RNA, 19 nt, Artificial Sequence
  Description of Artificial Sequence: Synthetic oligonucleotide
uaagguaccuucgggugug

SEQ ID NO: 1455745 - RNA, 19 nt, Artificial Sequence
  Description of Artificial Sequence: Synthetic oligonucleotide
agaaggaauaaaacugcca

SEQ ID NO: 1455746 - RNA, 19 nt, Artificial Sequence
  Description of Artificial Sequence: Synthetic oligonucleotide
caguaugaaaacgccacac

SEQ ID NO: 1455747 - RNA, 19 nt, Artificial Sequence
  Description of Artificial Sequence: Synthetic oligonucleotide
aaguacacuuagaacgggu

SEQ ID NO: 1455748 - RNA, 19 nt, Artificial Sequence
  Description of Artificial Sequence: Synthetic oligonucleotide
gcuaucuguggacagcucc

SEQ ID NO: 1455749 - RNA, 19 nt, Artificial Sequence
  Description of Artificial Sequence: Synthetic oligonucleotide
uucuaugcuauagguucag

SEQ ID NO: 1455750 - RNA, 19 nt, Artificial Sequence
  Description of Artificial Sequence: Synthetic oligonucleotide
guacaaaacuagugagaug

SEQ ID NO: 1455751 - RNA, 19 nt, Artificial Sequence
  Description of Artificial Sequence: Synthetic oligonucleotide
cuauguguuccugguaagc

SEQ ID NO: 1455752 - RNA, 19 nt, Artificial Sequence
  Description of Artificial Sequence: Synthetic oligonucleotide
ugagcccuuugcuuguaca

SEQ ID NO: 1455753 - RNA, 19 nt, Artificial Sequence
  Description of Artificial Sequence: Synthetic oligonucleotide
uuuuaugauuuaggaagau

SEQ ID NO: 1455754 - RNA, 19 nt, Artificial Sequence
  Description of Artificial Sequence: Synthetic oligonucleotide
gcugcuaaguggcuaacgc

SEQ ID NO: 1455755 - RNA, 19 nt, Artificial Sequence
  Description of Artificial Sequence: Synthetic oligonucleotide
gaaagaguacagacugcug

SEQ ID NO: 1455756 - RNA, 19 nt, Artificial Sequence
  Description of Artificial Sequence: Synthetic oligonucleotide
caaucccuugccacuggcg

SEQ ID NO: 1455757 - RNA, 19 nt, Artificial Sequence
  Description of Artificial Sequence: Synthetic oligonucleotide
gagcccuuugcuuguacac

SEQ ID NO: 1455758 - RNA, 19 nt, Artificial Sequence
  Description of Artificial Sequence: Synthetic oligonucleotide
augcuauagguucagccua

SEQ ID NO: 1455759 - RNA, 19 nt, Artificial Sequence
  Description of Artificial Sequence: Synthetic oligonucleotide
agaagugaagucaaagcuu

SEQ ID NO: 1455760 - RNA, 19 nt, Artificial Sequence
  Description of Artificial Sequence: Synthetic oligonucleotide
uaaaacucccagggcugcg

SEQ ID NO: 1455761 - RNA, 19 nt, Artificial Sequence
  Description of Artificial Sequence: Synthetic oligonucleotide
agucuuacuccuccuggga

SEQ ID NO: 1455762 - RNA, 19 nt, Artificial Sequence
  Description of Artificial Sequence: Synthetic oligonucleotide
ccuagagugaccgaggcac

SEQ ID NO: 1455763 - RNA, 19 nt, Artificial Sequence
  Description of Artificial Sequence: Synthetic oligonucleotide
agaacggguuuaauuucac

SEQ ID NO: 1455764 - RNA, 19 nt, Artificial Sequence
  Description of Artificial Sequence: Synthetic oligonucleotide
cuauagguucagccuagug

SEQ ID NO: 1455765 - RNA, 19 nt, Artificial Sequence
  Description of Artificial Sequence: Synthetic oligonucleotide
ugccccuagagugaccgag

SEQ ID NO: 1455766 - RNA, 19 nt, Artificial Sequence
  Description of Artificial Sequence: Synthetic oligonucleotide
uggcacguucucaacuugu

SEQ ID NO: 1455767 - RNA, 19 nt, Artificial Sequence
  Description of Artificial Sequence: Synthetic oligonucleotide
gguucagccuagugcaagg

SEQ ID NO: 1455768 - RNA, 19 nt, Artificial Sequence
  Description of Artificial Sequence: Synthetic oligonucleotide
uggcuaacgcacaccucag

SEQ ID NO: 1455769 - RNA, 19 nt, Artificial Sequence
  Description of Artificial Sequence: Synthetic oligonucleotide
ccguaagugguccagcucc

SEQ ID NO: 1455770 - RNA, 19 nt, Artificial Sequence
  Description of Artificial Sequence: Synthetic oligonucleotide
ggaauaaaacugccaucag

SEQ ID NO: 1455771 - RNA, 19 nt, Artificial Sequence
  Description of Artificial Sequence: Synthetic oligonucleotide
uagccccuaggccagugca

SEQ ID NO: 1455772 - RNA, 19 nt, Artificial Sequence
  Description of Artificial Sequence: Synthetic oligonucleotide
ggcaaggcaaggcacuucc

SEQ ID NO: 1455773 - RNA, 19 nt, Artificial Sequence
  Description of Artificial Sequence: Synthetic oligonucleotide
cucccuuagccacaugcac

SEQ ID NO: 1455774 - RNA, 19 nt, Artificial Sequence
  Description of Artificial Sequence: Synthetic oligonucleotide
gacaggcuacggcaagaag

SEQ ID NO: 1455775 - RNA, 19 nt, Artificial Sequence
  Description of Artificial Sequence: Synthetic oligonucleotide
augacucgauuacauugga

SEQ ID NO: 1455776 - RNA, 19 nt, Artificial Sequence
  Description of Artificial Sequence: Synthetic oligonucleotide
uuguacacacccagccuuc

SEQ ID NO: 1455777 - RNA, 19 nt, Artificial Sequence
  Description of Artificial Sequence: Synthetic oligonucleotide
agugagguguagggcacac

SEQ ID NO: 1455778 - RNA, 19 nt, Artificial Sequence
  Description of Artificial Sequence: Synthetic oligonucleotide
caaguuagucuuacuccuc

SEQ ID NO: 1455779 - RNA, 19 nt, Artificial Sequence
  Description of Artificial Sequence: Synthetic oligonucleotide
agggaaaccgucaccucgg

SEQ ID NO: 1455780 - RNA, 19 nt, Artificial Sequence
  Description of Artificial Sequence: Synthetic oligonucleotide
gaacggguuuaauuucaca

SEQ ID NO: 1455781 - RNA, 19 nt, Artificial Sequence
  Description of Artificial Sequence: Synthetic oligonucleotide
cuagagugaccgaggcacc

SEQ ID NO: 1455782 - RNA, 19 nt, Artificial Sequence
  Description of Artificial Sequence: Synthetic oligonucleotide
gccuugacuagcuugcaug

SEQ ID NO: 1455783 - RNA, 19 nt, Artificial Sequence
  Description of Artificial Sequence: Synthetic oligonucleotide
aacugugucuuagcugaga

SEQ ID NO: 1455784 - RNA, 19 nt, Artificial Sequence
  Description of Artificial Sequence: Synthetic oligonucleotide
uugccucaaucccuugcca

SEQ ID NO: 1455785 - RNA, 19 nt, Artificial Sequence
  Description of Artificial Sequence: Synthetic oligonucleotide
uccaguggugggcuaucug

SEQ ID NO: 1455786 - RNA, 19 nt, Artificial Sequence
  Description of Artificial Sequence: Synthetic oligonucleotide
cuaucuguggacagcucca

SEQ ID NO: 1455787 - RNA, 19 nt, Artificial Sequence
  Description of Artificial Sequence: Synthetic oligonucleotide
uagcaauccaguggugggc

SEQ ID NO: 1455788 - RNA, 19 nt, Artificial Sequence
  Description of Artificial Sequence: Synthetic oligonucleotide
aagauugccucaaucccuu

SEQ ID NO: 1455789 - RNA, 19 nt, Artificial Sequence
  Description of Artificial Sequence: Synthetic oligonucleotide
ccucggauaucccuuaaag

SEQ ID NO: 1455790 - RNA, 19 nt, Artificial Sequence
  Description of Artificial Sequence: Synthetic oligonucleotide
ucucgaggcacagcaacac

SEQ ID NO: 1455791 - RNA, 19 nt, Artificial Sequence
  Description of Artificial Sequence: Synthetic oligonucleotide
uggaucagacaguggggac

SEQ ID NO: 1455792 - RNA, 19 nt, Artificial Sequence
  Description of Artificial Sequence: Synthetic oligonucleotide
ccuuaaaguagccccuagg

SEQ ID NO: 1455793 - RNA, 19 nt, Artificial Sequence
  Description of Artificial Sequence: Synthetic oligonucleotide
guuaagcacuggaucagac

SEQ ID NO: 1455794 - RNA, 19 nt, Artificial Sequence
  Description of Artificial Sequence: Synthetic oligonucleotide
ggauaucccuuaaaguagc

SEQ ID NO: 1455795 - RNA, 19 nt, Artificial Sequence
  Description of Artificial Sequence: Synthetic oligonucleotide
ccuugacuagcuugcaugc

SEQ ID NO: 1455796 - RNA, 19 nt, Artificial Sequence
  Description of Artificial Sequence: Synthetic oligonucleotide
gucaaggugauguccucuc

SEQ ID NO: 1455797 - RNA, 19 nt, Artificial Sequence
  Description of Artificial Sequence: Synthetic oligonucleotide
cugugagagagcuguucug

SEQ ID NO: 1455798 - RNA, 19 nt, Artificial Sequence
  Description of Artificial Sequence: Synthetic oligonucleotide
uagagugaccgaggcaccc

SEQ ID NO: 1455799 - RNA, 19 nt, Artificial Sequence
  Description of Artificial Sequence: Synthetic oligonucleotide
gccuaucugucucuagagg

SEQ ID NO: 1455800 - RNA, 19 nt, Artificial Sequence
  Description of Artificial Sequence: Synthetic oligonucleotide
ggcacagcaacacaagaaa

SEQ ID NO: 1455801 - RNA, 19 nt, Artificial Sequence
  Description of Artificial Sequence: Synthetic oligonucleotide
uccguaagugguccagcuc

SEQ ID NO: 1455802 - RNA, 19 nt, Artificial Sequence
  Description of Artificial Sequence: Synthetic oligonucleotide
guucagccuagugcaaggg

SEQ ID NO: 1455803 - RNA, 19 nt, Artificial Sequence
  Description of Artificial Sequence: Synthetic oligonucleotide
uagccacaugcacgguggg

SEQ ID NO: 1455804 - RNA, 19 nt, Artificial Sequence
  Description of Artificial Sequence: Synthetic oligonucleotide
cucgauuacauuggaguca

SEQ ID NO: 1455805 - RNA, 19 nt, Artificial Sequence
  Description of Artificial Sequence: Synthetic oligonucleotide
gugaccgaggcacccgucc

SEQ ID NO: 1455806 - RNA, 19 nt, Artificial Sequence
  Description of Artificial Sequence: Synthetic oligonucleotide
uuggagucaaggugauguc

SEQ ID NO: 1455807 - RNA, 19 nt, Artificial Sequence
  Description of Artificial Sequence: Synthetic oligonucleotide
auggcacguucucaacuug

SEQ ID NO: 1455808 - RNA, 19 nt, Artificial Sequence
  Description of Artificial Sequence: Synthetic oligonucleotide
aguuaagcacuggaucaga

SEQ ID NO: 1455809 - RNA, 19 nt, Artificial Sequence
  Description of Artificial Sequence: Synthetic oligonucleotide
ugggcuaucuguggacagc

SEQ ID NO: 1455810 - RNA, 19 nt, Artificial Sequence
  Description of Artificial Sequence: Synthetic oligonucleotide
agagugaccgaggcacccg

SEQ ID NO: 1455811 - RNA, 19 nt, Artificial Sequence
  Description of Artificial Sequence: Synthetic oligonucleotide
agguucagccuagugcaag

SEQ ID NO: 1455812 - RNA, 19 nt, Artificial Sequence
  Description of Artificial Sequence: Synthetic oligonucleotide
ccaaucgugagcccuuugc

SEQ ID NO: 1455813 - RNA, 19 nt, Artificial Sequence
  Description of Artificial Sequence: Synthetic oligonucleotide
caauggcgcaggaagguga

SEQ ID NO: 1455814 - RNA, 19 nt, Artificial Sequence
  Description of Artificial Sequence: Synthetic oligonucleotide
agccacaugcacggugggc

SEQ ID NO: 1455815 - RNA, 19 nt, Artificial Sequence
  Description of Artificial Sequence: Synthetic oligonucleotide
uggaugucugaggcagggg

SEQ ID NO: 1455816 - RNA, 19 nt, Artificial Sequence
  Description of Artificial Sequence: Synthetic oligonucleotide
aagaaacaaccagccggcu

SEQ ID NO: 1455817 - RNA, 19 nt, Artificial Sequence
  Description of Artificial Sequence: Synthetic oligonucleotide
ugaccgaggcacccguccu

SEQ ID NO: 1455818 - RNA, 19 nt, Artificial Sequence
  Description of Artificial Sequence: Synthetic oligonucleotide
gucaaagcuugaguacuug

SEQ ID NO: 1455819 - RNA, 19 nt, Artificial Sequence
  Description of Artificial Sequence: Synthetic oligonucleotide
acagcgguagcaauccagu

SEQ ID NO: 1455820 - RNA, 19 nt, Artificial Sequence
  Description of Artificial Sequence: Synthetic oligonucleotide
ucccgcuccgagaccaucu

SEQ ID NO: 1455821 - RNA, 19 nt, Artificial Sequence
  Description of Artificial Sequence: Synthetic oligonucleotide
ugaccaaucgugagcccuu

SEQ ID NO: 1455822 - RNA, 19 nt, Artificial Sequence
  Description of Artificial Sequence: Synthetic oligonucleotide
aucuaguuugcaguaugaa

SEQ ID NO: 1455823 - RNA, 19 nt, Artificial Sequence
  Description of Artificial Sequence: Synthetic oligonucleotide
uucggguguggguuugccu

SEQ ID NO: 1455824 - RNA, 19 nt, Artificial Sequence
  Description of Artificial Sequence: Synthetic oligonucleotide
ugcauggcacguucucaac

SEQ ID NO: 1455825 - RNA, 19 nt, Artificial Sequence
  Description of Artificial Sequence: Synthetic oligonucleotide
ugcaugcuccuagaaccug

SEQ ID NO: 1455826 - RNA, 19 nt, Artificial Sequence
  Description of Artificial Sequence: Synthetic oligonucleotide
gugcaagggaaaccgucac

SEQ ID NO: 1455827 - RNA, 19 nt, Artificial Sequence
  Description of Artificial Sequence: Synthetic oligonucleotide
gcaaguuagucuuacuccu

SEQ ID NO: 1455828 - RNA, 19 nt, Artificial Sequence
  Description of Artificial Sequence: Synthetic oligonucleotide
gcaucuaaacugccccuag

SEQ ID NO: 1455829 - RNA, 19 nt, Artificial Sequence
  Description of Artificial Sequence: Synthetic oligonucleotide
cucggauaucccuuaaagu

SEQ ID NO: 1455830 - RNA, 19 nt, Artificial Sequence
  Description of Artificial Sequence: Synthetic oligonucleotide
cagugcaaguuagucuuac

SEQ ID NO: 1455831 - RNA, 19 nt, Artificial Sequence
  Description of Artificial Sequence: Synthetic oligonucleotide
ucgugagcccuuugcuugu

SEQ ID NO: 1455832 - RNA, 19 nt, Artificial Sequence
  Description of Artificial Sequence: Synthetic oligonucleotide
aggcacagcaacacaagaa

SEQ ID NO: 1455833 - RNA, 19 nt, Artificial Sequence
  Description of Artificial Sequence: Synthetic oligonucleotide
agcccuuugcuuguacaca

SEQ ID NO: 1455834 - RNA, 19 nt, Artificial Sequence
  Description of Artificial Sequence: Synthetic oligonucleotide
agauugccucaaucccuug

SEQ ID NO: 1455835 - RNA, 19 nt, Artificial Sequence
  Description of Artificial Sequence: Synthetic oligonucleotide
cagcgguagcaauccagug

SEQ ID NO: 1455836 - RNA, 19 nt, Artificial Sequence
  Description of Artificial Sequence: Synthetic oligonucleotide
aagguaccuucgggugugg

SEQ ID NO: 1455837 - RNA, 19 nt, Artificial Sequence
  Description of Artificial Sequence: Synthetic oligonucleotide
caucuaaacugccccuaga

SEQ ID NO: 1455838 - RNA, 19 nt, Artificial Sequence
  Description of Artificial Sequence: Synthetic oligonucleotide
cugugucuuagcugagaca

SEQ ID NO: 1455839 - RNA, 19 nt, Artificial Sequence
  Description of Artificial Sequence: Synthetic oligonucleotide
aaccuguggcuuugccaau

SEQ ID NO: 1455840 - RNA, 19 nt, Artificial Sequence
  Description of Artificial Sequence: Synthetic oligonucleotide
cuccgccaugcugugagag

SEQ ID NO: 1455841 - RNA, 19 nt, Artificial Sequence
  Description of Artificial Sequence: Synthetic oligonucleotide
agcuugcaugcuccuagaa

SEQ ID NO: 1455842 - RNA, 19 nt, Artificial Sequence
  Description of Artificial Sequence: Synthetic oligonucleotide
accaaucgugagcccuuug

SEQ ID NO: 1455843 - RNA, 19 nt, Artificial Sequence
  Description of Artificial Sequence: Synthetic oligonucleotide
guagccccuaggccagugc

SEQ ID NO: 1455844 - RNA, 19 nt, Artificial Sequence
  Description of Artificial Sequence: Synthetic oligonucleotide
ucccuugccacuggcgccu

SEQ ID NO: 1455845 - RNA, 19 nt, Artificial Sequence
  Description of Artificial Sequence: Synthetic oligonucleotide
cuuacuccuccugggagga

SEQ ID NO: 1455846 - RNA, 19 nt, Artificial Sequence
  Description of Artificial Sequence: Synthetic oligonucleotide
accucggauaucccuuaaa

SEQ ID NO: 1455847 - RNA, 19 nt, Artificial Sequence
  Description of Artificial Sequence: Synthetic oligonucleotide
aaccagccggcucucccuu

SEQ ID NO: 1455848 - RNA, 19 nt, Artificial Sequence
  Description of Artificial Sequence: Synthetic oligonucleotide
ucgggucaaggcagccucu

SEQ ID NO: 1455849 - RNA, 19 nt, Artificial Sequence
  Description of Artificial Sequence: Synthetic oligonucleotide
cugcgggaagagcaagcug

SEQ ID NO: 1455850 - RNA, 19 nt, Artificial Sequence
  Description of Artificial Sequence: Synthetic oligonucleotide
ccuagcagugagguguagg

SEQ ID NO: 1455851 - RNA, 19 nt, Artificial Sequence
  Description of Artificial Sequence: Synthetic oligonucleotide
cucuaggguugaaguuaag

SEQ ID NO: 1455852 - RNA, 19 nt, Artificial Sequence
  Description of Artificial Sequence: Synthetic oligonucleotide
gagaugccuccucggguca

SEQ ID NO: 1455853 - RNA, 19 nt, Artificial Sequence
  Description of Artificial Sequence: Synthetic oligonucleotide
ucuucgcuucaugcauggc

SEQ ID NO: 1455854 - RNA, 19 nt, Artificial Sequence
  Description of Artificial Sequence: Synthetic oligonucleotide
guaagugguccagcuccgc

SEQ ID NO: 1455855 - RNA, 19 nt, Artificial Sequence
  Description of Artificial Sequence: Synthetic oligonucleotide
caaggcaaggcacuuccgu

SEQ ID NO: 1455856 - RNA, 19 nt, Artificial Sequence
  Description of Artificial Sequence: Synthetic oligonucleotide
guacacuuagaacggguuu

SEQ ID NO: 1455857 - RNA, 19 nt, Artificial Sequence
  Description of Artificial Sequence: Synthetic oligonucleotide
caaucgugagcccuuugcu

SEQ ID NO: 1455858 - RNA, 19 nt, Artificial Sequence
  Description of Artificial Sequence: Synthetic oligonucleotide
gagguguagggcacacaca

SEQ ID NO: 1455859 - RNA, 19 nt, Artificial Sequence
  Description of Artificial Sequence: Synthetic oligonucleotide
agguaccuucggguguggg

SEQ ID NO: 1455860 - RNA, 19 nt, Artificial Sequence
  Description of Artificial Sequence: Synthetic oligonucleotide
acggugggcaucaguguug

SEQ ID NO: 1455861 - RNA, 19 nt, Artificial Sequence
  Description of Artificial Sequence: Synthetic oligonucleotide
agucaaagcuugaguacuu

SEQ ID NO: 1455862 - RNA, 19 nt, Artificial Sequence
  Description of Artificial Sequence: Synthetic oligonucleotide
aacgccacacacagcggua

SEQ ID NO: 1455863 - RNA, 19 nt, Artificial Sequence
  Description of Artificial Sequence: Synthetic oligonucleotide
gcgguagcaauccaguggu

SEQ ID NO: 1455864 - RNA, 19 nt, Artificial Sequence
  Description of Artificial Sequence: Synthetic oligonucleotide
gcagccucuaggguugaag

SEQ ID NO: 1455865 - RNA, 19 nt, Artificial Sequence
  Description of Artificial Sequence: Synthetic oligonucleotide
ccggcucucccuuagccac

SEQ ID NO: 1455866 - RNA, 19 nt, Artificial Sequence
  Description of Artificial Sequence: Synthetic oligonucleotide
gaccgaggcacccguccuc

SEQ ID NO: 1455867 - RNA, 19 nt, Artificial Sequence
  Description of Artificial Sequence: Synthetic oligonucleotide
gugagaugccuccucgggu

SEQ ID NO: 1455868 - RNA, 19 nt, Artificial Sequence
  Description of Artificial Sequence: Synthetic oligonucleotide
cucgaggcacagcaacaca

SEQ ID NO: 1455869 - RNA, 19 nt, Artificial Sequence
  Description of Artificial Sequence: Synthetic oligonucleotide
cagccuagugcaagggaaa

SEQ ID NO: 1455870 - RNA, 19 nt, Artificial Sequence
  Description of Artificial Sequence: Synthetic oligonucleotide
cguaagugguccagcuccg

SEQ ID NO: 1455871 - RNA, 19 nt, Artificial Sequence
  Description of Artificial Sequence: Synthetic oligonucleotide
agugaccgaggcacccguc

SEQ ID NO: 1455872 - RNA, 19 nt, Artificial Sequence
  Description of Artificial Sequence: Synthetic oligonucleotide
gugaccaaucgugagcccu

SEQ ID NO: 1455873 - RNA, 19 nt, Artificial Sequence
  Description of Artificial Sequence: Synthetic oligonucleotide
acuagcuugcaugcuccua

SEQ ID NO: 1455874 - RNA, 19 nt, Artificial Sequence
  Description of Artificial Sequence: Synthetic oligonucleotide
uccucgggucaaggcagcc

SEQ ID NO: 1455875 - RNA, 19 nt, Artificial Sequence
  Description of Artificial Sequence: Synthetic oligonucleotide
gcacuuccguaaguggucc

SEQ ID NO: 1455876 - RNA, 19 nt, Artificial Sequence
  Description of Artificial Sequence: Synthetic oligonucleotide
cauggcacguucucaacuu

SEQ ID NO: 1455877 - RNA, 19 nt, Artificial Sequence
  Description of Artificial Sequence: Synthetic oligonucleotide
gccuggaauucuucgcuuc

SEQ ID NO: 1455878 - RNA, 19 nt, Artificial Sequence
  Description of Artificial Sequence: Synthetic oligonucleotide
ugcgggccauuuccaugcu

SEQ ID NO: 1455879 - RNA, 19 nt, Artificial Sequence
  Description of Artificial Sequence: Synthetic oligonucleotide
ggugaccaaucgugagccc

SEQ ID NO: 1455880 - RNA, 19 nt, Artificial Sequence
  Description of Artificial Sequence: Synthetic oligonucleotide
ggguuugccucuuuuccua

SEQ ID NO: 1455881 - RNA, 19 nt, Artificial Sequence
  Description of Artificial Sequence: Synthetic oligonucleotide
ugggcaaggcaaggcacuu

SEQ ID NO: 1455882 - RNA, 19 nt, Artificial Sequence
  Description of Artificial Sequence: Synthetic oligonucleotide
ggcuacggcaagaagugaa

SEQ ID NO: 1455883 - RNA, 19 nt, Artificial Sequence
  Description of Artificial Sequence: Synthetic oligonucleotide
cgccuaucugucucuagag

SEQ ID NO: 1455884 - RNA, 19 nt, Artificial Sequence
  Description of Artificial Sequence: Synthetic oligonucleotide
cugcccuagcagugaggug

SEQ ID NO: 1455885 - RNA, 19 nt, Artificial Sequence
  Description of Artificial Sequence: Synthetic oligonucleotide
cccuuaaaguagccccuag

SEQ ID NO: 1455886 - RNA, 19 nt, Artificial Sequence
  Description of Artificial Sequence: Synthetic oligonucleotide
gagugaccgaggcacccgu

SEQ ID NO: 1455887 - RNA, 19 nt, Artificial Sequence
  Description of Artificial Sequence: Synthetic oligonucleotide
cucaacuuguaagcuucaa

SEQ ID NO: 1455888 - RNA, 19 nt, Artificial Sequence
  Description of Artificial Sequence: Synthetic oligonucleotide
ggugggcuaucuguggaca

SEQ ID NO: 1455889 - RNA, 19 nt, Artificial Sequence
  Description of Artificial Sequence: Synthetic oligonucleotide
gguaccuucgggugugggu

SEQ ID NO: 1455890 - RNA, 19 nt, Artificial Sequence
  Description of Artificial Sequence: Synthetic oligonucleotide
gcaaggcaaggcacuuccg

SEQ ID NO: 1455891 - RNA, 19 nt, Artificial Sequence
  Description of Artificial Sequence: Synthetic oligonucleotide
gccucuaggguugaaguua

SEQ ID NO: 1455892 - RNA, 19 nt, Artificial Sequence
  Description of Artificial Sequence: Synthetic oligonucleotide
gcacguucucaacuuguaa

SEQ ID NO: 1455893 - RNA, 19 nt, Artificial Sequence
  Description of Artificial Sequence: Synthetic oligonucleotide
cuagugcaagggaaaccgu

SEQ ID NO: 1455894 - RNA, 19 nt, Artificial Sequence
  Description of Artificial Sequence: Synthetic oligonucleotide
gcuaaguggcuaacgcaca

SEQ ID NO: 1455895 - RNA, 19 nt, Artificial Sequence
  Description of Artificial Sequence: Synthetic oligonucleotide
accuucggguguggguuug

SEQ ID NO: 1455896 - RNA, 19 nt, Artificial Sequence
  Description of Artificial Sequence: Synthetic oligonucleotide
ccucaaucccuugccacug

SEQ ID NO: 1455897 - RNA, 19 nt, Artificial Sequence
  Description of Artificial Sequence: Synthetic oligonucleotide
ccuggaauucuucgcuuca

SEQ ID NO: 1455898 - RNA, 19 nt, Artificial Sequence
  Description of Artificial Sequence: Synthetic oligonucleotide
aggcuacggcaagaaguga

SEQ ID NO: 1455899 - RNA, 19 nt, Artificial Sequence
  Description of Artificial Sequence: Synthetic oligonucleotide
cuacggcaagaagugaagu

SEQ ID NO: 1455900 - RNA, 19 nt, Artificial Sequence
  Description of Artificial Sequence: Synthetic oligonucleotide
gcauggcacguucucaacu

SEQ ID NO: 1455901 - RNA, 19 nt, Artificial Sequence
  Description of Artificial Sequence: Synthetic oligonucleotide
aaguagccccuaggccagu

SEQ ID NO: 1455902 - RNA, 19 nt, Artificial Sequence
  Description of Artificial Sequence: Synthetic oligonucleotide
cacuuccguaaguggucca

SEQ ID NO: 1455903 - RNA, 19 nt, Artificial Sequence
  Description of Artificial Sequence: Synthetic oligonucleotide
ggcuaacgcacaccucaga

SEQ ID NO: 1455904 - RNA, 19 nt, Artificial Sequence
  Description of Artificial Sequence: Synthetic oligonucleotide
ccccuaggccagugcaugg

SEQ ID NO: 1455905 - RNA, 19 nt, Artificial Sequence
  Description of Artificial Sequence: Synthetic oligonucleotide
cugcugcuaaguggcuaac

SEQ ID NO: 1455906 - RNA, 19 nt, Artificial Sequence
  Description of Artificial Sequence: Synthetic oligonucleotide
ccggcacugugucuguaac

SEQ ID NO: 1455907 - RNA, 19 nt, Artificial Sequence
  Description of Artificial Sequence: Synthetic oligonucleotide
ccaauggcgcaggaaggug

SEQ ID NO: 1455908 - RNA, 19 nt, Artificial Sequence
  Description of Artificial Sequence: Synthetic oligonucleotide
ccucuaggguugaaguuaa

SEQ ID NO: 1455909 - RNA, 19 nt, Artificial Sequence
  Description of Artificial Sequence: Synthetic oligonucleotide
cuugacuagcuugcaugcu

SEQ ID NO: 1455910 - RNA, 19 nt, Artificial Sequence
  Description of Artificial Sequence: Synthetic oligonucleotide
cugccgcuccagguuuugc

SEQ ID NO: 1455911 - RNA, 19 nt, Artificial Sequence
  Description of Artificial Sequence: Synthetic oligonucleotide
ccacuggcgccuaucuguc

SEQ ID NO: 1455912 - RNA, 19 nt, Artificial Sequence
  Description of Artificial Sequence: Synthetic oligonucleotide
gugagguguagggcacaca

SEQ ID NO: 1455913 - RNA, 19 nt, Artificial Sequence
  Description of Artificial Sequence: Synthetic oligonucleotide
agaugccuccucgggucaa

SEQ ID NO: 1455914 - RNA, 19 nt, Artificial Sequence
  Description of Artificial Sequence: Synthetic oligonucleotide
cacggugggcaucaguguu

SEQ ID NO: 1455915 - RNA, 19 nt, Artificial Sequence
  Description of Artificial Sequence: Synthetic oligonucleotide
caugcacggugggcaucag

SEQ ID NO: 1455916 - RNA, 19 nt, Artificial Sequence
  Description of Artificial Sequence: Synthetic oligonucleotide
gggaaaccgucaccucgga

SEQ ID NO: 1455917 - RNA, 19 nt, Artificial Sequence
  Description of Artificial Sequence: Synthetic oligonucleotide
agccccuaggccagugcau

SEQ ID NO: 1455918 - RNA, 19 nt, Artificial Sequence
  Description of Artificial Sequence: Synthetic oligonucleotide
ggacaggcuacggcaagaa

SEQ ID NO: 1455919 - RNA, 19 nt, Artificial Sequence
  Description of Artificial Sequence: Synthetic oligonucleotide
cugagacagaugacucgau

SEQ ID NO: 1455920 - RNA, 19 nt, Artificial Sequence
  Description of Artificial Sequence: Synthetic oligonucleotide
uggcgccuaucugucucua

SEQ ID NO: 1455921 - RNA, 19 nt, Artificial Sequence
  Description of Artificial Sequence: Synthetic oligonucleotide
ggcacguucucaacuugua

SEQ ID NO: 1455922 - RNA, 19 nt, Artificial Sequence
  Description of Artificial Sequence: Synthetic oligonucleotide
gggcuaucuguggacagcu

SEQ ID NO: 1455923 - RNA, 19 nt, Artificial Sequence
  Description of Artificial Sequence: Synthetic oligonucleotide
cucccgcuccgagaccauc

SEQ ID NO: 1455924 - RNA, 19 nt, Artificial Sequence
  Description of Artificial Sequence: Synthetic oligonucleotide
gcugugcgggccauuucca

SEQ ID NO: 1455925 - RNA, 19 nt, Artificial Sequence
  Description of Artificial Sequence: Synthetic oligonucleotide
caauccaguggugggcuau

SEQ ID NO: 1455926 - RNA, 19 nt, Artificial Sequence
  Description of Artificial Sequence: Synthetic oligonucleotide
caccucggauaucccuuaa

SEQ ID NO: 1455927 - RNA, 19 nt, Artificial Sequence
  Description of Artificial Sequence: Synthetic oligonucleotide
gccggcacugugucuguaa

SEQ ID NO: 1455928 - RNA, 19 nt, Artificial Sequence
  Description of Artificial Sequence: Synthetic oligonucleotide
ggcgcaggaaggugaccaa

SEQ ID NO: 1455929 - RNA, 19 nt, Artificial Sequence
  Description of Artificial Sequence: Synthetic oligonucleotide
ggguuuaauuucacagcau

SEQ ID NO: 1455930 - RNA, 19 nt, Artificial Sequence
  Description of Artificial Sequence: Synthetic oligonucleotide
guacacacccagccuucuu

SEQ ID NO: 1455931 - RNA, 19 nt, Artificial Sequence
  Description of Artificial Sequence: Synthetic oligonucleotide
ccgucaccucggauauccc

SEQ ID NO: 1455932 - RNA, 19 nt, Artificial Sequence
  Description of Artificial Sequence: Synthetic oligonucleotide
cugugcgggccauuuccau

SEQ ID NO: 1455933 - RNA, 19 nt, Artificial Sequence
  Description of Artificial Sequence: Synthetic oligonucleotide
ggcuaucuguggacagcuc

SEQ ID NO: 1455934 - RNA, 19 nt, Artificial Sequence
  Description of Artificial Sequence: Synthetic oligonucleotide
ggaaaccgucaccucggau

SEQ ID NO: 1455935 - RNA, 19 nt, Artificial Sequence
  Description of Artificial Sequence: Synthetic oligonucleotide
cgauuacauuggagucaag

SEQ ID NO: 1455936 - RNA, 19 nt, Artificial Sequence
  Description of Artificial Sequence: Synthetic oligonucleotide
gaccaaucgugagcccuuu

SEQ ID NO: 1455937 - RNA, 19 nt, Artificial Sequence
  Description of Artificial Sequence: Synthetic oligonucleotide
gcaauccaguggugggcua

SEQ ID NO: 1455938 - RNA, 19 nt, Artificial Sequence
  Description of Artificial Sequence: Synthetic oligonucleotide
aggcagccucuaggguuga

SEQ ID NO: 1455939 - RNA, 19 nt, Artificial Sequence
  Description of Artificial Sequence: Synthetic oligonucleotide
ccuucggguguggguuugc

SEQ ID NO: 1455940 - RNA, 19 nt, Artificial Sequence
  Description of Artificial Sequence: Synthetic oligonucleotide
cacuuagaacggguuuaau

SEQ ID NO: 1455941 - RNA, 19 nt, Artificial Sequence
  Description of Artificial Sequence: Synthetic oligonucleotide
cacuggcgccuaucugucu

SEQ ID NO: 1455942 - RNA, 19 nt, Artificial Sequence
  Description of Artificial Sequence: Synthetic oligonucleotide
caccugccgcuccagguuu

SEQ ID NO: 1455943 - RNA, 19 nt, Artificial Sequence
  Description of Artificial Sequence: Synthetic oligonucleotide
gcuauagguucagccuagu

SEQ ID NO: 1455944 - RNA, 19 nt, Artificial Sequence
  Description of Artificial Sequence: Synthetic oligonucleotide
cgguagcaauccaguggug

SEQ ID NO: 1455945 - RNA, 19 nt, Artificial Sequence
  Description of Artificial Sequence: Synthetic oligonucleotide
gcucucccuuagccacaug

SEQ ID NO: 1455946 - RNA, 19 nt, Artificial Sequence
  Description of Artificial Sequence: Synthetic oligonucleotide
cgucaccucggauaucccu

SEQ ID NO: 1455947 - RNA, 19 nt, Artificial Sequence
  Description of Artificial Sequence: Synthetic oligonucleotide
gccuggguccacugcccua

SEQ ID NO: 1455948 - RNA, 19 nt, Artificial Sequence
  Description of Artificial Sequence: Synthetic oligonucleotide
ggacagcuccacucaucuu

SEQ ID NO: 1455949 - RNA, 19 nt, Artificial Sequence
  Description of Artificial Sequence: Synthetic oligonucleotide
ggcucucccuuagccacau

SEQ ID NO: 1455950 - RNA, 19 nt, Artificial Sequence
  Description of Artificial Sequence: Synthetic oligonucleotide
gcgcaggaaggugaccaau

SEQ ID NO: 1455951 - RNA, 19 nt, Artificial Sequence
  Description of Artificial Sequence: Synthetic oligonucleotide
caggggugggaggcaucua

SEQ ID NO: 1455952 - RNA, 19 nt, Artificial Sequence
  Description of Artificial Sequence: Synthetic oligonucleotide
ggcagccucuaggguugaa

SEQ ID NO: 1455953 - RNA, 19 nt, Artificial Sequence
  Description of Artificial Sequence: Synthetic oligonucleotide
ccucgggucaaggcagccu

SEQ ID NO: 1455954 - RNA, 19 nt, Artificial Sequence
  Description of Artificial Sequence: Synthetic oligonucleotide
cccgcuccgagaccaucuu

SEQ ID NO: 1455955 - RNA, 19 nt, Artificial Sequence
  Description of Artificial Sequence: Synthetic oligonucleotide
cgugagcccuuugcuugua

SEQ ID NO: 1455956 - RNA, 19 nt, Artificial Sequence
  Description of Artificial Sequence: Synthetic oligonucleotide
cccuugccacuggcgccua

SEQ ID NO: 1455957 - RNA, 19 nt, Artificial Sequence
  Description of Artificial Sequence: Synthetic oligonucleotide
aaaucucuaacauaaauuc

SEQ ID NO: 1455958 - RNA, 19 nt, Artificial Sequence
  Description of Artificial Sequence: Synthetic oligonucleotide
uuuugcagcauccaaaucc

SEQ ID NO: 1455959 - RNA, 19 nt, Artificial Sequence
  Description of Artificial Sequence: Synthetic oligonucleotide
aauuggauggaaaacuucc

SEQ ID NO: 1455960 - RNA, 19 nt, Artificial Sequence
  Description of Artificial Sequence: Synthetic oligonucleotide
uauaaaguuucuuaaagga

SEQ ID NO: 1455961 - RNA, 19 nt, Artificial Sequence
  Description of Artificial Sequence: Synthetic oligonucleotide
uagaaagauaauuggaugg

SEQ ID NO: 1455962 - RNA, 19 nt, Artificial Sequence
  Description of Artificial Sequence: Synthetic oligonucleotide
ugcauaguaagucaucugg

SEQ ID NO: 1455963 - RNA, 19 nt, Artificial Sequence
  Description of Artificial Sequence: Synthetic oligonucleotide
ugauguuugaaucagcucu

SEQ ID NO: 1455964 - RNA, 19 nt, Artificial Sequence
  Description of Artificial Sequence: Synthetic oligonucleotide
aaccaugcaauuuuauugg

SEQ ID NO: 1455965 - RNA, 19 nt, Artificial Sequence
  Description of Artificial Sequence: Synthetic oligonucleotide
uccacauuuaauaagggca

SEQ ID NO: 1455966 - RNA, 19 nt, Artificial Sequence
  Description of Artificial Sequence: Synthetic oligonucleotide
uguaaugaaguauuaacca

SEQ ID NO: 1455967 - RNA, 19 nt, Artificial Sequence
  Description of Artificial Sequence: Synthetic oligonucleotide
ucugauuguuguuagaaag

SEQ ID NO: 1455968 - RNA, 19 nt, Artificial Sequence
  Description of Artificial Sequence: Synthetic oligonucleotide
uaaaguuucuuaaaggagu

SEQ ID NO: 1455969 - RNA, 19 nt, Artificial Sequence
  Description of Artificial Sequence: Synthetic oligonucleotide
ugaaguauuaaccaugcaa

SEQ ID NO: 1455970 - RNA, 19 nt, Artificial Sequence
  Description of Artificial Sequence: Synthetic oligonucleotide
uguaagaaaacauucuugu

SEQ ID NO: 1455971 - RNA, 19 nt, Artificial Sequence
  Description of Artificial Sequence: Synthetic oligonucleotide
uuguuagaaagauaauugg

SEQ ID NO: 1455972 - RNA, 19 nt, Artificial Sequence
  Description of Artificial Sequence: Synthetic oligonucleotide
uaaccaugcaauuuuauug

SEQ ID NO: 1455973 - RNA, 19 nt, Artificial Sequence
  Description of Artificial Sequence: Synthetic oligonucleotide
uuaauugagaaguucuaag

SEQ ID NO: 1455974 - RNA, 19 nt, Artificial Sequence
  Description of Artificial Sequence: Synthetic oligonucleotide
uuaaauuggggcucaaaag

SEQ ID NO: 1455975 - RNA, 19 nt, Artificial Sequence
  Description of Artificial Sequence: Synthetic oligonucleotide
auuccaacgacacugaaca

SEQ ID NO: 1455976 - RNA, 19 nt, Artificial Sequence
  Description of Artificial Sequence: Synthetic oligonucleotide
ucuaacauaaauucuguaa

SEQ ID NO: 1455977 - RNA, 19 nt, Artificial Sequence
  Description of Artificial Sequence: Synthetic oligonucleotide
uuagaaagauaauuggaug

SEQ ID NO: 1455978 - RNA, 19 nt, Artificial Sequence
  Description of Artificial Sequence: Synthetic oligonucleotide
uuuaaauuggggcucaaaa

SEQ ID NO: 1455979 - RNA, 19 nt, Artificial Sequence
  Description of Artificial Sequence: Synthetic oligonucleotide
uguuuaugcgacuuggugc

SEQ ID NO: 1455980 - RNA, 19 nt, Artificial Sequence
  Description of Artificial Sequence: Synthetic oligonucleotide
aacgacacugaacacagug

SEQ ID NO: 1455981 - RNA, 19 nt, Artificial Sequence
  Description of Artificial Sequence: Synthetic oligonucleotide
uuaauaagggcauugccgu

SEQ ID NO: 1455982 - RNA, 19 nt, Artificial Sequence
  Description of Artificial Sequence: Synthetic oligonucleotide
uucaguacuguucgcagcg

SEQ ID NO: 1455983 - RNA, 19 nt, Artificial Sequence
  Description of Artificial Sequence: Synthetic oligonucleotide
uuuuggaggucuaacaugu

SEQ ID NO: 1455984 - RNA, 19 nt, Artificial Sequence
  Description of Artificial Sequence: Synthetic oligonucleotide
uccaugauguucaugccgg

SEQ ID NO: 1455985 - RNA, 19 nt, Artificial Sequence
  Description of Artificial Sequence: Synthetic oligonucleotide
aauauggugucaugauagg

SEQ ID NO: 1455986 - RNA, 19 nt, Artificial Sequence
  Description of Artificial Sequence: Synthetic oligonucleotide
acuugauucuuuaaggucg

SEQ ID NO: 1455987 - RNA, 19 nt, Artificial Sequence
  Description of Artificial Sequence: Synthetic oligonucleotide
uucacguugaaauccauga

SEQ ID NO: 1455988 - RNA, 19 nt, Artificial Sequence
  Description of Artificial Sequence: Synthetic oligonucleotide
auucaguagaaaacaaucc

SEQ ID NO: 1455989 - RNA, 19 nt, Artificial Sequence
  Description of Artificial Sequence: Synthetic oligonucleotide
aagucggguaaucucugcc

SEQ ID NO: 1455990 - RNA, 19 nt, Artificial Sequence
  Description of Artificial Sequence: Synthetic oligonucleotide
caugcaauuuuauuggcag

SEQ ID NO: 1455991 - RNA, 19 nt, Artificial Sequence
  Description of Artificial Sequence: Synthetic oligonucleotide
uuucuuaaaggagugagga

SEQ ID NO: 1455992 - RNA, 19 nt, Artificial Sequence
  Description of Artificial Sequence: Synthetic oligonucleotide
agugaggaaauuuaaggcu

SEQ ID NO: 1455993 - RNA, 19 nt, Artificial Sequence
  Description of Artificial Sequence: Synthetic oligonucleotide
uuagaguuacuguauauaa

SEQ ID NO: 1455994 - RNA, 19 nt, Artificial Sequence
  Description of Artificial Sequence: Synthetic oligonucleotide
ugucaugaaaucucuaaca

SEQ ID NO: 1455995 - RNA, 19 nt, Artificial Sequence
  Description of Artificial Sequence: Synthetic oligonucleotide
uuagugaaaucucaguaaa

SEQ ID NO: 1455996 - RNA, 19 nt, Artificial Sequence
  Description of Artificial Sequence: Synthetic oligonucleotide
ugaguuauucguaauuccu

SEQ ID NO: 1455997 - RNA, 19 nt, Artificial Sequence
  Description of Artificial Sequence: Synthetic oligonucleotide
acuuaagccugcuuuagag

SEQ ID NO: 1455998 - RNA, 19 nt, Artificial Sequence
  Description of Artificial Sequence: Synthetic oligonucleotide
agaacccuagccuuccugc

SEQ ID NO: 1455999 - RNA, 19 nt, Artificial Sequence
  Description of Artificial Sequence: Synthetic oligonucleotide
guucuaaguagguaauugg

SEQ ID NO: 1456000 - RNA, 19 nt, Artificial Sequence
  Description of Artificial Sequence: Synthetic oligonucleotide
aaauuuaaggcugauguuu

SEQ ID NO: 1456001 - RNA, 19 nt, Artificial Sequence
  Description of Artificial Sequence: Synthetic oligonucleotide
ugaaaucucuaacauaaau

SEQ ID NO: 1456002 - RNA, 19 nt, Artificial Sequence
  Description of Artificial Sequence: Synthetic oligonucleotide
uagacgaacucuucuaucc

SEQ ID NO: 1456003 - RNA, 19 nt, Artificial Sequence
  Description of Artificial Sequence: Synthetic oligonucleotide
uuucaguuccuuaugacau

SEQ ID NO: 1456004 - RNA, 19 nt, Artificial Sequence
  Description of Artificial Sequence: Synthetic oligonucleotide
ucuauccaguuucucauag

SEQ ID NO: 1456005 - RNA, 19 nt, Artificial Sequence
  Description of Artificial Sequence: Synthetic oligonucleotide
cuaaguagguaauuggcac

SEQ ID NO: 1456006 - RNA, 19 nt, Artificial Sequence
  Description of Artificial Sequence: Synthetic oligonucleotide
uucuuuaaggucguugagg

SEQ ID NO: 1456007 - RNA, 19 nt, Artificial Sequence
  Description of Artificial Sequence: Synthetic oligonucleotide
augauguucaugccgggcg

SEQ ID NO: 1456008 - RNA, 19 nt, Artificial Sequence
  Description of Artificial Sequence: Synthetic oligonucleotide
uucccuauuuaauugagaa

SEQ ID NO: 1456009 - RNA, 19 nt, Artificial Sequence
  Description of Artificial Sequence: Synthetic oligonucleotide
acaugaacaugaaagguac

SEQ ID NO: 1456010 - RNA, 19 nt, Artificial Sequence
  Description of Artificial Sequence: Synthetic oligonucleotide
uuguuuaugcgacuuggug

SEQ ID NO: 1456011 - RNA, 19 nt, Artificial Sequence
  Description of Artificial Sequence: Synthetic oligonucleotide
uggcauuuggauuuggcug

SEQ ID NO: 1456012 - RNA, 19 nt, Artificial Sequence
  Description of Artificial Sequence: Synthetic oligonucleotide
uuauucguaauuccuguuc

SEQ ID NO: 1456013 - RNA, 19 nt, Artificial Sequence
  Description of Artificial Sequence: Synthetic oligonucleotide
uugaguuauucguaauucc

SEQ ID NO: 1456014 - RNA, 19 nt, Artificial Sequence
  Description of Artificial Sequence: Synthetic oligonucleotide
gauagguaaucguucauga

SEQ ID NO: 1456015 - RNA, 19 nt, Artificial Sequence
  Description of Artificial Sequence: Synthetic oligonucleotide
agguaauuggcaccuugcc

SEQ ID NO: 1456016 - RNA, 19 nt, Artificial Sequence
  Description of Artificial Sequence: Synthetic oligonucleotide
cuuguuagugaaaucucag

SEQ ID NO: 1456017 - RNA, 19 nt, Artificial Sequence
  Description of Artificial Sequence: Synthetic oligonucleotide
ucuaacauguacugguaac

SEQ ID NO: 1456018 - RNA, 19 nt, Artificial Sequence
  Description of Artificial Sequence: Synthetic oligonucleotide
caucaaucauguauugucc

SEQ ID NO: 1456019 - RNA, 19 nt, Artificial Sequence
  Description of Artificial Sequence: Synthetic oligonucleotide
gacgaucaaauucacuuug

SEQ ID NO: 1456020 - RNA, 19 nt, Artificial Sequence
  Description of Artificial Sequence: Synthetic oligonucleotide
aaggcugauguuugaauca

SEQ ID NO: 1456021 - RNA, 19 nt, Artificial Sequence
  Description of Artificial Sequence: Synthetic oligonucleotide
auaaaguuucuuaaaggag

SEQ ID NO: 1456022 - RNA, 19 nt, Artificial Sequence
  Description of Artificial Sequence: Synthetic oligonucleotide
uggauggaaaacuucccag

SEQ ID NO: 1456023 - RNA, 19 nt, Artificial Sequence
  Description of Artificial Sequence: Synthetic oligonucleotide
aaacgcagaugccacaggu

SEQ ID NO: 1456024 - RNA, 19 nt, Artificial Sequence
  Description of Artificial Sequence: Synthetic oligonucleotide
aaggagaguugauuacuag

SEQ ID NO: 1456025 - RNA, 19 nt, Artificial Sequence
  Description of Artificial Sequence: Synthetic oligonucleotide
uaaguagguaauuggcacc

SEQ ID NO: 1456026 - RNA, 19 nt, Artificial Sequence
  Description of Artificial Sequence: Synthetic oligonucleotide
uuugaguuauucguaauuc

SEQ ID NO: 1456027 - RNA, 19 nt, Artificial Sequence
  Description of Artificial Sequence: Synthetic oligonucleotide
aguuauucguaauuccugu

SEQ ID NO: 1456028 - RNA, 19 nt, Artificial Sequence
  Description of Artificial Sequence: Synthetic oligonucleotide
uccaauucgcuucugugcu

SEQ ID NO: 1456029 - RNA, 19 nt, Artificial Sequence
  Description of Artificial Sequence: Synthetic oligonucleotide
ugccugacgaucaaauuca

SEQ ID NO: 1456030 - RNA, 19 nt, Artificial Sequence
  Description of Artificial Sequence: Synthetic oligonucleotide
uuccaauucgcuucugugc

SEQ ID NO: 1456031 - RNA, 19 nt, Artificial Sequence
  Description of Artificial Sequence: Synthetic oligonucleotide
uugucaugaaaucucuaac

SEQ ID NO: 1456032 - RNA, 19 nt, Artificial Sequence
  Description of Artificial Sequence: Synthetic oligonucleotide
ucuccacauuuaauaaggg

SEQ ID NO: 1456033 - RNA, 19 nt, Artificial Sequence
  Description of Artificial Sequence: Synthetic oligonucleotide
ucaugauagguaaucguuc

SEQ ID NO: 1456034 - RNA, 19 nt, Artificial Sequence
  Description of Artificial Sequence: Synthetic oligonucleotide
aaucguucaugauuucccu

SEQ ID NO: 1456035 - RNA, 19 nt, Artificial Sequence
  Description of Artificial Sequence: Synthetic oligonucleotide
ucucuaacauaaauucugu

SEQ ID NO: 1456036 - RNA, 19 nt, Artificial Sequence
  Description of Artificial Sequence: Synthetic oligonucleotide
uuaaggucguugagguugg

SEQ ID NO: 1456037 - RNA, 19 nt, Artificial Sequence
  Description of Artificial Sequence: Synthetic oligonucleotide
aucucuaacauaaauucug

SEQ ID NO: 1456038 - RNA, 19 nt, Artificial Sequence
  Description of Artificial Sequence: Synthetic oligonucleotide
uuuaauugagaaguucuaa

SEQ ID NO: 1456039 - RNA, 19 nt, Artificial Sequence
  Description of Artificial Sequence: Synthetic oligonucleotide
auagcauuugaaaacgcag

SEQ ID NO: 1456040 - RNA, 19 nt, Artificial Sequence
  Description of Artificial Sequence: Synthetic oligonucleotide
ugucagcuguuccaauucg

SEQ ID NO: 1456041 - RNA, 19 nt, Artificial Sequence
  Description of Artificial Sequence: Synthetic oligonucleotide
auuacuaggcuaccuguug

SEQ ID NO: 1456042 - RNA, 19 nt, Artificial Sequence
  Description of Artificial Sequence: Synthetic oligonucleotide
auagacgaacucuucuauc

SEQ ID NO: 1456043 - RNA, 19 nt, Artificial Sequence
  Description of Artificial Sequence: Synthetic oligonucleotide
accaugcaauuuuauuggc

SEQ ID NO: 1456044 - RNA, 19 nt, Artificial Sequence
  Description of Artificial Sequence: Synthetic oligonucleotide
ucuggguuguuuaugcgac

SEQ ID NO: 1456045 - RNA, 19 nt, Artificial Sequence
  Description of Artificial Sequence: Synthetic oligonucleotide
aacauucuugucaugaaau

SEQ ID NO: 1456046 - RNA, 19 nt, Artificial Sequence
  Description of Artificial Sequence: Synthetic oligonucleotide
ggaaauuuaaggcugaugu

SEQ ID NO: 1456047 - RNA, 19 nt, Artificial Sequence
  Description of Artificial Sequence: Synthetic oligonucleotide
caaaaguagaaguggcuug

SEQ ID NO: 1456048 - RNA, 19 nt, Artificial Sequence
  Description of Artificial Sequence: Synthetic oligonucleotide
gauaauuggauggaaaacu

SEQ ID NO: 1456049 - RNA, 19 nt, Artificial Sequence
  Description of Artificial Sequence: Synthetic oligonucleotide
uuugguacauuccgcuuug

SEQ ID NO: 1456050 - RNA, 19 nt, Artificial Sequence
  Description of Artificial Sequence: Synthetic oligonucleotide
aguucuaaguagguaauug

SEQ ID NO: 1456051 - RNA, 19 nt, Artificial Sequence
  Description of Artificial Sequence: Synthetic oligonucleotide
aagccaucgcagaagggcc

SEQ ID NO: 1456052 - RNA, 19 nt, Artificial Sequence
  Description of Artificial Sequence: Synthetic oligonucleotide
uuaaccaugcaauuuuauu

SEQ ID NO: 1456053 - RNA, 19 nt, Artificial Sequence
  Description of Artificial Sequence: Synthetic oligonucleotide
ugauuacuaggcuaccugu

SEQ ID NO: 1456054 - RNA, 19 nt, Artificial Sequence
  Description of Artificial Sequence: Synthetic oligonucleotide
aauuggggcucaaaaguag

SEQ ID NO: 1456055 - RNA, 19 nt, Artificial Sequence
  Description of Artificial Sequence: Synthetic oligonucleotide
uucugauuuccucucuccc

SEQ ID NO: 1456056 - RNA, 19 nt, Artificial Sequence
  Description of Artificial Sequence: Synthetic oligonucleotide
cuccacauuuaauaagggc

SEQ ID NO: 1456057 - RNA, 19 nt, Artificial Sequence
  Description of Artificial Sequence: Synthetic oligonucleotide
guugaaauccaugauguuc

SEQ ID NO: 1456058 - RNA, 19 nt, Artificial Sequence
  Description of Artificial Sequence: Synthetic oligonucleotide
ucccuauuuaauugagaag

SEQ ID NO: 1456059 - RNA, 19 nt, Artificial Sequence
  Description of Artificial Sequence: Synthetic oligonucleotide
aaagauaauuggauggaaa

SEQ ID NO: 1456060 - RNA, 19 nt, Artificial Sequence
  Description of Artificial Sequence: Synthetic oligonucleotide
uuacuaggcuaccuguuga

SEQ ID NO: 1456061 - RNA, 19 nt, Artificial Sequence
  Description of Artificial Sequence: Synthetic oligonucleotide
aacaugaaagguacuuaag

SEQ ID NO: 1456062 - RNA, 19 nt, Artificial Sequence
  Description of Artificial Sequence: Synthetic oligonucleotide
ugucaugauagguaaucgu

SEQ ID NO: 1456063 - RNA, 19 nt, Artificial Sequence
  Description of Artificial Sequence: Synthetic oligonucleotide
ugugcuucuccacauuuaa

SEQ ID NO: 1456064 - RNA, 19 nt, Artificial Sequence
  Description of Artificial Sequence: Synthetic oligonucleotide
gaacaugaaagguacuuaa

SEQ ID NO: 1456065 - RNA, 19 nt, Artificial Sequence
  Description of Artificial Sequence: Synthetic oligonucleotide
uuggaaggagaguugauua

SEQ ID NO: 1456066 - RNA, 19 nt, Artificial Sequence
  Description of Artificial Sequence: Synthetic oligonucleotide
uaauuggauggaaaacuuc

SEQ ID NO: 1456067 - RNA, 19 nt, Artificial Sequence
  Description of Artificial Sequence: Synthetic oligonucleotide
uucaugauuucccuauuua

SEQ ID NO: 1456068 - RNA, 19 nt, Artificial Sequence
  Description of Artificial Sequence: Synthetic oligonucleotide
ugcaauuuuauuggcagaa

SEQ ID NO: 1456069 - RNA, 19 nt, Artificial Sequence
  Description of Artificial Sequence: Synthetic oligonucleotide
gaauccauuccaacgacac

SEQ ID NO: 1456070 - RNA, 19 nt, Artificial Sequence
  Description of Artificial Sequence: Synthetic oligonucleotide
ugccagaagugacaguuca

SEQ ID NO: 1456071 - RNA, 19 nt, Artificial Sequence
  Description of Artificial Sequence: Synthetic oligonucleotide
uagaguuacuguauauaaa

SEQ ID NO: 1456072 - RNA, 19 nt, Artificial Sequence
  Description of Artificial Sequence: Synthetic oligonucleotide
ugaggaaauuuaaggcuga

SEQ ID NO: 1456073 - RNA, 19 nt, Artificial Sequence
  Description of Artificial Sequence: Synthetic oligonucleotide
uccgcuuugcuaaggaggu

SEQ ID NO: 1456074 - RNA, 19 nt, Artificial Sequence
  Description of Artificial Sequence: Synthetic oligonucleotide
ugaauccauuccaacgaca

SEQ ID NO: 1456075 - RNA, 19 nt, Artificial Sequence
  Description of Artificial Sequence: Synthetic oligonucleotide
uccaacgacacugaacaca

SEQ ID NO: 1456076 - RNA, 19 nt, Artificial Sequence
  Description of Artificial Sequence: Synthetic oligonucleotide
uuucccuauuuaauugaga

SEQ ID NO: 1456077 - RNA, 19 nt, Artificial Sequence
  Description of Artificial Sequence: Synthetic oligonucleotide
gaguuauucguaauuccug

SEQ ID NO: 1456078 - RNA, 19 nt, Artificial Sequence
  Description of Artificial Sequence: Synthetic oligonucleotide
ucguaauuccuguucagau

SEQ ID NO: 1456079 - RNA, 19 nt, Artificial Sequence
  Description of Artificial Sequence: Synthetic oligonucleotide
cauuagccagucugaaucc

SEQ ID NO: 1456080 - RNA, 19 nt, Artificial Sequence
  Description of Artificial Sequence: Synthetic oligonucleotide
agaaagauaauuggaugga

SEQ ID NO: 1456081 - RNA, 19 nt, Artificial Sequence
  Description of Artificial Sequence: Synthetic oligonucleotide
agcauuugaaaacgcagau

SEQ ID NO: 1456082 - RNA, 19 nt, Artificial Sequence
  Description of Artificial Sequence: Synthetic oligonucleotide
agaguugauuacuaggcua

SEQ ID NO: 1456083 - RNA, 19 nt, Artificial Sequence
  Description of Artificial Sequence: Synthetic oligonucleotide
aauaagggcauugccguaa

SEQ ID NO: 1456084 - RNA, 19 nt, Artificial Sequence
  Description of Artificial Sequence: Synthetic oligonucleotide
gaguugauuacuaggcuac

SEQ ID NO: 1456085 - RNA, 19 nt, Artificial Sequence
  Description of Artificial Sequence: Synthetic oligonucleotide
aaaggagugaggaaauuua

SEQ ID NO: 1456086 - RNA, 19 nt, Artificial Sequence
  Description of Artificial Sequence: Synthetic oligonucleotide
cauuccaacgacacugaac

SEQ ID NO: 1456087 - RNA, 19 nt, Artificial Sequence
  Description of Artificial Sequence: Synthetic oligonucleotide
uauugucccaaaaguucug

SEQ ID NO: 1456088 - RNA, 19 nt, Artificial Sequence
  Description of Artificial Sequence: Synthetic oligonucleotide
uugugauuguuuuguaauc

SEQ ID NO: 1456089 - RNA, 19 nt, Artificial Sequence
  Description of Artificial Sequence: Synthetic oligonucleotide
uauuaaccaugcaauuuua

SEQ ID NO: 1456090 - RNA, 19 nt, Artificial Sequence
  Description of Artificial Sequence: Synthetic oligonucleotide
acuguucgcagcgucauag

SEQ ID NO: 1456091 - RNA, 19 nt, Artificial Sequence
  Description of Artificial Sequence: Synthetic oligonucleotide
cugccugacgaucaaauuc

SEQ ID NO: 1456092 - RNA, 19 nt, Artificial Sequence
  Description of Artificial Sequence: Synthetic oligonucleotide
guaaucguucaugauuucc

SEQ ID NO: 1456093 - RNA, 19 nt, Artificial Sequence
  Description of Artificial Sequence: Synthetic oligonucleotide
ucguucaugauuucccuau

SEQ ID NO: 1456094 - RNA, 19 nt, Artificial Sequence
  Description of Artificial Sequence: Synthetic oligonucleotide
gcaucaaucauguauuguc

SEQ ID NO: 1456095 - RNA, 19 nt, Artificial Sequence
  Description of Artificial Sequence: Synthetic oligonucleotide
gaucaaauucacuuugagu

SEQ ID NO: 1456096 - RNA, 19 nt, Artificial Sequence
  Description of Artificial Sequence: Synthetic oligonucleotide
ggagaguugauuacuaggc

SEQ ID NO: 1456097 - RNA, 19 nt, Artificial Sequence
  Description of Artificial Sequence: Synthetic oligonucleotide
agaaguggcuuguuaguga

SEQ ID NO: 1456098 - RNA, 19 nt, Artificial Sequence
  Description of Artificial Sequence: Synthetic oligonucleotide
auucguaauuccuguucag

SEQ ID NO: 1456099 - RNA, 19 nt, Artificial Sequence
  Description of Artificial Sequence: Synthetic oligonucleotide
cuugucaugaaaucucuaa

SEQ ID NO: 1456100 - RNA, 19 nt, Artificial Sequence
  Description of Artificial Sequence: Synthetic oligonucleotide
cuaccuguugaagccaucg

SEQ ID NO: 1456101 - RNA, 19 nt, Artificial Sequence
  Description of Artificial Sequence: Synthetic oligonucleotide
acguugaaauccaugaugu

SEQ ID NO: 1456102 - RNA, 19 nt, Artificial Sequence
  Description of Artificial Sequence: Synthetic oligonucleotide
uagaaguggcuuguuagug

SEQ ID NO: 1456103 - RNA, 19 nt, Artificial Sequence
  Description of Artificial Sequence: Synthetic oligonucleotide
caugauagguaaucguuca

SEQ ID NO: 1456104 - RNA, 19 nt, Artificial Sequence
  Description of Artificial Sequence: Synthetic oligonucleotide
aguauuaaccaugcaauuu

SEQ ID NO: 1456105 - RNA, 19 nt, Artificial Sequence
  Description of Artificial Sequence: Synthetic oligonucleotide
uaacauguacugguaacac

SEQ ID NO: 1456106 - RNA, 19 nt, Artificial Sequence
  Description of Artificial Sequence: Synthetic oligonucleotide
ugcgacuuggugcuuuucu

SEQ ID NO: 1456107 - RNA, 19 nt, Artificial Sequence
  Description of Artificial Sequence: Synthetic oligonucleotide
auggugucaugauagguaa

SEQ ID NO: 1456108 - RNA, 19 nt, Artificial Sequence
  Description of Artificial Sequence: Synthetic oligonucleotide
ugccuuucugauuuccucu

SEQ ID NO: 1456109 - RNA, 19 nt, Artificial Sequence
  Description of Artificial Sequence: Synthetic oligonucleotide
ggcauuuggauuuggcugc

SEQ ID NO: 1456110 - RNA, 19 nt, Artificial Sequence
  Description of Artificial Sequence: Synthetic oligonucleotide
uccugcugccacuugauuc

SEQ ID NO: 1456111 - RNA, 19 nt, Artificial Sequence
  Description of Artificial Sequence: Synthetic oligonucleotide
ggcucaaaaguagaagugg

SEQ ID NO: 1456112 - RNA, 19 nt, Artificial Sequence
  Description of Artificial Sequence: Synthetic oligonucleotide
auugccguaagcugucccu

SEQ ID NO: 1456113 - RNA, 19 nt, Artificial Sequence
  Description of Artificial Sequence: Synthetic oligonucleotide
uggcagaauggccaguuuc

SEQ ID NO: 1456114 - RNA, 19 nt, Artificial Sequence
  Description of Artificial Sequence: Synthetic oligonucleotide
gguuguuuaugcgacuugg

SEQ ID NO: 1456115 - RNA, 19 nt, Artificial Sequence
  Description of Artificial Sequence: Synthetic oligonucleotide
uacuuaagccugcuuuaga

SEQ ID NO: 1456116 - RNA, 19 nt, Artificial Sequence
  Description of Artificial Sequence: Synthetic oligonucleotide
uucguaauuccuguucaga

SEQ ID NO: 1456117 - RNA, 19 nt, Artificial Sequence
  Description of Artificial Sequence: Synthetic oligonucleotide
ccuuaugacaugaacauga

SEQ ID NO: 1456118 - RNA, 19 nt, Artificial Sequence
  Description of Artificial Sequence: Synthetic oligonucleotide
aaguagaaguggcuuguua

SEQ ID NO: 1456119 - RNA, 19 nt, Artificial Sequence
  Description of Artificial Sequence: Synthetic oligonucleotide
guuugaaucagcucucugu

SEQ ID NO: 1456120 - RNA, 19 nt, Artificial Sequence
  Description of Artificial Sequence: Synthetic oligonucleotide
gugucaugauagguaaucg

SEQ ID NO: 1456121 - RNA, 19 nt, Artificial Sequence
  Description of Artificial Sequence: Synthetic oligonucleotide
gaggucuaacauguacugg

SEQ ID NO: 1456122 - RNA, 19 nt, Artificial Sequence
  Description of Artificial Sequence: Synthetic oligonucleotide
uguucgcagcgucauaguc

SEQ ID NO: 1456123 - RNA, 19 nt, Artificial Sequence
  Description of Artificial Sequence: Synthetic oligonucleotide
uuuaaggcugauguuugaa

SEQ ID NO: 1456124 - RNA, 19 nt, Artificial Sequence
  Description of Artificial Sequence: Synthetic oligonucleotide
aacccuagccuuccugcug

SEQ ID NO: 1456125 - RNA, 19 nt, Artificial Sequence
  Description of Artificial Sequence: Synthetic oligonucleotide
uucgcagcgucauagucau

SEQ ID NO: 1456126 - RNA, 19 nt, Artificial Sequence
  Description of Artificial Sequence: Synthetic oligonucleotide
gacaugaacaugaaaggua

SEQ ID NO: 1456127 - RNA, 19 nt, Artificial Sequence
  Description of Artificial Sequence: Synthetic oligonucleotide
aagugagcauccaauucug

SEQ ID NO: 1456128 - RNA, 19 nt, Artificial Sequence
  Description of Artificial Sequence: Synthetic oligonucleotide
aaauuggggcucaaaagua

SEQ ID NO: 1456129 - RNA, 19 nt, Artificial Sequence
  Description of Artificial Sequence: Synthetic oligonucleotide
auuccuguucagaugaacu

SEQ ID NO: 1456130 - RNA, 19 nt, Artificial Sequence
  Description of Artificial Sequence: Synthetic oligonucleotide
cugggccaaacucaguccc

SEQ ID NO: 1456131 - RNA, 19 nt, Artificial Sequence
  Description of Artificial Sequence: Synthetic oligonucleotide
auuguuuuguaaucuccuu

SEQ ID NO: 1456132 - RNA, 19 nt, Artificial Sequence
  Description of Artificial Sequence: Synthetic oligonucleotide
ucgucugccagaagugaca

SEQ ID NO: 1456133 - RNA, 19 nt, Artificial Sequence
  Description of Artificial Sequence: Synthetic oligonucleotide
auuccgcuuugcuaaggag

SEQ ID NO: 1456134 - RNA, 19 nt, Artificial Sequence
  Description of Artificial Sequence: Synthetic oligonucleotide
ugaacaugaaagguacuua

SEQ ID NO: 1456135 - RNA, 19 nt, Artificial Sequence
  Description of Artificial Sequence: Synthetic oligonucleotide
guuuaugcgacuuggugcu

SEQ ID NO: 1456136 - RNA, 19 nt, Artificial Sequence
  Description of Artificial Sequence: Synthetic oligonucleotide
ucuucuauccuggcauuug

SEQ ID NO: 1456137 - RNA, 19 nt, Artificial Sequence
  Description of Artificial Sequence: Synthetic oligonucleotide
auuucccuauuuaauugag

SEQ ID NO: 1456138 - RNA, 19 nt, Artificial Sequence
  Description of Artificial Sequence: Synthetic oligonucleotide
uucuuaaaggagugaggaa

SEQ ID NO: 1456139 - RNA, 19 nt, Artificial Sequence
  Description of Artificial Sequence: Synthetic oligonucleotide
cagcgucauagucauagag

SEQ ID NO: 1456140 - RNA, 19 nt, Artificial Sequence
  Description of Artificial Sequence: Synthetic oligonucleotide
gaaguggcuuguuagugaa

SEQ ID NO: 1456141 - RNA, 19 nt, Artificial Sequence
  Description of Artificial Sequence: Synthetic oligonucleotide
aaggugcccgcgucggccg

SEQ ID NO: 1456142 - RNA, 19 nt, Artificial Sequence
  Description of Artificial Sequence: Synthetic oligonucleotide
agucggguaaucucugccu

SEQ ID NO: 1456143 - RNA, 19 nt, Artificial Sequence
  Description of Artificial Sequence: Synthetic oligonucleotide
gauguuugaaucagcucuc

SEQ ID NO: 1456144 - RNA, 19 nt, Artificial Sequence
  Description of Artificial Sequence: Synthetic oligonucleotide
gcaauagcacuucagucug

SEQ ID NO: 1456145 - RNA, 19 nt, Artificial Sequence
  Description of Artificial Sequence: Synthetic oligonucleotide
ugacgaucaaauucacuuu

SEQ ID NO: 1456146 - RNA, 19 nt, Artificial Sequence
  Description of Artificial Sequence: Synthetic oligonucleotide
cugacgaucaaauucacuu

SEQ ID NO: 1456147 - RNA, 19 nt, Artificial Sequence
  Description of Artificial Sequence: Synthetic oligonucleotide
auaagggcauugccguaag

SEQ ID NO: 1456148 - RNA, 19 nt, Artificial Sequence
  Description of Artificial Sequence: Synthetic oligonucleotide
augaacaugaaagguacuu

SEQ ID NO: 1456149 - RNA, 19 nt, Artificial Sequence
  Description of Artificial Sequence: Synthetic oligonucleotide
gaagucggguaaucucugc

SEQ ID NO: 1456150 - RNA, 19 nt, Artificial Sequence
  Description of Artificial Sequence: Synthetic oligonucleotide
ccaacgacacugaacacag

SEQ ID NO: 1456151 - RNA, 19 nt, Artificial Sequence
  Description of Artificial Sequence: Synthetic oligonucleotide
cuaacauguacugguaaca

SEQ ID NO: 1456152 - RNA, 19 nt, Artificial Sequence
  Description of Artificial Sequence: Synthetic oligonucleotide
guaauuggcaccuugccuu

SEQ ID NO: 1456153 - RNA, 19 nt, Artificial Sequence
  Description of Artificial Sequence: Synthetic oligonucleotide
gaaagguacuuaagccugc

SEQ ID NO: 1456154 - RNA, 19 nt, Artificial Sequence
  Description of Artificial Sequence: Synthetic oligonucleotide
uccaagugagcauccaauu

SEQ ID NO: 1456155 - RNA, 19 nt, Artificial Sequence
  Description of Artificial Sequence: Synthetic oligonucleotide
cugauguuugaaucagcuc

SEQ ID NO: 1456156 - RNA, 19 nt, Artificial Sequence
  Description of Artificial Sequence: Synthetic oligonucleotide
aaguuucuuaaaggaguga

SEQ ID NO: 1456157 - RNA, 19 nt, Artificial Sequence
  Description of Artificial Sequence: Synthetic oligonucleotide
agacgaacucuucuauccu

SEQ ID NO: 1456158 - RNA, 19 nt, Artificial Sequence
  Description of Artificial Sequence: Synthetic oligonucleotide
cugaauccauuccaacgac

SEQ ID NO: 1456159 - RNA, 19 nt, Artificial Sequence
  Description of Artificial Sequence: Synthetic oligonucleotide
agcgucauagucauagaga

SEQ ID NO: 1456160 - RNA, 19 nt, Artificial Sequence
  Description of Artificial Sequence: Synthetic oligonucleotide
uuagccagucugaauccau

SEQ ID NO: 1456161 - RNA, 19 nt, Artificial Sequence
  Description of Artificial Sequence: Synthetic oligonucleotide
uccuuaugacaugaacaug

SEQ ID NO: 1456162 - RNA, 19 nt, Artificial Sequence
  Description of Artificial Sequence: Synthetic oligonucleotide
agguaaucguucaugauuu

SEQ ID NO: 1456163 - RNA, 19 nt, Artificial Sequence
  Description of Artificial Sequence: Synthetic oligonucleotide
augcaauuuuauuggcaga

SEQ ID NO: 1456164 - RNA, 19 nt, Artificial Sequence
  Description of Artificial Sequence: Synthetic oligonucleotide
auaauuggauggaaaacuu

SEQ ID NO: 1456165 - RNA, 19 nt, Artificial Sequence
  Description of Artificial Sequence: Synthetic oligonucleotide
cuagccuuccugcugccac

SEQ ID NO: 1456166 - RNA, 19 nt, Artificial Sequence
  Description of Artificial Sequence: Synthetic oligonucleotide
gagaacccuagccuuccug

SEQ ID NO: 1456167 - RNA, 19 nt, Artificial Sequence
  Description of Artificial Sequence: Synthetic oligonucleotide
uacauuccgcuuugcuaag

SEQ ID NO: 1456168 - RNA, 19 nt, Artificial Sequence
  Description of Artificial Sequence: Synthetic oligonucleotide
acuuugaguuauucguaau

SEQ ID NO: 1456169 - RNA, 19 nt, Artificial Sequence
  Description of Artificial Sequence: Synthetic oligonucleotide
gcauaguaagucaucuggg

SEQ ID NO: 1456170 - RNA, 19 nt, Artificial Sequence
  Description of Artificial Sequence: Synthetic oligonucleotide
agucauucagacagcggag

SEQ ID NO: 1456171 - RNA, 19 nt, Artificial Sequence
  Description of Artificial Sequence: Synthetic oligonucleotide
auuuaauugagaaguucua

SEQ ID NO: 1456172 - RNA, 19 nt, Artificial Sequence
  Description of Artificial Sequence: Synthetic oligonucleotide
gucggguaaucucugccug

SEQ ID NO: 1456173 - RNA, 19 nt, Artificial Sequence
  Description of Artificial Sequence: Synthetic oligonucleotide
cucgucugccagaagugac

SEQ ID NO: 1456174 - RNA, 19 nt, Artificial Sequence
  Description of Artificial Sequence: Synthetic oligonucleotide
auuggcaccuugccuuucu

SEQ ID NO: 1456175 - RNA, 19 nt, Artificial Sequence
  Description of Artificial Sequence: Synthetic oligonucleotide
acuaggcuaccuguugaag

SEQ ID NO: 1456176 - RNA, 19 nt, Artificial Sequence
  Description of Artificial Sequence: Synthetic oligonucleotide
auguauugucccaaaaguu

SEQ ID NO: 1456177 - RNA, 19 nt, Artificial Sequence
  Description of Artificial Sequence: Synthetic oligonucleotide
gaaggugcccgcgucggcc

SEQ ID NO: 1456178 - RNA, 19 nt, Artificial Sequence
  Description of Artificial Sequence: Synthetic oligonucleotide
cauugccguaagcuguccc

SEQ ID NO: 1456179 - RNA, 19 nt, Artificial Sequence
  Description of Artificial Sequence: Synthetic oligonucleotide
ucguugagguuggaaggag

SEQ ID NO: 1456180 - RNA, 19 nt, Artificial Sequence
  Description of Artificial Sequence: Synthetic oligonucleotide
cugcaucaaucauguauug

SEQ ID NO: 1456181 - RNA, 19 nt, Artificial Sequence
  Description of Artificial Sequence: Synthetic oligonucleotide
augauagguaaucguucau

SEQ ID NO: 1456182 - RNA, 19 nt, Artificial Sequence
  Description of Artificial Sequence: Synthetic oligonucleotide
gcgucauagucauagagaa

SEQ ID NO: 1456183 - RNA, 19 nt, Artificial Sequence
  Description of Artificial Sequence: Synthetic oligonucleotide
aaguucuaaguagguaauu

SEQ ID NO: 1456184 - RNA, 19 nt, Artificial Sequence
  Description of Artificial Sequence: Synthetic oligonucleotide
cugugcauaguaagucauc

SEQ ID NO: 1456185 - RNA, 19 nt, Artificial Sequence
  Description of Artificial Sequence: Synthetic oligonucleotide
cacuuugaguuauucguaa

SEQ ID NO: 1456186 - RNA, 19 nt, Artificial Sequence
  Description of Artificial Sequence: Synthetic oligonucleotide
auuaaccaugcaauuuuau

SEQ ID NO: 1456187 - RNA, 19 nt, Artificial Sequence
  Description of Artificial Sequence: Synthetic oligonucleotide
gguacauuccgcuuugcua

SEQ ID NO: 1456188 - RNA, 19 nt, Artificial Sequence
  Description of Artificial Sequence: Synthetic oligonucleotide
uaauaagggcauugccgua

SEQ ID NO: 1456189 - RNA, 19 nt, Artificial Sequence
  Description of Artificial Sequence: Synthetic oligonucleotide
ucugccugacgaucaaauu

SEQ ID NO: 1456190 - RNA, 19 nt, Artificial Sequence
  Description of Artificial Sequence: Synthetic oligonucleotide
guuuuccaagugagcaucc

SEQ ID NO: 1456191 - RNA, 19 nt, Artificial Sequence
  Description of Artificial Sequence: Synthetic oligonucleotide
agcagaagucggguaaucu

SEQ ID NO: 1456192 - RNA, 19 nt, Artificial Sequence
  Description of Artificial Sequence: Synthetic oligonucleotide
aguacuguucgcagcguca

SEQ ID NO: 1456193 - RNA, 19 nt, Artificial Sequence
  Description of Artificial Sequence: Synthetic oligonucleotide
uaauuccuguucagaugaa

SEQ ID NO: 1456194 - RNA, 19 nt, Artificial Sequence
  Description of Artificial Sequence: Synthetic oligonucleotide
uggcaccuugccuuucuga

SEQ ID NO: 1456195 - RNA, 19 nt, Artificial Sequence
  Description of Artificial Sequence: Synthetic oligonucleotide
ucuucacguugaaauccau

SEQ ID NO: 1456196 - RNA, 19 nt, Artificial Sequence
  Description of Artificial Sequence: Synthetic oligonucleotide
guucgcagcgucauaguca

SEQ ID NO: 1456197 - RNA, 19 nt, Artificial Sequence
  Description of Artificial Sequence: Synthetic oligonucleotide
guagaaguggcuuguuagu

SEQ ID NO: 1456198 - RNA, 19 nt, Artificial Sequence
  Description of Artificial Sequence: Synthetic oligonucleotide
gaaggagaguugauuacua

SEQ ID NO: 1456199 - RNA, 19 nt, Artificial Sequence
  Description of Artificial Sequence: Synthetic oligonucleotide
aggaaggugcccgcgucgg

SEQ ID NO: 1456200 - RNA, 19 nt, Artificial Sequence
  Description of Artificial Sequence: Synthetic oligonucleotide
cauucuugucaugaaaucu

SEQ ID NO: 1456201 - RNA, 19 nt, Artificial Sequence
  Description of Artificial Sequence: Synthetic oligonucleotide
cuaaggagguuuuccaagu

SEQ ID NO: 1456202 - RNA, 19 nt, Artificial Sequence
  Description of Artificial Sequence: Synthetic oligonucleotide
caauucgcuucugugcuuc

SEQ ID NO: 1456203 - RNA, 19 nt, Artificial Sequence
  Description of Artificial Sequence: Synthetic oligonucleotide
uugccguaagcugucccug

SEQ ID NO: 1456204 - RNA, 19 nt, Artificial Sequence
  Description of Artificial Sequence: Synthetic oligonucleotide
gcagaagucggguaaucuc

SEQ ID NO: 1456205 - RNA, 19 nt, Artificial Sequence
  Description of Artificial Sequence: Synthetic oligonucleotide
cucaaaaguagaaguggcu

SEQ ID NO: 1456206 - RNA, 19 nt, Artificial Sequence
  Description of Artificial Sequence: Synthetic oligonucleotide
uggguuguuuaugcgacuu

SEQ ID NO: 1456207 - RNA, 19 nt, Artificial Sequence
  Description of Artificial Sequence: Synthetic oligonucleotide
acauuccgcuuugcuaagg

SEQ ID NO: 1456208 - RNA, 19 nt, Artificial Sequence
  Description of Artificial Sequence: Synthetic oligonucleotide
aucguucaugauuucccua

SEQ ID NO: 1456209 - RNA, 19 nt, Artificial Sequence
  Description of Artificial Sequence: Synthetic oligonucleotide
acgacacugaacacaguga

SEQ ID NO: 1456210 - RNA, 19 nt, Artificial Sequence
  Description of Artificial Sequence: Synthetic oligonucleotide
gccagucugaauccauucc

SEQ ID NO: 1456211 - RNA, 19 nt, Artificial Sequence
  Description of Artificial Sequence: Synthetic oligonucleotide
uuuggaggucuaacaugua

SEQ ID NO: 1456212 - RNA, 19 nt, Artificial Sequence
  Description of Artificial Sequence: Synthetic oligonucleotide
guaagcugucccugggcca

SEQ ID NO: 1456213 - RNA, 19 nt, Artificial Sequence
  Description of Artificial Sequence: Synthetic oligonucleotide
cauagagaacccuagccuu

SEQ ID NO: 1456214 - RNA, 19 nt, Artificial Sequence
  Description of Artificial Sequence: Synthetic oligonucleotide
cauuccgcuuugcuaagga

SEQ ID NO: 1456215 - RNA, 19 nt, Artificial Sequence
  Description of Artificial Sequence: Synthetic oligonucleotide
acgaucaaauucacuuuga

SEQ ID NO: 1456216 - RNA, 19 nt, Artificial Sequence
  Description of Artificial Sequence: Synthetic oligonucleotide
cuuaagccugcuuuagagu

SEQ ID NO: 1456217 - RNA, 19 nt, Artificial Sequence
  Description of Artificial Sequence: Synthetic oligonucleotide
gucauucagacagcggaga

SEQ ID NO: 1456218 - RNA, 19 nt, Artificial Sequence
  Description of Artificial Sequence: Synthetic oligonucleotide
ggggcucaaaaguagaagu

SEQ ID NO: 1456219 - RNA, 19 nt, Artificial Sequence
  Description of Artificial Sequence: Synthetic oligonucleotide
cuuuagaguuacuguauau

SEQ ID NO: 1456220 - RNA, 19 nt, Artificial Sequence
  Description of Artificial Sequence: Synthetic oligonucleotide
gguaauuggcaccuugccu

SEQ ID NO: 1456221 - RNA, 19 nt, Artificial Sequence
  Description of Artificial Sequence: Synthetic oligonucleotide
auguuugaaucagcucucu

SEQ ID NO: 1456222 - RNA, 19 nt, Artificial Sequence
  Description of Artificial Sequence: Synthetic oligonucleotide
uucugauggcuuguaguuu

SEQ ID NO: 1456223 - RNA, 19 nt, Artificial Sequence
  Description of Artificial Sequence: Synthetic oligonucleotide
ccaagugagcauccaauuc

SEQ ID NO: 1456224 - RNA, 19 nt, Artificial Sequence
  Description of Artificial Sequence: Synthetic oligonucleotide
uuaugcgacuuggugcuuu

SEQ ID NO: 1456225 - RNA, 19 nt, Artificial Sequence
  Description of Artificial Sequence: Synthetic oligonucleotide
caguacuguucgcagcguc

SEQ ID NO: 1456226 - RNA, 19 nt, Artificial Sequence
  Description of Artificial Sequence: Synthetic oligonucleotide
cuugauucuuuaaggucgu

SEQ ID NO: 1456227 - RNA, 19 nt, Artificial Sequence
  Description of Artificial Sequence: Synthetic oligonucleotide
gucaugauagguaaucguu

SEQ ID NO: 1456228 - RNA, 19 nt, Artificial Sequence
  Description of Artificial Sequence: Synthetic oligonucleotide
uaugcgacuuggugcuuuu

SEQ ID NO: 1456229 - RNA, 19 nt, Artificial Sequence
  Description of Artificial Sequence: Synthetic oligonucleotide
gucccaaaaguucuggguu

SEQ ID NO: 1456230 - RNA, 19 nt, Artificial Sequence
  Description of Artificial Sequence: Synthetic oligonucleotide
uauuggcagaauggccagu

SEQ ID NO: 1456231 - RNA, 19 nt, Artificial Sequence
  Description of Artificial Sequence: Synthetic oligonucleotide
uccuggcauuuggauuugg

SEQ ID NO: 1456232 - RNA, 19 nt, Artificial Sequence
  Description of Artificial Sequence: Synthetic oligonucleotide
guugauuacuaggcuaccu

SEQ ID NO: 1456233 - RNA, 19 nt, Artificial Sequence
  Description of Artificial Sequence: Synthetic oligonucleotide
ucaguacuguucgcagcgu

SEQ ID NO: 1456234 - RNA, 19 nt, Artificial Sequence
  Description of Artificial Sequence: Synthetic oligonucleotide
agagaacccuagccuuccu

SEQ ID NO: 1456235 - RNA, 19 nt, Artificial Sequence
  Description of Artificial Sequence: Synthetic oligonucleotide
agugagcauccaauucugu

SEQ ID NO: 1456236 - RNA, 19 nt, Artificial Sequence
  Description of Artificial Sequence: Synthetic oligonucleotide
ggguuguuuaugcgacuug

SEQ ID NO: 1456237 - RNA, 19 nt, Artificial Sequence
  Description of Artificial Sequence: Synthetic oligonucleotide
gcggagaugaugggcgugg

SEQ ID NO: 1456238 - RNA, 19 nt, Artificial Sequence
  Description of Artificial Sequence: Synthetic oligonucleotide
guuauucguaauuccuguu

SEQ ID NO: 1456239 - RNA, 19 nt, Artificial Sequence
  Description of Artificial Sequence: Synthetic oligonucleotide
gcuuuagaguuacuguaua

SEQ ID NO: 1456240 - RNA, 19 nt, Artificial Sequence
  Description of Artificial Sequence: Synthetic oligonucleotide
gaacccuagccuuccugcu

SEQ ID NO: 1456241 - RNA, 19 nt, Artificial Sequence
  Description of Artificial Sequence: Synthetic oligonucleotide
gcugauguuugaaucagcu

SEQ ID NO: 1456242 - RNA, 19 nt, Artificial Sequence
  Description of Artificial Sequence: Synthetic oligonucleotide
uacuguucgcagcgucaua

SEQ ID NO: 1456243 - RNA, 19 nt, Artificial Sequence
  Description of Artificial Sequence: Synthetic oligonucleotide
gauuacuaggcuaccuguu

SEQ ID NO: 1456244 - RNA, 19 nt, Artificial Sequence
  Description of Artificial Sequence: Synthetic oligonucleotide
guuggaaggagaguugauu

SEQ ID NO: 1456245 - RNA, 19 nt, Artificial Sequence
  Description of Artificial Sequence: Synthetic oligonucleotide
gguaaucguucaugauuuc

SEQ ID NO: 1456246 - RNA, 19 nt, Artificial Sequence
  Description of Artificial Sequence: Synthetic oligonucleotide
ggcuuguuagugaaaucuc

SEQ ID NO: 1456247 - RNA, 19 nt, Artificial Sequence
  Description of Artificial Sequence: Synthetic oligonucleotide
guaaucucugccugacgau

SEQ ID NO: 1456248 - RNA, 19 nt, Artificial Sequence
  Description of Artificial Sequence: Synthetic oligonucleotide
gcguggguacugcugauuc

SEQ ID NO: 1456249 - RNA, 19 nt, Artificial Sequence
  Description of Artificial Sequence: Synthetic oligonucleotide
agcggagaugaugggcgug

SEQ ID NO: 1456250 - RNA, 19 nt, Artificial Sequence
  Description of Artificial Sequence: Synthetic oligonucleotide
ccaugauguucaugccggg

SEQ ID NO: 1456251 - RNA, 19 nt, Artificial Sequence
  Description of Artificial Sequence: Synthetic oligonucleotide
guuguuuaugcgacuuggu

SEQ ID NO: 1456252 - RNA, 19 nt, Artificial Sequence
  Description of Artificial Sequence: Synthetic oligonucleotide
gccacaggugucccugaag

SEQ ID NO: 1456253 - RNA, 19 nt, Artificial Sequence
  Description of Artificial Sequence: Synthetic oligonucleotide
ggccaaacucagucccugc

SEQ ID NO: 1456254 - RNA, 19 nt, Artificial Sequence
  Description of Artificial Sequence: Synthetic oligonucleotide
ggcugauguuugaaucagc

SEQ ID NO: 1456255 - RNA, 19 nt, Artificial Sequence
  Description of Artificial Sequence: Synthetic oligonucleotide
agccaucgcagaagggcca

SEQ ID NO: 1456256 - RNA, 19 nt, Artificial Sequence
  Description of Artificial Sequence: Synthetic oligonucleotide
gaugggcguggguacugcu

SEQ ID NO: 1456257 - RNA, 19 nt, Artificial Sequence
  Description of Artificial Sequence: Synthetic oligonucleotide
uuuaugcgacuuggugcuu

SEQ ID NO: 1456258 - RNA, 19 nt, Artificial Sequence
  Description of Artificial Sequence: Synthetic oligonucleotide
ccacauuuaauaagggcau

SEQ ID NO: 1456259 - RNA, 19 nt, Artificial Sequence
  Description of Artificial Sequence: Synthetic oligonucleotide
aguagguaauuggcaccuu

SEQ ID NO: 1456260 - RNA, 19 nt, Artificial Sequence
  Description of Artificial Sequence: Synthetic oligonucleotide
gaggaaauuuaaggcugau

SEQ ID NO: 1456261 - RNA, 19 nt, Artificial Sequence
  Description of Artificial Sequence: Synthetic oligonucleotide
ggcauugccguaagcuguc

SEQ ID NO: 1456262 - RNA, 19 nt, Artificial Sequence
  Description of Artificial Sequence: Synthetic oligonucleotide
gcgacuuggugcuuuucua

SEQ ID NO: 1456263 - RNA, 19 nt, Artificial Sequence
  Description of Artificial Sequence: Synthetic oligonucleotide
caucgcagaagggccaaua

SEQ ID NO: 1456264 - RNA, 19 nt, Artificial Sequence
  Description of Artificial Sequence: Synthetic oligonucleotide
guacuguucgcagcgucau

SEQ ID NO: 1456265 - RNA, 19 nt, Artificial Sequence
  Description of Artificial Sequence: Synthetic oligonucleotide
ccagaagugacaguucagu

SEQ ID NO: 1456266 - RNA, 19 nt, Artificial Sequence
  Description of Artificial Sequence: Synthetic oligonucleotide
ccagucucuuauucuguaa

SEQ ID NO: 1456267 - RNA, 19 nt, Artificial Sequence
  Description of Artificial Sequence: Synthetic oligonucleotide
cuguuccaauucgcuucug

SEQ ID NO: 1456268 - RNA, 19 nt, Artificial Sequence
  Description of Artificial Sequence: Synthetic oligonucleotide
cuggguuguuuaugcgacu

SEQ ID NO: 1456269 - RNA, 19 nt, Artificial Sequence
  Description of Artificial Sequence: Synthetic oligonucleotide
ccuauuuaauugagaaguu

SEQ ID NO: 1456270 - RNA, 19 nt, Artificial Sequence
  Description of Artificial Sequence: Synthetic oligonucleotide
cuguucgcagcgucauagu

SEQ ID NO: 1456271 - RNA, 19 nt, Artificial Sequence
  Description of Artificial Sequence: Synthetic oligonucleotide
gcauugccguaagcugucc

SEQ ID NO: 1456272 - RNA, 19 nt, Artificial Sequence
  Description of Artificial Sequence: Synthetic oligonucleotide
gccugacgaucaaauucac

SEQ ID NO: 1456273 - RNA, 19 nt, Artificial Sequence
  Description of Artificial Sequence: Synthetic oligonucleotide
ucgcagcgucauagucaua

SEQ ID NO: 1456274 - RNA, 19 nt, Artificial Sequence
  Description of Artificial Sequence: Synthetic oligonucleotide
ccucgucugccagaaguga

SEQ ID NO: 1456275 - RNA, 19 nt, Artificial Sequence
  Description of Artificial Sequence: Synthetic oligonucleotide
cagcggagaugaugggcgu

SEQ ID NO: 1456276 - RNA, 19 nt, Artificial Sequence
  Description of Artificial Sequence: Synthetic oligonucleotide
cccuagccuuccugcugcc

SEQ ID NO: 1456277 - RNA, 19 nt, Artificial Sequence
  Description of Artificial Sequence: Synthetic oligonucleotide
caacgacacugaacacagu

SEQ ID NO: 1456278 - RNA, 19 nt, Artificial Sequence
  Description of Artificial Sequence: Synthetic oligonucleotide
cgcgucggccgccagcuuc

SEQ ID NO: 1456279 - RNA, 19 nt, Artificial Sequence
  Description of Artificial Sequence: Synthetic oligonucleotide
gguuggaaggagaguugau

SEQ ID NO: 1456280 - RNA, 19 nt, Artificial Sequence
  Description of Artificial Sequence: Synthetic oligonucleotide
gccaucgcagaagggccaa

SEQ ID NO: 1456281 - RNA, 19 nt, Artificial Sequence
  Description of Artificial Sequence: Synthetic oligonucleotide
cgacuuggugcuuuucuau

SEQ ID NO: 1456282 - RNA, 19 nt, Artificial Sequence
  Description of Artificial Sequence: Synthetic oligonucleotide
cccaaaaguucuggguugu

SEQ ID NO: 1456283 - RNA, 19 nt, Artificial Sequence
  Description of Artificial Sequence: Synthetic oligonucleotide
gcuuugcuaaggagguuuu

SEQ ID NO: 1456284 - RNA, 19 nt, Artificial Sequence
  Description of Artificial Sequence: Synthetic oligonucleotide
ccccauuagccagucugaa

SEQ ID NO: 1456285 - RNA, 19 nt, Artificial Sequence
  Description of Artificial Sequence: Synthetic oligonucleotide
cgcuuugcuaaggagguuu

SEQ ID NO: 1456286 - RNA, 19 nt, Artificial Sequence
  Description of Artificial Sequence: Synthetic oligonucleotide
ccagcagaagucggguaau

SEQ ID NO: 1456287 - RNA, 19 nt, Artificial Sequence
  Description of Artificial Sequence: Synthetic oligonucleotide
ggcguggguacugcugauu

SEQ ID NO: 1456288 - RNA, 19 nt, Artificial Sequence
  Description of Artificial Sequence: Synthetic oligonucleotide
gcgucggccgccagcuucu

SEQ ID NO: 1456289 - RNA, 19 nt, Artificial Sequence
  Description of Artificial Sequence: Synthetic oligonucleotide
gggcguggguacugcugau

SEQ ID NO: 1456290 - RNA, 19 nt, Artificial Sequence
  Description of Artificial Sequence: Synthetic oligonucleotide
gggcuucuacaaagucauu

SEQ ID NO: 1456291 - RNA, 19 nt, Artificial Sequence
  Description of Artificial Sequence: Synthetic oligonucleotide
ccgcuuugcuaaggagguu

SEQ ID NO: 1456292 - RNA, 19 nt, Artificial Sequence
  Description of Artificial Sequence: Synthetic oligonucleotide
cgucggccgccagcuucuu

SEQ ID NO: 1456293 - RNA, 19 nt, Artificial Sequence
  Description of Artificial Sequence: Synthetic oligonucleotide
auagaaucucuccagggcc

SEQ ID NO: 1456294 - RNA, 19 nt, Artificial Sequence
  Description of Artificial Sequence: Synthetic oligonucleotide
ugagagucaaagucgaugg

SEQ ID NO: 1456295 - RNA, 19 nt, Artificial Sequence
  Description of Artificial Sequence: Synthetic oligonucleotide
uuaucuuucacgcugucca

SEQ ID NO: 1456296 - RNA, 19 nt, Artificial Sequence
  Description of Artificial Sequence: Synthetic oligonucleotide
aguagggucacaaagggcc

SEQ ID NO: 1456297 - RNA, 19 nt, Artificial Sequence
  Description of Artificial Sequence: Synthetic oligonucleotide
acuagagaauauccgaacc

SEQ ID NO: 1456298 - RNA, 19 nt, Artificial Sequence
  Description of Artificial Sequence: Synthetic oligonucleotide
uuauagaagucauccaagg

SEQ ID NO: 1456299 - RNA, 19 nt, Artificial Sequence
  Description of Artificial Sequence: Synthetic oligonucleotide
aaacagaaggcgccgaggg

SEQ ID NO: 1456300 - RNA, 19 nt, Artificial Sequence
  Description of Artificial Sequence: Synthetic oligonucleotide
uucggcaagagacacagag

SEQ ID NO: 1456301 - RNA, 19 nt, Artificial Sequence
  Description of Artificial Sequence: Synthetic oligonucleotide
uuucgugucugaaaggcgg

SEQ ID NO: 1456302 - RNA, 19 nt, Artificial Sequence
  Description of Artificial Sequence: Synthetic oligonucleotide
agaauauccgaaccgugcc

SEQ ID NO: 1456303 - RNA, 19 nt, Artificial Sequence
  Description of Artificial Sequence: Synthetic oligonucleotide
acaggagagaaacacuacc

SEQ ID NO: 1456304 - RNA, 19 nt, Artificial Sequence
  Description of Artificial Sequence: Synthetic oligonucleotide
ugcuugaguccauagaagg

SEQ ID NO: 1456305 - RNA, 19 nt, Artificial Sequence
  Description of Artificial Sequence: Synthetic oligonucleotide
agaaacacuaccucuaacu

SEQ ID NO: 1456306 - RNA, 19 nt, Artificial Sequence
  Description of Artificial Sequence: Synthetic oligonucleotide
aaugugucgaucgccaagg

SEQ ID NO: 1456307 - RNA, 19 nt, Artificial Sequence
  Description of Artificial Sequence: Synthetic oligonucleotide
ugcguuaucuuucacgcug

SEQ ID NO: 1456308 - RNA, 19 nt, Artificial Sequence
  Description of Artificial Sequence: Synthetic oligonucleotide
ugcuguaacauuuuauaga

SEQ ID NO: 1456309 - RNA, 19 nt, Artificial Sequence
  Description of Artificial Sequence: Synthetic oligonucleotide
cuagagaauauccgaaccg

SEQ ID NO: 1456310 - RNA, 19 nt, Artificial Sequence
  Description of Artificial Sequence: Synthetic oligonucleotide
uaacuauuaaaugucaguc

SEQ ID NO: 1456311 - RNA, 19 nt, Artificial Sequence
  Description of Artificial Sequence: Synthetic oligonucleotide
uggagacuagagaauaucc

SEQ ID NO: 1456312 - RNA, 19 nt, Artificial Sequence
  Description of Artificial Sequence: Synthetic oligonucleotide
uaagcucccaucuugacau

SEQ ID NO: 1456313 - RNA, 19 nt, Artificial Sequence
  Description of Artificial Sequence: Synthetic oligonucleotide
agaaaguucuggcacuggg

SEQ ID NO: 1456314 - RNA, 19 nt, Artificial Sequence
  Description of Artificial Sequence: Synthetic oligonucleotide
gaaguaacuauuaaauguc

SEQ ID NO: 1456315 - RNA, 19 nt, Artificial Sequence
  Description of Artificial Sequence: Synthetic oligonucleotide
agaaggcucggucagguuc

SEQ ID NO: 1456316 - RNA, 19 nt, Artificial Sequence
  Description of Artificial Sequence: Synthetic oligonucleotide
aaaugucagucuuaauccu

SEQ ID NO: 1456317 - RNA, 19 nt, Artificial Sequence
  Description of Artificial Sequence: Synthetic oligonucleotide
aaacauguagucgcagaac

SEQ ID NO: 1456318 - RNA, 19 nt, Artificial Sequence
  Description of Artificial Sequence: Synthetic oligonucleotide
uuaacucgcagcuggcagg

SEQ ID NO: 1456319 - RNA, 19 nt, Artificial Sequence
  Description of Artificial Sequence: Synthetic oligonucleotide
auuuggaccgguuuuccag

SEQ ID NO: 1456320 - RNA, 19 nt, Artificial Sequence
  Description of Artificial Sequence: Synthetic oligonucleotide
agcaugaucaacaagugca

SEQ ID NO: 1456321 - RNA, 19 nt, Artificial Sequence
  Description of Artificial Sequence: Synthetic oligonucleotide
auggccuccacgcaaagag

SEQ ID NO: 1456322 - RNA, 19 nt, Artificial Sequence
  Description of Artificial Sequence: Synthetic oligonucleotide
aucgccaaggcuucguugg

SEQ ID NO: 1456323 - RNA, 19 nt, Artificial Sequence
  Description of Artificial Sequence: Synthetic oligonucleotide
cauagaaucucuccagggc

SEQ ID NO: 1456324 - RNA, 19 nt, Artificial Sequence
  Description of Artificial Sequence: Synthetic oligonucleotide
cucgaugcgcuccagaacc

SEQ ID NO: 1456325 - RNA, 19 nt, Artificial Sequence
  Description of Artificial Sequence: Synthetic oligonucleotide
ugucacuaagcagacgugg

SEQ ID NO: 1456326 - RNA, 19 nt, Artificial Sequence
  Description of Artificial Sequence: Synthetic oligonucleotide
aaugucagucuuaauccuc

SEQ ID NO: 1456327 - RNA, 19 nt, Artificial Sequence
  Description of Artificial Sequence: Synthetic oligonucleotide
aaaacagaaggcgccgagg

SEQ ID NO: 1456328 - RNA, 19 nt, Artificial Sequence
  Description of Artificial Sequence: Synthetic oligonucleotide
aggagagaaacacuaccuc

SEQ ID NO: 1456329 - RNA, 19 nt, Artificial Sequence
  Description of Artificial Sequence: Synthetic oligonucleotide
ucucgaacaaacccugggc

SEQ ID NO: 1456330 - RNA, 19 nt, Artificial Sequence
  Description of Artificial Sequence: Synthetic oligonucleotide
gagacuagagaauauccga

SEQ ID NO: 1456331 - RNA, 19 nt, Artificial Sequence
  Description of Artificial Sequence: Synthetic oligonucleotide
gaaacacuaccucuaacuc

SEQ ID NO: 1456332 - RNA, 19 nt, Artificial Sequence
  Description of Artificial Sequence: Synthetic oligonucleotide
uuuggaccgguuuuccagg

SEQ ID NO: 1456333 - RNA, 19 nt, Artificial Sequence
  Description of Artificial Sequence: Synthetic oligonucleotide
uuugcaccugucaagggac

SEQ ID NO: 1456334 - RNA, 19 nt, Artificial Sequence
  Description of Artificial Sequence: Synthetic oligonucleotide
guaggugugccacaugucc

SEQ ID NO: 1456335 - RNA, 19 nt, Artificial Sequence
  Description of Artificial Sequence: Synthetic oligonucleotide
aucgaagaauggcagcaac

SEQ ID NO: 1456336 - RNA, 19 nt, Artificial Sequence
  Description of Artificial Sequence: Synthetic oligonucleotide
cugaaaggcggcuagcuac

SEQ ID NO: 1456337 - RNA, 19 nt, Artificial Sequence
  Description of Artificial Sequence: Synthetic oligonucleotide
gaagaauggcagcaacucc

SEQ ID NO: 1456338 - RNA, 19 nt, Artificial Sequence
  Description of Artificial Sequence: Synthetic oligonucleotide
aaaguugauguggcgcugg

SEQ ID NO: 1456339 - RNA, 19 nt, Artificial Sequence
  Description of Artificial Sequence: Synthetic oligonucleotide
aauauccgaaccgugccug

SEQ ID NO: 1456340 - RNA, 19 nt, Artificial Sequence
  Description of Artificial Sequence: Synthetic oligonucleotide
ucggcaagagacacagagg

SEQ ID NO: 1456341 - RNA, 19 nt, Artificial Sequence
  Description of Artificial Sequence: Synthetic oligonucleotide
aaggcggcuagcuacagua

SEQ ID NO: 1456342 - RNA, 19 nt, Artificial Sequence
  Description of Artificial Sequence: Synthetic oligonucleotide
aguucgauggugugguaag

SEQ ID NO: 1456343 - RNA, 19 nt, Artificial Sequence
  Description of Artificial Sequence: Synthetic oligonucleotide
gagaauauccgaaccgugc

SEQ ID NO: 1456344 - RNA, 19 nt, Artificial Sequence
  Description of Artificial Sequence: Synthetic oligonucleotide
cauguagucgcagaacugc

SEQ ID NO: 1456345 - RNA, 19 nt, Artificial Sequence
  Description of Artificial Sequence: Synthetic oligonucleotide
ucaucacugaugagcaaug

SEQ ID NO: 1456346 - RNA, 19 nt, Artificial Sequence
  Description of Artificial Sequence: Synthetic oligonucleotide
cuuuucugagccucggcgc

SEQ ID NO: 1456347 - RNA, 19 nt, Artificial Sequence
  Description of Artificial Sequence: Synthetic oligonucleotide
ucuuaauccucaucagaac

SEQ ID NO: 1456348 - RNA, 19 nt, Artificial Sequence
  Description of Artificial Sequence: Synthetic oligonucleotide
aguaacuauuaaaugucag

SEQ ID NO: 1456349 - RNA, 19 nt, Artificial Sequence
  Description of Artificial Sequence: Synthetic oligonucleotide
aauuuggaccgguuuucca

SEQ ID NO: 1456350 - RNA, 19 nt, Artificial Sequence
  Description of Artificial Sequence: Synthetic oligonucleotide
ugugccacauguccucggg

SEQ ID NO: 1456351 - RNA, 19 nt, Artificial Sequence
  Description of Artificial Sequence: Synthetic oligonucleotide
gacuagagaauauccgaac

SEQ ID NO: 1456352 - RNA, 19 nt, Artificial Sequence
  Description of Artificial Sequence: Synthetic oligonucleotide
ucacuaagcagacgugggc

SEQ ID NO: 1456353 - RNA, 19 nt, Artificial Sequence
  Description of Artificial Sequence: Synthetic oligonucleotide
cacgcaaagagugagggug

SEQ ID NO: 1456354 - RNA, 19 nt, Artificial Sequence
  Description of Artificial Sequence: Synthetic oligonucleotide
aaggaauuuggaccgguuu

SEQ ID NO: 1456355 - RNA, 19 nt, Artificial Sequence
  Description of Artificial Sequence: Synthetic oligonucleotide
uugcugaaacauguagucg

SEQ ID NO: 1456356 - RNA, 19 nt, Artificial Sequence
  Description of Artificial Sequence: Synthetic oligonucleotide
ucgaagaauggcagcaacu

SEQ ID NO: 1456357 - RNA, 19 nt, Artificial Sequence
  Description of Artificial Sequence: Synthetic oligonucleotide
aaguaacuauuaaauguca

SEQ ID NO: 1456358 - RNA, 19 nt, Artificial Sequence
  Description of Artificial Sequence: Synthetic oligonucleotide
gaaacauguagucgcagaa

SEQ ID NO: 1456359 - RNA, 19 nt, Artificial Sequence
  Description of Artificial Sequence: Synthetic oligonucleotide
cuuucgugucugaaaggcg

SEQ ID NO: 1456360 - RNA, 19 nt, Artificial Sequence
  Description of Artificial Sequence: Synthetic oligonucleotide
accagaacgcacuuuacaa

SEQ ID NO: 1456361 - RNA, 19 nt, Artificial Sequence
  Description of Artificial Sequence: Synthetic oligonucleotide
acgggugagggucauacug

SEQ ID NO: 1456362 - RNA, 19 nt, Artificial Sequence
  Description of Artificial Sequence: Synthetic oligonucleotide
ggaggcguguaccugaagg

SEQ ID NO: 1456363 - RNA, 19 nt, Artificial Sequence
  Description of Artificial Sequence: Synthetic oligonucleotide
aacgcacuuuacaacauca

SEQ ID NO: 1456364 - RNA, 19 nt, Artificial Sequence
  Description of Artificial Sequence: Synthetic oligonucleotide
uagagaauauccgaaccgu

SEQ ID NO: 1456365 - RNA, 19 nt, Artificial Sequence
  Description of Artificial Sequence: Synthetic oligonucleotide
acaagcuucaugaccucgc

SEQ ID NO: 1456366 - RNA, 19 nt, Artificial Sequence
  Description of Artificial Sequence: Synthetic oligonucleotide
ucgaacaaacccugggcug

SEQ ID NO: 1456367 - RNA, 19 nt, Artificial Sequence
  Description of Artificial Sequence: Synthetic oligonucleotide
cagcuuucgugucugaaag

SEQ ID NO: 1456368 - RNA, 19 nt, Artificial Sequence
  Description of Artificial Sequence: Synthetic oligonucleotide
ucagguucgugcuguaaca

SEQ ID NO: 1456369 - RNA, 19 nt, Artificial Sequence
  Description of Artificial Sequence: Synthetic oligonucleotide
ucggucuggaccuugcgga

SEQ ID NO: 1456370 - RNA, 19 nt, Artificial Sequence
  Description of Artificial Sequence: Synthetic oligonucleotide
ugcucucgaacaaacccug

SEQ ID NO: 1456371 - RNA, 19 nt, Artificial Sequence
  Description of Artificial Sequence: Synthetic oligonucleotide
auggagacuagagaauauc

SEQ ID NO: 1456372 - RNA, 19 nt, Artificial Sequence
  Description of Artificial Sequence: Synthetic oligonucleotide
uggauauugguccccuuaa

SEQ ID NO: 1456373 - RNA, 19 nt, Artificial Sequence
  Description of Artificial Sequence: Synthetic oligonucleotide
gauauugguccccuuaacu

SEQ ID NO: 1456374 - RNA, 19 nt, Artificial Sequence
  Description of Artificial Sequence: Synthetic oligonucleotide
ugaaaggcggcuagcuaca

SEQ ID NO: 1456375 - RNA, 19 nt, Artificial Sequence
  Description of Artificial Sequence: Synthetic oligonucleotide
cacuaagcagacgugggcg

SEQ ID NO: 1456376 - RNA, 19 nt, Artificial Sequence
  Description of Artificial Sequence: Synthetic oligonucleotide
uagaaucucuccagggccu

SEQ ID NO: 1456377 - RNA, 19 nt, Artificial Sequence
  Description of Artificial Sequence: Synthetic oligonucleotide
auugguccccuuaacucgc

SEQ ID NO: 1456378 - RNA, 19 nt, Artificial Sequence
  Description of Artificial Sequence: Synthetic oligonucleotide
ggagacuagagaauauccg

SEQ ID NO: 1456379 - RNA, 19 nt, Artificial Sequence
  Description of Artificial Sequence: Synthetic oligonucleotide
agccugacauaccggcucc

SEQ ID NO: 1456380 - RNA, 19 nt, Artificial Sequence
  Description of Artificial Sequence: Synthetic oligonucleotide
uuccccagacacauggaga

SEQ ID NO: 1456381 - RNA, 19 nt, Artificial Sequence
  Description of Artificial Sequence: Synthetic oligonucleotide
gucacaaagggccucuuuc

SEQ ID NO: 1456382 - RNA, 19 nt, Artificial Sequence
  Description of Artificial Sequence: Synthetic oligonucleotide
aggagcacuuuguugucag

SEQ ID NO: 1456383 - RNA, 19 nt, Artificial Sequence
  Description of Artificial Sequence: Synthetic oligonucleotide
ccugcguuaucuuucacgc

SEQ ID NO: 1456384 - RNA, 19 nt, Artificial Sequence
  Description of Artificial Sequence: Synthetic oligonucleotide
uucagggaguacuuguguc

SEQ ID NO: 1456385 - RNA, 19 nt, Artificial Sequence
  Description of Artificial Sequence: Synthetic oligonucleotide
uccaguucgaugguguggu

SEQ ID NO: 1456386 - RNA, 19 nt, Artificial Sequence
  Description of Artificial Sequence: Synthetic oligonucleotide
acgcgguugcucccgacgc

SEQ ID NO: 1456387 - RNA, 19 nt, Artificial Sequence
  Description of Artificial Sequence: Synthetic oligonucleotide
ggucagaaaguucuggcac

SEQ ID NO: 1456388 - RNA, 19 nt, Artificial Sequence
  Description of Artificial Sequence: Synthetic oligonucleotide
cagauuguaggugugccac

SEQ ID NO: 1456389 - RNA, 19 nt, Artificial Sequence
  Description of Artificial Sequence: Synthetic oligonucleotide
cacuuuacaacaucaaagu

SEQ ID NO: 1456390 - RNA, 19 nt, Artificial Sequence
  Description of Artificial Sequence: Synthetic oligonucleotide
gacgcgguugcucccgacg

SEQ ID NO: 1456391 - RNA, 19 nt, Artificial Sequence
  Description of Artificial Sequence: Synthetic oligonucleotide
caaaacagaaggcgccgag

SEQ ID NO: 1456392 - RNA, 19 nt, Artificial Sequence
  Description of Artificial Sequence: Synthetic oligonucleotide
ggcuugagagucaaagucg

SEQ ID NO: 1456393 - RNA, 19 nt, Artificial Sequence
  Description of Artificial Sequence: Synthetic oligonucleotide
cugcuugaguccauagaag

SEQ ID NO: 1456394 - RNA, 19 nt, Artificial Sequence
  Description of Artificial Sequence: Synthetic oligonucleotide
uucgugucugaaaggcggc

SEQ ID NO: 1456395 - RNA, 19 nt, Artificial Sequence
  Description of Artificial Sequence: Synthetic oligonucleotide
caaugugucgaucgccaag

SEQ ID NO: 1456396 - RNA, 19 nt, Artificial Sequence
  Description of Artificial Sequence: Synthetic oligonucleotide
gaauuuggaccgguuuucc

SEQ ID NO: 1456397 - RNA, 19 nt, Artificial Sequence
  Description of Artificial Sequence: Synthetic oligonucleotide
gauggugugguaagcuccc

SEQ ID NO: 1456398 - RNA, 19 nt, Artificial Sequence
  Description of Artificial Sequence: Synthetic oligonucleotide
caccagaaaucccagcaug

SEQ ID NO: 1456399 - RNA, 19 nt, Artificial Sequence
  Description of Artificial Sequence: Synthetic oligonucleotide
agucgcagaacugcucucg

SEQ ID NO: 1456400 - RNA, 19 nt, Artificial Sequence
  Description of Artificial Sequence: Synthetic oligonucleotide
gacauaccggcuccgggug

SEQ ID NO: 1456401 - RNA, 19 nt, Artificial Sequence
  Description of Artificial Sequence: Synthetic oligonucleotide
guaagcucccaucuugaca

SEQ ID NO: 1456402 - RNA, 19 nt, Artificial Sequence
  Description of Artificial Sequence: Synthetic oligonucleotide
gucagguucgugcuguaac

SEQ ID NO: 1456403 - RNA, 19 nt, Artificial Sequence
  Description of Artificial Sequence: Synthetic oligonucleotide
cuucaugaccucgccaggg

SEQ ID NO: 1456404 - RNA, 19 nt, Artificial Sequence
  Description of Artificial Sequence: Synthetic oligonucleotide
cuuguguccagaggaggcg

SEQ ID NO: 1456405 - RNA, 19 nt, Artificial Sequence
  Description of Artificial Sequence: Synthetic oligonucleotide
aaccgugccugcguuaucu

SEQ ID NO: 1456406 - RNA, 19 nt, Artificial Sequence
  Description of Artificial Sequence: Synthetic oligonucleotide
acuaagcagacgugggcga

SEQ ID NO: 1456407 - RNA, 19 nt, Artificial Sequence
  Description of Artificial Sequence: Synthetic oligonucleotide
cuuggcacgggugaggguc

SEQ ID NO: 1456408 - RNA, 19 nt, Artificial Sequence
  Description of Artificial Sequence: Synthetic oligonucleotide
cucggucuggaccuugcgg

SEQ ID NO: 1456409 - RNA, 19 nt, Artificial Sequence
  Description of Artificial Sequence: Synthetic oligonucleotide
ucgugcuguaacauuuuau

SEQ ID NO: 1456410 - RNA, 19 nt, Artificial Sequence
  Description of Artificial Sequence: Synthetic oligonucleotide
augugucgaucgccaaggc

SEQ ID NO: 1456411 - RNA, 19 nt, Artificial Sequence
  Description of Artificial Sequence: Synthetic oligonucleotide
cagaaaucccagcaugauc

SEQ ID NO: 1456412 - RNA, 19 nt, Artificial Sequence
  Description of Artificial Sequence: Synthetic oligonucleotide
cugacauaccggcuccggg

SEQ ID NO: 1456413 - RNA, 19 nt, Artificial Sequence
  Description of Artificial Sequence: Synthetic oligonucleotide
caugaucaacaagugcagc

SEQ ID NO: 1456414 - RNA, 19 nt, Artificial Sequence
  Description of Artificial Sequence: Synthetic oligonucleotide
uguaggugugccacauguc

SEQ ID NO: 1456415 - RNA, 19 nt, Artificial Sequence
  Description of Artificial Sequence: Synthetic oligonucleotide
gaacgcacuuuacaacauc

SEQ ID NO: 1456416 - RNA, 19 nt, Artificial Sequence
  Description of Artificial Sequence: Synthetic oligonucleotide
ggugucacuaagcagacgu

SEQ ID NO: 1456417 - RNA, 19 nt, Artificial Sequence
  Description of Artificial Sequence: Synthetic oligonucleotide
gccugcguuaucuuucacg

SEQ ID NO: 1456418 - RNA, 19 nt, Artificial Sequence
  Description of Artificial Sequence: Synthetic oligonucleotide
cugaugagcaaugugucga

SEQ ID NO: 1456419 - RNA, 19 nt, Artificial Sequence
  Description of Artificial Sequence: Synthetic oligonucleotide
ugcgcggcagaccccacgc

SEQ ID NO: 1456420 - RNA, 19 nt, Artificial Sequence
  Description of Artificial Sequence: Synthetic oligonucleotide
agagaauauccgaaccgug

SEQ ID NO: 1456421 - RNA, 19 nt, Artificial Sequence
  Description of Artificial Sequence: Synthetic oligonucleotide
gcuuucgugucugaaaggc

SEQ ID NO: 1456422 - RNA, 19 nt, Artificial Sequence
  Description of Artificial Sequence: Synthetic oligonucleotide
auagaaggcucggucaggu

SEQ ID NO: 1456423 - RNA, 19 nt, Artificial Sequence
  Description of Artificial Sequence: Synthetic oligonucleotide
guccauagaaggcucgguc

SEQ ID NO: 1456424 - RNA, 19 nt, Artificial Sequence
  Description of Artificial Sequence: Synthetic oligonucleotide
ugugguaagcucccaucuu

SEQ ID NO: 1456425 - RNA, 19 nt, Artificial Sequence
  Description of Artificial Sequence: Synthetic oligonucleotide
uguguccagaggaggcgug

SEQ ID NO: 1456426 - RNA, 19 nt, Artificial Sequence
  Description of Artificial Sequence: Synthetic oligonucleotide
ggaggacucggucuggacc

SEQ ID NO: 1456427 - RNA, 19 nt, Artificial Sequence
  Description of Artificial Sequence: Synthetic oligonucleotide
gacgcuuuucugagccucg

SEQ ID NO: 1456428 - RNA, 19 nt, Artificial Sequence
  Description of Artificial Sequence: Synthetic oligonucleotide
cacauccugaugccggaag

SEQ ID NO: 1456429 - RNA, 19 nt, Artificial Sequence
  Description of Artificial Sequence: Synthetic oligonucleotide
cuccacgcaaagagugagg

SEQ ID NO: 1456430 - RNA, 19 nt, Artificial Sequence
  Description of Artificial Sequence: Synthetic oligonucleotide
agcaaugugucgaucgcca

SEQ ID NO: 1456431 - RNA, 19 nt, Artificial Sequence
  Description of Artificial Sequence: Synthetic oligonucleotide
agacuagagaauauccgaa

SEQ ID NO: 1456432 - RNA, 19 nt, Artificial Sequence
  Description of Artificial Sequence: Synthetic oligonucleotide
gggaaucgaagaauggcag

SEQ ID NO: 1456433 - RNA, 19 nt, Artificial Sequence
  Description of Artificial Sequence: Synthetic oligonucleotide
ugucgaucgccaaggcuuc

SEQ ID NO: 1456434 - RNA, 19 nt, Artificial Sequence
  Description of Artificial Sequence: Synthetic oligonucleotide
acucccgucaacuggccaa

SEQ ID NO: 1456435 - RNA, 19 nt, Artificial Sequence
  Description of Artificial Sequence: Synthetic oligonucleotide
guacuuguguccagaggag

SEQ ID NO: 1456436 - RNA, 19 nt, Artificial Sequence
  Description of Artificial Sequence: Synthetic oligonucleotide
cauagaaggcucggucagg

SEQ ID NO: 1456437 - RNA, 19 nt, Artificial Sequence
  Description of Artificial Sequence: Synthetic oligonucleotide
aacucccgucaacuggcca

SEQ ID NO: 1456438 - RNA, 19 nt, Artificial Sequence
  Description of Artificial Sequence: Synthetic oligonucleotide
ggcucggucagguucgugc

SEQ ID NO: 1456439 - RNA, 19 nt, Artificial Sequence
  Description of Artificial Sequence: Synthetic oligonucleotide
auuguaggugugccacaug

SEQ ID NO: 1456440 - RNA, 19 nt, Artificial Sequence
  Description of Artificial Sequence: Synthetic oligonucleotide
uggaccgguuuuccaggag

SEQ ID NO: 1456441 - RNA, 19 nt, Artificial Sequence
  Description of Artificial Sequence: Synthetic oligonucleotide
acauaccggcuccgggugg

SEQ ID NO: 1456442 - RNA, 19 nt, Artificial Sequence
  Description of Artificial Sequence: Synthetic oligonucleotide
gucaagggacacugagaag

SEQ ID NO: 1456443 - RNA, 19 nt, Artificial Sequence
  Description of Artificial Sequence: Synthetic oligonucleotide
ggcggcuagcuacaguagg

SEQ ID NO: 1456444 - RNA, 19 nt, Artificial Sequence
  Description of Artificial Sequence: Synthetic oligonucleotide
gcgguugggcuccaguucg

SEQ ID NO: 1456445 - RNA, 19 nt, Artificial Sequence
  Description of Artificial Sequence: Synthetic oligonucleotide
cuccaguucgauggugugg

SEQ ID NO: 1456446 - RNA, 19 nt, Artificial Sequence
  Description of Artificial Sequence: Synthetic oligonucleotide
ggaccgguuuuccaggagc

SEQ ID NO: 1456447 - RNA, 19 nt, Artificial Sequence
  Description of Artificial Sequence: Synthetic oligonucleotide
ugagccucggcgcgcagau

SEQ ID NO: 1456448 - RNA, 19 nt, Artificial Sequence
  Description of Artificial Sequence: Synthetic oligonucleotide
accagaaaucccagcauga

SEQ ID NO: 1456449 - RNA, 19 nt, Artificial Sequence
  Description of Artificial Sequence: Synthetic oligonucleotide
ucgauggccuccacgcaaa

SEQ ID NO: 1456450 - RNA, 19 nt, Artificial Sequence
  Description of Artificial Sequence: Synthetic oligonucleotide
acgcaaagagugagggugg

SEQ ID NO: 1456451 - RNA, 19 nt, Artificial Sequence
  Description of Artificial Sequence: Synthetic oligonucleotide
cuugaguccauagaaggcu

SEQ ID NO: 1456452 - RNA, 19 nt, Artificial Sequence
  Description of Artificial Sequence: Synthetic oligonucleotide
ugaccuggcccgcauuguc

SEQ ID NO: 1456453 - RNA, 19 nt, Artificial Sequence
  Description of Artificial Sequence: Synthetic oligonucleotide
cuaccucuaacuccugcca

SEQ ID NO: 1456454 - RNA, 19 nt, Artificial Sequence
  Description of Artificial Sequence: Synthetic oligonucleotide
uuggaccgguuuuccagga

SEQ ID NO: 1456455 - RNA, 19 nt, Artificial Sequence
  Description of Artificial Sequence: Synthetic oligonucleotide
gaauauccgaaccgugccu

SEQ ID NO: 1456456 - RNA, 19 nt, Artificial Sequence
  Description of Artificial Sequence: Synthetic oligonucleotide
caccugucaagggacacug

SEQ ID NO: 1456457 - RNA, 19 nt, Artificial Sequence
  Description of Artificial Sequence: Synthetic oligonucleotide
acauguagucgcagaacug

SEQ ID NO: 1456458 - RNA, 19 nt, Artificial Sequence
  Description of Artificial Sequence: Synthetic oligonucleotide
ccccuuaacucgcagcugg

SEQ ID NO: 1456459 - RNA, 19 nt, Artificial Sequence
  Description of Artificial Sequence: Synthetic oligonucleotide
caucagcgcuccacgcugg

SEQ ID NO: 1456460 - RNA, 19 nt, Artificial Sequence
  Description of Artificial Sequence: Synthetic oligonucleotide
ugucugaaaggcggcuagc

SEQ ID NO: 1456461 - RNA, 19 nt, Artificial Sequence
  Description of Artificial Sequence: Synthetic oligonucleotide
ccuggguauguucaccucc

SEQ ID NO: 1456462 - RNA, 19 nt, Artificial Sequence
  Description of Artificial Sequence: Synthetic oligonucleotide
ggagagaaacacuaccucu

SEQ ID NO: 1456463 - RNA, 19 nt, Artificial Sequence
  Description of Artificial Sequence: Synthetic oligonucleotide
ugggguccuaggcugggaa

SEQ ID NO: 1456464 - RNA, 19 nt, Artificial Sequence
  Description of Artificial Sequence: Synthetic oligonucleotide
ucggucagguucgugcugu

SEQ ID NO: 1456465 - RNA, 19 nt, Artificial Sequence
  Description of Artificial Sequence: Synthetic oligonucleotide
gguggaggcgcgcaggcug

SEQ ID NO: 1456466 - RNA, 19 nt, Artificial Sequence
  Description of Artificial Sequence: Synthetic oligonucleotide
ucgaugcgcuccagaacca

SEQ ID NO: 1456467 - RNA, 19 nt, Artificial Sequence
  Description of Artificial Sequence: Synthetic oligonucleotide
uggugugguaagcucccau

SEQ ID NO: 1456468 - RNA, 19 nt, Artificial Sequence
  Description of Artificial Sequence: Synthetic oligonucleotide
ucaccgcuugcugaaacau

SEQ ID NO: 1456469 - RNA, 19 nt, Artificial Sequence
  Description of Artificial Sequence: Synthetic oligonucleotide
ucaacuggccaagcuguuc

SEQ ID NO: 1456470 - RNA, 19 nt, Artificial Sequence
  Description of Artificial Sequence: Synthetic oligonucleotide
cuaagcagacgugggcgag

SEQ ID NO: 1456471 - RNA, 19 nt, Artificial Sequence
  Description of Artificial Sequence: Synthetic oligonucleotide
gcaugaucaacaagugcag

SEQ ID NO: 1456472 - RNA, 19 nt, Artificial Sequence
  Description of Artificial Sequence: Synthetic oligonucleotide
agcuacaguagggucacaa

SEQ ID NO: 1456473 - RNA, 19 nt, Artificial Sequence
  Description of Artificial Sequence: Synthetic oligonucleotide
uuguguccagaggaggcgu

SEQ ID NO: 1456474 - RNA, 19 nt, Artificial Sequence
  Description of Artificial Sequence: Synthetic oligonucleotide
cucgcagcuggcaggcuug

SEQ ID NO: 1456475 - RNA, 19 nt, Artificial Sequence
  Description of Artificial Sequence: Synthetic oligonucleotide
uuggcacgggugaggguca

SEQ ID NO: 1456476 - RNA, 19 nt, Artificial Sequence
  Description of Artificial Sequence: Synthetic oligonucleotide
ggugaccuggcccgcauug

SEQ ID NO: 1456477 - RNA, 19 nt, Artificial Sequence
  Description of Artificial Sequence: Synthetic oligonucleotide
agggaguacuuguguccag

SEQ ID NO: 1456478 - RNA, 19 nt, Artificial Sequence
  Description of Artificial Sequence: Synthetic oligonucleotide
cucgaacaaacccugggcu

SEQ ID NO: 1456479 - RNA, 19 nt, Artificial Sequence
  Description of Artificial Sequence: Synthetic oligonucleotide
gggagcaguugccuuuccg

SEQ ID NO: 1456480 - RNA, 19 nt, Artificial Sequence
  Description of Artificial Sequence: Synthetic oligonucleotide
gcuagcuacaguaggguca

SEQ ID NO: 1456481 - RNA, 19 nt, Artificial Sequence
  Description of Artificial Sequence: Synthetic oligonucleotide
ggguccuaggcugggaagg

SEQ ID NO: 1456482 - RNA, 19 nt, Artificial Sequence
  Description of Artificial Sequence: Synthetic oligonucleotide
caccagauuguaggugugc

SEQ ID NO: 1456483 - RNA, 19 nt, Artificial Sequence
  Description of Artificial Sequence: Synthetic oligonucleotide
accggcuccggguggccac

SEQ ID NO: 1456484 - RNA, 19 nt, Artificial Sequence
  Description of Artificial Sequence: Synthetic oligonucleotide
gaugagcaaugugucgauc

SEQ ID NO: 1456485 - RNA, 19 nt, Artificial Sequence
  Description of Artificial Sequence: Synthetic oligonucleotide
ggauauugguccccuuaac

SEQ ID NO: 1456486 - RNA, 19 nt, Artificial Sequence
  Description of Artificial Sequence: Synthetic oligonucleotide
cgcagauccacgcugcgcg

SEQ ID NO: 1456487 - RNA, 19 nt, Artificial Sequence
  Description of Artificial Sequence: Synthetic oligonucleotide
ccagcaugaucaacaagug

SEQ ID NO: 1456488 - RNA, 19 nt, Artificial Sequence
  Description of Artificial Sequence: Synthetic oligonucleotide
cccgacgcuuuucugagcc

SEQ ID NO: 1456489 - RNA, 19 nt, Artificial Sequence
  Description of Artificial Sequence: Synthetic oligonucleotide
caaaguugauguggcgcug

SEQ ID NO: 1456490 - RNA, 19 nt, Artificial Sequence
  Description of Artificial Sequence: Synthetic oligonucleotide
gugugccacauguccucgg

SEQ ID NO: 1456491 - RNA, 19 nt, Artificial Sequence
  Description of Artificial Sequence: Synthetic oligonucleotide
guccccuuaacucgcagcu

SEQ ID NO: 1456492 - RNA, 19 nt, Artificial Sequence
  Description of Artificial Sequence: Synthetic oligonucleotide
gaccgguuuuccaggagca

SEQ ID NO: 1456493 - RNA, 19 nt, Artificial Sequence
  Description of Artificial Sequence: Synthetic oligonucleotide
ugcaccugucaagggacac

SEQ ID NO: 1456494 - RNA, 19 nt, Artificial Sequence
  Description of Artificial Sequence: Synthetic oligonucleotide
gugugguaagcucccaucu

SEQ ID NO: 1456495 - RNA, 19 nt, Artificial Sequence
  Description of Artificial Sequence: Synthetic oligonucleotide
auccgaaccgugccugcgu

SEQ ID NO: 1456496 - RNA, 19 nt, Artificial Sequence
  Description of Artificial Sequence: Synthetic oligonucleotide
agguucgugcuguaacauu

SEQ ID NO: 1456497 - RNA, 19 nt, Artificial Sequence
  Description of Artificial Sequence: Synthetic oligonucleotide
aguccauagaaggcucggu

SEQ ID NO: 1456498 - RNA, 19 nt, Artificial Sequence
  Description of Artificial Sequence: Synthetic oligonucleotide
gguccccuuaacucgcagc

SEQ ID NO: 1456499 - RNA, 19 nt, Artificial Sequence
  Description of Artificial Sequence: Synthetic oligonucleotide
auguagucgcagaacugcu

SEQ ID NO: 1456500 - RNA, 19 nt, Artificial Sequence
  Description of Artificial Sequence: Synthetic oligonucleotide
uggaggacucggucuggac

SEQ ID NO: 1456501 - RNA, 19 nt, Artificial Sequence
  Description of Artificial Sequence: Synthetic oligonucleotide
ucgcagaacugcucucgaa

SEQ ID NO: 1456502 - RNA, 19 nt, Artificial Sequence
  Description of Artificial Sequence: Synthetic oligonucleotide
cauaccggcuccggguggc

SEQ ID NO: 1456503 - RNA, 19 nt, Artificial Sequence
  Description of Artificial Sequence: Synthetic oligonucleotide
gguaagcucccaucuugac

SEQ ID NO: 1456504 - RNA, 19 nt, Artificial Sequence
  Description of Artificial Sequence: Synthetic oligonucleotide
gcccaccugcaccagauug

SEQ ID NO: 1456505 - RNA, 19 nt, Artificial Sequence
  Description of Artificial Sequence: Synthetic oligonucleotide
caacucccgucaacuggcc

SEQ ID NO: 1456506 - RNA, 19 nt, Artificial Sequence
  Description of Artificial Sequence: Synthetic oligonucleotide
acucgcagcuggcaggcuu

SEQ ID NO: 1456507 - RNA, 19 nt, Artificial Sequence
  Description of Artificial Sequence: Synthetic oligonucleotide
uggcgguugggcuccaguu

SEQ ID NO: 1456508 - RNA, 19 nt, Artificial Sequence
  Description of Artificial Sequence: Synthetic oligonucleotide
cagcaacucccgucaacug

SEQ ID NO: 1456509 - RNA, 19 nt, Artificial Sequence
  Description of Artificial Sequence: Synthetic oligonucleotide
gcuggcaggcuugagaguc

SEQ ID NO: 1456510 - RNA, 19 nt, Artificial Sequence
  Description of Artificial Sequence: Synthetic oligonucleotide
uagucgcagaacugcucuc

SEQ ID NO: 1456511 - RNA, 19 nt, Artificial Sequence
  Description of Artificial Sequence: Synthetic oligonucleotide
ucgugucugaaaggcggcu

SEQ ID NO: 1456512 - RNA, 19 nt, Artificial Sequence
  Description of Artificial Sequence: Synthetic oligonucleotide
gugucacuaagcagacgug

SEQ ID NO: 1456513 - RNA, 19 nt, Artificial Sequence
  Description of Artificial Sequence: Synthetic oligonucleotide
uccgaaccgugccugcguu

SEQ ID NO: 1456514 - RNA, 19 nt, Artificial Sequence
  Description of Artificial Sequence: Synthetic oligonucleotide
ccuguucauagaaucucuc

SEQ ID NO: 1456515 - RNA, 19 nt, Artificial Sequence
  Description of Artificial Sequence: Synthetic oligonucleotide
gacucggucuggaccuugc

SEQ ID NO: 1456516 - RNA, 19 nt, Artificial Sequence
  Description of Artificial Sequence: Synthetic oligonucleotide
gcuugagagucaaagucga

SEQ ID NO: 1456517 - RNA, 19 nt, Artificial Sequence
  Description of Artificial Sequence: Synthetic oligonucleotide
uccccuuaacucgcagcug

SEQ ID NO: 1456518 - RNA, 19 nt, Artificial Sequence
  Description of Artificial Sequence: Synthetic oligonucleotide
gguggugcggacgcgguug

SEQ ID NO: 1456519 - RNA, 19 nt, Artificial Sequence
  Description of Artificial Sequence: Synthetic oligonucleotide
cagaacugcucucgaacaa

SEQ ID NO: 1456520 - RNA, 19 nt, Artificial Sequence
  Description of Artificial Sequence: Synthetic oligonucleotide
cucccgacgcugcccgugg

SEQ ID NO: 1456521 - RNA, 19 nt, Artificial Sequence
  Description of Artificial Sequence: Synthetic oligonucleotide
ccgucaacuggccaagcug

SEQ ID NO: 1456522 - RNA, 19 nt, Artificial Sequence
  Description of Artificial Sequence: Synthetic oligonucleotide
ggaccaccuguucauagaa

SEQ ID NO: 1456523 - RNA, 19 nt, Artificial Sequence
  Description of Artificial Sequence: Synthetic oligonucleotide
ggagcaguugccuuuccgu

SEQ ID NO: 1456524 - RNA, 19 nt, Artificial Sequence
  Description of Artificial Sequence: Synthetic oligonucleotide
agggucacaaagggccucu

SEQ ID NO: 1456525 - RNA, 19 nt, Artificial Sequence
  Description of Artificial Sequence: Synthetic oligonucleotide
ggcuagcuacaguaggguc

SEQ ID NO: 1456526 - RNA, 19 nt, Artificial Sequence
  Description of Artificial Sequence: Synthetic oligonucleotide
gcagcuuucgugucugaaa

SEQ ID NO: 1456527 - RNA, 19 nt, Artificial Sequence
  Description of Artificial Sequence: Synthetic oligonucleotide
cagauccacgcugcgcggc

SEQ ID NO: 1456528 - RNA, 19 nt, Artificial Sequence
  Description of Artificial Sequence: Synthetic oligonucleotide
aggaggcguguaccugaag

SEQ ID NO: 1456529 - RNA, 19 nt, Artificial Sequence
  Description of Artificial Sequence: Synthetic oligonucleotide
cccgggacaggcuuucccc

SEQ ID NO: 1456530 - RNA, 19 nt, Artificial Sequence
  Description of Artificial Sequence: Synthetic oligonucleotide
cgcauuguccuucucgaug

SEQ ID NO: 1456531 - RNA, 19 nt, Artificial Sequence
  Description of Artificial Sequence: Synthetic oligonucleotide
gucgcagaacugcucucga

SEQ ID NO: 1456532 - RNA, 19 nt, Artificial Sequence
  Description of Artificial Sequence: Synthetic oligonucleotide
cuuuccguuuccuggguau

SEQ ID NO: 1456533 - RNA, 19 nt, Artificial Sequence
  Description of Artificial Sequence: Synthetic oligonucleotide
ccacgcugggucacaagcc

SEQ ID NO: 1456534 - RNA, 19 nt, Artificial Sequence
  Description of Artificial Sequence: Synthetic oligonucleotide
cugcgcggcagaccccacg

SEQ ID NO: 1456535 - RNA, 19 nt, Artificial Sequence
  Description of Artificial Sequence: Synthetic oligonucleotide
gcagauccacgcugcgcgg

SEQ ID NO: 1456536 - RNA, 19 nt, Artificial Sequence
  Description of Artificial Sequence: Synthetic oligonucleotide
gggguccuaggcugggaag

SEQ ID NO: 1456537 - RNA, 19 nt, Artificial Sequence
  Description of Artificial Sequence: Synthetic oligonucleotide
caugaccucgccaggggcu

SEQ ID NO: 1456538 - RNA, 19 nt, Artificial Sequence
  Description of Artificial Sequence: Synthetic oligonucleotide
guggugcggacgcgguugc

SEQ ID NO: 1456539 - RNA, 19 nt, Artificial Sequence
  Description of Artificial Sequence: Synthetic oligonucleotide
cacagaggcgcgggugggg

SEQ ID NO: 1456540 - RNA, 19 nt, Artificial Sequence
  Description of Artificial Sequence: Synthetic oligonucleotide
gagcaguugccuuuccguu

SEQ ID NO: 1456541 - RNA, 19 nt, Artificial Sequence
  Description of Artificial Sequence: Synthetic oligonucleotide
ugaugccggaagagcucau

SEQ ID NO: 1456542 - RNA, 19 nt, Artificial Sequence
  Description of Artificial Sequence: Synthetic oligonucleotide
uagaaggcucggucagguu

SEQ ID NO: 1456543 - RNA, 19 nt, Artificial Sequence
  Description of Artificial Sequence: Synthetic oligonucleotide
ugccugcguuaucuuucac

SEQ ID NO: 1456544 - RNA, 19 nt, Artificial Sequence
  Description of Artificial Sequence: Synthetic oligonucleotide
gcacgggugagggucauac

SEQ ID NO: 1456545 - RNA, 19 nt, Artificial Sequence
  Description of Artificial Sequence: Synthetic oligonucleotide
uccguuuccuggguauguu

SEQ ID NO: 1456546 - RNA, 19 nt, Artificial Sequence
  Description of Artificial Sequence: Synthetic oligonucleotide
caagccugcucgaugcgcu

SEQ ID NO: 1456547 - RNA, 19 nt, Artificial Sequence
  Description of Artificial Sequence: Synthetic oligonucleotide
caguucgauggugugguaa

SEQ ID NO: 1456548 - RNA, 19 nt, Artificial Sequence
  Description of Artificial Sequence: Synthetic oligonucleotide
acgcacuuuacaacaucaa

SEQ ID NO: 1456549 - RNA, 19 nt, Artificial Sequence
  Description of Artificial Sequence: Synthetic oligonucleotide
gucgaucgccaaggcuucg

SEQ ID NO: 1456550 - RNA, 19 nt, Artificial Sequence
  Description of Artificial Sequence: Synthetic oligonucleotide
ccuccacgcaaagagugag

SEQ ID NO: 1456551 - RNA, 19 nt, Artificial Sequence
  Description of Artificial Sequence: Synthetic oligonucleotide
gucugaaaggcggcuagcu

SEQ ID NO: 1456552 - RNA, 19 nt, Artificial Sequence
  Description of Artificial Sequence: Synthetic oligonucleotide
aggcggcuagcuacaguag

SEQ ID NO: 1456553 - RNA, 19 nt, Artificial Sequence
  Description of Artificial Sequence: Synthetic oligonucleotide
gccucuuucagggaguacu

SEQ ID NO: 1456554 - RNA, 19 nt, Artificial Sequence
  Description of Artificial Sequence: Synthetic oligonucleotide
uccacgcugcgcggcagac

SEQ ID NO: 1456555 - RNA, 19 nt, Artificial Sequence
  Description of Artificial Sequence: Synthetic oligonucleotide
cacaucagcgcuccacgcu

SEQ ID NO: 1456556 - RNA, 19 nt, Artificial Sequence
  Description of Artificial Sequence: Synthetic oligonucleotide
gaauggcagcaacucccgu

SEQ ID NO: 1456557 - RNA, 19 nt, Artificial Sequence
  Description of Artificial Sequence: Synthetic oligonucleotide
gaaccgugccugcguuauc

SEQ ID NO: 1456558 - RNA, 19 nt, Artificial Sequence
  Description of Artificial Sequence: Synthetic oligonucleotide
ccugacauaccggcuccgg

SEQ ID NO: 1456559 - RNA, 19 nt, Artificial Sequence
  Description of Artificial Sequence: Synthetic oligonucleotide
cagaccccacgcugagcac

SEQ ID NO: 1456560 - RNA, 19 nt, Artificial Sequence
  Description of Artificial Sequence: Synthetic oligonucleotide
cacgcugggucacaagccu

SEQ ID NO: 1456561 - RNA, 19 nt, Artificial Sequence
  Description of Artificial Sequence: Synthetic oligonucleotide
cccgcauuguccuucucga

SEQ ID NO: 1456562 - RNA, 19 nt, Artificial Sequence
  Description of Artificial Sequence: Synthetic oligonucleotide
gguucgugcuguaacauuu

SEQ ID NO: 1456563 - RNA, 19 nt, Artificial Sequence
  Description of Artificial Sequence: Synthetic oligonucleotide
acgcugggucacaagccug

SEQ ID NO: 1456564 - RNA, 19 nt, Artificial Sequence
  Description of Artificial Sequence: Synthetic oligonucleotide
cccuuaacucgcagcuggc

SEQ ID NO: 1456565 - RNA, 19 nt, Artificial Sequence
  Description of Artificial Sequence: Synthetic oligonucleotide
ucccgucaacuggccaagc

SEQ ID NO: 1456566 - RNA, 19 nt, Artificial Sequence
  Description of Artificial Sequence: Synthetic oligonucleotide
gcaaagagugaggguggug

SEQ ID NO: 1456567 - RNA, 19 nt, Artificial Sequence
  Description of Artificial Sequence: Synthetic oligonucleotide
ucccgacgcugcccgugga

SEQ ID NO: 1456568 - RNA, 19 nt, Artificial Sequence
  Description of Artificial Sequence: Synthetic oligonucleotide
ugguggaggcgcgcaggcu

SEQ ID NO: 1456569 - RNA, 19 nt, Artificial Sequence
  Description of Artificial Sequence: Synthetic oligonucleotide
ccguuuccuggguauguuc

SEQ ID NO: 1456570 - RNA, 19 nt, Artificial Sequence
  Description of Artificial Sequence: Synthetic oligonucleotide
cuugagagucaaagucgau

SEQ ID NO: 1456571 - RNA, 19 nt, Artificial Sequence
  Description of Artificial Sequence: Synthetic oligonucleotide
gcaaugugucgaucgccaa

SEQ ID NO: 1456572 - RNA, 19 nt, Artificial Sequence
  Description of Artificial Sequence: Synthetic oligonucleotide
ucgcagcuggcaggcuuga

SEQ ID NO: 1456573 - RNA, 19 nt, Artificial Sequence
  Description of Artificial Sequence: Synthetic oligonucleotide
ggugcggacgcgguugcuc

SEQ ID NO: 1456574 - RNA, 19 nt, Artificial Sequence
  Description of Artificial Sequence: Synthetic oligonucleotide
ggaggcgcgcaggcugucg

SEQ ID NO: 1456575 - RNA, 19 nt, Artificial Sequence
  Description of Artificial Sequence: Synthetic oligonucleotide
gcgguugcucccgacgcug

SEQ ID NO: 1456576 - RNA, 19 nt, Artificial Sequence
  Description of Artificial Sequence: Synthetic oligonucleotide
gcaccagauuguaggugug

SEQ ID NO: 1456577 - RNA, 19 nt, Artificial Sequence
  Description of Artificial Sequence: Synthetic oligonucleotide
cugcguuaucuuucacgcu

SEQ ID NO: 1456578 - RNA, 19 nt, Artificial Sequence
  Description of Artificial Sequence: Synthetic oligonucleotide
ccaccuguucauagaaucu

SEQ ID NO: 1456579 - RNA, 19 nt, Artificial Sequence
  Description of Artificial Sequence: Synthetic oligonucleotide
gaccaccuguucauagaau

SEQ ID NO: 1456580 - RNA, 19 nt, Artificial Sequence
  Description of Artificial Sequence: Synthetic oligonucleotide
cgucaacuggccaagcugu

SEQ ID NO: 1456581 - RNA, 19 nt, Artificial Sequence
  Description of Artificial Sequence: Synthetic oligonucleotide
gcggacgcgguugcucccg

SEQ ID NO: 1456582 - RNA, 19 nt, Artificial Sequence
  Description of Artificial Sequence: Synthetic oligonucleotide
gccugacauaccggcuccg

SEQ ID NO: 1456583 - RNA, 19 nt, Artificial Sequence
  Description of Artificial Sequence: Synthetic oligonucleotide
ccuugucaugcugggagca

SEQ ID NO: 1456584 - RNA, 19 nt, Artificial Sequence
  Description of Artificial Sequence: Synthetic oligonucleotide
gcgcagauccacgcugcgc

SEQ ID NO: 1456585 - RNA, 19 nt, Artificial Sequence
  Description of Artificial Sequence: Synthetic oligonucleotide
cagacgugggcgaggcccu

SEQ ID NO: 1456586 - RNA, 19 nt, Artificial Sequence
  Description of Artificial Sequence: Synthetic oligonucleotide
cugagccucggcgcgcaga

SEQ ID NO: 1456587 - RNA, 19 nt, Artificial Sequence
  Description of Artificial Sequence: Synthetic oligonucleotide
ggcgcuggauggccuggac

SEQ ID NO: 1456588 - RNA, 19 nt, Artificial Sequence
  Description of Artificial Sequence: Synthetic oligonucleotide
ccuuaacucgcagcuggca

SEQ ID NO: 1456589 - RNA, 19 nt, Artificial Sequence
  Description of Artificial Sequence: Synthetic oligonucleotide
ggacucggucuggaccuug

SEQ ID NO: 1456590 - RNA, 19 nt, Artificial Sequence
  Description of Artificial Sequence: Synthetic oligonucleotide
gcugggagcaguugccuuu

SEQ ID NO: 1456591 - RNA, 19 nt, Artificial Sequence
  Description of Artificial Sequence: Synthetic oligonucleotide
cuuggauauugguccccuu

SEQ ID NO: 1456592 - RNA, 19 nt, Artificial Sequence
  Description of Artificial Sequence: Synthetic oligonucleotide
cccgacgcugcccguggag

SEQ ID NO: 1456593 - RNA, 19 nt, Artificial Sequence
  Description of Artificial Sequence: Synthetic oligonucleotide
cgacgcuuuucugagccuc

SEQ ID NO: 1456594 - RNA, 19 nt, Artificial Sequence
  Description of Artificial Sequence: Synthetic oligonucleotide
cagguucgugcuguaacau

SEQ ID NO: 1456595 - RNA, 19 nt, Artificial Sequence
  Description of Artificial Sequence: Synthetic oligonucleotide
aggcucggucagguucgug

SEQ ID NO: 1456596 - RNA, 19 nt, Artificial Sequence
  Description of Artificial Sequence: Synthetic oligonucleotide
ggcguguaccugaaggaau

SEQ ID NO: 1456597 - RNA, 19 nt, Artificial Sequence
  Description of Artificial Sequence: Synthetic oligonucleotide
cguuaucuuucacgcuguc

SEQ ID NO: 1456598 - RNA, 19 nt, Artificial Sequence
  Description of Artificial Sequence: Synthetic oligonucleotide
cuggcgguugggcuccagu

SEQ ID NO: 1456599 - RNA, 19 nt, Artificial Sequence
  Description of Artificial Sequence: Synthetic oligonucleotide
gcggcagaccccacgcuga

SEQ ID NO: 1456600 - RNA, 19 nt, Artificial Sequence
  Description of Artificial Sequence: Synthetic oligonucleotide
ccagaggaggcguguaccu

SEQ ID NO: 1456601 - RNA, 19 nt, Artificial Sequence
  Description of Artificial Sequence: Synthetic oligonucleotide
gcucccgacgcugcccgug

SEQ ID NO: 1456602 - RNA, 19 nt, Artificial Sequence
  Description of Artificial Sequence: Synthetic oligonucleotide
uggaggcgcgcaggcuguc

SEQ ID NO: 1456603 - RNA, 19 nt, Artificial Sequence
  Description of Artificial Sequence: Synthetic oligonucleotide
ggguucggcaagagacaca

SEQ ID NO: 1456604 - RNA, 19 nt, Artificial Sequence
  Description of Artificial Sequence: Synthetic oligonucleotide
cacgggugagggucauacu

SEQ ID NO: 1456605 - RNA, 19 nt, Artificial Sequence
  Description of Artificial Sequence: Synthetic oligonucleotide
ggacgcgguugcucccgac

SEQ ID NO: 1456606 - RNA, 19 nt, Artificial Sequence
  Description of Artificial Sequence: Synthetic oligonucleotide
uggcacgggugagggucau

SEQ ID NO: 1456607 - RNA, 19 nt, Artificial Sequence
  Description of Artificial Sequence: Synthetic oligonucleotide
gcguuaucuuucacgcugu

SEQ ID NO: 1456608 - RNA, 19 nt, Artificial Sequence
  Description of Artificial Sequence: Synthetic oligonucleotide
cguggaggacucggucugg

SEQ ID NO: 1456609 - RNA, 19 nt, Artificial Sequence
  Description of Artificial Sequence: Synthetic oligonucleotide
gcguguaccugaaggaauu

SEQ ID NO: 1456610 - RNA, 19 nt, Artificial Sequence
  Description of Artificial Sequence: Synthetic oligonucleotide
gagccucggcgcgcagauc

SEQ ID NO: 1456611 - RNA, 19 nt, Artificial Sequence
  Description of Artificial Sequence: Synthetic oligonucleotide
ccgguuuuccaggagcacu

SEQ ID NO: 1456612 - RNA, 19 nt, Artificial Sequence
  Description of Artificial Sequence: Synthetic oligonucleotide
gucaacuggccaagcuguu

SEQ ID NO: 1456613 - RNA, 19 nt, Artificial Sequence
  Description of Artificial Sequence: Synthetic oligonucleotide
ccuuuccguuuccugggua

SEQ ID NO: 1456614 - RNA, 19 nt, Artificial Sequence
  Description of Artificial Sequence: Synthetic oligonucleotide
ccagaaaucccagcaugau

SEQ ID NO: 1456615 - RNA, 19 nt, Artificial Sequence
  Description of Artificial Sequence: Synthetic oligonucleotide
ccagccugacauaccggcu

SEQ ID NO: 1456616 - RNA, 19 nt, Artificial Sequence
  Description of Artificial Sequence: Synthetic oligonucleotide
ccacgcaaagagugagggu

SEQ ID NO: 1456617 - RNA, 19 nt, Artificial Sequence
  Description of Artificial Sequence: Synthetic oligonucleotide
cccgucaacuggccaagcu

SEQ ID NO: 1456618 - RNA, 19 nt, Artificial Sequence
  Description of Artificial Sequence: Synthetic oligonucleotide
gggccucuuucagggagua

SEQ ID NO: 1456619 - RNA, 19 nt, Artificial Sequence
  Description of Artificial Sequence: Synthetic oligonucleotide
cgacgcugcccguggagga

SEQ ID NO: 1456620 - RNA, 19 nt, Artificial Sequence
  Description of Artificial Sequence: Synthetic oligonucleotide
gcgcaggcugucgcccacc

SEQ ID NO: 1456621 - RNA, 19 nt, Artificial Sequence
  Description of Artificial Sequence: Synthetic oligonucleotide
ccgcuugcugaaacaugua

SEQ ID NO: 1456622 - RNA, 19 nt, Artificial Sequence
  Description of Artificial Sequence: Synthetic oligonucleotide
ccaguucgaugguguggua

SEQ ID NO: 1456623 - RNA, 19 nt, Artificial Sequence
  Description of Artificial Sequence: Synthetic oligonucleotide
ccgaaccgugccugcguua

SEQ ID NO: 1456624 - RNA, 19 nt, Artificial Sequence
  Description of Artificial Sequence: Synthetic oligonucleotide
ccacauccugaugccggaa

SEQ ID NO: 1456625 - RNA, 19 nt, Artificial Sequence
  Description of Artificial Sequence: Synthetic oligonucleotide
cgaaccgugccugcguuau

SEQ ID NO: 1456626 - RNA, 19 nt, Artificial Sequence
  Description of Artificial Sequence: Synthetic oligonucleotide
ccgacgcuuuucugagccu

SEQ ID NO: 1456627 - RNA, 19 nt, Artificial Sequence
  Description of Artificial Sequence: Synthetic oligonucleotide
cgguugggcuccaguucga

SEQ ID NO: 1456628 - RNA, 19 nt, Artificial Sequence
  Description of Artificial Sequence: Synthetic oligonucleotide
ccgugccugcguuaucuuu

SEQ ID NO: 1456629 - RNA, 19 nt, Artificial Sequence
  Description of Artificial Sequence: Synthetic oligonucleotide
ccgcauuguccuucucgau

SEQ ID NO: 1456630 - RNA, 19 nt, Artificial Sequence
  Description of Artificial Sequence: Synthetic oligonucleotide
gggcgaggcccuccugcau

SEQ ID NO: 1456631 - RNA, 19 nt, Artificial Sequence
  Description of Artificial Sequence: Synthetic oligonucleotide
cggcuagcuacaguagggu

SEQ ID NO: 1456632 - RNA, 19 nt, Artificial Sequence
  Description of Artificial Sequence: Synthetic oligonucleotide
ccccagacacauggagacu

SEQ ID NO: 1456633 - RNA, 19 nt, Artificial Sequence
  Description of Artificial Sequence: Synthetic oligonucleotide
gggucacaaagggccucuu

SEQ ID NO: 1456634 - RNA, 19 nt, Artificial Sequence
  Description of Artificial Sequence: Synthetic oligonucleotide
cgcgguugcucccgacgcu

SEQ ID NO: 1456635 - RNA, 19 nt, Artificial Sequence
  Description of Artificial Sequence: Synthetic oligonucleotide
cggacgcgguugcucccga

SEQ ID NO: 1456636 - RNA, 19 nt, Artificial Sequence
  Description of Artificial Sequence: Synthetic oligonucleotide
uuuauuugaaggcaaaaca

SEQ ID NO: 1456637 - RNA, 19 nt, Artificial Sequence
  Description of Artificial Sequence: Synthetic oligonucleotide
auaagggucguccagggcc

SEQ ID NO: 1456638 - RNA, 19 nt, Artificial Sequence
  Description of Artificial Sequence: Synthetic oligonucleotide
cauuuuaucgaaaagaaca

SEQ ID NO: 1456639 - RNA, 19 nt, Artificial Sequence
  Description of Artificial Sequence: Synthetic oligonucleotide
aacgugaagacuucgagga

SEQ ID NO: 1456640 - RNA, 19 nt, Artificial Sequence
  Description of Artificial Sequence: Synthetic oligonucleotide
uuuaucccaagucagacac

SEQ ID NO: 1456641 - RNA, 19 nt, Artificial Sequence
  Description of Artificial Sequence: Synthetic oligonucleotide
uucauucgggcaaugaagg

SEQ ID NO: 1456642 - RNA, 19 nt, Artificial Sequence
  Description of Artificial Sequence: Synthetic oligonucleotide
agucaagugucuuaugugg

SEQ ID NO: 1456643 - RNA, 19 nt, Artificial Sequence
  Description of Artificial Sequence: Synthetic oligonucleotide
uuuaucgaaaagaacauuu

SEQ ID NO: 1456644 - RNA, 19 nt, Artificial Sequence
  Description of Artificial Sequence: Synthetic oligonucleotide
aauaacuggcaccagggcu

SEQ ID NO: 1456645 - RNA, 19 nt, Artificial Sequence
  Description of Artificial Sequence: Synthetic oligonucleotide
uuggggauagucaaagcgg

SEQ ID NO: 1456646 - RNA, 19 nt, Artificial Sequence
  Description of Artificial Sequence: Synthetic oligonucleotide
gagccauuaacccugcugg

SEQ ID NO: 1456647 - RNA, 19 nt, Artificial Sequence
  Description of Artificial Sequence: Synthetic oligonucleotide
acaaucaguuguuaacagc

SEQ ID NO: 1456648 - RNA, 19 nt, Artificial Sequence
  Description of Artificial Sequence: Synthetic oligonucleotide
uuuacgaaaggcuuuauuu

SEQ ID NO: 1456649 - RNA, 19 nt, Artificial Sequence
  Description of Artificial Sequence: Synthetic oligonucleotide
ucuuauguggugcugagaa

SEQ ID NO: 1456650 - RNA, 19 nt, Artificial Sequence
  Description of Artificial Sequence: Synthetic oligonucleotide
aaaagggugacgaggaggg

SEQ ID NO: 1456651 - RNA, 19 nt, Artificial Sequence
  Description of Artificial Sequence: Synthetic oligonucleotide
gaggcgcugaauuagaacc

SEQ ID NO: 1456652 - RNA, 19 nt, Artificial Sequence
  Description of Artificial Sequence: Synthetic oligonucleotide
acaaauaacuggcaccagg

SEQ ID NO: 1456653 - RNA, 19 nt, Artificial Sequence
  Description of Artificial Sequence: Synthetic oligonucleotide
uaucgaaaagaacauuuca

SEQ ID NO: 1456654 - RNA, 19 nt, Artificial Sequence
  Description of Artificial Sequence: Synthetic oligonucleotide
aagcgguugaaguuguggg

SEQ ID NO: 1456655 - RNA, 19 nt, Artificial Sequence
  Description of Artificial Sequence: Synthetic oligonucleotide
uauuugaaggcaaaacagu

SEQ ID NO: 1456656 - RNA, 19 nt, Artificial Sequence
  Description of Artificial Sequence: Synthetic oligonucleotide
uuguuaacagcacaugugu

SEQ ID NO: 1456657 - RNA, 19 nt, Artificial Sequence
  Description of Artificial Sequence: Synthetic oligonucleotide
uuacgaaaggcuuuauuug

SEQ ID NO: 1456658 - RNA, 19 nt, Artificial Sequence
  Description of Artificial Sequence: Synthetic oligonucleotide
aaagcgguggaggauaggg

SEQ ID NO: 1456659 - RNA, 19 nt, Artificial Sequence
  Description of Artificial Sequence: Synthetic oligonucleotide
uuucgugccccaaacgugg

SEQ ID NO: 1456660 - RNA, 19 nt, Artificial Sequence
  Description of Artificial Sequence: Synthetic oligonucleotide
aaacguggagaacucaucu

SEQ ID NO: 1456661 - RNA, 19 nt, Artificial Sequence
  Description of Artificial Sequence: Synthetic oligonucleotide
cuuguuuaucccaagucag

SEQ ID NO: 1456662 - RNA, 19 nt, Artificial Sequence
  Description of Artificial Sequence: Synthetic oligonucleotide
gaacgugaagacuucgagg

SEQ ID NO: 1456663 - RNA, 19 nt, Artificial Sequence
  Description of Artificial Sequence: Synthetic oligonucleotide
auugaugccaggguguggc

SEQ ID NO: 1456664 - RNA, 19 nt, Artificial Sequence
  Description of Artificial Sequence: Synthetic oligonucleotide
guaauucucauaagggucg

SEQ ID NO: 1456665 - RNA, 19 nt, Artificial Sequence
  Description of Artificial Sequence: Synthetic oligonucleotide
acguggagaacucaucucg

SEQ ID NO: 1456666 - RNA, 19 nt, Artificial Sequence
  Description of Artificial Sequence: Synthetic oligonucleotide
ucgaaaagaacauuucaaa

SEQ ID NO: 1456667 - RNA, 19 nt, Artificial Sequence
  Description of Artificial Sequence: Synthetic oligonucleotide
uuaaugggguccuggaugc

SEQ ID NO: 1456668 - RNA, 19 nt, Artificial Sequence
  Description of Artificial Sequence: Synthetic oligonucleotide
cuucauucgggcaaugaag

SEQ ID NO: 1456669 - RNA, 19 nt, Artificial Sequence
  Description of Artificial Sequence: Synthetic oligonucleotide
aucgaaguagggcacauug

SEQ ID NO: 1456670 - RNA, 19 nt, Artificial Sequence
  Description of Artificial Sequence: Synthetic oligonucleotide
acaucuccgcccuuaaugg

SEQ ID NO: 1456671 - RNA, 19 nt, Artificial Sequence
  Description of Artificial Sequence: Synthetic oligonucleotide
cuuaaugggguccuggaug

SEQ ID NO: 1456672 - RNA, 19 nt, Artificial Sequence
  Description of Artificial Sequence: Synthetic oligonucleotide
aguuguuaacagcacaugu

SEQ ID NO: 1456673 - RNA, 19 nt, Artificial Sequence
  Description of Artificial Sequence: Synthetic oligonucleotide
gugaugaugagcgaccucg

SEQ ID NO: 1456674 - RNA, 19 nt, Artificial Sequence
  Description of Artificial Sequence: Synthetic oligonucleotide
cugaauuagaacccaggcc

SEQ ID NO: 1456675 - RNA, 19 nt, Artificial Sequence
  Description of Artificial Sequence: Synthetic oligonucleotide
uacgaaaggcuuuauuuga

SEQ ID NO: 1456676 - RNA, 19 nt, Artificial Sequence
  Description of Artificial Sequence: Synthetic oligonucleotide
acaaggggagccauuaacc

SEQ ID NO: 1456677 - RNA, 19 nt, Artificial Sequence
  Description of Artificial Sequence: Synthetic oligonucleotide
uuauguggugcugagaagu

SEQ ID NO: 1456678 - RNA, 19 nt, Artificial Sequence
  Description of Artificial Sequence: Synthetic oligonucleotide
aguaaaauccacaaucagu

SEQ ID NO: 1456679 - RNA, 19 nt, Artificial Sequence
  Description of Artificial Sequence: Synthetic oligonucleotide
ucccaagucagacacgucu

SEQ ID NO: 1456680 - RNA, 19 nt, Artificial Sequence
  Description of Artificial Sequence: Synthetic oligonucleotide
auagucaaagcgguggagg

SEQ ID NO: 1456681 - RNA, 19 nt, Artificial Sequence
  Description of Artificial Sequence: Synthetic oligonucleotide
ucauaagggucguccaggg

SEQ ID NO: 1456682 - RNA, 19 nt, Artificial Sequence
  Description of Artificial Sequence: Synthetic oligonucleotide
ggcgguaauucucauaagg

SEQ ID NO: 1456683 - RNA, 19 nt, Artificial Sequence
  Description of Artificial Sequence: Synthetic oligonucleotide
aagucucuguacaaauaac

SEQ ID NO: 1456684 - RNA, 19 nt, Artificial Sequence
  Description of Artificial Sequence: Synthetic oligonucleotide
gaagcgguugaaguugugg

SEQ ID NO: 1456685 - RNA, 19 nt, Artificial Sequence
  Description of Artificial Sequence: Synthetic oligonucleotide
auaacuggcaccagggcuc

SEQ ID NO: 1456686 - RNA, 19 nt, Artificial Sequence
  Description of Artificial Sequence: Synthetic oligonucleotide
uuguuuaucccaagucaga

SEQ ID NO: 1456687 - RNA, 19 nt, Artificial Sequence
  Description of Artificial Sequence: Synthetic oligonucleotide
aaguuguagagggcucugc

SEQ ID NO: 1456688 - RNA, 19 nt, Artificial Sequence
  Description of Artificial Sequence: Synthetic oligonucleotide
ggaagaucgaaguagggca

SEQ ID NO: 1456689 - RNA, 19 nt, Artificial Sequence
  Description of Artificial Sequence: Synthetic oligonucleotide
cucguagaggccauucugc

SEQ ID NO: 1456690 - RNA, 19 nt, Artificial Sequence
  Description of Artificial Sequence: Synthetic oligonucleotide
aaggggagccauuaacccu

SEQ ID NO: 1456691 - RNA, 19 nt, Artificial Sequence
  Description of Artificial Sequence: Synthetic oligonucleotide
caaaagggugacgaggagg

SEQ ID NO: 1456692 - RNA, 19 nt, Artificial Sequence
  Description of Artificial Sequence: Synthetic oligonucleotide
ugugagcaguuucugcacc

SEQ ID NO: 1456693 - RNA, 19 nt, Artificial Sequence
  Description of Artificial Sequence: Synthetic oligonucleotide
ucaucucgggccuucauuc

SEQ ID NO: 1456694 - RNA, 19 nt, Artificial Sequence
  Description of Artificial Sequence: Synthetic oligonucleotide
ggggaauaagacuuggacc

SEQ ID NO: 1456695 - RNA, 19 nt, Artificial Sequence
  Description of Artificial Sequence: Synthetic oligonucleotide
ugaugaugagcgaccucgg

SEQ ID NO: 1456696 - RNA, 19 nt, Artificial Sequence
  Description of Artificial Sequence: Synthetic oligonucleotide
ggcuccuagaccuggagcg

SEQ ID NO: 1456697 - RNA, 19 nt, Artificial Sequence
  Description of Artificial Sequence: Synthetic oligonucleotide
uggggauagucaaagcggu

SEQ ID NO: 1456698 - RNA, 19 nt, Artificial Sequence
  Description of Artificial Sequence: Synthetic oligonucleotide
ugucuugcuuguuuauccc

SEQ ID NO: 1456699 - RNA, 19 nt, Artificial Sequence
  Description of Artificial Sequence: Synthetic oligonucleotide
uuuuacgaaaggcuuuauu

SEQ ID NO: 1456700 - RNA, 19 nt, Artificial Sequence
  Description of Artificial Sequence: Synthetic oligonucleotide
ugaugagcgaccucggcuc

SEQ ID NO: 1456701 - RNA, 19 nt, Artificial Sequence
  Description of Artificial Sequence: Synthetic oligonucleotide
uguuaacagcacauguguc

SEQ ID NO: 1456702 - RNA, 19 nt, Artificial Sequence
  Description of Artificial Sequence: Synthetic oligonucleotide
agcgugaucggcuucggcu

SEQ ID NO: 1456703 - RNA, 19 nt, Artificial Sequence
  Description of Artificial Sequence: Synthetic oligonucleotide
ugcaccacgccuguguuag

SEQ ID NO: 1456704 - RNA, 19 nt, Artificial Sequence
  Description of Artificial Sequence: Synthetic oligonucleotide
uucgaggagcgugagcugg

SEQ ID NO: 1456705 - RNA, 19 nt, Artificial Sequence
  Description of Artificial Sequence: Synthetic oligonucleotide
uacuggucccacuuguccc

SEQ ID NO: 1456706 - RNA, 19 nt, Artificial Sequence
  Description of Artificial Sequence: Synthetic oligonucleotide
uccuuucgugccccaaacg

SEQ ID NO: 1456707 - RNA, 19 nt, Artificial Sequence
  Description of Artificial Sequence: Synthetic oligonucleotide
ugucuuauguggugcugag

SEQ ID NO: 1456708 - RNA, 19 nt, Artificial Sequence
  Description of Artificial Sequence: Synthetic oligonucleotide
cuuggcucggaagaacucg

SEQ ID NO: 1456709 - RNA, 19 nt, Artificial Sequence
  Description of Artificial Sequence: Synthetic oligonucleotide
gacacgucugcacacguca

SEQ ID NO: 1456710 - RNA, 19 nt, Artificial Sequence
  Description of Artificial Sequence: Synthetic oligonucleotide
gcugaauuagaacccaggc

SEQ ID NO: 1456711 - RNA, 19 nt, Artificial Sequence
  Description of Artificial Sequence: Synthetic oligonucleotide
auuuuaucgaaaagaacau

SEQ ID NO: 1456712 - RNA, 19 nt, Artificial Sequence
  Description of Artificial Sequence: Synthetic oligonucleotide
aacucguagaggccauucu

SEQ ID NO: 1456713 - RNA, 19 nt, Artificial Sequence
  Description of Artificial Sequence: Synthetic oligonucleotide
gaagaacucguagaggcca

SEQ ID NO: 1456714 - RNA, 19 nt, Artificial Sequence
  Description of Artificial Sequence: Synthetic oligonucleotide
uucuuuuacgaaaggcuuu

SEQ ID NO: 1456715 - RNA, 19 nt, Artificial Sequence
  Description of Artificial Sequence: Synthetic oligonucleotide
cucauaagggucguccagg

SEQ ID NO: 1456716 - RNA, 19 nt, Artificial Sequence
  Description of Artificial Sequence: Synthetic oligonucleotide
acagcuaugggaaaucuaa

SEQ ID NO: 1456717 - RNA, 19 nt, Artificial Sequence
  Description of Artificial Sequence: Synthetic oligonucleotide
ugcucauugaugccagggu

SEQ ID NO: 1456718 - RNA, 19 nt, Artificial Sequence
  Description of Artificial Sequence: Synthetic oligonucleotide
ucaaagcgguggaggauag

SEQ ID NO: 1456719 - RNA, 19 nt, Artificial Sequence
  Description of Artificial Sequence: Synthetic oligonucleotide
agaccuggagcgucgccgc

SEQ ID NO: 1456720 - RNA, 19 nt, Artificial Sequence
  Description of Artificial Sequence: Synthetic oligonucleotide
ucaccagcauuugaugucc

SEQ ID NO: 1456721 - RNA, 19 nt, Artificial Sequence
  Description of Artificial Sequence: Synthetic oligonucleotide
agucugguaugggaggcgc

SEQ ID NO: 1456722 - RNA, 19 nt, Artificial Sequence
  Description of Artificial Sequence: Synthetic oligonucleotide
gggaauaagacuuggaccu

SEQ ID NO: 1456723 - RNA, 19 nt, Artificial Sequence
  Description of Artificial Sequence: Synthetic oligonucleotide
aucgaaaagaacauuucaa

SEQ ID NO: 1456724 - RNA, 19 nt, Artificial Sequence
  Description of Artificial Sequence: Synthetic oligonucleotide
cuuucgugccccaaacgug

SEQ ID NO: 1456725 - RNA, 19 nt, Artificial Sequence
  Description of Artificial Sequence: Synthetic oligonucleotide
uccuagaccuggagcgucg

SEQ ID NO: 1456726 - RNA, 19 nt, Artificial Sequence
  Description of Artificial Sequence: Synthetic oligonucleotide
acacgucacagcuauggga

SEQ ID NO: 1456727 - RNA, 19 nt, Artificial Sequence
  Description of Artificial Sequence: Synthetic oligonucleotide
gaugaugagcgaccucggc

SEQ ID NO: 1456728 - RNA, 19 nt, Artificial Sequence
  Description of Artificial Sequence: Synthetic oligonucleotide
gguaauucucauaaggguc

SEQ ID NO: 1456729 - RNA, 19 nt, Artificial Sequence
  Description of Artificial Sequence: Synthetic oligonucleotide
guacuggucccacuugucc

SEQ ID NO: 1456730 - RNA, 19 nt, Artificial Sequence
  Description of Artificial Sequence: Synthetic oligonucleotide
cuuauguggugcugagaag

SEQ ID NO: 1456731 - RNA, 19 nt, Artificial Sequence
  Description of Artificial Sequence: Synthetic oligonucleotide
cuuguugcggcgguaauuc

SEQ ID NO: 1456732 - RNA, 19 nt, Artificial Sequence
  Description of Artificial Sequence: Synthetic oligonucleotide
cacaaggggagccauuaac

SEQ ID NO: 1456733 - RNA, 19 nt, Artificial Sequence
  Description of Artificial Sequence: Synthetic oligonucleotide
aucucgggccuucauucgg

SEQ ID NO: 1456734 - RNA, 19 nt, Artificial Sequence
  Description of Artificial Sequence: Synthetic oligonucleotide
aggccauucugcucccagc

SEQ ID NO: 1456735 - RNA, 19 nt, Artificial Sequence
  Description of Artificial Sequence: Synthetic oligonucleotide
uguugcggcgguaauucuc

SEQ ID NO: 1456736 - RNA, 19 nt, Artificial Sequence
  Description of Artificial Sequence: Synthetic oligonucleotide
uuuuaucgaaaagaacauu

SEQ ID NO: 1456737 - RNA, 19 nt, Artificial Sequence
  Description of Artificial Sequence: Synthetic oligonucleotide
uaggguggccgcucaaaag

SEQ ID NO: 1456738 - RNA, 19 nt, Artificial Sequence
  Description of Artificial Sequence: Synthetic oligonucleotide
uuccuuucgugccccaaac

SEQ ID NO: 1456739 - RNA, 19 nt, Artificial Sequence
  Description of Artificial Sequence: Synthetic oligonucleotide
cuagcccgcaucuuggcuc

SEQ ID NO: 1456740 - RNA, 19 nt, Artificial Sequence
  Description of Artificial Sequence: Synthetic oligonucleotide
gaagaucgaaguagggcac

SEQ ID NO: 1456741 - RNA, 19 nt, Artificial Sequence
  Description of Artificial Sequence: Synthetic oligonucleotide
ucauucgggcaaugaagga

SEQ ID NO: 1456742 - RNA, 19 nt, Artificial Sequence
  Description of Artificial Sequence: Synthetic oligonucleotide
caaacguggagaacucauc

SEQ ID NO: 1456743 - RNA, 19 nt, Artificial Sequence
  Description of Artificial Sequence: Synthetic oligonucleotide
uagcccgcaucuuggcucg

SEQ ID NO: 1456744 - RNA, 19 nt, Artificial Sequence
  Description of Artificial Sequence: Synthetic oligonucleotide
caugaagcguggugggaag

SEQ ID NO: 1456745 - RNA, 19 nt, Artificial Sequence
  Description of Artificial Sequence: Synthetic oligonucleotide
ucgugguugaugugaggug

SEQ ID NO: 1456746 - RNA, 19 nt, Artificial Sequence
  Description of Artificial Sequence: Synthetic oligonucleotide
cugcaugaagcgugguggg

SEQ ID NO: 1456747 - RNA, 19 nt, Artificial Sequence
  Description of Artificial Sequence: Synthetic oligonucleotide
aggcgcugaauuagaaccc

SEQ ID NO: 1456748 - RNA, 19 nt, Artificial Sequence
  Description of Artificial Sequence: Synthetic oligonucleotide
uuggcucggaagaacucgu

SEQ ID NO: 1456749 - RNA, 19 nt, Artificial Sequence
  Description of Artificial Sequence: Synthetic oligonucleotide
gaggaacgugaagacuucg

SEQ ID NO: 1456750 - RNA, 19 nt, Artificial Sequence
  Description of Artificial Sequence: Synthetic oligonucleotide
cacgucacagcuaugggaa

SEQ ID NO: 1456751 - RNA, 19 nt, Artificial Sequence
  Description of Artificial Sequence: Synthetic oligonucleotide
uaugggaggcgcugaauua

SEQ ID NO: 1456752 - RNA, 19 nt, Artificial Sequence
  Description of Artificial Sequence: Synthetic oligonucleotide
ggagccauuaacccugcug

SEQ ID NO: 1456753 - RNA, 19 nt, Artificial Sequence
  Description of Artificial Sequence: Synthetic oligonucleotide
uucacaaggggagccauua

SEQ ID NO: 1456754 - RNA, 19 nt, Artificial Sequence
  Description of Artificial Sequence: Synthetic oligonucleotide
caucuccgcccuuaauggg

SEQ ID NO: 1456755 - RNA, 19 nt, Artificial Sequence
  Description of Artificial Sequence: Synthetic oligonucleotide
auucgggcaaugaaggagu

SEQ ID NO: 1456756 - RNA, 19 nt, Artificial Sequence
  Description of Artificial Sequence: Synthetic oligonucleotide
acaugugucuugcuuguuu

SEQ ID NO: 1456757 - RNA, 19 nt, Artificial Sequence
  Description of Artificial Sequence: Synthetic oligonucleotide
caccagacccgcuccaacc

SEQ ID NO: 1456758 - RNA, 19 nt, Artificial Sequence
  Description of Artificial Sequence: Synthetic oligonucleotide
gucaucgugguugauguga

SEQ ID NO: 1456759 - RNA, 19 nt, Artificial Sequence
  Description of Artificial Sequence: Synthetic oligonucleotide
guagcucuuguugcggcgg

SEQ ID NO: 1456760 - RNA, 19 nt, Artificial Sequence
  Description of Artificial Sequence: Synthetic oligonucleotide
augggaggcgcugaauuag

SEQ ID NO: 1456761 - RNA, 19 nt, Artificial Sequence
  Description of Artificial Sequence: Synthetic oligonucleotide
ugucccggacaucuccgcc

SEQ ID NO: 1456762 - RNA, 19 nt, Artificial Sequence
  Description of Artificial Sequence: Synthetic oligonucleotide
gaagcguggugggaagcgg

SEQ ID NO: 1456763 - RNA, 19 nt, Artificial Sequence
  Description of Artificial Sequence: Synthetic oligonucleotide
augaagcguggugggaagc

SEQ ID NO: 1456764 - RNA, 19 nt, Artificial Sequence
  Description of Artificial Sequence: Synthetic oligonucleotide
cauugaagccguggggagg

SEQ ID NO: 1456765 - RNA, 19 nt, Artificial Sequence
  Description of Artificial Sequence: Synthetic oligonucleotide
cuuguacuggucccacuug

SEQ ID NO: 1456766 - RNA, 19 nt, Artificial Sequence
  Description of Artificial Sequence: Synthetic oligonucleotide
caucucgggccuucauucg

SEQ ID NO: 1456767 - RNA, 19 nt, Artificial Sequence
  Description of Artificial Sequence: Synthetic oligonucleotide
ugacgaggagggaagucau

SEQ ID NO: 1456768 - RNA, 19 nt, Artificial Sequence
  Description of Artificial Sequence: Synthetic oligonucleotide
ugcgugaccuggaggggcc

SEQ ID NO: 1456769 - RNA, 19 nt, Artificial Sequence
  Description of Artificial Sequence: Synthetic oligonucleotide
cucugcauuuuaucgaaaa

SEQ ID NO: 1456770 - RNA, 19 nt, Artificial Sequence
  Description of Artificial Sequence: Synthetic oligonucleotide
ugaagccguggggaggagg

SEQ ID NO: 1456771 - RNA, 19 nt, Artificial Sequence
  Description of Artificial Sequence: Synthetic oligonucleotide
acgcccacacccuuguacu

SEQ ID NO: 1456772 - RNA, 19 nt, Artificial Sequence
  Description of Artificial Sequence: Synthetic oligonucleotide
cauuaacccugcuggaaga

SEQ ID NO: 1456773 - RNA, 19 nt, Artificial Sequence
  Description of Artificial Sequence: Synthetic oligonucleotide
gggaccgugaggaggaacg

SEQ ID NO: 1456774 - RNA, 19 nt, Artificial Sequence
  Description of Artificial Sequence: Synthetic oligonucleotide
uggccgcucaaaaggguga

SEQ ID NO: 1456775 - RNA, 19 nt, Artificial Sequence
  Description of Artificial Sequence: Synthetic oligonucleotide
uuugccccgaggccaccag

SEQ ID NO: 1456776 - RNA, 19 nt, Artificial Sequence
  Description of Artificial Sequence: Synthetic oligonucleotide
auaggguggccgcucaaaa

SEQ ID NO: 1456777 - RNA, 19 nt, Artificial Sequence
  Description of Artificial Sequence: Synthetic oligonucleotide
cauaagggucguccagggc

SEQ ID NO: 1456778 - RNA, 19 nt, Artificial Sequence
  Description of Artificial Sequence: Synthetic oligonucleotide
ugggaggcgcugaauuaga

SEQ ID NO: 1456779 - RNA, 19 nt, Artificial Sequence
  Description of Artificial Sequence: Synthetic oligonucleotide
gagccuggagucugguaug

SEQ ID NO: 1456780 - RNA, 19 nt, Artificial Sequence
  Description of Artificial Sequence: Synthetic oligonucleotide
cacgcccacacccuuguac

SEQ ID NO: 1456781 - RNA, 19 nt, Artificial Sequence
  Description of Artificial Sequence: Synthetic oligonucleotide
ccauuaacccugcuggaag

SEQ ID NO: 1456782 - RNA, 19 nt, Artificial Sequence
  Description of Artificial Sequence: Synthetic oligonucleotide
uccagagguuuguacucgu

SEQ ID NO: 1456783 - RNA, 19 nt, Artificial Sequence
  Description of Artificial Sequence: Synthetic oligonucleotide
uaauucucauaagggucgu

SEQ ID NO: 1456784 - RNA, 19 nt, Artificial Sequence
  Description of Artificial Sequence: Synthetic oligonucleotide
gagcgugaugaugagcgac

SEQ ID NO: 1456785 - RNA, 19 nt, Artificial Sequence
  Description of Artificial Sequence: Synthetic oligonucleotide
gugacgaggagggaaguca

SEQ ID NO: 1456786 - RNA, 19 nt, Artificial Sequence
  Description of Artificial Sequence: Synthetic oligonucleotide
ggcucggaagaacucguag

SEQ ID NO: 1456787 - RNA, 19 nt, Artificial Sequence
  Description of Artificial Sequence: Synthetic oligonucleotide
ugggcuguagaaggccucc

SEQ ID NO: 1456788 - RNA, 19 nt, Artificial Sequence
  Description of Artificial Sequence: Synthetic oligonucleotide
gaucggcuucggcuucugg

SEQ ID NO: 1456789 - RNA, 19 nt, Artificial Sequence
  Description of Artificial Sequence: Synthetic oligonucleotide
caugugucuugcuuguuua

SEQ ID NO: 1456790 - RNA, 19 nt, Artificial Sequence
  Description of Artificial Sequence: Synthetic oligonucleotide
cuucuccgagccuggaguc

SEQ ID NO: 1456791 - RNA, 19 nt, Artificial Sequence
  Description of Artificial Sequence: Synthetic oligonucleotide
gaacucguagaggccauuc

SEQ ID NO: 1456792 - RNA, 19 nt, Artificial Sequence
  Description of Artificial Sequence: Synthetic oligonucleotide
gucccggacaucuccgccc

SEQ ID NO: 1456793 - RNA, 19 nt, Artificial Sequence
  Description of Artificial Sequence: Synthetic oligonucleotide
ucgugccccaaacguggag

SEQ ID NO: 1456794 - RNA, 19 nt, Artificial Sequence
  Description of Artificial Sequence: Synthetic oligonucleotide
augccaggguguggcaugc

SEQ ID NO: 1456795 - RNA, 19 nt, Artificial Sequence
  Description of Artificial Sequence: Synthetic oligonucleotide
agugucuuauguggugcug

SEQ ID NO: 1456796 - RNA, 19 nt, Artificial Sequence
  Description of Artificial Sequence: Synthetic oligonucleotide
uccgcccuuaauggggucc

SEQ ID NO: 1456797 - RNA, 19 nt, Artificial Sequence
  Description of Artificial Sequence: Synthetic oligonucleotide
gacuucgaggagcgugagc

SEQ ID NO: 1456798 - RNA, 19 nt, Artificial Sequence
  Description of Artificial Sequence: Synthetic oligonucleotide
cuggaggggccgcuguucc

SEQ ID NO: 1456799 - RNA, 19 nt, Artificial Sequence
  Description of Artificial Sequence: Synthetic oligonucleotide
guugcggcgguaauucuca

SEQ ID NO: 1456800 - RNA, 19 nt, Artificial Sequence
  Description of Artificial Sequence: Synthetic oligonucleotide
agccauuaacccugcugga

SEQ ID NO: 1456801 - RNA, 19 nt, Artificial Sequence
  Description of Artificial Sequence: Synthetic oligonucleotide
ucacaaggggagccauuaa

SEQ ID NO: 1456802 - RNA, 19 nt, Artificial Sequence
  Description of Artificial Sequence: Synthetic oligonucleotide
ucgggcaaugaaggaguag

SEQ ID NO: 1456803 - RNA, 19 nt, Artificial Sequence
  Description of Artificial Sequence: Synthetic oligonucleotide
ugguugaugugaggugggc

SEQ ID NO: 1456804 - RNA, 19 nt, Artificial Sequence
  Description of Artificial Sequence: Synthetic oligonucleotide
agggugacgaggagggaag

SEQ ID NO: 1456805 - RNA, 19 nt, Artificial Sequence
  Description of Artificial Sequence: Synthetic oligonucleotide
gaacccaggccagcugcgg

SEQ ID NO: 1456806 - RNA, 19 nt, Artificial Sequence
  Description of Artificial Sequence: Synthetic oligonucleotide
gcggcgguaauucucauaa

SEQ ID NO: 1456807 - RNA, 19 nt, Artificial Sequence
  Description of Artificial Sequence: Synthetic oligonucleotide
ucuuguugcggcgguaauu

SEQ ID NO: 1456808 - RNA, 19 nt, Artificial Sequence
  Description of Artificial Sequence: Synthetic oligonucleotide
ucgaggagcgugagcugga

SEQ ID NO: 1456809 - RNA, 19 nt, Artificial Sequence
  Description of Artificial Sequence: Synthetic oligonucleotide
augugucuugcuuguuuau

SEQ ID NO: 1456810 - RNA, 19 nt, Artificial Sequence
  Description of Artificial Sequence: Synthetic oligonucleotide
uugaugugaggugggcccu

SEQ ID NO: 1456811 - RNA, 19 nt, Artificial Sequence
  Description of Artificial Sequence: Synthetic oligonucleotide
ucggccugucgugggaggg

SEQ ID NO: 1456812 - RNA, 19 nt, Artificial Sequence
  Description of Artificial Sequence: Synthetic oligonucleotide
ugcaugaagcgugguggga

SEQ ID NO: 1456813 - RNA, 19 nt, Artificial Sequence
  Description of Artificial Sequence: Synthetic oligonucleotide
caucuuggcucggaagaac

SEQ ID NO: 1456814 - RNA, 19 nt, Artificial Sequence
  Description of Artificial Sequence: Synthetic oligonucleotide
gguccagagguuuguacuc

SEQ ID NO: 1456815 - RNA, 19 nt, Artificial Sequence
  Description of Artificial Sequence: Synthetic oligonucleotide
guagggcacauuggggacc

SEQ ID NO: 1456816 - RNA, 19 nt, Artificial Sequence
  Description of Artificial Sequence: Synthetic oligonucleotide
cauugaugccagggugugg

SEQ ID NO: 1456817 - RNA, 19 nt, Artificial Sequence
  Description of Artificial Sequence: Synthetic oligonucleotide
uucgugccccaaacgugga

SEQ ID NO: 1456818 - RNA, 19 nt, Artificial Sequence
  Description of Artificial Sequence: Synthetic oligonucleotide
auuaacccugcuggaagau

SEQ ID NO: 1456819 - RNA, 19 nt, Artificial Sequence
  Description of Artificial Sequence: Synthetic oligonucleotide
ggaggcgcugaauuagaac

SEQ ID NO: 1456820 - RNA, 19 nt, Artificial Sequence
  Description of Artificial Sequence: Synthetic oligonucleotide
gguugaugugaggugggcc

SEQ ID NO: 1456821 - RNA, 19 nt, Artificial Sequence
  Description of Artificial Sequence: Synthetic oligonucleotide
agggugggugcucauugau

SEQ ID NO: 1456822 - RNA, 19 nt, Artificial Sequence
  Description of Artificial Sequence: Synthetic oligonucleotide
guggccgcucaaaagggug

SEQ ID NO: 1456823 - RNA, 19 nt, Artificial Sequence
  Description of Artificial Sequence: Synthetic oligonucleotide
aagcguggugggaagcggu

SEQ ID NO: 1456824 - RNA, 19 nt, Artificial Sequence
  Description of Artificial Sequence: Synthetic oligonucleotide
aggaacgugaagacuucga

SEQ ID NO: 1456825 - RNA, 19 nt, Artificial Sequence
  Description of Artificial Sequence: Synthetic oligonucleotide
gccgcuguuccucuucucc

SEQ ID NO: 1456826 - RNA, 19 nt, Artificial Sequence
  Description of Artificial Sequence: Synthetic oligonucleotide
cuagaccuggagcgucgcc

SEQ ID NO: 1456827 - RNA, 19 nt, Artificial Sequence
  Description of Artificial Sequence: Synthetic oligonucleotide
gaccgugaggaggaacgug

SEQ ID NO: 1456828 - RNA, 19 nt, Artificial Sequence
  Description of Artificial Sequence: Synthetic oligonucleotide
gagcgcgagcggcuucugg

SEQ ID NO: 1456829 - RNA, 19 nt, Artificial Sequence
  Description of Artificial Sequence: Synthetic oligonucleotide
uuguugcggcgguaauucu

SEQ ID NO: 1456830 - RNA, 19 nt, Artificial Sequence
  Description of Artificial Sequence: Synthetic oligonucleotide
cgugguugaugugaggugg

SEQ ID NO: 1456831 - RNA, 19 nt, Artificial Sequence
  Description of Artificial Sequence: Synthetic oligonucleotide
aggauaggguggccgcuca

SEQ ID NO: 1456832 - RNA, 19 nt, Artificial Sequence
  Description of Artificial Sequence: Synthetic oligonucleotide
agcccucacuguuccucgg

SEQ ID NO: 1456833 - RNA, 19 nt, Artificial Sequence
  Description of Artificial Sequence: Synthetic oligonucleotide
aagaacucguagaggccau

SEQ ID NO: 1456834 - RNA, 19 nt, Artificial Sequence
  Description of Artificial Sequence: Synthetic oligonucleotide
agacacgucugcacacguc

SEQ ID NO: 1456835 - RNA, 19 nt, Artificial Sequence
  Description of Artificial Sequence: Synthetic oligonucleotide
uucgggcaaugaaggagua

SEQ ID NO: 1456836 - RNA, 19 nt, Artificial Sequence
  Description of Artificial Sequence: Synthetic oligonucleotide
cggggaauaagacuuggac

SEQ ID NO: 1456837 - RNA, 19 nt, Artificial Sequence
  Description of Artificial Sequence: Synthetic oligonucleotide
cugcgugaccuggaggggc

SEQ ID NO: 1456838 - RNA, 19 nt, Artificial Sequence
  Description of Artificial Sequence: Synthetic oligonucleotide
aaagggugacgaggaggga

SEQ ID NO: 1456839 - RNA, 19 nt, Artificial Sequence
  Description of Artificial Sequence: Synthetic oligonucleotide
ucgggccuucauucgggca

SEQ ID NO: 1456840 - RNA, 19 nt, Artificial Sequence
  Description of Artificial Sequence: Synthetic oligonucleotide
ggggucccaucucuggcgg

SEQ ID NO: 1456841 - RNA, 19 nt, Artificial Sequence
  Description of Artificial Sequence: Synthetic oligonucleotide
augugaggugggcccuguc

SEQ ID NO: 1456842 - RNA, 19 nt, Artificial Sequence
  Description of Artificial Sequence: Synthetic oligonucleotide
cucggccugucgugggagg

SEQ ID NO: 1456843 - RNA, 19 nt, Artificial Sequence
  Description of Artificial Sequence: Synthetic oligonucleotide
guaugggaggcgcugaauu

SEQ ID NO: 1456844 - RNA, 19 nt, Artificial Sequence
  Description of Artificial Sequence: Synthetic oligonucleotide
agcgaccucggcucuugga

SEQ ID NO: 1456845 - RNA, 19 nt, Artificial Sequence
  Description of Artificial Sequence: Synthetic oligonucleotide
uggcggggaagucuccuuu

SEQ ID NO: 1456846 - RNA, 19 nt, Artificial Sequence
  Description of Artificial Sequence: Synthetic oligonucleotide
ugcacacgucacagcuaug

SEQ ID NO: 1456847 - RNA, 19 nt, Artificial Sequence
  Description of Artificial Sequence: Synthetic oligonucleotide
cguggagaacucaucucgg

SEQ ID NO: 1456848 - RNA, 19 nt, Artificial Sequence
  Description of Artificial Sequence: Synthetic oligonucleotide
uaacuggcaccagggcucu

SEQ ID NO: 1456849 - RNA, 19 nt, Artificial Sequence
  Description of Artificial Sequence: Synthetic oligonucleotide
ggaauaagacuuggaccug

SEQ ID NO: 1456850 - RNA, 19 nt, Artificial Sequence
  Description of Artificial Sequence: Synthetic oligonucleotide
ccugucgccgcaugugggg

SEQ ID NO: 1456851 - RNA, 19 nt, Artificial Sequence
  Description of Artificial Sequence: Synthetic oligonucleotide
uugccccgaggccaccaga

SEQ ID NO: 1456852 - RNA, 19 nt, Artificial Sequence
  Description of Artificial Sequence: Synthetic oligonucleotide
agcgggaccgugaggagga

SEQ ID NO: 1456853 - RNA, 19 nt, Artificial Sequence
  Description of Artificial Sequence: Synthetic oligonucleotide
ucucgcuggguggcauggg

SEQ ID NO: 1456854 - RNA, 19 nt, Artificial Sequence
  Description of Artificial Sequence: Synthetic oligonucleotide
uucuccgagccuggagucu

SEQ ID NO: 1456855 - RNA, 19 nt, Artificial Sequence
  Description of Artificial Sequence: Synthetic oligonucleotide
gcggggaagucuccuuugg

SEQ ID NO: 1456856 - RNA, 19 nt, Artificial Sequence
  Description of Artificial Sequence: Synthetic oligonucleotide
caaagcgguggaggauagg

SEQ ID NO: 1456857 - RNA, 19 nt, Artificial Sequence
  Description of Artificial Sequence: Synthetic oligonucleotide
accagcauuugauguccuu

SEQ ID NO: 1456858 - RNA, 19 nt, Artificial Sequence
  Description of Artificial Sequence: Synthetic oligonucleotide
gaggauaggguggccgcuc

SEQ ID NO: 1456859 - RNA, 19 nt, Artificial Sequence
  Description of Artificial Sequence: Synthetic oligonucleotide
cuuggaccugcugcgugac

SEQ ID NO: 1456860 - RNA, 19 nt, Artificial Sequence
  Description of Artificial Sequence: Synthetic oligonucleotide
cagcuaugggaaaucuaaa

SEQ ID NO: 1456861 - RNA, 19 nt, Artificial Sequence
  Description of Artificial Sequence: Synthetic oligonucleotide
cuuccuuucgugccccaaa

SEQ ID NO: 1456862 - RNA, 19 nt, Artificial Sequence
  Description of Artificial Sequence: Synthetic oligonucleotide
agacuucgaggagcgugag

SEQ ID NO: 1456863 - RNA, 19 nt, Artificial Sequence
  Description of Artificial Sequence: Synthetic oligonucleotide
uggagcgcgagcggcuucu

SEQ ID NO: 1456864 - RNA, 19 nt, Artificial Sequence
  Description of Artificial Sequence: Synthetic oligonucleotide
caccacgccuguguuaguc

SEQ ID NO: 1456865 - RNA, 19 nt, Artificial Sequence
  Description of Artificial Sequence: Synthetic oligonucleotide
cuugcgccgccuagcccgc

SEQ ID NO: 1456866 - RNA, 19 nt, Artificial Sequence
  Description of Artificial Sequence: Synthetic oligonucleotide
guggcaugcgguggccagg

SEQ ID NO: 1456867 - RNA, 19 nt, Artificial Sequence
  Description of Artificial Sequence: Synthetic oligonucleotide
cuccgagccuggagucugg

SEQ ID NO: 1456868 - RNA, 19 nt, Artificial Sequence
  Description of Artificial Sequence: Synthetic oligonucleotide
cuucggcuucuggaccugg

SEQ ID NO: 1456869 - RNA, 19 nt, Artificial Sequence
  Description of Artificial Sequence: Synthetic oligonucleotide
gaccucggcucuuggaccu

SEQ ID NO: 1456870 - RNA, 19 nt, Artificial Sequence
  Description of Artificial Sequence: Synthetic oligonucleotide
ggguggccgcucaaaaggg

SEQ ID NO: 1456871 - RNA, 19 nt, Artificial Sequence
  Description of Artificial Sequence: Synthetic oligonucleotide
gucaagugucuuauguggu

SEQ ID NO: 1456872 - RNA, 19 nt, Artificial Sequence
  Description of Artificial Sequence: Synthetic oligonucleotide
gcccugucgccgcaugugg

SEQ ID NO: 1456873 - RNA, 19 nt, Artificial Sequence
  Description of Artificial Sequence: Synthetic oligonucleotide
cacagcuaugggaaaucua

SEQ ID NO: 1456874 - RNA, 19 nt, Artificial Sequence
  Description of Artificial Sequence: Synthetic oligonucleotide
gcccuuaaugggguccugg

SEQ ID NO: 1456875 - RNA, 19 nt, Artificial Sequence
  Description of Artificial Sequence: Synthetic oligonucleotide
gaccuggagcgucgccgcc

SEQ ID NO: 1456876 - RNA, 19 nt, Artificial Sequence
  Description of Artificial Sequence: Synthetic oligonucleotide
ggcggggaagucuccuuug

SEQ ID NO: 1456877 - RNA, 19 nt, Artificial Sequence
  Description of Artificial Sequence: Synthetic oligonucleotide
gugccccaaacguggagaa

SEQ ID NO: 1456878 - RNA, 19 nt, Artificial Sequence
  Description of Artificial Sequence: Synthetic oligonucleotide
cugcacacgucacagcuau

SEQ ID NO: 1456879 - RNA, 19 nt, Artificial Sequence
  Description of Artificial Sequence: Synthetic oligonucleotide
aucccaagucagacacguc

SEQ ID NO: 1456880 - RNA, 19 nt, Artificial Sequence
  Description of Artificial Sequence: Synthetic oligonucleotide
gaccgugagcgggaccgug

SEQ ID NO: 1456881 - RNA, 19 nt, Artificial Sequence
  Description of Artificial Sequence: Synthetic oligonucleotide
gucuuauguggugcugaga

SEQ ID NO: 1456882 - RNA, 19 nt, Artificial Sequence
  Description of Artificial Sequence: Synthetic oligonucleotide
gggguggggcuccuagacc

SEQ ID NO: 1456883 - RNA, 19 nt, Artificial Sequence
  Description of Artificial Sequence: Synthetic oligonucleotide
ugccccaaacguggagaac

SEQ ID NO: 1456884 - RNA, 19 nt, Artificial Sequence
  Description of Artificial Sequence: Synthetic oligonucleotide
ccagagguuuguacucgug

SEQ ID NO: 1456885 - RNA, 19 nt, Artificial Sequence
  Description of Artificial Sequence: Synthetic oligonucleotide
acccgcuccaacccaucuu

SEQ ID NO: 1456886 - RNA, 19 nt, Artificial Sequence
  Description of Artificial Sequence: Synthetic oligonucleotide
gcaugaagcguggugggaa

SEQ ID NO: 1456887 - RNA, 19 nt, Artificial Sequence
  Description of Artificial Sequence: Synthetic oligonucleotide
ggcgcugaauuagaaccca

SEQ ID NO: 1456888 - RNA, 19 nt, Artificial Sequence
  Description of Artificial Sequence: Synthetic oligonucleotide
cuccccggggaauaagacu

SEQ ID NO: 1456889 - RNA, 19 nt, Artificial Sequence
  Description of Artificial Sequence: Synthetic oligonucleotide
ccuuucgugccccaaacgu

SEQ ID NO: 1456890 - RNA, 19 nt, Artificial Sequence
  Description of Artificial Sequence: Synthetic oligonucleotide
ccugucgugggaggguggg

SEQ ID NO: 1456891 - RNA, 19 nt, Artificial Sequence
  Description of Artificial Sequence: Synthetic oligonucleotide
uggucccacuugucccgga

SEQ ID NO: 1456892 - RNA, 19 nt, Artificial Sequence
  Description of Artificial Sequence: Synthetic oligonucleotide
cccugucgccgcauguggg

SEQ ID NO: 1456893 - RNA, 19 nt, Artificial Sequence
  Description of Artificial Sequence: Synthetic oligonucleotide
accgugagcgggaccguga

SEQ ID NO: 1456894 - RNA, 19 nt, Artificial Sequence
  Description of Artificial Sequence: Synthetic oligonucleotide
ccgcaucuuggcucggaag

SEQ ID NO: 1456895 - RNA, 19 nt, Artificial Sequence
  Description of Artificial Sequence: Synthetic oligonucleotide
cugucgugggagggugggc

SEQ ID NO: 1456896 - RNA, 19 nt, Artificial Sequence
  Description of Artificial Sequence: Synthetic oligonucleotide
gccccaaacguggagaacu

SEQ ID NO: 1456897 - RNA, 19 nt, Artificial Sequence
  Description of Artificial Sequence: Synthetic oligonucleotide
gguuuguacucgugguccu

SEQ ID NO: 1456898 - RNA, 19 nt, Artificial Sequence
  Description of Artificial Sequence: Synthetic oligonucleotide
cccggggaauaagacuugg

SEQ ID NO: 1456899 - RNA, 19 nt, Artificial Sequence
  Description of Artificial Sequence: Synthetic oligonucleotide
ugcgccgccuagcccgcau

SEQ ID NO: 1456900 - RNA, 19 nt, Artificial Sequence
  Description of Artificial Sequence: Synthetic oligonucleotide
cgaccucggcucuuggacc

SEQ ID NO: 1456901 - RNA, 19 nt, Artificial Sequence
  Description of Artificial Sequence: Synthetic oligonucleotide
gcugcgugaccuggagggg

SEQ ID NO: 1456902 - RNA, 19 nt, Artificial Sequence
  Description of Artificial Sequence: Synthetic oligonucleotide
uugcggcgguaauucucau

SEQ ID NO: 1456903 - RNA, 19 nt, Artificial Sequence
  Description of Artificial Sequence: Synthetic oligonucleotide
agaacucguagaggccauu

SEQ ID NO: 1456904 - RNA, 19 nt, Artificial Sequence
  Description of Artificial Sequence: Synthetic oligonucleotide
gccauuaacccugcuggaa

SEQ ID NO: 1456905 - RNA, 19 nt, Artificial Sequence
  Description of Artificial Sequence: Synthetic oligonucleotide
cuguuccucggccugucgu

SEQ ID NO: 1456906 - RNA, 19 nt, Artificial Sequence
  Description of Artificial Sequence: Synthetic oligonucleotide
cucaucucgggccuucauu

SEQ ID NO: 1456907 - RNA, 19 nt, Artificial Sequence
  Description of Artificial Sequence: Synthetic oligonucleotide
ggagcgucgccgccucccc

SEQ ID NO: 1456908 - RNA, 19 nt, Artificial Sequence
  Description of Artificial Sequence: Synthetic oligonucleotide
cgguaauucucauaagggu

SEQ ID NO: 1456909 - RNA, 19 nt, Artificial Sequence
  Description of Artificial Sequence: Synthetic oligonucleotide
cgcucaaaagggugacgag

SEQ ID NO: 1456910 - RNA, 19 nt, Artificial Sequence
  Description of Artificial Sequence: Synthetic oligonucleotide
gccgcucaaaagggugacg

SEQ ID NO: 1456911 - RNA, 19 nt, Artificial Sequence
  Description of Artificial Sequence: Synthetic oligonucleotide
gcccuugcgccgccuagcc

SEQ ID NO: 1456912 - RNA, 19 nt, Artificial Sequence
  Description of Artificial Sequence: Synthetic oligonucleotide
ccgcucaaaagggugacga

SEQ ID NO: 1456913 - RNA, 19 nt, Artificial Sequence
  Description of Artificial Sequence: Synthetic oligonucleotide
ccgccuagcccgcaucuug

SEQ ID NO: 1456914 - RNA, 19 nt, Artificial Sequence
  Description of Artificial Sequence: Synthetic oligonucleotide
gagcgggaccgggaccgug

SEQ ID NO: 1456915 - RNA, 19 nt, Artificial Sequence
  Description of Artificial Sequence: Synthetic oligonucleotide
ccaaacguggagaacucau

SEQ ID NO: 1456916 - RNA, 19 nt, Artificial Sequence
  Description of Artificial Sequence: Synthetic oligonucleotide
ccccaaacguggagaacuc

SEQ ID NO: 1456917 - RNA, 19 nt, Artificial Sequence
  Description of Artificial Sequence: Synthetic oligonucleotide
cuuugccccgaggccacca

SEQ ID NO: 1456918 - RNA, 19 nt, Artificial Sequence
  Description of Artificial Sequence: Synthetic oligonucleotide
ggcccugucgccgcaugug

SEQ ID NO: 1456919 - RNA, 19 nt, Artificial Sequence
  Description of Artificial Sequence: Synthetic oligonucleotide
cuggagcgcgagcggcuuc

SEQ ID NO: 1456920 - RNA, 19 nt, Artificial Sequence
  Description of Artificial Sequence: Synthetic oligonucleotide
cagacacgucugcacacgu

SEQ ID NO: 1456921 - RNA, 19 nt, Artificial Sequence
  Description of Artificial Sequence: Synthetic oligonucleotide
gcucuuguugcggcgguaa

SEQ ID NO: 1456922 - RNA, 19 nt, Artificial Sequence
  Description of Artificial Sequence: Synthetic oligonucleotide
ggccgcucaaaagggugac

SEQ ID NO: 1456923 - RNA, 19 nt, Artificial Sequence
  Description of Artificial Sequence: Synthetic oligonucleotide
ccuagaccuggagcgucgc

SEQ ID NO: 1456924 - RNA, 19 nt, Artificial Sequence
  Description of Artificial Sequence: Synthetic oligonucleotide
gcguggugggaagcgguug

SEQ ID NO: 1456925 - RNA, 19 nt, Artificial Sequence
  Description of Artificial Sequence: Synthetic oligonucleotide
accucggcucuuggaccug

SEQ ID NO: 1456926 - RNA, 19 nt, Artificial Sequence
  Description of Artificial Sequence: Synthetic oligonucleotide
ggcccuugcgccgccuagc

SEQ ID NO: 1456927 - RNA, 19 nt, Artificial Sequence
  Description of Artificial Sequence: Synthetic oligonucleotide
cuuuuacgaaaggcuuuau

SEQ ID NO: 1456928 - RNA, 19 nt, Artificial Sequence
  Description of Artificial Sequence: Synthetic oligonucleotide
ggugggcuguagaaggccu

SEQ ID NO: 1456929 - RNA, 19 nt, Artificial Sequence
  Description of Artificial Sequence: Synthetic oligonucleotide
ccggggaauaagacuugga

SEQ ID NO: 1456930 - RNA, 19 nt, Artificial Sequence
  Description of Artificial Sequence: Synthetic oligonucleotide
gucccaucucuggcgggga

SEQ ID NO: 1456931 - RNA, 19 nt, Artificial Sequence
  Description of Artificial Sequence: Synthetic oligonucleotide
ccccggggaauaagacuug

SEQ ID NO: 1456932 - RNA, 19 nt, Artificial Sequence
  Description of Artificial Sequence: Synthetic oligonucleotide
ggauaggguggccgcucaa

SEQ ID NO: 1456933 - RNA, 19 nt, Artificial Sequence
  Description of Artificial Sequence: Synthetic oligonucleotide
ggggagccauuaacccugc

SEQ ID NO: 1456934 - RNA, 19 nt, Artificial Sequence
  Description of Artificial Sequence: Synthetic oligonucleotide
gccugucgugggagggugg

SEQ ID NO: 1456935 - RNA, 19 nt, Artificial Sequence
  Description of Artificial Sequence: Synthetic oligonucleotide
cgugaugaugagcgaccuc

SEQ ID NO: 1456936 - RNA, 19 nt, Artificial Sequence
  Description of Artificial Sequence: Synthetic oligonucleotide
guggcaggcggaugucuuu

SEQ ID NO: 1456937 - RNA, 19 nt, Artificial Sequence
  Description of Artificial Sequence: Synthetic oligonucleotide
ggaggagcgugaucggcuu

SEQ ID NO: 1456938 - RNA, 19 nt, Artificial Sequence
  Description of Artificial Sequence: Synthetic oligonucleotide
gcgugaucggcuucggcuu

SEQ ID NO: 1456939 - RNA, 19 nt, Artificial Sequence
  Description of Artificial Sequence: Synthetic oligonucleotide
agccucucgcuggguggca

SEQ ID NO: 1456940 - RNA, 19 nt, Artificial Sequence
  Description of Artificial Sequence: Synthetic oligonucleotide
agcccgcaucuuggcucgg

SEQ ID NO: 1456941 - RNA, 19 nt, Artificial Sequence
  Description of Artificial Sequence: Synthetic oligonucleotide
ggccacgcccacacccuug

SEQ ID NO: 1456942 - RNA, 19 nt, Artificial Sequence
  Description of Artificial Sequence: Synthetic oligonucleotide
cggcgguaauucucauaag

SEQ ID NO: 1456943 - RNA, 19 nt, Artificial Sequence
  Description of Artificial Sequence: Synthetic oligonucleotide
cccaaacguggagaacuca

SEQ ID NO: 1456944 - RNA, 19 nt, Artificial Sequence
  Description of Artificial Sequence: Synthetic oligonucleotide
aggggccgcuguuccucuu

SEQ ID NO: 1456945 - RNA, 19 nt, Artificial Sequence
  Description of Artificial Sequence: Synthetic oligonucleotide
ggccaaagucagggugcug

SEQ ID NO: 1456946 - RNA, 19 nt, Artificial Sequence
  Description of Artificial Sequence: Synthetic oligonucleotide
ggaggauaggguggccgcu

SEQ ID NO: 1456947 - RNA, 19 nt, Artificial Sequence
  Description of Artificial Sequence: Synthetic oligonucleotide
gguggccgcucaaaagggu

SEQ ID NO: 1456948 - RNA, 19 nt, Artificial Sequence
  Description of Artificial Sequence: Synthetic oligonucleotide
ccgugaggaggaacgugaa

SEQ ID NO: 1456949 - RNA, 19 nt, Artificial Sequence
  Description of Artificial Sequence: Synthetic oligonucleotide
gcgugaugaugagcgaccu

SEQ ID NO: 1456950 - RNA, 19 nt, Artificial Sequence
  Description of Artificial Sequence: Synthetic oligonucleotide
uugcgccgccuagcccgca

SEQ ID NO: 1456951 - RNA, 19 nt, Artificial Sequence
  Description of Artificial Sequence: Synthetic oligonucleotide
cgaggagcgugagcuggag

SEQ ID NO: 1456952 - RNA, 19 nt, Artificial Sequence
  Description of Artificial Sequence: Synthetic oligonucleotide
ccgaggccaccagacccgc

SEQ ID NO: 1456953 - RNA, 19 nt, Artificial Sequence
  Description of Artificial Sequence: Synthetic oligonucleotide
ggaccgugaggaggaacgu

SEQ ID NO: 1456954 - RNA, 19 nt, Artificial Sequence
  Description of Artificial Sequence: Synthetic oligonucleotide
ccuagcccgcaucuuggcu

SEQ ID NO: 1456955 - RNA, 19 nt, Artificial Sequence
  Description of Artificial Sequence: Synthetic oligonucleotide
gcuccuagaccuggagcgu

SEQ ID NO: 1456956 - RNA, 19 nt, Artificial Sequence
  Description of Artificial Sequence: Synthetic oligonucleotide
gcgccgccuagcccgcauc

SEQ ID NO: 1456957 - RNA, 19 nt, Artificial Sequence
  Description of Artificial Sequence: Synthetic oligonucleotide
ccggacaucuccgcccuua

SEQ ID NO: 1456958 - RNA, 19 nt, Artificial Sequence
  Description of Artificial Sequence: Synthetic oligonucleotide
ggcuggccauugaagccgu

SEQ ID NO: 1456959 - RNA, 19 nt, Artificial Sequence
  Description of Artificial Sequence: Synthetic oligonucleotide
gcccgcaucuuggcucgga

SEQ ID NO: 1456960 - RNA, 19 nt, Artificial Sequence
  Description of Artificial Sequence: Synthetic oligonucleotide
gccgccuccccggggaaua

SEQ ID NO: 1456961 - RNA, 19 nt, Artificial Sequence
  Description of Artificial Sequence: Synthetic oligonucleotide
ccgagccuggagucuggua

SEQ ID NO: 1456962 - RNA, 19 nt, Artificial Sequence
  Description of Artificial Sequence: Synthetic oligonucleotide
cggacaucuccgcccuuaa

SEQ ID NO: 1456963 - RNA, 19 nt, Artificial Sequence
  Description of Artificial Sequence: Synthetic oligonucleotide
gcgugagcuggagcgugau

SEQ ID NO: 1456964 - RNA, 19 nt, Artificial Sequence
  Description of Artificial Sequence: Synthetic oligonucleotide
ccgcccuuaaugggguccu

SEQ ID NO: 1456965 - RNA, 19 nt, Artificial Sequence
  Description of Artificial Sequence: Synthetic oligonucleotide
cgccgccuagcccgcaucu

SEQ ID NO: 1456966 - RNA, 19 nt, Artificial Sequence
  Description of Artificial Sequence: Synthetic oligonucleotide
gccgccuagcccgcaucuu

SEQ ID NO: 1456967 - RNA, 19 nt, Artificial Sequence
  Description of Artificial Sequence: Synthetic oligonucleotide
ccgccuccccggggaauaa

SEQ ID NO: 1456968 - RNA, 19 nt, Artificial Sequence
  Description of Artificial Sequence: Synthetic oligonucleotide
cggccugucgugggagggu

SEQ ID NO: 1456969 - RNA, 19 nt, Artificial Sequence
  Description of Artificial Sequence: Synthetic oligonucleotide
auaauuauaaaguugaagg

SEQ ID NO: 1456970 - RNA, 19 nt, Artificial Sequence
  Description of Artificial Sequence: Synthetic oligonucleotide
aaaucuauuauacaucucu

SEQ ID NO: 1456971 - RNA, 19 nt, Artificial Sequence
  Description of Artificial Sequence: Synthetic oligonucleotide
uaagauagaaguuaggucu

SEQ ID NO: 1456972 - RNA, 19 nt, Artificial Sequence
  Description of Artificial Sequence: Synthetic oligonucleotide
uacaguugaaacaacaucc

SEQ ID NO: 1456973 - RNA, 19 nt, Artificial Sequence
  Description of Artificial Sequence: Synthetic oligonucleotide
acauauaacucacucauac

SEQ ID NO: 1456974 - RNA, 19 nt, Artificial Sequence
  Description of Artificial Sequence: Synthetic oligonucleotide
aaaggguuggaauagaaga

SEQ ID NO: 1456975 - RNA, 19 nt, Artificial Sequence
  Description of Artificial Sequence: Synthetic oligonucleotide
aaauaucaauuacaugcgc

SEQ ID NO: 1456976 - RNA, 19 nt, Artificial Sequence
  Description of Artificial Sequence: Synthetic oligonucleotide
ucaauuuggguccagagca

SEQ ID NO: 1456977 - RNA, 19 nt, Artificial Sequence
  Description of Artificial Sequence: Synthetic oligonucleotide
uauugcacaaaguuguccg

SEQ ID NO: 1456978 - RNA, 19 nt, Artificial Sequence
  Description of Artificial Sequence: Synthetic oligonucleotide
uacaauacauggcugagag

SEQ ID NO: 1456979 - RNA, 19 nt, Artificial Sequence
  Description of Artificial Sequence: Synthetic oligonucleotide
auggauuuacaguugaaac

SEQ ID NO: 1456980 - RNA, 19 nt, Artificial Sequence
  Description of Artificial Sequence: Synthetic oligonucleotide
uaauuauaaaguugaaggc

SEQ ID NO: 1456981 - RNA, 19 nt, Artificial Sequence
  Description of Artificial Sequence: Synthetic oligonucleotide
ugagaaaauacaaacuaga

SEQ ID NO: 1456982 - RNA, 19 nt, Artificial Sequence
  Description of Artificial Sequence: Synthetic oligonucleotide
aacucaaacucuuaagaug

SEQ ID NO: 1456983 - RNA, 19 nt, Artificial Sequence
  Description of Artificial Sequence: Synthetic oligonucleotide
uuuaugggaagguagaacu

SEQ ID NO: 1456984 - RNA, 19 nt, Artificial Sequence
  Description of Artificial Sequence: Synthetic oligonucleotide
agucuuaccucucuaagac

SEQ ID NO: 1456985 - RNA, 19 nt, Artificial Sequence
  Description of Artificial Sequence: Synthetic oligonucleotide
uacaacacuauaauuauaa

SEQ ID NO: 1456986 - RNA, 19 nt, Artificial Sequence
  Description of Artificial Sequence: Synthetic oligonucleotide
uggaauugcugguagaggg

SEQ ID NO: 1456987 - RNA, 19 nt, Artificial Sequence
  Description of Artificial Sequence: Synthetic oligonucleotide
aucuacaucguccuacugc

SEQ ID NO: 1456988 - RNA, 19 nt, Artificial Sequence
  Description of Artificial Sequence: Synthetic oligonucleotide
aaugagucauguuaugaug

SEQ ID NO: 1456989 - RNA, 19 nt, Artificial Sequence
  Description of Artificial Sequence: Synthetic oligonucleotide
caccuuagcaacuuuaugg

SEQ ID NO: 1456990 - RNA, 19 nt, Artificial Sequence
  Description of Artificial Sequence: Synthetic oligonucleotide
uaucaagccacacagcuca

SEQ ID NO: 1456991 - RNA, 19 nt, Artificial Sequence
  Description of Artificial Sequence: Synthetic oligonucleotide
gauacuugccacaacaucc

SEQ ID NO: 1456992 - RNA, 19 nt, Artificial Sequence
  Description of Artificial Sequence: Synthetic oligonucleotide
gguaauguggaauugcugg

SEQ ID NO: 1456993 - RNA, 19 nt, Artificial Sequence
  Description of Artificial Sequence: Synthetic oligonucleotide
auuauaaaguugaaggcac

SEQ ID NO: 1456994 - RNA, 19 nt, Artificial Sequence
  Description of Artificial Sequence: Synthetic oligonucleotide
uacaucucuauuauuaacu

SEQ ID NO: 1456995 - RNA, 19 nt, Artificial Sequence
  Description of Artificial Sequence: Synthetic oligonucleotide
uuaucaaaaccacaucggc

SEQ ID NO: 1456996 - RNA, 19 nt, Artificial Sequence
  Description of Artificial Sequence: Synthetic oligonucleotide
uucauguucaaucauggaa

SEQ ID NO: 1456997 - RNA, 19 nt, Artificial Sequence
  Description of Artificial Sequence: Synthetic oligonucleotide
aaagucuuaccucucuaag

SEQ ID NO: 1456998 - RNA, 19 nt, Artificial Sequence
  Description of Artificial Sequence: Synthetic oligonucleotide
cacaacaaggguaaugugg

SEQ ID NO: 1456999 - RNA, 19 nt, Artificial Sequence
  Description of Artificial Sequence: Synthetic oligonucleotide
ucagcaaacaccuuaguaa

SEQ ID NO: 1457000 - RNA, 19 nt, Artificial Sequence
  Description of Artificial Sequence: Synthetic oligonucleotide
acaacauccaaagaacccc

SEQ ID NO: 1457001 - RNA, 19 nt, Artificial Sequence
  Description of Artificial Sequence: Synthetic oligonucleotide
aauugucaccaauacagca

SEQ ID NO: 1457002 - RNA, 19 nt, Artificial Sequence
  Description of Artificial Sequence: Synthetic oligonucleotide
uggaugauuuaacacagug

SEQ ID NO: 1457003 - RNA, 19 nt, Artificial Sequence
  Description of Artificial Sequence: Synthetic oligonucleotide
uagaaguuaggucuuuucc

SEQ ID NO: 1457004 - RNA, 19 nt, Artificial Sequence
  Description of Artificial Sequence: Synthetic oligonucleotide
aauguggaauugcugguag

SEQ ID NO: 1457005 - RNA, 19 nt, Artificial Sequence
  Description of Artificial Sequence: Synthetic oligonucleotide
aggguugcaaaaccaaacc

SEQ ID NO: 1457006 - RNA, 19 nt, Artificial Sequence
  Description of Artificial Sequence: Synthetic oligonucleotide
uauuauacaucucuauuau

SEQ ID NO: 1457007 - RNA, 19 nt, Artificial Sequence
  Description of Artificial Sequence: Synthetic oligonucleotide
auucgaauccucuuaacug

SEQ ID NO: 1457008 - RNA, 19 nt, Artificial Sequence
  Description of Artificial Sequence: Synthetic oligonucleotide
cuauucucaauuugggucc

SEQ ID NO: 1457009 - RNA, 19 nt, Artificial Sequence
  Description of Artificial Sequence: Synthetic oligonucleotide
ucauguucaaucauggaau

SEQ ID NO: 1457010 - RNA, 19 nt, Artificial Sequence
  Description of Artificial Sequence: Synthetic oligonucleotide
guuggaauagaagaaaccc

SEQ ID NO: 1457011 - RNA, 19 nt, Artificial Sequence
  Description of Artificial Sequence: Synthetic oligonucleotide
aauuacaugcgcaugagaa

SEQ ID NO: 1457012 - RNA, 19 nt, Artificial Sequence
  Description of Artificial Sequence: Synthetic oligonucleotide
agucauguuaugaugggcc

SEQ ID NO: 1457013 - RNA, 19 nt, Artificial Sequence
  Description of Artificial Sequence: Synthetic oligonucleotide
ucagaacuacuucuaagcc

SEQ ID NO: 1457014 - RNA, 19 nt, Artificial Sequence
  Description of Artificial Sequence: Synthetic oligonucleotide
aaggguaauguggaauugc

SEQ ID NO: 1457015 - RNA, 19 nt, Artificial Sequence
  Description of Artificial Sequence: Synthetic oligonucleotide
accuuagcaacuuuauggg

SEQ ID NO: 1457016 - RNA, 19 nt, Artificial Sequence
  Description of Artificial Sequence: Synthetic oligonucleotide
auauaacucacucauacuu

SEQ ID NO: 1457017 - RNA, 19 nt, Artificial Sequence
  Description of Artificial Sequence: Synthetic oligonucleotide
aagcccauagauuucagaa

SEQ ID NO: 1457018 - RNA, 19 nt, Artificial Sequence
  Description of Artificial Sequence: Synthetic oligonucleotide
ucuaaccaaaguuuuacaa

SEQ ID NO: 1457019 - RNA, 19 nt, Artificial Sequence
  Description of Artificial Sequence: Synthetic oligonucleotide
ucuacaucguccuacugca

SEQ ID NO: 1457020 - RNA, 19 nt, Artificial Sequence
  Description of Artificial Sequence: Synthetic oligonucleotide
acuucuauucucaauuugg

SEQ ID NO: 1457021 - RNA, 19 nt, Artificial Sequence
  Description of Artificial Sequence: Synthetic oligonucleotide
auagauuucagaaugugga

SEQ ID NO: 1457022 - RNA, 19 nt, Artificial Sequence
  Description of Artificial Sequence: Synthetic oligonucleotide
ccugagaagcaauagaucg

SEQ ID NO: 1457023 - RNA, 19 nt, Artificial Sequence
  Description of Artificial Sequence: Synthetic oligonucleotide
uaucaaaaccacaucggcu

SEQ ID NO: 1457024 - RNA, 19 nt, Artificial Sequence
  Description of Artificial Sequence: Synthetic oligonucleotide
aacuucuauucucaauuug

SEQ ID NO: 1457025 - RNA, 19 nt, Artificial Sequence
  Description of Artificial Sequence: Synthetic oligonucleotide
cuugucauaaguugguuuc

SEQ ID NO: 1457026 - RNA, 19 nt, Artificial Sequence
  Description of Artificial Sequence: Synthetic oligonucleotide
uaaccaaaguuuuacaaua

SEQ ID NO: 1457027 - RNA, 19 nt, Artificial Sequence
  Description of Artificial Sequence: Synthetic oligonucleotide
aaaauugauucgaauccuc

SEQ ID NO: 1457028 - RNA, 19 nt, Artificial Sequence
  Description of Artificial Sequence: Synthetic oligonucleotide
aagaaccccaaauaacaca

SEQ ID NO: 1457029 - RNA, 19 nt, Artificial Sequence
  Description of Artificial Sequence: Synthetic oligonucleotide
auagaaguuaggucuuuuc

SEQ ID NO: 1457030 - RNA, 19 nt, Artificial Sequence
  Description of Artificial Sequence: Synthetic oligonucleotide
cuaagauagaaguuagguc

SEQ ID NO: 1457031 - RNA, 19 nt, Artificial Sequence
  Description of Artificial Sequence: Synthetic oligonucleotide
gggacaauagauuuugucc

SEQ ID NO: 1457032 - RNA, 19 nt, Artificial Sequence
  Description of Artificial Sequence: Synthetic oligonucleotide
agaaguuaggucuuuucca

SEQ ID NO: 1457033 - RNA, 19 nt, Artificial Sequence
  Description of Artificial Sequence: Synthetic oligonucleotide
aacucuuaagauggcauag

SEQ ID NO: 1457034 - RNA, 19 nt, Artificial Sequence
  Description of Artificial Sequence: Synthetic oligonucleotide
uuagcaacuuuaugggaag

SEQ ID NO: 1457035 - RNA, 19 nt, Artificial Sequence
  Description of Artificial Sequence: Synthetic oligonucleotide
uccaacauuugccaucgcc

SEQ ID NO: 1457036 - RNA, 19 nt, Artificial Sequence
  Description of Artificial Sequence: Synthetic oligonucleotide
ugagaagcaauagaucgag

SEQ ID NO: 1457037 - RNA, 19 nt, Artificial Sequence
  Description of Artificial Sequence: Synthetic oligonucleotide
cuuaguaaugccaaccuga

SEQ ID NO: 1457038 - RNA, 19 nt, Artificial Sequence
  Description of Artificial Sequence: Synthetic oligonucleotide
aagucuuaccucucuaaga

SEQ ID NO: 1457039 - RNA, 19 nt, Artificial Sequence
  Description of Artificial Sequence: Synthetic oligonucleotide
agggacaauagauuuuguc

SEQ ID NO: 1457040 - RNA, 19 nt, Artificial Sequence
  Description of Artificial Sequence: Synthetic oligonucleotide
auugcacaaaguuguccgc

SEQ ID NO: 1457041 - RNA, 19 nt, Artificial Sequence
  Description of Artificial Sequence: Synthetic oligonucleotide
aaguacuacagaaacagau

SEQ ID NO: 1457042 - RNA, 19 nt, Artificial Sequence
  Description of Artificial Sequence: Synthetic oligonucleotide
agaaggucauuccuuauca

SEQ ID NO: 1457043 - RNA, 19 nt, Artificial Sequence
  Description of Artificial Sequence: Synthetic oligonucleotide
aauagaucgagcugucuua

SEQ ID NO: 1457044 - RNA, 19 nt, Artificial Sequence
  Description of Artificial Sequence: Synthetic oligonucleotide
uucgaauccucuuaacugu

SEQ ID NO: 1457045 - RNA, 19 nt, Artificial Sequence
  Description of Artificial Sequence: Synthetic oligonucleotide
uggauucuaaccaaaguuu

SEQ ID NO: 1457046 - RNA, 19 nt, Artificial Sequence
  Description of Artificial Sequence: Synthetic oligonucleotide
aauagcaccuucaucaaaa

SEQ ID NO: 1457047 - RNA, 19 nt, Artificial Sequence
  Description of Artificial Sequence: Synthetic oligonucleotide
uugacaagucgauacuugc

SEQ ID NO: 1457048 - RNA, 19 nt, Artificial Sequence
  Description of Artificial Sequence: Synthetic oligonucleotide
aaguugguuuccuguagag

SEQ ID NO: 1457049 - RNA, 19 nt, Artificial Sequence
  Description of Artificial Sequence: Synthetic oligonucleotide
ugagucauguuaugauggg

SEQ ID NO: 1457050 - RNA, 19 nt, Artificial Sequence
  Description of Artificial Sequence: Synthetic oligonucleotide
uauuauuaacuguuucuuc

SEQ ID NO: 1457051 - RNA, 19 nt, Artificial Sequence
  Description of Artificial Sequence: Synthetic oligonucleotide
aucaucuacaucguccuac

SEQ ID NO: 1457052 - RNA, 19 nt, Artificial Sequence
  Description of Artificial Sequence: Synthetic oligonucleotide
ucuccuaccauugcuaccc

SEQ ID NO: 1457053 - RNA, 19 nt, Artificial Sequence
  Description of Artificial Sequence: Synthetic oligonucleotide
ucaucaauugucaccaaua

SEQ ID NO: 1457054 - RNA, 19 nt, Artificial Sequence
  Description of Artificial Sequence: Synthetic oligonucleotide
uuccuugacaagucgauac

SEQ ID NO: 1457055 - RNA, 19 nt, Artificial Sequence
  Description of Artificial Sequence: Synthetic oligonucleotide
gagucaaugagucauguua

SEQ ID NO: 1457056 - RNA, 19 nt, Artificial Sequence
  Description of Artificial Sequence: Synthetic oligonucleotide
uucuagguuaauagcaccu

SEQ ID NO: 1457057 - RNA, 19 nt, Artificial Sequence
  Description of Artificial Sequence: Synthetic oligonucleotide
uuuacaauacauggcugag

SEQ ID NO: 1457058 - RNA, 19 nt, Artificial Sequence
  Description of Artificial Sequence: Synthetic oligonucleotide
uuaacacagugaaacuuga

SEQ ID NO: 1457059 - RNA, 19 nt, Artificial Sequence
  Description of Artificial Sequence: Synthetic oligonucleotide
uguggaauugcugguagag

SEQ ID NO: 1457060 - RNA, 19 nt, Artificial Sequence
  Description of Artificial Sequence: Synthetic oligonucleotide
ucucaauuuggguccagag

SEQ ID NO: 1457061 - RNA, 19 nt, Artificial Sequence
  Description of Artificial Sequence: Synthetic oligonucleotide
auaaguugguuuccuguag

SEQ ID NO: 1457062 - RNA, 19 nt, Artificial Sequence
  Description of Artificial Sequence: Synthetic oligonucleotide
uuagagcaaagacaaaauu

SEQ ID NO: 1457063 - RNA, 19 nt, Artificial Sequence
  Description of Artificial Sequence: Synthetic oligonucleotide
guacuacagaaacagauga

SEQ ID NO: 1457064 - RNA, 19 nt, Artificial Sequence
  Description of Artificial Sequence: Synthetic oligonucleotide
uucggcagaaauaucaauu

SEQ ID NO: 1457065 - RNA, 19 nt, Artificial Sequence
  Description of Artificial Sequence: Synthetic oligonucleotide
aaucauggaaucaucuaca

SEQ ID NO: 1457066 - RNA, 19 nt, Artificial Sequence
  Description of Artificial Sequence: Synthetic oligonucleotide
uggcaauuccaacauuugc

SEQ ID NO: 1457067 - RNA, 19 nt, Artificial Sequence
  Description of Artificial Sequence: Synthetic oligonucleotide
gagaaaaggguuggaauag

SEQ ID NO: 1457068 - RNA, 19 nt, Artificial Sequence
  Description of Artificial Sequence: Synthetic oligonucleotide
auuccaacauuugccaucg

SEQ ID NO: 1457069 - RNA, 19 nt, Artificial Sequence
  Description of Artificial Sequence: Synthetic oligonucleotide
uugcaaaaccaaaccaaug

SEQ ID NO: 1457070 - RNA, 19 nt, Artificial Sequence
  Description of Artificial Sequence: Synthetic oligonucleotide
aauugauucgaauccucuu

SEQ ID NO: 1457071 - RNA, 19 nt, Artificial Sequence
  Description of Artificial Sequence: Synthetic oligonucleotide
aauuccaaccagauuauaa

SEQ ID NO: 1457072 - RNA, 19 nt, Artificial Sequence
  Description of Artificial Sequence: Synthetic oligonucleotide
ucaaugagucauguuauga

SEQ ID NO: 1457073 - RNA, 19 nt, Artificial Sequence
  Description of Artificial Sequence: Synthetic oligonucleotide
cucaauuuggguccagagc

SEQ ID NO: 1457074 - RNA, 19 nt, Artificial Sequence
  Description of Artificial Sequence: Synthetic oligonucleotide
uggucuaaaauagaguuua

SEQ ID NO: 1457075 - RNA, 19 nt, Artificial Sequence
  Description of Artificial Sequence: Synthetic oligonucleotide
uuauaaaguugaaggcaca

SEQ ID NO: 1457076 - RNA, 19 nt, Artificial Sequence
  Description of Artificial Sequence: Synthetic oligonucleotide
agaucgagcugucuuacug

SEQ ID NO: 1457077 - RNA, 19 nt, Artificial Sequence
  Description of Artificial Sequence: Synthetic oligonucleotide
uaaguugguuuccuguaga

SEQ ID NO: 1457078 - RNA, 19 nt, Artificial Sequence
  Description of Artificial Sequence: Synthetic oligonucleotide
uguucaaucauggaaucau

SEQ ID NO: 1457079 - RNA, 19 nt, Artificial Sequence
  Description of Artificial Sequence: Synthetic oligonucleotide
ugaaggcacaucuucggca

SEQ ID NO: 1457080 - RNA, 19 nt, Artificial Sequence
  Description of Artificial Sequence: Synthetic oligonucleotide
uuacaugcgcaugagaaaa

SEQ ID NO: 1457081 - RNA, 19 nt, Artificial Sequence
  Description of Artificial Sequence: Synthetic oligonucleotide
aaauugauucgaauccucu

SEQ ID NO: 1457082 - RNA, 19 nt, Artificial Sequence
  Description of Artificial Sequence: Synthetic oligonucleotide
aaacucuuaagauggcaua

SEQ ID NO: 1457083 - RNA, 19 nt, Artificial Sequence
  Description of Artificial Sequence: Synthetic oligonucleotide
uucuauucucaauuugggu

SEQ ID NO: 1457084 - RNA, 19 nt, Artificial Sequence
  Description of Artificial Sequence: Synthetic oligonucleotide
acaauacauggcugagagc

SEQ ID NO: 1457085 - RNA, 19 nt, Artificial Sequence
  Description of Artificial Sequence: Synthetic oligonucleotide
cucuuaacugucuuccuug

SEQ ID NO: 1457086 - RNA, 19 nt, Artificial Sequence
  Description of Artificial Sequence: Synthetic oligonucleotide
caucaauugucaccaauac

SEQ ID NO: 1457087 - RNA, 19 nt, Artificial Sequence
  Description of Artificial Sequence: Synthetic oligonucleotide
auugauucgaauccucuua

SEQ ID NO: 1457088 - RNA, 19 nt, Artificial Sequence
  Description of Artificial Sequence: Synthetic oligonucleotide
ccagauuauaaauuagagc

SEQ ID NO: 1457089 - RNA, 19 nt, Artificial Sequence
  Description of Artificial Sequence: Synthetic oligonucleotide
acuggaugauuuaacacag

SEQ ID NO: 1457090 - RNA, 19 nt, Artificial Sequence
  Description of Artificial Sequence: Synthetic oligonucleotide
cauugauuccaucuccuac

SEQ ID NO: 1457091 - RNA, 19 nt, Artificial Sequence
  Description of Artificial Sequence: Synthetic oligonucleotide
uguuuuggauucuaaccaa

SEQ ID NO: 1457092 - RNA, 19 nt, Artificial Sequence
  Description of Artificial Sequence: Synthetic oligonucleotide
ucuaagcccauagauuuca

SEQ ID NO: 1457093 - RNA, 19 nt, Artificial Sequence
  Description of Artificial Sequence: Synthetic oligonucleotide
uugauucgaauccucuuaa

SEQ ID NO: 1457094 - RNA, 19 nt, Artificial Sequence
  Description of Artificial Sequence: Synthetic oligonucleotide
cuuagcaacuuuaugggaa

SEQ ID NO: 1457095 - RNA, 19 nt, Artificial Sequence
  Description of Artificial Sequence: Synthetic oligonucleotide
aacuuuaugggaagguaga

SEQ ID NO: 1457096 - RNA, 19 nt, Artificial Sequence
  Description of Artificial Sequence: Synthetic oligonucleotide
ucuccagucaucagaacua

SEQ ID NO: 1457097 - RNA, 19 nt, Artificial Sequence
  Description of Artificial Sequence: Synthetic oligonucleotide
ucaccuuagcaacuuuaug

SEQ ID NO: 1457098 - RNA, 19 nt, Artificial Sequence
  Description of Artificial Sequence: Synthetic oligonucleotide
aguugaaggcacaucuucg

SEQ ID NO: 1457099 - RNA, 19 nt, Artificial Sequence
  Description of Artificial Sequence: Synthetic oligonucleotide
caauugucaccaauacagc

SEQ ID NO: 1457100 - RNA, 19 nt, Artificial Sequence
  Description of Artificial Sequence: Synthetic oligonucleotide
aguacuacagaaacagaug

SEQ ID NO: 1457101 - RNA, 19 nt, Artificial Sequence
  Description of Artificial Sequence: Synthetic oligonucleotide
uucuaaccaaaguuuuaca

SEQ ID NO: 1457102 - RNA, 19 nt, Artificial Sequence
  Description of Artificial Sequence: Synthetic oligonucleotide
uggggaacuucuauucuca

SEQ ID NO: 1457103 - RNA, 19 nt, Artificial Sequence
  Description of Artificial Sequence: Synthetic oligonucleotide
aacaccuuaguaaugccaa

SEQ ID NO: 1457104 - RNA, 19 nt, Artificial Sequence
  Description of Artificial Sequence: Synthetic oligonucleotide
gucgauacuugccacaaca

SEQ ID NO: 1457105 - RNA, 19 nt, Artificial Sequence
  Description of Artificial Sequence: Synthetic oligonucleotide
aaacaccuuaguaaugcca

SEQ ID NO: 1457106 - RNA, 19 nt, Artificial Sequence
  Description of Artificial Sequence: Synthetic oligonucleotide
ucaaacucuuaagauggca

SEQ ID NO: 1457107 - RNA, 19 nt, Artificial Sequence
  Description of Artificial Sequence: Synthetic oligonucleotide
auagaucgagcugucuuac

SEQ ID NO: 1457108 - RNA, 19 nt, Artificial Sequence
  Description of Artificial Sequence: Synthetic oligonucleotide
uuaauagcaccuucaucaa

SEQ ID NO: 1457109 - RNA, 19 nt, Artificial Sequence
  Description of Artificial Sequence: Synthetic oligonucleotide
gauucgaauccucuuaacu

SEQ ID NO: 1457110 - RNA, 19 nt, Artificial Sequence
  Description of Artificial Sequence: Synthetic oligonucleotide
agauuucagaauguggaca

SEQ ID NO: 1457111 - RNA, 19 nt, Artificial Sequence
  Description of Artificial Sequence: Synthetic oligonucleotide
cucuauuauuaacuguuuc

SEQ ID NO: 1457112 - RNA, 19 nt, Artificial Sequence
  Description of Artificial Sequence: Synthetic oligonucleotide
uucaccuuagcaacuuuau

SEQ ID NO: 1457113 - RNA, 19 nt, Artificial Sequence
  Description of Artificial Sequence: Synthetic oligonucleotide
ucggcagaaauaucaauua

SEQ ID NO: 1457114 - RNA, 19 nt, Artificial Sequence
  Description of Artificial Sequence: Synthetic oligonucleotide
accuuaguaaugccaaccu

SEQ ID NO: 1457115 - RNA, 19 nt, Artificial Sequence
  Description of Artificial Sequence: Synthetic oligonucleotide
uuucaccuuagcaacuuua

SEQ ID NO: 1457116 - RNA, 19 nt, Artificial Sequence
  Description of Artificial Sequence: Synthetic oligonucleotide
acaacaaggguaaugugga

SEQ ID NO: 1457117 - RNA, 19 nt, Artificial Sequence
  Description of Artificial Sequence: Synthetic oligonucleotide
ucugaucucaguacaucau

SEQ ID NO: 1457118 - RNA, 19 nt, Artificial Sequence
  Description of Artificial Sequence: Synthetic oligonucleotide
aucucuauuauuaacuguu

SEQ ID NO: 1457119 - RNA, 19 nt, Artificial Sequence
  Description of Artificial Sequence: Synthetic oligonucleotide
aucuucggcagaaauauca

SEQ ID NO: 1457120 - RNA, 19 nt, Artificial Sequence
  Description of Artificial Sequence: Synthetic oligonucleotide
caggguugcaaaaccaaac

SEQ ID NO: 1457121 - RNA, 19 nt, Artificial Sequence
  Description of Artificial Sequence: Synthetic oligonucleotide
auuacaugcgcaugagaaa

SEQ ID NO: 1457122 - RNA, 19 nt, Artificial Sequence
  Description of Artificial Sequence: Synthetic oligonucleotide
caauacauggcugagagcu

SEQ ID NO: 1457123 - RNA, 19 nt, Artificial Sequence
  Description of Artificial Sequence: Synthetic oligonucleotide
ucuugucauaaguugguuu

SEQ ID NO: 1457124 - RNA, 19 nt, Artificial Sequence
  Description of Artificial Sequence: Synthetic oligonucleotide
uacuacagaaacagaugaa

SEQ ID NO: 1457125 - RNA, 19 nt, Artificial Sequence
  Description of Artificial Sequence: Synthetic oligonucleotide
uacaucguccuacugcaau

SEQ ID NO: 1457126 - RNA, 19 nt, Artificial Sequence
  Description of Artificial Sequence: Synthetic oligonucleotide
caugcgcaugagaaaauac

SEQ ID NO: 1457127 - RNA, 19 nt, Artificial Sequence
  Description of Artificial Sequence: Synthetic oligonucleotide
ucggcugcuucaauggcca

SEQ ID NO: 1457128 - RNA, 19 nt, Artificial Sequence
  Description of Artificial Sequence: Synthetic oligonucleotide
caaacaccuuaguaaugcc

SEQ ID NO: 1457129 - RNA, 19 nt, Artificial Sequence
  Description of Artificial Sequence: Synthetic oligonucleotide
cagcaauagcuaucaagcc

SEQ ID NO: 1457130 - RNA, 19 nt, Artificial Sequence
  Description of Artificial Sequence: Synthetic oligonucleotide
acucuuaagauggcauagg

SEQ ID NO: 1457131 - RNA, 19 nt, Artificial Sequence
  Description of Artificial Sequence: Synthetic oligonucleotide
uaagcccauagauuucaga

SEQ ID NO: 1457132 - RNA, 19 nt, Artificial Sequence
  Description of Artificial Sequence: Synthetic oligonucleotide
ucuaggagucaaugaguca

SEQ ID NO: 1457133 - RNA, 19 nt, Artificial Sequence
  Description of Artificial Sequence: Synthetic oligonucleotide
cauugcuacccguuuuccc

SEQ ID NO: 1457134 - RNA, 19 nt, Artificial Sequence
  Description of Artificial Sequence: Synthetic oligonucleotide
uccuugacaagucgauacu

SEQ ID NO: 1457135 - RNA, 19 nt, Artificial Sequence
  Description of Artificial Sequence: Synthetic oligonucleotide
uuggucuaaaauagaguuu

SEQ ID NO: 1457136 - RNA, 19 nt, Artificial Sequence
  Description of Artificial Sequence: Synthetic oligonucleotide
cuagguuaauagcaccuuc

SEQ ID NO: 1457137 - RNA, 19 nt, Artificial Sequence
  Description of Artificial Sequence: Synthetic oligonucleotide
auuucagaauguggacagc

SEQ ID NO: 1457138 - RNA, 19 nt, Artificial Sequence
  Description of Artificial Sequence: Synthetic oligonucleotide
agaauguggacagccagcu

SEQ ID NO: 1457139 - RNA, 19 nt, Artificial Sequence
  Description of Artificial Sequence: Synthetic oligonucleotide
aucaucaauugucaccaau

SEQ ID NO: 1457140 - RNA, 19 nt, Artificial Sequence
  Description of Artificial Sequence: Synthetic oligonucleotide
cugucuuacuguugucucc

SEQ ID NO: 1457141 - RNA, 19 nt, Artificial Sequence
  Description of Artificial Sequence: Synthetic oligonucleotide
acagcaguccgaccuuuuc

SEQ ID NO: 1457142 - RNA, 19 nt, Artificial Sequence
  Description of Artificial Sequence: Synthetic oligonucleotide
ucucuauuauuaacuguuu

SEQ ID NO: 1457143 - RNA, 19 nt, Artificial Sequence
  Description of Artificial Sequence: Synthetic oligonucleotide
uaauagcaccuucaucaaa

SEQ ID NO: 1457144 - RNA, 19 nt, Artificial Sequence
  Description of Artificial Sequence: Synthetic oligonucleotide
cugcggaucccauccaggg

SEQ ID NO: 1457145 - RNA, 19 nt, Artificial Sequence
  Description of Artificial Sequence: Synthetic oligonucleotide
acaacacuauaauuauaaa

SEQ ID NO: 1457146 - RNA, 19 nt, Artificial Sequence
  Description of Artificial Sequence: Synthetic oligonucleotide
gaucucaguacaucaugga

SEQ ID NO: 1457147 - RNA, 19 nt, Artificial Sequence
  Description of Artificial Sequence: Synthetic oligonucleotide
uuacaauacauggcugaga

SEQ ID NO: 1457148 - RNA, 19 nt, Artificial Sequence
  Description of Artificial Sequence: Synthetic oligonucleotide
guuuuacaauacauggcug

SEQ ID NO: 1457149 - RNA, 19 nt, Artificial Sequence
  Description of Artificial Sequence: Synthetic oligonucleotide
agguagaacuucagcaaac

SEQ ID NO: 1457150 - RNA, 19 nt, Artificial Sequence
  Description of Artificial Sequence: Synthetic oligonucleotide
auuagagcaaagacaaaau

SEQ ID NO: 1457151 - RNA, 19 nt, Artificial Sequence
  Description of Artificial Sequence: Synthetic oligonucleotide
caccuuaguaaugccaacc

SEQ ID NO: 1457152 - RNA, 19 nt, Artificial Sequence
  Description of Artificial Sequence: Synthetic oligonucleotide
uaggagucaaugagucaug

SEQ ID NO: 1457153 - RNA, 19 nt, Artificial Sequence
  Description of Artificial Sequence: Synthetic oligonucleotide
agaaaguacuacagaaaca

SEQ ID NO: 1457154 - RNA, 19 nt, Artificial Sequence
  Description of Artificial Sequence: Synthetic oligonucleotide
gcauuggucuaaaauagag

SEQ ID NO: 1457155 - RNA, 19 nt, Artificial Sequence
  Description of Artificial Sequence: Synthetic oligonucleotide
cgcaugagaaaauacaaac

SEQ ID NO: 1457156 - RNA, 19 nt, Artificial Sequence
  Description of Artificial Sequence: Synthetic oligonucleotide
ggauuuacaguugaaacaa

SEQ ID NO: 1457157 - RNA, 19 nt, Artificial Sequence
  Description of Artificial Sequence: Synthetic oligonucleotide
agguuucacaguaucagca

SEQ ID NO: 1457158 - RNA, 19 nt, Artificial Sequence
  Description of Artificial Sequence: Synthetic oligonucleotide
uccuccuaccugaacgugu

SEQ ID NO: 1457159 - RNA, 19 nt, Artificial Sequence
  Description of Artificial Sequence: Synthetic oligonucleotide
ccccaaauaacacaacaag

SEQ ID NO: 1457160 - RNA, 19 nt, Artificial Sequence
  Description of Artificial Sequence: Synthetic oligonucleotide
ccaaagaaccccaaauaac

SEQ ID NO: 1457161 - RNA, 19 nt, Artificial Sequence
  Description of Artificial Sequence: Synthetic oligonucleotide
gucaaugagucauguuaug

SEQ ID NO: 1457162 - RNA, 19 nt, Artificial Sequence
  Description of Artificial Sequence: Synthetic oligonucleotide
ucgauacuugccacaacau

SEQ ID NO: 1457163 - RNA, 19 nt, Artificial Sequence
  Description of Artificial Sequence: Synthetic oligonucleotide
ugauucgaauccucuuaac

SEQ ID NO: 1457164 - RNA, 19 nt, Artificial Sequence
  Description of Artificial Sequence: Synthetic oligonucleotide
caaauaacacaacaagggu

SEQ ID NO: 1457165 - RNA, 19 nt, Artificial Sequence
  Description of Artificial Sequence: Synthetic oligonucleotide
ugaacgugugcuguugccu

SEQ ID NO: 1457166 - RNA, 19 nt, Artificial Sequence
  Description of Artificial Sequence: Synthetic oligonucleotide
cucugaucucaguacauca

SEQ ID NO: 1457167 - RNA, 19 nt, Artificial Sequence
  Description of Artificial Sequence: Synthetic oligonucleotide
gagucauguuaugaugggc

SEQ ID NO: 1457168 - RNA, 19 nt, Artificial Sequence
  Description of Artificial Sequence: Synthetic oligonucleotide
cuaucaagccacacagcuc

SEQ ID NO: 1457169 - RNA, 19 nt, Artificial Sequence
  Description of Artificial Sequence: Synthetic oligonucleotide
gaacgugugcuguugccuc

SEQ ID NO: 1457170 - RNA, 19 nt, Artificial Sequence
  Description of Artificial Sequence: Synthetic oligonucleotide
gucauaaguugguuuccug

SEQ ID NO: 1457171 - RNA, 19 nt, Artificial Sequence
  Description of Artificial Sequence: Synthetic oligonucleotide
uacuugccacaacauccag

SEQ ID NO: 1457172 - RNA, 19 nt, Artificial Sequence
  Description of Artificial Sequence: Synthetic oligonucleotide
cagaaggucauuccuuauc

SEQ ID NO: 1457173 - RNA, 19 nt, Artificial Sequence
  Description of Artificial Sequence: Synthetic oligonucleotide
ugucauaaguugguuuccu

SEQ ID NO: 1457174 - RNA, 19 nt, Artificial Sequence
  Description of Artificial Sequence: Synthetic oligonucleotide
ucauggauuuacaguugaa

SEQ ID NO: 1457175 - RNA, 19 nt, Artificial Sequence
  Description of Artificial Sequence: Synthetic oligonucleotide
aauacauggcugagagcug

SEQ ID NO: 1457176 - RNA, 19 nt, Artificial Sequence
  Description of Artificial Sequence: Synthetic oligonucleotide
agcaaagacaaaauugauu

SEQ ID NO: 1457177 - RNA, 19 nt, Artificial Sequence
  Description of Artificial Sequence: Synthetic oligonucleotide
gaauugcugguagagggga

SEQ ID NO: 1457178 - RNA, 19 nt, Artificial Sequence
  Description of Artificial Sequence: Synthetic oligonucleotide
cagucaucagaacuacuuc

SEQ ID NO: 1457179 - RNA, 19 nt, Artificial Sequence
  Description of Artificial Sequence: Synthetic oligonucleotide
caauacagcaguccgaccu

SEQ ID NO: 1457180 - RNA, 19 nt, Artificial Sequence
  Description of Artificial Sequence: Synthetic oligonucleotide
cugaacgugugcuguugcc

SEQ ID NO: 1457181 - RNA, 19 nt, Artificial Sequence
  Description of Artificial Sequence: Synthetic oligonucleotide
gguuggaauagaagaaacc

SEQ ID NO: 1457182 - RNA, 19 nt, Artificial Sequence
  Description of Artificial Sequence: Synthetic oligonucleotide
uacccguuuucccuccucu

SEQ ID NO: 1457183 - RNA, 19 nt, Artificial Sequence
  Description of Artificial Sequence: Synthetic oligonucleotide
aucaaaagucuuaccucuc

SEQ ID NO: 1457184 - RNA, 19 nt, Artificial Sequence
  Description of Artificial Sequence: Synthetic oligonucleotide
ugguuuccuguagaguuug

SEQ ID NO: 1457185 - RNA, 19 nt, Artificial Sequence
  Description of Artificial Sequence: Synthetic oligonucleotide
gguagaggggacuggauga

SEQ ID NO: 1457186 - RNA, 19 nt, Artificial Sequence
  Description of Artificial Sequence: Synthetic oligonucleotide
uccuaccugaacgugugcu

SEQ ID NO: 1457187 - RNA, 19 nt, Artificial Sequence
  Description of Artificial Sequence: Synthetic oligonucleotide
cuaaccaaaguuuuacaau

SEQ ID NO: 1457188 - RNA, 19 nt, Artificial Sequence
  Description of Artificial Sequence: Synthetic oligonucleotide
cugagaagcaauagaucga

SEQ ID NO: 1457189 - RNA, 19 nt, Artificial Sequence
  Description of Artificial Sequence: Synthetic oligonucleotide
cuuaacugucuuccuugac

SEQ ID NO: 1457190 - RNA, 19 nt, Artificial Sequence
  Description of Artificial Sequence: Synthetic oligonucleotide
gaaaaggguuggaauagaa

SEQ ID NO: 1457191 - RNA, 19 nt, Artificial Sequence
  Description of Artificial Sequence: Synthetic oligonucleotide
aguacaucauggauuuaca

SEQ ID NO: 1457192 - RNA, 19 nt, Artificial Sequence
  Description of Artificial Sequence: Synthetic oligonucleotide
gucauguuaugaugggcca

SEQ ID NO: 1457193 - RNA, 19 nt, Artificial Sequence
  Description of Artificial Sequence: Synthetic oligonucleotide
ucauguuaugaugggccac

SEQ ID NO: 1457194 - RNA, 19 nt, Artificial Sequence
  Description of Artificial Sequence: Synthetic oligonucleotide
agaaacccauucuccauuu

SEQ ID NO: 1457195 - RNA, 19 nt, Artificial Sequence
  Description of Artificial Sequence: Synthetic oligonucleotide
acuucuaagcccauagauu

SEQ ID NO: 1457196 - RNA, 19 nt, Artificial Sequence
  Description of Artificial Sequence: Synthetic oligonucleotide
uaauguggaauugcuggua

SEQ ID NO: 1457197 - RNA, 19 nt, Artificial Sequence
  Description of Artificial Sequence: Synthetic oligonucleotide
cauggauuuacaguugaaa

SEQ ID NO: 1457198 - RNA, 19 nt, Artificial Sequence
  Description of Artificial Sequence: Synthetic oligonucleotide
aaaguugaaggcacaucuu

SEQ ID NO: 1457199 - RNA, 19 nt, Artificial Sequence
  Description of Artificial Sequence: Synthetic oligonucleotide
cuaagcccauagauuucag

SEQ ID NO: 1457200 - RNA, 19 nt, Artificial Sequence
  Description of Artificial Sequence: Synthetic oligonucleotide
ucuagguuaauagcaccuu

SEQ ID NO: 1457201 - RNA, 19 nt, Artificial Sequence
  Description of Artificial Sequence: Synthetic oligonucleotide
ggaacuucuauucucaauu

SEQ ID NO: 1457202 - RNA, 19 nt, Artificial Sequence
  Description of Artificial Sequence: Synthetic oligonucleotide
ggaucugaagggacaauag

SEQ ID NO: 1457203 - RNA, 19 nt, Artificial Sequence
  Description of Artificial Sequence: Synthetic oligonucleotide
auacuugccacaacaucca

SEQ ID NO: 1457204 - RNA, 19 nt, Artificial Sequence
  Description of Artificial Sequence: Synthetic oligonucleotide
uuggguccagagcaagaaa

SEQ ID NO: 1457205 - RNA, 19 nt, Artificial Sequence
  Description of Artificial Sequence: Synthetic oligonucleotide
agcaguccgaccuuuucuu

SEQ ID NO: 1457206 - RNA, 19 nt, Artificial Sequence
  Description of Artificial Sequence: Synthetic oligonucleotide
uccagucaucagaacuacu

SEQ ID NO: 1457207 - RNA, 19 nt, Artificial Sequence
  Description of Artificial Sequence: Synthetic oligonucleotide
agaaaaggguuggaauaga

SEQ ID NO: 1457208 - RNA, 19 nt, Artificial Sequence
  Description of Artificial Sequence: Synthetic oligonucleotide
gauucuaaccaaaguuuua

SEQ ID NO: 1457209 - RNA, 19 nt, Artificial Sequence
  Description of Artificial Sequence: Synthetic oligonucleotide
uacaugcgcaugagaaaau

SEQ ID NO: 1457210 - RNA, 19 nt, Artificial Sequence
  Description of Artificial Sequence: Synthetic oligonucleotide
aggguuggaauagaagaaa

SEQ ID NO: 1457211 - RNA, 19 nt, Artificial Sequence
  Description of Artificial Sequence: Synthetic oligonucleotide
gcuaucaagccacacagcu

SEQ ID NO: 1457212 - RNA, 19 nt, Artificial Sequence
  Description of Artificial Sequence: Synthetic oligonucleotide
aacauauaacucacucaua

SEQ ID NO: 1457213 - RNA, 19 nt, Artificial Sequence
  Description of Artificial Sequence: Synthetic oligonucleotide
uguuucaccuuagcaacuu

SEQ ID NO: 1457214 - RNA, 19 nt, Artificial Sequence
  Description of Artificial Sequence: Synthetic oligonucleotide
uccucuuaacugucuuccu

SEQ ID NO: 1457215 - RNA, 19 nt, Artificial Sequence
  Description of Artificial Sequence: Synthetic oligonucleotide
agcaauagaucgagcuguc

SEQ ID NO: 1457216 - RNA, 19 nt, Artificial Sequence
  Description of Artificial Sequence: Synthetic oligonucleotide
gaagaaacccauucuccau

SEQ ID NO: 1457217 - RNA, 19 nt, Artificial Sequence
  Description of Artificial Sequence: Synthetic oligonucleotide
acaucguccuacugcaaua

SEQ ID NO: 1457218 - RNA, 19 nt, Artificial Sequence
  Description of Artificial Sequence: Synthetic oligonucleotide
uaccauugcuacccguuuu

SEQ ID NO: 1457219 - RNA, 19 nt, Artificial Sequence
  Description of Artificial Sequence: Synthetic oligonucleotide
guaauguggaauugcuggu

SEQ ID NO: 1457220 - RNA, 19 nt, Artificial Sequence
  Description of Artificial Sequence: Synthetic oligonucleotide
caagucgauacuugccaca

SEQ ID NO: 1457221 - RNA, 19 nt, Artificial Sequence
  Description of Artificial Sequence: Synthetic oligonucleotide
caucguccuacugcaauac

SEQ ID NO: 1457222 - RNA, 19 nt, Artificial Sequence
  Description of Artificial Sequence: Synthetic oligonucleotide
ccaacauuugccaucgcca

SEQ ID NO: 1457223 - RNA, 19 nt, Artificial Sequence
  Description of Artificial Sequence: Synthetic oligonucleotide
ggguugcaaaaccaaacca

SEQ ID NO: 1457224 - RNA, 19 nt, Artificial Sequence
  Description of Artificial Sequence: Synthetic oligonucleotide
caucggcugcuucaauggc

SEQ ID NO: 1457225 - RNA, 19 nt, Artificial Sequence
  Description of Artificial Sequence: Synthetic oligonucleotide
aguuguccgcuccuguuuu

SEQ ID NO: 1457226 - RNA, 19 nt, Artificial Sequence
  Description of Artificial Sequence: Synthetic oligonucleotide
caaggguaauguggaauug

SEQ ID NO: 1457227 - RNA, 19 nt, Artificial Sequence
  Description of Artificial Sequence: Synthetic oligonucleotide
cauauaacucacucauacu

SEQ ID NO: 1457228 - RNA, 19 nt, Artificial Sequence
  Description of Artificial Sequence: Synthetic oligonucleotide
aggagucaaugagucaugu

SEQ ID NO: 1457229 - RNA, 19 nt, Artificial Sequence
  Description of Artificial Sequence: Synthetic oligonucleotide
cacaucuucggcagaaaua

SEQ ID NO: 1457230 - RNA, 19 nt, Artificial Sequence
  Description of Artificial Sequence: Synthetic oligonucleotide
aguccgaccuuuucuucau

SEQ ID NO: 1457231 - RNA, 19 nt, Artificial Sequence
  Description of Artificial Sequence: Synthetic oligonucleotide
uagaucgagcugucuuacu

SEQ ID NO: 1457232 - RNA, 19 nt, Artificial Sequence
  Description of Artificial Sequence: Synthetic oligonucleotide
caaugagucauguuaugau

SEQ ID NO: 1457233 - RNA, 19 nt, Artificial Sequence
  Description of Artificial Sequence: Synthetic oligonucleotide
aaggcacaucuucggcaga

SEQ ID NO: 1457234 - RNA, 19 nt, Artificial Sequence
  Description of Artificial Sequence: Synthetic oligonucleotide
gucuuaccucucuaagaca

SEQ ID NO: 1457235 - RNA, 19 nt, Artificial Sequence
  Description of Artificial Sequence: Synthetic oligonucleotide
caauuacaugcgcaugaga

SEQ ID NO: 1457236 - RNA, 19 nt, Artificial Sequence
  Description of Artificial Sequence: Synthetic oligonucleotide
cuauuauuaacuguuucuu

SEQ ID NO: 1457237 - RNA, 19 nt, Artificial Sequence
  Description of Artificial Sequence: Synthetic oligonucleotide
aucguccuacugcaauaca

SEQ ID NO: 1457238 - RNA, 19 nt, Artificial Sequence
  Description of Artificial Sequence: Synthetic oligonucleotide
uggcauaggcauuggucua

SEQ ID NO: 1457239 - RNA, 19 nt, Artificial Sequence
  Description of Artificial Sequence: Synthetic oligonucleotide
uguccgcuccuguuuugga

SEQ ID NO: 1457240 - RNA, 19 nt, Artificial Sequence
  Description of Artificial Sequence: Synthetic oligonucleotide
ugccaaccugagaagcaau

SEQ ID NO: 1457241 - RNA, 19 nt, Artificial Sequence
  Description of Artificial Sequence: Synthetic oligonucleotide
caaaauugauucgaauccu

SEQ ID NO: 1457242 - RNA, 19 nt, Artificial Sequence
  Description of Artificial Sequence: Synthetic oligonucleotide
cuccagucaucagaacuac

SEQ ID NO: 1457243 - RNA, 19 nt, Artificial Sequence
  Description of Artificial Sequence: Synthetic oligonucleotide
ggguuggaauagaagaaac

SEQ ID NO: 1457244 - RNA, 19 nt, Artificial Sequence
  Description of Artificial Sequence: Synthetic oligonucleotide
cauugcugcggaucccauc

SEQ ID NO: 1457245 - RNA, 19 nt, Artificial Sequence
  Description of Artificial Sequence: Synthetic oligonucleotide
uccuaccauugcuacccgu

SEQ ID NO: 1457246 - RNA, 19 nt, Artificial Sequence
  Description of Artificial Sequence: Synthetic oligonucleotide
uguugccucugaucucagu

SEQ ID NO: 1457247 - RNA, 19 nt, Artificial Sequence
  Description of Artificial Sequence: Synthetic oligonucleotide
caguccgaccuuuucuuca

SEQ ID NO: 1457248 - RNA, 19 nt, Artificial Sequence
  Description of Artificial Sequence: Synthetic oligonucleotide
ucgccagagcuggagaauc

SEQ ID NO: 1457249 - RNA, 19 nt, Artificial Sequence
  Description of Artificial Sequence: Synthetic oligonucleotide
aacuacuucuaagcccaua

SEQ ID NO: 1457250 - RNA, 19 nt, Artificial Sequence
  Description of Artificial Sequence: Synthetic oligonucleotide
auggaaucaucuacaucgu

SEQ ID NO: 1457251 - RNA, 19 nt, Artificial Sequence
  Description of Artificial Sequence: Synthetic oligonucleotide
caucuacaucguccuacug

SEQ ID NO: 1457252 - RNA, 19 nt, Artificial Sequence
  Description of Artificial Sequence: Synthetic oligonucleotide
ccuuaguaaugccaaccug

SEQ ID NO: 1457253 - RNA, 19 nt, Artificial Sequence
  Description of Artificial Sequence: Synthetic oligonucleotide
caguugaaacaacauccaa

SEQ ID NO: 1457254 - RNA, 19 nt, Artificial Sequence
  Description of Artificial Sequence: Synthetic oligonucleotide
gugaaacuugacaacauuu

SEQ ID NO: 1457255 - RNA, 19 nt, Artificial Sequence
  Description of Artificial Sequence: Synthetic oligonucleotide
acaugcgcaugagaaaaua

SEQ ID NO: 1457256 - RNA, 19 nt, Artificial Sequence
  Description of Artificial Sequence: Synthetic oligonucleotide
caauagaucgagcugucuu

SEQ ID NO: 1457257 - RNA, 19 nt, Artificial Sequence
  Description of Artificial Sequence: Synthetic oligonucleotide
ccuaccugaacgugugcug

SEQ ID NO: 1457258 - RNA, 19 nt, Artificial Sequence
  Description of Artificial Sequence: Synthetic oligonucleotide
uugcugcggaucccaucca

SEQ ID NO: 1457259 - RNA, 19 nt, Artificial Sequence
  Description of Artificial Sequence: Synthetic oligonucleotide
caucgccagagcuggagaa

SEQ ID NO: 1457260 - RNA, 19 nt, Artificial Sequence
  Description of Artificial Sequence: Synthetic oligonucleotide
caauagcuaucaagccaca

SEQ ID NO: 1457261 - RNA, 19 nt, Artificial Sequence
  Description of Artificial Sequence: Synthetic oligonucleotide
cuccuaccugaacgugugc

SEQ ID NO: 1457262 - RNA, 19 nt, Artificial Sequence
  Description of Artificial Sequence: Synthetic oligonucleotide
uaccugaacgugugcuguu

SEQ ID NO: 1457263 - RNA, 19 nt, Artificial Sequence
  Description of Artificial Sequence: Synthetic oligonucleotide
ccugaacgugugcuguugc

SEQ ID NO: 1457264 - RNA, 19 nt, Artificial Sequence
  Description of Artificial Sequence: Synthetic oligonucleotide
gaauuccaaccagauuaua

SEQ ID NO: 1457265 - RNA, 19 nt, Artificial Sequence
  Description of Artificial Sequence: Synthetic oligonucleotide
aggcacaucuucggcagaa

SEQ ID NO: 1457266 - RNA, 19 nt, Artificial Sequence
  Description of Artificial Sequence: Synthetic oligonucleotide
augggccacuaguuauuaa

SEQ ID NO: 1457267 - RNA, 19 nt, Artificial Sequence
  Description of Artificial Sequence: Synthetic oligonucleotide
cuguugccucugaucucag

SEQ ID NO: 1457268 - RNA, 19 nt, Artificial Sequence
  Description of Artificial Sequence: Synthetic oligonucleotide
cgauacuugccacaacauc

SEQ ID NO: 1457269 - RNA, 19 nt, Artificial Sequence
  Description of Artificial Sequence: Synthetic oligonucleotide
cuacccguuuucccuccuc

SEQ ID NO: 1457270 - RNA, 19 nt, Artificial Sequence
  Description of Artificial Sequence: Synthetic oligonucleotide
ccuuagcaacuuuauggga

SEQ ID NO: 1457271 - RNA, 19 nt, Artificial Sequence
  Description of Artificial Sequence: Synthetic oligonucleotide
gcagccauugcugcggauc

SEQ ID NO: 1457272 - RNA, 19 nt, Artificial Sequence
  Description of Artificial Sequence: Synthetic oligonucleotide
aucgccagagcuggagaau

SEQ ID NO: 1457273 - RNA, 19 nt, Artificial Sequence
  Description of Artificial Sequence: Synthetic oligonucleotide
cuucggcagaaauaucaau

SEQ ID NO: 1457274 - RNA, 19 nt, Artificial Sequence
  Description of Artificial Sequence: Synthetic oligonucleotide
cauaggcauuggucuaaaa

SEQ ID NO: 1457275 - RNA, 19 nt, Artificial Sequence
  Description of Artificial Sequence: Synthetic oligonucleotide
guccuccuaccugaacgug

SEQ ID NO: 1457276 - RNA, 19 nt, Artificial Sequence
  Description of Artificial Sequence: Synthetic oligonucleotide
cuguuucaccuuagcaacu

SEQ ID NO: 1457277 - RNA, 19 nt, Artificial Sequence
  Description of Artificial Sequence: Synthetic oligonucleotide
acgugugcuguugccucug

SEQ ID NO: 1457278 - RNA, 19 nt, Artificial Sequence
  Description of Artificial Sequence: Synthetic oligonucleotide
auacagcaguccgaccuuu

SEQ ID NO: 1457279 - RNA, 19 nt, Artificial Sequence
  Description of Artificial Sequence: Synthetic oligonucleotide
ggauucuaaccaaaguuuu

SEQ ID NO: 1457280 - RNA, 19 nt, Artificial Sequence
  Description of Artificial Sequence: Synthetic oligonucleotide
cuaccugaacgugugcugu

SEQ ID NO: 1457281 - RNA, 19 nt, Artificial Sequence
  Description of Artificial Sequence: Synthetic oligonucleotide
ccauugcuacccguuuucc

SEQ ID NO: 1457282 - RNA, 19 nt, Artificial Sequence
  Description of Artificial Sequence: Synthetic oligonucleotide
gccaucgccagagcuggag

SEQ ID NO: 1457283 - RNA, 19 nt, Artificial Sequence
  Description of Artificial Sequence: Synthetic oligonucleotide
ucaguacaucauggauuua

SEQ ID NO: 1457284 - RNA, 19 nt, Artificial Sequence
  Description of Artificial Sequence: Synthetic oligonucleotide
cagcaguccgaccuuuucu

SEQ ID NO: 1457285 - RNA, 19 nt, Artificial Sequence
  Description of Artificial Sequence: Synthetic oligonucleotide
ccagucaucagaacuacuu

SEQ ID NO: 1457286 - RNA, 19 nt, Artificial Sequence
  Description of Artificial Sequence: Synthetic oligonucleotide
ggucuugucauaaguuggu

SEQ ID NO: 1457287 - RNA, 19 nt, Artificial Sequence
  Description of Artificial Sequence: Synthetic oligonucleotide
cuggaugauuuaacacagu

SEQ ID NO: 1457288 - RNA, 19 nt, Artificial Sequence
  Description of Artificial Sequence: Synthetic oligonucleotide
gcaguccgaccuuuucuuc

SEQ ID NO: 1457289 - RNA, 19 nt, Artificial Sequence
  Description of Artificial Sequence: Synthetic oligonucleotide
cuacaucguccuacugcaa

SEQ ID NO: 1457290 - RNA, 19 nt, Artificial Sequence
  Description of Artificial Sequence: Synthetic oligonucleotide
gcgcaugagaaaauacaaa

SEQ ID NO: 1457291 - RNA, 19 nt, Artificial Sequence
  Description of Artificial Sequence: Synthetic oligonucleotide
ccaggguugcaaaaccaaa

SEQ ID NO: 1457292 - RNA, 19 nt, Artificial Sequence
  Description of Artificial Sequence: Synthetic oligonucleotide
ugccaucgccagagcugga

SEQ ID NO: 1457293 - RNA, 19 nt, Artificial Sequence
  Description of Artificial Sequence: Synthetic oligonucleotide
ccguuuucccuccucuuga

SEQ ID NO: 1457294 - RNA, 19 nt, Artificial Sequence
  Description of Artificial Sequence: Synthetic oligonucleotide
ggcauaggcauuggucuaa

SEQ ID NO: 1457295 - RNA, 19 nt, Artificial Sequence
  Description of Artificial Sequence: Synthetic oligonucleotide
ggaauuccaaccagauuau

SEQ ID NO: 1457296 - RNA, 19 nt, Artificial Sequence
  Description of Artificial Sequence: Synthetic oligonucleotide
cuaccauugcuacccguuu

SEQ ID NO: 1457297 - RNA, 19 nt, Artificial Sequence
  Description of Artificial Sequence: Synthetic oligonucleotide
ccgcuccuguuuuggauuc

SEQ ID NO: 1457298 - RNA, 19 nt, Artificial Sequence
  Description of Artificial Sequence: Synthetic oligonucleotide
guagaggggacuggaugau

SEQ ID NO: 1457299 - RNA, 19 nt, Artificial Sequence
  Description of Artificial Sequence: Synthetic oligonucleotide
aucaagccacacagcucau

SEQ ID NO: 1457300 - RNA, 19 nt, Artificial Sequence
  Description of Artificial Sequence: Synthetic oligonucleotide
gucuugucauaaguugguu

SEQ ID NO: 1457301 - RNA, 19 nt, Artificial Sequence
  Description of Artificial Sequence: Synthetic oligonucleotide
ggagucaaugagucauguu

SEQ ID NO: 1457302 - RNA, 19 nt, Artificial Sequence
  Description of Artificial Sequence: Synthetic oligonucleotide
ccuaccauugcuacccguu

SEQ ID NO: 1457303 - RNA, 19 nt, Artificial Sequence
  Description of Artificial Sequence: Synthetic oligonucleotide
ccaucgccagagcuggaga

SEQ ID NO: 1457304 - RNA, 19 nt, Artificial Sequence
  Description of Artificial Sequence: Synthetic oligonucleotide
gcaauagaucgagcugucu

SEQ ID NO: 1457305 - RNA, 19 nt, Artificial Sequence
  Description of Artificial Sequence: Synthetic oligonucleotide
gaacuacuucuaagcccau

SEQ ID NO: 1457306 - RNA, 19 nt, Artificial Sequence
  Description of Artificial Sequence: Synthetic oligonucleotide
ccagaaggucauuccuuau

SEQ ID NO: 1457307 - RNA, 19 nt, Artificial Sequence
  Description of Artificial Sequence: Synthetic oligonucleotide
gccucugaucucaguacau

SEQ ID NO: 1457308 - RNA, 19 nt, Artificial Sequence
  Description of Artificial Sequence: Synthetic oligonucleotide
gcuacccguuuucccuccu

SEQ ID NO: 1457309 - RNA, 19 nt, Artificial Sequence
  Description of Artificial Sequence: Synthetic oligonucleotide
aaggguuuaauauaauuac

SEQ ID NO: 1457310 - RNA, 19 nt, Artificial Sequence
  Description of Artificial Sequence: Synthetic oligonucleotide
ucuaaaagagucuacauca

SEQ ID NO: 1457311 - RNA, 19 nt, Artificial Sequence
  Description of Artificial Sequence: Synthetic oligonucleotide
gauggagacacgcagaugg

SEQ ID NO: 1457312 - RNA, 19 nt, Artificial Sequence
  Description of Artificial Sequence: Synthetic oligonucleotide
aauuacccuacuuaacagc

SEQ ID NO: 1457313 - RNA, 19 nt, Artificial Sequence
  Description of Artificial Sequence: Synthetic oligonucleotide
aacuaaacaguacauucac

SEQ ID NO: 1457314 - RNA, 19 nt, Artificial Sequence
  Description of Artificial Sequence: Synthetic oligonucleotide
aauauaauuaccaccugac

SEQ ID NO: 1457315 - RNA, 19 nt, Artificial Sequence
  Description of Artificial Sequence: Synthetic oligonucleotide
gauccaagcaucuucaucc

SEQ ID NO: 1457316 - RNA, 19 nt, Artificial Sequence
  Description of Artificial Sequence: Synthetic oligonucleotide
aauggaaagcaucagguca

SEQ ID NO: 1457317 - RNA, 19 nt, Artificial Sequence
  Description of Artificial Sequence: Synthetic oligonucleotide
aauuuuauagcagcuguac

SEQ ID NO: 1457318 - RNA, 19 nt, Artificial Sequence
  Description of Artificial Sequence: Synthetic oligonucleotide
auggcagauacgcagaggc

SEQ ID NO: 1457319 - RNA, 19 nt, Artificial Sequence
  Description of Artificial Sequence: Synthetic oligonucleotide
uugggauccaagcugaagg

SEQ ID NO: 1457320 - RNA, 19 nt, Artificial Sequence
  Description of Artificial Sequence: Synthetic oligonucleotide
uuuguguuuacaaaagcac

SEQ ID NO: 1457321 - RNA, 19 nt, Artificial Sequence
  Description of Artificial Sequence: Synthetic oligonucleotide
uguauugggauccaagcug

SEQ ID NO: 1457322 - RNA, 19 nt, Artificial Sequence
  Description of Artificial Sequence: Synthetic oligonucleotide
aaucuuacaauggaaagca

SEQ ID NO: 1457323 - RNA, 19 nt, Artificial Sequence
  Description of Artificial Sequence: Synthetic oligonucleotide
aaauuacccuacuuaacag

SEQ ID NO: 1457324 - RNA, 19 nt, Artificial Sequence
  Description of Artificial Sequence: Synthetic oligonucleotide
auagguacgccgcagggcc

SEQ ID NO: 1457325 - RNA, 19 nt, Artificial Sequence
  Description of Artificial Sequence: Synthetic oligonucleotide
uaauauaauuaccaccuga

SEQ ID NO: 1457326 - RNA, 19 nt, Artificial Sequence
  Description of Artificial Sequence: Synthetic oligonucleotide
uacaucacugaaauuaccc

SEQ ID NO: 1457327 - RNA, 19 nt, Artificial Sequence
  Description of Artificial Sequence: Synthetic oligonucleotide
uucauggcacccaaggugg

SEQ ID NO: 1457328 - RNA, 19 nt, Artificial Sequence
  Description of Artificial Sequence: Synthetic oligonucleotide
ugauucaacagauccaagc

SEQ ID NO: 1457329 - RNA, 19 nt, Artificial Sequence
  Description of Artificial Sequence: Synthetic oligonucleotide
auggaagguauacaggugg

SEQ ID NO: 1457330 - RNA, 19 nt, Artificial Sequence
  Description of Artificial Sequence: Synthetic oligonucleotide
uuuuauagcagcuguacuc

SEQ ID NO: 1457331 - RNA, 19 nt, Artificial Sequence
  Description of Artificial Sequence: Synthetic oligonucleotide
aacauugucaguugugagu

SEQ ID NO: 1457332 - RNA, 19 nt, Artificial Sequence
  Description of Artificial Sequence: Synthetic oligonucleotide
aauaggaauuuguguuuac

SEQ ID NO: 1457333 - RNA, 19 nt, Artificial Sequence
  Description of Artificial Sequence: Synthetic oligonucleotide
aaaaugguacagcucuauc

SEQ ID NO: 1457334 - RNA, 19 nt, Artificial Sequence
  Description of Artificial Sequence: Synthetic oligonucleotide
cuucgagaaaaccugagag

SEQ ID NO: 1457335 - RNA, 19 nt, Artificial Sequence
  Description of Artificial Sequence: Synthetic oligonucleotide
aaaagagccggcguuuucg

SEQ ID NO: 1457336 - RNA, 19 nt, Artificial Sequence
  Description of Artificial Sequence: Synthetic oligonucleotide
aaacauugucaguugugag

SEQ ID NO: 1457337 - RNA, 19 nt, Artificial Sequence
  Description of Artificial Sequence: Synthetic oligonucleotide
ucuucauccgcacgcaucc

SEQ ID NO: 1457338 - RNA, 19 nt, Artificial Sequence
  Description of Artificial Sequence: Synthetic oligonucleotide
cuuacaauggaaagcauca

SEQ ID NO: 1457339 - RNA, 19 nt, Artificial Sequence
  Description of Artificial Sequence: Synthetic oligonucleotide
gaaacaguuuggcaagucc

SEQ ID NO: 1457340 - RNA, 19 nt, Artificial Sequence
  Description of Artificial Sequence: Synthetic oligonucleotide
uacaaacuagcccucaccu

SEQ ID NO: 1457341 - RNA, 19 nt, Artificial Sequence
  Description of Artificial Sequence: Synthetic oligonucleotide
caaacuagcccucaccugc

SEQ ID NO: 1457342 - RNA, 19 nt, Artificial Sequence
  Description of Artificial Sequence: Synthetic oligonucleotide
uacaaguuacaauaggaau

SEQ ID NO: 1457343 - RNA, 19 nt, Artificial Sequence
  Description of Artificial Sequence: Synthetic oligonucleotide
agguauaugacagagaaua

SEQ ID NO: 1457344 - RNA, 19 nt, Artificial Sequence
  Description of Artificial Sequence: Synthetic oligonucleotide
agcuugucaaacucauacc

SEQ ID NO: 1457345 - RNA, 19 nt, Artificial Sequence
  Description of Artificial Sequence: Synthetic oligonucleotide
gguaccagaagcccgaacg

SEQ ID NO: 1457346 - RNA, 19 nt, Artificial Sequence
  Description of Artificial Sequence: Synthetic oligonucleotide
acugaaauuacccuacuua

SEQ ID NO: 1457347 - RNA, 19 nt, Artificial Sequence
  Description of Artificial Sequence: Synthetic oligonucleotide
aauggccucauagguacgc

SEQ ID NO: 1457348 - RNA, 19 nt, Artificial Sequence
  Description of Artificial Sequence: Synthetic oligonucleotide
uucaacagauccaagcauc

SEQ ID NO: 1457349 - RNA, 19 nt, Artificial Sequence
  Description of Artificial Sequence: Synthetic oligonucleotide
acauugucaguugugaguc

SEQ ID NO: 1457350 - RNA, 19 nt, Artificial Sequence
  Description of Artificial Sequence: Synthetic oligonucleotide
uuaauauaauuaccaccug

SEQ ID NO: 1457351 - RNA, 19 nt, Artificial Sequence
  Description of Artificial Sequence: Synthetic oligonucleotide
uucgagaaaaccugagagc

SEQ ID NO: 1457352 - RNA, 19 nt, Artificial Sequence
  Description of Artificial Sequence: Synthetic oligonucleotide
ugaaauuacccuacuuaac

SEQ ID NO: 1457353 - RNA, 19 nt, Artificial Sequence
  Description of Artificial Sequence: Synthetic oligonucleotide
uuacaaacuagcccucacc

SEQ ID NO: 1457354 - RNA, 19 nt, Artificial Sequence
  Description of Artificial Sequence: Synthetic oligonucleotide
uccaagguauaugacagag

SEQ ID NO: 1457355 - RNA, 19 nt, Artificial Sequence
  Description of Artificial Sequence: Synthetic oligonucleotide
aaacucauaccggaugcgg

SEQ ID NO: 1457356 - RNA, 19 nt, Artificial Sequence
  Description of Artificial Sequence: Synthetic oligonucleotide
cauagguaccagaagcccg

SEQ ID NO: 1457357 - RNA, 19 nt, Artificial Sequence
  Description of Artificial Sequence: Synthetic oligonucleotide
aaacuaaacaguacauuca

SEQ ID NO: 1457358 - RNA, 19 nt, Artificial Sequence
  Description of Artificial Sequence: Synthetic oligonucleotide
cuacuuaacagcucagaug

SEQ ID NO: 1457359 - RNA, 19 nt, Artificial Sequence
  Description of Artificial Sequence: Synthetic oligonucleotide
aaagagccggcguuuucgg

SEQ ID NO: 1457360 - RNA, 19 nt, Artificial Sequence
  Description of Artificial Sequence: Synthetic oligonucleotide
acucgugaggucaucagcc

SEQ ID NO: 1457361 - RNA, 19 nt, Artificial Sequence
  Description of Artificial Sequence: Synthetic oligonucleotide
uacccuacuuaacagcuca

SEQ ID NO: 1457362 - RNA, 19 nt, Artificial Sequence
  Description of Artificial Sequence: Synthetic oligonucleotide
gaaguagggccucacuucc

SEQ ID NO: 1457363 - RNA, 19 nt, Artificial Sequence
  Description of Artificial Sequence: Synthetic oligonucleotide
uuaacagcucagaugucca

SEQ ID NO: 1457364 - RNA, 19 nt, Artificial Sequence
  Description of Artificial Sequence: Synthetic oligonucleotide
caagguauaugacagagaa

SEQ ID NO: 1457365 - RNA, 19 nt, Artificial Sequence
  Description of Artificial Sequence: Synthetic oligonucleotide
cucuaucagaaacaguuug

SEQ ID NO: 1457366 - RNA, 19 nt, Artificial Sequence
  Description of Artificial Sequence: Synthetic oligonucleotide
uccaccaacuaacaaacua

SEQ ID NO: 1457367 - RNA, 19 nt, Artificial Sequence
  Description of Artificial Sequence: Synthetic oligonucleotide
cacacgguagccaugguug

SEQ ID NO: 1457368 - RNA, 19 nt, Artificial Sequence
  Description of Artificial Sequence: Synthetic oligonucleotide
acgcucaaucucucgagcc

SEQ ID NO: 1457369 - RNA, 19 nt, Artificial Sequence
  Description of Artificial Sequence: Synthetic oligonucleotide
aaacaguuuggcaaguccu

SEQ ID NO: 1457370 - RNA, 19 nt, Artificial Sequence
  Description of Artificial Sequence: Synthetic oligonucleotide
guggcagugacgcucagag

SEQ ID NO: 1457371 - RNA, 19 nt, Artificial Sequence
  Description of Artificial Sequence: Synthetic oligonucleotide
caugcaguggucuccgucc

SEQ ID NO: 1457372 - RNA, 19 nt, Artificial Sequence
  Description of Artificial Sequence: Synthetic oligonucleotide
acauucacugcacacuaug

SEQ ID NO: 1457373 - RNA, 19 nt, Artificial Sequence
  Description of Artificial Sequence: Synthetic oligonucleotide
ccuagaagaccccagauag

SEQ ID NO: 1457374 - RNA, 19 nt, Artificial Sequence
  Description of Artificial Sequence: Synthetic oligonucleotide
acaaauuuuauagcagcug

SEQ ID NO: 1457375 - RNA, 19 nt, Artificial Sequence
  Description of Artificial Sequence: Synthetic oligonucleotide
ugugcaugugccugcaccc

SEQ ID NO: 1457376 - RNA, 19 nt, Artificial Sequence
  Description of Artificial Sequence: Synthetic oligonucleotide
ugugcaaaagagccggcgu

SEQ ID NO: 1457377 - RNA, 19 nt, Artificial Sequence
  Description of Artificial Sequence: Synthetic oligonucleotide
aacaguuuggcaaguccuc

SEQ ID NO: 1457378 - RNA, 19 nt, Artificial Sequence
  Description of Artificial Sequence: Synthetic oligonucleotide
auguccaccaacuaacaaa

SEQ ID NO: 1457379 - RNA, 19 nt, Artificial Sequence
  Description of Artificial Sequence: Synthetic oligonucleotide
cacgcauccaucagcaagc

SEQ ID NO: 1457380 - RNA, 19 nt, Artificial Sequence
  Description of Artificial Sequence: Synthetic oligonucleotide
cacacuaugaaaucuuaca

SEQ ID NO: 1457381 - RNA, 19 nt, Artificial Sequence
  Description of Artificial Sequence: Synthetic oligonucleotide
aaggucaugucaucuuccu

SEQ ID NO: 1457382 - RNA, 19 nt, Artificial Sequence
  Description of Artificial Sequence: Synthetic oligonucleotide
aauguccaccaacuaacaa

SEQ ID NO: 1457383 - RNA, 19 nt, Artificial Sequence
  Description of Artificial Sequence: Synthetic oligonucleotide
aguacauucacugcacacu

SEQ ID NO: 1457384 - RNA, 19 nt, Artificial Sequence
  Description of Artificial Sequence: Synthetic oligonucleotide
uagaagaccccagauagaa

SEQ ID NO: 1457385 - RNA, 19 nt, Artificial Sequence
  Description of Artificial Sequence: Synthetic oligonucleotide
aaaucgcggagcuugucaa

SEQ ID NO: 1457386 - RNA, 19 nt, Artificial Sequence
  Description of Artificial Sequence: Synthetic oligonucleotide
uagaaguagggccucacuu

SEQ ID NO: 1457387 - RNA, 19 nt, Artificial Sequence
  Description of Artificial Sequence: Synthetic oligonucleotide
guacagcucuaucagaaac

SEQ ID NO: 1457388 - RNA, 19 nt, Artificial Sequence
  Description of Artificial Sequence: Synthetic oligonucleotide
cugaaauuacccuacuuaa

SEQ ID NO: 1457389 - RNA, 19 nt, Artificial Sequence
  Description of Artificial Sequence: Synthetic oligonucleotide
ucgucugcaccucauugug

SEQ ID NO: 1457390 - RNA, 19 nt, Artificial Sequence
  Description of Artificial Sequence: Synthetic oligonucleotide
auuacccuacuuaacagcu

SEQ ID NO: 1457391 - RNA, 19 nt, Artificial Sequence
  Description of Artificial Sequence: Synthetic oligonucleotide
gaugacacucgugagguca

SEQ ID NO: 1457392 - RNA, 19 nt, Artificial Sequence
  Description of Artificial Sequence: Synthetic oligonucleotide
uugauggagacacgcagau

SEQ ID NO: 1457393 - RNA, 19 nt, Artificial Sequence
  Description of Artificial Sequence: Synthetic oligonucleotide
agcucagauguccagcucu

SEQ ID NO: 1457394 - RNA, 19 nt, Artificial Sequence
  Description of Artificial Sequence: Synthetic oligonucleotide
guauaugacagagaauaca

SEQ ID NO: 1457395 - RNA, 19 nt, Artificial Sequence
  Description of Artificial Sequence: Synthetic oligonucleotide
gaaaucgcggagcuuguca

SEQ ID NO: 1457396 - RNA, 19 nt, Artificial Sequence
  Description of Artificial Sequence: Synthetic oligonucleotide
agcugcaacaagccaaaug

SEQ ID NO: 1457397 - RNA, 19 nt, Artificial Sequence
  Description of Artificial Sequence: Synthetic oligonucleotide
uccacccucaggaaaucgc

SEQ ID NO: 1457398 - RNA, 19 nt, Artificial Sequence
  Description of Artificial Sequence: Synthetic oligonucleotide
caucuguagacgcucaauc

SEQ ID NO: 1457399 - RNA, 19 nt, Artificial Sequence
  Description of Artificial Sequence: Synthetic oligonucleotide
acaauaggaauuuguguuu

SEQ ID NO: 1457400 - RNA, 19 nt, Artificial Sequence
  Description of Artificial Sequence: Synthetic oligonucleotide
ugcggcauagguaccagaa

SEQ ID NO: 1457401 - RNA, 19 nt, Artificial Sequence
  Description of Artificial Sequence: Synthetic oligonucleotide
agucgucugcaccucauug

SEQ ID NO: 1457402 - RNA, 19 nt, Artificial Sequence
  Description of Artificial Sequence: Synthetic oligonucleotide
aagagugggagcccuucga

SEQ ID NO: 1457403 - RNA, 19 nt, Artificial Sequence
  Description of Artificial Sequence: Synthetic oligonucleotide
accaacuaacaaacuaaac

SEQ ID NO: 1457404 - RNA, 19 nt, Artificial Sequence
  Description of Artificial Sequence: Synthetic oligonucleotide
agaagcccgaacgaguauc

SEQ ID NO: 1457405 - RNA, 19 nt, Artificial Sequence
  Description of Artificial Sequence: Synthetic oligonucleotide
acagguggcagugacgcuc

SEQ ID NO: 1457406 - RNA, 19 nt, Artificial Sequence
  Description of Artificial Sequence: Synthetic oligonucleotide
gaaagcaucaggucaggua

SEQ ID NO: 1457407 - RNA, 19 nt, Artificial Sequence
  Description of Artificial Sequence: Synthetic oligonucleotide
gagaaaaccugagagccca

SEQ ID NO: 1457408 - RNA, 19 nt, Artificial Sequence
  Description of Artificial Sequence: Synthetic oligonucleotide
aguggucuccguccacacc

SEQ ID NO: 1457409 - RNA, 19 nt, Artificial Sequence
  Description of Artificial Sequence: Synthetic oligonucleotide
gcuguauugggauccaagc

SEQ ID NO: 1457410 - RNA, 19 nt, Artificial Sequence
  Description of Artificial Sequence: Synthetic oligonucleotide
aggagaagcgcucuggauu

SEQ ID NO: 1457411 - RNA, 19 nt, Artificial Sequence
  Description of Artificial Sequence: Synthetic oligonucleotide
agcuuggcaggccacccac

SEQ ID NO: 1457412 - RNA, 19 nt, Artificial Sequence
  Description of Artificial Sequence: Synthetic oligonucleotide
uccaucagcaagccaggcu

SEQ ID NO: 1457413 - RNA, 19 nt, Artificial Sequence
  Description of Artificial Sequence: Synthetic oligonucleotide
auggaaagcaucaggucag

SEQ ID NO: 1457414 - RNA, 19 nt, Artificial Sequence
  Description of Artificial Sequence: Synthetic oligonucleotide
acgaguaucgugguagcag

SEQ ID NO: 1457415 - RNA, 19 nt, Artificial Sequence
  Description of Artificial Sequence: Synthetic oligonucleotide
acaaacuagcccucaccug

SEQ ID NO: 1457416 - RNA, 19 nt, Artificial Sequence
  Description of Artificial Sequence: Synthetic oligonucleotide
gaagcccgaacgaguaucg

SEQ ID NO: 1457417 - RNA, 19 nt, Artificial Sequence
  Description of Artificial Sequence: Synthetic oligonucleotide
gugacgcucagagucauag

SEQ ID NO: 1457418 - RNA, 19 nt, Artificial Sequence
  Description of Artificial Sequence: Synthetic oligonucleotide
uccgcacgcauccaucagc

SEQ ID NO: 1457419 - RNA, 19 nt, Artificial Sequence
  Description of Artificial Sequence: Synthetic oligonucleotide
agggcacugauucaacaga

SEQ ID NO: 1457420 - RNA, 19 nt, Artificial Sequence
  Description of Artificial Sequence: Synthetic oligonucleotide
cucauagguacgccgcagg

SEQ ID NO: 1457421 - RNA, 19 nt, Artificial Sequence
  Description of Artificial Sequence: Synthetic oligonucleotide
auaggaauuuguguuuaca

SEQ ID NO: 1457422 - RNA, 19 nt, Artificial Sequence
  Description of Artificial Sequence: Synthetic oligonucleotide
guagacgcucaaucucucg

SEQ ID NO: 1457423 - RNA, 19 nt, Artificial Sequence
  Description of Artificial Sequence: Synthetic oligonucleotide
acugcacacuaugaaaucu

SEQ ID NO: 1457424 - RNA, 19 nt, Artificial Sequence
  Description of Artificial Sequence: Synthetic oligonucleotide
aaauuuuauagcagcugua

SEQ ID NO: 1457425 - RNA, 19 nt, Artificial Sequence
  Description of Artificial Sequence: Synthetic oligonucleotide
gaacgaguaucgugguagc

SEQ ID NO: 1457426 - RNA, 19 nt, Artificial Sequence
  Description of Artificial Sequence: Synthetic oligonucleotide
agagccggcguuuucggcu

SEQ ID NO: 1457427 - RNA, 19 nt, Artificial Sequence
  Description of Artificial Sequence: Synthetic oligonucleotide
agaaacaguuuggcaaguc

SEQ ID NO: 1457428 - RNA, 19 nt, Artificial Sequence
  Description of Artificial Sequence: Synthetic oligonucleotide
auagaaguagggccucacu

SEQ ID NO: 1457429 - RNA, 19 nt, Artificial Sequence
  Description of Artificial Sequence: Synthetic oligonucleotide
aucgcggagcuugucaaac

SEQ ID NO: 1457430 - RNA, 19 nt, Artificial Sequence
  Description of Artificial Sequence: Synthetic oligonucleotide
guuacaaacuagcccucac

SEQ ID NO: 1457431 - RNA, 19 nt, Artificial Sequence
  Description of Artificial Sequence: Synthetic oligonucleotide
aaauguccaccaacuaaca

SEQ ID NO: 1457432 - RNA, 19 nt, Artificial Sequence
  Description of Artificial Sequence: Synthetic oligonucleotide
agccaagucgucugcaccu

SEQ ID NO: 1457433 - RNA, 19 nt, Artificial Sequence
  Description of Artificial Sequence: Synthetic oligonucleotide
auuaccaccugaccuggaa

SEQ ID NO: 1457434 - RNA, 19 nt, Artificial Sequence
  Description of Artificial Sequence: Synthetic oligonucleotide
aaguagggccucacuuccc

SEQ ID NO: 1457435 - RNA, 19 nt, Artificial Sequence
  Description of Artificial Sequence: Synthetic oligonucleotide
gaagggcacugauucaaca

SEQ ID NO: 1457436 - RNA, 19 nt, Artificial Sequence
  Description of Artificial Sequence: Synthetic oligonucleotide
ucaugcaguggucuccguc

SEQ ID NO: 1457437 - RNA, 19 nt, Artificial Sequence
  Description of Artificial Sequence: Synthetic oligonucleotide
uaccagaagcccgaacgag

SEQ ID NO: 1457438 - RNA, 19 nt, Artificial Sequence
  Description of Artificial Sequence: Synthetic oligonucleotide
auugggauccaagcugaag

SEQ ID NO: 1457439 - RNA, 19 nt, Artificial Sequence
  Description of Artificial Sequence: Synthetic oligonucleotide
agcccgaacgaguaucgug

SEQ ID NO: 1457440 - RNA, 19 nt, Artificial Sequence
  Description of Artificial Sequence: Synthetic oligonucleotide
cacucgugaggucaucagc

SEQ ID NO: 1457441 - RNA, 19 nt, Artificial Sequence
  Description of Artificial Sequence: Synthetic oligonucleotide
guggcuuguuccuccaccc

SEQ ID NO: 1457442 - RNA, 19 nt, Artificial Sequence
  Description of Artificial Sequence: Synthetic oligonucleotide
ugccggugggaguagaaaa

SEQ ID NO: 1457443 - RNA, 19 nt, Artificial Sequence
  Description of Artificial Sequence: Synthetic oligonucleotide
aaguuacaauaggaauuug

SEQ ID NO: 1457444 - RNA, 19 nt, Artificial Sequence
  Description of Artificial Sequence: Synthetic oligonucleotide
ugucaguugugagucaaau

SEQ ID NO: 1457445 - RNA, 19 nt, Artificial Sequence
  Description of Artificial Sequence: Synthetic oligonucleotide
caaucucucgagccagugc

SEQ ID NO: 1457446 - RNA, 19 nt, Artificial Sequence
  Description of Artificial Sequence: Synthetic oligonucleotide
acacucgugaggucaucag

SEQ ID NO: 1457447 - RNA, 19 nt, Artificial Sequence
  Description of Artificial Sequence: Synthetic oligonucleotide
caagagugggagcccuucg

SEQ ID NO: 1457448 - RNA, 19 nt, Artificial Sequence
  Description of Artificial Sequence: Synthetic oligonucleotide
gaugcggccuuccagccaa

SEQ ID NO: 1457449 - RNA, 19 nt, Artificial Sequence
  Description of Artificial Sequence: Synthetic oligonucleotide
gcacgcauccaucagcaag

SEQ ID NO: 1457450 - RNA, 19 nt, Artificial Sequence
  Description of Artificial Sequence: Synthetic oligonucleotide
cucauugugcuuggcaaug

SEQ ID NO: 1457451 - RNA, 19 nt, Artificial Sequence
  Description of Artificial Sequence: Synthetic oligonucleotide
caucacugaaauuacccua

SEQ ID NO: 1457452 - RNA, 19 nt, Artificial Sequence
  Description of Artificial Sequence: Synthetic oligonucleotide
ugugaguggccuucaccac

SEQ ID NO: 1457453 - RNA, 19 nt, Artificial Sequence
  Description of Artificial Sequence: Synthetic oligonucleotide
cugcacacgguagccaugg

SEQ ID NO: 1457454 - RNA, 19 nt, Artificial Sequence
  Description of Artificial Sequence: Synthetic oligonucleotide
cugaggagaagcgcucugg

SEQ ID NO: 1457455 - RNA, 19 nt, Artificial Sequence
  Description of Artificial Sequence: Synthetic oligonucleotide
cacccucaggaaaucgcgg

SEQ ID NO: 1457456 - RNA, 19 nt, Artificial Sequence
  Description of Artificial Sequence: Synthetic oligonucleotide
guauugggauccaagcuga

SEQ ID NO: 1457457 - RNA, 19 nt, Artificial Sequence
  Description of Artificial Sequence: Synthetic oligonucleotide
agccaaauguccaccaacu

SEQ ID NO: 1457458 - RNA, 19 nt, Artificial Sequence
  Description of Artificial Sequence: Synthetic oligonucleotide
uucauccgcacgcauccau

SEQ ID NO: 1457459 - RNA, 19 nt, Artificial Sequence
  Description of Artificial Sequence: Synthetic oligonucleotide
auugucaguugugagucaa

SEQ ID NO: 1457460 - RNA, 19 nt, Artificial Sequence
  Description of Artificial Sequence: Synthetic oligonucleotide
aacgaguaucgugguagca

SEQ ID NO: 1457461 - RNA, 19 nt, Artificial Sequence
  Description of Artificial Sequence: Synthetic oligonucleotide
ugugccugugcaugugccu

SEQ ID NO: 1457462 - RNA, 19 nt, Artificial Sequence
  Description of Artificial Sequence: Synthetic oligonucleotide
ucggcucuuguguuucaug

SEQ ID NO: 1457463 - RNA, 19 nt, Artificial Sequence
  Description of Artificial Sequence: Synthetic oligonucleotide
aucgugguagcagcuaugu

SEQ ID NO: 1457464 - RNA, 19 nt, Artificial Sequence
  Description of Artificial Sequence: Synthetic oligonucleotide
aaucgcggagcuugucaaa

SEQ ID NO: 1457465 - RNA, 19 nt, Artificial Sequence
  Description of Artificial Sequence: Synthetic oligonucleotide
ugggcauggaagguauaca

SEQ ID NO: 1457466 - RNA, 19 nt, Artificial Sequence
  Description of Artificial Sequence: Synthetic oligonucleotide
accccagauagaaguaggg

SEQ ID NO: 1457467 - RNA, 19 nt, Artificial Sequence
  Description of Artificial Sequence: Synthetic oligonucleotide
uacauucacugcacacuau

SEQ ID NO: 1457468 - RNA, 19 nt, Artificial Sequence
  Description of Artificial Sequence: Synthetic oligonucleotide
uggcagauacgcagaggcu

SEQ ID NO: 1457469 - RNA, 19 nt, Artificial Sequence
  Description of Artificial Sequence: Synthetic oligonucleotide
ucgugguagcagcuaugug

SEQ ID NO: 1457470 - RNA, 19 nt, Artificial Sequence
  Description of Artificial Sequence: Synthetic oligonucleotide
guaccagaagcccgaacga

SEQ ID NO: 1457471 - RNA, 19 nt, Artificial Sequence
  Description of Artificial Sequence: Synthetic oligonucleotide
gcccgaacgaguaucgugg

SEQ ID NO: 1457472 - RNA, 19 nt, Artificial Sequence
  Description of Artificial Sequence: Synthetic oligonucleotide
aggggcguguggcuguguc

SEQ ID NO: 1457473 - RNA, 19 nt, Artificial Sequence
  Description of Artificial Sequence: Synthetic oligonucleotide
augugccugcacccucacc

SEQ ID NO: 1457474 - RNA, 19 nt, Artificial Sequence
  Description of Artificial Sequence: Synthetic oligonucleotide
acaguuuggcaaguccuca

SEQ ID NO: 1457475 - RNA, 19 nt, Artificial Sequence
  Description of Artificial Sequence: Synthetic oligonucleotide
aagguauaugacagagaau

SEQ ID NO: 1457476 - RNA, 19 nt, Artificial Sequence
  Description of Artificial Sequence: Synthetic oligonucleotide
agcagcuaugugaguggcc

SEQ ID NO: 1457477 - RNA, 19 nt, Artificial Sequence
  Description of Artificial Sequence: Synthetic oligonucleotide
caccaacuaacaaacuaaa

SEQ ID NO: 1457478 - RNA, 19 nt, Artificial Sequence
  Description of Artificial Sequence: Synthetic oligonucleotide
ggggcgauagccuggacca

SEQ ID NO: 1457479 - RNA, 19 nt, Artificial Sequence
  Description of Artificial Sequence: Synthetic oligonucleotide
ggcauagguaccagaagcc

SEQ ID NO: 1457480 - RNA, 19 nt, Artificial Sequence
  Description of Artificial Sequence: Synthetic oligonucleotide
caccacacccacucgccag

SEQ ID NO: 1457481 - RNA, 19 nt, Artificial Sequence
  Description of Artificial Sequence: Synthetic oligonucleotide
cacuaugaaaucuuacaau

SEQ ID NO: 1457482 - RNA, 19 nt, Artificial Sequence
  Description of Artificial Sequence: Synthetic oligonucleotide
cuacaucagccugagccug

SEQ ID NO: 1457483 - RNA, 19 nt, Artificial Sequence
  Description of Artificial Sequence: Synthetic oligonucleotide
uugucaguugugagucaaa

SEQ ID NO: 1457484 - RNA, 19 nt, Artificial Sequence
  Description of Artificial Sequence: Synthetic oligonucleotide
acugugcaaaagagccggc

SEQ ID NO: 1457485 - RNA, 19 nt, Artificial Sequence
  Description of Artificial Sequence: Synthetic oligonucleotide
acgcauccaucagcaagcc

SEQ ID NO: 1457486 - RNA, 19 nt, Artificial Sequence
  Description of Artificial Sequence: Synthetic oligonucleotide
acgguagccaugguugaug

SEQ ID NO: 1457487 - RNA, 19 nt, Artificial Sequence
  Description of Artificial Sequence: Synthetic oligonucleotide
ucgccagcuuggcaggcca

SEQ ID NO: 1457488 - RNA, 19 nt, Artificial Sequence
  Description of Artificial Sequence: Synthetic oligonucleotide
accccuagaagaccccaga

SEQ ID NO: 1457489 - RNA, 19 nt, Artificial Sequence
  Description of Artificial Sequence: Synthetic oligonucleotide
cgugguagcagcuauguga

SEQ ID NO: 1457490 - RNA, 19 nt, Artificial Sequence
  Description of Artificial Sequence: Synthetic oligonucleotide
acgcucagagucauagaag

SEQ ID NO: 1457491 - RNA, 19 nt, Artificial Sequence
  Description of Artificial Sequence: Synthetic oligonucleotide
ugacgcucagagucauaga

SEQ ID NO: 1457492 - RNA, 19 nt, Artificial Sequence
  Description of Artificial Sequence: Synthetic oligonucleotide
uauugggauccaagcugaa

SEQ ID NO: 1457493 - RNA, 19 nt, Artificial Sequence
  Description of Artificial Sequence: Synthetic oligonucleotide
cuagaagaccccagauaga

SEQ ID NO: 1457494 - RNA, 19 nt, Artificial Sequence
  Description of Artificial Sequence: Synthetic oligonucleotide
agaagaccccagauagaag

SEQ ID NO: 1457495 - RNA, 19 nt, Artificial Sequence
  Description of Artificial Sequence: Synthetic oligonucleotide
gguauaugacagagaauac

SEQ ID NO: 1457496 - RNA, 19 nt, Artificial Sequence
  Description of Artificial Sequence: Synthetic oligonucleotide
auaccggaugcggccuucc

SEQ ID NO: 1457497 - RNA, 19 nt, Artificial Sequence
  Description of Artificial Sequence: Synthetic oligonucleotide
acacgguagccaugguuga

SEQ ID NO: 1457498 - RNA, 19 nt, Artificial Sequence
  Description of Artificial Sequence: Synthetic oligonucleotide
aagucgucugcaccucauu

SEQ ID NO: 1457499 - RNA, 19 nt, Artificial Sequence
  Description of Artificial Sequence: Synthetic oligonucleotide
ccacccucaggaaaucgcg

SEQ ID NO: 1457500 - RNA, 19 nt, Artificial Sequence
  Description of Artificial Sequence: Synthetic oligonucleotide
ggcucuuguguuucaugag

SEQ ID NO: 1457501 - RNA, 19 nt, Artificial Sequence
  Description of Artificial Sequence: Synthetic oligonucleotide
cgaacgaguaucgugguag

SEQ ID NO: 1457502 - RNA, 19 nt, Artificial Sequence
  Description of Artificial Sequence: Synthetic oligonucleotide
uggcuuguuccuccacccu

SEQ ID NO: 1457503 - RNA, 19 nt, Artificial Sequence
  Description of Artificial Sequence: Synthetic oligonucleotide
cuguagacgcucaaucucu

SEQ ID NO: 1457504 - RNA, 19 nt, Artificial Sequence
  Description of Artificial Sequence: Synthetic oligonucleotide
caccaccuacaucagccug

SEQ ID NO: 1457505 - RNA, 19 nt, Artificial Sequence
  Description of Artificial Sequence: Synthetic oligonucleotide
auccgcacgcauccaucag

SEQ ID NO: 1457506 - RNA, 19 nt, Artificial Sequence
  Description of Artificial Sequence: Synthetic oligonucleotide
uacgccgcagggcccaaaa

SEQ ID NO: 1457507 - RNA, 19 nt, Artificial Sequence
  Description of Artificial Sequence: Synthetic oligonucleotide
accaccuacaucagccuga

SEQ ID NO: 1457508 - RNA, 19 nt, Artificial Sequence
  Description of Artificial Sequence: Synthetic oligonucleotide
ggaccgucaccccuagaag

SEQ ID NO: 1457509 - RNA, 19 nt, Artificial Sequence
  Description of Artificial Sequence: Synthetic oligonucleotide
ucaccccuagaagacccca

SEQ ID NO: 1457510 - RNA, 19 nt, Artificial Sequence
  Description of Artificial Sequence: Synthetic oligonucleotide
cuguauugggauccaagcu

SEQ ID NO: 1457511 - RNA, 19 nt, Artificial Sequence
  Description of Artificial Sequence: Synthetic oligonucleotide
cuaugugaguggccuucac

SEQ ID NO: 1457512 - RNA, 19 nt, Artificial Sequence
  Description of Artificial Sequence: Synthetic oligonucleotide
gugggaguagaaaauggua

SEQ ID NO: 1457513 - RNA, 19 nt, Artificial Sequence
  Description of Artificial Sequence: Synthetic oligonucleotide
cgaguaucgugguagcagc

SEQ ID NO: 1457514 - RNA, 19 nt, Artificial Sequence
  Description of Artificial Sequence: Synthetic oligonucleotide
cauccgcacgcauccauca

SEQ ID NO: 1457515 - RNA, 19 nt, Artificial Sequence
  Description of Artificial Sequence: Synthetic oligonucleotide
gggaccgucaccccuagaa

SEQ ID NO: 1457516 - RNA, 19 nt, Artificial Sequence
  Description of Artificial Sequence: Synthetic oligonucleotide
ucgcggagcuugucaaacu

SEQ ID NO: 1457517 - RNA, 19 nt, Artificial Sequence
  Description of Artificial Sequence: Synthetic oligonucleotide
uuucggcucuuguguuuca

SEQ ID NO: 1457518 - RNA, 19 nt, Artificial Sequence
  Description of Artificial Sequence: Synthetic oligonucleotide
aguaucgugguagcagcua

SEQ ID NO: 1457519 - RNA, 19 nt, Artificial Sequence
  Description of Artificial Sequence: Synthetic oligonucleotide
aggcggcggggcgauagcc

SEQ ID NO: 1457520 - RNA, 19 nt, Artificial Sequence
  Description of Artificial Sequence: Synthetic oligonucleotide
agauagaaguagggccuca

SEQ ID NO: 1457521 - RNA, 19 nt, Artificial Sequence
  Description of Artificial Sequence: Synthetic oligonucleotide
cacccugugugcggcauag

SEQ ID NO: 1457522 - RNA, 19 nt, Artificial Sequence
  Description of Artificial Sequence: Synthetic oligonucleotide
uggcacccaagguggcuug

SEQ ID NO: 1457523 - RNA, 19 nt, Artificial Sequence
  Description of Artificial Sequence: Synthetic oligonucleotide
uaccggaugcggccuucca

SEQ ID NO: 1457524 - RNA, 19 nt, Artificial Sequence
  Description of Artificial Sequence: Synthetic oligonucleotide
ucccaagagugggagcccu

SEQ ID NO: 1457525 - RNA, 19 nt, Artificial Sequence
  Description of Artificial Sequence: Synthetic oligonucleotide
uggucuccguccacacccu

SEQ ID NO: 1457526 - RNA, 19 nt, Artificial Sequence
  Description of Artificial Sequence: Synthetic oligonucleotide
gucgucugcaccucauugu

SEQ ID NO: 1457527 - RNA, 19 nt, Artificial Sequence
  Description of Artificial Sequence: Synthetic oligonucleotide
gagccggcguuuucggcuc

SEQ ID NO: 1457528 - RNA, 19 nt, Artificial Sequence
  Description of Artificial Sequence: Synthetic oligonucleotide
gcggcauagguaccagaag

SEQ ID NO: 1457529 - RNA, 19 nt, Artificial Sequence
  Description of Artificial Sequence: Synthetic oligonucleotide
guaucgugguagcagcuau

SEQ ID NO: 1457530 - RNA, 19 nt, Artificial Sequence
  Description of Artificial Sequence: Synthetic oligonucleotide
aagcccgaacgaguaucgu

SEQ ID NO: 1457531 - RNA, 19 nt, Artificial Sequence
  Description of Artificial Sequence: Synthetic oligonucleotide
agacacgcagauggcagau

SEQ ID NO: 1457532 - RNA, 19 nt, Artificial Sequence
  Description of Artificial Sequence: Synthetic oligonucleotide
uggcagugacgcucagagu

SEQ ID NO: 1457533 - RNA, 19 nt, Artificial Sequence
  Description of Artificial Sequence: Synthetic oligonucleotide
ucauaccggaugcggccuu

SEQ ID NO: 1457534 - RNA, 19 nt, Artificial Sequence
  Description of Artificial Sequence: Synthetic oligonucleotide
gcacacuaugaaaucuuac

SEQ ID NO: 1457535 - RNA, 19 nt, Artificial Sequence
  Description of Artificial Sequence: Synthetic oligonucleotide
ccucaaaggguuuaauaua

SEQ ID NO: 1457536 - RNA, 19 nt, Artificial Sequence
  Description of Artificial Sequence: Synthetic oligonucleotide
gugagucaaauaaaauuuu

SEQ ID NO: 1457537 - RNA, 19 nt, Artificial Sequence
  Description of Artificial Sequence: Synthetic oligonucleotide
caagccaaauguccaccaa

SEQ ID NO: 1457538 - RNA, 19 nt, Artificial Sequence
  Description of Artificial Sequence: Synthetic oligonucleotide
aggucagguacaaguuaca

SEQ ID NO: 1457539 - RNA, 19 nt, Artificial Sequence
  Description of Artificial Sequence: Synthetic oligonucleotide
cacuuugagccagccagca

SEQ ID NO: 1457540 - RNA, 19 nt, Artificial Sequence
  Description of Artificial Sequence: Synthetic oligonucleotide
cgucaccccuagaagaccc

SEQ ID NO: 1457541 - RNA, 19 nt, Artificial Sequence
  Description of Artificial Sequence: Synthetic oligonucleotide
ccacuuugagccagccagc

SEQ ID NO: 1457542 - RNA, 19 nt, Artificial Sequence
  Description of Artificial Sequence: Synthetic oligonucleotide
gaggagaagcgcucuggau

SEQ ID NO: 1457543 - RNA, 19 nt, Artificial Sequence
  Description of Artificial Sequence: Synthetic oligonucleotide
caugugccugcacccucac

SEQ ID NO: 1457544 - RNA, 19 nt, Artificial Sequence
  Description of Artificial Sequence: Synthetic oligonucleotide
aucuuacaauggaaagcau

SEQ ID NO: 1457545 - RNA, 19 nt, Artificial Sequence
  Description of Artificial Sequence: Synthetic oligonucleotide
guguuucaugaggaagguc

SEQ ID NO: 1457546 - RNA, 19 nt, Artificial Sequence
  Description of Artificial Sequence: Synthetic oligonucleotide
ugcacacgguagccauggu

SEQ ID NO: 1457547 - RNA, 19 nt, Artificial Sequence
  Description of Artificial Sequence: Synthetic oligonucleotide
acccuacuuaacagcucag

SEQ ID NO: 1457548 - RNA, 19 nt, Artificial Sequence
  Description of Artificial Sequence: Synthetic oligonucleotide
cucccaagagugggagccc

SEQ ID NO: 1457549 - RNA, 19 nt, Artificial Sequence
  Description of Artificial Sequence: Synthetic oligonucleotide
ccuucgagaaaaccugaga

SEQ ID NO: 1457550 - RNA, 19 nt, Artificial Sequence
  Description of Artificial Sequence: Synthetic oligonucleotide
aggaaaucgcggagcuugu

SEQ ID NO: 1457551 - RNA, 19 nt, Artificial Sequence
  Description of Artificial Sequence: Synthetic oligonucleotide
gugugcggcauagguacca

SEQ ID NO: 1457552 - RNA, 19 nt, Artificial Sequence
  Description of Artificial Sequence: Synthetic oligonucleotide
gucaccccuagaagacccc

SEQ ID NO: 1457553 - RNA, 19 nt, Artificial Sequence
  Description of Artificial Sequence: Synthetic oligonucleotide
agggccucacuuccccaaa

SEQ ID NO: 1457554 - RNA, 19 nt, Artificial Sequence
  Description of Artificial Sequence: Synthetic oligonucleotide
cagcucagauguccagcuc

SEQ ID NO: 1457555 - RNA, 19 nt, Artificial Sequence
  Description of Artificial Sequence: Synthetic oligonucleotide
gcgauagccuggaccagag

SEQ ID NO: 1457556 - RNA, 19 nt, Artificial Sequence
  Description of Artificial Sequence: Synthetic oligonucleotide
gccucagucuguucugcca

SEQ ID NO: 1457557 - RNA, 19 nt, Artificial Sequence
  Description of Artificial Sequence: Synthetic oligonucleotide
cugcacacuaugaaaucuu

SEQ ID NO: 1457558 - RNA, 19 nt, Artificial Sequence
  Description of Artificial Sequence: Synthetic oligonucleotide
uagguaccagaagcccgaa

SEQ ID NO: 1457559 - RNA, 19 nt, Artificial Sequence
  Description of Artificial Sequence: Synthetic oligonucleotide
cauaccggaugcggccuuc

SEQ ID NO: 1457560 - RNA, 19 nt, Artificial Sequence
  Description of Artificial Sequence: Synthetic oligonucleotide
ugacacucgugaggucauc

SEQ ID NO: 1457561 - RNA, 19 nt, Artificial Sequence
  Description of Artificial Sequence: Synthetic oligonucleotide
cggggcgauagccuggacc

SEQ ID NO: 1457562 - RNA, 19 nt, Artificial Sequence
  Description of Artificial Sequence: Synthetic oligonucleotide
ccuacuuaacagcucagau

SEQ ID NO: 1457563 - RNA, 19 nt, Artificial Sequence
  Description of Artificial Sequence: Synthetic oligonucleotide
ccggugggaguagaaaaug

SEQ ID NO: 1457564 - RNA, 19 nt, Artificial Sequence
  Description of Artificial Sequence: Synthetic oligonucleotide
gugcggcauagguaccaga

SEQ ID NO: 1457565 - RNA, 19 nt, Artificial Sequence
  Description of Artificial Sequence: Synthetic oligonucleotide
ugcggccuuccagccaagu

SEQ ID NO: 1457566 - RNA, 19 nt, Artificial Sequence
  Description of Artificial Sequence: Synthetic oligonucleotide
cacugaaauuacccuacuu

SEQ ID NO: 1457567 - RNA, 19 nt, Artificial Sequence
  Description of Artificial Sequence: Synthetic oligonucleotide
ggcgauagccuggaccaga

SEQ ID NO: 1457568 - RNA, 19 nt, Artificial Sequence
  Description of Artificial Sequence: Synthetic oligonucleotide
agaggggcguguggcugug

SEQ ID NO: 1457569 - RNA, 19 nt, Artificial Sequence
  Description of Artificial Sequence: Synthetic oligonucleotide
gcggcggggcgauagccug

SEQ ID NO: 1457570 - RNA, 19 nt, Artificial Sequence
  Description of Artificial Sequence: Synthetic oligonucleotide
ugcugccggugggaguaga

SEQ ID NO: 1457571 - RNA, 19 nt, Artificial Sequence
  Description of Artificial Sequence: Synthetic oligonucleotide
gcaguggucuccguccaca

SEQ ID NO: 1457572 - RNA, 19 nt, Artificial Sequence
  Description of Artificial Sequence: Synthetic oligonucleotide
cucaaucucucgagccagu

SEQ ID NO: 1457573 - RNA, 19 nt, Artificial Sequence
  Description of Artificial Sequence: Synthetic oligonucleotide
acacccugugugcggcaua

SEQ ID NO: 1457574 - RNA, 19 nt, Artificial Sequence
  Description of Artificial Sequence: Synthetic oligonucleotide
gccucauagguacgccgca

SEQ ID NO: 1457575 - RNA, 19 nt, Artificial Sequence
  Description of Artificial Sequence: Synthetic oligonucleotide
ccgcacgcauccaucagca

SEQ ID NO: 1457576 - RNA, 19 nt, Artificial Sequence
  Description of Artificial Sequence: Synthetic oligonucleotide
ccaagagugggagcccuuc

SEQ ID NO: 1457577 - RNA, 19 nt, Artificial Sequence
  Description of Artificial Sequence: Synthetic oligonucleotide
caagucgucugcaccucau

SEQ ID NO: 1457578 - RNA, 19 nt, Artificial Sequence
  Description of Artificial Sequence: Synthetic oligonucleotide
gacacgcagauggcagaua

SEQ ID NO: 1457579 - RNA, 19 nt, Artificial Sequence
  Description of Artificial Sequence: Synthetic oligonucleotide
gcuaugugaguggccuuca

SEQ ID NO: 1457580 - RNA, 19 nt, Artificial Sequence
  Description of Artificial Sequence: Synthetic oligonucleotide
gcggccuuccagccaaguc

SEQ ID NO: 1457581 - RNA, 19 nt, Artificial Sequence
  Description of Artificial Sequence: Synthetic oligonucleotide
gaagcacgugcuccauguu

SEQ ID NO: 1457582 - RNA, 19 nt, Artificial Sequence
  Description of Artificial Sequence: Synthetic oligonucleotide
cccuagaagaccccagaua

SEQ ID NO: 1457583 - RNA, 19 nt, Artificial Sequence
  Description of Artificial Sequence: Synthetic oligonucleotide
cagcucuaucagaaacagu

SEQ ID NO: 1457584 - RNA, 19 nt, Artificial Sequence
  Description of Artificial Sequence: Synthetic oligonucleotide
cucauaccggaugcggccu

SEQ ID NO: 1457585 - RNA, 19 nt, Artificial Sequence
  Description of Artificial Sequence: Synthetic oligonucleotide
cuucauccgcacgcaucca

SEQ ID NO: 1457586 - RNA, 19 nt, Artificial Sequence
  Description of Artificial Sequence: Synthetic oligonucleotide
cccuacuuaacagcucaga

SEQ ID NO: 1457587 - RNA, 19 nt, Artificial Sequence
  Description of Artificial Sequence: Synthetic oligonucleotide
ccgucaccccuagaagacc

SEQ ID NO: 1457588 - RNA, 19 nt, Artificial Sequence
  Description of Artificial Sequence: Synthetic oligonucleotide
cggaugcggccuuccagcc

SEQ ID NO: 1457589 - RNA, 19 nt, Artificial Sequence
  Description of Artificial Sequence: Synthetic oligonucleotide
ccaagguggcuuguuccuc

SEQ ID NO: 1457590 - RNA, 19 nt, Artificial Sequence
  Description of Artificial Sequence: Synthetic oligonucleotide
agccggcguuuucggcucu

SEQ ID NO: 1457591 - RNA, 19 nt, Artificial Sequence
  Description of Artificial Sequence: Synthetic oligonucleotide
cgauagccuggaccagagg

SEQ ID NO: 1457592 - RNA, 19 nt, Artificial Sequence
  Description of Artificial Sequence: Synthetic oligonucleotide
cgaagcacgugcuccaugu

SEQ ID NO: 1457593 - RNA, 19 nt, Artificial Sequence
  Description of Artificial Sequence: Synthetic oligonucleotide
gucuccguccacacccugu

SEQ ID NO: 1457594 - RNA, 19 nt, Artificial Sequence
  Description of Artificial Sequence: Synthetic oligonucleotide
agugggcauggaagguaua

SEQ ID NO: 1457595 - RNA, 19 nt, Artificial Sequence
  Description of Artificial Sequence: Synthetic oligonucleotide
gggcacugauucaacagau

SEQ ID NO: 1457596 - RNA, 19 nt, Artificial Sequence
  Description of Artificial Sequence: Synthetic oligonucleotide
ggaaagcaucaggucaggu

SEQ ID NO: 1457597 - RNA, 19 nt, Artificial Sequence
  Description of Artificial Sequence: Synthetic oligonucleotide
agugacgcucagagucaua

SEQ ID NO: 1457598 - RNA, 19 nt, Artificial Sequence
  Description of Artificial Sequence: Synthetic oligonucleotide
gugcaugugccugcacccu

SEQ ID NO: 1457599 - RNA, 19 nt, Artificial Sequence
  Description of Artificial Sequence: Synthetic oligonucleotide
gccaagucgucugcaccuc

SEQ ID NO: 1457600 - RNA, 19 nt, Artificial Sequence
  Description of Artificial Sequence: Synthetic oligonucleotide
gggcgauagccuggaccag

SEQ ID NO: 1457601 - RNA, 19 nt, Artificial Sequence
  Description of Artificial Sequence: Synthetic oligonucleotide
cagaagcccgaacgaguau

SEQ ID NO: 1457602 - RNA, 19 nt, Artificial Sequence
  Description of Artificial Sequence: Synthetic oligonucleotide
gcaccucauugugcuuggc

SEQ ID NO: 1457603 - RNA, 19 nt, Artificial Sequence
  Description of Artificial Sequence: Synthetic oligonucleotide
augcggccuuccagccaag

SEQ ID NO: 1457604 - RNA, 19 nt, Artificial Sequence
  Description of Artificial Sequence: Synthetic oligonucleotide
gccggugggaguagaaaau

SEQ ID NO: 1457605 - RNA, 19 nt, Artificial Sequence
  Description of Artificial Sequence: Synthetic oligonucleotide
ggcggggcgauagccugga

SEQ ID NO: 1457606 - RNA, 19 nt, Artificial Sequence
  Description of Artificial Sequence: Synthetic oligonucleotide
cagugacgcucagagucau

SEQ ID NO: 1457607 - RNA, 19 nt, Artificial Sequence
  Description of Artificial Sequence: Synthetic oligonucleotide
gcguguggcugugucugaa

SEQ ID NO: 1457608 - RNA, 19 nt, Artificial Sequence
  Description of Artificial Sequence: Synthetic oligonucleotide
cacgguagccaugguugau

SEQ ID NO: 1457609 - RNA, 19 nt, Artificial Sequence
  Description of Artificial Sequence: Synthetic oligonucleotide
cggcggggcgauagccugg

SEQ ID NO: 1457610 - RNA, 19 nt, Artificial Sequence
  Description of Artificial Sequence: Synthetic oligonucleotide
ccgaacgaguaucguggua

SEQ ID NO: 1457611 - RNA, 19 nt, Artificial Sequence
  Description of Artificial Sequence: Synthetic oligonucleotide
ccggcguuuucggcucuug

SEQ ID NO: 1457612 - RNA, 19 nt, Artificial Sequence
  Description of Artificial Sequence: Synthetic oligonucleotide
cacacccugugugcggcau

SEQ ID NO: 1457613 - RNA, 19 nt, Artificial Sequence
  Description of Artificial Sequence: Synthetic oligonucleotide
cccucaccugcugccggug

SEQ ID NO: 1457614 - RNA, 19 nt, Artificial Sequence
  Description of Artificial Sequence: Synthetic oligonucleotide
cccgaacgaguaucguggu

SEQ ID NO: 1457615 - RNA, 19 nt, Artificial Sequence
  Description of Artificial Sequence: Synthetic oligonucleotide
guacgccgcagggcccaaa

SEQ ID NO: 1457616 - RNA, 19 nt, Artificial Sequence
  Description of Artificial Sequence: Synthetic oligonucleotide
ggggaccgucaccccuaga

SEQ ID NO: 1457617 - RNA, 19 nt, Artificial Sequence
  Description of Artificial Sequence: Synthetic oligonucleotide
cgccagcuuggcaggccac

SEQ ID NO: 1457618 - RNA, 19 nt, Artificial Sequence
  Description of Artificial Sequence: Synthetic oligonucleotide
ggcggcggggcgauagccu

SEQ ID NO: 1457619 - RNA, 19 nt, Artificial Sequence
  Description of Artificial Sequence: Synthetic oligonucleotide
gccuuccagccaagucguc

SEQ ID NO: 1457620 - RNA, 19 nt, Artificial Sequence
  Description of Artificial Sequence: Synthetic oligonucleotide
ggcacccaagguggcuugu

SEQ ID NO: 1457621 - RNA, 19 nt, Artificial Sequence
  Description of Artificial Sequence: Synthetic oligonucleotide
gcggggcgauagccuggac

SEQ ID NO: 1457622 - RNA, 19 nt, Artificial Sequence
  Description of Artificial Sequence: Synthetic oligonucleotide
gguacgccgcagggcccaa

SEQ ID NO: 1457623 - RNA, 19 nt, Artificial Sequence
  Description of Artificial Sequence: Synthetic oligonucleotide
cgcacgcauccaucagcaa

SEQ ID NO: 1457624 - RNA, 19 nt, Artificial Sequence
  Description of Artificial Sequence: Synthetic oligonucleotide
gccggcguuuucggcucuu

SEQ ID NO: 1457625 - RNA, 19 nt, Artificial Sequence
  Description of Artificial Sequence: Synthetic oligonucleotide
agagcuaagcuccaaacgc

SEQ ID NO: 1457626 - RNA, 19 nt, Artificial Sequence
  Description of Artificial Sequence: Synthetic oligonucleotide
uuauuaaaggagacgacag

SEQ ID NO: 1457627 - RNA, 19 nt, Artificial Sequence
  Description of Artificial Sequence: Synthetic oligonucleotide
ugucaaacgacucugcuug

SEQ ID NO: 1457628 - RNA, 19 nt, Artificial Sequence
  Description of Artificial Sequence: Synthetic oligonucleotide
uuugacaacaggcucuacg

SEQ ID NO: 1457629 - RNA, 19 nt, Artificial Sequence
  Description of Artificial Sequence: Synthetic oligonucleotide
gaaacuuaguccuuggggc

SEQ ID NO: 1457630 - RNA, 19 nt, Artificial Sequence
  Description of Artificial Sequence: Synthetic oligonucleotide
aaacuuaguccuuggggcc

SEQ ID NO: 1457631 - RNA, 19 nt, Artificial Sequence
  Description of Artificial Sequence: Synthetic oligonucleotide
caaguauuugacaacaggc

SEQ ID NO: 1457632 - RNA, 19 nt, Artificial Sequence
  Description of Artificial Sequence: Synthetic oligonucleotide
aauagugcuccauccuucc

SEQ ID NO: 1457633 - RNA, 19 nt, Artificial Sequence
  Description of Artificial Sequence: Synthetic oligonucleotide
uguaagauaaggacaaggu

SEQ ID NO: 1457634 - RNA, 19 nt, Artificial Sequence
  Description of Artificial Sequence: Synthetic oligonucleotide
aguauuugacaacaggcuc

SEQ ID NO: 1457635 - RNA, 19 nt, Artificial Sequence
  Description of Artificial Sequence: Synthetic oligonucleotide
auuacucugcagcacaucg

SEQ ID NO: 1457636 - RNA, 19 nt, Artificial Sequence
  Description of Artificial Sequence: Synthetic oligonucleotide
agacagaucaagaaggacc

SEQ ID NO: 1457637 - RNA, 19 nt, Artificial Sequence
  Description of Artificial Sequence: Synthetic oligonucleotide
aucgcucauagucugaccc

SEQ ID NO: 1457638 - RNA, 19 nt, Artificial Sequence
  Description of Artificial Sequence: Synthetic oligonucleotide
uguuguaagauaaggacaa

SEQ ID NO: 1457639 - RNA, 19 nt, Artificial Sequence
  Description of Artificial Sequence: Synthetic oligonucleotide
ucuacgagacucaaguugc

SEQ ID NO: 1457640 - RNA, 19 nt, Artificial Sequence
  Description of Artificial Sequence: Synthetic oligonucleotide
uuggaaguagcccacaugu

SEQ ID NO: 1457641 - RNA, 19 nt, Artificial Sequence
  Description of Artificial Sequence: Synthetic oligonucleotide
guagcggucagucagaggc

SEQ ID NO: 1457642 - RNA, 19 nt, Artificial Sequence
  Description of Artificial Sequence: Synthetic oligonucleotide
cuuggcacgaguuggaugc

SEQ ID NO: 1457643 - RNA, 19 nt, Artificial Sequence
  Description of Artificial Sequence: Synthetic oligonucleotide
cuaagcaugggacaggccc

SEQ ID NO: 1457644 - RNA, 19 nt, Artificial Sequence
  Description of Artificial Sequence: Synthetic oligonucleotide
agccaaggaaacuuagucc

SEQ ID NO: 1457645 - RNA, 19 nt, Artificial Sequence
  Description of Artificial Sequence: Synthetic oligonucleotide
aacgcaggaggguaugggc

SEQ ID NO: 1457646 - RNA, 19 nt, Artificial Sequence
  Description of Artificial Sequence: Synthetic oligonucleotide
uaaaggagacgacaggacc

SEQ ID NO: 1457647 - RNA, 19 nt, Artificial Sequence
  Description of Artificial Sequence: Synthetic oligonucleotide
uggaggauagacaagaguu

SEQ ID NO: 1457648 - RNA, 19 nt, Artificial Sequence
  Description of Artificial Sequence: Synthetic oligonucleotide
uuguaagauaaggacaagg

SEQ ID NO: 1457649 - RNA, 19 nt, Artificial Sequence
  Description of Artificial Sequence: Synthetic oligonucleotide
gaaaagguuauccugaacu

SEQ ID NO: 1457650 - RNA, 19 nt, Artificial Sequence
  Description of Artificial Sequence: Synthetic oligonucleotide
uucgguagcggucagucag

SEQ ID NO: 1457651 - RNA, 19 nt, Artificial Sequence
  Description of Artificial Sequence: Synthetic oligonucleotide
augaaguuacuucagccag

SEQ ID NO: 1457652 - RNA, 19 nt, Artificial Sequence
  Description of Artificial Sequence: Synthetic oligonucleotide
aguggauucaugcucaagu

SEQ ID NO: 1457653 - RNA, 19 nt, Artificial Sequence
  Description of Artificial Sequence: Synthetic oligonucleotide
uguaaaguggcuuggccug

SEQ ID NO: 1457654 - RNA, 19 nt, Artificial Sequence
  Description of Artificial Sequence: Synthetic oligonucleotide
  modified_base (16)..(16): a, c, u, g, unknown or other
aguuggaugccugacnggg

SEQ ID NO: 1457655 - RNA, 19 nt, Artificial Sequence
  Description of Artificial Sequence: Synthetic oligonucleotide
aucaagacaugucaaacga

SEQ ID NO: 1457656 - RNA, 19 nt, Artificial Sequence
  Description of Artificial Sequence: Synthetic oligonucleotide
uuggucaaguauuugacaa

SEQ ID NO: 1457657 - RNA, 19 nt, Artificial Sequence
  Description of Artificial Sequence: Synthetic oligonucleotide
uugaacucgaacccggaug

SEQ ID NO: 1457658 - RNA, 19 nt, Artificial Sequence
  Description of Artificial Sequence: Synthetic oligonucleotide
cuagccaagccacagagug

SEQ ID NO: 1457659 - RNA, 19 nt, Artificial Sequence
  Description of Artificial Sequence: Synthetic oligonucleotide
agccaauagugcuccaucc

SEQ ID NO: 1457660 - RNA, 19 nt, Artificial Sequence
  Description of Artificial Sequence: Synthetic oligonucleotide
ucuguaaaguggcuuggcc

SEQ ID NO: 1457661 - RNA, 19 nt, Artificial Sequence
  Description of Artificial Sequence: Synthetic oligonucleotide
ggaaacuuaguccuugggg

SEQ ID NO: 1457662 - RNA, 19 nt, Artificial Sequence
  Description of Artificial Sequence: Synthetic oligonucleotide
aaguauuugacaacaggcu

SEQ ID NO: 1457663 - RNA, 19 nt, Artificial Sequence
  Description of Artificial Sequence: Synthetic oligonucleotide
aagacagaucaagaaggac

SEQ ID NO: 1457664 - RNA, 19 nt, Artificial Sequence
  Description of Artificial Sequence: Synthetic oligonucleotide
uccuagccaagccacagag

SEQ ID NO: 1457665 - RNA, 19 nt, Artificial Sequence
  Description of Artificial Sequence: Synthetic oligonucleotide
uuaaaggagacgacaggac

SEQ ID NO: 1457666 - RNA, 19 nt, Artificial Sequence
  Description of Artificial Sequence: Synthetic oligonucleotide
ugcaggguacuaagcaugg

SEQ ID NO: 1457667 - RNA, 19 nt, Artificial Sequence
  Description of Artificial Sequence: Synthetic oligonucleotide
gaggcauuuaaagaagagc

SEQ ID NO: 1457668 - RNA, 19 nt, Artificial Sequence
  Description of Artificial Sequence: Synthetic oligonucleotide
guuauccugaacuugaacu

SEQ ID NO: 1457669 - RNA, 19 nt, Artificial Sequence
  Description of Artificial Sequence: Synthetic oligonucleotide
cucuacgagacucaaguug

SEQ ID NO: 1457670 - RNA, 19 nt, Artificial Sequence
  Description of Artificial Sequence: Synthetic oligonucleotide
ugcuccauccuuccguagg

SEQ ID NO: 1457671 - RNA, 19 nt, Artificial Sequence
  Description of Artificial Sequence: Synthetic oligonucleotide
uuacucugcagcacaucgg

SEQ ID NO: 1457672 - RNA, 19 nt, Artificial Sequence
  Description of Artificial Sequence: Synthetic oligonucleotide
uacuaggccugcuacugcg

SEQ ID NO: 1457673 - RNA, 19 nt, Artificial Sequence
  Description of Artificial Sequence: Synthetic oligonucleotide
gaggauagacaagaguucc

SEQ ID NO: 1457674 - RNA, 19 nt, Artificial Sequence
  Description of Artificial Sequence: Synthetic oligonucleotide
gugcaauuuucccuguugg

SEQ ID NO: 1457675 - RNA, 19 nt, Artificial Sequence
  Description of Artificial Sequence: Synthetic oligonucleotide
guaagauaaggacaagguc

SEQ ID NO: 1457676 - RNA, 19 nt, Artificial Sequence
  Description of Artificial Sequence: Synthetic oligonucleotide
aagacaugucaaacgacuc

SEQ ID NO: 1457677 - RNA, 19 nt, Artificial Sequence
  Description of Artificial Sequence: Synthetic oligonucleotide
guagggugagccuuggaag

SEQ ID NO: 1457678 - RNA, 19 nt, Artificial Sequence
  Description of Artificial Sequence: Synthetic oligonucleotide
gucagaggcauuuaaagaa

SEQ ID NO: 1457679 - RNA, 19 nt, Artificial Sequence
  Description of Artificial Sequence: Synthetic oligonucleotide
aacuugaacucgaacccgg

SEQ ID NO: 1457680 - RNA, 19 nt, Artificial Sequence
  Description of Artificial Sequence: Synthetic oligonucleotide
ugaaguuacuucagccagc

SEQ ID NO: 1457681 - RNA, 19 nt, Artificial Sequence
  Description of Artificial Sequence: Synthetic oligonucleotide
uguuugguaguagcgcugg

SEQ ID NO: 1457682 - RNA, 19 nt, Artificial Sequence
  Description of Artificial Sequence: Synthetic oligonucleotide
  modified_base (2)..(2): a, c, u, g, unknown or other
cngggcaucgcucauaguc

SEQ ID NO: 1457683 - RNA, 19 nt, Artificial Sequence
  Description of Artificial Sequence: Synthetic oligonucleotide
agcguguuguaagauaagg

SEQ ID NO: 1457684 - RNA, 19 nt, Artificial Sequence
  Description of Artificial Sequence: Synthetic oligonucleotide
aaaggagacgacaggacca

SEQ ID NO: 1457685 - RNA, 19 nt, Artificial Sequence
  Description of Artificial Sequence: Synthetic oligonucleotide
cucaacaucuuggaaggcg

SEQ ID NO: 1457686 - RNA, 19 nt, Artificial Sequence
  Description of Artificial Sequence: Synthetic oligonucleotide
aacuuaguccuuggggccg

SEQ ID NO: 1457687 - RNA, 19 nt, Artificial Sequence
  Description of Artificial Sequence: Synthetic oligonucleotide
aucugcucaguucucucac

SEQ ID NO: 1457688 - RNA, 19 nt, Artificial Sequence
  Description of Artificial Sequence: Synthetic oligonucleotide
  modified_base (4)..(4): a, c, u, g, unknown or other
gacngggcaucgcucauag

SEQ ID NO: 1457689 - RNA, 19 nt, Artificial Sequence
  Description of Artificial Sequence: Synthetic oligonucleotide
gaaguagcccacauguuug

SEQ ID NO: 1457690 - RNA, 19 nt, Artificial Sequence
  Description of Artificial Sequence: Synthetic oligonucleotide
aaggaccagguuccauggc

SEQ ID NO: 1457691 - RNA, 19 nt, Artificial Sequence
  Description of Artificial Sequence: Synthetic oligonucleotide
gacaugucaaacgacucug

SEQ ID NO: 1457692 - RNA, 19 nt, Artificial Sequence
  Description of Artificial Sequence: Synthetic oligonucleotide
cuuggaaggcgcuacccag

SEQ ID NO: 1457693 - RNA, 19 nt, Artificial Sequence
  Description of Artificial Sequence: Synthetic oligonucleotide
aaguggcuuggccugagga

SEQ ID NO: 1457694 - RNA, 19 nt, Artificial Sequence
  Description of Artificial Sequence: Synthetic oligonucleotide
aggguacuaagcaugggac

SEQ ID NO: 1457695 - RNA, 19 nt, Artificial Sequence
  Description of Artificial Sequence: Synthetic oligonucleotide
agacaugucaaacgacucu

SEQ ID NO: 1457696 - RNA, 19 nt, Artificial Sequence
  Description of Artificial Sequence: Synthetic oligonucleotide
aaacgcaggaggguauggg

SEQ ID NO: 1457697 - RNA, 19 nt, Artificial Sequence
  Description of Artificial Sequence: Synthetic oligonucleotide
agaugucggaguucagggg

SEQ ID NO: 1457698 - RNA, 19 nt, Artificial Sequence
  Description of Artificial Sequence: Synthetic oligonucleotide
guaggugcaggguacuaag

SEQ ID NO: 1457699 - RNA, 19 nt, Artificial Sequence
  Description of Artificial Sequence: Synthetic oligonucleotide
uuugguaguagcgcugggc

SEQ ID NO: 1457700 - RNA, 19 nt, Artificial Sequence
  Description of Artificial Sequence: Synthetic oligonucleotide
acgagacucaaguugcucu

SEQ ID NO: 1457701 - RNA, 19 nt, Artificial Sequence
  Description of Artificial Sequence: Synthetic oligonucleotide
gguuaggugggccagagca

SEQ ID NO: 1457702 - RNA, 19 nt, Artificial Sequence
  Description of Artificial Sequence: Synthetic oligonucleotide
aguggcuuggccugaggag

SEQ ID NO: 1457703 - RNA, 19 nt, Artificial Sequence
  Description of Artificial Sequence: Synthetic oligonucleotide
ucaacaagcuggcgcagac

SEQ ID NO: 1457704 - RNA, 19 nt, Artificial Sequence
  Description of Artificial Sequence: Synthetic oligonucleotide
uagucugacccugagguac

SEQ ID NO: 1457705 - RNA, 19 nt, Artificial Sequence
  Description of Artificial Sequence: Synthetic oligonucleotide
uaguccguguaccccaacc

SEQ ID NO: 1457706 - RNA, 19 nt, Artificial Sequence
  Description of Artificial Sequence: Synthetic oligonucleotide
cauagucugacccugaggu

SEQ ID NO: 1457707 - RNA, 19 nt, Artificial Sequence
  Description of Artificial Sequence: Synthetic oligonucleotide
gcauuuaaagaagagcuug

SEQ ID NO: 1457708 - RNA, 19 nt, Artificial Sequence
  Description of Artificial Sequence: Synthetic oligonucleotide
aaaguggcuuggccugagg

SEQ ID NO: 1457709 - RNA, 19 nt, Artificial Sequence
  Description of Artificial Sequence: Synthetic oligonucleotide
gguacuaagcaugggacag

SEQ ID NO: 1457710 - RNA, 19 nt, Artificial Sequence
  Description of Artificial Sequence: Synthetic oligonucleotide
aggacaaggucuucaggug

SEQ ID NO: 1457711 - RNA, 19 nt, Artificial Sequence
  Description of Artificial Sequence: Synthetic oligonucleotide
ugcuuuaguccguguaccc

SEQ ID NO: 1457712 - RNA, 19 nt, Artificial Sequence
  Description of Artificial Sequence: Synthetic oligonucleotide
gggaccuugguccagugag

SEQ ID NO: 1457713 - RNA, 19 nt, Artificial Sequence
  Description of Artificial Sequence: Synthetic oligonucleotide
aaggagacgacaggaccag

SEQ ID NO: 1457714 - RNA, 19 nt, Artificial Sequence
  Description of Artificial Sequence: Synthetic oligonucleotide
uaugggccgguaaacucug

SEQ ID NO: 1457715 - RNA, 19 nt, Artificial Sequence
  Description of Artificial Sequence: Synthetic oligonucleotide
uugcuuuaguccguguacc

SEQ ID NO: 1457716 - RNA, 19 nt, Artificial Sequence
  Description of Artificial Sequence: Synthetic oligonucleotide
gagguacuaggccugcuac

SEQ ID NO: 1457717 - RNA, 19 nt, Artificial Sequence
  Description of Artificial Sequence: Synthetic oligonucleotide
cuuggggccgcucuuggag

SEQ ID NO: 1457718 - RNA, 19 nt, Artificial Sequence
  Description of Artificial Sequence: Synthetic oligonucleotide
  modified_base (17)..(17): a, c, u, g, unknown or other
gaguuggaugccugacngg

SEQ ID NO: 1457719 - RNA, 19 nt, Artificial Sequence
  Description of Artificial Sequence: Synthetic oligonucleotide
ccaugaaguuacuucagcc

SEQ ID NO: 1457720 - RNA, 19 nt, Artificial Sequence
  Description of Artificial Sequence: Synthetic oligonucleotide
ucccuguugggucccgagg

SEQ ID NO: 1457721 - RNA, 19 nt, Artificial Sequence
  Description of Artificial Sequence: Synthetic oligonucleotide
acaugucaaacgacucugc

SEQ ID NO: 1457722 - RNA, 19 nt, Artificial Sequence
  Description of Artificial Sequence: Synthetic oligonucleotide
aguuccuccaaguucugua

SEQ ID NO: 1457723 - RNA, 19 nt, Artificial Sequence
  Description of Artificial Sequence: Synthetic oligonucleotide
cuuuaguccguguacccca

SEQ ID NO: 1457724 - RNA, 19 nt, Artificial Sequence
  Description of Artificial Sequence: Synthetic oligonucleotide
auagugcuccauccuuccg

SEQ ID NO: 1457725 - RNA, 19 nt, Artificial Sequence
  Description of Artificial Sequence: Synthetic oligonucleotide
ugcaucucggucccuugug

SEQ ID NO: 1457726 - RNA, 19 nt, Artificial Sequence
  Description of Artificial Sequence: Synthetic oligonucleotide
ugguccagugagcacgcgc

SEQ ID NO: 1457727 - RNA, 19 nt, Artificial Sequence
  Description of Artificial Sequence: Synthetic oligonucleotide
  modified_base (11)..(11): a, c, u, g, unknown or other
gaugccugacngggcaucg

SEQ ID NO: 1457728 - RNA, 19 nt, Artificial Sequence
  Description of Artificial Sequence: Synthetic oligonucleotide
uaggugcaggguacuaagc

SEQ ID NO: 1457729 - RNA, 19 nt, Artificial Sequence
  Description of Artificial Sequence: Synthetic oligonucleotide
cuuggucaaguauuugaca

SEQ ID NO: 1457730 - RNA, 19 nt, Artificial Sequence
  Description of Artificial Sequence: Synthetic oligonucleotide
uagcggucagucagaggcg

SEQ ID NO: 1457731 - RNA, 19 nt, Artificial Sequence
  Description of Artificial Sequence: Synthetic oligonucleotide
uuggggccgcucuuggagg

SEQ ID NO: 1457732 - RNA, 19 nt, Artificial Sequence
  Description of Artificial Sequence: Synthetic oligonucleotide
guggauucaugcucaaguc

SEQ ID NO: 1457733 - RNA, 19 nt, Artificial Sequence
  Description of Artificial Sequence: Synthetic oligonucleotide
gacgacaggaccaggguca

SEQ ID NO: 1457734 - RNA, 19 nt, Artificial Sequence
  Description of Artificial Sequence: Synthetic oligonucleotide
ugguaguagcgcugggcag

SEQ ID NO: 1457735 - RNA, 19 nt, Artificial Sequence
  Description of Artificial Sequence: Synthetic oligonucleotide
ugagguacuaggccugcua

SEQ ID NO: 1457736 - RNA, 19 nt, Artificial Sequence
  Description of Artificial Sequence: Synthetic oligonucleotide
cacacugcaucucgguccc

SEQ ID NO: 1457737 - RNA, 19 nt, Artificial Sequence
  Description of Artificial Sequence: Synthetic oligonucleotide
ucaaacgacucugcuuggc

SEQ ID NO: 1457738 - RNA, 19 nt, Artificial Sequence
  Description of Artificial Sequence: Synthetic oligonucleotide
ggauggagcagccugacaa

SEQ ID NO: 1457739 - RNA, 19 nt, Artificial Sequence
  Description of Artificial Sequence: Synthetic oligonucleotide
ugauuggaagacagaucaa

SEQ ID NO: 1457740 - RNA, 19 nt, Artificial Sequence
  Description of Artificial Sequence: Synthetic oligonucleotide
cuaggccugcuacugcggg

SEQ ID NO: 1457741 - RNA, 19 nt, Artificial Sequence
  Description of Artificial Sequence: Synthetic oligonucleotide
ugggccgguaaacucugca

SEQ ID NO: 1457742 - RNA, 19 nt, Artificial Sequence
  Description of Artificial Sequence: Synthetic oligonucleotide
  modified_base (19)..(19): a, c, u, g, unknown or other
acgaguuggaugccugacn

SEQ ID NO: 1457743 - RNA, 19 nt, Artificial Sequence
  Description of Artificial Sequence: Synthetic oligonucleotide
  modified_base (9)..(9): a, c, u, g, unknown or other
ugccugacngggcaucgcu

SEQ ID NO: 1457744 - RNA, 19 nt, Artificial Sequence
  Description of Artificial Sequence: Synthetic oligonucleotide
gccuucaacaagcuggcgc

SEQ ID NO: 1457745 - RNA, 19 nt, Artificial Sequence
  Description of Artificial Sequence: Synthetic oligonucleotide
uaguccuuggggccgcucu

SEQ ID NO: 1457746 - RNA, 19 nt, Artificial Sequence
  Description of Artificial Sequence: Synthetic oligonucleotide
aggguaugggccgguaaac

SEQ ID NO: 1457747 - RNA, 19 nt, Artificial Sequence
  Description of Artificial Sequence: Synthetic oligonucleotide
cucgaacccggaugggagg

SEQ ID NO: 1457748 - RNA, 19 nt, Artificial Sequence
  Description of Artificial Sequence: Synthetic oligonucleotide
agggaugaggaaaagguua

SEQ ID NO: 1457749 - RNA, 19 nt, Artificial Sequence
  Description of Artificial Sequence: Synthetic oligonucleotide
uguaggugcaggguacuaa

SEQ ID NO: 1457750 - RNA, 19 nt, Artificial Sequence
  Description of Artificial Sequence: Synthetic oligonucleotide
caggguacuaagcauggga

SEQ ID NO: 1457751 - RNA, 19 nt, Artificial Sequence
  Description of Artificial Sequence: Synthetic oligonucleotide
aagccggcacugaagccac

SEQ ID NO: 1457752 - RNA, 19 nt, Artificial Sequence
  Description of Artificial Sequence: Synthetic oligonucleotide
uuuaguccguguaccccaa

SEQ ID NO: 1457753 - RNA, 19 nt, Artificial Sequence
  Description of Artificial Sequence: Synthetic oligonucleotide
gucaaacgacucugcuugg

SEQ ID NO: 1457754 - RNA, 19 nt, Artificial Sequence
  Description of Artificial Sequence: Synthetic oligonucleotide
guacuaagcaugggacagg

SEQ ID NO: 1457755 - RNA, 19 nt, Artificial Sequence
  Description of Artificial Sequence: Synthetic oligonucleotide
augucggaguucaggggcc

SEQ ID NO: 1457756 - RNA, 19 nt, Artificial Sequence
  Description of Artificial Sequence: Synthetic oligonucleotide
guuacuucagccagcaccu

SEQ ID NO: 1457757 - RNA, 19 nt, Artificial Sequence
  Description of Artificial Sequence: Synthetic oligonucleotide
aggcgcuacccagagcagc

SEQ ID NO: 1457758 - RNA, 19 nt, Artificial Sequence
  Description of Artificial Sequence: Synthetic oligonucleotide
guuguaagauaaggacaag

SEQ ID NO: 1457759 - RNA, 19 nt, Artificial Sequence
  Description of Artificial Sequence: Synthetic oligonucleotide
gguacuaggccugcuacug

SEQ ID NO: 1457760 - RNA, 19 nt, Artificial Sequence
  Description of Artificial Sequence: Synthetic oligonucleotide
acucgaacccggaugggag

SEQ ID NO: 1457761 - RNA, 19 nt, Artificial Sequence
  Description of Artificial Sequence: Synthetic oligonucleotide
uccaaacgcaggaggguau

SEQ ID NO: 1457762 - RNA, 19 nt, Artificial Sequence
  Description of Artificial Sequence: Synthetic oligonucleotide
ucucggucccuugugcuca

SEQ ID NO: 1457763 - RNA, 19 nt, Artificial Sequence
  Description of Artificial Sequence: Synthetic oligonucleotide
guauuugacaacaggcucu

SEQ ID NO: 1457764 - RNA, 19 nt, Artificial Sequence
  Description of Artificial Sequence: Synthetic oligonucleotide
gaccuuccuggcucaagug

SEQ ID NO: 1457765 - RNA, 19 nt, Artificial Sequence
  Description of Artificial Sequence: Synthetic oligonucleotide
uguugggucccgagguccu

SEQ ID NO: 1457766 - RNA, 19 nt, Artificial Sequence
  Description of Artificial Sequence: Synthetic oligonucleotide
ucgcucauagucugacccu

SEQ ID NO: 1457767 - RNA, 19 nt, Artificial Sequence
  Description of Artificial Sequence: Synthetic oligonucleotide
ggcggaaggucccaugaag

SEQ ID NO: 1457768 - RNA, 19 nt, Artificial Sequence
  Description of Artificial Sequence: Synthetic oligonucleotide
acuaagcaugggacaggcc

SEQ ID NO: 1457769 - RNA, 19 nt, Artificial Sequence
  Description of Artificial Sequence: Synthetic oligonucleotide
gagcuaagcuccaaacgca

SEQ ID NO: 1457770 - RNA, 19 nt, Artificial Sequence
  Description of Artificial Sequence: Synthetic oligonucleotide
agcggucagucagaggcgg

SEQ ID NO: 1457771 - RNA, 19 nt, Artificial Sequence
  Description of Artificial Sequence: Synthetic oligonucleotide
gcucuuggaggauagacaa

SEQ ID NO: 1457772 - RNA, 19 nt, Artificial Sequence
  Description of Artificial Sequence: Synthetic oligonucleotide
uucccuguugggucccgag

SEQ ID NO: 1457773 - RNA, 19 nt, Artificial Sequence
  Description of Artificial Sequence: Synthetic oligonucleotide
uucaacaagcuggcgcaga

SEQ ID NO: 1457774 - RNA, 19 nt, Artificial Sequence
  Description of Artificial Sequence: Synthetic oligonucleotide
ggccgguaaacucugcagc

SEQ ID NO: 1457775 - RNA, 19 nt, Artificial Sequence
  Description of Artificial Sequence: Synthetic oligonucleotide
caucauuacucugcagcac

SEQ ID NO: 1457776 - RNA, 19 nt, Artificial Sequence
  Description of Artificial Sequence: Synthetic oligonucleotide
cauguuugguaguagcgcu

SEQ ID NO: 1457777 - RNA, 19 nt, Artificial Sequence
  Description of Artificial Sequence: Synthetic oligonucleotide
aggagcaccgagcguguug

SEQ ID NO: 1457778 - RNA, 19 nt, Artificial Sequence
  Description of Artificial Sequence: Synthetic oligonucleotide
caucuuggaaggcgcuacc

SEQ ID NO: 1457779 - RNA, 19 nt, Artificial Sequence
  Description of Artificial Sequence: Synthetic oligonucleotide
ugcucaggcguuugcugca

SEQ ID NO: 1457780 - RNA, 19 nt, Artificial Sequence
  Description of Artificial Sequence: Synthetic oligonucleotide
guggagccaauagugcucc

SEQ ID NO: 1457781 - RNA, 19 nt, Artificial Sequence
  Description of Artificial Sequence: Synthetic oligonucleotide
  modified_base (10)..(10): a, c, u, g, unknown or other
augccugacngggcaucgc

SEQ ID NO: 1457782 - RNA, 19 nt, Artificial Sequence
  Description of Artificial Sequence: Synthetic oligonucleotide
cuguaaaguggcuuggccu

SEQ ID NO: 1457783 - RNA, 19 nt, Artificial Sequence
  Description of Artificial Sequence: Synthetic oligonucleotide
uccuuccguagggugagcc

SEQ ID NO: 1457784 - RNA, 19 nt, Artificial Sequence
  Description of Artificial Sequence: Synthetic oligonucleotide
uaguggauucaugcucaag

SEQ ID NO: 1457785 - RNA, 19 nt, Artificial Sequence
  Description of Artificial Sequence: Synthetic oligonucleotide
ggcucuacgagacucaagu

SEQ ID NO: 1457786 - RNA, 19 nt, Artificial Sequence
  Description of Artificial Sequence: Synthetic oligonucleotide
caucgcucauagucugacc

SEQ ID NO: 1457787 - RNA, 19 nt, Artificial Sequence
  Description of Artificial Sequence: Synthetic oligonucleotide
ggucccuugugcucaggcg

SEQ ID NO: 1457788 - RNA, 19 nt, Artificial Sequence
  Description of Artificial Sequence: Synthetic oligonucleotide
gguuauccugaacuugaac

SEQ ID NO: 1457789 - RNA, 19 nt, Artificial Sequence
  Description of Artificial Sequence: Synthetic oligonucleotide
guacuaggccugcuacugc

SEQ ID NO: 1457790 - RNA, 19 nt, Artificial Sequence
  Description of Artificial Sequence: Synthetic oligonucleotide
caaacgacucugcuuggca

SEQ ID NO: 1457791 - RNA, 19 nt, Artificial Sequence
  Description of Artificial Sequence: Synthetic oligonucleotide
caaacgcaggaggguaugg

SEQ ID NO: 1457792 - RNA, 19 nt, Artificial Sequence
  Description of Artificial Sequence: Synthetic oligonucleotide
agagcagccugguggcucu

SEQ ID NO: 1457793 - RNA, 19 nt, Artificial Sequence
  Description of Artificial Sequence: Synthetic oligonucleotide
gguaguagcgcugggcagc

SEQ ID NO: 1457794 - RNA, 19 nt, Artificial Sequence
  Description of Artificial Sequence: Synthetic oligonucleotide
gucauguggagccaauagu

SEQ ID NO: 1457795 - RNA, 19 nt, Artificial Sequence
  Description of Artificial Sequence: Synthetic oligonucleotide
gcguuugcugcacaacugc

SEQ ID NO: 1457796 - RNA, 19 nt, Artificial Sequence
  Description of Artificial Sequence: Synthetic oligonucleotide
uggauggagcagccugaca

SEQ ID NO: 1457797 - RNA, 19 nt, Artificial Sequence
  Description of Artificial Sequence: Synthetic oligonucleotide
uacgagacucaaguugcuc

SEQ ID NO: 1457798 - RNA, 19 nt, Artificial Sequence
  Description of Artificial Sequence: Synthetic oligonucleotide
ggauagacaagaguuccuc

SEQ ID NO: 1457799 - RNA, 19 nt, Artificial Sequence
  Description of Artificial Sequence: Synthetic oligonucleotide
  modified_base (18)..(18): a, c, u, g, unknown or other
cgaguuggaugccugacng

SEQ ID NO: 1457800 - RNA, 19 nt, Artificial Sequence
  Description of Artificial Sequence: Synthetic oligonucleotide
ucgaacccggaugggagga

SEQ ID NO: 1457801 - RNA, 19 nt, Artificial Sequence
  Description of Artificial Sequence: Synthetic oligonucleotide
cagucuccgacacacugca

SEQ ID NO: 1457802 - RNA, 19 nt, Artificial Sequence
  Description of Artificial Sequence: Synthetic oligonucleotide
ggaaaagguuauccugaac

SEQ ID NO: 1457803 - RNA, 19 nt, Artificial Sequence
  Description of Artificial Sequence: Synthetic oligonucleotide
ugggucccgagguccuagg

SEQ ID NO: 1457804 - RNA, 19 nt, Artificial Sequence
  Description of Artificial Sequence: Synthetic oligonucleotide
gagcguguuguaagauaag

SEQ ID NO: 1457805 - RNA, 19 nt, Artificial Sequence
  Description of Artificial Sequence: Synthetic oligonucleotide
gcucaagugauuggaagac

SEQ ID NO: 1457806 - RNA, 19 nt, Artificial Sequence
  Description of Artificial Sequence: Synthetic oligonucleotide
auagucugacccugaggua

SEQ ID NO: 1457807 - RNA, 19 nt, Artificial Sequence
  Description of Artificial Sequence: Synthetic oligonucleotide
auguuugguaguagcgcug

SEQ ID NO: 1457808 - RNA, 19 nt, Artificial Sequence
  Description of Artificial Sequence: Synthetic oligonucleotide
gaacucgaacccggauggg

SEQ ID NO: 1457809 - RNA, 19 nt, Artificial Sequence
  Description of Artificial Sequence: Synthetic oligonucleotide
aagaaggaccagguuccau

SEQ ID NO: 1457810 - RNA, 19 nt, Artificial Sequence
  Description of Artificial Sequence: Synthetic oligonucleotide
ccuucaacaagcuggcgca

SEQ ID NO: 1457811 - RNA, 19 nt, Artificial Sequence
  Description of Artificial Sequence: Synthetic oligonucleotide
gaguuugcagacaggguua

SEQ ID NO: 1457812 - RNA, 19 nt, Artificial Sequence
  Description of Artificial Sequence: Synthetic oligonucleotide
caggcccgcagaagggagg

SEQ ID NO: 1457813 - RNA, 19 nt, Artificial Sequence
  Description of Artificial Sequence: Synthetic oligonucleotide
aggguuaggugggccagag

SEQ ID NO: 1457814 - RNA, 19 nt, Artificial Sequence
  Description of Artificial Sequence: Synthetic oligonucleotide
acuaggccugcuacugcgg

SEQ ID NO: 1457815 - RNA, 19 nt, Artificial Sequence
  Description of Artificial Sequence: Synthetic oligonucleotide
ccuaguggauucaugcuca

SEQ ID NO: 1457816 - RNA, 19 nt, Artificial Sequence
  Description of Artificial Sequence: Synthetic oligonucleotide
aggauagacaagaguuccu

SEQ ID NO: 1457817 - RNA, 19 nt, Artificial Sequence
  Description of Artificial Sequence: Synthetic oligonucleotide
ggaggauagacaagaguuc

SEQ ID NO: 1457818 - RNA, 19 nt, Artificial Sequence
  Description of Artificial Sequence: Synthetic oligonucleotide
guaccccaaccaucaagac

SEQ ID NO: 1457819 - RNA, 19 nt, Artificial Sequence
  Description of Artificial Sequence: Synthetic oligonucleotide
guuaggugggccagagcac

SEQ ID NO: 1457820 - RNA, 19 nt, Artificial Sequence
  Description of Artificial Sequence: Synthetic oligonucleotide
uuaguccguguaccccaac

SEQ ID NO: 1457821 - RNA, 19 nt, Artificial Sequence
  Description of Artificial Sequence: Synthetic oligonucleotide
uugggucccgagguccuag

SEQ ID NO: 1457822 - RNA, 19 nt, Artificial Sequence
  Description of Artificial Sequence: Synthetic oligonucleotide
gggccgguaaacucugcag

SEQ ID NO: 1457823 - RNA, 19 nt, Artificial Sequence
  Description of Artificial Sequence: Synthetic oligonucleotide
  modified_base (15)..(15): a, c, u, g, unknown or other
guuggaugccugacngggc

SEQ ID NO: 1457824 - RNA, 19 nt, Artificial Sequence
  Description of Artificial Sequence: Synthetic oligonucleotide
uacccagagcagccuggug

SEQ ID NO: 1457825 - RNA, 19 nt, Artificial Sequence
  Description of Artificial Sequence: Synthetic oligonucleotide
guagcccacauguuuggua

SEQ ID NO: 1457826 - RNA, 19 nt, Artificial Sequence
  Description of Artificial Sequence: Synthetic oligonucleotide
uccguagggugagccuugg

SEQ ID NO: 1457827 - RNA, 19 nt, Artificial Sequence
  Description of Artificial Sequence: Synthetic oligonucleotide
aucggggaugaggucaugu

SEQ ID NO: 1457828 - RNA, 19 nt, Artificial Sequence
  Description of Artificial Sequence: Synthetic oligonucleotide
ggguacuaagcaugggaca

SEQ ID NO: 1457829 - RNA, 19 nt, Artificial Sequence
  Description of Artificial Sequence: Synthetic oligonucleotide
uggcgcagaccuuccuggc

SEQ ID NO: 1457830 - RNA, 19 nt, Artificial Sequence
  Description of Artificial Sequence: Synthetic oligonucleotide
uaggccugcuacugcgggu

SEQ ID NO: 1457831 - RNA, 19 nt, Artificial Sequence
  Description of Artificial Sequence: Synthetic oligonucleotide
gcuaagcuccaaacgcagg

SEQ ID NO: 1457832 - RNA, 19 nt, Artificial Sequence
  Description of Artificial Sequence: Synthetic oligonucleotide
cagccugacaagccaagga

SEQ ID NO: 1457833 - RNA, 19 nt, Artificial Sequence
  Description of Artificial Sequence: Synthetic oligonucleotide
agcugaccucaggauuggc

SEQ ID NO: 1457834 - RNA, 19 nt, Artificial Sequence
  Description of Artificial Sequence: Synthetic oligonucleotide
ccugaacuugaacucgaac

SEQ ID NO: 1457835 - RNA, 19 nt, Artificial Sequence
  Description of Artificial Sequence: Synthetic oligonucleotide
cagucagaggcggaagguc

SEQ ID NO: 1457836 - RNA, 19 nt, Artificial Sequence
  Description of Artificial Sequence: Synthetic oligonucleotide
gcaucucggucccuugugc

SEQ ID NO: 1457837 - RNA, 19 nt, Artificial Sequence
  Description of Artificial Sequence: Synthetic oligonucleotide
ucagaggcggaagguccca

SEQ ID NO: 1457838 - RNA, 19 nt, Artificial Sequence
  Description of Artificial Sequence: Synthetic oligonucleotide
agcacccucgccagggcag

SEQ ID NO: 1457839 - RNA, 19 nt, Artificial Sequence
  Description of Artificial Sequence: Synthetic oligonucleotide
gguagcggucagucagagg

SEQ ID NO: 1457840 - RNA, 19 nt, Artificial Sequence
  Description of Artificial Sequence: Synthetic oligonucleotide
gcuuggcacgaguuggaug

SEQ ID NO: 1457841 - RNA, 19 nt, Artificial Sequence
  Description of Artificial Sequence: Synthetic oligonucleotide
guaugggccgguaaacucu

SEQ ID NO: 1457842 - RNA, 19 nt, Artificial Sequence
  Description of Artificial Sequence: Synthetic oligonucleotide
caagccaaggaaacuuagu

SEQ ID NO: 1457843 - RNA, 19 nt, Artificial Sequence
  Description of Artificial Sequence: Synthetic oligonucleotide
ucccgagguccuaggcaug

SEQ ID NO: 1457844 - RNA, 19 nt, Artificial Sequence
  Description of Artificial Sequence: Synthetic oligonucleotide
gccgguaaacucugcagca

SEQ ID NO: 1457845 - RNA, 19 nt, Artificial Sequence
  Description of Artificial Sequence: Synthetic oligonucleotide
  modified_base (7)..(7): a, c, u, g, unknown or other
ccugacngggcaucgcuca

SEQ ID NO: 1457846 - RNA, 19 nt, Artificial Sequence
  Description of Artificial Sequence: Synthetic oligonucleotide
gggcaucgcucauagucug

SEQ ID NO: 1457847 - RNA, 19 nt, Artificial Sequence
  Description of Artificial Sequence: Synthetic oligonucleotide
acuugaacucgaacccgga

SEQ ID NO: 1457848 - RNA, 19 nt, Artificial Sequence
  Description of Artificial Sequence: Synthetic oligonucleotide
gacucugcuuggcacgagu

SEQ ID NO: 1457849 - RNA, 19 nt, Artificial Sequence
  Description of Artificial Sequence: Synthetic oligonucleotide
agcaccgagcguguuguaa

SEQ ID NO: 1457850 - RNA, 19 nt, Artificial Sequence
  Description of Artificial Sequence: Synthetic oligonucleotide
gcguguuguaagauaagga

SEQ ID NO: 1457851 - RNA, 19 nt, Artificial Sequence
  Description of Artificial Sequence: Synthetic oligonucleotide
cuggauggagcagccugac

SEQ ID NO: 1457852 - RNA, 19 nt, Artificial Sequence
  Description of Artificial Sequence: Synthetic oligonucleotide
ucggaguucaggggccccu

SEQ ID NO: 1457853 - RNA, 19 nt, Artificial Sequence
  Description of Artificial Sequence: Synthetic oligonucleotide
acgacucugcuuggcacga

SEQ ID NO: 1457854 - RNA, 19 nt, Artificial Sequence
  Description of Artificial Sequence: Synthetic oligonucleotide
uuggcacgaguuggaugcc

SEQ ID NO: 1457855 - RNA, 19 nt, Artificial Sequence
  Description of Artificial Sequence: Synthetic oligonucleotide
  modified_base (5)..(5): a, c, u, g, unknown or other
ugacngggcaucgcucaua

SEQ ID NO: 1457856 - RNA, 19 nt, Artificial Sequence
  Description of Artificial Sequence: Synthetic oligonucleotide
cagacaggguuaggugggc

SEQ ID NO: 1457857 - RNA, 19 nt, Artificial Sequence
  Description of Artificial Sequence: Synthetic oligonucleotide
uggcacgaguuggaugccu

SEQ ID NO: 1457858 - RNA, 19 nt, Artificial Sequence
  Description of Artificial Sequence: Synthetic oligonucleotide
gcagucuccgacacacugc

SEQ ID NO: 1457859 - RNA, 19 nt, Artificial Sequence
  Description of Artificial Sequence: Synthetic oligonucleotide
agucugacccugagguacu

SEQ ID NO: 1457860 - RNA, 19 nt, Artificial Sequence
  Description of Artificial Sequence: Synthetic oligonucleotide
ggucagucagaggcggaag

SEQ ID NO: 1457861 - RNA, 19 nt, Artificial Sequence
  Description of Artificial Sequence: Synthetic oligonucleotide
cuucgguagcggucaguca

SEQ ID NO: 1457862 - RNA, 19 nt, Artificial Sequence
  Description of Artificial Sequence: Synthetic oligonucleotide
uuucccuguugggucccga

SEQ ID NO: 1457863 - RNA, 19 nt, Artificial Sequence
  Description of Artificial Sequence: Synthetic oligonucleotide
ccguguaccccaaccauca

SEQ ID NO: 1457864 - RNA, 19 nt, Artificial Sequence
  Description of Artificial Sequence: Synthetic oligonucleotide
ggaaggucccaugaaguua

SEQ ID NO: 1457865 - RNA, 19 nt, Artificial Sequence
  Description of Artificial Sequence: Synthetic oligonucleotide
augggccgguaaacucugc

SEQ ID NO: 1457866 - RNA, 19 nt, Artificial Sequence
  Description of Artificial Sequence: Synthetic oligonucleotide
ccggcagucuccgacacac

SEQ ID NO: 1457867 - RNA, 19 nt, Artificial Sequence
  Description of Artificial Sequence: Synthetic oligonucleotide
cuaguggauucaugcucaa

SEQ ID NO: 1457868 - RNA, 19 nt, Artificial Sequence
  Description of Artificial Sequence: Synthetic oligonucleotide
agauagcagcuuauuuauu

SEQ ID NO: 1457869 - RNA, 19 nt, Artificial Sequence
  Description of Artificial Sequence: Synthetic oligonucleotide
uggagccaauagugcucca

SEQ ID NO: 1457870 - RNA, 19 nt, Artificial Sequence
  Description of Artificial Sequence: Synthetic oligonucleotide
ccuucgguagcggucaguc

SEQ ID NO: 1457871 - RNA, 19 nt, Artificial Sequence
  Description of Artificial Sequence: Synthetic oligonucleotide
cgagcguguuguaagauaa

SEQ ID NO: 1457872 - RNA, 19 nt, Artificial Sequence
  Description of Artificial Sequence: Synthetic oligonucleotide
gcaucgcucauagucugac

SEQ ID NO: 1457873 - RNA, 19 nt, Artificial Sequence
  Description of Artificial Sequence: Synthetic oligonucleotide
  modified_base (3)..(3): a, c, u, g, unknown or other
acngggcaucgcucauagu

SEQ ID NO: 1457874 - RNA, 19 nt, Artificial Sequence
  Description of Artificial Sequence: Synthetic oligonucleotide
agcacgcgcuggccggcag

SEQ ID NO: 1457875 - RNA, 19 nt, Artificial Sequence
  Description of Artificial Sequence: Synthetic oligonucleotide
aggcucuacgagacucaag

SEQ ID NO: 1457876 - RNA, 19 nt, Artificial Sequence
  Description of Artificial Sequence: Synthetic oligonucleotide
agguuauccugaacuugaa

SEQ ID NO: 1457877 - RNA, 19 nt, Artificial Sequence
  Description of Artificial Sequence: Synthetic oligonucleotide
cucgccagggcaggagcac

SEQ ID NO: 1457878 - RNA, 19 nt, Artificial Sequence
  Description of Artificial Sequence: Synthetic oligonucleotide
caucucggucccuugugcu

SEQ ID NO: 1457879 - RNA, 19 nt, Artificial Sequence
  Description of Artificial Sequence: Synthetic oligonucleotide
gcgcagaccuuccuggcuc

SEQ ID NO: 1457880 - RNA, 19 nt, Artificial Sequence
  Description of Artificial Sequence: Synthetic oligonucleotide
ggcacgaguuggaugccug

SEQ ID NO: 1457881 - RNA, 19 nt, Artificial Sequence
  Description of Artificial Sequence: Synthetic oligonucleotide
ggaccuugguccagugagc

SEQ ID NO: 1457882 - RNA, 19 nt, Artificial Sequence
  Description of Artificial Sequence: Synthetic oligonucleotide
cuugaacucgaacccggau

SEQ ID NO: 1457883 - RNA, 19 nt, Artificial Sequence
  Description of Artificial Sequence: Synthetic oligonucleotide
acaucggggaugaggucau

SEQ ID NO: 1457884 - RNA, 19 nt, Artificial Sequence
  Description of Artificial Sequence: Synthetic oligonucleotide
gcaggguacuaagcauggg

SEQ ID NO: 1457885 - RNA, 19 nt, Artificial Sequence
  Description of Artificial Sequence: Synthetic oligonucleotide
cuguagccaggcugccauc

SEQ ID NO: 1457886 - RNA, 19 nt, Artificial Sequence
  Description of Artificial Sequence: Synthetic oligonucleotide
ggauuggcagacaggucca

SEQ ID NO: 1457887 - RNA, 19 nt, Artificial Sequence
  Description of Artificial Sequence: Synthetic oligonucleotide
cccugagguacuaggccug

SEQ ID NO: 1457888 - RNA, 19 nt, Artificial Sequence
  Description of Artificial Sequence: Synthetic oligonucleotide
ccuggcucaagugauugga

SEQ ID NO: 1457889 - RNA, 19 nt, Artificial Sequence
  Description of Artificial Sequence: Synthetic oligonucleotide
uuaguccuuggggccgcuc

SEQ ID NO: 1457890 - RNA, 19 nt, Artificial Sequence
  Description of Artificial Sequence: Synthetic oligonucleotide
guccguguaccccaaccau

SEQ ID NO: 1457891 - RNA, 19 nt, Artificial Sequence
  Description of Artificial Sequence: Synthetic oligonucleotide
ggaaggcgcuacccagagc

SEQ ID NO: 1457892 - RNA, 19 nt, Artificial Sequence
  Description of Artificial Sequence: Synthetic oligonucleotide
agggugagccuuggaagua

SEQ ID NO: 1457893 - RNA, 19 nt, Artificial Sequence
  Description of Artificial Sequence: Synthetic oligonucleotide
gccaauagugcuccauccu

SEQ ID NO: 1457894 - RNA, 19 nt, Artificial Sequence
  Description of Artificial Sequence: Synthetic oligonucleotide
ucggucccuugugcucagg

SEQ ID NO: 1457895 - RNA, 19 nt, Artificial Sequence
  Description of Artificial Sequence: Synthetic oligonucleotide
cguagggugagccuuggaa

SEQ ID NO: 1457896 - RNA, 19 nt, Artificial Sequence
  Description of Artificial Sequence: Synthetic oligonucleotide
gggucccgagguccuaggc

SEQ ID NO: 1457897 - RNA, 19 nt, Artificial Sequence
  Description of Artificial Sequence: Synthetic oligonucleotide
caagaaggaccagguucca

SEQ ID NO: 1457898 - RNA, 19 nt, Artificial Sequence
  Description of Artificial Sequence: Synthetic oligonucleotide
cuacgagacucaaguugcu

SEQ ID NO: 1457899 - RNA, 19 nt, Artificial Sequence
  Description of Artificial Sequence: Synthetic oligonucleotide
gccuguaggugcaggguac

SEQ ID NO: 1457900 - RNA, 19 nt, Artificial Sequence
  Description of Artificial Sequence: Synthetic oligonucleotide
cccacauguuugguaguag

SEQ ID NO: 1457901 - RNA, 19 nt, Artificial Sequence
  Description of Artificial Sequence: Synthetic oligonucleotide
gucggaguucaggggcccc

SEQ ID NO: 1457902 - RNA, 19 nt, Artificial Sequence
  Description of Artificial Sequence: Synthetic oligonucleotide
aggcuggaccagaagcaaa

SEQ ID NO: 1457903 - RNA, 19 nt, Artificial Sequence
  Description of Artificial Sequence: Synthetic oligonucleotide
cuccgacacacugcaucuc

SEQ ID NO: 1457904 - RNA, 19 nt, Artificial Sequence
  Description of Artificial Sequence: Synthetic oligonucleotide
ggguuaggugggccagagc

SEQ ID NO: 1457905 - RNA, 19 nt, Artificial Sequence
  Description of Artificial Sequence: Synthetic oligonucleotide
ccaaacgcaggaggguaug

SEQ ID NO: 1457906 - RNA, 19 nt, Artificial Sequence
  Description of Artificial Sequence: Synthetic oligonucleotide
cgcucuuggaggauagaca

SEQ ID NO: 1457907 - RNA, 19 nt, Artificial Sequence
  Description of Artificial Sequence: Synthetic oligonucleotide
  modified_base (12)..(12): a, c, u, g, unknown or other
ggaugccugacngggcauc

SEQ ID NO: 1457908 - RNA, 19 nt, Artificial Sequence
  Description of Artificial Sequence: Synthetic oligonucleotide
ccggcacugaagccacagg

SEQ ID NO: 1457909 - RNA, 19 nt, Artificial Sequence
  Description of Artificial Sequence: Synthetic oligonucleotide
ggagcaccgagcguguugu

SEQ ID NO: 1457910 - RNA, 19 nt, Artificial Sequence
  Description of Artificial Sequence: Synthetic oligonucleotide
ccgguaaacucugcagcac

SEQ ID NO: 1457911 - RNA, 19 nt, Artificial Sequence
  Description of Artificial Sequence: Synthetic oligonucleotide
ccugagguacuaggccugc

SEQ ID NO: 1457912 - RNA, 19 nt, Artificial Sequence
  Description of Artificial Sequence: Synthetic oligonucleotide
cacgcgcuggccggcaguc

SEQ ID NO: 1457913 - RNA, 19 nt, Artificial Sequence
  Description of Artificial Sequence: Synthetic oligonucleotide
cccgagguccuaggcaugc

SEQ ID NO: 1457914 - RNA, 19 nt, Artificial Sequence
  Description of Artificial Sequence: Synthetic oligonucleotide
ggcauuuaaagaagagcuu

SEQ ID NO: 1457915 - RNA, 19 nt, Artificial Sequence
  Description of Artificial Sequence: Synthetic oligonucleotide
cagcacccucgccagggca

SEQ ID NO: 1457916 - RNA, 19 nt, Artificial Sequence
  Description of Artificial Sequence: Synthetic oligonucleotide
cuuccguagggugagccuu

SEQ ID NO: 1457917 - RNA, 19 nt, Artificial Sequence
  Description of Artificial Sequence: Synthetic oligonucleotide
guaguagcgcugggcagcu

SEQ ID NO: 1457918 - RNA, 19 nt, Artificial Sequence
  Description of Artificial Sequence: Synthetic oligonucleotide
ggccgcucuuggaggauag

SEQ ID NO: 1457919 - RNA, 19 nt, Artificial Sequence
  Description of Artificial Sequence: Synthetic oligonucleotide
caggcucuacgagacucaa

SEQ ID NO: 1457920 - RNA, 19 nt, Artificial Sequence
  Description of Artificial Sequence: Synthetic oligonucleotide
gcggaaggucccaugaagu

SEQ ID NO: 1457921 - RNA, 19 nt, Artificial Sequence
  Description of Artificial Sequence: Synthetic oligonucleotide
cugcacaacugcagcuccu

SEQ ID NO: 1457922 - RNA, 19 nt, Artificial Sequence
  Description of Artificial Sequence: Synthetic oligonucleotide
ggccggcagucuccgacac

SEQ ID NO: 1457923 - RNA, 19 nt, Artificial Sequence
  Description of Artificial Sequence: Synthetic oligonucleotide
cugcaucucggucccuugu

SEQ ID NO: 1457924 - RNA, 19 nt, Artificial Sequence
  Description of Artificial Sequence: Synthetic oligonucleotide
gcucauagucugacccuga

SEQ ID NO: 1457925 - RNA, 19 nt, Artificial Sequence
  Description of Artificial Sequence: Synthetic oligonucleotide
caucggggaugaggucaug

SEQ ID NO: 1457926 - RNA, 19 nt, Artificial Sequence
  Description of Artificial Sequence: Synthetic oligonucleotide
ggguaugggccgguaaacu

SEQ ID NO: 1457927 - RNA, 19 nt, Artificial Sequence
  Description of Artificial Sequence: Synthetic oligonucleotide
ggcaucgcucauagucuga

SEQ ID NO: 1457928 - RNA, 19 nt, Artificial Sequence
  Description of Artificial Sequence: Synthetic oligonucleotide
ccgagcguguuguaagaua

SEQ ID NO: 1457929 - RNA, 19 nt, Artificial Sequence
  Description of Artificial Sequence: Synthetic oligonucleotide
gaggucauguggagccaau

SEQ ID NO: 1457930 - RNA, 19 nt, Artificial Sequence
  Description of Artificial Sequence: Synthetic oligonucleotide
cucuugcuuuaguccgugu

SEQ ID NO: 1457931 - RNA, 19 nt, Artificial Sequence
  Description of Artificial Sequence: Synthetic oligonucleotide
caggguuaggugggccaga

SEQ ID NO: 1457932 - RNA, 19 nt, Artificial Sequence
  Description of Artificial Sequence: Synthetic oligonucleotide
cuguaggugcaggguacua

SEQ ID NO: 1457933 - RNA, 19 nt, Artificial Sequence
  Description of Artificial Sequence: Synthetic oligonucleotide
aggaggguaugggccggua

SEQ ID NO: 1457934 - RNA, 19 nt, Artificial Sequence
  Description of Artificial Sequence: Synthetic oligonucleotide
  modified_base (8)..(8): a, c, u, g, unknown or other
gccugacngggcaucgcuc

SEQ ID NO: 1457935 - RNA, 19 nt, Artificial Sequence
  Description of Artificial Sequence: Synthetic oligonucleotide
ggagccaauagugcuccau

SEQ ID NO: 1457936 - RNA, 19 nt, Artificial Sequence
  Description of Artificial Sequence: Synthetic oligonucleotide
agucuccgacacacugcau

SEQ ID NO: 1457937 - RNA, 19 nt, Artificial Sequence
  Description of Artificial Sequence: Synthetic oligonucleotide
gcccacauguuugguagua

SEQ ID NO: 1457938 - RNA, 19 nt, Artificial Sequence
  Description of Artificial Sequence: Synthetic oligonucleotide
gagcaccgagcguguugua

SEQ ID NO: 1457939 - RNA, 19 nt, Artificial Sequence
  Description of Artificial Sequence: Synthetic oligonucleotide
gcuccaaacgcaggagggu

SEQ ID NO: 1457940 - RNA, 19 nt, Artificial Sequence
  Description of Artificial Sequence: Synthetic oligonucleotide
gagcacgcgcuggccggca

SEQ ID NO: 1457941 - RNA, 19 nt, Artificial Sequence
  Description of Artificial Sequence: Synthetic oligonucleotide
  modified_base (6)..(6): a, c, u, g, unknown or other
cugacngggcaucgcucau

SEQ ID NO: 1457942 - RNA, 19 nt, Artificial Sequence
  Description of Artificial Sequence: Synthetic oligonucleotide
gcucuacgagacucaaguu

SEQ ID NO: 1457943 - RNA, 19 nt, Artificial Sequence
  Description of Artificial Sequence: Synthetic oligonucleotide
guugggucccgagguccua

SEQ ID NO: 1457944 - RNA, 19 nt, Artificial Sequence
  Description of Artificial Sequence: Synthetic oligonucleotide
ccuaggcaugcuggggcuc

SEQ ID NO: 1457945 - RNA, 19 nt, Artificial Sequence
  Description of Artificial Sequence: Synthetic oligonucleotide
ggccugcuacugcggguca

SEQ ID NO: 1457946 - RNA, 19 nt, Artificial Sequence
  Description of Artificial Sequence: Synthetic oligonucleotide
gggagacaucugcucaguu

SEQ ID NO: 1457947 - RNA, 19 nt, Artificial Sequence
  Description of Artificial Sequence: Synthetic oligonucleotide
ccuuccguagggugagccu

SEQ ID NO: 1457948 - RNA, 19 nt, Artificial Sequence
  Description of Artificial Sequence: Synthetic oligonucleotide
ccuuggggccgcucuugga

SEQ ID NO: 1457949 - RNA, 19 nt, Artificial Sequence
  Description of Artificial Sequence: Synthetic oligonucleotide
cacugcaucucggucccuu

SEQ ID NO: 1457950 - RNA, 19 nt, Artificial Sequence
  Description of Artificial Sequence: Synthetic oligonucleotide
uaguagcgcugggcagcuu

SEQ ID NO: 1457951 - RNA, 19 nt, Artificial Sequence
  Description of Artificial Sequence: Synthetic oligonucleotide
gccggcagucuccgacaca

SEQ ID NO: 1457952 - RNA, 19 nt, Artificial Sequence
  Description of Artificial Sequence: Synthetic oligonucleotide
gcggucagucagaggcgga

SEQ ID NO: 1457953 - RNA, 19 nt, Artificial Sequence
  Description of Artificial Sequence: Synthetic oligonucleotide
cacccucgccagggcagga

SEQ ID NO: 1457954 - RNA, 19 nt, Artificial Sequence
  Description of Artificial Sequence: Synthetic oligonucleotide
gccgcucuuggaggauaga

SEQ ID NO: 1457955 - RNA, 19 nt, Artificial Sequence
  Description of Artificial Sequence: Synthetic oligonucleotide
cggaaggucccaugaaguu

SEQ ID NO: 1457956 - RNA, 19 nt, Artificial Sequence
  Description of Artificial Sequence: Synthetic oligonucleotide
gcaggagcaccgagcgugu

SEQ ID NO: 1457957 - RNA, 19 nt, Artificial Sequence
  Description of Artificial Sequence: Synthetic oligonucleotide
cagaggcggaaggucccau

SEQ ID NO: 1457958 - RNA, 19 nt, Artificial Sequence
  Description of Artificial Sequence: Synthetic oligonucleotide
gcagaccuuccuggcucaa

SEQ ID NO: 1457959 - RNA, 19 nt, Artificial Sequence
  Description of Artificial Sequence: Synthetic oligonucleotide
ccguagggugagccuugga

SEQ ID NO: 1457960 - RNA, 19 nt, Artificial Sequence
  Description of Artificial Sequence: Synthetic oligonucleotide
gcgcuacccagagcagccu

SEQ ID NO: 1457961 - RNA, 19 nt, Artificial Sequence
  Description of Artificial Sequence: Synthetic oligonucleotide
caggagcaccgagcguguu

SEQ ID NO: 1457962 - RNA, 19 nt, Artificial Sequence
  Description of Artificial Sequence: Synthetic oligonucleotide
ccgagguccuaggcaugcu

SEQ ID NO: 1457963 - RNA, 19 nt, Artificial Sequence
  Description of Artificial Sequence: Synthetic oligonucleotide
cccuucgguagcggucagu

SEQ ID NO: 1457964 - RNA, 19 nt, Artificial Sequence
  Description of Artificial Sequence: Synthetic oligonucleotide
aaucacauaguacuaaagg

SEQ ID NO: 1457965 - RNA, 19 nt, Artificial Sequence
  Description of Artificial Sequence: Synthetic oligonucleotide
aaaaugguggcuuauagca

SEQ ID NO: 1457966 - RNA, 19 nt, Artificial Sequence
  Description of Artificial Sequence: Synthetic oligonucleotide
augacuagagcuuaaaagg

SEQ ID NO: 1457967 - RNA, 19 nt, Artificial Sequence
  Description of Artificial Sequence: Synthetic oligonucleotide
uuguuaaagacuuuggugc

SEQ ID NO: 1457968 - RNA, 19 nt, Artificial Sequence
  Description of Artificial Sequence: Synthetic oligonucleotide
gaugcuaucaccuuccaag

SEQ ID NO: 1457969 - RNA, 19 nt, Artificial Sequence
  Description of Artificial Sequence: Synthetic oligonucleotide
uaaacuaucucguacaugu

SEQ ID NO: 1457970 - RNA, 19 nt, Artificial Sequence
  Description of Artificial Sequence: Synthetic oligonucleotide
ucuaaaaucacgccgacac

SEQ ID NO: 1457971 - RNA, 19 nt, Artificial Sequence
  Description of Artificial Sequence: Synthetic oligonucleotide
aaauaagggauaugaauag

SEQ ID NO: 1457972 - RNA, 19 nt, Artificial Sequence
  Description of Artificial Sequence: Synthetic oligonucleotide
aauauagcuuccucccucc

SEQ ID NO: 1457973 - RNA, 19 nt, Artificial Sequence
  Description of Artificial Sequence: Synthetic oligonucleotide
aagacagaaacuucgaagu

SEQ ID NO: 1457974 - RNA, 19 nt, Artificial Sequence
  Description of Artificial Sequence: Synthetic oligonucleotide
aguuucuaaaaucacgccg

SEQ ID NO: 1457975 - RNA, 19 nt, Artificial Sequence
  Description of Artificial Sequence: Synthetic oligonucleotide
ugucauaagaacuaccuug

SEQ ID NO: 1457976 - RNA, 19 nt, Artificial Sequence
  Description of Artificial Sequence: Synthetic oligonucleotide
uuucacucaaacacuaacg

SEQ ID NO: 1457977 - RNA, 19 nt, Artificial Sequence
  Description of Artificial Sequence: Synthetic oligonucleotide
aaaaggauagaucuagaga

SEQ ID NO: 1457978 - RNA, 19 nt, Artificial Sequence
  Description of Artificial Sequence: Synthetic oligonucleotide
auaugagucauauguaggg

SEQ ID NO: 1457979 - RNA, 19 nt, Artificial Sequence
  Description of Artificial Sequence: Synthetic oligonucleotide
aaguuucuaaaaucacgcc

SEQ ID NO: 1457980 - RNA, 19 nt, Artificial Sequence
  Description of Artificial Sequence: Synthetic oligonucleotide
caaguuucuaaaaucacgc

SEQ ID NO: 1457981 - RNA, 19 nt, Artificial Sequence
  Description of Artificial Sequence: Synthetic oligonucleotide
ugucacaaagcauuaacag

SEQ ID NO: 1457982 - RNA, 19 nt, Artificial Sequence
  Description of Artificial Sequence: Synthetic oligonucleotide
aacacuaacgaaaagagau

SEQ ID NO: 1457983 - RNA, 19 nt, Artificial Sequence
  Description of Artificial Sequence: Synthetic oligonucleotide
uaauggcuaaacuaucucg

SEQ ID NO: 1457984 - RNA, 19 nt, Artificial Sequence
  Description of Artificial Sequence: Synthetic oligonucleotide
aauggugaacccaauauag

SEQ ID NO: 1457985 - RNA, 19 nt, Artificial Sequence
  Description of Artificial Sequence: Synthetic oligonucleotide
uguaaaauucugaguaucc

SEQ ID NO: 1457986 - RNA, 19 nt, Artificial Sequence
  Description of Artificial Sequence: Synthetic oligonucleotide
ucauaugagucauauguag

SEQ ID NO: 1457987 - RNA, 19 nt, Artificial Sequence
  Description of Artificial Sequence: Synthetic oligonucleotide
uuuauuuacuguacaaacu

SEQ ID NO: 1457988 - RNA, 19 nt, Artificial Sequence
  Description of Artificial Sequence: Synthetic oligonucleotide
uugaaaagccaaaagccag

SEQ ID NO: 1457989 - RNA, 19 nt, Artificial Sequence
  Description of Artificial Sequence: Synthetic oligonucleotide
aagugcuaugacuagagcu

SEQ ID NO: 1457990 - RNA, 19 nt, Artificial Sequence
  Description of Artificial Sequence: Synthetic oligonucleotide
aacgaaaagagaugcuauc

SEQ ID NO: 1457991 - RNA, 19 nt, Artificial Sequence
  Description of Artificial Sequence: Synthetic oligonucleotide
caaacgaugacugcgaagg

SEQ ID NO: 1457992 - RNA, 19 nt, Artificial Sequence
  Description of Artificial Sequence: Synthetic oligonucleotide
ugaucuugagccuuaaugu

SEQ ID NO: 1457993 - RNA, 19 nt, Artificial Sequence
  Description of Artificial Sequence: Synthetic oligonucleotide
gaaaagagaugcuaucacc

SEQ ID NO: 1457994 - RNA, 19 nt, Artificial Sequence
  Description of Artificial Sequence: Synthetic oligonucleotide
ugcaaaagagagcaaaacu

SEQ ID NO: 1457995 - RNA, 19 nt, Artificial Sequence
  Description of Artificial Sequence: Synthetic oligonucleotide
uucacucaaacacuaacga

SEQ ID NO: 1457996 - RNA, 19 nt, Artificial Sequence
  Description of Artificial Sequence: Synthetic oligonucleotide
ugagucauauguagggagg

SEQ ID NO: 1457997 - RNA, 19 nt, Artificial Sequence
  Description of Artificial Sequence: Synthetic oligonucleotide
ucucguacauguuccaugg

SEQ ID NO: 1457998 - RNA, 19 nt, Artificial Sequence
  Description of Artificial Sequence: Synthetic oligonucleotide
gacaggaacaaacugcccc

SEQ ID NO: 1457999 - RNA, 19 nt, Artificial Sequence
  Description of Artificial Sequence: Synthetic oligonucleotide
uuuucacucaaacacuaac

SEQ ID NO: 1458000 - RNA, 19 nt, Artificial Sequence
  Description of Artificial Sequence: Synthetic oligonucleotide
gacauugaaaagccaaaag

SEQ ID NO: 1458001 - RNA, 19 nt, Artificial Sequence
  Description of Artificial Sequence: Synthetic oligonucleotide
acccaauauagcuuccucc

SEQ ID NO: 1458002 - RNA, 19 nt, Artificial Sequence
  Description of Artificial Sequence: Synthetic oligonucleotide
aacuauuuacaucuccagu

SEQ ID NO: 1458003 - RNA, 19 nt, Artificial Sequence
  Description of Artificial Sequence: Synthetic oligonucleotide
guucuagcagcucaggagg

SEQ ID NO: 1458004 - RNA, 19 nt, Artificial Sequence
  Description of Artificial Sequence: Synthetic oligonucleotide
gaaagugugggcaagcagc

SEQ ID NO: 1458005 - RNA, 19 nt, Artificial Sequence
  Description of Artificial Sequence: Synthetic oligonucleotide
gaacuggccaaaauaaggg

SEQ ID NO: 1458006 - RNA, 19 nt, Artificial Sequence
  Description of Artificial Sequence: Synthetic oligonucleotide
uguacaaacuauuuacauc

SEQ ID NO: 1458007 - RNA, 19 nt, Artificial Sequence
  Description of Artificial Sequence: Synthetic oligonucleotide
ugccaaguuucuaaaauca

SEQ ID NO: 1458008 - RNA, 19 nt, Artificial Sequence
  Description of Artificial Sequence: Synthetic oligonucleotide
acuaucucguacauguucc

SEQ ID NO: 1458009 - RNA, 19 nt, Artificial Sequence
  Description of Artificial Sequence: Synthetic oligonucleotide
acuauuuacaucuccaguu

SEQ ID NO: 1458010 - RNA, 19 nt, Artificial Sequence
  Description of Artificial Sequence: Synthetic oligonucleotide
gugaucuugagccuuaaug

SEQ ID NO: 1458011 - RNA, 19 nt, Artificial Sequence
  Description of Artificial Sequence: Synthetic oligonucleotide
auaauggugaacccaauau

SEQ ID NO: 1458012 - RNA, 19 nt, Artificial Sequence
  Description of Artificial Sequence: Synthetic oligonucleotide
ugacuagagcuuaaaagga

SEQ ID NO: 1458013 - RNA, 19 nt, Artificial Sequence
  Description of Artificial Sequence: Synthetic oligonucleotide
auguaccccaguuggaagc

SEQ ID NO: 1458014 - RNA, 19 nt, Artificial Sequence
  Description of Artificial Sequence: Synthetic oligonucleotide
cuucauaugagucauaugu

SEQ ID NO: 1458015 - RNA, 19 nt, Artificial Sequence
  Description of Artificial Sequence: Synthetic oligonucleotide
uagcaaagccucuuuaaag

SEQ ID NO: 1458016 - RNA, 19 nt, Artificial Sequence
  Description of Artificial Sequence: Synthetic oligonucleotide
uacaucuccaguuaccgac

SEQ ID NO: 1458017 - RNA, 19 nt, Artificial Sequence
  Description of Artificial Sequence: Synthetic oligonucleotide
uguuaaagacuuuggugcc

SEQ ID NO: 1458018 - RNA, 19 nt, Artificial Sequence
  Description of Artificial Sequence: Synthetic oligonucleotide
agaaaggacaaacgaugac

SEQ ID NO: 1458019 - RNA, 19 nt, Artificial Sequence
  Description of Artificial Sequence: Synthetic oligonucleotide
cuagagcuuaaaaggauag

SEQ ID NO: 1458020 - RNA, 19 nt, Artificial Sequence
  Description of Artificial Sequence: Synthetic oligonucleotide
guaggcauuuuauuuacug

SEQ ID NO: 1458021 - RNA, 19 nt, Artificial Sequence
  Description of Artificial Sequence: Synthetic oligonucleotide
aacccaauauagcuuccuc

SEQ ID NO: 1458022 - RNA, 19 nt, Artificial Sequence
  Description of Artificial Sequence: Synthetic oligonucleotide
ucuuacaccccaaggauaa

SEQ ID NO: 1458023 - RNA, 19 nt, Artificial Sequence
  Description of Artificial Sequence: Synthetic oligonucleotide
aagugccuaugucacaaag

SEQ ID NO: 1458024 - RNA, 19 nt, Artificial Sequence
  Description of Artificial Sequence: Synthetic oligonucleotide
aggacaaacgaugacugcg

SEQ ID NO: 1458025 - RNA, 19 nt, Artificial Sequence
  Description of Artificial Sequence: Synthetic oligonucleotide
cauuaacagaagaacuggc

SEQ ID NO: 1458026 - RNA, 19 nt, Artificial Sequence
  Description of Artificial Sequence: Synthetic oligonucleotide
gacagaaacuucgaagucc

SEQ ID NO: 1458027 - RNA, 19 nt, Artificial Sequence
  Description of Artificial Sequence: Synthetic oligonucleotide
aauggcuaaacuaucucgu

SEQ ID NO: 1458028 - RNA, 19 nt, Artificial Sequence
  Description of Artificial Sequence: Synthetic oligonucleotide
ugguuuucauuucaugacu

SEQ ID NO: 1458029 - RNA, 19 nt, Artificial Sequence
  Description of Artificial Sequence: Synthetic oligonucleotide
ugccuaaagaccacccuag

SEQ ID NO: 1458030 - RNA, 19 nt, Artificial Sequence
  Description of Artificial Sequence: Synthetic oligonucleotide
uaaucaccacauaauggug

SEQ ID NO: 1458031 - RNA, 19 nt, Artificial Sequence
  Description of Artificial Sequence: Synthetic oligonucleotide
ucagacaugcuuccaggcc

SEQ ID NO: 1458032 - RNA, 19 nt, Artificial Sequence
  Description of Artificial Sequence: Synthetic oligonucleotide
aggauagaucuagagaggg

SEQ ID NO: 1458033 - RNA, 19 nt, Artificial Sequence
  Description of Artificial Sequence: Synthetic oligonucleotide
ucugaguaucccaucaaaa

SEQ ID NO: 1458034 - RNA, 19 nt, Artificial Sequence
  Description of Artificial Sequence: Synthetic oligonucleotide
aguugguuaaacaugugug

SEQ ID NO: 1458035 - RNA, 19 nt, Artificial Sequence
  Description of Artificial Sequence: Synthetic oligonucleotide
ucgcaacccucacugaugg

SEQ ID NO: 1458036 - RNA, 19 nt, Artificial Sequence
  Description of Artificial Sequence: Synthetic oligonucleotide
uaaaaucacgccgacacuc

SEQ ID NO: 1458037 - RNA, 19 nt, Artificial Sequence
  Description of Artificial Sequence: Synthetic oligonucleotide
gaaacuucgaaguccaugu

SEQ ID NO: 1458038 - RNA, 19 nt, Artificial Sequence
  Description of Artificial Sequence: Synthetic oligonucleotide
uaacgaaaagagaugcuau

SEQ ID NO: 1458039 - RNA, 19 nt, Artificial Sequence
  Description of Artificial Sequence: Synthetic oligonucleotide
cacuaacgaaaagagaugc

SEQ ID NO: 1458040 - RNA, 19 nt, Artificial Sequence
  Description of Artificial Sequence: Synthetic oligonucleotide
cauucuguaugucuucccc

SEQ ID NO: 1458041 - RNA, 19 nt, Artificial Sequence
  Description of Artificial Sequence: Synthetic oligonucleotide
ucccuccuggucuagagag

SEQ ID NO: 1458042 - RNA, 19 nt, Artificial Sequence
  Description of Artificial Sequence: Synthetic oligonucleotide
ugacaaugugcagagagcu

SEQ ID NO: 1458043 - RNA, 19 nt, Artificial Sequence
  Description of Artificial Sequence: Synthetic oligonucleotide
aauaagggauaugaauaga

SEQ ID NO: 1458044 - RNA, 19 nt, Artificial Sequence
  Description of Artificial Sequence: Synthetic oligonucleotide
guuaggagagaguaaucug

SEQ ID NO: 1458045 - RNA, 19 nt, Artificial Sequence
  Description of Artificial Sequence: Synthetic oligonucleotide
uaauggugaacccaauaua

SEQ ID NO: 1458046 - RNA, 19 nt, Artificial Sequence
  Description of Artificial Sequence: Synthetic oligonucleotide
aaggauaagugaggucagc

SEQ ID NO: 1458047 - RNA, 19 nt, Artificial Sequence
  Description of Artificial Sequence: Synthetic oligonucleotide
gaauaguuaggagagagua

SEQ ID NO: 1458048 - RNA, 19 nt, Artificial Sequence
  Description of Artificial Sequence: Synthetic oligonucleotide
aaucaccacauaaugguga

SEQ ID NO: 1458049 - RNA, 19 nt, Artificial Sequence
  Description of Artificial Sequence: Synthetic oligonucleotide
gagugugggagccaagcag

SEQ ID NO: 1458050 - RNA, 19 nt, Artificial Sequence
  Description of Artificial Sequence: Synthetic oligonucleotide
agcauuaacagaagaacug

SEQ ID NO: 1458051 - RNA, 19 nt, Artificial Sequence
  Description of Artificial Sequence: Synthetic oligonucleotide
uacaccccaaggauaagug

SEQ ID NO: 1458052 - RNA, 19 nt, Artificial Sequence
  Description of Artificial Sequence: Synthetic oligonucleotide
gaagaacuggccaaaauaa

SEQ ID NO: 1458053 - RNA, 19 nt, Artificial Sequence
  Description of Artificial Sequence: Synthetic oligonucleotide
auaguuaggagagaguaau

SEQ ID NO: 1458054 - RNA, 19 nt, Artificial Sequence
  Description of Artificial Sequence: Synthetic oligonucleotide
cauacuugcugguuuuggc

SEQ ID NO: 1458055 - RNA, 19 nt, Artificial Sequence
  Description of Artificial Sequence: Synthetic oligonucleotide
ccaaguuucuaaaaucacg

SEQ ID NO: 1458056 - RNA, 19 nt, Artificial Sequence
  Description of Artificial Sequence: Synthetic oligonucleotide
ucauauguagggaggcaca

SEQ ID NO: 1458057 - RNA, 19 nt, Artificial Sequence
  Description of Artificial Sequence: Synthetic oligonucleotide
agugccuaugucacaaagc

SEQ ID NO: 1458058 - RNA, 19 nt, Artificial Sequence
  Description of Artificial Sequence: Synthetic oligonucleotide
aagaaaggacaaacgauga

SEQ ID NO: 1458059 - RNA, 19 nt, Artificial Sequence
  Description of Artificial Sequence: Synthetic oligonucleotide
uucauaugagucauaugua

SEQ ID NO: 1458060 - RNA, 19 nt, Artificial Sequence
  Description of Artificial Sequence: Synthetic oligonucleotide
aagaacuggccaaaauaag

SEQ ID NO: 1458061 - RNA, 19 nt, Artificial Sequence
  Description of Artificial Sequence: Synthetic oligonucleotide
aaagaccacccuaggauag

SEQ ID NO: 1458062 - RNA, 19 nt, Artificial Sequence
  Description of Artificial Sequence: Synthetic oligonucleotide
uuccaagagacugucaagu

SEQ ID NO: 1458063 - RNA, 19 nt, Artificial Sequence
  Description of Artificial Sequence: Synthetic oligonucleotide
uggcuaaacuaucucguac

SEQ ID NO: 1458064 - RNA, 19 nt, Artificial Sequence
  Description of Artificial Sequence: Synthetic oligonucleotide
acaaugugcagagagcuca

SEQ ID NO: 1458065 - RNA, 19 nt, Artificial Sequence
  Description of Artificial Sequence: Synthetic oligonucleotide
ggugccaggucuuacaccc

SEQ ID NO: 1458066 - RNA, 19 nt, Artificial Sequence
  Description of Artificial Sequence: Synthetic oligonucleotide
cacuggacuggcuagugcc

SEQ ID NO: 1458067 - RNA, 19 nt, Artificial Sequence
  Description of Artificial Sequence: Synthetic oligonucleotide
acgccaagaaaggacaaac

SEQ ID NO: 1458068 - RNA, 19 nt, Artificial Sequence
  Description of Artificial Sequence: Synthetic oligonucleotide
auacuugcugguuuuggca

SEQ ID NO: 1458069 - RNA, 19 nt, Artificial Sequence
  Description of Artificial Sequence: Synthetic oligonucleotide
gugccuaugucacaaagca

SEQ ID NO: 1458070 - RNA, 19 nt, Artificial Sequence
  Description of Artificial Sequence: Synthetic oligonucleotide
augacugcgaaggagguca

SEQ ID NO: 1458071 - RNA, 19 nt, Artificial Sequence
  Description of Artificial Sequence: Synthetic oligonucleotide
ucuagagagugugggagcc

SEQ ID NO: 1458072 - RNA, 19 nt, Artificial Sequence
  Description of Artificial Sequence: Synthetic oligonucleotide
ugcuucugaauaguuagga

SEQ ID NO: 1458073 - RNA, 19 nt, Artificial Sequence
  Description of Artificial Sequence: Synthetic oligonucleotide
aucucguacauguuccaug

SEQ ID NO: 1458074 - RNA, 19 nt, Artificial Sequence
  Description of Artificial Sequence: Synthetic oligonucleotide
guuaccgacguccagaccu

SEQ ID NO: 1458075 - RNA, 19 nt, Artificial Sequence
  Description of Artificial Sequence: Synthetic oligonucleotide
auggugaacccaauauagc

SEQ ID NO: 1458076 - RNA, 19 nt, Artificial Sequence
  Description of Artificial Sequence: Synthetic oligonucleotide
agaguaaucuggaauagaa

SEQ ID NO: 1458077 - RNA, 19 nt, Artificial Sequence
  Description of Artificial Sequence: Synthetic oligonucleotide
acaaacgaugacugcgaag

SEQ ID NO: 1458078 - RNA, 19 nt, Artificial Sequence
  Description of Artificial Sequence: Synthetic oligonucleotide
gugaacccaauauagcuuc

SEQ ID NO: 1458079 - RNA, 19 nt, Artificial Sequence
  Description of Artificial Sequence: Synthetic oligonucleotide
agugugggagccaagcagg

SEQ ID NO: 1458080 - RNA, 19 nt, Artificial Sequence
  Description of Artificial Sequence: Synthetic oligonucleotide
uuucuaaaaucacgccgac

SEQ ID NO: 1458081 - RNA, 19 nt, Artificial Sequence
  Description of Artificial Sequence: Synthetic oligonucleotide
agacuuuggugccuaaaga

SEQ ID NO: 1458082 - RNA, 19 nt, Artificial Sequence
  Description of Artificial Sequence: Synthetic oligonucleotide
aaacacuaacgaaaagaga

SEQ ID NO: 1458083 - RNA, 19 nt, Artificial Sequence
  Description of Artificial Sequence: Synthetic oligonucleotide
ggauaugaauagaaaauug

SEQ ID NO: 1458084 - RNA, 19 nt, Artificial Sequence
  Description of Artificial Sequence: Synthetic oligonucleotide
agggauaugaauagaaaau

SEQ ID NO: 1458085 - RNA, 19 nt, Artificial Sequence
  Description of Artificial Sequence: Synthetic oligonucleotide
aaacaugugugugcggaca

SEQ ID NO: 1458086 - RNA, 19 nt, Artificial Sequence
  Description of Artificial Sequence: Synthetic oligonucleotide
auaagggauaugaauagaa

SEQ ID NO: 1458087 - RNA, 19 nt, Artificial Sequence
  Description of Artificial Sequence: Synthetic oligonucleotide
acgaaaagagaugcuauca

SEQ ID NO: 1458088 - RNA, 19 nt, Artificial Sequence
  Description of Artificial Sequence: Synthetic oligonucleotide
aauaguuaggagagaguaa

SEQ ID NO: 1458089 - RNA, 19 nt, Artificial Sequence
  Description of Artificial Sequence: Synthetic oligonucleotide
caauauagcuuccucccuc

SEQ ID NO: 1458090 - RNA, 19 nt, Artificial Sequence
  Description of Artificial Sequence: Synthetic oligonucleotide
guaauggcuaaacuaucuc

SEQ ID NO: 1458091 - RNA, 19 nt, Artificial Sequence
  Description of Artificial Sequence: Synthetic oligonucleotide
ugccaaagcccucgcaacc

SEQ ID NO: 1458092 - RNA, 19 nt, Artificial Sequence
  Description of Artificial Sequence: Synthetic oligonucleotide
agcacccacgccaagaaag

SEQ ID NO: 1458093 - RNA, 19 nt, Artificial Sequence
  Description of Artificial Sequence: Synthetic oligonucleotide
ccugacaaugugcagagag

SEQ ID NO: 1458094 - RNA, 19 nt, Artificial Sequence
  Description of Artificial Sequence: Synthetic oligonucleotide
agcaggguaauggcuaaac

SEQ ID NO: 1458095 - RNA, 19 nt, Artificial Sequence
  Description of Artificial Sequence: Synthetic oligonucleotide
uggcuagugcccaagcagu

SEQ ID NO: 1458096 - RNA, 19 nt, Artificial Sequence
  Description of Artificial Sequence: Synthetic oligonucleotide
gccaaaauaagggauauga

SEQ ID NO: 1458097 - RNA, 19 nt, Artificial Sequence
  Description of Artificial Sequence: Synthetic oligonucleotide
uacuugcugguuuuggcaa

SEQ ID NO: 1458098 - RNA, 19 nt, Artificial Sequence
  Description of Artificial Sequence: Synthetic oligonucleotide
uaaacaugugugugcggac

SEQ ID NO: 1458099 - RNA, 19 nt, Artificial Sequence
  Description of Artificial Sequence: Synthetic oligonucleotide
caggucuuacaccccaagg

SEQ ID NO: 1458100 - RNA, 19 nt, Artificial Sequence
  Description of Artificial Sequence: Synthetic oligonucleotide
aggguaauggcuaaacuau

SEQ ID NO: 1458101 - RNA, 19 nt, Artificial Sequence
  Description of Artificial Sequence: Synthetic oligonucleotide
caaggauaagugaggucag

SEQ ID NO: 1458102 - RNA, 19 nt, Artificial Sequence
  Description of Artificial Sequence: Synthetic oligonucleotide
cagaccuugccugacaaug

SEQ ID NO: 1458103 - RNA, 19 nt, Artificial Sequence
  Description of Artificial Sequence: Synthetic oligonucleotide
ugaacccaauauagcuucc

SEQ ID NO: 1458104 - RNA, 19 nt, Artificial Sequence
  Description of Artificial Sequence: Synthetic oligonucleotide
acgccgacacucuucuugg

SEQ ID NO: 1458105 - RNA, 19 nt, Artificial Sequence
  Description of Artificial Sequence: Synthetic oligonucleotide
uuacaccccaaggauaagu

SEQ ID NO: 1458106 - RNA, 19 nt, Artificial Sequence
  Description of Artificial Sequence: Synthetic oligonucleotide
ggaacaaacugccccagac

SEQ ID NO: 1458107 - RNA, 19 nt, Artificial Sequence
  Description of Artificial Sequence: Synthetic oligonucleotide
augucacaaagcauuaaca

SEQ ID NO: 1458108 - RNA, 19 nt, Artificial Sequence
  Description of Artificial Sequence: Synthetic oligonucleotide
augcuaucaccuuccaaga

SEQ ID NO: 1458109 - RNA, 19 nt, Artificial Sequence
  Description of Artificial Sequence: Synthetic oligonucleotide
gagcaugccaaagcccucg

SEQ ID NO: 1458110 - RNA, 19 nt, Artificial Sequence
  Description of Artificial Sequence: Synthetic oligonucleotide
cacgccgacacucuucuug

SEQ ID NO: 1458111 - RNA, 19 nt, Artificial Sequence
  Description of Artificial Sequence: Synthetic oligonucleotide
cauauguagggaggcacag

SEQ ID NO: 1458112 - RNA, 19 nt, Artificial Sequence
  Description of Artificial Sequence: Synthetic oligonucleotide
cuaaagaccacccuaggau

SEQ ID NO: 1458113 - RNA, 19 nt, Artificial Sequence
  Description of Artificial Sequence: Synthetic oligonucleotide
aucacgccgacacucuucu

SEQ ID NO: 1458114 - RNA, 19 nt, Artificial Sequence
  Description of Artificial Sequence: Synthetic oligonucleotide
ucaugacuugucuccuuca

SEQ ID NO: 1458115 - RNA, 19 nt, Artificial Sequence
  Description of Artificial Sequence: Synthetic oligonucleotide
aggauagagcugccccagc

SEQ ID NO: 1458116 - RNA, 19 nt, Artificial Sequence
  Description of Artificial Sequence: Synthetic oligonucleotide
gaccuugccugacaaugug

SEQ ID NO: 1458117 - RNA, 19 nt, Artificial Sequence
  Description of Artificial Sequence: Synthetic oligonucleotide
gucucgggauuccacauac

SEQ ID NO: 1458118 - RNA, 19 nt, Artificial Sequence
  Description of Artificial Sequence: Synthetic oligonucleotide
gucauauguagggaggcac

SEQ ID NO: 1458119 - RNA, 19 nt, Artificial Sequence
  Description of Artificial Sequence: Synthetic oligonucleotide
aggauaagugaggucagca

SEQ ID NO: 1458120 - RNA, 19 nt, Artificial Sequence
  Description of Artificial Sequence: Synthetic oligonucleotide
gccaagaaaggacaaacga

SEQ ID NO: 1458121 - RNA, 19 nt, Artificial Sequence
  Description of Artificial Sequence: Synthetic oligonucleotide
cauuuucacucaaacacua

SEQ ID NO: 1458122 - RNA, 19 nt, Artificial Sequence
  Description of Artificial Sequence: Synthetic oligonucleotide
caggguaauggcuaaacua

SEQ ID NO: 1458123 - RNA, 19 nt, Artificial Sequence
  Description of Artificial Sequence: Synthetic oligonucleotide
cuaacgaaaagagaugcua

SEQ ID NO: 1458124 - RNA, 19 nt, Artificial Sequence
  Description of Artificial Sequence: Synthetic oligonucleotide
uuaaagacuuuggugccua

SEQ ID NO: 1458125 - RNA, 19 nt, Artificial Sequence
  Description of Artificial Sequence: Synthetic oligonucleotide
ggucuagagagugugggag

SEQ ID NO: 1458126 - RNA, 19 nt, Artificial Sequence
  Description of Artificial Sequence: Synthetic oligonucleotide
acacuaacgaaaagagaug

SEQ ID NO: 1458127 - RNA, 19 nt, Artificial Sequence
  Description of Artificial Sequence: Synthetic oligonucleotide
acuaccuugucucgggauu

SEQ ID NO: 1458128 - RNA, 19 nt, Artificial Sequence
  Description of Artificial Sequence: Synthetic oligonucleotide
aucaccacauaauggugaa

SEQ ID NO: 1458129 - RNA, 19 nt, Artificial Sequence
  Description of Artificial Sequence: Synthetic oligonucleotide
ccuaggauagagcugcccc

SEQ ID NO: 1458130 - RNA, 19 nt, Artificial Sequence
  Description of Artificial Sequence: Synthetic oligonucleotide
auugcucaggaaauaacau

SEQ ID NO: 1458131 - RNA, 19 nt, Artificial Sequence
  Description of Artificial Sequence: Synthetic oligonucleotide
uaguuaggagagaguaauc

SEQ ID NO: 1458132 - RNA, 19 nt, Artificial Sequence
  Description of Artificial Sequence: Synthetic oligonucleotide
cgggauuccacauacuugc

SEQ ID NO: 1458133 - RNA, 19 nt, Artificial Sequence
  Description of Artificial Sequence: Synthetic oligonucleotide
uugagccuuaaugucauuu

SEQ ID NO: 1458134 - RNA, 19 nt, Artificial Sequence
  Description of Artificial Sequence: Synthetic oligonucleotide
cacauaguacuaaaggggu

SEQ ID NO: 1458135 - RNA, 19 nt, Artificial Sequence
  Description of Artificial Sequence: Synthetic oligonucleotide
accuugccugacaaugugc

SEQ ID NO: 1458136 - RNA, 19 nt, Artificial Sequence
  Description of Artificial Sequence: Synthetic oligonucleotide
cuugucucgggauuccaca

SEQ ID NO: 1458137 - RNA, 19 nt, Artificial Sequence
  Description of Artificial Sequence: Synthetic oligonucleotide
ggcuaaacuaucucguaca

SEQ ID NO: 1458138 - RNA, 19 nt, Artificial Sequence
  Description of Artificial Sequence: Synthetic oligonucleotide
uucuaaaaucacgccgaca

SEQ ID NO: 1458139 - RNA, 19 nt, Artificial Sequence
  Description of Artificial Sequence: Synthetic oligonucleotide
agccucuuuaaagacagaa

SEQ ID NO: 1458140 - RNA, 19 nt, Artificial Sequence
  Description of Artificial Sequence: Synthetic oligonucleotide
ugugcggacagcugaggau

SEQ ID NO: 1458141 - RNA, 19 nt, Artificial Sequence
  Description of Artificial Sequence: Synthetic oligonucleotide
cagacaugcuuccaggcca

SEQ ID NO: 1458142 - RNA, 19 nt, Artificial Sequence
  Description of Artificial Sequence: Synthetic oligonucleotide
acccacgccaagaaaggac

SEQ ID NO: 1458143 - RNA, 19 nt, Artificial Sequence
  Description of Artificial Sequence: Synthetic oligonucleotide
cucgcaacccucacugaug

SEQ ID NO: 1458144 - RNA, 19 nt, Artificial Sequence
  Description of Artificial Sequence: Synthetic oligonucleotide
cuugccugacaaugugcag

SEQ ID NO: 1458145 - RNA, 19 nt, Artificial Sequence
  Description of Artificial Sequence: Synthetic oligonucleotide
gcaacagugccucggagac

SEQ ID NO: 1458146 - RNA, 19 nt, Artificial Sequence
  Description of Artificial Sequence: Synthetic oligonucleotide
cugaggagagcagugacca

SEQ ID NO: 1458147 - RNA, 19 nt, Artificial Sequence
  Description of Artificial Sequence: Synthetic oligonucleotide
caggagggcucagacaugc

SEQ ID NO: 1458148 - RNA, 19 nt, Artificial Sequence
  Description of Artificial Sequence: Synthetic oligonucleotide
caguuaccgacguccagac

SEQ ID NO: 1458149 - RNA, 19 nt, Artificial Sequence
  Description of Artificial Sequence: Synthetic oligonucleotide
aaaucacgccgacacucuu

SEQ ID NO: 1458150 - RNA, 19 nt, Artificial Sequence
  Description of Artificial Sequence: Synthetic oligonucleotide
caaugugcagagagcucag

SEQ ID NO: 1458151 - RNA, 19 nt, Artificial Sequence
  Description of Artificial Sequence: Synthetic oligonucleotide
cuaggauagagcugcccca

SEQ ID NO: 1458152 - RNA, 19 nt, Artificial Sequence
  Description of Artificial Sequence: Synthetic oligonucleotide
aagagacugucaaguucuc

SEQ ID NO: 1458153 - RNA, 19 nt, Artificial Sequence
  Description of Artificial Sequence: Synthetic oligonucleotide
acuagagcuuaaaaggaua

SEQ ID NO: 1458154 - RNA, 19 nt, Artificial Sequence
  Description of Artificial Sequence: Synthetic oligonucleotide
ucuagcagcucaggagggc

SEQ ID NO: 1458155 - RNA, 19 nt, Artificial Sequence
  Description of Artificial Sequence: Synthetic oligonucleotide
acuaacgaaaagagaugcu

SEQ ID NO: 1458156 - RNA, 19 nt, Artificial Sequence
  Description of Artificial Sequence: Synthetic oligonucleotide
cuaugacuagagcuuaaaa

SEQ ID NO: 1458157 - RNA, 19 nt, Artificial Sequence
  Description of Artificial Sequence: Synthetic oligonucleotide
gcaacccucacugauggcc

SEQ ID NO: 1458158 - RNA, 19 nt, Artificial Sequence
  Description of Artificial Sequence: Synthetic oligonucleotide
gaguaaucuggaauagaaa

SEQ ID NO: 1458159 - RNA, 19 nt, Artificial Sequence
  Description of Artificial Sequence: Synthetic oligonucleotide
agugcccaagcaguauuag

SEQ ID NO: 1458160 - RNA, 19 nt, Artificial Sequence
  Description of Artificial Sequence: Synthetic oligonucleotide
uggugccaggucuuacacc

SEQ ID NO: 1458161 - RNA, 19 nt, Artificial Sequence
  Description of Artificial Sequence: Synthetic oligonucleotide
cauaauggugaacccaaua

SEQ ID NO: 1458162 - RNA, 19 nt, Artificial Sequence
  Description of Artificial Sequence: Synthetic oligonucleotide
ggauagaucuagagagggg

SEQ ID NO: 1458163 - RNA, 19 nt, Artificial Sequence
  Description of Artificial Sequence: Synthetic oligonucleotide
uccugugcaccucuucaua

SEQ ID NO: 1458164 - RNA, 19 nt, Artificial Sequence
  Description of Artificial Sequence: Synthetic oligonucleotide
ugcuaugacuagagcuuaa

SEQ ID NO: 1458165 - RNA, 19 nt, Artificial Sequence
  Description of Artificial Sequence: Synthetic oligonucleotide
ugcugguuuuggcaauaaa

SEQ ID NO: 1458166 - RNA, 19 nt, Artificial Sequence
  Description of Artificial Sequence: Synthetic oligonucleotide
auggcuaaacuaucucgua

SEQ ID NO: 1458167 - RNA, 19 nt, Artificial Sequence
  Description of Artificial Sequence: Synthetic oligonucleotide
uggccaaaauaagggauau

SEQ ID NO: 1458168 - RNA, 19 nt, Artificial Sequence
  Description of Artificial Sequence: Synthetic oligonucleotide
ugggguguagaggcccugg

SEQ ID NO: 1458169 - RNA, 19 nt, Artificial Sequence
  Description of Artificial Sequence: Synthetic oligonucleotide
uagugcccaagcaguauua

SEQ ID NO: 1458170 - RNA, 19 nt, Artificial Sequence
  Description of Artificial Sequence: Synthetic oligonucleotide
agaugcuaucaccuuccaa

SEQ ID NO: 1458171 - RNA, 19 nt, Artificial Sequence
  Description of Artificial Sequence: Synthetic oligonucleotide
cucguacauguuccauggg

SEQ ID NO: 1458172 - RNA, 19 nt, Artificial Sequence
  Description of Artificial Sequence: Synthetic oligonucleotide
ugguggcuuauagcaaagc

SEQ ID NO: 1458173 - RNA, 19 nt, Artificial Sequence
  Description of Artificial Sequence: Synthetic oligonucleotide
gacaaacgaugacugcgaa

SEQ ID NO: 1458174 - RNA, 19 nt, Artificial Sequence
  Description of Artificial Sequence: Synthetic oligonucleotide
aagaccacccuaggauaga

SEQ ID NO: 1458175 - RNA, 19 nt, Artificial Sequence
  Description of Artificial Sequence: Synthetic oligonucleotide
auauagcuuccucccuccu

SEQ ID NO: 1458176 - RNA, 19 nt, Artificial Sequence
  Description of Artificial Sequence: Synthetic oligonucleotide
ggugacagaggagugguca

SEQ ID NO: 1458177 - RNA, 19 nt, Artificial Sequence
  Description of Artificial Sequence: Synthetic oligonucleotide
uccaggccaaggcacuguc

SEQ ID NO: 1458178 - RNA, 19 nt, Artificial Sequence
  Description of Artificial Sequence: Synthetic oligonucleotide
ccaagagacugucaaguuc

SEQ ID NO: 1458179 - RNA, 19 nt, Artificial Sequence
  Description of Artificial Sequence: Synthetic oligonucleotide
gugccuaaagaccacccua

SEQ ID NO: 1458180 - RNA, 19 nt, Artificial Sequence
  Description of Artificial Sequence: Synthetic oligonucleotide
gacaaugugcagagagcuc

SEQ ID NO: 1458181 - RNA, 19 nt, Artificial Sequence
  Description of Artificial Sequence: Synthetic oligonucleotide
uaaagacuuuggugccuaa

SEQ ID NO: 1458182 - RNA, 19 nt, Artificial Sequence
  Description of Artificial Sequence: Synthetic oligonucleotide
ucucgggauuccacauacu

SEQ ID NO: 1458183 - RNA, 19 nt, Artificial Sequence
  Description of Artificial Sequence: Synthetic oligonucleotide
accgacguccagaccuugc

SEQ ID NO: 1458184 - RNA, 19 nt, Artificial Sequence
  Description of Artificial Sequence: Synthetic oligonucleotide
cgaaaagagaugcuaucac

SEQ ID NO: 1458185 - RNA, 19 nt, Artificial Sequence
  Description of Artificial Sequence: Synthetic oligonucleotide
auauguagggaggcacagu

SEQ ID NO: 1458186 - RNA, 19 nt, Artificial Sequence
  Description of Artificial Sequence: Synthetic oligonucleotide
cuaucucguacauguucca

SEQ ID NO: 1458187 - RNA, 19 nt, Artificial Sequence
  Description of Artificial Sequence: Synthetic oligonucleotide
caacccucacugauggcca

SEQ ID NO: 1458188 - RNA, 19 nt, Artificial Sequence
  Description of Artificial Sequence: Synthetic oligonucleotide
uuaccgacguccagaccuu

SEQ ID NO: 1458189 - RNA, 19 nt, Artificial Sequence
  Description of Artificial Sequence: Synthetic oligonucleotide
gagaugcuaucaccuucca

SEQ ID NO: 1458190 - RNA, 19 nt, Artificial Sequence
  Description of Artificial Sequence: Synthetic oligonucleotide
agaccuugccugacaaugu

SEQ ID NO: 1458191 - RNA, 19 nt, Artificial Sequence
  Description of Artificial Sequence: Synthetic oligonucleotide
gacuagagcuuaaaaggau

SEQ ID NO: 1458192 - RNA, 19 nt, Artificial Sequence
  Description of Artificial Sequence: Synthetic oligonucleotide
gacugcgaaggaggucagg

SEQ ID NO: 1458193 - RNA, 19 nt, Artificial Sequence
  Description of Artificial Sequence: Synthetic oligonucleotide
ucaccacauaauggugaac

SEQ ID NO: 1458194 - RNA, 19 nt, Artificial Sequence
  Description of Artificial Sequence: Synthetic oligonucleotide
cuuacaccccaaggauaag

SEQ ID NO: 1458195 - RNA, 19 nt, Artificial Sequence
  Description of Artificial Sequence: Synthetic oligonucleotide
gccaagccagcccauguac

SEQ ID NO: 1458196 - RNA, 19 nt, Artificial Sequence
  Description of Artificial Sequence: Synthetic oligonucleotide
gccaaguuucuaaaaucac

SEQ ID NO: 1458197 - RNA, 19 nt, Artificial Sequence
  Description of Artificial Sequence: Synthetic oligonucleotide
ggacauugaaaagccaaaa

SEQ ID NO: 1458198 - RNA, 19 nt, Artificial Sequence
  Description of Artificial Sequence: Synthetic oligonucleotide
ccuaaagaccacccuagga

SEQ ID NO: 1458199 - RNA, 19 nt, Artificial Sequence
  Description of Artificial Sequence: Synthetic oligonucleotide
gcauggaggauccuggggu

SEQ ID NO: 1458200 - RNA, 19 nt, Artificial Sequence
  Description of Artificial Sequence: Synthetic oligonucleotide
agaggaguggucagagcau

SEQ ID NO: 1458201 - RNA, 19 nt, Artificial Sequence
  Description of Artificial Sequence: Synthetic oligonucleotide
ggucuuacaccccaaggau

SEQ ID NO: 1458202 - RNA, 19 nt, Artificial Sequence
  Description of Artificial Sequence: Synthetic oligonucleotide
gaacccaauauagcuuccu

SEQ ID NO: 1458203 - RNA, 19 nt, Artificial Sequence
  Description of Artificial Sequence: Synthetic oligonucleotide
gucuuacaccccaaggaua

SEQ ID NO: 1458204 - RNA, 19 nt, Artificial Sequence
  Description of Artificial Sequence: Synthetic oligonucleotide
auguuccaugggaaagugu

SEQ ID NO: 1458205 - RNA, 19 nt, Artificial Sequence
  Description of Artificial Sequence: Synthetic oligonucleotide
cuaugucacaaagcauuaa

SEQ ID NO: 1458206 - RNA, 19 nt, Artificial Sequence
  Description of Artificial Sequence: Synthetic oligonucleotide
ccaagaaaggacaaacgau

SEQ ID NO: 1458207 - RNA, 19 nt, Artificial Sequence
  Description of Artificial Sequence: Synthetic oligonucleotide
ccgacguccagaccuugcc

SEQ ID NO: 1458208 - RNA, 19 nt, Artificial Sequence
  Description of Artificial Sequence: Synthetic oligonucleotide
ggguaauggcuaaacuauc

SEQ ID NO: 1458209 - RNA, 19 nt, Artificial Sequence
  Description of Artificial Sequence: Synthetic oligonucleotide
ccaggucuuacaccccaag

SEQ ID NO: 1458210 - RNA, 19 nt, Artificial Sequence
  Description of Artificial Sequence: Synthetic oligonucleotide
guaccccaguuggaagccc

SEQ ID NO: 1458211 - RNA, 19 nt, Artificial Sequence
  Description of Artificial Sequence: Synthetic oligonucleotide
gcaauaaagauggcuugua

SEQ ID NO: 1458212 - RNA, 19 nt, Artificial Sequence
  Description of Artificial Sequence: Synthetic oligonucleotide
uaccgacguccagaccuug

SEQ ID NO: 1458213 - RNA, 19 nt, Artificial Sequence
  Description of Artificial Sequence: Synthetic oligonucleotide
ggacaggaacaaacugccc

SEQ ID NO: 1458214 - RNA, 19 nt, Artificial Sequence
  Description of Artificial Sequence: Synthetic oligonucleotide
cccugaggagagcagugac

SEQ ID NO: 1458215 - RNA, 19 nt, Artificial Sequence
  Description of Artificial Sequence: Synthetic oligonucleotide
gcuaaacuaucucguacau

SEQ ID NO: 1458216 - RNA, 19 nt, Artificial Sequence
  Description of Artificial Sequence: Synthetic oligonucleotide
ggugccuaaagaccacccu

SEQ ID NO: 1458217 - RNA, 19 nt, Artificial Sequence
  Description of Artificial Sequence: Synthetic oligonucleotide
ccaguuaccgacguccaga

SEQ ID NO: 1458218 - RNA, 19 nt, Artificial Sequence
  Description of Artificial Sequence: Synthetic oligonucleotide
ggccaaaauaagggauaug

SEQ ID NO: 1458219 - RNA, 19 nt, Artificial Sequence
  Description of Artificial Sequence: Synthetic oligonucleotide
cuagugcccaagcaguauu

SEQ ID NO: 1458220 - RNA, 19 nt, Artificial Sequence
  Description of Artificial Sequence: Synthetic oligonucleotide
gcuaugacuagagcuuaaa

SEQ ID NO: 1458221 - RNA, 19 nt, Artificial Sequence
  Description of Artificial Sequence: Synthetic oligonucleotide
cucccuccuggucuagaga

SEQ ID NO: 1458222 - RNA, 19 nt, Artificial Sequence
  Description of Artificial Sequence: Synthetic oligonucleotide
ccacccuaggauagagcug

SEQ ID NO: 1458223 - RNA, 19 nt, Artificial Sequence
  Description of Artificial Sequence: Synthetic oligonucleotide
ccacuggacuggcuagugc

SEQ ID NO: 1458224 - RNA, 19 nt, Artificial Sequence
  Description of Artificial Sequence: Synthetic oligonucleotide
agucucugccaaguuucua

SEQ ID NO: 1458225 - RNA, 19 nt, Artificial Sequence
  Description of Artificial Sequence: Synthetic oligonucleotide
caagugccuaugucacaaa

SEQ ID NO: 1458226 - RNA, 19 nt, Artificial Sequence
  Description of Artificial Sequence: Synthetic oligonucleotide
gguuuucauuucaugacuu

SEQ ID NO: 1458227 - RNA, 19 nt, Artificial Sequence
  Description of Artificial Sequence: Synthetic oligonucleotide
ggaggauccugggguguag

SEQ ID NO: 1458228 - RNA, 19 nt, Artificial Sequence
  Description of Artificial Sequence: Synthetic oligonucleotide
ggugaacccaauauagcuu

SEQ ID NO: 1458229 - RNA, 19 nt, Artificial Sequence
  Description of Artificial Sequence: Synthetic oligonucleotide
cugcgaaggaggucaggcu

SEQ ID NO: 1458230 - RNA, 19 nt, Artificial Sequence
  Description of Artificial Sequence: Synthetic oligonucleotide
cacccacgccaagaaagga

SEQ ID NO: 1458231 - RNA, 19 nt, Artificial Sequence
  Description of Artificial Sequence: Synthetic oligonucleotide
cuuuuaucucucccacauu

SEQ ID NO: 1458232 - RNA, 19 nt, Artificial Sequence
  Description of Artificial Sequence: Synthetic oligonucleotide
cccuaggauagagcugccc

SEQ ID NO: 1458233 - RNA, 19 nt, Artificial Sequence
  Description of Artificial Sequence: Synthetic oligonucleotide
cugggguguagaggcccug

SEQ ID NO: 1458234 - RNA, 19 nt, Artificial Sequence
  Description of Artificial Sequence: Synthetic oligonucleotide
ccaauauagcuuccucccu

SEQ ID NO: 1458235 - RNA, 19 nt, Artificial Sequence
  Description of Artificial Sequence: Synthetic oligonucleotide
cccacuggacuggcuagug

SEQ ID NO: 1458236 - RNA, 19 nt, Artificial Sequence
  Description of Artificial Sequence: Synthetic oligonucleotide
ggcuuauagcaaagccucu

SEQ ID NO: 1458237 - RNA, 19 nt, Artificial Sequence
  Description of Artificial Sequence: Synthetic oligonucleotide
ggcuagugcccaagcagua

SEQ ID NO: 1458238 - RNA, 19 nt, Artificial Sequence
  Description of Artificial Sequence: Synthetic oligonucleotide
gcuagugcccaagcaguau

SEQ ID NO: 1458239 - RNA, 19 nt, Artificial Sequence
  Description of Artificial Sequence: Synthetic oligonucleotide
cagcaggguaauggcuaaa

SEQ ID NO: 1458240 - RNA, 19 nt, Artificial Sequence
  Description of Artificial Sequence: Synthetic oligonucleotide
cgcaacccucacugauggc

SEQ ID NO: 1458241 - RNA, 19 nt, Artificial Sequence
  Description of Artificial Sequence: Synthetic oligonucleotide
ccucgcaacccucacugau

SEQ ID NO: 1458242 - RNA, 19 nt, Artificial Sequence
  Description of Artificial Sequence: Synthetic oligonucleotide
cgaugacugcgaaggaggu

SEQ ID NO: 1458243 - RNA, 19 nt, Artificial Sequence
  Description of Artificial Sequence: Synthetic oligonucleotide
gccaggucuuacaccccaa

SEQ ID NO: 1458244 - RNA, 19 nt, Artificial Sequence
  Description of Artificial Sequence: Synthetic oligonucleotide
cagcucaggagggcuuguu

SEQ ID NO: 1458245 - RNA, 19 nt, Artificial Sequence
  Description of Artificial Sequence: Synthetic oligonucleotide
ggcccuggugccaggucuu

SEQ ID NO: 1458246 - RNA, 19 nt, Artificial Sequence
  Description of Artificial Sequence: Synthetic oligonucleotide
cgccgacacucuucuuggu

SEQ ID NO: 1458247 - RNA, 19 nt, Artificial Sequence
  Description of Artificial Sequence: Synthetic oligonucleotide
gaauuuacgauagaggucg

SEQ ID NO: 1458248 - RNA, 19 nt, Artificial Sequence
  Description of Artificial Sequence: Synthetic oligonucleotide
uuuaucaccaccucguuag

SEQ ID NO: 1458249 - RNA, 19 nt, Artificial Sequence
  Description of Artificial Sequence: Synthetic oligonucleotide
ucuaacugaaaguaguugc

SEQ ID NO: 1458250 - RNA, 19 nt, Artificial Sequence
  Description of Artificial Sequence: Synthetic oligonucleotide
aauaacuucgccucauaug

SEQ ID NO: 1458251 - RNA, 19 nt, Artificial Sequence
  Description of Artificial Sequence: Synthetic oligonucleotide
uucguacaaaucaagaucu

SEQ ID NO: 1458252 - RNA, 19 nt, Artificial Sequence
  Description of Artificial Sequence: Synthetic oligonucleotide
auaacuucgccucauaugu

SEQ ID NO: 1458253 - RNA, 19 nt, Artificial Sequence
  Description of Artificial Sequence: Synthetic oligonucleotide
gagggaauugauuagggcc

SEQ ID NO: 1458254 - RNA, 19 nt, Artificial Sequence
  Description of Artificial Sequence: Synthetic oligonucleotide
uuucagaucuuucucagca

SEQ ID NO: 1458255 - RNA, 19 nt, Artificial Sequence
  Description of Artificial Sequence: Synthetic oligonucleotide
aacuucgccucauauguac

SEQ ID NO: 1458256 - RNA, 19 nt, Artificial Sequence
  Description of Artificial Sequence: Synthetic oligonucleotide
uucuugauaucagugaagg

SEQ ID NO: 1458257 - RNA, 19 nt, Artificial Sequence
  Description of Artificial Sequence: Synthetic oligonucleotide
uuuacuuucuuguuuguac

SEQ ID NO: 1458258 - RNA, 19 nt, Artificial Sequence
  Description of Artificial Sequence: Synthetic oligonucleotide
aacauguuccucgaccugc

SEQ ID NO: 1458259 - RNA, 19 nt, Artificial Sequence
  Description of Artificial Sequence: Synthetic oligonucleotide
aaagucauuucgcaucuug

SEQ ID NO: 1458260 - RNA, 19 nt, Artificial Sequence
  Description of Artificial Sequence: Synthetic oligonucleotide
ugcagugaauuuacgauag

SEQ ID NO: 1458261 - RNA, 19 nt, Artificial Sequence
  Description of Artificial Sequence: Synthetic oligonucleotide
ugcaucagcguacugaucu

SEQ ID NO: 1458262 - RNA, 19 nt, Artificial Sequence
  Description of Artificial Sequence: Synthetic oligonucleotide
ucaacaaccagguugcccu

SEQ ID NO: 1458263 - RNA, 19 nt, Artificial Sequence
  Description of Artificial Sequence: Synthetic oligonucleotide
auauguacgcaacagguca

SEQ ID NO: 1458264 - RNA, 19 nt, Artificial Sequence
  Description of Artificial Sequence: Synthetic oligonucleotide
uuacgcuccaacaacaggu

SEQ ID NO: 1458265 - RNA, 19 nt, Artificial Sequence
  Description of Artificial Sequence: Synthetic oligonucleotide
acggucuuuguuucgaagc

SEQ ID NO: 1458266 - RNA, 19 nt, Artificial Sequence
  Description of Artificial Sequence: Synthetic oligonucleotide
cuaacugaaaguaguugcg

SEQ ID NO: 1458267 - RNA, 19 nt, Artificial Sequence
  Description of Artificial Sequence: Synthetic oligonucleotide
cucaauuucucgaacuugc

SEQ ID NO: 1458268 - RNA, 19 nt, Artificial Sequence
  Description of Artificial Sequence: Synthetic oligonucleotide
aaucccacauuguccaggg

SEQ ID NO: 1458269 - RNA, 19 nt, Artificial Sequence
  Description of Artificial Sequence: Synthetic oligonucleotide
uugauaucagugaaggccu

SEQ ID NO: 1458270 - RNA, 19 nt, Artificial Sequence
  Description of Artificial Sequence: Synthetic oligonucleotide
ucagcaaccuuuaaacgug

SEQ ID NO: 1458271 - RNA, 19 nt, Artificial Sequence
  Description of Artificial Sequence: Synthetic oligonucleotide
cuucgauuccagaacaucc

SEQ ID NO: 1458272 - RNA, 19 nt, Artificial Sequence
  Description of Artificial Sequence: Synthetic oligonucleotide
ucauuucgcaucuugguca

SEQ ID NO: 1458273 - RNA, 19 nt, Artificial Sequence
  Description of Artificial Sequence: Synthetic oligonucleotide
cuucuuaucauacuugguc

SEQ ID NO: 1458274 - RNA, 19 nt, Artificial Sequence
  Description of Artificial Sequence: Synthetic oligonucleotide
uuugucacguucuaacuga

SEQ ID NO: 1458275 - RNA, 19 nt, Artificial Sequence
  Description of Artificial Sequence: Synthetic oligonucleotide
uacaccuuaaucuccaccu

SEQ ID NO: 1458276 - RNA, 19 nt, Artificial Sequence
  Description of Artificial Sequence: Synthetic oligonucleotide
uuuacgcuccaacaacagg

SEQ ID NO: 1458277 - RNA, 19 nt, Artificial Sequence
  Description of Artificial Sequence: Synthetic oligonucleotide
agugaauuuacgauagagg

SEQ ID NO: 1458278 - RNA, 19 nt, Artificial Sequence
  Description of Artificial Sequence: Synthetic oligonucleotide
gucacguucuaacugaaag

SEQ ID NO: 1458279 - RNA, 19 nt, Artificial Sequence
  Description of Artificial Sequence: Synthetic oligonucleotide
uuuguacaccuuaaucucc

SEQ ID NO: 1458280 - RNA, 19 nt, Artificial Sequence
  Description of Artificial Sequence: Synthetic oligonucleotide
acaaaucaagaucugcuug

SEQ ID NO: 1458281 - RNA, 19 nt, Artificial Sequence
  Description of Artificial Sequence: Synthetic oligonucleotide
ucucaguacacccuccugc

SEQ ID NO: 1458282 - RNA, 19 nt, Artificial Sequence
  Description of Artificial Sequence: Synthetic oligonucleotide
aguacacccuccugcaugc

SEQ ID NO: 1458283 - RNA, 19 nt, Artificial Sequence
  Description of Artificial Sequence: Synthetic oligonucleotide
aaccuuuaaacgugccuuc

SEQ ID NO: 1458284 - RNA, 19 nt, Artificial Sequence
  Description of Artificial Sequence: Synthetic oligonucleotide
cuucguacaaaucaagauc

SEQ ID NO: 1458285 - RNA, 19 nt, Artificial Sequence
  Description of Artificial Sequence: Synthetic oligonucleotide
uacgcaacaggucauugug

SEQ ID NO: 1458286 - RNA, 19 nt, Artificial Sequence
  Description of Artificial Sequence: Synthetic oligonucleotide
aacugaaaguaguugcgcu

SEQ ID NO: 1458287 - RNA, 19 nt, Artificial Sequence
  Description of Artificial Sequence: Synthetic oligonucleotide
ucucagcaaccuuuaaacg

SEQ ID NO: 1458288 - RNA, 19 nt, Artificial Sequence
  Description of Artificial Sequence: Synthetic oligonucleotide
guuguuaagagugauguca

SEQ ID NO: 1458289 - RNA, 19 nt, Artificial Sequence
  Description of Artificial Sequence: Synthetic oligonucleotide
uuaaacgugccuucguaca

SEQ ID NO: 1458290 - RNA, 19 nt, Artificial Sequence
  Description of Artificial Sequence: Synthetic oligonucleotide
acugaaaguaguugcgcuc

SEQ ID NO: 1458291 - RNA, 19 nt, Artificial Sequence
  Description of Artificial Sequence: Synthetic oligonucleotide
guucuuuaucaccaccucg

SEQ ID NO: 1458292 - RNA, 19 nt, Artificial Sequence
  Description of Artificial Sequence: Synthetic oligonucleotide
guuaagagugaugucauug

SEQ ID NO: 1458293 - RNA, 19 nt, Artificial Sequence
  Description of Artificial Sequence: Synthetic oligonucleotide
uuuacgauagaggucgucu

SEQ ID NO: 1458294 - RNA, 19 nt, Artificial Sequence
  Description of Artificial Sequence: Synthetic oligonucleotide
uuuaaacgugccuucguac

SEQ ID NO: 1458295 - RNA, 19 nt, Artificial Sequence
  Description of Artificial Sequence: Synthetic oligonucleotide
caguuuucgggacacaagc

SEQ ID NO: 1458296 - RNA, 19 nt, Artificial Sequence
  Description of Artificial Sequence: Synthetic oligonucleotide
gaacuugccuuucaaaguc

SEQ ID NO: 1458297 - RNA, 19 nt, Artificial Sequence
  Description of Artificial Sequence: Synthetic oligonucleotide
gauacgcgaaacauguucc

SEQ ID NO: 1458298 - RNA, 19 nt, Artificial Sequence
  Description of Artificial Sequence: Synthetic oligonucleotide
acuuucuuguuuguacacc

SEQ ID NO: 1458299 - RNA, 19 nt, Artificial Sequence
  Description of Artificial Sequence: Synthetic oligonucleotide
ucaugacgcugcaucagcg

SEQ ID NO: 1458300 - RNA, 19 nt, Artificial Sequence
  Description of Artificial Sequence: Synthetic oligonucleotide
aacauccuccaguuuucgg

SEQ ID NO: 1458301 - RNA, 19 nt, Artificial Sequence
  Description of Artificial Sequence: Synthetic oligonucleotide
acgcgaaacauguuccucg

SEQ ID NO: 1458302 - RNA, 19 nt, Artificial Sequence
  Description of Artificial Sequence: Synthetic oligonucleotide
ugcaguuuacgcuccaaca

SEQ ID NO: 1458303 - RNA, 19 nt, Artificial Sequence
  Description of Artificial Sequence: Synthetic oligonucleotide
cauacuuggucucaauuuc

SEQ ID NO: 1458304 - RNA, 19 nt, Artificial Sequence
  Description of Artificial Sequence: Synthetic oligonucleotide
ucauacuuggucucaauuu

SEQ ID NO: 1458305 - RNA, 19 nt, Artificial Sequence
  Description of Artificial Sequence: Synthetic oligonucleotide
auagcucgcaauucucuuc

SEQ ID NO: 1458306 - RNA, 19 nt, Artificial Sequence
  Description of Artificial Sequence: Synthetic oligonucleotide
cucagcauguuucagacga

SEQ ID NO: 1458307 - RNA, 19 nt, Artificial Sequence
  Description of Artificial Sequence: Synthetic oligonucleotide
ucaauuucucgaacuugcc

SEQ ID NO: 1458308 - RNA, 19 nt, Artificial Sequence
  Description of Artificial Sequence: Synthetic oligonucleotide
uaguaguucuugauaucag

SEQ ID NO: 1458309 - RNA, 19 nt, Artificial Sequence
  Description of Artificial Sequence: Synthetic oligonucleotide
auucuucgauuccagaaca

SEQ ID NO: 1458310 - RNA, 19 nt, Artificial Sequence
  Description of Artificial Sequence: Synthetic oligonucleotide
aaguaguugcgcuccucuc

SEQ ID NO: 1458311 - RNA, 19 nt, Artificial Sequence
  Description of Artificial Sequence: Synthetic oligonucleotide
caagcguuagugcugcagg

SEQ ID NO: 1458312 - RNA, 19 nt, Artificial Sequence
  Description of Artificial Sequence: Synthetic oligonucleotide
uuaucucccagaaggugug

SEQ ID NO: 1458313 - RNA, 19 nt, Artificial Sequence
  Description of Artificial Sequence: Synthetic oligonucleotide
agaagguguggauuuuguc

SEQ ID NO: 1458314 - RNA, 19 nt, Artificial Sequence
  Description of Artificial Sequence: Synthetic oligonucleotide
caacaggucauugugggcc

SEQ ID NO: 1458315 - RNA, 19 nt, Artificial Sequence
  Description of Artificial Sequence: Synthetic oligonucleotide
uucuaacugaaaguaguug

SEQ ID NO: 1458316 - RNA, 19 nt, Artificial Sequence
  Description of Artificial Sequence: Synthetic oligonucleotide
ucacguucuaacugaaagu

SEQ ID NO: 1458317 - RNA, 19 nt, Artificial Sequence
  Description of Artificial Sequence: Synthetic oligonucleotide
ucauagcucgcaauucucu

SEQ ID NO: 1458318 - RNA, 19 nt, Artificial Sequence
  Description of Artificial Sequence: Synthetic oligonucleotide
gugcucauacaacaggugc

SEQ ID NO: 1458319 - RNA, 19 nt, Artificial Sequence
  Description of Artificial Sequence: Synthetic oligonucleotide
aggugcuuuacuuucuugu

SEQ ID NO: 1458320 - RNA, 19 nt, Artificial Sequence
  Description of Artificial Sequence: Synthetic oligonucleotide
caggauccaaguuggaggc

SEQ ID NO: 1458321 - RNA, 19 nt, Artificial Sequence
  Description of Artificial Sequence: Synthetic oligonucleotide
gcaggauccaaguuggagg

SEQ ID NO: 1458322 - RNA, 19 nt, Artificial Sequence
  Description of Artificial Sequence: Synthetic oligonucleotide
agugccugcaguuuacgcu

SEQ ID NO: 1458323 - RNA, 19 nt, Artificial Sequence
  Description of Artificial Sequence: Synthetic oligonucleotide
uguuccuugagggaauuga

SEQ ID NO: 1458324 - RNA, 19 nt, Artificial Sequence
  Description of Artificial Sequence: Synthetic oligonucleotide
cuucaccucggcuagguug

SEQ ID NO: 1458325 - RNA, 19 nt, Artificial Sequence
  Description of Artificial Sequence: Synthetic oligonucleotide
agucauuucgcaucuuggu

SEQ ID NO: 1458326 - RNA, 19 nt, Artificial Sequence
  Description of Artificial Sequence: Synthetic oligonucleotide
cagugaauuuacgauagag

SEQ ID NO: 1458327 - RNA, 19 nt, Artificial Sequence
  Description of Artificial Sequence: Synthetic oligonucleotide
ucuuguuuguacaccuuaa

SEQ ID NO: 1458328 - RNA, 19 nt, Artificial Sequence
  Description of Artificial Sequence: Synthetic oligonucleotide
uuguuaagagugaugucau

SEQ ID NO: 1458329 - RNA, 19 nt, Artificial Sequence
  Description of Artificial Sequence: Synthetic oligonucleotide
gaaucgcugcuccaguacc

SEQ ID NO: 1458330 - RNA, 19 nt, Artificial Sequence
  Description of Artificial Sequence: Synthetic oligonucleotide
ugaugaaucgcugcuccag

SEQ ID NO: 1458331 - RNA, 19 nt, Artificial Sequence
  Description of Artificial Sequence: Synthetic oligonucleotide
aaacauguuccucgaccug

SEQ ID NO: 1458332 - RNA, 19 nt, Artificial Sequence
  Description of Artificial Sequence: Synthetic oligonucleotide
uucgucauguccucuggug

SEQ ID NO: 1458333 - RNA, 19 nt, Artificial Sequence
  Description of Artificial Sequence: Synthetic oligonucleotide
uaacugaaaguaguugcgc

SEQ ID NO: 1458334 - RNA, 19 nt, Artificial Sequence
  Description of Artificial Sequence: Synthetic oligonucleotide
uacaacaggugcuuuacuu

SEQ ID NO: 1458335 - RNA, 19 nt, Artificial Sequence
  Description of Artificial Sequence: Synthetic oligonucleotide
ucuugauaucagugaaggc

SEQ ID NO: 1458336 - RNA, 19 nt, Artificial Sequence
  Description of Artificial Sequence: Synthetic oligonucleotide
aaguccuugauggugguau

SEQ ID NO: 1458337 - RNA, 19 nt, Artificial Sequence
  Description of Artificial Sequence: Synthetic oligonucleotide
ucauuguaguaguucuuga

SEQ ID NO: 1458338 - RNA, 19 nt, Artificial Sequence
  Description of Artificial Sequence: Synthetic oligonucleotide
uucaccucggcuagguugu

SEQ ID NO: 1458339 - RNA, 19 nt, Artificial Sequence
  Description of Artificial Sequence: Synthetic oligonucleotide
acacaagcguuagugcugc

SEQ ID NO: 1458340 - RNA, 19 nt, Artificial Sequence
  Description of Artificial Sequence: Synthetic oligonucleotide
uauguaggggcacccacaa

SEQ ID NO: 1458341 - RNA, 19 nt, Artificial Sequence
  Description of Artificial Sequence: Synthetic oligonucleotide
guauucuucgauuccagaa

SEQ ID NO: 1458342 - RNA, 19 nt, Artificial Sequence
  Description of Artificial Sequence: Synthetic oligonucleotide
cugaaaguaguugcgcucc

SEQ ID NO: 1458343 - RNA, 19 nt, Artificial Sequence
  Description of Artificial Sequence: Synthetic oligonucleotide
ugaaucgcugcuccaguac

SEQ ID NO: 1458344 - RNA, 19 nt, Artificial Sequence
  Description of Artificial Sequence: Synthetic oligonucleotide
ucuucuuaucauacuuggu

SEQ ID NO: 1458345 - RNA, 19 nt, Artificial Sequence
  Description of Artificial Sequence: Synthetic oligonucleotide
caccuuaaucuccaccugg

SEQ ID NO: 1458346 - RNA, 19 nt, Artificial Sequence
  Description of Artificial Sequence: Synthetic oligonucleotide
aauugauuagggccagguu

SEQ ID NO: 1458347 - RNA, 19 nt, Artificial Sequence
  Description of Artificial Sequence: Synthetic oligonucleotide
uugggcgccauguugccag

SEQ ID NO: 1458348 - RNA, 19 nt, Artificial Sequence
  Description of Artificial Sequence: Synthetic oligonucleotide
acugaucuggccauucuuc

SEQ ID NO: 1458349 - RNA, 19 nt, Artificial Sequence
  Description of Artificial Sequence: Synthetic oligonucleotide
uacgauagaggucgucucu

SEQ ID NO: 1458350 - RNA, 19 nt, Artificial Sequence
  Description of Artificial Sequence: Synthetic oligonucleotide
cauauguacgcaacagguc

SEQ ID NO: 1458351 - RNA, 19 nt, Artificial Sequence
  Description of Artificial Sequence: Synthetic oligonucleotide
uacacccuccugcaugcgg

SEQ ID NO: 1458352 - RNA, 19 nt, Artificial Sequence
  Description of Artificial Sequence: Synthetic oligonucleotide
uguccuuucucaguacacc

SEQ ID NO: 1458353 - RNA, 19 nt, Artificial Sequence
  Description of Artificial Sequence: Synthetic oligonucleotide
uagcucgcaauucucuucu

SEQ ID NO: 1458354 - RNA, 19 nt, Artificial Sequence
  Description of Artificial Sequence: Synthetic oligonucleotide
aguugcgcuccucucguuc

SEQ ID NO: 1458355 - RNA, 19 nt, Artificial Sequence
  Description of Artificial Sequence: Synthetic oligonucleotide
ugcaggauccaaguuggag

SEQ ID NO: 1458356 - RNA, 19 nt, Artificial Sequence
  Description of Artificial Sequence: Synthetic oligonucleotide
uaagagugaugucauugua

SEQ ID NO: 1458357 - RNA, 19 nt, Artificial Sequence
  Description of Artificial Sequence: Synthetic oligonucleotide
ugccuucguacaaaucaag

SEQ ID NO: 1458358 - RNA, 19 nt, Artificial Sequence
  Description of Artificial Sequence: Synthetic oligonucleotide
uggugcgaguccaucaaca

SEQ ID NO: 1458359 - RNA, 19 nt, Artificial Sequence
  Description of Artificial Sequence: Synthetic oligonucleotide
uaaacgugccuucguacaa

SEQ ID NO: 1458360 - RNA, 19 nt, Artificial Sequence
  Description of Artificial Sequence: Synthetic oligonucleotide
ccgaaggccaauaacuucg

SEQ ID NO: 1458361 - RNA, 19 nt, Artificial Sequence
  Description of Artificial Sequence: Synthetic oligonucleotide
ucauacuguaaguccuuga

SEQ ID NO: 1458362 - RNA, 19 nt, Artificial Sequence
  Description of Artificial Sequence: Synthetic oligonucleotide
ucgaccugcuccuucguca

SEQ ID NO: 1458363 - RNA, 19 nt, Artificial Sequence
  Description of Artificial Sequence: Synthetic oligonucleotide
uccucgaccugcuccuucg

SEQ ID NO: 1458364 - RNA, 19 nt, Artificial Sequence
  Description of Artificial Sequence: Synthetic oligonucleotide
caucuccucagcauguuuc

SEQ ID NO: 1458365 - RNA, 19 nt, Artificial Sequence
  Description of Artificial Sequence: Synthetic oligonucleotide
cuucgccucauauguacgc

SEQ ID NO: 1458366 - RNA, 19 nt, Artificial Sequence
  Description of Artificial Sequence: Synthetic oligonucleotide
uuuucgggacacaagcguu

SEQ ID NO: 1458367 - RNA, 19 nt, Artificial Sequence
  Description of Artificial Sequence: Synthetic oligonucleotide
caguuuacgcuccaacaac

SEQ ID NO: 1458368 - RNA, 19 nt, Artificial Sequence
  Description of Artificial Sequence: Synthetic oligonucleotide
agccguuuguucugcagag

SEQ ID NO: 1458369 - RNA, 19 nt, Artificial Sequence
  Description of Artificial Sequence: Synthetic oligonucleotide
aguuuucgggacacaagcg

SEQ ID NO: 1458370 - RNA, 19 nt, Artificial Sequence
  Description of Artificial Sequence: Synthetic oligonucleotide
guacaccuuaaucuccacc

SEQ ID NO: 1458371 - RNA, 19 nt, Artificial Sequence
  Description of Artificial Sequence: Synthetic oligonucleotide
uuggucucaauuucucgaa

SEQ ID NO: 1458372 - RNA, 19 nt, Artificial Sequence
  Description of Artificial Sequence: Synthetic oligonucleotide
agcauguuucagacgaagg

SEQ ID NO: 1458373 - RNA, 19 nt, Artificial Sequence
  Description of Artificial Sequence: Synthetic oligonucleotide
uuacgauagaggucgucuc

SEQ ID NO: 1458374 - RNA, 19 nt, Artificial Sequence
  Description of Artificial Sequence: Synthetic oligonucleotide
acaacaggugcuuuacuuu

SEQ ID NO: 1458375 - RNA, 19 nt, Artificial Sequence
  Description of Artificial Sequence: Synthetic oligonucleotide
cauucaucucuuccuuugc

SEQ ID NO: 1458376 - RNA, 19 nt, Artificial Sequence
  Description of Artificial Sequence: Synthetic oligonucleotide
cucaugacgcugcaucagc

SEQ ID NO: 1458377 - RNA, 19 nt, Artificial Sequence
  Description of Artificial Sequence: Synthetic oligonucleotide
ucuggugcgaguccaucaa

SEQ ID NO: 1458378 - RNA, 19 nt, Artificial Sequence
  Description of Artificial Sequence: Synthetic oligonucleotide
uucuccgcaggucaagcuc

SEQ ID NO: 1458379 - RNA, 19 nt, Artificial Sequence
  Description of Artificial Sequence: Synthetic oligonucleotide
aucccgaaggccaauaacu

SEQ ID NO: 1458380 - RNA, 19 nt, Artificial Sequence
  Description of Artificial Sequence: Synthetic oligonucleotide
uagaggucgucucucuccu

SEQ ID NO: 1458381 - RNA, 19 nt, Artificial Sequence
  Description of Artificial Sequence: Synthetic oligonucleotide
ucguacaaaucaagaucug

SEQ ID NO: 1458382 - RNA, 19 nt, Artificial Sequence
  Description of Artificial Sequence: Synthetic oligonucleotide
gacgaagguucuuuaucac

SEQ ID NO: 1458383 - RNA, 19 nt, Artificial Sequence
  Description of Artificial Sequence: Synthetic oligonucleotide
ucuuucucagcaaccuuua

SEQ ID NO: 1458384 - RNA, 19 nt, Artificial Sequence
  Description of Artificial Sequence: Synthetic oligonucleotide
ggauacgcgaaacauguuc

SEQ ID NO: 1458385 - RNA, 19 nt, Artificial Sequence
  Description of Artificial Sequence: Synthetic oligonucleotide
gauaucagugaaggccucc

SEQ ID NO: 1458386 - RNA, 19 nt, Artificial Sequence
  Description of Artificial Sequence: Synthetic oligonucleotide
gacacaagcguuagugcug

SEQ ID NO: 1458387 - RNA, 19 nt, Artificial Sequence
  Description of Artificial Sequence: Synthetic oligonucleotide
caacaacagguucuugaag

SEQ ID NO: 1458388 - RNA, 19 nt, Artificial Sequence
  Description of Artificial Sequence: Synthetic oligonucleotide
uucucaguacacccuccug

SEQ ID NO: 1458389 - RNA, 19 nt, Artificial Sequence
  Description of Artificial Sequence: Synthetic oligonucleotide
ucgauuccagaacauccuc

SEQ ID NO: 1458390 - RNA, 19 nt, Artificial Sequence
  Description of Artificial Sequence: Synthetic oligonucleotide
uauguacgcaacaggucau

SEQ ID NO: 1458391 - RNA, 19 nt, Artificial Sequence
  Description of Artificial Sequence: Synthetic oligonucleotide
gaagguucuuuaucaccac

SEQ ID NO: 1458392 - RNA, 19 nt, Artificial Sequence
  Description of Artificial Sequence: Synthetic oligonucleotide
guucuugauaucagugaag

SEQ ID NO: 1458393 - RNA, 19 nt, Artificial Sequence
  Description of Artificial Sequence: Synthetic oligonucleotide
uccucaugacgcugcauca

SEQ ID NO: 1458394 - RNA, 19 nt, Artificial Sequence
  Description of Artificial Sequence: Synthetic oligonucleotide
ucauggaucucagucuuuc

SEQ ID NO: 1458395 - RNA, 19 nt, Artificial Sequence
  Description of Artificial Sequence: Synthetic oligonucleotide
ucuucgauuccagaacauc

SEQ ID NO: 1458396 - RNA, 19 nt, Artificial Sequence
  Description of Artificial Sequence: Synthetic oligonucleotide
ggcuagguuguucuggugc

SEQ ID NO: 1458397 - RNA, 19 nt, Artificial Sequence
  Description of Artificial Sequence: Synthetic oligonucleotide
ucucacggucuuuguuucg

SEQ ID NO: 1458398 - RNA, 19 nt, Artificial Sequence
  Description of Artificial Sequence: Synthetic oligonucleotide
caccuugaugaaucgcugc

SEQ ID NO: 1458399 - RNA, 19 nt, Artificial Sequence
  Description of Artificial Sequence: Synthetic oligonucleotide
cacaaguccugcagggccc

SEQ ID NO: 1458400 - RNA, 19 nt, Artificial Sequence
  Description of Artificial Sequence: Synthetic oligonucleotide
uucagugccugcaguuuac

SEQ ID NO: 1458401 - RNA, 19 nt, Artificial Sequence
  Description of Artificial Sequence: Synthetic oligonucleotide
ucagacgaagguucuuuau

SEQ ID NO: 1458402 - RNA, 19 nt, Artificial Sequence
  Description of Artificial Sequence: Synthetic oligonucleotide
cucguuagccagcuccugc

SEQ ID NO: 1458403 - RNA, 19 nt, Artificial Sequence
  Description of Artificial Sequence: Synthetic oligonucleotide
ucguugaacugcaccuccc

SEQ ID NO: 1458404 - RNA, 19 nt, Artificial Sequence
  Description of Artificial Sequence: Synthetic oligonucleotide
aacgugccuucguacaaau

SEQ ID NO: 1458405 - RNA, 19 nt, Artificial Sequence
  Description of Artificial Sequence: Synthetic oligonucleotide
cucagcaaccuuuaaacgu

SEQ ID NO: 1458406 - RNA, 19 nt, Artificial Sequence
  Description of Artificial Sequence: Synthetic oligonucleotide
uguacgcaacaggucauug

SEQ ID NO: 1458407 - RNA, 19 nt, Artificial Sequence
  Description of Artificial Sequence: Synthetic oligonucleotide
uggccauucuuccucuccu

SEQ ID NO: 1458408 - RNA, 19 nt, Artificial Sequence
  Description of Artificial Sequence: Synthetic oligonucleotide
aguuuacgcuccaacaaca

SEQ ID NO: 1458409 - RNA, 19 nt, Artificial Sequence
  Description of Artificial Sequence: Synthetic oligonucleotide
uggucucaauuucucgaac

SEQ ID NO: 1458410 - RNA, 19 nt, Artificial Sequence
  Description of Artificial Sequence: Synthetic oligonucleotide
ugacgcugcaucagcguac

SEQ ID NO: 1458411 - RNA, 19 nt, Artificial Sequence
  Description of Artificial Sequence: Synthetic oligonucleotide
aguaccucaugcucccacu

SEQ ID NO: 1458412 - RNA, 19 nt, Artificial Sequence
  Description of Artificial Sequence: Synthetic oligonucleotide
uuucgggacacaagcguua

SEQ ID NO: 1458413 - RNA, 19 nt, Artificial Sequence
  Description of Artificial Sequence: Synthetic oligonucleotide
uuuugggcgccauguugcc

SEQ ID NO: 1458414 - RNA, 19 nt, Artificial Sequence
  Description of Artificial Sequence: Synthetic oligonucleotide
cucgcaauucucuucugca

SEQ ID NO: 1458415 - RNA, 19 nt, Artificial Sequence
  Description of Artificial Sequence: Synthetic oligonucleotide
acaagcguuagugcugcag

SEQ ID NO: 1458416 - RNA, 19 nt, Artificial Sequence
  Description of Artificial Sequence: Synthetic oligonucleotide
agguguggauuuugucacg

SEQ ID NO: 1458417 - RNA, 19 nt, Artificial Sequence
  Description of Artificial Sequence: Synthetic oligonucleotide
gauagaggucgucucucuc

SEQ ID NO: 1458418 - RNA, 19 nt, Artificial Sequence
  Description of Artificial Sequence: Synthetic oligonucleotide
acgauagaggucgucucuc

SEQ ID NO: 1458419 - RNA, 19 nt, Artificial Sequence
  Description of Artificial Sequence: Synthetic oligonucleotide
guuuacgcuccaacaacag

SEQ ID NO: 1458420 - RNA, 19 nt, Artificial Sequence
  Description of Artificial Sequence: Synthetic oligonucleotide
gggcuugaaucccacauug

SEQ ID NO: 1458421 - RNA, 19 nt, Artificial Sequence
  Description of Artificial Sequence: Synthetic oligonucleotide
uccaguuuucgggacacaa

SEQ ID NO: 1458422 - RNA, 19 nt, Artificial Sequence
  Description of Artificial Sequence: Synthetic oligonucleotide
acaccuuaaucuccaccug

SEQ ID NO: 1458423 - RNA, 19 nt, Artificial Sequence
  Description of Artificial Sequence: Synthetic oligonucleotide
auacgcgaaacauguuccu

SEQ ID NO: 1458424 - RNA, 19 nt, Artificial Sequence
  Description of Artificial Sequence: Synthetic oligonucleotide
auguccucuggugcgaguc

SEQ ID NO: 1458425 - RNA, 19 nt, Artificial Sequence
  Description of Artificial Sequence: Synthetic oligonucleotide
aggucaagcucaucucuca

SEQ ID NO: 1458426 - RNA, 19 nt, Artificial Sequence
  Description of Artificial Sequence: Synthetic oligonucleotide
guacaaaucaagaucugcu

SEQ ID NO: 1458427 - RNA, 19 nt, Artificial Sequence
  Description of Artificial Sequence: Synthetic oligonucleotide
agcaaccuuuaaacgugcc

SEQ ID NO: 1458428 - RNA, 19 nt, Artificial Sequence
  Description of Artificial Sequence: Synthetic oligonucleotide
uucccggauacgcgaaaca

SEQ ID NO: 1458429 - RNA, 19 nt, Artificial Sequence
  Description of Artificial Sequence: Synthetic oligonucleotide
cucggcuagguuguucugg

SEQ ID NO: 1458430 - RNA, 19 nt, Artificial Sequence
  Description of Artificial Sequence: Synthetic oligonucleotide
gcuugaaucccacauuguc

SEQ ID NO: 1458431 - RNA, 19 nt, Artificial Sequence
  Description of Artificial Sequence: Synthetic oligonucleotide
ucagugccugcaguuuacg

SEQ ID NO: 1458432 - RNA, 19 nt, Artificial Sequence
  Description of Artificial Sequence: Synthetic oligonucleotide
auccuccaguuuucgggac

SEQ ID NO: 1458433 - RNA, 19 nt, Artificial Sequence
  Description of Artificial Sequence: Synthetic oligonucleotide
uucgggacacaagcguuag

SEQ ID NO: 1458434 - RNA, 19 nt, Artificial Sequence
  Description of Artificial Sequence: Synthetic oligonucleotide
cacggucuuuguuucgaag

SEQ ID NO: 1458435 - RNA, 19 nt, Artificial Sequence
  Description of Artificial Sequence: Synthetic oligonucleotide
ugauggugguauucuucga

SEQ ID NO: 1458436 - RNA, 19 nt, Artificial Sequence
  Description of Artificial Sequence: Synthetic oligonucleotide
cgaaacauguuccucgacc

SEQ ID NO: 1458437 - RNA, 19 nt, Artificial Sequence
  Description of Artificial Sequence: Synthetic oligonucleotide
ucccgaaggccaauaacuu

SEQ ID NO: 1458438 - RNA, 19 nt, Artificial Sequence
  Description of Artificial Sequence: Synthetic oligonucleotide
agugcccgcauguccuuuc

SEQ ID NO: 1458439 - RNA, 19 nt, Artificial Sequence
  Description of Artificial Sequence: Synthetic oligonucleotide
ucccagaagguguggauuu

SEQ ID NO: 1458440 - RNA, 19 nt, Artificial Sequence
  Description of Artificial Sequence: Synthetic oligonucleotide
guuuucgggacacaagcgu

SEQ ID NO: 1458441 - RNA, 19 nt, Artificial Sequence
  Description of Artificial Sequence: Synthetic oligonucleotide
ggccagguuguuaagagug

SEQ ID NO: 1458442 - RNA, 19 nt, Artificial Sequence
  Description of Artificial Sequence: Synthetic oligonucleotide
ucgcaauucucuucugcau

SEQ ID NO: 1458443 - RNA, 19 nt, Artificial Sequence
  Description of Artificial Sequence: Synthetic oligonucleotide
ugcuugucccguucauagc

SEQ ID NO: 1458444 - RNA, 19 nt, Artificial Sequence
  Description of Artificial Sequence: Synthetic oligonucleotide
cugcaguuuacgcuccaac

SEQ ID NO: 1458445 - RNA, 19 nt, Artificial Sequence
  Description of Artificial Sequence: Synthetic oligonucleotide
ugauaucagugaaggccuc

SEQ ID NO: 1458446 - RNA, 19 nt, Artificial Sequence
  Description of Artificial Sequence: Synthetic oligonucleotide
acguucuaacugaaaguag

SEQ ID NO: 1458447 - RNA, 19 nt, Artificial Sequence
  Description of Artificial Sequence: Synthetic oligonucleotide
auaucagugaaggccuccu

SEQ ID NO: 1458448 - RNA, 19 nt, Artificial Sequence
  Description of Artificial Sequence: Synthetic oligonucleotide
cuuuaaacgugccuucgua

SEQ ID NO: 1458449 - RNA, 19 nt, Artificial Sequence
  Description of Artificial Sequence: Synthetic oligonucleotide
ccguuuguucugcagagcc

SEQ ID NO: 1458450 - RNA, 19 nt, Artificial Sequence
  Description of Artificial Sequence: Synthetic oligonucleotide
guucauagcucgcaauucu

SEQ ID NO: 1458451 - RNA, 19 nt, Artificial Sequence
  Description of Artificial Sequence: Synthetic oligonucleotide
acuucgccucauauguacg

SEQ ID NO: 1458452 - RNA, 19 nt, Artificial Sequence
  Description of Artificial Sequence: Synthetic oligonucleotide
uugucacguucuaacugaa

SEQ ID NO: 1458453 - RNA, 19 nt, Artificial Sequence
  Description of Artificial Sequence: Synthetic oligonucleotide
uucgccucauauguacgca

SEQ ID NO: 1458454 - RNA, 19 nt, Artificial Sequence
  Description of Artificial Sequence: Synthetic oligonucleotide
gaauugauuagggccaggu

SEQ ID NO: 1458455 - RNA, 19 nt, Artificial Sequence
  Description of Artificial Sequence: Synthetic oligonucleotide
cuauguaggggcacccaca

SEQ ID NO: 1458456 - RNA, 19 nt, Artificial Sequence
  Description of Artificial Sequence: Synthetic oligonucleotide
caggucaagcucaucucuc

SEQ ID NO: 1458457 - RNA, 19 nt, Artificial Sequence
  Description of Artificial Sequence: Synthetic oligonucleotide
ugcggugcuccuucugggc

SEQ ID NO: 1458458 - RNA, 19 nt, Artificial Sequence
  Description of Artificial Sequence: Synthetic oligonucleotide
ugucccguucauagcucgc

SEQ ID NO: 1458459 - RNA, 19 nt, Artificial Sequence
  Description of Artificial Sequence: Synthetic oligonucleotide
cacguucuaacugaaagua

SEQ ID NO: 1458460 - RNA, 19 nt, Artificial Sequence
  Description of Artificial Sequence: Synthetic oligonucleotide
cagugccugcaguuuacgc

SEQ ID NO: 1458461 - RNA, 19 nt, Artificial Sequence
  Description of Artificial Sequence: Synthetic oligonucleotide
uacgcuccaacaacagguu

SEQ ID NO: 1458462 - RNA, 19 nt, Artificial Sequence
  Description of Artificial Sequence: Synthetic oligonucleotide
aaacgugccuucguacaaa

SEQ ID NO: 1458463 - RNA, 19 nt, Artificial Sequence
  Description of Artificial Sequence: Synthetic oligonucleotide
ucagcauguuucagacgaa

SEQ ID NO: 1458464 - RNA, 19 nt, Artificial Sequence
  Description of Artificial Sequence: Synthetic oligonucleotide
agcguacugaucuggccau

SEQ ID NO: 1458465 - RNA, 19 nt, Artificial Sequence
  Description of Artificial Sequence: Synthetic oligonucleotide
gugguauucuucgauucca

SEQ ID NO: 1458466 - RNA, 19 nt, Artificial Sequence
  Description of Artificial Sequence: Synthetic oligonucleotide
uaucucccagaaggugugg

SEQ ID NO: 1458467 - RNA, 19 nt, Artificial Sequence
  Description of Artificial Sequence: Synthetic oligonucleotide
acgcaacaggucauugugg

SEQ ID NO: 1458468 - RNA, 19 nt, Artificial Sequence
  Description of Artificial Sequence: Synthetic oligonucleotide
ucccacugcaggucuuuca

SEQ ID NO: 1458469 - RNA, 19 nt, Artificial Sequence
  Description of Artificial Sequence: Synthetic oligonucleotide
gugcgaguccaucaacaac

SEQ ID NO: 1458470 - RNA, 19 nt, Artificial Sequence
  Description of Artificial Sequence: Synthetic oligonucleotide
ucgccucauauguacgcaa

SEQ ID NO: 1458471 - RNA, 19 nt, Artificial Sequence
  Description of Artificial Sequence: Synthetic oligonucleotide
gaugaaucgcugcuccagu

SEQ ID NO: 1458472 - RNA, 19 nt, Artificial Sequence
  Description of Artificial Sequence: Synthetic oligonucleotide
ucccggauacgcgaaacau

SEQ ID NO: 1458473 - RNA, 19 nt, Artificial Sequence
  Description of Artificial Sequence: Synthetic oligonucleotide
uccgcauguccuccaucug

SEQ ID NO: 1458474 - RNA, 19 nt, Artificial Sequence
  Description of Artificial Sequence: Synthetic oligonucleotide
uacgcgaaacauguuccuc

SEQ ID NO: 1458475 - RNA, 19 nt, Artificial Sequence
  Description of Artificial Sequence: Synthetic oligonucleotide
gcaguuuacgcuccaacaa

SEQ ID NO: 1458476 - RNA, 19 nt, Artificial Sequence
  Description of Artificial Sequence: Synthetic oligonucleotide
ggucaagcucaucucucag

SEQ ID NO: 1458477 - RNA, 19 nt, Artificial Sequence
  Description of Artificial Sequence: Synthetic oligonucleotide
caggugcuuuacuuucuug

SEQ ID NO: 1458478 - RNA, 19 nt, Artificial Sequence
  Description of Artificial Sequence: Synthetic oligonucleotide
cugcuccuucgucaugucc

SEQ ID NO: 1458479 - RNA, 19 nt, Artificial Sequence
  Description of Artificial Sequence: Synthetic oligonucleotide
augaaucgcugcuccagua

SEQ ID NO: 1458480 - RNA, 19 nt, Artificial Sequence
  Description of Artificial Sequence: Synthetic oligonucleotide
cagccuucaccucggcuag

SEQ ID NO: 1458481 - RNA, 19 nt, Artificial Sequence
  Description of Artificial Sequence: Synthetic oligonucleotide
ggauccaaguuggaggcug

SEQ ID NO: 1458482 - RNA, 19 nt, Artificial Sequence
  Description of Artificial Sequence: Synthetic oligonucleotide
ccucauauguacgcaacag

SEQ ID NO: 1458483 - RNA, 19 nt, Artificial Sequence
  Description of Artificial Sequence: Synthetic oligonucleotide
cuuuaucaccaccucguua

SEQ ID NO: 1458484 - RNA, 19 nt, Artificial Sequence
  Description of Artificial Sequence: Synthetic oligonucleotide
ucuucccggauacgcgaaa

SEQ ID NO: 1458485 - RNA, 19 nt, Artificial Sequence
  Description of Artificial Sequence: Synthetic oligonucleotide
aauuuacgauagaggucgu

SEQ ID NO: 1458486 - RNA, 19 nt, Artificial Sequence
  Description of Artificial Sequence: Synthetic oligonucleotide
gguauucuucgauuccaga

SEQ ID NO: 1458487 - RNA, 19 nt, Artificial Sequence
  Description of Artificial Sequence: Synthetic oligonucleotide
cagaacauccuccaguuuu

SEQ ID NO: 1458488 - RNA, 19 nt, Artificial Sequence
  Description of Artificial Sequence: Synthetic oligonucleotide
ucauguccucuggugcgag

SEQ ID NO: 1458489 - RNA, 19 nt, Artificial Sequence
  Description of Artificial Sequence: Synthetic oligonucleotide
cgugccuucguacaaauca

SEQ ID NO: 1458490 - RNA, 19 nt, Artificial Sequence
  Description of Artificial Sequence: Synthetic oligonucleotide
acaggugcuuuacuuucuu

SEQ ID NO: 1458491 - RNA, 19 nt, Artificial Sequence
  Description of Artificial Sequence: Synthetic oligonucleotide
gcucgcaauucucuucugc

SEQ ID NO: 1458492 - RNA, 19 nt, Artificial Sequence
  Description of Artificial Sequence: Synthetic oligonucleotide
gcuauguaggggcacccac

SEQ ID NO: 1458493 - RNA, 19 nt, Artificial Sequence
  Description of Artificial Sequence: Synthetic oligonucleotide
ugugggccuugcagacccg

SEQ ID NO: 1458494 - RNA, 19 nt, Artificial Sequence
  Description of Artificial Sequence: Synthetic oligonucleotide
auguaggggcacccacaag

SEQ ID NO: 1458495 - RNA, 19 nt, Artificial Sequence
  Description of Artificial Sequence: Synthetic oligonucleotide
cauuguaguaguucuugau

SEQ ID NO: 1458496 - RNA, 19 nt, Artificial Sequence
  Description of Artificial Sequence: Synthetic oligonucleotide
guccaaucacugcugucuc

SEQ ID NO: 1458497 - RNA, 19 nt, Artificial Sequence
  Description of Artificial Sequence: Synthetic oligonucleotide
cucucguucucgguccagc

SEQ ID NO: 1458498 - RNA, 19 nt, Artificial Sequence
  Description of Artificial Sequence: Synthetic oligonucleotide
aucccacauuguccagggg

SEQ ID NO: 1458499 - RNA, 19 nt, Artificial Sequence
  Description of Artificial Sequence: Synthetic oligonucleotide
gcauguuucagacgaaggu

SEQ ID NO: 1458500 - RNA, 19 nt, Artificial Sequence
  Description of Artificial Sequence: Synthetic oligonucleotide
ggacacaagcguuagugcu

SEQ ID NO: 1458501 - RNA, 19 nt, Artificial Sequence
  Description of Artificial Sequence: Synthetic oligonucleotide
ucacggucuuuguuucgaa

SEQ ID NO: 1458502 - RNA, 19 nt, Artificial Sequence
  Description of Artificial Sequence: Synthetic oligonucleotide
cuucccggauacgcgaaac

SEQ ID NO: 1458503 - RNA, 19 nt, Artificial Sequence
  Description of Artificial Sequence: Synthetic oligonucleotide
cuuucagugcccgcauguc

SEQ ID NO: 1458504 - RNA, 19 nt, Artificial Sequence
  Description of Artificial Sequence: Synthetic oligonucleotide
augcucccacugcaggucu

SEQ ID NO: 1458505 - RNA, 19 nt, Artificial Sequence
  Description of Artificial Sequence: Synthetic oligonucleotide
cuguccaaucacugcuguc

SEQ ID NO: 1458506 - RNA, 19 nt, Artificial Sequence
  Description of Artificial Sequence: Synthetic oligonucleotide
uucgcaucuuggucaucuc

SEQ ID NO: 1458507 - RNA, 19 nt, Artificial Sequence
  Description of Artificial Sequence: Synthetic oligonucleotide
cuggugcgaguccaucaac

SEQ ID NO: 1458508 - RNA, 19 nt, Artificial Sequence
  Description of Artificial Sequence: Synthetic oligonucleotide
cugcaccuugaugaaucgc

SEQ ID NO: 1458509 - RNA, 19 nt, Artificial Sequence
  Description of Artificial Sequence: Synthetic oligonucleotide
uuagugcugcaggauccaa

SEQ ID NO: 1458510 - RNA, 19 nt, Artificial Sequence
  Description of Artificial Sequence: Synthetic oligonucleotide
gcaacaggucauugugggc

SEQ ID NO: 1458511 - RNA, 19 nt, Artificial Sequence
  Description of Artificial Sequence: Synthetic oligonucleotide
caucucacggucuuuguuu

SEQ ID NO: 1458512 - RNA, 19 nt, Artificial Sequence
  Description of Artificial Sequence: Synthetic oligonucleotide
guaguugcgcuccucucgu

SEQ ID NO: 1458513 - RNA, 19 nt, Artificial Sequence
  Description of Artificial Sequence: Synthetic oligonucleotide
guacgcaacaggucauugu

SEQ ID NO: 1458514 - RNA, 19 nt, Artificial Sequence
  Description of Artificial Sequence: Synthetic oligonucleotide
ucgggacacaagcguuagu

SEQ ID NO: 1458515 - RNA, 19 nt, Artificial Sequence
  Description of Artificial Sequence: Synthetic oligonucleotide
guaggggcacccacaaguc

SEQ ID NO: 1458516 - RNA, 19 nt, Artificial Sequence
  Description of Artificial Sequence: Synthetic oligonucleotide
aggucgucucucuccugcu

SEQ ID NO: 1458517 - RNA, 19 nt, Artificial Sequence
  Description of Artificial Sequence: Synthetic oligonucleotide
cacuuucagugcccgcaug

SEQ ID NO: 1458518 - RNA, 19 nt, Artificial Sequence
  Description of Artificial Sequence: Synthetic oligonucleotide
agcucgcaauucucuucug

SEQ ID NO: 1458519 - RNA, 19 nt, Artificial Sequence
  Description of Artificial Sequence: Synthetic oligonucleotide
caaccuuuaaacgugccuu

SEQ ID NO: 1458520 - RNA, 19 nt, Artificial Sequence
  Description of Artificial Sequence: Synthetic oligonucleotide
gcguuagugcugcaggauc

SEQ ID NO: 1458521 - RNA, 19 nt, Artificial Sequence
  Description of Artificial Sequence: Synthetic oligonucleotide
gggaauugauuagggccag

SEQ ID NO: 1458522 - RNA, 19 nt, Artificial Sequence
  Description of Artificial Sequence: Synthetic oligonucleotide
ggaauugauuagggccagg

SEQ ID NO: 1458523 - RNA, 19 nt, Artificial Sequence
  Description of Artificial Sequence: Synthetic oligonucleotide
cucgaccugcuccuucguc

SEQ ID NO: 1458524 - RNA, 19 nt, Artificial Sequence
  Description of Artificial Sequence: Synthetic oligonucleotide
cccggauacgcgaaacaug

SEQ ID NO: 1458525 - RNA, 19 nt, Artificial Sequence
  Description of Artificial Sequence: Synthetic oligonucleotide
gauuagggccagguuguua

SEQ ID NO: 1458526 - RNA, 19 nt, Artificial Sequence
  Description of Artificial Sequence: Synthetic oligonucleotide
ggugcgaguccaucaacaa

SEQ ID NO: 1458527 - RNA, 19 nt, Artificial Sequence
  Description of Artificial Sequence: Synthetic oligonucleotide
auuucgcaucuuggucauc

SEQ ID NO: 1458528 - RNA, 19 nt, Artificial Sequence
  Description of Artificial Sequence: Synthetic oligonucleotide
gcagcauucagugccugca

SEQ ID NO: 1458529 - RNA, 19 nt, Artificial Sequence
  Description of Artificial Sequence: Synthetic oligonucleotide
gcaucagcguacugaucug

SEQ ID NO: 1458530 - RNA, 19 nt, Artificial Sequence
  Description of Artificial Sequence: Synthetic oligonucleotide
gugccuucguacaaaucaa

SEQ ID NO: 1458531 - RNA, 19 nt, Artificial Sequence
  Description of Artificial Sequence: Synthetic oligonucleotide
uugcgcuccucucguucuc

SEQ ID NO: 1458532 - RNA, 19 nt, Artificial Sequence
  Description of Artificial Sequence: Synthetic oligonucleotide
cgggacacaagcguuagug

SEQ ID NO: 1458533 - RNA, 19 nt, Artificial Sequence
  Description of Artificial Sequence: Synthetic oligonucleotide
gccucauauguacgcaaca

SEQ ID NO: 1458534 - RNA, 19 nt, Artificial Sequence
  Description of Artificial Sequence: Synthetic oligonucleotide
ugccagccguuuguucugc

SEQ ID NO: 1458535 - RNA, 19 nt, Artificial Sequence
  Description of Artificial Sequence: Synthetic oligonucleotide
cccgaaggccaauaacuuc

SEQ ID NO: 1458536 - RNA, 19 nt, Artificial Sequence
  Description of Artificial Sequence: Synthetic oligonucleotide
acgugccuucguacaaauc

SEQ ID NO: 1458537 - RNA, 19 nt, Artificial Sequence
  Description of Artificial Sequence: Synthetic oligonucleotide
gcaaccuuuaaacgugccu

SEQ ID NO: 1458538 - RNA, 19 nt, Artificial Sequence
  Description of Artificial Sequence: Synthetic oligonucleotide
gccuucguacaaaucaaga

SEQ ID NO: 1458539 - RNA, 19 nt, Artificial Sequence
  Description of Artificial Sequence: Synthetic oligonucleotide
cugcaucagcguacugauc

SEQ ID NO: 1458540 - RNA, 19 nt, Artificial Sequence
  Description of Artificial Sequence: Synthetic oligonucleotide
ccggauacgcgaaacaugu

SEQ ID NO: 1458541 - RNA, 19 nt, Artificial Sequence
  Description of Artificial Sequence: Synthetic oligonucleotide
gcucuucccggauacgcga

SEQ ID NO: 1458542 - RNA, 19 nt, Artificial Sequence
  Description of Artificial Sequence: Synthetic oligonucleotide
ggucuuuguuucgaagcuc

SEQ ID NO: 1458543 - RNA, 19 nt, Artificial Sequence
  Description of Artificial Sequence: Synthetic oligonucleotide
guucuaacugaaaguaguu

SEQ ID NO: 1458544 - RNA, 19 nt, Artificial Sequence
  Description of Artificial Sequence: Synthetic oligonucleotide
cguucuaacugaaaguagu

SEQ ID NO: 1458545 - RNA, 19 nt, Artificial Sequence
  Description of Artificial Sequence: Synthetic oligonucleotide
cagugucuguccaaucacu

SEQ ID NO: 1458546 - RNA, 19 nt, Artificial Sequence
  Description of Artificial Sequence: Synthetic oligonucleotide
cauagcucgcaauucucuu

SEQ ID NO: 1458547 - RNA, 19 nt, Artificial Sequence
  Description of Artificial Sequence: Synthetic oligonucleotide
auguacgcaacaggucauu

SEQ ID NO: 1458548 - RNA, 19 nt, Artificial Sequence
  Description of Artificial Sequence: Synthetic oligonucleotide
ccuucguacaaaucaagau

SEQ ID NO: 1458549 - RNA, 19 nt, Artificial Sequence
  Description of Artificial Sequence: Synthetic oligonucleotide
gcugcaucagcguacugau

SEQ ID NO: 1458550 - RNA, 19 nt, Artificial Sequence
  Description of Artificial Sequence: Synthetic oligonucleotide
guacacccuccugcaugcg

SEQ ID NO: 1458551 - RNA, 19 nt, Artificial Sequence
  Description of Artificial Sequence: Synthetic oligonucleotide
ggcccugucccagugucug

SEQ ID NO: 1458552 - RNA, 19 nt, Artificial Sequence
  Description of Artificial Sequence: Synthetic oligonucleotide
cacccuccugcaugcggug

SEQ ID NO: 1458553 - RNA, 19 nt, Artificial Sequence
  Description of Artificial Sequence: Synthetic oligonucleotide
cauggaucucagucuuucu

SEQ ID NO: 1458554 - RNA, 19 nt, Artificial Sequence
  Description of Artificial Sequence: Synthetic oligonucleotide
agagguucugccagccguu

SEQ ID NO: 1458555 - RNA, 19 nt, Artificial Sequence
  Description of Artificial Sequence: Synthetic oligonucleotide
ugauuagggccagguuguu

SEQ ID NO: 1458556 - RNA, 19 nt, Artificial Sequence
  Description of Artificial Sequence: Synthetic oligonucleotide
cgaaggccaauaacuucgc

SEQ ID NO: 1458557 - RNA, 19 nt, Artificial Sequence
  Description of Artificial Sequence: Synthetic oligonucleotide
gacgcugcaucagcguacu

SEQ ID NO: 1458558 - RNA, 19 nt, Artificial Sequence
  Description of Artificial Sequence: Synthetic oligonucleotide
ccucaugacgcugcaucag

SEQ ID NO: 1458559 - RNA, 19 nt, Artificial Sequence
  Description of Artificial Sequence: Synthetic oligonucleotide
gcagugaauuuacgauaga

SEQ ID NO: 1458560 - RNA, 19 nt, Artificial Sequence
  Description of Artificial Sequence: Synthetic oligonucleotide
gguggcuauguaggggcac

SEQ ID NO: 1458561 - RNA, 19 nt, Artificial Sequence
  Description of Artificial Sequence: Synthetic oligonucleotide
ggaucccgaaggccaauaa

SEQ ID NO: 1458562 - RNA, 19 nt, Artificial Sequence
  Description of Artificial Sequence: Synthetic oligonucleotide
gcgaaacauguuccucgac

SEQ ID NO: 1458563 - RNA, 19 nt, Artificial Sequence
  Description of Artificial Sequence: Synthetic oligonucleotide
agguggcuauguaggggca

SEQ ID NO: 1458564 - RNA, 19 nt, Artificial Sequence
  Description of Artificial Sequence: Synthetic oligonucleotide
gcaugcggugcuccuucug

SEQ ID NO: 1458565 - RNA, 19 nt, Artificial Sequence
  Description of Artificial Sequence: Synthetic oligonucleotide
cgccucauauguacgcaac

SEQ ID NO: 1458566 - RNA, 19 nt, Artificial Sequence
  Description of Artificial Sequence: Synthetic oligonucleotide
gccguuuguucugcagagc

SEQ ID NO: 1458567 - RNA, 19 nt, Artificial Sequence
  Description of Artificial Sequence: Synthetic oligonucleotide
cugcaggauccaaguugga

SEQ ID NO: 1458568 - RNA, 19 nt, Artificial Sequence
  Description of Artificial Sequence: Synthetic oligonucleotide
acgcugcaucagcguacug

SEQ ID NO: 1458569 - RNA, 19 nt, Artificial Sequence
  Description of Artificial Sequence: Synthetic oligonucleotide
gccuugcagacccgggcca

SEQ ID NO: 1458570 - RNA, 19 nt, Artificial Sequence
  Description of Artificial Sequence: Synthetic oligonucleotide
ccuugcagacccgggccag

SEQ ID NO: 1458571 - RNA, 19 nt, Artificial Sequence
  Description of Artificial Sequence: Synthetic oligonucleotide
cagagccaccuccgccauc

SEQ ID NO: 1458572 - RNA, 19 nt, Artificial Sequence
  Description of Artificial Sequence: Synthetic oligonucleotide
cacaagcguuagugcugca

SEQ ID NO: 1458573 - RNA, 19 nt, Artificial Sequence
  Description of Artificial Sequence: Synthetic oligonucleotide
cgcgaaacauguuccucga

SEQ ID NO: 1458574 - RNA, 19 nt, Artificial Sequence
  Description of Artificial Sequence: Synthetic oligonucleotide
ccucggcuagguuguucug

SEQ ID NO: 1458575 - RNA, 19 nt, Artificial Sequence
  Description of Artificial Sequence: Synthetic oligonucleotide
ccaauaacuucgccucaua

SEQ ID NO: 1458576 - RNA, 19 nt, Artificial Sequence
  Description of Artificial Sequence: Synthetic oligonucleotide
cucauggaucucagucuuu

SEQ ID NO: 1458577 - RNA, 19 nt, Artificial Sequence
  Description of Artificial Sequence: Synthetic oligonucleotide
ggggcuugaaucccacauu

SEQ ID NO: 1458578 - RNA, 19 nt, Artificial Sequence
  Description of Artificial Sequence: Synthetic oligonucleotide
ggcuugaaucccacauugu

SEQ ID NO: 1458579 - RNA, 19 nt, Artificial Sequence
  Description of Artificial Sequence: Synthetic oligonucleotide
ccucauggaucucagucuu

SEQ ID NO: 1458580 - RNA, 19 nt, Artificial Sequence
  Description of Artificial Sequence: Synthetic oligonucleotide
ucaccucggcuagguuguu

SEQ ID NO: 1458581 - RNA, 19 nt, Artificial Sequence
  Description of Artificial Sequence: Synthetic oligonucleotide
cggucuuuguuucgaagcu

SEQ ID NO: 1458582 - RNA, 19 nt, Artificial Sequence
  Description of Artificial Sequence: Synthetic oligonucleotide
gggaucccgaaggccaaua

SEQ ID NO: 1458583 - RNA, 19 nt, Artificial Sequence
  Description of Artificial Sequence: Synthetic oligonucleotide
ggauggcugcagugaauuu

SEQ ID NO: 1458584 - RNA, 19 nt, Artificial Sequence
  Description of Artificial Sequence: Synthetic oligonucleotide
agacccgggccagcucaua

SEQ ID NO: 1458585 - RNA, 19 nt, Artificial Sequence
  Description of Artificial Sequence: Synthetic oligonucleotide
cggcuagguuguucuggug

SEQ ID NO: 1458586 - RNA, 19 nt, Artificial Sequence
  Description of Artificial Sequence: Synthetic oligonucleotide
gcccuuggcuuugccuuuc

SEQ ID NO: 1458587 - RNA, 19 nt, Artificial Sequence
  Description of Artificial Sequence: Synthetic oligonucleotide
ccgcauguccuuucucagu

SEQ ID NO: 1458588 - RNA, 19 nt, Artificial Sequence
  Description of Artificial Sequence: Synthetic oligonucleotide
cgauagaggucgucucucu

SEQ ID NO: 1458589 - RNA, 19 nt, Artificial Sequence
  Description of Artificial Sequence: Synthetic oligonucleotide
ccaucucacggucuuuguu

SEQ ID NO: 1458590 - RNA, 19 nt, Artificial Sequence
  Description of Artificial Sequence: Synthetic oligonucleotide
cccguucauagcucgcaau

SEQ ID NO: 1458591 - RNA, 19 nt, Artificial Sequence
  Description of Artificial Sequence: Synthetic oligonucleotide
cagacccgggccagcucau

SEQ ID NO: 1458592 - RNA, 19 nt, Artificial Sequence
  Description of Artificial Sequence: Synthetic oligonucleotide
ccagaacauccuccaguuu

SEQ ID NO: 1458593 - RNA, 19 nt, Artificial Sequence
  Description of Artificial Sequence: Synthetic oligonucleotide
ccaccuccgccaucucccu

SEQ ID NO: 1458594 - RNA, 19 nt, Artificial Sequence
  Description of Artificial Sequence: Synthetic oligonucleotide
gggcccugucccagugucu

SEQ ID NO: 1458595 - RNA, 19 nt, Artificial Sequence
  Description of Artificial Sequence: Synthetic oligonucleotide
ggggaucccgaaggccaau

SEQ ID NO: 1458596 - RNA, 19 nt, Artificial Sequence
  Description of Artificial Sequence: Synthetic oligonucleotide
ccucgaccugcuccuucgu

SEQ ID NO: 1458597 - RNA, 19 nt, Artificial Sequence
  Description of Artificial Sequence: Synthetic oligonucleotide
gcguacugaucuggccauu

SEQ ID NO: 1458598 - RNA, 19 nt, Artificial Sequence
  Description of Artificial Sequence: Synthetic oligonucleotide
cggauacgcgaaacauguu

SEQ ID NO: 1458599 - RNA, 19 nt, Artificial Sequence
  Description of Artificial Sequence: Synthetic oligonucleotide
cguucucgguccagcucuu

SEQ ID NO: 1458600 - RNA, 19 nt, Artificial Sequence
  Description of Artificial Sequence: Synthetic oligonucleotide
uuuaugaccauguaguugg

SEQ ID NO: 1458601 - RNA, 19 nt, Artificial Sequence
  Description of Artificial Sequence: Synthetic oligonucleotide
uuuggaauaaccuuuucgg

SEQ ID NO: 1458602 - RNA, 19 nt, Artificial Sequence
  Description of Artificial Sequence: Synthetic oligonucleotide
uaugcuuccauuuuguucc

SEQ ID NO: 1458603 - RNA, 19 nt, Artificial Sequence
  Description of Artificial Sequence: Synthetic oligonucleotide
aauauauugacacuuuuau

SEQ ID NO: 1458604 - RNA, 19 nt, Artificial Sequence
  Description of Artificial Sequence: Synthetic oligonucleotide
ugaugauucaucaaacucc

SEQ ID NO: 1458605 - RNA, 19 nt, Artificial Sequence
  Description of Artificial Sequence: Synthetic oligonucleotide
aagauauaaauuuuggaau

SEQ ID NO: 1458606 - RNA, 19 nt, Artificial Sequence
  Description of Artificial Sequence: Synthetic oligonucleotide
aaacgagagaucuacaugu

SEQ ID NO: 1458607 - RNA, 19 nt, Artificial Sequence
  Description of Artificial Sequence: Synthetic oligonucleotide
aaguguucaauaugcuucc

SEQ ID NO: 1458608 - RNA, 19 nt, Artificial Sequence
  Description of Artificial Sequence: Synthetic oligonucleotide
acaaccgacauuucaaagc

SEQ ID NO: 1458609 - RNA, 19 nt, Artificial Sequence
  Description of Artificial Sequence: Synthetic oligonucleotide
cauaugugaacucaaaggc

SEQ ID NO: 1458610 - RNA, 19 nt, Artificial Sequence
  Description of Artificial Sequence: Synthetic oligonucleotide
cuugucuagauuuaugacc

SEQ ID NO: 1458611 - RNA, 19 nt, Artificial Sequence
  Description of Artificial Sequence: Synthetic oligonucleotide
uagauuuaugaccauguag

SEQ ID NO: 1458612 - RNA, 19 nt, Artificial Sequence
  Description of Artificial Sequence: Synthetic oligonucleotide
aaugugugagauuuacauc

SEQ ID NO: 1458613 - RNA, 19 nt, Artificial Sequence
  Description of Artificial Sequence: Synthetic oligonucleotide
gacauuaaaaccugagacc

SEQ ID NO: 1458614 - RNA, 19 nt, Artificial Sequence
  Description of Artificial Sequence: Synthetic oligonucleotide
ucaucuaacuuaauuuucc

SEQ ID NO: 1458615 - RNA, 19 nt, Artificial Sequence
  Description of Artificial Sequence: Synthetic oligonucleotide
ucuaacuuaauuuuccaaa

SEQ ID NO: 1458616 - RNA, 19 nt, Artificial Sequence
  Description of Artificial Sequence: Synthetic oligonucleotide
uuagaugaagcauaugggu

SEQ ID NO: 1458617 - RNA, 19 nt, Artificial Sequence
  Description of Artificial Sequence: Synthetic oligonucleotide
cuggcgacuauauaaacgg

SEQ ID NO: 1458618 - RNA, 19 nt, Artificial Sequence
  Description of Artificial Sequence: Synthetic oligonucleotide
gauaaauuucuccacucug

SEQ ID NO: 1458619 - RNA, 19 nt, Artificial Sequence
  Description of Artificial Sequence: Synthetic oligonucleotide
uaucucaugucauugugag

SEQ ID NO: 1458620 - RNA, 19 nt, Artificial Sequence
  Description of Artificial Sequence: Synthetic oligonucleotide
auaugcuuccauuuuguuc

SEQ ID NO: 1458621 - RNA, 19 nt, Artificial Sequence
  Description of Artificial Sequence: Synthetic oligonucleotide
ucucaugucauugugaggu

SEQ ID NO: 1458622 - RNA, 19 nt, Artificial Sequence
  Description of Artificial Sequence: Synthetic oligonucleotide
ucaauaugcuuccauuuug

SEQ ID NO: 1458623 - RNA, 19 nt, Artificial Sequence
  Description of Artificial Sequence: Synthetic oligonucleotide
uaaauuuuggaauaaccuu

SEQ ID NO: 1458624 - RNA, 19 nt, Artificial Sequence
  Description of Artificial Sequence: Synthetic oligonucleotide
aaccauuguaaacaguaga

SEQ ID NO: 1458625 - RNA, 19 nt, Artificial Sequence
  Description of Artificial Sequence: Synthetic oligonucleotide
uucacuuaggcacuggagu

SEQ ID NO: 1458626 - RNA, 19 nt, Artificial Sequence
  Description of Artificial Sequence: Synthetic oligonucleotide
agauuuaugaccauguagu

SEQ ID NO: 1458627 - RNA, 19 nt, Artificial Sequence
  Description of Artificial Sequence: Synthetic oligonucleotide
uuguaguucugcuuguuag

SEQ ID NO: 1458628 - RNA, 19 nt, Artificial Sequence
  Description of Artificial Sequence: Synthetic oligonucleotide
gaagcauccucacacuggg

SEQ ID NO: 1458629 - RNA, 19 nt, Artificial Sequence
  Description of Artificial Sequence: Synthetic oligonucleotide
acaacuggcgacuauauaa

SEQ ID NO: 1458630 - RNA, 19 nt, Artificial Sequence
  Description of Artificial Sequence: Synthetic oligonucleotide
ucugugcugacguagauaa

SEQ ID NO: 1458631 - RNA, 19 nt, Artificial Sequence
  Description of Artificial Sequence: Synthetic oligonucleotide
uauuuaccaacacaugagu

SEQ ID NO: 1458632 - RNA, 19 nt, Artificial Sequence
  Description of Artificial Sequence: Synthetic oligonucleotide
aauaaccuuuucgggauac

SEQ ID NO: 1458633 - RNA, 19 nt, Artificial Sequence
  Description of Artificial Sequence: Synthetic oligonucleotide
agcuguauuagcuccuucg

SEQ ID NO: 1458634 - RNA, 19 nt, Artificial Sequence
  Description of Artificial Sequence: Synthetic oligonucleotide
uggaauaaccuuuucggga

SEQ ID NO: 1458635 - RNA, 19 nt, Artificial Sequence
  Description of Artificial Sequence: Synthetic oligonucleotide
uuuccugucguguuggagc

SEQ ID NO: 1458636 - RNA, 19 nt, Artificial Sequence
  Description of Artificial Sequence: Synthetic oligonucleotide
aucgacacugccuccauac

SEQ ID NO: 1458637 - RNA, 19 nt, Artificial Sequence
  Description of Artificial Sequence: Synthetic oligonucleotide
acauuucaaagcugguccc

SEQ ID NO: 1458638 - RNA, 19 nt, Artificial Sequence
  Description of Artificial Sequence: Synthetic oligonucleotide
aauuagucaggacauuaaa

SEQ ID NO: 1458639 - RNA, 19 nt, Artificial Sequence
  Description of Artificial Sequence: Synthetic oligonucleotide
ugugagauuuacaucuuac

SEQ ID NO: 1458640 - RNA, 19 nt, Artificial Sequence
  Description of Artificial Sequence: Synthetic oligonucleotide
uuagaaacggguucaagau

SEQ ID NO: 1458641 - RNA, 19 nt, Artificial Sequence
  Description of Artificial Sequence: Synthetic oligonucleotide
aaaaccugagaccgucagg

SEQ ID NO: 1458642 - RNA, 19 nt, Artificial Sequence
  Description of Artificial Sequence: Synthetic oligonucleotide
uguauuagcuccuucgcaa

SEQ ID NO: 1458643 - RNA, 19 nt, Artificial Sequence
  Description of Artificial Sequence: Synthetic oligonucleotide
uaaaaccugagaccgucag

SEQ ID NO: 1458644 - RNA, 19 nt, Artificial Sequence
  Description of Artificial Sequence: Synthetic oligonucleotide
aacuggcgacuauauaaac

SEQ ID NO: 1458645 - RNA, 19 nt, Artificial Sequence
  Description of Artificial Sequence: Synthetic oligonucleotide
gugggagucacaaaugucg

SEQ ID NO: 1458646 - RNA, 19 nt, Artificial Sequence
  Description of Artificial Sequence: Synthetic oligonucleotide
guuagaaacggguucaaga

SEQ ID NO: 1458647 - RNA, 19 nt, Artificial Sequence
  Description of Artificial Sequence: Synthetic oligonucleotide
aguacuaugucuauuuucu

SEQ ID NO: 1458648 - RNA, 19 nt, Artificial Sequence
  Description of Artificial Sequence: Synthetic oligonucleotide
acuauauaaacgguggcug

SEQ ID NO: 1458649 - RNA, 19 nt, Artificial Sequence
  Description of Artificial Sequence: Synthetic oligonucleotide
aaugucgcccuguauaaau

SEQ ID NO: 1458650 - RNA, 19 nt, Artificial Sequence
  Description of Artificial Sequence: Synthetic oligonucleotide
uggaaauucucucgguacc

SEQ ID NO: 1458651 - RNA, 19 nt, Artificial Sequence
  Description of Artificial Sequence: Synthetic oligonucleotide
aaaggcacggacaaacgag

SEQ ID NO: 1458652 - RNA, 19 nt, Artificial Sequence
  Description of Artificial Sequence: Synthetic oligonucleotide
agguuuuauauaaauuaac

SEQ ID NO: 1458653 - RNA, 19 nt, Artificial Sequence
  Description of Artificial Sequence: Synthetic oligonucleotide
ugauccaugaauacagcau

SEQ ID NO: 1458654 - RNA, 19 nt, Artificial Sequence
  Description of Artificial Sequence: Synthetic oligonucleotide
auaaacgguggcuggacag

SEQ ID NO: 1458655 - RNA, 19 nt, Artificial Sequence
  Description of Artificial Sequence: Synthetic oligonucleotide
aaaauuagucaggacauua

SEQ ID NO: 1458656 - RNA, 19 nt, Artificial Sequence
  Description of Artificial Sequence: Synthetic oligonucleotide
gagaucuacaugugucugg

SEQ ID NO: 1458657 - RNA, 19 nt, Artificial Sequence
  Description of Artificial Sequence: Synthetic oligonucleotide
ugaacucaaaggcacggac

SEQ ID NO: 1458658 - RNA, 19 nt, Artificial Sequence
  Description of Artificial Sequence: Synthetic oligonucleotide
uucaaagcuggucccaaug

SEQ ID NO: 1458659 - RNA, 19 nt, Artificial Sequence
  Description of Artificial Sequence: Synthetic oligonucleotide
acaaaugucgcccuguaua

SEQ ID NO: 1458660 - RNA, 19 nt, Artificial Sequence
  Description of Artificial Sequence: Synthetic oligonucleotide
acaggaaagggcucuaaug

SEQ ID NO: 1458661 - RNA, 19 nt, Artificial Sequence
  Description of Artificial Sequence: Synthetic oligonucleotide
guaaacaguagagacauga

SEQ ID NO: 1458662 - RNA, 19 nt, Artificial Sequence
  Description of Artificial Sequence: Synthetic oligonucleotide
accuuuccguuucagacuc

SEQ ID NO: 1458663 - RNA, 19 nt, Artificial Sequence
  Description of Artificial Sequence: Synthetic oligonucleotide
cacuuucacaucaucagac

SEQ ID NO: 1458664 - RNA, 19 nt, Artificial Sequence
  Description of Artificial Sequence: Synthetic oligonucleotide
ugagguaggcuaauguccu

SEQ ID NO: 1458665 - RNA, 19 nt, Artificial Sequence
  Description of Artificial Sequence: Synthetic oligonucleotide
gguucaagauucuucaagc

SEQ ID NO: 1458666 - RNA, 19 nt, Artificial Sequence
  Description of Artificial Sequence: Synthetic oligonucleotide
ugugaggucugucauuaac

SEQ ID NO: 1458667 - RNA, 19 nt, Artificial Sequence
  Description of Artificial Sequence: Synthetic oligonucleotide
agcaguauuuaccaacaca

SEQ ID NO: 1458668 - RNA, 19 nt, Artificial Sequence
  Description of Artificial Sequence: Synthetic oligonucleotide
acaguaauccagcuugucu

SEQ ID NO: 1458669 - RNA, 19 nt, Artificial Sequence
  Description of Artificial Sequence: Synthetic oligonucleotide
aaccuuuucgggauacugg

SEQ ID NO: 1458670 - RNA, 19 nt, Artificial Sequence
  Description of Artificial Sequence: Synthetic oligonucleotide
uaguccacccaccuuuccg

SEQ ID NO: 1458671 - RNA, 19 nt, Artificial Sequence
  Description of Artificial Sequence: Synthetic oligonucleotide
uaaacaguagagacaugac

SEQ ID NO: 1458672 - RNA, 19 nt, Artificial Sequence
  Description of Artificial Sequence: Synthetic oligonucleotide
ucuucucuacaacuggcga

SEQ ID NO: 1458673 - RNA, 19 nt, Artificial Sequence
  Description of Artificial Sequence: Synthetic oligonucleotide
uccauaaacauuacugcuu

SEQ ID NO: 1458674 - RNA, 19 nt, Artificial Sequence
  Description of Artificial Sequence: Synthetic oligonucleotide
caaagauauaaauuuugga

SEQ ID NO: 1458675 - RNA, 19 nt, Artificial Sequence
  Description of Artificial Sequence: Synthetic oligonucleotide
gugagauuuacaucuuacc

SEQ ID NO: 1458676 - RNA, 19 nt, Artificial Sequence
  Description of Artificial Sequence: Synthetic oligonucleotide
uuaacguaguccacccacc

SEQ ID NO: 1458677 - RNA, 19 nt, Artificial Sequence
  Description of Artificial Sequence: Synthetic oligonucleotide
augcaaugaagccggcgcc

SEQ ID NO: 1458678 - RNA, 19 nt, Artificial Sequence
  Description of Artificial Sequence: Synthetic oligonucleotide
gugaugauucaucaaacuc

SEQ ID NO: 1458679 - RNA, 19 nt, Artificial Sequence
  Description of Artificial Sequence: Synthetic oligonucleotide
uagauaaauuucuccacuc

SEQ ID NO: 1458680 - RNA, 19 nt, Artificial Sequence
  Description of Artificial Sequence: Synthetic oligonucleotide
auugacauaugugaacuca

SEQ ID NO: 1458681 - RNA, 19 nt, Artificial Sequence
  Description of Artificial Sequence: Synthetic oligonucleotide
uggacaaccgacauuucaa

SEQ ID NO: 1458682 - RNA, 19 nt, Artificial Sequence
  Description of Artificial Sequence: Synthetic oligonucleotide
acuuguaucgcucccagua

SEQ ID NO: 1458683 - RNA, 19 nt, Artificial Sequence
  Description of Artificial Sequence: Synthetic oligonucleotide
ucccaaggcacuuugggcu

SEQ ID NO: 1458684 - RNA, 19 nt, Artificial Sequence
  Description of Artificial Sequence: Synthetic oligonucleotide
acauugacauaugugaacu

SEQ ID NO: 1458685 - RNA, 19 nt, Artificial Sequence
  Description of Artificial Sequence: Synthetic oligonucleotide
acaaacgagagaucuacau

SEQ ID NO: 1458686 - RNA, 19 nt, Artificial Sequence
  Description of Artificial Sequence: Synthetic oligonucleotide
auuuaugaccauguaguug

SEQ ID NO: 1458687 - RNA, 19 nt, Artificial Sequence
  Description of Artificial Sequence: Synthetic oligonucleotide
agaucuacaugugucuggg

SEQ ID NO: 1458688 - RNA, 19 nt, Artificial Sequence
  Description of Artificial Sequence: Synthetic oligonucleotide
gguccauaaacauuacugc

SEQ ID NO: 1458689 - RNA, 19 nt, Artificial Sequence
  Description of Artificial Sequence: Synthetic oligonucleotide
acaaucuguauuuaauaua

SEQ ID NO: 1458690 - RNA, 19 nt, Artificial Sequence
  Description of Artificial Sequence: Synthetic oligonucleotide
gaguacuaugucuauuuuc

SEQ ID NO: 1458691 - RNA, 19 nt, Artificial Sequence
  Description of Artificial Sequence: Synthetic oligonucleotide
ugugcugacguagauaaau

SEQ ID NO: 1458692 - RNA, 19 nt, Artificial Sequence
  Description of Artificial Sequence: Synthetic oligonucleotide
guuguuugggugaugauuc

SEQ ID NO: 1458693 - RNA, 19 nt, Artificial Sequence
  Description of Artificial Sequence: Synthetic oligonucleotide
acuggcgacuauauaaacg

SEQ ID NO: 1458694 - RNA, 19 nt, Artificial Sequence
  Description of Artificial Sequence: Synthetic oligonucleotide
uuccguuucagacucugaa

SEQ ID NO: 1458695 - RNA, 19 nt, Artificial Sequence
  Description of Artificial Sequence: Synthetic oligonucleotide
gggauaaucuuccacuaag

SEQ ID NO: 1458696 - RNA, 19 nt, Artificial Sequence
  Description of Artificial Sequence: Synthetic oligonucleotide
uggaaacuuguaucgcucc

SEQ ID NO: 1458697 - RNA, 19 nt, Artificial Sequence
  Description of Artificial Sequence: Synthetic oligonucleotide
uggaguacuaugucuauuu

SEQ ID NO: 1458698 - RNA, 19 nt, Artificial Sequence
  Description of Artificial Sequence: Synthetic oligonucleotide
acggguucaagauucuuca

SEQ ID NO: 1458699 - RNA, 19 nt, Artificial Sequence
  Description of Artificial Sequence: Synthetic oligonucleotide
uccugaucgacacugccuc

SEQ ID NO: 1458700 - RNA, 19 nt, Artificial Sequence
  Description of Artificial Sequence: Synthetic oligonucleotide
ucagcagcguaaaggaagu

SEQ ID NO: 1458701 - RNA, 19 nt, Artificial Sequence
  Description of Artificial Sequence: Synthetic oligonucleotide
uuguagguuguuuggguga

SEQ ID NO: 1458702 - RNA, 19 nt, Artificial Sequence
  Description of Artificial Sequence: Synthetic oligonucleotide
cacgucagcagcguaaagg

SEQ ID NO: 1458703 - RNA, 19 nt, Artificial Sequence
  Description of Artificial Sequence: Synthetic oligonucleotide
aauggaguacuaugucuau

SEQ ID NO: 1458704 - RNA, 19 nt, Artificial Sequence
  Description of Artificial Sequence: Synthetic oligonucleotide
caggacauuaaaaccugag

SEQ ID NO: 1458705 - RNA, 19 nt, Artificial Sequence
  Description of Artificial Sequence: Synthetic oligonucleotide
acauuacugcuucugguga

SEQ ID NO: 1458706 - RNA, 19 nt, Artificial Sequence
  Description of Artificial Sequence: Synthetic oligonucleotide
cucaaaggcacggacaaac

SEQ ID NO: 1458707 - RNA, 19 nt, Artificial Sequence
  Description of Artificial Sequence: Synthetic oligonucleotide
cuaauguccucuucucuac

SEQ ID NO: 1458708 - RNA, 19 nt, Artificial Sequence
  Description of Artificial Sequence: Synthetic oligonucleotide
ugggagucacaaaugucgc

SEQ ID NO: 1458709 - RNA, 19 nt, Artificial Sequence
  Description of Artificial Sequence: Synthetic oligonucleotide
agcauccucacacuggggu

SEQ ID NO: 1458710 - RNA, 19 nt, Artificial Sequence
  Description of Artificial Sequence: Synthetic oligonucleotide
uguaucgcucccaguaaga

SEQ ID NO: 1458711 - RNA, 19 nt, Artificial Sequence
  Description of Artificial Sequence: Synthetic oligonucleotide
aauaugcuuccauuuuguu

SEQ ID NO: 1458712 - RNA, 19 nt, Artificial Sequence
  Description of Artificial Sequence: Synthetic oligonucleotide
aaacauugacauaugugaa

SEQ ID NO: 1458713 - RNA, 19 nt, Artificial Sequence
  Description of Artificial Sequence: Synthetic oligonucleotide
ucguguuggagcaaagaua

SEQ ID NO: 1458714 - RNA, 19 nt, Artificial Sequence
  Description of Artificial Sequence: Synthetic oligonucleotide
accuuuucgggauacuggu

SEQ ID NO: 1458715 - RNA, 19 nt, Artificial Sequence
  Description of Artificial Sequence: Synthetic oligonucleotide
auuuaccaacacaugagug

SEQ ID NO: 1458716 - RNA, 19 nt, Artificial Sequence
  Description of Artificial Sequence: Synthetic oligonucleotide
aaauuagucaggacauuaa

SEQ ID NO: 1458717 - RNA, 19 nt, Artificial Sequence
  Description of Artificial Sequence: Synthetic oligonucleotide
ugaacuggucucuuugauc

SEQ ID NO: 1458718 - RNA, 19 nt, Artificial Sequence
  Description of Artificial Sequence: Synthetic oligonucleotide
cacaugagugccauaaaca

SEQ ID NO: 1458719 - RNA, 19 nt, Artificial Sequence
  Description of Artificial Sequence: Synthetic oligonucleotide
ugacauaugugaacucaaa

SEQ ID NO: 1458720 - RNA, 19 nt, Artificial Sequence
  Description of Artificial Sequence: Synthetic oligonucleotide
aucuaacuuaauuuuccaa

SEQ ID NO: 1458721 - RNA, 19 nt, Artificial Sequence
  Description of Artificial Sequence: Synthetic oligonucleotide
ugcuggaacuccuggagac

SEQ ID NO: 1458722 - RNA, 19 nt, Artificial Sequence
  Description of Artificial Sequence: Synthetic oligonucleotide
guauuagcuccuucgcaag

SEQ ID NO: 1458723 - RNA, 19 nt, Artificial Sequence
  Description of Artificial Sequence: Synthetic oligonucleotide
uucucuacaacuggcgacu

SEQ ID NO: 1458724 - RNA, 19 nt, Artificial Sequence
  Description of Artificial Sequence: Synthetic oligonucleotide
uuaugaccauguaguuggg

SEQ ID NO: 1458725 - RNA, 19 nt, Artificial Sequence
  Description of Artificial Sequence: Synthetic oligonucleotide
acuuaggcacuggaguucg

SEQ ID NO: 1458726 - RNA, 19 nt, Artificial Sequence
  Description of Artificial Sequence: Synthetic oligonucleotide
acggacaaacgagagaucu

SEQ ID NO: 1458727 - RNA, 19 nt, Artificial Sequence
  Description of Artificial Sequence: Synthetic oligonucleotide
ugacguagauaaauuucuc

SEQ ID NO: 1458728 - RNA, 19 nt, Artificial Sequence
  Description of Artificial Sequence: Synthetic oligonucleotide
gucauugugaggucuguca

SEQ ID NO: 1458729 - RNA, 19 nt, Artificial Sequence
  Description of Artificial Sequence: Synthetic oligonucleotide
agcccugauccaugaauac

SEQ ID NO: 1458730 - RNA, 19 nt, Artificial Sequence
  Description of Artificial Sequence: Synthetic oligonucleotide
uccauacacuucaucugug

SEQ ID NO: 1458731 - RNA, 19 nt, Artificial Sequence
  Description of Artificial Sequence: Synthetic oligonucleotide
uccguuucagacucugaac

SEQ ID NO: 1458732 - RNA, 19 nt, Artificial Sequence
  Description of Artificial Sequence: Synthetic oligonucleotide
uaacguaguccacccaccu

SEQ ID NO: 1458733 - RNA, 19 nt, Artificial Sequence
  Description of Artificial Sequence: Synthetic oligonucleotide
uguuagaaacggguucaag

SEQ ID NO: 1458734 - RNA, 19 nt, Artificial Sequence
  Description of Artificial Sequence: Synthetic oligonucleotide
aucucaugucauugugagg

SEQ ID NO: 1458735 - RNA, 19 nt, Artificial Sequence
  Description of Artificial Sequence: Synthetic oligonucleotide
uccuucgcaagcuggacaa

SEQ ID NO: 1458736 - RNA, 19 nt, Artificial Sequence
  Description of Artificial Sequence: Synthetic oligonucleotide
caguaagacuguacaaaac

SEQ ID NO: 1458737 - RNA, 19 nt, Artificial Sequence
  Description of Artificial Sequence: Synthetic oligonucleotide
uuuucgggauacuggugug

SEQ ID NO: 1458738 - RNA, 19 nt, Artificial Sequence
  Description of Artificial Sequence: Synthetic oligonucleotide
uugggcuuccacccuaaac

SEQ ID NO: 1458739 - RNA, 19 nt, Artificial Sequence
  Description of Artificial Sequence: Synthetic oligonucleotide
gcgacuauauaaacggugg

SEQ ID NO: 1458740 - RNA, 19 nt, Artificial Sequence
  Description of Artificial Sequence: Synthetic oligonucleotide
ucucgguaccacucaacug

SEQ ID NO: 1458741 - RNA, 19 nt, Artificial Sequence
  Description of Artificial Sequence: Synthetic oligonucleotide
ucauuggauaucucauguc

SEQ ID NO: 1458742 - RNA, 19 nt, Artificial Sequence
  Description of Artificial Sequence: Synthetic oligonucleotide
ucgcccuguauaaauuugu

SEQ ID NO: 1458743 - RNA, 19 nt, Artificial Sequence
  Description of Artificial Sequence: Synthetic oligonucleotide
ugucauuaacguaguccac

SEQ ID NO: 1458744 - RNA, 19 nt, Artificial Sequence
  Description of Artificial Sequence: Synthetic oligonucleotide
ggcacuggaguucgcaucg

SEQ ID NO: 1458745 - RNA, 19 nt, Artificial Sequence
  Description of Artificial Sequence: Synthetic oligonucleotide
aacuggucucuuugaucag

SEQ ID NO: 1458746 - RNA, 19 nt, Artificial Sequence
  Description of Artificial Sequence: Synthetic oligonucleotide
uugggauaaucuuccacua

SEQ ID NO: 1458747 - RNA, 19 nt, Artificial Sequence
  Description of Artificial Sequence: Synthetic oligonucleotide
uuccugucguguuggagca

SEQ ID NO: 1458748 - RNA, 19 nt, Artificial Sequence
  Description of Artificial Sequence: Synthetic oligonucleotide
uaucgcucccaguaagacu

SEQ ID NO: 1458749 - RNA, 19 nt, Artificial Sequence
  Description of Artificial Sequence: Synthetic oligonucleotide
ccaauguuauaaaucuccc

SEQ ID NO: 1458750 - RNA, 19 nt, Artificial Sequence
  Description of Artificial Sequence: Synthetic oligonucleotide
cuuuucagacuucauugga

SEQ ID NO: 1458751 - RNA, 19 nt, Artificial Sequence
  Description of Artificial Sequence: Synthetic oligonucleotide
ugcuuguuagaaacggguu

SEQ ID NO: 1458752 - RNA, 19 nt, Artificial Sequence
  Description of Artificial Sequence: Synthetic oligonucleotide
ugggauaaucuuccacuaa

SEQ ID NO: 1458753 - RNA, 19 nt, Artificial Sequence
  Description of Artificial Sequence: Synthetic oligonucleotide
ggagucacaaaugucgccc

SEQ ID NO: 1458754 - RNA, 19 nt, Artificial Sequence
  Description of Artificial Sequence: Synthetic oligonucleotide
acgagagaucuacaugugu

SEQ ID NO: 1458755 - RNA, 19 nt, Artificial Sequence
  Description of Artificial Sequence: Synthetic oligonucleotide
ugcugacguagauaaauuu

SEQ ID NO: 1458756 - RNA, 19 nt, Artificial Sequence
  Description of Artificial Sequence: Synthetic oligonucleotide
ggcucuaaugccuuuucug

SEQ ID NO: 1458757 - RNA, 19 nt, Artificial Sequence
  Description of Artificial Sequence: Synthetic oligonucleotide
ggguuuguagguuguuugg

SEQ ID NO: 1458758 - RNA, 19 nt, Artificial Sequence
  Description of Artificial Sequence: Synthetic oligonucleotide
auugugaggucugucauua

SEQ ID NO: 1458759 - RNA, 19 nt, Artificial Sequence
  Description of Artificial Sequence: Synthetic oligonucleotide
acguaguccacccaccuuu

SEQ ID NO: 1458760 - RNA, 19 nt, Artificial Sequence
  Description of Artificial Sequence: Synthetic oligonucleotide
uguaaacaguagagacaug

SEQ ID NO: 1458761 - RNA, 19 nt, Artificial Sequence
  Description of Artificial Sequence: Synthetic oligonucleotide
cugacguagauaaauuucu

SEQ ID NO: 1458762 - RNA, 19 nt, Artificial Sequence
  Description of Artificial Sequence: Synthetic oligonucleotide
guucgcaucgcugcugagg

SEQ ID NO: 1458763 - RNA, 19 nt, Artificial Sequence
  Description of Artificial Sequence: Synthetic oligonucleotide
cuccacacggaauccuggg

SEQ ID NO: 1458764 - RNA, 19 nt, Artificial Sequence
  Description of Artificial Sequence: Synthetic oligonucleotide
gaaacuuguaucgcuccca

SEQ ID NO: 1458765 - RNA, 19 nt, Artificial Sequence
  Description of Artificial Sequence: Synthetic oligonucleotide
aaggcacggacaaacgaga

SEQ ID NO: 1458766 - RNA, 19 nt, Artificial Sequence
  Description of Artificial Sequence: Synthetic oligonucleotide
cauguaguugggauaaucu

SEQ ID NO: 1458767 - RNA, 19 nt, Artificial Sequence
  Description of Artificial Sequence: Synthetic oligonucleotide
aacgagagaucuacaugug

SEQ ID NO: 1458768 - RNA, 19 nt, Artificial Sequence
  Description of Artificial Sequence: Synthetic oligonucleotide
acagcauuuccugucgugu

SEQ ID NO: 1458769 - RNA, 19 nt, Artificial Sequence
  Description of Artificial Sequence: Synthetic oligonucleotide
gacuauauaaacgguggcu

SEQ ID NO: 1458770 - RNA, 19 nt, Artificial Sequence
  Description of Artificial Sequence: Synthetic oligonucleotide
ugaccauguaguugggaua

SEQ ID NO: 1458771 - RNA, 19 nt, Artificial Sequence
  Description of Artificial Sequence: Synthetic oligonucleotide
gucaggacauuaaaaccug

SEQ ID NO: 1458772 - RNA, 19 nt, Artificial Sequence
  Description of Artificial Sequence: Synthetic oligonucleotide
gaacucaaaggcacggaca

SEQ ID NO: 1458773 - RNA, 19 nt, Artificial Sequence
  Description of Artificial Sequence: Synthetic oligonucleotide
gagagaucuacaugugucu

SEQ ID NO: 1458774 - RNA, 19 nt, Artificial Sequence
  Description of Artificial Sequence: Synthetic oligonucleotide
ugcaaugaagccggcgccc

SEQ ID NO: 1458775 - RNA, 19 nt, Artificial Sequence
  Description of Artificial Sequence: Synthetic oligonucleotide
cacucuggcuucauaagca

SEQ ID NO: 1458776 - RNA, 19 nt, Artificial Sequence
  Description of Artificial Sequence: Synthetic oligonucleotide
gagaccgucaggucuccac

SEQ ID NO: 1458777 - RNA, 19 nt, Artificial Sequence
  Description of Artificial Sequence: Synthetic oligonucleotide
cuuccacccuaaacugugg

SEQ ID NO: 1458778 - RNA, 19 nt, Artificial Sequence
  Description of Artificial Sequence: Synthetic oligonucleotide
auaucucaugucauuguga

SEQ ID NO: 1458779 - RNA, 19 nt, Artificial Sequence
  Description of Artificial Sequence: Synthetic oligonucleotide
cucgguaccacucaacugu

SEQ ID NO: 1458780 - RNA, 19 nt, Artificial Sequence
  Description of Artificial Sequence: Synthetic oligonucleotide
ugugguccauaaacauuac

SEQ ID NO: 1458781 - RNA, 19 nt, Artificial Sequence
  Description of Artificial Sequence: Synthetic oligonucleotide
cauccgaacccaguccugg

SEQ ID NO: 1458782 - RNA, 19 nt, Artificial Sequence
  Description of Artificial Sequence: Synthetic oligonucleotide
ggacaaacgagagaucuac

SEQ ID NO: 1458783 - RNA, 19 nt, Artificial Sequence
  Description of Artificial Sequence: Synthetic oligonucleotide
cauugacauaugugaacuc

SEQ ID NO: 1458784 - RNA, 19 nt, Artificial Sequence
  Description of Artificial Sequence: Synthetic oligonucleotide
gcuguauuagcuccuucgc

SEQ ID NO: 1458785 - RNA, 19 nt, Artificial Sequence
  Description of Artificial Sequence: Synthetic oligonucleotide
caaaugucgcccuguauaa

SEQ ID NO: 1458786 - RNA, 19 nt, Artificial Sequence
  Description of Artificial Sequence: Synthetic oligonucleotide
ucccaguaagacuguacaa

SEQ ID NO: 1458787 - RNA, 19 nt, Artificial Sequence
  Description of Artificial Sequence: Synthetic oligonucleotide
accgucaggucuccacacg

SEQ ID NO: 1458788 - RNA, 19 nt, Artificial Sequence
  Description of Artificial Sequence: Synthetic oligonucleotide
ugucguguuggagcaaaga

SEQ ID NO: 1458789 - RNA, 19 nt, Artificial Sequence
  Description of Artificial Sequence: Synthetic oligonucleotide
auuacugcuucuggugaug

SEQ ID NO: 1458790 - RNA, 19 nt, Artificial Sequence
  Description of Artificial Sequence: Synthetic oligonucleotide
gugugguccauaaacauua

SEQ ID NO: 1458791 - RNA, 19 nt, Artificial Sequence
  Description of Artificial Sequence: Synthetic oligonucleotide
ucucucgguaccacucaac

SEQ ID NO: 1458792 - RNA, 19 nt, Artificial Sequence
  Description of Artificial Sequence: Synthetic oligonucleotide
ucgcaagcuggacaaccga

SEQ ID NO: 1458793 - RNA, 19 nt, Artificial Sequence
  Description of Artificial Sequence: Synthetic oligonucleotide
gcccuguauaaauuuguag

SEQ ID NO: 1458794 - RNA, 19 nt, Artificial Sequence
  Description of Artificial Sequence: Synthetic oligonucleotide
ugugugagauuuacaucuu

SEQ ID NO: 1458795 - RNA, 19 nt, Artificial Sequence
  Description of Artificial Sequence: Synthetic oligonucleotide
aaacgguggcuggacagga

SEQ ID NO: 1458796 - RNA, 19 nt, Artificial Sequence
  Description of Artificial Sequence: Synthetic oligonucleotide
ugucgcccuguauaaauuu

SEQ ID NO: 1458797 - RNA, 19 nt, Artificial Sequence
  Description of Artificial Sequence: Synthetic oligonucleotide
cuuuucgggauacuggugu

SEQ ID NO: 1458798 - RNA, 19 nt, Artificial Sequence
  Description of Artificial Sequence: Synthetic oligonucleotide
caaaggcacggacaaacga

SEQ ID NO: 1458799 - RNA, 19 nt, Artificial Sequence
  Description of Artificial Sequence: Synthetic oligonucleotide
agucacaaaugucgcccug

SEQ ID NO: 1458800 - RNA, 19 nt, Artificial Sequence
  Description of Artificial Sequence: Synthetic oligonucleotide
cugcuuuagaugaagcaua

SEQ ID NO: 1458801 - RNA, 19 nt, Artificial Sequence
  Description of Artificial Sequence: Synthetic oligonucleotide
uggcgacuauauaaacggu

SEQ ID NO: 1458802 - RNA, 19 nt, Artificial Sequence
  Description of Artificial Sequence: Synthetic oligonucleotide
uggaguucgcaucgcugcu

SEQ ID NO: 1458803 - RNA, 19 nt, Artificial Sequence
  Description of Artificial Sequence: Synthetic oligonucleotide
guuugggugaugauucauc

SEQ ID NO: 1458804 - RNA, 19 nt, Artificial Sequence
  Description of Artificial Sequence: Synthetic oligonucleotide
uugggugaugauucaucaa

SEQ ID NO: 1458805 - RNA, 19 nt, Artificial Sequence
  Description of Artificial Sequence: Synthetic oligonucleotide
cuggacaaccgacauuuca

SEQ ID NO: 1458806 - RNA, 19 nt, Artificial Sequence
  Description of Artificial Sequence: Synthetic oligonucleotide
gcuugucuagauuuaugac

SEQ ID NO: 1458807 - RNA, 19 nt, Artificial Sequence
  Description of Artificial Sequence: Synthetic oligonucleotide
ggcgacuauauaaacggug

SEQ ID NO: 1458808 - RNA, 19 nt, Artificial Sequence
  Description of Artificial Sequence: Synthetic oligonucleotide
aacguaguccacccaccuu

SEQ ID NO: 1458809 - RNA, 19 nt, Artificial Sequence
  Description of Artificial Sequence: Synthetic oligonucleotide
cuguauuagcuccuucgca

SEQ ID NO: 1458810 - RNA, 19 nt, Artificial Sequence
  Description of Artificial Sequence: Synthetic oligonucleotide
agcuugcacaguaauccag

SEQ ID NO: 1458811 - RNA, 19 nt, Artificial Sequence
  Description of Artificial Sequence: Synthetic oligonucleotide
uucgggauacugguguggu

SEQ ID NO: 1458812 - RNA, 19 nt, Artificial Sequence
  Description of Artificial Sequence: Synthetic oligonucleotide
gaagcccugauccaugaau

SEQ ID NO: 1458813 - RNA, 19 nt, Artificial Sequence
  Description of Artificial Sequence: Synthetic oligonucleotide
aagcccugauccaugaaua

SEQ ID NO: 1458814 - RNA, 19 nt, Artificial Sequence
  Description of Artificial Sequence: Synthetic oligonucleotide
uggagacucugcauccgaa

SEQ ID NO: 1458815 - RNA, 19 nt, Artificial Sequence
  Description of Artificial Sequence: Synthetic oligonucleotide
uguagguuguuugggugau

SEQ ID NO: 1458816 - RNA, 19 nt, Artificial Sequence
  Description of Artificial Sequence: Synthetic oligonucleotide
uucucucgguaccacucaa

SEQ ID NO: 1458817 - RNA, 19 nt, Artificial Sequence
  Description of Artificial Sequence: Synthetic oligonucleotide
uccgaacccaguccuggaa

SEQ ID NO: 1458818 - RNA, 19 nt, Artificial Sequence
  Description of Artificial Sequence: Synthetic oligonucleotide
caacuggcgacuauauaaa

SEQ ID NO: 1458819 - RNA, 19 nt, Artificial Sequence
  Description of Artificial Sequence: Synthetic oligonucleotide
gauuuaugaccauguaguu

SEQ ID NO: 1458820 - RNA, 19 nt, Artificial Sequence
  Description of Artificial Sequence: Synthetic oligonucleotide
ugugucugggcagcaaaau

SEQ ID NO: 1458821 - RNA, 19 nt, Artificial Sequence
  Description of Artificial Sequence: Synthetic oligonucleotide
gaguucgcaucgcugcuga

SEQ ID NO: 1458822 - RNA, 19 nt, Artificial Sequence
  Description of Artificial Sequence: Synthetic oligonucleotide
gcugacguagauaaauuuc

SEQ ID NO: 1458823 - RNA, 19 nt, Artificial Sequence
  Description of Artificial Sequence: Synthetic oligonucleotide
ggucccaauguuauaaauc

SEQ ID NO: 1458824 - RNA, 19 nt, Artificial Sequence
  Description of Artificial Sequence: Synthetic oligonucleotide
agguaggcuaauguccucu

SEQ ID NO: 1458825 - RNA, 19 nt, Artificial Sequence
  Description of Artificial Sequence: Synthetic oligonucleotide
agcagcguaaaggaaguuu

SEQ ID NO: 1458826 - RNA, 19 nt, Artificial Sequence
  Description of Artificial Sequence: Synthetic oligonucleotide
guaguucugcuuguuagaa

SEQ ID NO: 1458827 - RNA, 19 nt, Artificial Sequence
  Description of Artificial Sequence: Synthetic oligonucleotide
aggaggcaaucacauggga

SEQ ID NO: 1458828 - RNA, 19 nt, Artificial Sequence
  Description of Artificial Sequence: Synthetic oligonucleotide
guaucgcucccaguaagac

SEQ ID NO: 1458829 - RNA, 19 nt, Artificial Sequence
  Description of Artificial Sequence: Synthetic oligonucleotide
aaaugucgcccuguauaaa

SEQ ID NO: 1458830 - RNA, 19 nt, Artificial Sequence
  Description of Artificial Sequence: Synthetic oligonucleotide
aaagggcucuaaugccuuu

SEQ ID NO: 1458831 - RNA, 19 nt, Artificial Sequence
  Description of Artificial Sequence: Synthetic oligonucleotide
ccacacggaauccugggcc

SEQ ID NO: 1458832 - RNA, 19 nt, Artificial Sequence
  Description of Artificial Sequence: Synthetic oligonucleotide
cugcuuguuagaaacgggu

SEQ ID NO: 1458833 - RNA, 19 nt, Artificial Sequence
  Description of Artificial Sequence: Synthetic oligonucleotide
acgguggcuggacaggaaa

SEQ ID NO: 1458834 - RNA, 19 nt, Artificial Sequence
  Description of Artificial Sequence: Synthetic oligonucleotide
aagcuggacaaccgacauu

SEQ ID NO: 1458835 - RNA, 19 nt, Artificial Sequence
  Description of Artificial Sequence: Synthetic oligonucleotide
cccuguauaaauuuguagu

SEQ ID NO: 1458836 - RNA, 19 nt, Artificial Sequence
  Description of Artificial Sequence: Synthetic oligonucleotide
ucgcugcugagguaggcua

SEQ ID NO: 1458837 - RNA, 19 nt, Artificial Sequence
  Description of Artificial Sequence: Synthetic oligonucleotide
ggaauaaccuuuucgggau

SEQ ID NO: 1458838 - RNA, 19 nt, Artificial Sequence
  Description of Artificial Sequence: Synthetic oligonucleotide
gcagcguaaaggaaguuuc

SEQ ID NO: 1458839 - RNA, 19 nt, Artificial Sequence
  Description of Artificial Sequence: Synthetic oligonucleotide
accaacacaugagugccau

SEQ ID NO: 1458840 - RNA, 19 nt, Artificial Sequence
  Description of Artificial Sequence: Synthetic oligonucleotide
ccacucuggcuucauaagc

SEQ ID NO: 1458841 - RNA, 19 nt, Artificial Sequence
  Description of Artificial Sequence: Synthetic oligonucleotide
gucgcccuguauaaauuug

SEQ ID NO: 1458842 - RNA, 19 nt, Artificial Sequence
  Description of Artificial Sequence: Synthetic oligonucleotide
ugaucgacacugccuccau

SEQ ID NO: 1458843 - RNA, 19 nt, Artificial Sequence
  Description of Artificial Sequence: Synthetic oligonucleotide
guaggcuaauguccucuuc

SEQ ID NO: 1458844 - RNA, 19 nt, Artificial Sequence
  Description of Artificial Sequence: Synthetic oligonucleotide
cuuguaucgcucccaguaa

SEQ ID NO: 1458845 - RNA, 19 nt, Artificial Sequence
  Description of Artificial Sequence: Synthetic oligonucleotide
guaguccacccaccuuucc

SEQ ID NO: 1458846 - RNA, 19 nt, Artificial Sequence
  Description of Artificial Sequence: Synthetic oligonucleotide
gacaaacgagagaucuaca

SEQ ID NO: 1458847 - RNA, 19 nt, Artificial Sequence
  Description of Artificial Sequence: Synthetic oligonucleotide
auauggguuuguagguugu

SEQ ID NO: 1458848 - RNA, 19 nt, Artificial Sequence
  Description of Artificial Sequence: Synthetic oligonucleotide
caguagagacaugacaaaa

SEQ ID NO: 1458849 - RNA, 19 nt, Artificial Sequence
  Description of Artificial Sequence: Synthetic oligonucleotide
ggugaugauucaucaaacu

SEQ ID NO: 1458850 - RNA, 19 nt, Artificial Sequence
  Description of Artificial Sequence: Synthetic oligonucleotide
aaacggguucaagauucuu

SEQ ID NO: 1458851 - RNA, 19 nt, Artificial Sequence
  Description of Artificial Sequence: Synthetic oligonucleotide
gaauaaccuuuucgggaua

SEQ ID NO: 1458852 - RNA, 19 nt, Artificial Sequence
  Description of Artificial Sequence: Synthetic oligonucleotide
cacuuaggcacuggaguuc

SEQ ID NO: 1458853 - RNA, 19 nt, Artificial Sequence
  Description of Artificial Sequence: Synthetic oligonucleotide
aagggcucuaaugccuuuu

SEQ ID NO: 1458854 - RNA, 19 nt, Artificial Sequence
  Description of Artificial Sequence: Synthetic oligonucleotide
cauuucaaagcugguccca

SEQ ID NO: 1458855 - RNA, 19 nt, Artificial Sequence
  Description of Artificial Sequence: Synthetic oligonucleotide
uacuggugugguccauaaa

SEQ ID NO: 1458856 - RNA, 19 nt, Artificial Sequence
  Description of Artificial Sequence: Synthetic oligonucleotide
cugucguguuggagcaaag

SEQ ID NO: 1458857 - RNA, 19 nt, Artificial Sequence
  Description of Artificial Sequence: Synthetic oligonucleotide
gucaggucuccacacggaa

SEQ ID NO: 1458858 - RNA, 19 nt, Artificial Sequence
  Description of Artificial Sequence: Synthetic oligonucleotide
ggaaauucucucgguacca

SEQ ID NO: 1458859 - RNA, 19 nt, Artificial Sequence
  Description of Artificial Sequence: Synthetic oligonucleotide
cuuaggcacuggaguucgc

SEQ ID NO: 1458860 - RNA, 19 nt, Artificial Sequence
  Description of Artificial Sequence: Synthetic oligonucleotide
gagguaggcuaauguccuc

SEQ ID NO: 1458861 - RNA, 19 nt, Artificial Sequence
  Description of Artificial Sequence: Synthetic oligonucleotide
aguucgcaucgcugcugag

SEQ ID NO: 1458862 - RNA, 19 nt, Artificial Sequence
  Description of Artificial Sequence: Synthetic oligonucleotide
auccgaacccaguccugga

SEQ ID NO: 1458863 - RNA, 19 nt, Artificial Sequence
  Description of Artificial Sequence: Synthetic oligonucleotide
gauacuggugugguccaua

SEQ ID NO: 1458864 - RNA, 19 nt, Artificial Sequence
  Description of Artificial Sequence: Synthetic oligonucleotide
gaacccaguccuggaagca

SEQ ID NO: 1458865 - RNA, 19 nt, Artificial Sequence
  Description of Artificial Sequence: Synthetic oligonucleotide
cacccuaaacuguggaucu

SEQ ID NO: 1458866 - RNA, 19 nt, Artificial Sequence
  Description of Artificial Sequence: Synthetic oligonucleotide
cuccuucgcaagcuggaca

SEQ ID NO: 1458867 - RNA, 19 nt, Artificial Sequence
  Description of Artificial Sequence: Synthetic oligonucleotide
ccgucaggucuccacacgg

SEQ ID NO: 1458868 - RNA, 19 nt, Artificial Sequence
  Description of Artificial Sequence: Synthetic oligonucleotide
uauggguuuguagguuguu

SEQ ID NO: 1458869 - RNA, 19 nt, Artificial Sequence
  Description of Artificial Sequence: Synthetic oligonucleotide
cacggacaaacgagagauc

SEQ ID NO: 1458870 - RNA, 19 nt, Artificial Sequence
  Description of Artificial Sequence: Synthetic oligonucleotide
ggauaucucaugucauugu

SEQ ID NO: 1458871 - RNA, 19 nt, Artificial Sequence
  Description of Artificial Sequence: Synthetic oligonucleotide
ucgggauacuggugugguc

SEQ ID NO: 1458872 - RNA, 19 nt, Artificial Sequence
  Description of Artificial Sequence: Synthetic oligonucleotide
ccacccuaaacuguggauc

SEQ ID NO: 1458873 - RNA, 19 nt, Artificial Sequence
  Description of Artificial Sequence: Synthetic oligonucleotide
aucugugcugacguagaua

SEQ ID NO: 1458874 - RNA, 19 nt, Artificial Sequence
  Description of Artificial Sequence: Synthetic oligonucleotide
auggaguacuaugucuauu

SEQ ID NO: 1458875 - RNA, 19 nt, Artificial Sequence
  Description of Artificial Sequence: Synthetic oligonucleotide
cgacuauauaaacgguggc

SEQ ID NO: 1458876 - RNA, 19 nt, Artificial Sequence
  Description of Artificial Sequence: Synthetic oligonucleotide
gugaacucaaaggcacgga

SEQ ID NO: 1458877 - RNA, 19 nt, Artificial Sequence
  Description of Artificial Sequence: Synthetic oligonucleotide
cugaucgacacugccucca

SEQ ID NO: 1458878 - RNA, 19 nt, Artificial Sequence
  Description of Artificial Sequence: Synthetic oligonucleotide
gucugucauuaacguaguc

SEQ ID NO: 1458879 - RNA, 19 nt, Artificial Sequence
  Description of Artificial Sequence: Synthetic oligonucleotide
caucgcugcugagguaggc

SEQ ID NO: 1458880 - RNA, 19 nt, Artificial Sequence
  Description of Artificial Sequence: Synthetic oligonucleotide
cauaaacauuacugcuucu

SEQ ID NO: 1458881 - RNA, 19 nt, Artificial Sequence
  Description of Artificial Sequence: Synthetic oligonucleotide
gugguccauaaacauuacu

SEQ ID NO: 1458882 - RNA, 19 nt, Artificial Sequence
  Description of Artificial Sequence: Synthetic oligonucleotide
accacgucagcagcguaaa

SEQ ID NO: 1458883 - RNA, 19 nt, Artificial Sequence
  Description of Artificial Sequence: Synthetic oligonucleotide
ccgaacccaguccuggaag

SEQ ID NO: 1458884 - RNA, 19 nt, Artificial Sequence
  Description of Artificial Sequence: Synthetic oligonucleotide
ggcacggacaaacgagaga

SEQ ID NO: 1458885 - RNA, 19 nt, Artificial Sequence
  Description of Artificial Sequence: Synthetic oligonucleotide
cuacaacuggcgacuauau

SEQ ID NO: 1458886 - RNA, 19 nt, Artificial Sequence
  Description of Artificial Sequence: Synthetic oligonucleotide
augugucugggcagcaaaa

SEQ ID NO: 1458887 - RNA, 19 nt, Artificial Sequence
  Description of Artificial Sequence: Synthetic oligonucleotide
gcacggacaaacgagagau

SEQ ID NO: 1458888 - RNA, 19 nt, Artificial Sequence
  Description of Artificial Sequence: Synthetic oligonucleotide
ccuuuucgggauacuggug

SEQ ID NO: 1458889 - RNA, 19 nt, Artificial Sequence
  Description of Artificial Sequence: Synthetic oligonucleotide
ccauguaguugggauaauc

SEQ ID NO: 1458890 - RNA, 19 nt, Artificial Sequence
  Description of Artificial Sequence: Synthetic oligonucleotide
ucucuacaacuggcgacua

SEQ ID NO: 1458891 - RNA, 19 nt, Artificial Sequence
  Description of Artificial Sequence: Synthetic oligonucleotide
ggaaagggcucuaaugccu

SEQ ID NO: 1458892 - RNA, 19 nt, Artificial Sequence
  Description of Artificial Sequence: Synthetic oligonucleotide
gaucgacacugccuccaua

SEQ ID NO: 1458893 - RNA, 19 nt, Artificial Sequence
  Description of Artificial Sequence: Synthetic oligonucleotide
guagguuguuugggugaug

SEQ ID NO: 1458894 - RNA, 19 nt, Artificial Sequence
  Description of Artificial Sequence: Synthetic oligonucleotide
gcaagcuggacaaccgaca

SEQ ID NO: 1458895 - RNA, 19 nt, Artificial Sequence
  Description of Artificial Sequence: Synthetic oligonucleotide
ccguuucagacucugaacu

SEQ ID NO: 1458896 - RNA, 19 nt, Artificial Sequence
  Description of Artificial Sequence: Synthetic oligonucleotide
gucacaaaugucgcccugu

SEQ ID NO: 1458897 - RNA, 19 nt, Artificial Sequence
  Description of Artificial Sequence: Synthetic oligonucleotide
cgcaucgcugcugagguag

SEQ ID NO: 1458898 - RNA, 19 nt, Artificial Sequence
  Description of Artificial Sequence: Synthetic oligonucleotide
cauuacugcuucuggugau

SEQ ID NO: 1458899 - RNA, 19 nt, Artificial Sequence
  Description of Artificial Sequence: Synthetic oligonucleotide
gcaaugaagccggcgcccc

SEQ ID NO: 1458900 - RNA, 19 nt, Artificial Sequence
  Description of Artificial Sequence: Synthetic oligonucleotide
ggaguucgcaucgcugcug

SEQ ID NO: 1458901 - RNA, 19 nt, Artificial Sequence
  Description of Artificial Sequence: Synthetic oligonucleotide
ccugaucgacacugccucc

SEQ ID NO: 1458902 - RNA, 19 nt, Artificial Sequence
  Description of Artificial Sequence: Synthetic oligonucleotide
aacgguggcuggacaggaa

SEQ ID NO: 1458903 - RNA, 19 nt, Artificial Sequence
  Description of Artificial Sequence: Synthetic oligonucleotide
cugagaccgucaggucucc

SEQ ID NO: 1458904 - RNA, 19 nt, Artificial Sequence
  Description of Artificial Sequence: Synthetic oligonucleotide
gaaagggcucuaaugccuu

SEQ ID NO: 1458905 - RNA, 19 nt, Artificial Sequence
  Description of Artificial Sequence: Synthetic oligonucleotide
augucgcccuguauaaauu

SEQ ID NO: 1458906 - RNA, 19 nt, Artificial Sequence
  Description of Artificial Sequence: Synthetic oligonucleotide
cugaacuggucucuuugau

SEQ ID NO: 1458907 - RNA, 19 nt, Artificial Sequence
  Description of Artificial Sequence: Synthetic oligonucleotide
cagcguaaaggaaguuucu

SEQ ID NO: 1458908 - RNA, 19 nt, Artificial Sequence
  Description of Artificial Sequence: Synthetic oligonucleotide
cuaugucuauuuucuccau

SEQ ID NO: 1458909 - RNA, 19 nt, Artificial Sequence
  Description of Artificial Sequence: Synthetic oligonucleotide
aaggcacuuugggcuucca

SEQ ID NO: 1458910 - RNA, 19 nt, Artificial Sequence
  Description of Artificial Sequence: Synthetic oligonucleotide
ugagaccgucaggucucca

SEQ ID NO: 1458911 - RNA, 19 nt, Artificial Sequence
  Description of Artificial Sequence: Synthetic oligonucleotide
ccacccaccuuuccguuuc

SEQ ID NO: 1458912 - RNA, 19 nt, Artificial Sequence
  Description of Artificial Sequence: Synthetic oligonucleotide
cucugcauccgaacccagu

SEQ ID NO: 1458913 - RNA, 19 nt, Artificial Sequence
  Description of Artificial Sequence: Synthetic oligonucleotide
cuuccacuaaggaggcaau

SEQ ID NO: 1458914 - RNA, 19 nt, Artificial Sequence
  Description of Artificial Sequence: Synthetic oligonucleotide
cuaaugccuuuucugcauu

SEQ ID NO: 1458915 - RNA, 19 nt, Artificial Sequence
  Description of Artificial Sequence: Synthetic oligonucleotide
ggaggcaaucacaugggau

SEQ ID NO: 1458916 - RNA, 19 nt, Artificial Sequence
  Description of Artificial Sequence: Synthetic oligonucleotide
ggaguacuaugucuauuuu

SEQ ID NO: 1458917 - RNA, 19 nt, Artificial Sequence
  Description of Artificial Sequence: Synthetic oligonucleotide
ucgcaucgcugcugaggua

SEQ ID NO: 1458918 - RNA, 19 nt, Artificial Sequence
  Description of Artificial Sequence: Synthetic oligonucleotide
cggaauccugggccaaugc

SEQ ID NO: 1458919 - RNA, 19 nt, Artificial Sequence
  Description of Artificial Sequence: Synthetic oligonucleotide
cacaaaugucgcccuguau

SEQ ID NO: 1458920 - RNA, 19 nt, Artificial Sequence
  Description of Artificial Sequence: Synthetic oligonucleotide
gcagcaaaauggaguacua

SEQ ID NO: 1458921 - RNA, 19 nt, Artificial Sequence
  Description of Artificial Sequence: Synthetic oligonucleotide
gcaucgcugcugagguagg

SEQ ID NO: 1458922 - RNA, 19 nt, Artificial Sequence
  Description of Artificial Sequence: Synthetic oligonucleotide
acccuaaacuguggaucuu

SEQ ID NO: 1458923 - RNA, 19 nt, Artificial Sequence
  Description of Artificial Sequence: Synthetic oligonucleotide
cagcaaaauggaguacuau

SEQ ID NO: 1458924 - RNA, 19 nt, Artificial Sequence
  Description of Artificial Sequence: Synthetic oligonucleotide
gugcugacguagauaaauu

SEQ ID NO: 1458925 - RNA, 19 nt, Artificial Sequence
  Description of Artificial Sequence: Synthetic oligonucleotide
cagcauuuccugucguguu

SEQ ID NO: 1458926 - RNA, 19 nt, Artificial Sequence
  Description of Artificial Sequence: Synthetic oligonucleotide
gcuccuucgcaagcuggac

SEQ ID NO: 1458927 - RNA, 19 nt, Artificial Sequence
  Description of Artificial Sequence: Synthetic oligonucleotide
ccacgucagcagcguaaag

SEQ ID NO: 1458928 - RNA, 19 nt, Artificial Sequence
  Description of Artificial Sequence: Synthetic oligonucleotide
cucuacaacuggcgacuau

SEQ ID NO: 1458929 - RNA, 19 nt, Artificial Sequence
  Description of Artificial Sequence: Synthetic oligonucleotide
ccugucguguuggagcaaa

SEQ ID NO: 1458930 - RNA, 19 nt, Artificial Sequence
  Description of Artificial Sequence: Synthetic oligonucleotide
ccuaaacuguggaucuuuu

SEQ ID NO: 1458931 - RNA, 19 nt, Artificial Sequence
  Description of Artificial Sequence: Synthetic oligonucleotide
cucccuuuuggaggacagu

SEQ ID NO: 1458932 - RNA, 19 nt, Artificial Sequence
  Description of Artificial Sequence: Synthetic oligonucleotide
ccuucgcaagcuggacaac

SEQ ID NO: 1458933 - RNA, 19 nt, Artificial Sequence
  Description of Artificial Sequence: Synthetic oligonucleotide
cgucagcagcguaaaggaa

SEQ ID NO: 1458934 - RNA, 19 nt, Artificial Sequence
  Description of Artificial Sequence: Synthetic oligonucleotide
cggacaaacgagagaucua

SEQ ID NO: 1458935 - RNA, 19 nt, Artificial Sequence
  Description of Artificial Sequence: Synthetic oligonucleotide
cggguucaagauucuucaa

SEQ ID NO: 1458936 - RNA, 19 nt, Artificial Sequence
  Description of Artificial Sequence: Synthetic oligonucleotide
cccuaaacuguggaucuuu

SEQ ID NO: 1458937 - RNA, 19 nt, Artificial Sequence
  Description of Artificial Sequence: Synthetic oligonucleotide
gcucucccuuuuggaggac

SEQ ID NO: 1458938 - RNA, 19 nt, Artificial Sequence
  Description of Artificial Sequence: Synthetic oligonucleotide
cagcagcguaaaggaaguu

SEQ ID NO: 1458939 - RNA, 19 nt, Artificial Sequence
  Description of Artificial Sequence: Synthetic oligonucleotide
cgcucccaguaagacugua

SEQ ID NO: 1458940 - RNA, 19 nt, Artificial Sequence
  Description of Artificial Sequence: Synthetic oligonucleotide
aauauguacagucauaucu

SEQ ID NO: 1458941 - RNA, 19 nt, Artificial Sequence
  Description of Artificial Sequence: Synthetic oligonucleotide
uuaagaaaugcucuccugg

SEQ ID NO: 1458942 - RNA, 19 nt, Artificial Sequence
  Description of Artificial Sequence: Synthetic oligonucleotide
ugaaaucuauacaugauca

SEQ ID NO: 1458943 - RNA, 19 nt, Artificial Sequence
  Description of Artificial Sequence: Synthetic oligonucleotide
acagaugaagagcaggucc

SEQ ID NO: 1458944 - RNA, 19 nt, Artificial Sequence
  Description of Artificial Sequence: Synthetic oligonucleotide
gaaucuucggggcugaugg

SEQ ID NO: 1458945 - RNA, 19 nt, Artificial Sequence
  Description of Artificial Sequence: Synthetic oligonucleotide
caaaccaugacacagcaag

SEQ ID NO: 1458946 - RNA, 19 nt, Artificial Sequence
  Description of Artificial Sequence: Synthetic oligonucleotide
uauauucugaaaucuauac

SEQ ID NO: 1458947 - RNA, 19 nt, Artificial Sequence
  Description of Artificial Sequence: Synthetic oligonucleotide
auaucuuauauucugaaau

SEQ ID NO: 1458948 - RNA, 19 nt, Artificial Sequence
  Description of Artificial Sequence: Synthetic oligonucleotide
guagucaagauccucagag

SEQ ID NO: 1458949 - RNA, 19 nt, Artificial Sequence
  Description of Artificial Sequence: Synthetic oligonucleotide
gaacauguuucucaguggg

SEQ ID NO: 1458950 - RNA, 19 nt, Artificial Sequence
  Description of Artificial Sequence: Synthetic oligonucleotide
ugguauacaggacaacagg

SEQ ID NO: 1458951 - RNA, 19 nt, Artificial Sequence
  Description of Artificial Sequence: Synthetic oligonucleotide
gaugacaugagcucuggcc

SEQ ID NO: 1458952 - RNA, 19 nt, Artificial Sequence
  Description of Artificial Sequence: Synthetic oligonucleotide
caaucaauggcucucgagg

SEQ ID NO: 1458953 - RNA, 19 nt, Artificial Sequence
  Description of Artificial Sequence: Synthetic oligonucleotide
aaaucuauacaugaucaca

SEQ ID NO: 1458954 - RNA, 19 nt, Artificial Sequence
  Description of Artificial Sequence: Synthetic oligonucleotide
augaugauggccaaggcac

SEQ ID NO: 1458955 - RNA, 19 nt, Artificial Sequence
  Description of Artificial Sequence: Synthetic oligonucleotide
ucuauacaugaucacauaa

SEQ ID NO: 1458956 - RNA, 19 nt, Artificial Sequence
  Description of Artificial Sequence: Synthetic oligonucleotide
gauauucugggacuccagg

SEQ ID NO: 1458957 - RNA, 19 nt, Artificial Sequence
  Description of Artificial Sequence: Synthetic oligonucleotide
aguugguugaugugguggc

SEQ ID NO: 1458958 - RNA, 19 nt, Artificial Sequence
  Description of Artificial Sequence: Synthetic oligonucleotide
cacgcugccacucaguucg

SEQ ID NO: 1458959 - RNA, 19 nt, Artificial Sequence
  Description of Artificial Sequence: Synthetic oligonucleotide
aaggaguugauuuccgacu

SEQ ID NO: 1458960 - RNA, 19 nt, Artificial Sequence
  Description of Artificial Sequence: Synthetic oligonucleotide
aaccaugacacagcaagcg

SEQ ID NO: 1458961 - RNA, 19 nt, Artificial Sequence
  Description of Artificial Sequence: Synthetic oligonucleotide
ugcaagugggcucugccgg

SEQ ID NO: 1458962 - RNA, 19 nt, Artificial Sequence
  Description of Artificial Sequence: Synthetic oligonucleotide
gacccgagaauucuguagg

SEQ ID NO: 1458963 - RNA, 19 nt, Artificial Sequence
  Description of Artificial Sequence: Synthetic oligonucleotide
ugaacauguuucucagugg

SEQ ID NO: 1458964 - RNA, 19 nt, Artificial Sequence
  Description of Artificial Sequence: Synthetic oligonucleotide
cacaguaggagacagcaag

SEQ ID NO: 1458965 - RNA, 19 nt, Artificial Sequence
  Description of Artificial Sequence: Synthetic oligonucleotide
uaucuuauauucugaaauc

SEQ ID NO: 1458966 - RNA, 19 nt, Artificial Sequence
  Description of Artificial Sequence: Synthetic oligonucleotide
aucacauaaaugaacaugu

SEQ ID NO: 1458967 - RNA, 19 nt, Artificial Sequence
  Description of Artificial Sequence: Synthetic oligonucleotide
aaugcaauuccugccauga

SEQ ID NO: 1458968 - RNA, 19 nt, Artificial Sequence
  Description of Artificial Sequence: Synthetic oligonucleotide
uaauuauggcaacucauau

SEQ ID NO: 1458969 - RNA, 19 nt, Artificial Sequence
  Description of Artificial Sequence: Synthetic oligonucleotide
aauuauggcaacucauauu

SEQ ID NO: 1458970 - RNA, 19 nt, Artificial Sequence
  Description of Artificial Sequence: Synthetic oligonucleotide
aggucaaucucaucguccg

SEQ ID NO: 1458971 - RNA, 19 nt, Artificial Sequence
  Description of Artificial Sequence: Synthetic oligonucleotide
ugcuguggcaaucaauggc

SEQ ID NO: 1458972 - RNA, 19 nt, Artificial Sequence
  Description of Artificial Sequence: Synthetic oligonucleotide
cucaguagcucuuggacag

SEQ ID NO: 1458973 - RNA, 19 nt, Artificial Sequence
  Description of Artificial Sequence: Synthetic oligonucleotide
gaaagccaaaugcaauucc

SEQ ID NO: 1458974 - RNA, 19 nt, Artificial Sequence
  Description of Artificial Sequence: Synthetic oligonucleotide
uccuauucaagagaagccc

SEQ ID NO: 1458975 - RNA, 19 nt, Artificial Sequence
  Description of Artificial Sequence: Synthetic oligonucleotide
uuauauucugaaaucuaua

SEQ ID NO: 1458976 - RNA, 19 nt, Artificial Sequence
  Description of Artificial Sequence: Synthetic oligonucleotide
ucuuauauucugaaaucua

SEQ ID NO: 1458977 - RNA, 19 nt, Artificial Sequence
  Description of Artificial Sequence: Synthetic oligonucleotide
agaggacacaccuggacag

SEQ ID NO: 1458978 - RNA, 19 nt, Artificial Sequence
  Description of Artificial Sequence: Synthetic oligonucleotide
ucauugauauucugggacu

SEQ ID NO: 1458979 - RNA, 19 nt, Artificial Sequence
  Description of Artificial Sequence: Synthetic oligonucleotide
gagaggaugauguggacuc

SEQ ID NO: 1458980 - RNA, 19 nt, Artificial Sequence
  Description of Artificial Sequence: Synthetic oligonucleotide
gcuggugaaagccaaaugc

SEQ ID NO: 1458981 - RNA, 19 nt, Artificial Sequence
  Description of Artificial Sequence: Synthetic oligonucleotide
augacaugagcucuggcca

SEQ ID NO: 1458982 - RNA, 19 nt, Artificial Sequence
  Description of Artificial Sequence: Synthetic oligonucleotide
accacugaguagccaaacc

SEQ ID NO: 1458983 - RNA, 19 nt, Artificial Sequence
  Description of Artificial Sequence: Synthetic oligonucleotide
uguaggaacuucacugcug

SEQ ID NO: 1458984 - RNA, 19 nt, Artificial Sequence
  Description of Artificial Sequence: Synthetic oligonucleotide
cuccuauucaagagaagcc

SEQ ID NO: 1458985 - RNA, 19 nt, Artificial Sequence
  Description of Artificial Sequence: Synthetic oligonucleotide
aacauguuucucagugggc

SEQ ID NO: 1458986 - RNA, 19 nt, Artificial Sequence
  Description of Artificial Sequence: Synthetic oligonucleotide
gagacagcaagaccauggg

SEQ ID NO: 1458987 - RNA, 19 nt, Artificial Sequence
  Description of Artificial Sequence: Synthetic oligonucleotide
guucggagagacucgaugc

SEQ ID NO: 1458988 - RNA, 19 nt, Artificial Sequence
  Description of Artificial Sequence: Synthetic oligonucleotide
ucucaguagcucuuggaca

SEQ ID NO: 1458989 - RNA, 19 nt, Artificial Sequence
  Description of Artificial Sequence: Synthetic oligonucleotide
augaucacauaaaugaaca

SEQ ID NO: 1458990 - RNA, 19 nt, Artificial Sequence
  Description of Artificial Sequence: Synthetic oligonucleotide
auucaagagaagcccuuuc

SEQ ID NO: 1458991 - RNA, 19 nt, Artificial Sequence
  Description of Artificial Sequence: Synthetic oligonucleotide
aucuuauauucugaaaucu

SEQ ID NO: 1458992 - RNA, 19 nt, Artificial Sequence
  Description of Artificial Sequence: Synthetic oligonucleotide
agaagcacaccucaccacu

SEQ ID NO: 1458993 - RNA, 19 nt, Artificial Sequence
  Description of Artificial Sequence: Synthetic oligonucleotide
aguucggagagacucgaug

SEQ ID NO: 1458994 - RNA, 19 nt, Artificial Sequence
  Description of Artificial Sequence: Synthetic oligonucleotide
ucugccucccaggauaagg

SEQ ID NO: 1458995 - RNA, 19 nt, Artificial Sequence
  Description of Artificial Sequence: Synthetic oligonucleotide
cucgccaucgggaacuucc

SEQ ID NO: 1458996 - RNA, 19 nt, Artificial Sequence
  Description of Artificial Sequence: Synthetic oligonucleotide
auccaguugguugaugugg

SEQ ID NO: 1458997 - RNA, 19 nt, Artificial Sequence
  Description of Artificial Sequence: Synthetic oligonucleotide
uauucugggacuccaggau

SEQ ID NO: 1458998 - RNA, 19 nt, Artificial Sequence
  Description of Artificial Sequence: Synthetic oligonucleotide
aacucauauuuauuacaau

SEQ ID NO: 1458999 - RNA, 19 nt, Artificial Sequence
  Description of Artificial Sequence: Synthetic oligonucleotide
ugccacucaguucggagag

SEQ ID NO: 1459000 - RNA, 19 nt, Artificial Sequence
  Description of Artificial Sequence: Synthetic oligonucleotide
auauucugggacuccagga

SEQ ID NO: 1459001 - RNA, 19 nt, Artificial Sequence
  Description of Artificial Sequence: Synthetic oligonucleotide
uugcaagugggcucugccg

SEQ ID NO: 1459002 - RNA, 19 nt, Artificial Sequence
  Description of Artificial Sequence: Synthetic oligonucleotide
cuucuuaagaaaugcucuc

SEQ ID NO: 1459003 - RNA, 19 nt, Artificial Sequence
  Description of Artificial Sequence: Synthetic oligonucleotide
caaggcaccguaaucucgc

SEQ ID NO: 1459004 - RNA, 19 nt, Artificial Sequence
  Description of Artificial Sequence: Synthetic oligonucleotide
aacugccuccuauucaaga

SEQ ID NO: 1459005 - RNA, 19 nt, Artificial Sequence
  Description of Artificial Sequence: Synthetic oligonucleotide
uggcaacucauauuuauua

SEQ ID NO: 1459006 - RNA, 19 nt, Artificial Sequence
  Description of Artificial Sequence: Synthetic oligonucleotide
aaggcaccguaaucucgcc

SEQ ID NO: 1459007 - RNA, 19 nt, Artificial Sequence
  Description of Artificial Sequence: Synthetic oligonucleotide
caaggaguugauuuccgac

SEQ ID NO: 1459008 - RNA, 19 nt, Artificial Sequence
  Description of Artificial Sequence: Synthetic oligonucleotide
aaucucgccaucgggaacu

SEQ ID NO: 1459009 - RNA, 19 nt, Artificial Sequence
  Description of Artificial Sequence: Synthetic oligonucleotide
agagaagcccuuucaagga

SEQ ID NO: 1459010 - RNA, 19 nt, Artificial Sequence
  Description of Artificial Sequence: Synthetic oligonucleotide
aacuuccggggcugcaugg

SEQ ID NO: 1459011 - RNA, 19 nt, Artificial Sequence
  Description of Artificial Sequence: Synthetic oligonucleotide
ugccaggagggaaucuucg

SEQ ID NO: 1459012 - RNA, 19 nt, Artificial Sequence
  Description of Artificial Sequence: Synthetic oligonucleotide
uccgacuugagcucauuga

SEQ ID NO: 1459013 - RNA, 19 nt, Artificial Sequence
  Description of Artificial Sequence: Synthetic oligonucleotide
cucguugcugacaggagag

SEQ ID NO: 1459014 - RNA, 19 nt, Artificial Sequence
  Description of Artificial Sequence: Synthetic oligonucleotide
uucggagagacucgaugcc

SEQ ID NO: 1459015 - RNA, 19 nt, Artificial Sequence
  Description of Artificial Sequence: Synthetic oligonucleotide
cuuguagagcuggugaaag

SEQ ID NO: 1459016 - RNA, 19 nt, Artificial Sequence
  Description of Artificial Sequence: Synthetic oligonucleotide
uguagcagugcccgacugc

SEQ ID NO: 1459017 - RNA, 19 nt, Artificial Sequence
  Description of Artificial Sequence: Synthetic oligonucleotide
agaugacaugagcucuggc

SEQ ID NO: 1459018 - RNA, 19 nt, Artificial Sequence
  Description of Artificial Sequence: Synthetic oligonucleotide
acauguuucucagugggca

SEQ ID NO: 1459019 - RNA, 19 nt, Artificial Sequence
  Description of Artificial Sequence: Synthetic oligonucleotide
cauggugucagguagucaa

SEQ ID NO: 1459020 - RNA, 19 nt, Artificial Sequence
  Description of Artificial Sequence: Synthetic oligonucleotide
caacucauauuuauuacaa

SEQ ID NO: 1459021 - RNA, 19 nt, Artificial Sequence
  Description of Artificial Sequence: Synthetic oligonucleotide
gauguggacucguugcuga

SEQ ID NO: 1459022 - RNA, 19 nt, Artificial Sequence
  Description of Artificial Sequence: Synthetic oligonucleotide
gguggcaucugucagccag

SEQ ID NO: 1459023 - RNA, 19 nt, Artificial Sequence
  Description of Artificial Sequence: Synthetic oligonucleotide
caccucaccacugaguagc

SEQ ID NO: 1459024 - RNA, 19 nt, Artificial Sequence
  Description of Artificial Sequence: Synthetic oligonucleotide
ucugucagccaggaccugg

SEQ ID NO: 1459025 - RNA, 19 nt, Artificial Sequence
  Description of Artificial Sequence: Synthetic oligonucleotide
acagcaagcgaggaugguc

SEQ ID NO: 1459026 - RNA, 19 nt, Artificial Sequence
  Description of Artificial Sequence: Synthetic oligonucleotide
agcucuuggacagaggcca

SEQ ID NO: 1459027 - RNA, 19 nt, Artificial Sequence
  Description of Artificial Sequence: Synthetic oligonucleotide
cucaguucggagagacucg

SEQ ID NO: 1459028 - RNA, 19 nt, Artificial Sequence
  Description of Artificial Sequence: Synthetic oligonucleotide
uucuuguagagcuggugaa

SEQ ID NO: 1459029 - RNA, 19 nt, Artificial Sequence
  Description of Artificial Sequence: Synthetic oligonucleotide
cuucuuguagagcugguga

SEQ ID NO: 1459030 - RNA, 19 nt, Artificial Sequence
  Description of Artificial Sequence: Synthetic oligonucleotide
uccaguugguugauguggu

SEQ ID NO: 1459031 - RNA, 19 nt, Artificial Sequence
  Description of Artificial Sequence: Synthetic oligonucleotide
gacaggacaccuguccagg

SEQ ID NO: 1459032 - RNA, 19 nt, Artificial Sequence
  Description of Artificial Sequence: Synthetic oligonucleotide
acugucugggccacgcugc

SEQ ID NO: 1459033 - RNA, 19 nt, Artificial Sequence
  Description of Artificial Sequence: Synthetic oligonucleotide
accguaaucucgccaucgg

SEQ ID NO: 1459034 - RNA, 19 nt, Artificial Sequence
  Description of Artificial Sequence: Synthetic oligonucleotide
caggagaugacaugagcuc

SEQ ID NO: 1459035 - RNA, 19 nt, Artificial Sequence
  Description of Artificial Sequence: Synthetic oligonucleotide
gaugccauccucuccagcu

SEQ ID NO: 1459036 - RNA, 19 nt, Artificial Sequence
  Description of Artificial Sequence: Synthetic oligonucleotide
acucguugcugacaggaga

SEQ ID NO: 1459037 - RNA, 19 nt, Artificial Sequence
  Description of Artificial Sequence: Synthetic oligonucleotide
gauccaguugguugaugug

SEQ ID NO: 1459038 - RNA, 19 nt, Artificial Sequence
  Description of Artificial Sequence: Synthetic oligonucleotide
auggucuugugugguauac

SEQ ID NO: 1459039 - RNA, 19 nt, Artificial Sequence
  Description of Artificial Sequence: Synthetic oligonucleotide
ugucucaguagcucuugga

SEQ ID NO: 1459040 - RNA, 19 nt, Artificial Sequence
  Description of Artificial Sequence: Synthetic oligonucleotide
gugguauacaggacaacag

SEQ ID NO: 1459041 - RNA, 19 nt, Artificial Sequence
  Description of Artificial Sequence: Synthetic oligonucleotide
guugcaagugggcucugcc

SEQ ID NO: 1459042 - RNA, 19 nt, Artificial Sequence
  Description of Artificial Sequence: Synthetic oligonucleotide
gagggagaagcacaccuca

SEQ ID NO: 1459043 - RNA, 19 nt, Artificial Sequence
  Description of Artificial Sequence: Synthetic oligonucleotide
uagagcuggugaaagccaa

SEQ ID NO: 1459044 - RNA, 19 nt, Artificial Sequence
  Description of Artificial Sequence: Synthetic oligonucleotide
agccaaaccaugacacagc

SEQ ID NO: 1459045 - RNA, 19 nt, Artificial Sequence
  Description of Artificial Sequence: Synthetic oligonucleotide
gaggcaggagaugacauga

SEQ ID NO: 1459046 - RNA, 19 nt, Artificial Sequence
  Description of Artificial Sequence: Synthetic oligonucleotide
ucaauggcucucgaggcac

SEQ ID NO: 1459047 - RNA, 19 nt, Artificial Sequence
  Description of Artificial Sequence: Synthetic oligonucleotide
ucuucggggcugaugggga

SEQ ID NO: 1459048 - RNA, 19 nt, Artificial Sequence
  Description of Artificial Sequence: Synthetic oligonucleotide
accaugacacagcaagcga

SEQ ID NO: 1459049 - RNA, 19 nt, Artificial Sequence
  Description of Artificial Sequence: Synthetic oligonucleotide
acuaaggugacaggaggca

SEQ ID NO: 1459050 - RNA, 19 nt, Artificial Sequence
  Description of Artificial Sequence: Synthetic oligonucleotide
cugaguagccaaaccauga

SEQ ID NO: 1459051 - RNA, 19 nt, Artificial Sequence
  Description of Artificial Sequence: Synthetic oligonucleotide
auguuucucagugggcagg

SEQ ID NO: 1459052 - RNA, 19 nt, Artificial Sequence
  Description of Artificial Sequence: Synthetic oligonucleotide
ucuguagcagugcccgacu

SEQ ID NO: 1459053 - RNA, 19 nt, Artificial Sequence
  Description of Artificial Sequence: Synthetic oligonucleotide
ucguccgucagcccuuucu

SEQ ID NO: 1459054 - RNA, 19 nt, Artificial Sequence
  Description of Artificial Sequence: Synthetic oligonucleotide
ccuccuauucaagagaagc

SEQ ID NO: 1459055 - RNA, 19 nt, Artificial Sequence
  Description of Artificial Sequence: Synthetic oligonucleotide
cuugugugguauacaggac

SEQ ID NO: 1459056 - RNA, 19 nt, Artificial Sequence
  Description of Artificial Sequence: Synthetic oligonucleotide
ucacauaaaugaacauguu

SEQ ID NO: 1459057 - RNA, 19 nt, Artificial Sequence
  Description of Artificial Sequence: Synthetic oligonucleotide
ucgccaucgggaacuuccg

SEQ ID NO: 1459058 - RNA, 19 nt, Artificial Sequence
  Description of Artificial Sequence: Synthetic oligonucleotide
gcaacucauauuuauuaca

SEQ ID NO: 1459059 - RNA, 19 nt, Artificial Sequence
  Description of Artificial Sequence: Synthetic oligonucleotide
agcuggugaaagccaaaug

SEQ ID NO: 1459060 - RNA, 19 nt, Artificial Sequence
  Description of Artificial Sequence: Synthetic oligonucleotide
accuggacaggacaccugu

SEQ ID NO: 1459061 - RNA, 19 nt, Artificial Sequence
  Description of Artificial Sequence: Synthetic oligonucleotide
gucuguaccugagucacug

SEQ ID NO: 1459062 - RNA, 19 nt, Artificial Sequence
  Description of Artificial Sequence: Synthetic oligonucleotide
gcgaggauggucuugugug

SEQ ID NO: 1459063 - RNA, 19 nt, Artificial Sequence
  Description of Artificial Sequence: Synthetic oligonucleotide
gcuguggugguucacggcc

SEQ ID NO: 1459064 - RNA, 19 nt, Artificial Sequence
  Description of Artificial Sequence: Synthetic oligonucleotide
uccucagaggacacaccug

SEQ ID NO: 1459065 - RNA, 19 nt, Artificial Sequence
  Description of Artificial Sequence: Synthetic oligonucleotide
cuaaggugacaggaggcag

SEQ ID NO: 1459066 - RNA, 19 nt, Artificial Sequence
  Description of Artificial Sequence: Synthetic oligonucleotide
gaaagccaggucaaucuca

SEQ ID NO: 1459067 - RNA, 19 nt, Artificial Sequence
  Description of Artificial Sequence: Synthetic oligonucleotide
ucuuggaccuucugcugcu

SEQ ID NO: 1459068 - RNA, 19 nt, Artificial Sequence
  Description of Artificial Sequence: Synthetic oligonucleotide
gaguugauuuccgacuuga

SEQ ID NO: 1459069 - RNA, 19 nt, Artificial Sequence
  Description of Artificial Sequence: Synthetic oligonucleotide
acugaguagccaaaccaug

SEQ ID NO: 1459070 - RNA, 19 nt, Artificial Sequence
  Description of Artificial Sequence: Synthetic oligonucleotide
aggagaugacaugagcucu

SEQ ID NO: 1459071 - RNA, 19 nt, Artificial Sequence
  Description of Artificial Sequence: Synthetic oligonucleotide
agcgaggauggucuugugu

SEQ ID NO: 1459072 - RNA, 19 nt, Artificial Sequence
  Description of Artificial Sequence: Synthetic oligonucleotide
ugacaggagagaugucgcu

SEQ ID NO: 1459073 - RNA, 19 nt, Artificial Sequence
  Description of Artificial Sequence: Synthetic oligonucleotide
cuggcaggcccacagauga

SEQ ID NO: 1459074 - RNA, 19 nt, Artificial Sequence
  Description of Artificial Sequence: Synthetic oligonucleotide
cuguaccugagucacuguc

SEQ ID NO: 1459075 - RNA, 19 nt, Artificial Sequence
  Description of Artificial Sequence: Synthetic oligonucleotide
uaccugagucacugucugg

SEQ ID NO: 1459076 - RNA, 19 nt, Artificial Sequence
  Description of Artificial Sequence: Synthetic oligonucleotide
uugacguccaccaccccuu

SEQ ID NO: 1459077 - RNA, 19 nt, Artificial Sequence
  Description of Artificial Sequence: Synthetic oligonucleotide
uggcucucgaggcaccaca

SEQ ID NO: 1459078 - RNA, 19 nt, Artificial Sequence
  Description of Artificial Sequence: Synthetic oligonucleotide
ugauguggacucguugcug

SEQ ID NO: 1459079 - RNA, 19 nt, Artificial Sequence
  Description of Artificial Sequence: Synthetic oligonucleotide
uguggugguucacggccgc

SEQ ID NO: 1459080 - RNA, 19 nt, Artificial Sequence
  Description of Artificial Sequence: Synthetic oligonucleotide
ggacccgagaauucuguag

SEQ ID NO: 1459081 - RNA, 19 nt, Artificial Sequence
  Description of Artificial Sequence: Synthetic oligonucleotide
aucuauacaugaucacaua

SEQ ID NO: 1459082 - RNA, 19 nt, Artificial Sequence
  Description of Artificial Sequence: Synthetic oligonucleotide
uugguugaugugguggccu

SEQ ID NO: 1459083 - RNA, 19 nt, Artificial Sequence
  Description of Artificial Sequence: Synthetic oligonucleotide
uucuguagcagugcccgac

SEQ ID NO: 1459084 - RNA, 19 nt, Artificial Sequence
  Description of Artificial Sequence: Synthetic oligonucleotide
cauugauauucugggacuc

SEQ ID NO: 1459085 - RNA, 19 nt, Artificial Sequence
  Description of Artificial Sequence: Synthetic oligonucleotide
guaaucucgccaucgggaa

SEQ ID NO: 1459086 - RNA, 19 nt, Artificial Sequence
  Description of Artificial Sequence: Synthetic oligonucleotide
gaacuuccggggcugcaug

SEQ ID NO: 1459087 - RNA, 19 nt, Artificial Sequence
  Description of Artificial Sequence: Synthetic oligonucleotide
gucuugugugguauacagg

SEQ ID NO: 1459088 - RNA, 19 nt, Artificial Sequence
  Description of Artificial Sequence: Synthetic oligonucleotide
gccaucgggaacuuccggg

SEQ ID NO: 1459089 - RNA, 19 nt, Artificial Sequence
  Description of Artificial Sequence: Synthetic oligonucleotide
uggccaugcauggugucag

SEQ ID NO: 1459090 - RNA, 19 nt, Artificial Sequence
  Description of Artificial Sequence: Synthetic oligonucleotide
cuguggugguucacggccg

SEQ ID NO: 1459091 - RNA, 19 nt, Artificial Sequence
  Description of Artificial Sequence: Synthetic oligonucleotide
ucgaggcaccacauuuuca

SEQ ID NO: 1459092 - RNA, 19 nt, Artificial Sequence
  Description of Artificial Sequence: Synthetic oligonucleotide
gcaaucaauggcucucgag

SEQ ID NO: 1459093 - RNA, 19 nt, Artificial Sequence
  Description of Artificial Sequence: Synthetic oligonucleotide
ugacacagcaagcgaggau

SEQ ID NO: 1459094 - RNA, 19 nt, Artificial Sequence
  Description of Artificial Sequence: Synthetic oligonucleotide
ggagaagcacaccucacca

SEQ ID NO: 1459095 - RNA, 19 nt, Artificial Sequence
  Description of Artificial Sequence: Synthetic oligonucleotide
uaggagacagcaagaccau

SEQ ID NO: 1459096 - RNA, 19 nt, Artificial Sequence
  Description of Artificial Sequence: Synthetic oligonucleotide
uggugguucacggccgcgg

SEQ ID NO: 1459097 - RNA, 19 nt, Artificial Sequence
  Description of Artificial Sequence: Synthetic oligonucleotide
ucucgaggcaccacauuuu

SEQ ID NO: 1459098 - RNA, 19 nt, Artificial Sequence
  Description of Artificial Sequence: Synthetic oligonucleotide
caccguaaucucgccaucg

SEQ ID NO: 1459099 - RNA, 19 nt, Artificial Sequence
  Description of Artificial Sequence: Synthetic oligonucleotide
gaagcacaccucaccacug

SEQ ID NO: 1459100 - RNA, 19 nt, Artificial Sequence
  Description of Artificial Sequence: Synthetic oligonucleotide
ucggagagacucgaugcca

SEQ ID NO: 1459101 - RNA, 19 nt, Artificial Sequence
  Description of Artificial Sequence: Synthetic oligonucleotide
ucugccggacccgagaauu

SEQ ID NO: 1459102 - RNA, 19 nt, Artificial Sequence
  Description of Artificial Sequence: Synthetic oligonucleotide
uauucaagagaagcccuuu

SEQ ID NO: 1459103 - RNA, 19 nt, Artificial Sequence
  Description of Artificial Sequence: Synthetic oligonucleotide
uggugucagguagucaaga

SEQ ID NO: 1459104 - RNA, 19 nt, Artificial Sequence
  Description of Artificial Sequence: Synthetic oligonucleotide
ggaacugccuccuauucaa

SEQ ID NO: 1459105 - RNA, 19 nt, Artificial Sequence
  Description of Artificial Sequence: Synthetic oligonucleotide
gagggcgggaacugccucc

SEQ ID NO: 1459106 - RNA, 19 nt, Artificial Sequence
  Description of Artificial Sequence: Synthetic oligonucleotide
ugguucacggccgcggggc

SEQ ID NO: 1459107 - RNA, 19 nt, Artificial Sequence
  Description of Artificial Sequence: Synthetic oligonucleotide
gcaauuccugccaugauga

SEQ ID NO: 1459108 - RNA, 19 nt, Artificial Sequence
  Description of Artificial Sequence: Synthetic oligonucleotide
cucgaggcaccacauuuuc

SEQ ID NO: 1459109 - RNA, 19 nt, Artificial Sequence
  Description of Artificial Sequence: Synthetic oligonucleotide
uggccguggagcccucggg

SEQ ID NO: 1459110 - RNA, 19 nt, Artificial Sequence
  Description of Artificial Sequence: Synthetic oligonucleotide
gucaagauccucagaggac

SEQ ID NO: 1459111 - RNA, 19 nt, Artificial Sequence
  Description of Artificial Sequence: Synthetic oligonucleotide
agggcgacuucacugggau

SEQ ID NO: 1459112 - RNA, 19 nt, Artificial Sequence
  Description of Artificial Sequence: Synthetic oligonucleotide
ggcguagccaggcccaagg

SEQ ID NO: 1459113 - RNA, 19 nt, Artificial Sequence
  Description of Artificial Sequence: Synthetic oligonucleotide
acggccgcggggcuggagg

SEQ ID NO: 1459114 - RNA, 19 nt, Artificial Sequence
  Description of Artificial Sequence: Synthetic oligonucleotide
acaccucaccacugaguag

SEQ ID NO: 1459115 - RNA, 19 nt, Artificial Sequence
  Description of Artificial Sequence: Synthetic oligonucleotide
ugacaugagcucuggccau

SEQ ID NO: 1459116 - RNA, 19 nt, Artificial Sequence
  Description of Artificial Sequence: Synthetic oligonucleotide
gauuuccgacuugagcuca

SEQ ID NO: 1459117 - RNA, 19 nt, Artificial Sequence
  Description of Artificial Sequence: Synthetic oligonucleotide
guagccaaaccaugacaca

SEQ ID NO: 1459118 - RNA, 19 nt, Artificial Sequence
  Description of Artificial Sequence: Synthetic oligonucleotide
ugcuguggugguucacggc

SEQ ID NO: 1459119 - RNA, 19 nt, Artificial Sequence
  Description of Artificial Sequence: Synthetic oligonucleotide
uucacggccgcggggcugg

SEQ ID NO: 1459120 - RNA, 19 nt, Artificial Sequence
  Description of Artificial Sequence: Synthetic oligonucleotide
acacagcaagcgaggaugg

SEQ ID NO: 1459121 - RNA, 19 nt, Artificial Sequence
  Description of Artificial Sequence: Synthetic oligonucleotide
aauggcucucgaggcacca

SEQ ID NO: 1459122 - RNA, 19 nt, Artificial Sequence
  Description of Artificial Sequence: Synthetic oligonucleotide
cacuggcguagccaggccc

SEQ ID NO: 1459123 - RNA, 19 nt, Artificial Sequence
  Description of Artificial Sequence: Synthetic oligonucleotide
ccaggagggaaucuucggg

SEQ ID NO: 1459124 - RNA, 19 nt, Artificial Sequence
  Description of Artificial Sequence: Synthetic oligonucleotide
uguggacucguugcugaca

SEQ ID NO: 1459125 - RNA, 19 nt, Artificial Sequence
  Description of Artificial Sequence: Synthetic oligonucleotide
auaaggggcagcagguacu

SEQ ID NO: 1459126 - RNA, 19 nt, Artificial Sequence
  Description of Artificial Sequence: Synthetic oligonucleotide
aggccagcguugucuguac

SEQ ID NO: 1459127 - RNA, 19 nt, Artificial Sequence
  Description of Artificial Sequence: Synthetic oligonucleotide
ugcauggcugugcgaugag

SEQ ID NO: 1459128 - RNA, 19 nt, Artificial Sequence
  Description of Artificial Sequence: Synthetic oligonucleotide
gugcccgacugcuggaaag

SEQ ID NO: 1459129 - RNA, 19 nt, Artificial Sequence
  Description of Artificial Sequence: Synthetic oligonucleotide
cuggaaagccaggucaauc

SEQ ID NO: 1459130 - RNA, 19 nt, Artificial Sequence
  Description of Artificial Sequence: Synthetic oligonucleotide
gcgagggcgacuucacugg

SEQ ID NO: 1459131 - RNA, 19 nt, Artificial Sequence
  Description of Artificial Sequence: Synthetic oligonucleotide
ucuguaccugagucacugu

SEQ ID NO: 1459132 - RNA, 19 nt, Artificial Sequence
  Description of Artificial Sequence: Synthetic oligonucleotide
gagacucgaugccauccuc

SEQ ID NO: 1459133 - RNA, 19 nt, Artificial Sequence
  Description of Artificial Sequence: Synthetic oligonucleotide
aaaugcucuccugguugca

SEQ ID NO: 1459134 - RNA, 19 nt, Artificial Sequence
  Description of Artificial Sequence: Synthetic oligonucleotide
cuccugguugcaagugggc

SEQ ID NO: 1459135 - RNA, 19 nt, Artificial Sequence
  Description of Artificial Sequence: Synthetic oligonucleotide
gauccucagaggacacacc

SEQ ID NO: 1459136 - RNA, 19 nt, Artificial Sequence
  Description of Artificial Sequence: Synthetic oligonucleotide
ugauggccaaggcaccgua

SEQ ID NO: 1459137 - RNA, 19 nt, Artificial Sequence
  Description of Artificial Sequence: Synthetic oligonucleotide
gacucguugcugacaggag

SEQ ID NO: 1459138 - RNA, 19 nt, Artificial Sequence
  Description of Artificial Sequence: Synthetic oligonucleotide
ggacaggacaccuguccag

SEQ ID NO: 1459139 - RNA, 19 nt, Artificial Sequence
  Description of Artificial Sequence: Synthetic oligonucleotide
acccgagaauucuguagga

SEQ ID NO: 1459140 - RNA, 19 nt, Artificial Sequence
  Description of Artificial Sequence: Synthetic oligonucleotide
ccgacugcuggaaagccag

SEQ ID NO: 1459141 - RNA, 19 nt, Artificial Sequence
  Description of Artificial Sequence: Synthetic oligonucleotide
cucaccuggcccuugacgu

SEQ ID NO: 1459142 - RNA, 19 nt, Artificial Sequence
  Description of Artificial Sequence: Synthetic oligonucleotide
ugcauggugucagguaguc

SEQ ID NO: 1459143 - RNA, 19 nt, Artificial Sequence
  Description of Artificial Sequence: Synthetic oligonucleotide
gucacugucugggccacgc

SEQ ID NO: 1459144 - RNA, 19 nt, Artificial Sequence
  Description of Artificial Sequence: Synthetic oligonucleotide
uccuucguccucccucuuc

SEQ ID NO: 1459145 - RNA, 19 nt, Artificial Sequence
  Description of Artificial Sequence: Synthetic oligonucleotide
cugcacuaaggugacagga

SEQ ID NO: 1459146 - RNA, 19 nt, Artificial Sequence
  Description of Artificial Sequence: Synthetic oligonucleotide
guugguugaugugguggcc

SEQ ID NO: 1459147 - RNA, 19 nt, Artificial Sequence
  Description of Artificial Sequence: Synthetic oligonucleotide
ccaaggcaccguaaucucg

SEQ ID NO: 1459148 - RNA, 19 nt, Artificial Sequence
  Description of Artificial Sequence: Synthetic oligonucleotide
ugucuguaccugagucacu

SEQ ID NO: 1459149 - RNA, 19 nt, Artificial Sequence
  Description of Artificial Sequence: Synthetic oligonucleotide
cuguggcaaucaauggcuc

SEQ ID NO: 1459150 - RNA, 19 nt, Artificial Sequence
  Description of Artificial Sequence: Synthetic oligonucleotide
ccaaaugcaauuccugcca

SEQ ID NO: 1459151 - RNA, 19 nt, Artificial Sequence
  Description of Artificial Sequence: Synthetic oligonucleotide
aagcgaggauggucuugug

SEQ ID NO: 1459152 - RNA, 19 nt, Artificial Sequence
  Description of Artificial Sequence: Synthetic oligonucleotide
cgaggcaccacauuuucac

SEQ ID NO: 1459153 - RNA, 19 nt, Artificial Sequence
  Description of Artificial Sequence: Synthetic oligonucleotide
uccuccuccuccuccuccu

SEQ ID NO: 1459154 - RNA, 19 nt, Artificial Sequence
  Description of Artificial Sequence: Synthetic oligonucleotide
gaacugccuccuauucaag

SEQ ID NO: 1459155 - RNA, 19 nt, Artificial Sequence
  Description of Artificial Sequence: Synthetic oligonucleotide
cauggcugugcgaugaggu

SEQ ID NO: 1459156 - RNA, 19 nt, Artificial Sequence
  Description of Artificial Sequence: Synthetic oligonucleotide
ucaucguccgucagcccuu

SEQ ID NO: 1459157 - RNA, 19 nt, Artificial Sequence
  Description of Artificial Sequence: Synthetic oligonucleotide
gcucuucuguagcagugcc

SEQ ID NO: 1459158 - RNA, 19 nt, Artificial Sequence
  Description of Artificial Sequence: Synthetic oligonucleotide
acaccuggacaggacaccu

SEQ ID NO: 1459159 - RNA, 19 nt, Artificial Sequence
  Description of Artificial Sequence: Synthetic oligonucleotide
ggugguucacggccgcggg

SEQ ID NO: 1459160 - RNA, 19 nt, Artificial Sequence
  Description of Artificial Sequence: Synthetic oligonucleotide
cuucggggcugauggggag

SEQ ID NO: 1459161 - RNA, 19 nt, Artificial Sequence
  Description of Artificial Sequence: Synthetic oligonucleotide
agacucgaugccauccucu

SEQ ID NO: 1459162 - RNA, 19 nt, Artificial Sequence
  Description of Artificial Sequence: Synthetic oligonucleotide
gugguucacggccgcgggg

SEQ ID NO: 1459163 - RNA, 19 nt, Artificial Sequence
  Description of Artificial Sequence: Synthetic oligonucleotide
gagaugucgcugcugcugu

SEQ ID NO: 1459164 - RNA, 19 nt, Artificial Sequence
  Description of Artificial Sequence: Synthetic oligonucleotide
ggaaagccaggucaaucuc

SEQ ID NO: 1459165 - RNA, 19 nt, Artificial Sequence
  Description of Artificial Sequence: Synthetic oligonucleotide
auguacagucauaucuuau

SEQ ID NO: 1459166 - RNA, 19 nt, Artificial Sequence
  Description of Artificial Sequence: Synthetic oligonucleotide
gccaggagggaaucuucgg

SEQ ID NO: 1459167 - RNA, 19 nt, Artificial Sequence
  Description of Artificial Sequence: Synthetic oligonucleotide
cuguagcagugcccgacug

SEQ ID NO: 1459168 - RNA, 19 nt, Artificial Sequence
  Description of Artificial Sequence: Synthetic oligonucleotide
ugggccacgcugccacuca

SEQ ID NO: 1459169 - RNA, 19 nt, Artificial Sequence
  Description of Artificial Sequence: Synthetic oligonucleotide
ggauccaguugguugaugu

SEQ ID NO: 1459170 - RNA, 19 nt, Artificial Sequence
  Description of Artificial Sequence: Synthetic oligonucleotide
gauggucuugugugguaua

SEQ ID NO: 1459171 - RNA, 19 nt, Artificial Sequence
  Description of Artificial Sequence: Synthetic oligonucleotide
ucgggaacuuccggggcug

SEQ ID NO: 1459172 - RNA, 19 nt, Artificial Sequence
  Description of Artificial Sequence: Synthetic oligonucleotide
caccuggcccuugacgucc

SEQ ID NO: 1459173 - RNA, 19 nt, Artificial Sequence
  Description of Artificial Sequence: Synthetic oligonucleotide
ggagaugacaugagcucug

SEQ ID NO: 1459174 - RNA, 19 nt, Artificial Sequence
  Description of Artificial Sequence: Synthetic oligonucleotide
cccuugacguccaccaccc

SEQ ID NO: 1459175 - RNA, 19 nt, Artificial Sequence
  Description of Artificial Sequence: Synthetic oligonucleotide
ggacucguugcugacagga

SEQ ID NO: 1459176 - RNA, 19 nt, Artificial Sequence
  Description of Artificial Sequence: Synthetic oligonucleotide
cuccuccuccuccuccucc

SEQ ID NO: 1459177 - RNA, 19 nt, Artificial Sequence
  Description of Artificial Sequence: Synthetic oligonucleotide
guggccguggagcccucgg

SEQ ID NO: 1459178 - RNA, 19 nt, Artificial Sequence
  Description of Artificial Sequence: Synthetic oligonucleotide
aggcaccguaaucucgcca

SEQ ID NO: 1459179 - RNA, 19 nt, Artificial Sequence
  Description of Artificial Sequence: Synthetic oligonucleotide
cagucauaucuuauauucu

SEQ ID NO: 1459180 - RNA, 19 nt, Artificial Sequence
  Description of Artificial Sequence: Synthetic oligonucleotide
cagcaagcgaggauggucu

SEQ ID NO: 1459181 - RNA, 19 nt, Artificial Sequence
  Description of Artificial Sequence: Synthetic oligonucleotide
acuggcguagccaggccca

SEQ ID NO: 1459182 - RNA, 19 nt, Artificial Sequence
  Description of Artificial Sequence: Synthetic oligonucleotide
ucacugucugggccacgcu

SEQ ID NO: 1459183 - RNA, 19 nt, Artificial Sequence
  Description of Artificial Sequence: Synthetic oligonucleotide
ugccggacccgagaauucu

SEQ ID NO: 1459184 - RNA, 19 nt, Artificial Sequence
  Description of Artificial Sequence: Synthetic oligonucleotide
ugguugaugugguggccuu

SEQ ID NO: 1459185 - RNA, 19 nt, Artificial Sequence
  Description of Artificial Sequence: Synthetic oligonucleotide
cccugcacuaaggugacag

SEQ ID NO: 1459186 - RNA, 19 nt, Artificial Sequence
  Description of Artificial Sequence: Synthetic oligonucleotide
uaaggggcagcagguacuu

SEQ ID NO: 1459187 - RNA, 19 nt, Artificial Sequence
  Description of Artificial Sequence: Synthetic oligonucleotide
guccuccuccuccuccucc

SEQ ID NO: 1459188 - RNA, 19 nt, Artificial Sequence
  Description of Artificial Sequence: Synthetic oligonucleotide
ccugcacuaaggugacagg

SEQ ID NO: 1459189 - RNA, 19 nt, Artificial Sequence
  Description of Artificial Sequence: Synthetic oligonucleotide
ucccucaccuggcccuuga

SEQ ID NO: 1459190 - RNA, 19 nt, Artificial Sequence
  Description of Artificial Sequence: Synthetic oligonucleotide
cacugaguagccaaaccau

SEQ ID NO: 1459191 - RNA, 19 nt, Artificial Sequence
  Description of Artificial Sequence: Synthetic oligonucleotide
gcucauugauauucuggga

SEQ ID NO: 1459192 - RNA, 19 nt, Artificial Sequence
  Description of Artificial Sequence: Synthetic oligonucleotide
auggcucucgaggcaccac

SEQ ID NO: 1459193 - RNA, 19 nt, Artificial Sequence
  Description of Artificial Sequence: Synthetic oligonucleotide
cugucugggccacgcugcc

SEQ ID NO: 1459194 - RNA, 19 nt, Artificial Sequence
  Description of Artificial Sequence: Synthetic oligonucleotide
gguagucaagauccucaga

SEQ ID NO: 1459195 - RNA, 19 nt, Artificial Sequence
  Description of Artificial Sequence: Synthetic oligonucleotide
ccugguugcaagugggcuc

SEQ ID NO: 1459196 - RNA, 19 nt, Artificial Sequence
  Description of Artificial Sequence: Synthetic oligonucleotide
ggcgacuucacugggaucu

SEQ ID NO: 1459197 - RNA, 19 nt, Artificial Sequence
  Description of Artificial Sequence: Synthetic oligonucleotide
cguaaucucgccaucggga

SEQ ID NO: 1459198 - RNA, 19 nt, Artificial Sequence
  Description of Artificial Sequence: Synthetic oligonucleotide
ggaaucuucggggcugaug

SEQ ID NO: 1459199 - RNA, 19 nt, Artificial Sequence
  Description of Artificial Sequence: Synthetic oligonucleotide
ggaggcucuucuguagcag

SEQ ID NO: 1459200 - RNA, 19 nt, Artificial Sequence
  Description of Artificial Sequence: Synthetic oligonucleotide
ggcccacagaugaagagca

SEQ ID NO: 1459201 - RNA, 19 nt, Artificial Sequence
  Description of Artificial Sequence: Synthetic oligonucleotide
gaucugccaggagggaauc

SEQ ID NO: 1459202 - RNA, 19 nt, Artificial Sequence
  Description of Artificial Sequence: Synthetic oligonucleotide
agugcccgacugcuggaaa

SEQ ID NO: 1459203 - RNA, 19 nt, Artificial Sequence
  Description of Artificial Sequence: Synthetic oligonucleotide
guagcagugcccgacugcu

SEQ ID NO: 1459204 - RNA, 19 nt, Artificial Sequence
  Description of Artificial Sequence: Synthetic oligonucleotide
cuuccuguccucucugccu

SEQ ID NO: 1459205 - RNA, 19 nt, Artificial Sequence
  Description of Artificial Sequence: Synthetic oligonucleotide
gauggggagggcgggaacu

SEQ ID NO: 1459206 - RNA, 19 nt, Artificial Sequence
  Description of Artificial Sequence: Synthetic oligonucleotide
ugacguccaccaccccuuc

SEQ ID NO: 1459207 - RNA, 19 nt, Artificial Sequence
  Description of Artificial Sequence: Synthetic oligonucleotide
gcaggagaugacaugagcu

SEQ ID NO: 1459208 - RNA, 19 nt, Artificial Sequence
  Description of Artificial Sequence: Synthetic oligonucleotide
aggcaggagaugacaugag

SEQ ID NO: 1459209 - RNA, 19 nt, Artificial Sequence
  Description of Artificial Sequence: Synthetic oligonucleotide
guccgucagcccuuucuuc

SEQ ID NO: 1459210 - RNA, 19 nt, Artificial Sequence
  Description of Artificial Sequence: Synthetic oligonucleotide
aggugggguggcaucuguc

SEQ ID NO: 1459211 - RNA, 19 nt, Artificial Sequence
  Description of Artificial Sequence: Synthetic oligonucleotide
gcuguggcaaucaauggcu

SEQ ID NO: 1459212 - RNA, 19 nt, Artificial Sequence
  Description of Artificial Sequence: Synthetic oligonucleotide
ggaccugguuguagggagg

SEQ ID NO: 1459213 - RNA, 19 nt, Artificial Sequence
  Description of Artificial Sequence: Synthetic oligonucleotide
cuguaggaacuucacugcu

SEQ ID NO: 1459214 - RNA, 19 nt, Artificial Sequence
  Description of Artificial Sequence: Synthetic oligonucleotide
cugcauggcugugcgauga

SEQ ID NO: 1459215 - RNA, 19 nt, Artificial Sequence
  Description of Artificial Sequence: Synthetic oligonucleotide
cugccggacccgagaauuc

SEQ ID NO: 1459216 - RNA, 19 nt, Artificial Sequence
  Description of Artificial Sequence: Synthetic oligonucleotide
ggcucuccuucccaggaga

SEQ ID NO: 1459217 - RNA, 19 nt, Artificial Sequence
  Description of Artificial Sequence: Synthetic oligonucleotide
gaggauggucuuguguggu

SEQ ID NO: 1459218 - RNA, 19 nt, Artificial Sequence
  Description of Artificial Sequence: Synthetic oligonucleotide
gaggaugauguggacucgu

SEQ ID NO: 1459219 - RNA, 19 nt, Artificial Sequence
  Description of Artificial Sequence: Synthetic oligonucleotide
caagugggcucugccggac

SEQ ID NO: 1459220 - RNA, 19 nt, Artificial Sequence
  Description of Artificial Sequence: Synthetic oligonucleotide
cagcguugucuguaccuga

SEQ ID NO: 1459221 - RNA, 19 nt, Artificial Sequence
  Description of Artificial Sequence: Synthetic oligonucleotide
augcauggugucagguagu

SEQ ID NO: 1459222 - RNA, 19 nt, Artificial Sequence
  Description of Artificial Sequence: Synthetic oligonucleotide
ugggcucugccggacccga

SEQ ID NO: 1459223 - RNA, 19 nt, Artificial Sequence
  Description of Artificial Sequence: Synthetic oligonucleotide
aggauccaguugguugaug

SEQ ID NO: 1459224 - RNA, 19 nt, Artificial Sequence
  Description of Artificial Sequence: Synthetic oligonucleotide
ccacucaguucggagagac

SEQ ID NO: 1459225 - RNA, 19 nt, Artificial Sequence
  Description of Artificial Sequence: Synthetic oligonucleotide
gauggccaaggcaccguaa

SEQ ID NO: 1459226 - RNA, 19 nt, Artificial Sequence
  Description of Artificial Sequence: Synthetic oligonucleotide
ucgcaccuccaucccucac

SEQ ID NO: 1459227 - RNA, 19 nt, Artificial Sequence
  Description of Artificial Sequence: Synthetic oligonucleotide
cuccuccuccuccuccuuc

SEQ ID NO: 1459228 - RNA, 19 nt, Artificial Sequence
  Description of Artificial Sequence: Synthetic oligonucleotide
agcaagcgaggauggucuu

SEQ ID NO: 1459229 - RNA, 19 nt, Artificial Sequence
  Description of Artificial Sequence: Synthetic oligonucleotide
ggugguagguggccgugga

SEQ ID NO: 1459230 - RNA, 19 nt, Artificial Sequence
  Description of Artificial Sequence: Synthetic oligonucleotide
ccaagccagggcacaguag

SEQ ID NO: 1459231 - RNA, 19 nt, Artificial Sequence
  Description of Artificial Sequence: Synthetic oligonucleotide
guggugguucacggccgcg

SEQ ID NO: 1459232 - RNA, 19 nt, Artificial Sequence
  Description of Artificial Sequence: Synthetic oligonucleotide
cuuggaccuucugcugcug

SEQ ID NO: 1459233 - RNA, 19 nt, Artificial Sequence
  Description of Artificial Sequence: Synthetic oligonucleotide
caagcgaggauggucuugu

SEQ ID NO: 1459234 - RNA, 19 nt, Artificial Sequence
  Description of Artificial Sequence: Synthetic oligonucleotide
ccuauucaagagaagcccu

SEQ ID NO: 1459235 - RNA, 19 nt, Artificial Sequence
  Description of Artificial Sequence: Synthetic oligonucleotide
ggcaccguaaucucgccau

SEQ ID NO: 1459236 - RNA, 19 nt, Artificial Sequence
  Description of Artificial Sequence: Synthetic oligonucleotide
ggagagacucgaugccauc

SEQ ID NO: 1459237 - RNA, 19 nt, Artificial Sequence
  Description of Artificial Sequence: Synthetic oligonucleotide
aucguccgucagcccuuuc

SEQ ID NO: 1459238 - RNA, 19 nt, Artificial Sequence
  Description of Artificial Sequence: Synthetic oligonucleotide
gagggcgacuucacuggga

SEQ ID NO: 1459239 - RNA, 19 nt, Artificial Sequence
  Description of Artificial Sequence: Synthetic oligonucleotide
caaaugcaauuccugccau

SEQ ID NO: 1459240 - RNA, 19 nt, Artificial Sequence
  Description of Artificial Sequence: Synthetic oligonucleotide
ggagggagaagcacaccuc

SEQ ID NO: 1459241 - RNA, 19 nt, Artificial Sequence
  Description of Artificial Sequence: Synthetic oligonucleotide
gugggcucugccggacccg

SEQ ID NO: 1459242 - RNA, 19 nt, Artificial Sequence
  Description of Artificial Sequence: Synthetic oligonucleotide
ggagaggaugauguggacu

SEQ ID NO: 1459243 - RNA, 19 nt, Artificial Sequence
  Description of Artificial Sequence: Synthetic oligonucleotide
uuuccgacuugagcucauu

SEQ ID NO: 1459244 - RNA, 19 nt, Artificial Sequence
  Description of Artificial Sequence: Synthetic oligonucleotide
agagcuggugaaagccaaa

SEQ ID NO: 1459245 - RNA, 19 nt, Artificial Sequence
  Description of Artificial Sequence: Synthetic oligonucleotide
agggcgggaacugccuccu

SEQ ID NO: 1459246 - RNA, 19 nt, Artificial Sequence
  Description of Artificial Sequence: Synthetic oligonucleotide
gcugcauggcugugcgaug

SEQ ID NO: 1459247 - RNA, 19 nt, Artificial Sequence
  Description of Artificial Sequence: Synthetic oligonucleotide
ggcuuuggaacaggcaaaa

SEQ ID NO: 1459248 - RNA, 19 nt, Artificial Sequence
  Description of Artificial Sequence: Synthetic oligonucleotide
cgcaccuccaucccucacc

SEQ ID NO: 1459249 - RNA, 19 nt, Artificial Sequence
  Description of Artificial Sequence: Synthetic oligonucleotide
gccguggagcccucggggc

SEQ ID NO: 1459250 - RNA, 19 nt, Artificial Sequence
  Description of Artificial Sequence: Synthetic oligonucleotide
cugguugcaagugggcucu

SEQ ID NO: 1459251 - RNA, 19 nt, Artificial Sequence
  Description of Artificial Sequence: Synthetic oligonucleotide
ccucgcaccuccaucccuc

SEQ ID NO: 1459252 - RNA, 19 nt, Artificial Sequence
  Description of Artificial Sequence: Synthetic oligonucleotide
gguugcaagugggcucugc

SEQ ID NO: 1459253 - RNA, 19 nt, Artificial Sequence
  Description of Artificial Sequence: Synthetic oligonucleotide
aggaugauguggacucguu

SEQ ID NO: 1459254 - RNA, 19 nt, Artificial Sequence
  Description of Artificial Sequence: Synthetic oligonucleotide
gcaagcgaggauggucuug

SEQ ID NO: 1459255 - RNA, 19 nt, Artificial Sequence
  Description of Artificial Sequence: Synthetic oligonucleotide
ggugucagguagucaagau

SEQ ID NO: 1459256 - RNA, 19 nt, Artificial Sequence
  Description of Artificial Sequence: Synthetic oligonucleotide
auuuccgacuugagcucau

SEQ ID NO: 1459257 - RNA, 19 nt, Artificial Sequence
  Description of Artificial Sequence: Synthetic oligonucleotide
guucacggccgcggggcug

SEQ ID NO: 1459258 - RNA, 19 nt, Artificial Sequence
  Description of Artificial Sequence: Synthetic oligonucleotide
ggcucugccggacccgaga

SEQ ID NO: 1459259 - RNA, 19 nt, Artificial Sequence
  Description of Artificial Sequence: Synthetic oligonucleotide
cucgcaccuccaucccuca

SEQ ID NO: 1459260 - RNA, 19 nt, Artificial Sequence
  Description of Artificial Sequence: Synthetic oligonucleotide
accugguuguagggaggcu

SEQ ID NO: 1459261 - RNA, 19 nt, Artificial Sequence
  Description of Artificial Sequence: Synthetic oligonucleotide
ccaaggauggaggcucuuc

SEQ ID NO: 1459262 - RNA, 19 nt, Artificial Sequence
  Description of Artificial Sequence: Synthetic oligonucleotide
gcaagugggcucugccgga

SEQ ID NO: 1459263 - RNA, 19 nt, Artificial Sequence
  Description of Artificial Sequence: Synthetic oligonucleotide
gggucuggacaggagccac

SEQ ID NO: 1459264 - RNA, 19 nt, Artificial Sequence
  Description of Artificial Sequence: Synthetic oligonucleotide
ggccagcguugucuguacc

SEQ ID NO: 1459265 - RNA, 19 nt, Artificial Sequence
  Description of Artificial Sequence: Synthetic oligonucleotide
gccuccuauucaagagaag

SEQ ID NO: 1459266 - RNA, 19 nt, Artificial Sequence
  Description of Artificial Sequence: Synthetic oligonucleotide
cucugccucccaggauaag

SEQ ID NO: 1459267 - RNA, 19 nt, Artificial Sequence
  Description of Artificial Sequence: Synthetic oligonucleotide
cuuggacagaggccagcgu

SEQ ID NO: 1459268 - RNA, 19 nt, Artificial Sequence
  Description of Artificial Sequence: Synthetic oligonucleotide
gcggccagcucaugggcca

SEQ ID NO: 1459269 - RNA, 19 nt, Artificial Sequence
  Description of Artificial Sequence: Synthetic oligonucleotide
cucagugggcaggacagau

SEQ ID NO: 1459270 - RNA, 19 nt, Artificial Sequence
  Description of Artificial Sequence: Synthetic oligonucleotide
gggaucugccaggagggaa

SEQ ID NO: 1459271 - RNA, 19 nt, Artificial Sequence
  Description of Artificial Sequence: Synthetic oligonucleotide
ucucgccaucgggaacuuc

SEQ ID NO: 1459272 - RNA, 19 nt, Artificial Sequence
  Description of Artificial Sequence: Synthetic oligonucleotide
ccuggacaggacaccuguc

SEQ ID NO: 1459273 - RNA, 19 nt, Artificial Sequence
  Description of Artificial Sequence: Synthetic oligonucleotide
gcaccuccaucccucaccu

SEQ ID NO: 1459274 - RNA, 19 nt, Artificial Sequence
  Description of Artificial Sequence: Synthetic oligonucleotide
ggggcuggagggcgagggc

SEQ ID NO: 1459275 - RNA, 19 nt, Artificial Sequence
  Description of Artificial Sequence: Synthetic oligonucleotide
ggcugcauggcugugcgau

SEQ ID NO: 1459276 - RNA, 19 nt, Artificial Sequence
  Description of Artificial Sequence: Synthetic oligonucleotide
gccgcggggcuggagggcg

SEQ ID NO: 1459277 - RNA, 19 nt, Artificial Sequence
  Description of Artificial Sequence: Synthetic oligonucleotide
gucagguagucaagauccu

SEQ ID NO: 1459278 - RNA, 19 nt, Artificial Sequence
  Description of Artificial Sequence: Synthetic oligonucleotide
ccaugcauggugucaggua

SEQ ID NO: 1459279 - RNA, 19 nt, Artificial Sequence
  Description of Artificial Sequence: Synthetic oligonucleotide
cuuccggggcugcauggcu

SEQ ID NO: 1459280 - RNA, 19 nt, Artificial Sequence
  Description of Artificial Sequence: Synthetic oligonucleotide
ccgacuugagcucauugau

SEQ ID NO: 1459281 - RNA, 19 nt, Artificial Sequence
  Description of Artificial Sequence: Synthetic oligonucleotide
gcaccguaaucucgccauc

SEQ ID NO: 1459282 - RNA, 19 nt, Artificial Sequence
  Description of Artificial Sequence: Synthetic oligonucleotide
ccacgcugccacucaguuc

SEQ ID NO: 1459283 - RNA, 19 nt, Artificial Sequence
  Description of Artificial Sequence: Synthetic oligonucleotide
cccgacugcuggaaagcca

SEQ ID NO: 1459284 - RNA, 19 nt, Artificial Sequence
  Description of Artificial Sequence: Synthetic oligonucleotide
caauuccugccaugaugau

SEQ ID NO: 1459285 - RNA, 19 nt, Artificial Sequence
  Description of Artificial Sequence: Synthetic oligonucleotide
gccggacccgagaauucug

SEQ ID NO: 1459286 - RNA, 19 nt, Artificial Sequence
  Description of Artificial Sequence: Synthetic oligonucleotide
cgacugcuggaaagccagg

SEQ ID NO: 1459287 - RNA, 19 nt, Artificial Sequence
  Description of Artificial Sequence: Synthetic oligonucleotide
ggucaaucucaucguccgu

SEQ ID NO: 1459288 - RNA, 19 nt, Artificial Sequence
  Description of Artificial Sequence: Synthetic oligonucleotide
acgcugccacucaguucgg

SEQ ID NO: 1459289 - RNA, 19 nt, Artificial Sequence
  Description of Artificial Sequence: Synthetic oligonucleotide
gcauggugucagguaguca

SEQ ID NO: 1459290 - RNA, 19 nt, Artificial Sequence
  Description of Artificial Sequence: Synthetic oligonucleotide
ccacuggcguagccaggcc

SEQ ID NO: 1459291 - RNA, 19 nt, Artificial Sequence
  Description of Artificial Sequence: Synthetic oligonucleotide
gcagugcccgacugcugga

SEQ ID NO: 1459292 - RNA, 19 nt, Artificial Sequence
  Description of Artificial Sequence: Synthetic oligonucleotide
ggcgggaacugccuccuau

SEQ ID NO: 1459293 - RNA, 19 nt, Artificial Sequence
  Description of Artificial Sequence: Synthetic oligonucleotide
gguggccguggagcccucg

SEQ ID NO: 1459294 - RNA, 19 nt, Artificial Sequence
  Description of Artificial Sequence: Synthetic oligonucleotide
gcgacuucacugggaucug

SEQ ID NO: 1459295 - RNA, 19 nt, Artificial Sequence
  Description of Artificial Sequence: Synthetic oligonucleotide
gggcgacuucacugggauc

SEQ ID NO: 1459296 - RNA, 19 nt, Artificial Sequence
  Description of Artificial Sequence: Synthetic oligonucleotide
ccuugacguccaccacccc

SEQ ID NO: 1459297 - RNA, 19 nt, Artificial Sequence
  Description of Artificial Sequence: Synthetic oligonucleotide
gguccuccuccuccuccuc

SEQ ID NO: 1459298 - RNA, 19 nt, Artificial Sequence
  Description of Artificial Sequence: Synthetic oligonucleotide
gcugugcgaugaggugggg

SEQ ID NO: 1459299 - RNA, 19 nt, Artificial Sequence
  Description of Artificial Sequence: Synthetic oligonucleotide
caggugggguggcaucugu

SEQ ID NO: 1459300 - RNA, 19 nt, Artificial Sequence
  Description of Artificial Sequence: Synthetic oligonucleotide
cccgagaauucuguaggaa

SEQ ID NO: 1459301 - RNA, 19 nt, Artificial Sequence
  Description of Artificial Sequence: Synthetic oligonucleotide
aucucgccaucgggaacuu

SEQ ID NO: 1459302 - RNA, 19 nt, Artificial Sequence
  Description of Artificial Sequence: Synthetic oligonucleotide
cagugcccgacugcuggaa

SEQ ID NO: 1459303 - RNA, 19 nt, Artificial Sequence
  Description of Artificial Sequence: Synthetic oligonucleotide
ccccucgcaccuccauccc

SEQ ID NO: 1459304 - RNA, 19 nt, Artificial Sequence
  Description of Artificial Sequence: Synthetic oligonucleotide
cuccuucccaggagaggau

SEQ ID NO: 1459305 - RNA, 19 nt, Artificial Sequence
  Description of Artificial Sequence: Synthetic oligonucleotide
gccaugcauggugucaggu

SEQ ID NO: 1459306 - RNA, 19 nt, Artificial Sequence
  Description of Artificial Sequence: Synthetic oligonucleotide
gcguugucuguaccugagu

SEQ ID NO: 1459307 - RNA, 19 nt, Artificial Sequence
  Description of Artificial Sequence: Synthetic oligonucleotide
gccacgcugccacucaguu

SEQ ID NO: 1459308 - RNA, 19 nt, Artificial Sequence
  Description of Artificial Sequence: Synthetic oligonucleotide
caguucggagagacucgau

SEQ ID NO: 1459309 - RNA, 19 nt, Artificial Sequence
  Description of Artificial Sequence: Synthetic oligonucleotide
cacagcaagcgaggauggu

SEQ ID NO: 1459310 - RNA, 19 nt, Artificial Sequence
  Description of Artificial Sequence: Synthetic oligonucleotide
ccggacccgagaauucugu

SEQ ID NO: 1459311 - RNA, 19 nt, Artificial Sequence
  Description of Artificial Sequence: Synthetic oligonucleotide
cacggccgcggggcuggag

SEQ ID NO: 1459312 - RNA, 19 nt, Artificial Sequence
  Description of Artificial Sequence: Synthetic oligonucleotide
gccacucaguucggagaga

SEQ ID NO: 1459313 - RNA, 19 nt, Artificial Sequence
  Description of Artificial Sequence: Synthetic oligonucleotide
gcgggaacugccuccuauu

SEQ ID NO: 1459314 - RNA, 19 nt, Artificial Sequence
  Description of Artificial Sequence: Synthetic oligonucleotide
gguucacggccgcggggcu

SEQ ID NO: 1459315 - RNA, 19 nt, Artificial Sequence
  Description of Artificial Sequence: Synthetic oligonucleotide
cucugccggacccgagaau

SEQ ID NO: 1459316 - RNA, 19 nt, Artificial Sequence
  Description of Artificial Sequence: Synthetic oligonucleotide
ccuccuccuccuccuccuc

SEQ ID NO: 1459317 - RNA, 19 nt, Artificial Sequence
  Description of Artificial Sequence: Synthetic oligonucleotide
gggagggcgggaacugccu

SEQ ID NO: 1459318 - RNA, 19 nt, Artificial Sequence
  Description of Artificial Sequence: Synthetic oligonucleotide
cuccaggauccaguugguu

SEQ ID NO: 1459319 - RNA, 19 nt, Artificial Sequence
  Description of Artificial Sequence: Synthetic oligonucleotide
cggagagacucgaugccau

SEQ ID NO: 1459320 - RNA, 19 nt, Artificial Sequence
  Description of Artificial Sequence: Synthetic oligonucleotide
ggccaagccagggcacagu

SEQ ID NO: 1459321 - RNA, 19 nt, Artificial Sequence
  Description of Artificial Sequence: Synthetic oligonucleotide
cggacccgagaauucugua

SEQ ID NO: 1459322 - RNA, 19 nt, Artificial Sequence
  Description of Artificial Sequence: Synthetic oligonucleotide
cgggaacuuccggggcugc

SEQ ID NO: 1459323 - RNA, 19 nt, Artificial Sequence
  Description of Artificial Sequence: Synthetic oligonucleotide
caucguccgucagcccuuu

SEQ ID NO: 1459324 - RNA, 19 nt, Artificial Sequence
  Description of Artificial Sequence: Synthetic oligonucleotide
cguccgucagcccuuucuu

SEQ ID NO: 1459325 - RNA, 19 nt, Artificial Sequence
  Description of Artificial Sequence: Synthetic oligonucleotide
cccucgcaccuccaucccu

SEQ ID NO: 1459326 - RNA, 19 nt, Artificial Sequence
  Description of Artificial Sequence: Synthetic oligonucleotide
ccgucagcccuuucuucuu

SEQ ID NO: 1459327 - RNA, 19 nt, Artificial Sequence
  Description of Artificial Sequence: Synthetic oligonucleotide
gggcgggaacugccuccua

SEQ ID NO: 1459328 - RNA, 19 nt, Artificial Sequence
  Description of Artificial Sequence: Synthetic oligonucleotide
ccccugcacuaaggugaca

SEQ ID NO: 1459329 - RNA, 19 nt, Artificial Sequence
  Description of Artificial Sequence: Synthetic oligonucleotide
ccuccuccuccuccuccuu

SEQ ID NO: 1459330 - RNA, 19 nt, Artificial Sequence
  Description of Artificial Sequence: Synthetic oligonucleotide
cccaaggauggaggcucuu

SEQ ID NO: 1459331 - RNA, 19 nt, Artificial Sequence
  Description of Artificial Sequence: Synthetic oligonucleotide
aaacguauggcuucucccc

SEQ ID NO: 1459332 - RNA, 19 nt, Artificial Sequence
  Description of Artificial Sequence: Synthetic oligonucleotide
gagguaaugauugugacgg

SEQ ID NO: 1459333 - RNA, 19 nt, Artificial Sequence
  Description of Artificial Sequence: Synthetic oligonucleotide
ugaauucugacuguggugg

SEQ ID NO: 1459334 - RNA, 19 nt, Artificial Sequence
  Description of Artificial Sequence: Synthetic oligonucleotide
uuaccaaggccccagaggu

SEQ ID NO: 1459335 - RNA, 19 nt, Artificial Sequence
  Description of Artificial Sequence: Synthetic oligonucleotide
uucgucgugaugauugggg

SEQ ID NO: 1459336 - RNA, 19 nt, Artificial Sequence
  Description of Artificial Sequence: Synthetic oligonucleotide
agagguaaugauugugacg

SEQ ID NO: 1459337 - RNA, 19 nt, Artificial Sequence
  Description of Artificial Sequence: Synthetic oligonucleotide
acgugauucuuguaguugg

SEQ ID NO: 1459338 - RNA, 19 nt, Artificial Sequence
  Description of Artificial Sequence: Synthetic oligonucleotide
ucgaauacucagugaagcg

SEQ ID NO: 1459339 - RNA, 19 nt, Artificial Sequence
  Description of Artificial Sequence: Synthetic oligonucleotide
acguggugcuuguagaggc

SEQ ID NO: 1459340 - RNA, 19 nt, Artificial Sequence
  Description of Artificial Sequence: Synthetic oligonucleotide
uucaaaagggcaccggaac

SEQ ID NO: 1459341 - RNA, 19 nt, Artificial Sequence
  Description of Artificial Sequence: Synthetic oligonucleotide
agguaagcaaugugggcgc

SEQ ID NO: 1459342 - RNA, 19 nt, Artificial Sequence
  Description of Artificial Sequence: Synthetic oligonucleotide
aaagccgguguccagggca

SEQ ID NO: 1459343 - RNA, 19 nt, Artificial Sequence
  Description of Artificial Sequence: Synthetic oligonucleotide
gguaggaccagucagggug

SEQ ID NO: 1459344 - RNA, 19 nt, Artificial Sequence
  Description of Artificial Sequence: Synthetic oligonucleotide
gauugugacgggcugaguc

SEQ ID NO: 1459345 - RNA, 19 nt, Artificial Sequence
  Description of Artificial Sequence: Synthetic oligonucleotide
aggucuucuggcgauaggc

SEQ ID NO: 1459346 - RNA, 19 nt, Artificial Sequence
  Description of Artificial Sequence: Synthetic oligonucleotide
uguagaggcucgaauacuc

SEQ ID NO: 1459347 - RNA, 19 nt, Artificial Sequence
  Description of Artificial Sequence: Synthetic oligonucleotide
ucuggcgauaggcugaccu

SEQ ID NO: 1459348 - RNA, 19 nt, Artificial Sequence
  Description of Artificial Sequence: Synthetic oligonucleotide
gauguggugaaggagcggc

SEQ ID NO: 1459349 - RNA, 19 nt, Artificial Sequence
  Description of Artificial Sequence: Synthetic oligonucleotide
uacgcuuauggccuccucc

SEQ ID NO: 1459350 - RNA, 19 nt, Artificial Sequence
  Description of Artificial Sequence: Synthetic oligonucleotide
cucgaauacucagugaagc

SEQ ID NO: 1459351 - RNA, 19 nt, Artificial Sequence
  Description of Artificial Sequence: Synthetic oligonucleotide
caaacguauggcuucuccc

SEQ ID NO: 1459352 - RNA, 19 nt, Artificial Sequence
  Description of Artificial Sequence: Synthetic oligonucleotide
uugcggauauuugaugugg

SEQ ID NO: 1459353 - RNA, 19 nt, Artificial Sequence
  Description of Artificial Sequence: Synthetic oligonucleotide
caguucgucgugaugauug

SEQ ID NO: 1459354 - RNA, 19 nt, Artificial Sequence
  Description of Artificial Sequence: Synthetic oligonucleotide
gaaugaauucugacugugg

SEQ ID NO: 1459355 - RNA, 19 nt, Artificial Sequence
  Description of Artificial Sequence: Synthetic oligonucleotide
auugcgugggagccagucc

SEQ ID NO: 1459356 - RNA, 19 nt, Artificial Sequence
  Description of Artificial Sequence: Synthetic oligonucleotide
auggugaccgugugugugc

SEQ ID NO: 1459357 - RNA, 19 nt, Artificial Sequence
  Description of Artificial Sequence: Synthetic oligonucleotide
ugagugaucagagccaccu

SEQ ID NO: 1459358 - RNA, 19 nt, Artificial Sequence
  Description of Artificial Sequence: Synthetic oligonucleotide
gaggcucgaauacucagug

SEQ ID NO: 1459359 - RNA, 19 nt, Artificial Sequence
  Description of Artificial Sequence: Synthetic oligonucleotide
uagaggcucgaauacucag

SEQ ID NO: 1459360 - RNA, 19 nt, Artificial Sequence
  Description of Artificial Sequence: Synthetic oligonucleotide
uggcuaggcaucuuggcca

SEQ ID NO: 1459361 - RNA, 19 nt, Artificial Sequence
  Description of Artificial Sequence: Synthetic oligonucleotide
ugugugugcccgauguggc

SEQ ID NO: 1459362 - RNA, 19 nt, Artificial Sequence
  Description of Artificial Sequence: Synthetic oligonucleotide
caaaagggcaccggaacgg

SEQ ID NO: 1459363 - RNA, 19 nt, Artificial Sequence
  Description of Artificial Sequence: Synthetic oligonucleotide
aagggaggaaagccggugu

SEQ ID NO: 1459364 - RNA, 19 nt, Artificial Sequence
  Description of Artificial Sequence: Synthetic oligonucleotide
cugaggaaugaauucugac

SEQ ID NO: 1459365 - RNA, 19 nt, Artificial Sequence
  Description of Artificial Sequence: Synthetic oligonucleotide
ugcgauguguguuccguug

SEQ ID NO: 1459366 - RNA, 19 nt, Artificial Sequence
  Description of Artificial Sequence: Synthetic oligonucleotide
gaguccucgguuaccaagg

SEQ ID NO: 1459367 - RNA, 19 nt, Artificial Sequence
  Description of Artificial Sequence: Synthetic oligonucleotide
uuggguugggaugucacug

SEQ ID NO: 1459368 - RNA, 19 nt, Artificial Sequence
  Description of Artificial Sequence: Synthetic oligonucleotide
cuugcagugugugugcacc

SEQ ID NO: 1459369 - RNA, 19 nt, Artificial Sequence
  Description of Artificial Sequence: Synthetic oligonucleotide
aguucgucgugaugauugg

SEQ ID NO: 1459370 - RNA, 19 nt, Artificial Sequence
  Description of Artificial Sequence: Synthetic oligonucleotide
uugcgugggagccaguccu

SEQ ID NO: 1459371 - RNA, 19 nt, Artificial Sequence
  Description of Artificial Sequence: Synthetic oligonucleotide
acgggcugagucugggugc

SEQ ID NO: 1459372 - RNA, 19 nt, Artificial Sequence
  Description of Artificial Sequence: Synthetic oligonucleotide
aaugugggcgcguuugguu

SEQ ID NO: 1459373 - RNA, 19 nt, Artificial Sequence
  Description of Artificial Sequence: Synthetic oligonucleotide
uguuccguuggcuguggcc

SEQ ID NO: 1459374 - RNA, 19 nt, Artificial Sequence
  Description of Artificial Sequence: Synthetic oligonucleotide
gacgggcugagucugggug

SEQ ID NO: 1459375 - RNA, 19 nt, Artificial Sequence
  Description of Artificial Sequence: Synthetic oligonucleotide
guggcuaggcaucuuggcc

SEQ ID NO: 1459376 - RNA, 19 nt, Artificial Sequence
  Description of Artificial Sequence: Synthetic oligonucleotide
gugugugugcccgaugugg

SEQ ID NO: 1459377 - RNA, 19 nt, Artificial Sequence
  Description of Artificial Sequence: Synthetic oligonucleotide
aaguggcuaggcaucuugg

SEQ ID NO: 1459378 - RNA, 19 nt, Artificial Sequence
  Description of Artificial Sequence: Synthetic oligonucleotide
cuugcggauauuugaugug

SEQ ID NO: 1459379 - RNA, 19 nt, Artificial Sequence
  Description of Artificial Sequence: Synthetic oligonucleotide
aaagggcaccggaacgggc

SEQ ID NO: 1459380 - RNA, 19 nt, Artificial Sequence
  Description of Artificial Sequence: Synthetic oligonucleotide
augguaggaccagucaggg

SEQ ID NO: 1459381 - RNA, 19 nt, Artificial Sequence
  Description of Artificial Sequence: Synthetic oligonucleotide
uccccugaugguaggacca

SEQ ID NO: 1459382 - RNA, 19 nt, Artificial Sequence
  Description of Artificial Sequence: Synthetic oligonucleotide
agggaggaaagccgguguc

SEQ ID NO: 1459383 - RNA, 19 nt, Artificial Sequence
  Description of Artificial Sequence: Synthetic oligonucleotide
uuggggucagccgagccag

SEQ ID NO: 1459384 - RNA, 19 nt, Artificial Sequence
  Description of Artificial Sequence: Synthetic oligonucleotide
augugggcgcguuugguug

SEQ ID NO: 1459385 - RNA, 19 nt, Artificial Sequence
  Description of Artificial Sequence: Synthetic oligonucleotide
aggaaagccgguguccagg

SEQ ID NO: 1459386 - RNA, 19 nt, Artificial Sequence
  Description of Artificial Sequence: Synthetic oligonucleotide
ugugggcgcguuugguugg

SEQ ID NO: 1459387 - RNA, 19 nt, Artificial Sequence
  Description of Artificial Sequence: Synthetic oligonucleotide
ucgucgugaugauugggga

SEQ ID NO: 1459388 - RNA, 19 nt, Artificial Sequence
  Description of Artificial Sequence: Synthetic oligonucleotide
ugcggauauuugauguggu

SEQ ID NO: 1459389 - RNA, 19 nt, Artificial Sequence
  Description of Artificial Sequence: Synthetic oligonucleotide
aguggacacaagugaauau

SEQ ID NO: 1459390 - RNA, 19 nt, Artificial Sequence
  Description of Artificial Sequence: Synthetic oligonucleotide
gucgugaugauuggggaug

SEQ ID NO: 1459391 - RNA, 19 nt, Artificial Sequence
  Description of Artificial Sequence: Synthetic oligonucleotide
uguauggcagccguggcua

SEQ ID NO: 1459392 - RNA, 19 nt, Artificial Sequence
  Description of Artificial Sequence: Synthetic oligonucleotide
ugcuuguagaggcucgaau

SEQ ID NO: 1459393 - RNA, 19 nt, Artificial Sequence
  Description of Artificial Sequence: Synthetic oligonucleotide
ggcaggaaguuccuggugc

SEQ ID NO: 1459394 - RNA, 19 nt, Artificial Sequence
  Description of Artificial Sequence: Synthetic oligonucleotide
agcaaugugggcgcguuug

SEQ ID NO: 1459395 - RNA, 19 nt, Artificial Sequence
  Description of Artificial Sequence: Synthetic oligonucleotide
uauagggcuugcagugugu

SEQ ID NO: 1459396 - RNA, 19 nt, Artificial Sequence
  Description of Artificial Sequence: Synthetic oligonucleotide
uguuggggucagccgagcc

SEQ ID NO: 1459397 - RNA, 19 nt, Artificial Sequence
  Description of Artificial Sequence: Synthetic oligonucleotide
gguaaugauugugacgggc

SEQ ID NO: 1459398 - RNA, 19 nt, Artificial Sequence
  Description of Artificial Sequence: Synthetic oligonucleotide
ucgugaugauuggggaugg

SEQ ID NO: 1459399 - RNA, 19 nt, Artificial Sequence
  Description of Artificial Sequence: Synthetic oligonucleotide
cauccugagugaucagagc

SEQ ID NO: 1459400 - RNA, 19 nt, Artificial Sequence
  Description of Artificial Sequence: Synthetic oligonucleotide
ucucugauacugugguuuc

SEQ ID NO: 1459401 - RNA, 19 nt, Artificial Sequence
  Description of Artificial Sequence: Synthetic oligonucleotide
agguaaugauugugacggg

SEQ ID NO: 1459402 - RNA, 19 nt, Artificial Sequence
  Description of Artificial Sequence: Synthetic oligonucleotide
augauuggggauggugagg

SEQ ID NO: 1459403 - RNA, 19 nt, Artificial Sequence
  Description of Artificial Sequence: Synthetic oligonucleotide
accgugcaaacguauggcu

SEQ ID NO: 1459404 - RNA, 19 nt, Artificial Sequence
  Description of Artificial Sequence: Synthetic oligonucleotide
gugaugauuggggauggug

SEQ ID NO: 1459405 - RNA, 19 nt, Artificial Sequence
  Description of Artificial Sequence: Synthetic oligonucleotide
accuugcggauauuugaug

SEQ ID NO: 1459406 - RNA, 19 nt, Artificial Sequence
  Description of Artificial Sequence: Synthetic oligonucleotide
ugcgcacugcgcuugugca

SEQ ID NO: 1459407 - RNA, 19 nt, Artificial Sequence
  Description of Artificial Sequence: Synthetic oligonucleotide
uggcgauaggcugaccugc

SEQ ID NO: 1459408 - RNA, 19 nt, Artificial Sequence
  Description of Artificial Sequence: Synthetic oligonucleotide
cugauacugugguuuccag

SEQ ID NO: 1459409 - RNA, 19 nt, Artificial Sequence
  Description of Artificial Sequence: Synthetic oligonucleotide
uuguagaggcucgaauacu

SEQ ID NO: 1459410 - RNA, 19 nt, Artificial Sequence
  Description of Artificial Sequence: Synthetic oligonucleotide
ugcgcacaugcaccuugcg

SEQ ID NO: 1459411 - RNA, 19 nt, Artificial Sequence
  Description of Artificial Sequence: Synthetic oligonucleotide
gccguggcuacgcuuaugg

SEQ ID NO: 1459412 - RNA, 19 nt, Artificial Sequence
  Description of Artificial Sequence: Synthetic oligonucleotide
guaggaccagucagggugg

SEQ ID NO: 1459413 - RNA, 19 nt, Artificial Sequence
  Description of Artificial Sequence: Synthetic oligonucleotide
ugugugcccgauguggcca

SEQ ID NO: 1459414 - RNA, 19 nt, Artificial Sequence
  Description of Artificial Sequence: Synthetic oligonucleotide
agugccaccuguuggugau

SEQ ID NO: 1459415 - RNA, 19 nt, Artificial Sequence
  Description of Artificial Sequence: Synthetic oligonucleotide
caucucucagagaaaggga

SEQ ID NO: 1459416 - RNA, 19 nt, Artificial Sequence
  Description of Artificial Sequence: Synthetic oligonucleotide
gccuaccuuccccugaugg

SEQ ID NO: 1459417 - RNA, 19 nt, Artificial Sequence
  Description of Artificial Sequence: Synthetic oligonucleotide
cacgugauucuuguaguug

SEQ ID NO: 1459418 - RNA, 19 nt, Artificial Sequence
  Description of Artificial Sequence: Synthetic oligonucleotide
acacuugaguccucgguua

SEQ ID NO: 1459419 - RNA, 19 nt, Artificial Sequence
  Description of Artificial Sequence: Synthetic oligonucleotide
ggcucgaauacucagugaa

SEQ ID NO: 1459420 - RNA, 19 nt, Artificial Sequence
  Description of Artificial Sequence: Synthetic oligonucleotide
agcauugcgugggagccag

SEQ ID NO: 1459421 - RNA, 19 nt, Artificial Sequence
  Description of Artificial Sequence: Synthetic oligonucleotide
gcacguauagggcuugcag

SEQ ID NO: 1459422 - RNA, 19 nt, Artificial Sequence
  Description of Artificial Sequence: Synthetic oligonucleotide
ugguuauugcugggaggcg

SEQ ID NO: 1459423 - RNA, 19 nt, Artificial Sequence
  Description of Artificial Sequence: Synthetic oligonucleotide
gcgcacgugauucuuguag

SEQ ID NO: 1459424 - RNA, 19 nt, Artificial Sequence
  Description of Artificial Sequence: Synthetic oligonucleotide
caccacguggugcuuguag

SEQ ID NO: 1459425 - RNA, 19 nt, Artificial Sequence
  Description of Artificial Sequence: Synthetic oligonucleotide
gaugccacacuugaguccu

SEQ ID NO: 1459426 - RNA, 19 nt, Artificial Sequence
  Description of Artificial Sequence: Synthetic oligonucleotide
ugugagcauggcaccuucu

SEQ ID NO: 1459427 - RNA, 19 nt, Artificial Sequence
  Description of Artificial Sequence: Synthetic oligonucleotide
agucugggugccaucggcg

SEQ ID NO: 1459428 - RNA, 19 nt, Artificial Sequence
  Description of Artificial Sequence: Synthetic oligonucleotide
cguggcuacgcuuauggcc

SEQ ID NO: 1459429 - RNA, 19 nt, Artificial Sequence
  Description of Artificial Sequence: Synthetic oligonucleotide
acugcgauguguguuccgu

SEQ ID NO: 1459430 - RNA, 19 nt, Artificial Sequence
  Description of Artificial Sequence: Synthetic oligonucleotide
uccaccuaggccccaucuc

SEQ ID NO: 1459431 - RNA, 19 nt, Artificial Sequence
  Description of Artificial Sequence: Synthetic oligonucleotide
ggcuacuuggguugggaug

SEQ ID NO: 1459432 - RNA, 19 nt, Artificial Sequence
  Description of Artificial Sequence: Synthetic oligonucleotide
gaugcgcacgugauucuug

SEQ ID NO: 1459433 - RNA, 19 nt, Artificial Sequence
  Description of Artificial Sequence: Synthetic oligonucleotide
uguguuccguuggcugugg

SEQ ID NO: 1459434 - RNA, 19 nt, Artificial Sequence
  Description of Artificial Sequence: Synthetic oligonucleotide
augcgcacgugauucuugu

SEQ ID NO: 1459435 - RNA, 19 nt, Artificial Sequence
  Description of Artificial Sequence: Synthetic oligonucleotide
caguccucguccaccuagg

SEQ ID NO: 1459436 - RNA, 19 nt, Artificial Sequence
  Description of Artificial Sequence: Synthetic oligonucleotide
gagugaucagagccaccug

SEQ ID NO: 1459437 - RNA, 19 nt, Artificial Sequence
  Description of Artificial Sequence: Synthetic oligonucleotide
guggagaccaguccucguc

SEQ ID NO: 1459438 - RNA, 19 nt, Artificial Sequence
  Description of Artificial Sequence: Synthetic oligonucleotide
guucgucgugaugauuggg

SEQ ID NO: 1459439 - RNA, 19 nt, Artificial Sequence
  Description of Artificial Sequence: Synthetic oligonucleotide
cagcccuuuccaucagagg

SEQ ID NO: 1459440 - RNA, 19 nt, Artificial Sequence
  Description of Artificial Sequence: Synthetic oligonucleotide
agccuggcaccgugcaaac

SEQ ID NO: 1459441 - RNA, 19 nt, Artificial Sequence
  Description of Artificial Sequence: Synthetic oligonucleotide
cucagugaagcgcuuucca

SEQ ID NO: 1459442 - RNA, 19 nt, Artificial Sequence
  Description of Artificial Sequence: Synthetic oligonucleotide
auacugugguuuccagggu

SEQ ID NO: 1459443 - RNA, 19 nt, Artificial Sequence
  Description of Artificial Sequence: Synthetic oligonucleotide
gcuuguagaggcucgaaua

SEQ ID NO: 1459444 - RNA, 19 nt, Artificial Sequence
  Description of Artificial Sequence: Synthetic oligonucleotide
guaaugauugugacgggcu

SEQ ID NO: 1459445 - RNA, 19 nt, Artificial Sequence
  Description of Artificial Sequence: Synthetic oligonucleotide
aagccgguguccagggcag

SEQ ID NO: 1459446 - RNA, 19 nt, Artificial Sequence
  Description of Artificial Sequence: Synthetic oligonucleotide
gcgauguguguuccguugg

SEQ ID NO: 1459447 - RNA, 19 nt, Artificial Sequence
  Description of Artificial Sequence: Synthetic oligonucleotide
agccuucaaaagggcaccg

SEQ ID NO: 1459448 - RNA, 19 nt, Artificial Sequence
  Description of Artificial Sequence: Synthetic oligonucleotide
gcagugugugugcaccacg

SEQ ID NO: 1459449 - RNA, 19 nt, Artificial Sequence
  Description of Artificial Sequence: Synthetic oligonucleotide
uugcuguauggcagccgug

SEQ ID NO: 1459450 - RNA, 19 nt, Artificial Sequence
  Description of Artificial Sequence: Synthetic oligonucleotide
ggcgcguuugguuggcggg

SEQ ID NO: 1459451 - RNA, 19 nt, Artificial Sequence
  Description of Artificial Sequence: Synthetic oligonucleotide
gugcgcacugcgcuugugc

SEQ ID NO: 1459452 - RNA, 19 nt, Artificial Sequence
  Description of Artificial Sequence: Synthetic oligonucleotide
gcgcacaugcaccuugcgg

SEQ ID NO: 1459453 - RNA, 19 nt, Artificial Sequence
  Description of Artificial Sequence: Synthetic oligonucleotide
ucagccgagccaggguucc

SEQ ID NO: 1459454 - RNA, 19 nt, Artificial Sequence
  Description of Artificial Sequence: Synthetic oligonucleotide
ugccaccuguuggugauga

SEQ ID NO: 1459455 - RNA, 19 nt, Artificial Sequence
  Description of Artificial Sequence: Synthetic oligonucleotide
gcccgauguggccaguucg

SEQ ID NO: 1459456 - RNA, 19 nt, Artificial Sequence
  Description of Artificial Sequence: Synthetic oligonucleotide
gagaaagggaguggacaca

SEQ ID NO: 1459457 - RNA, 19 nt, Artificial Sequence
  Description of Artificial Sequence: Synthetic oligonucleotide
uaagcaaugugggcgcguu

SEQ ID NO: 1459458 - RNA, 19 nt, Artificial Sequence
  Description of Artificial Sequence: Synthetic oligonucleotide
cacguauagggcuugcagu

SEQ ID NO: 1459459 - RNA, 19 nt, Artificial Sequence
  Description of Artificial Sequence: Synthetic oligonucleotide
cuugcuguauggcagccgu

SEQ ID NO: 1459460 - RNA, 19 nt, Artificial Sequence
  Description of Artificial Sequence: Synthetic oligonucleotide
ugcacguauagggcuugca

SEQ ID NO: 1459461 - RNA, 19 nt, Artificial Sequence
  Description of Artificial Sequence: Synthetic oligonucleotide
gcggauauuugauguggug

SEQ ID NO: 1459462 - RNA, 19 nt, Artificial Sequence
  Description of Artificial Sequence: Synthetic oligonucleotide
uggccaguucgucgugaug

SEQ ID NO: 1459463 - RNA, 19 nt, Artificial Sequence
  Description of Artificial Sequence: Synthetic oligonucleotide
cgauaggcugaccugcugg

SEQ ID NO: 1459464 - RNA, 19 nt, Artificial Sequence
  Description of Artificial Sequence: Synthetic oligonucleotide
ugcagugugugugcaccac

SEQ ID NO: 1459465 - RNA, 19 nt, Artificial Sequence
  Description of Artificial Sequence: Synthetic oligonucleotide
cugugagcauggcaccuuc

SEQ ID NO: 1459466 - RNA, 19 nt, Artificial Sequence
  Description of Artificial Sequence: Synthetic oligonucleotide
guggcuacgcuuauggccu

SEQ ID NO: 1459467 - RNA, 19 nt, Artificial Sequence
  Description of Artificial Sequence: Synthetic oligonucleotide
gguggugcugccaugcuga

SEQ ID NO: 1459468 - RNA, 19 nt, Artificial Sequence
  Description of Artificial Sequence: Synthetic oligonucleotide
uggugaccgugugugugcc

SEQ ID NO: 1459469 - RNA, 19 nt, Artificial Sequence
  Description of Artificial Sequence: Synthetic oligonucleotide
auggcuacuuggguuggga

SEQ ID NO: 1459470 - RNA, 19 nt, Artificial Sequence
  Description of Artificial Sequence: Synthetic oligonucleotide
cuagcugcacugcgaugug

SEQ ID NO: 1459471 - RNA, 19 nt, Artificial Sequence
  Description of Artificial Sequence: Synthetic oligonucleotide
ggugccaucggcgcugacc

SEQ ID NO: 1459472 - RNA, 19 nt, Artificial Sequence
  Description of Artificial Sequence: Synthetic oligonucleotide
guagaggcucgaauacuca

SEQ ID NO: 1459473 - RNA, 19 nt, Artificial Sequence
  Description of Artificial Sequence: Synthetic oligonucleotide
gugacgggcugagucuggg

SEQ ID NO: 1459474 - RNA, 19 nt, Artificial Sequence
  Description of Artificial Sequence: Synthetic oligonucleotide
gcgggcuuuccucagcagc

SEQ ID NO: 1459475 - RNA, 19 nt, Artificial Sequence
  Description of Artificial Sequence: Synthetic oligonucleotide
ccaacagugccaccuguug

SEQ ID NO: 1459476 - RNA, 19 nt, Artificial Sequence
  Description of Artificial Sequence: Synthetic oligonucleotide
ugcccgauguggccaguuc

SEQ ID NO: 1459477 - RNA, 19 nt, Artificial Sequence
  Description of Artificial Sequence: Synthetic oligonucleotide
cucuagcugcacugcgaug

SEQ ID NO: 1459478 - RNA, 19 nt, Artificial Sequence
  Description of Artificial Sequence: Synthetic oligonucleotide
ggugccaaguggcuaggca

SEQ ID NO: 1459479 - RNA, 19 nt, Artificial Sequence
  Description of Artificial Sequence: Synthetic oligonucleotide
gcaccauccugagugauca

SEQ ID NO: 1459480 - RNA, 19 nt, Artificial Sequence
  Description of Artificial Sequence: Synthetic oligonucleotide
caccuaggccccaucucuc

SEQ ID NO: 1459481 - RNA, 19 nt, Artificial Sequence
  Description of Artificial Sequence: Synthetic oligonucleotide
caucagaggccauuuuccu

SEQ ID NO: 1459482 - RNA, 19 nt, Artificial Sequence
  Description of Artificial Sequence: Synthetic oligonucleotide
gguaagcaaugugggcgcg

SEQ ID NO: 1459483 - RNA, 19 nt, Artificial Sequence
  Description of Artificial Sequence: Synthetic oligonucleotide
aggguggaggucugccggu

SEQ ID NO: 1459484 - RNA, 19 nt, Artificial Sequence
  Description of Artificial Sequence: Synthetic oligonucleotide
ugacgggcugagucugggu

SEQ ID NO: 1459485 - RNA, 19 nt, Artificial Sequence
  Description of Artificial Sequence: Synthetic oligonucleotide
guguguuccguuggcugug

SEQ ID NO: 1459486 - RNA, 19 nt, Artificial Sequence
  Description of Artificial Sequence: Synthetic oligonucleotide
ccaucggcgcugaccaugg

SEQ ID NO: 1459487 - RNA, 19 nt, Artificial Sequence
  Description of Artificial Sequence: Synthetic oligonucleotide
ugccuaccuuccccugaug

SEQ ID NO: 1459488 - RNA, 19 nt, Artificial Sequence
  Description of Artificial Sequence: Synthetic oligonucleotide
cuccccgugcgcacugcgc

SEQ ID NO: 1459489 - RNA, 19 nt, Artificial Sequence
  Description of Artificial Sequence: Synthetic oligonucleotide
gcaucuuggccacccuacc

SEQ ID NO: 1459490 - RNA, 19 nt, Artificial Sequence
  Description of Artificial Sequence: Synthetic oligonucleotide
gugugcccgauguggccag

SEQ ID NO: 1459491 - RNA, 19 nt, Artificial Sequence
  Description of Artificial Sequence: Synthetic oligonucleotide
ccuucaaaagggcaccgga

SEQ ID NO: 1459492 - RNA, 19 nt, Artificial Sequence
  Description of Artificial Sequence: Synthetic oligonucleotide
ucaccacgcugauggcacu

SEQ ID NO: 1459493 - RNA, 19 nt, Artificial Sequence
  Description of Artificial Sequence: Synthetic oligonucleotide
ggucacagccccuugcugu

SEQ ID NO: 1459494 - RNA, 19 nt, Artificial Sequence
  Description of Artificial Sequence: Synthetic oligonucleotide
cgcacaugcaccuugcgga

SEQ ID NO: 1459495 - RNA, 19 nt, Artificial Sequence
  Description of Artificial Sequence: Synthetic oligonucleotide
gguggaggucugccgguag

SEQ ID NO: 1459496 - RNA, 19 nt, Artificial Sequence
  Description of Artificial Sequence: Synthetic oligonucleotide
auacucagugaagcgcuuu

SEQ ID NO: 1459497 - RNA, 19 nt, Artificial Sequence
  Description of Artificial Sequence: Synthetic oligonucleotide
gggcgcguuugguuggcgg

SEQ ID NO: 1459498 - RNA, 19 nt, Artificial Sequence
  Description of Artificial Sequence: Synthetic oligonucleotide
ugaccgugugugugcccga

SEQ ID NO: 1459499 - RNA, 19 nt, Artificial Sequence
  Description of Artificial Sequence: Synthetic oligonucleotide
ccuguacuggaugcgcacg

SEQ ID NO: 1459500 - RNA, 19 nt, Artificial Sequence
  Description of Artificial Sequence: Synthetic oligonucleotide
gcuacuuggguugggaugu

SEQ ID NO: 1459501 - RNA, 19 nt, Artificial Sequence
  Description of Artificial Sequence: Synthetic oligonucleotide
uuccguuggcuguggccaa

SEQ ID NO: 1459502 - RNA, 19 nt, Artificial Sequence
  Description of Artificial Sequence: Synthetic oligonucleotide
guggacacaagugaauauu

SEQ ID NO: 1459503 - RNA, 19 nt, Artificial Sequence
  Description of Artificial Sequence: Synthetic oligonucleotide
ugauugugacgggcugagu

SEQ ID NO: 1459504 - RNA, 19 nt, Artificial Sequence
  Description of Artificial Sequence: Synthetic oligonucleotide
guauggcagccguggcuac

SEQ ID NO: 1459505 - RNA, 19 nt, Artificial Sequence
  Description of Artificial Sequence: Synthetic oligonucleotide
agggcaccggaacgggcgu

SEQ ID NO: 1459506 - RNA, 19 nt, Artificial Sequence
  Description of Artificial Sequence: Synthetic oligonucleotide
ggaggaaagccggugucca

SEQ ID NO: 1459507 - RNA, 19 nt, Artificial Sequence
  Description of Artificial Sequence: Synthetic oligonucleotide
gaaguuccuggugccaagu

SEQ ID NO: 1459508 - RNA, 19 nt, Artificial Sequence
  Description of Artificial Sequence: Synthetic oligonucleotide
ggcuaggcaucuuggccac

SEQ ID NO: 1459509 - RNA, 19 nt, Artificial Sequence
  Description of Artificial Sequence: Synthetic oligonucleotide
ccuugcggauauuugaugu

SEQ ID NO: 1459510 - RNA, 19 nt, Artificial Sequence
  Description of Artificial Sequence: Synthetic oligonucleotide
cuacgcuuauggccuccuc

SEQ ID NO: 1459511 - RNA, 19 nt, Artificial Sequence
  Description of Artificial Sequence: Synthetic oligonucleotide
cacacuugaguccucgguu

SEQ ID NO: 1459512 - RNA, 19 nt, Artificial Sequence
  Description of Artificial Sequence: Synthetic oligonucleotide
ugcgcacgugauucuugua

SEQ ID NO: 1459513 - RNA, 19 nt, Artificial Sequence
  Description of Artificial Sequence: Synthetic oligonucleotide
guguuccguuggcuguggc

SEQ ID NO: 1459514 - RNA, 19 nt, Artificial Sequence
  Description of Artificial Sequence: Synthetic oligonucleotide
cuccagcauugcgugggag

SEQ ID NO: 1459515 - RNA, 19 nt, Artificial Sequence
  Description of Artificial Sequence: Synthetic oligonucleotide
gcaggucuucuggcgauag

SEQ ID NO: 1459516 - RNA, 19 nt, Artificial Sequence
  Description of Artificial Sequence: Synthetic oligonucleotide
cggauauuugaugugguga

SEQ ID NO: 1459517 - RNA, 19 nt, Artificial Sequence
  Description of Artificial Sequence: Synthetic oligonucleotide
cuguauggcagccguggcu

SEQ ID NO: 1459518 - RNA, 19 nt, Artificial Sequence
  Description of Artificial Sequence: Synthetic oligonucleotide
cccuggaggugguuauugc

SEQ ID NO: 1459519 - RNA, 19 nt, Artificial Sequence
  Description of Artificial Sequence: Synthetic oligonucleotide
ugggcgcguuugguuggcg

SEQ ID NO: 1459520 - RNA, 19 nt, Artificial Sequence
  Description of Artificial Sequence: Synthetic oligonucleotide
caugcugagucaccacgcu

SEQ ID NO: 1459521 - RNA, 19 nt, Artificial Sequence
  Description of Artificial Sequence: Synthetic oligonucleotide
uggugcugccaugcugagu

SEQ ID NO: 1459522 - RNA, 19 nt, Artificial Sequence
  Description of Artificial Sequence: Synthetic oligonucleotide
cuguuggggucagccgagc

SEQ ID NO: 1459523 - RNA, 19 nt, Artificial Sequence
  Description of Artificial Sequence: Synthetic oligonucleotide
uggcacuccccagggccug

SEQ ID NO: 1459524 - RNA, 19 nt, Artificial Sequence
  Description of Artificial Sequence: Synthetic oligonucleotide
uccguuggcuguggccaac

SEQ ID NO: 1459525 - RNA, 19 nt, Artificial Sequence
  Description of Artificial Sequence: Synthetic oligonucleotide
cccuguacuggaugcgcac

SEQ ID NO: 1459526 - RNA, 19 nt, Artificial Sequence
  Description of Artificial Sequence: Synthetic oligonucleotide
guccaccuaggccccaucu

SEQ ID NO: 1459527 - RNA, 19 nt, Artificial Sequence
  Description of Artificial Sequence: Synthetic oligonucleotide
cgauguguguuccguuggc

SEQ ID NO: 1459528 - RNA, 19 nt, Artificial Sequence
  Description of Artificial Sequence: Synthetic oligonucleotide
caucuuggguguggcccac

SEQ ID NO: 1459529 - RNA, 19 nt, Artificial Sequence
  Description of Artificial Sequence: Synthetic oligonucleotide
uggcuacgcuuauggccuc

SEQ ID NO: 1459530 - RNA, 19 nt, Artificial Sequence
  Description of Artificial Sequence: Synthetic oligonucleotide
gcgauaggcugaccugcug

SEQ ID NO: 1459531 - RNA, 19 nt, Artificial Sequence
  Description of Artificial Sequence: Synthetic oligonucleotide
aggucugccgguaggucuu

SEQ ID NO: 1459532 - RNA, 19 nt, Artificial Sequence
  Description of Artificial Sequence: Synthetic oligonucleotide
gcugaccauggugaccgug

SEQ ID NO: 1459533 - RNA, 19 nt, Artificial Sequence
  Description of Artificial Sequence: Synthetic oligonucleotide
caccacgcugauggcacuc

SEQ ID NO: 1459534 - RNA, 19 nt, Artificial Sequence
  Description of Artificial Sequence: Synthetic oligonucleotide
cuggcaccgugcaaacgua

SEQ ID NO: 1459535 - RNA, 19 nt, Artificial Sequence
  Description of Artificial Sequence: Synthetic oligonucleotide
ggcgcugaccauggugacc

SEQ ID NO: 1459536 - RNA, 19 nt, Artificial Sequence
  Description of Artificial Sequence: Synthetic oligonucleotide
ccuggcaccgugcaaacgu

SEQ ID NO: 1459537 - RNA, 19 nt, Artificial Sequence
  Description of Artificial Sequence: Synthetic oligonucleotide
cacugcgcuugugcauggc

SEQ ID NO: 1459538 - RNA, 19 nt, Artificial Sequence
  Description of Artificial Sequence: Synthetic oligonucleotide
ggcuccgggcagguguagg

SEQ ID NO: 1459539 - RNA, 19 nt, Artificial Sequence
  Description of Artificial Sequence: Synthetic oligonucleotide
ccguggcuacgcuuauggc

SEQ ID NO: 1459540 - RNA, 19 nt, Artificial Sequence
  Description of Artificial Sequence: Synthetic oligonucleotide
gccgguaggucuugccgca

SEQ ID NO: 1459541 - RNA, 19 nt, Artificial Sequence
  Description of Artificial Sequence: Synthetic oligonucleotide
guaagcaaugugggcgcgu

SEQ ID NO: 1459542 - RNA, 19 nt, Artificial Sequence
  Description of Artificial Sequence: Synthetic oligonucleotide
agccguggcuacgcuuaug

SEQ ID NO: 1459543 - RNA, 19 nt, Artificial Sequence
  Description of Artificial Sequence: Synthetic oligonucleotide
aggccccaucucucagaga

SEQ ID NO: 1459544 - RNA, 19 nt, Artificial Sequence
  Description of Artificial Sequence: Synthetic oligonucleotide
ugugcaccacguggugcuu

SEQ ID NO: 1459545 - RNA, 19 nt, Artificial Sequence
  Description of Artificial Sequence: Synthetic oligonucleotide
cuaccccuggaggugguua

SEQ ID NO: 1459546 - RNA, 19 nt, Artificial Sequence
  Description of Artificial Sequence: Synthetic oligonucleotide
ccauggcuacuuggguugg

SEQ ID NO: 1459547 - RNA, 19 nt, Artificial Sequence
  Description of Artificial Sequence: Synthetic oligonucleotide
cucgguuaccaaggcccca

SEQ ID NO: 1459548 - RNA, 19 nt, Artificial Sequence
  Description of Artificial Sequence: Synthetic oligonucleotide
gcagccguggcuacgcuua

SEQ ID NO: 1459549 - RNA, 19 nt, Artificial Sequence
  Description of Artificial Sequence: Synthetic oligonucleotide
gugggcgcguuugguuggc

SEQ ID NO: 1459550 - RNA, 19 nt, Artificial Sequence
  Description of Artificial Sequence: Synthetic oligonucleotide
gugcuuguagaggcucgaa

SEQ ID NO: 1459551 - RNA, 19 nt, Artificial Sequence
  Description of Artificial Sequence: Synthetic oligonucleotide
ggaggucugccgguagguc

SEQ ID NO: 1459552 - RNA, 19 nt, Artificial Sequence
  Description of Artificial Sequence: Synthetic oligonucleotide
cgcacugcgcuugugcaug

SEQ ID NO: 1459553 - RNA, 19 nt, Artificial Sequence
  Description of Artificial Sequence: Synthetic oligonucleotide
gcgcguuugguuggcgggc

SEQ ID NO: 1459554 - RNA, 19 nt, Artificial Sequence
  Description of Artificial Sequence: Synthetic oligonucleotide
ugccaucggcgcugaccau

SEQ ID NO: 1459555 - RNA, 19 nt, Artificial Sequence
  Description of Artificial Sequence: Synthetic oligonucleotide
ggcuacgcuuauggccucc

SEQ ID NO: 1459556 - RNA, 19 nt, Artificial Sequence
  Description of Artificial Sequence: Synthetic oligonucleotide
gccgguguccagggcagcc

SEQ ID NO: 1459557 - RNA, 19 nt, Artificial Sequence
  Description of Artificial Sequence: Synthetic oligonucleotide
caaugugggcgcguuuggu

SEQ ID NO: 1459558 - RNA, 19 nt, Artificial Sequence
  Description of Artificial Sequence: Synthetic oligonucleotide
ggguugggaugucacugcu

SEQ ID NO: 1459559 - RNA, 19 nt, Artificial Sequence
  Description of Artificial Sequence: Synthetic oligonucleotide
ccaccuaggccccaucucu

SEQ ID NO: 1459560 - RNA, 19 nt, Artificial Sequence
  Description of Artificial Sequence: Synthetic oligonucleotide
gccuggcaccgugcaaacg

SEQ ID NO: 1459561 - RNA, 19 nt, Artificial Sequence
  Description of Artificial Sequence: Synthetic oligonucleotide
cugcaggucuucuggcgau

SEQ ID NO: 1459562 - RNA, 19 nt, Artificial Sequence
  Description of Artificial Sequence: Synthetic oligonucleotide
ggcaccggaacgggcguuc

SEQ ID NO: 1459563 - RNA, 19 nt, Artificial Sequence
  Description of Artificial Sequence: Synthetic oligonucleotide
gguggagaccaguccucgu

SEQ ID NO: 1459564 - RNA, 19 nt, Artificial Sequence
  Description of Artificial Sequence: Synthetic oligonucleotide
ccgugugugugcccgaugu

SEQ ID NO: 1459565 - RNA, 19 nt, Artificial Sequence
  Description of Artificial Sequence: Synthetic oligonucleotide
gcacgugauucuuguaguu

SEQ ID NO: 1459566 - RNA, 19 nt, Artificial Sequence
  Description of Artificial Sequence: Synthetic oligonucleotide
ccccuguacuggaugcgca

SEQ ID NO: 1459567 - RNA, 19 nt, Artificial Sequence
  Description of Artificial Sequence: Synthetic oligonucleotide
ccccugaugguaggaccag

SEQ ID NO: 1459568 - RNA, 19 nt, Artificial Sequence
  Description of Artificial Sequence: Synthetic oligonucleotide
gcacaugcaccuugcggau

SEQ ID NO: 1459569 - RNA, 19 nt, Artificial Sequence
  Description of Artificial Sequence: Synthetic oligonucleotide
cugcacugcgauguguguu

SEQ ID NO: 1459570 - RNA, 19 nt, Artificial Sequence
  Description of Artificial Sequence: Synthetic oligonucleotide
ggucugccgguaggucuug

SEQ ID NO: 1459571 - RNA, 19 nt, Artificial Sequence
  Description of Artificial Sequence: Synthetic oligonucleotide
gcuaggcaucuuggccacc

SEQ ID NO: 1459572 - RNA, 19 nt, Artificial Sequence
  Description of Artificial Sequence: Synthetic oligonucleotide
cugcgauguguguuccguu

SEQ ID NO: 1459573 - RNA, 19 nt, Artificial Sequence
  Description of Artificial Sequence: Synthetic oligonucleotide
cgcacgugauucuuguagu

SEQ ID NO: 1459574 - RNA, 19 nt, Artificial Sequence
  Description of Artificial Sequence: Synthetic oligonucleotide
cccgauguggccaguucgu

SEQ ID NO: 1459575 - RNA, 19 nt, Artificial Sequence
  Description of Artificial Sequence: Synthetic oligonucleotide
cccgugcgcacugcgcuug

SEQ ID NO: 1459576 - RNA, 19 nt, Artificial Sequence
  Description of Artificial Sequence: Synthetic oligonucleotide
gggucagccgagccagggu

SEQ ID NO: 1459577 - RNA, 19 nt, Artificial Sequence
  Description of Artificial Sequence: Synthetic oligonucleotide
gcugagucaccacgcugau

SEQ ID NO: 1459578 - RNA, 19 nt, Artificial Sequence
  Description of Artificial Sequence: Synthetic oligonucleotide
ccgugcaaacguauggcuu

SEQ ID NO: 1459579 - RNA, 19 nt, Artificial Sequence
  Description of Artificial Sequence: Synthetic oligonucleotide
ggcgauaggcugaccugcu

SEQ ID NO: 1459580 - RNA, 19 nt, Artificial Sequence
  Description of Artificial Sequence: Synthetic oligonucleotide
gccaguucgucgugaugau

SEQ ID NO: 1459581 - RNA, 19 nt, Artificial Sequence
  Description of Artificial Sequence: Synthetic oligonucleotide
ccuuccccugaugguagga

SEQ ID NO: 1459582 - RNA, 19 nt, Artificial Sequence
  Description of Artificial Sequence: Synthetic oligonucleotide
gcuacgcuuauggccuccu

SEQ ID NO: 1459583 - RNA, 19 nt, Artificial Sequence
  Description of Artificial Sequence: Synthetic oligonucleotide
gggcuccgggcagguguag

SEQ ID NO: 1459584 - RNA, 19 nt, Artificial Sequence
  Description of Artificial Sequence: Synthetic oligonucleotide
ggcugagucugggugccau

SEQ ID NO: 1459585 - RNA, 19 nt, Artificial Sequence
  Description of Artificial Sequence: Synthetic oligonucleotide
ggcagccguggcuacgcuu

SEQ ID NO: 1459586 - RNA, 19 nt, Artificial Sequence
  Description of Artificial Sequence: Synthetic oligonucleotide
cggcgcugaccauggugac

SEQ ID NO: 1459587 - RNA, 19 nt, Artificial Sequence
  Description of Artificial Sequence: Synthetic oligonucleotide
cgucgugaugauuggggau

SEQ ID NO: 1459588 - RNA, 19 nt, Artificial Sequence
  Description of Artificial Sequence: Synthetic oligonucleotide
ccccagagguaaugauugu

SEQ ID NO: 1459589 - RNA, 19 nt, Artificial Sequence
  Description of Artificial Sequence: Synthetic oligonucleotide
cguauagggcuugcagugu

SEQ ID NO: 1459590 - RNA, 19 nt, Artificial Sequence
  Description of Artificial Sequence: Synthetic oligonucleotide
caucggcgcugaccauggu

SEQ ID NO: 1459591 - RNA, 19 nt, Artificial Sequence
  Description of Artificial Sequence: Synthetic oligonucleotide
gugcccgauguggccaguu

SEQ ID NO: 1459592 - RNA, 19 nt, Artificial Sequence
  Description of Artificial Sequence: Synthetic oligonucleotide
cagccguggcuacgcuuau

SEQ ID NO: 1459593 - RNA, 19 nt, Artificial Sequence
  Description of Artificial Sequence: Synthetic oligonucleotide
caugcaccuugcggauauu

SEQ ID NO: 1459594 - RNA, 19 nt, Artificial Sequence
  Description of Artificial Sequence: Synthetic oligonucleotide
cccugaugguaggaccagu

SEQ ID NO: 1459595 - RNA, 19 nt, Artificial Sequence
  Description of Artificial Sequence: Synthetic oligonucleotide
ccugugagcauggcaccuu

SEQ ID NO: 1459596 - RNA, 19 nt, Artificial Sequence
  Description of Artificial Sequence: Synthetic oligonucleotide
ccaguucgucgugaugauu

SEQ ID NO: 1459597 - RNA, 19 nt, Artificial Sequence
  Description of Artificial Sequence: Synthetic oligonucleotide
cccgugugggugcgcacau

SEQ ID NO: 1459598 - RNA, 19 nt, Artificial Sequence
  Description of Artificial Sequence: Synthetic oligonucleotide
cccuaccccuggagguggu

SEQ ID NO: 1459599 - RNA, 19 nt, Artificial Sequence
  Description of Artificial Sequence: Synthetic oligonucleotide
cgcguuugguuggcgggcu

SEQ ID NO: 1459600 - RNA, 19 nt, Artificial Sequence
  Description of Artificial Sequence: Synthetic oligonucleotide
cgugaugauuggggauggu

SEQ ID NO: 1459601 - RNA, 19 nt, Artificial Sequence
  Description of Artificial Sequence: Synthetic oligonucleotide
gggcaccggaacgggcguu

SEQ ID NO: 1459602 - RNA, 19 nt, Artificial Sequence
  Description of Artificial Sequence: Synthetic oligonucleotide
ccgugcgcacugcgcuugu

SEQ ID NO: 1459603 - RNA, 19 nt, Artificial Sequence
  Description of Artificial Sequence: Synthetic oligonucleotide
ccccgugcgcacugcgcuu

SEQ ID NO: 1459604 - RNA, 19 nt, Artificial Sequence
  Description of Artificial Sequence: Synthetic oligonucleotide
aauacugagucuugaagcc

SEQ ID NO: 1459605 - RNA, 19 nt, Artificial Sequence
  Description of Artificial Sequence: Synthetic oligonucleotide
agaaagguagcauagacag

SEQ ID NO: 1459606 - RNA, 19 nt, Artificial Sequence
  Description of Artificial Sequence: Synthetic oligonucleotide
uuucuugucaaguagguag

SEQ ID NO: 1459607 - RNA, 19 nt, Artificial Sequence
  Description of Artificial Sequence: Synthetic oligonucleotide
agauuuaagguuuaugauc

SEQ ID NO: 1459608 - RNA, 19 nt, Artificial Sequence
  Description of Artificial Sequence: Synthetic oligonucleotide
auuuaucagcuuuagaguc

SEQ ID NO: 1459609 - RNA, 19 nt, Artificial Sequence
  Description of Artificial Sequence: Synthetic oligonucleotide
uuuaucuucacaguuguag

SEQ ID NO: 1459610 - RNA, 19 nt, Artificial Sequence
  Description of Artificial Sequence: Synthetic oligonucleotide
ugugaagccuucaugaugc

SEQ ID NO: 1459611 - RNA, 19 nt, Artificial Sequence
  Description of Artificial Sequence: Synthetic oligonucleotide
guagcuguuaacaaggucg

SEQ ID NO: 1459612 - RNA, 19 nt, Artificial Sequence
  Description of Artificial Sequence: Synthetic oligonucleotide
aucauuauagagccaagcg

SEQ ID NO: 1459613 - RNA, 19 nt, Artificial Sequence
  Description of Artificial Sequence: Synthetic oligonucleotide
cauuauagagccaagcgag

SEQ ID NO: 1459614 - RNA, 19 nt, Artificial Sequence
  Description of Artificial Sequence: Synthetic oligonucleotide
uaaucugacauacaaauuu

SEQ ID NO: 1459615 - RNA, 19 nt, Artificial Sequence
  Description of Artificial Sequence: Synthetic oligonucleotide
ugcacaaacaccccgaacu

SEQ ID NO: 1459616 - RNA, 19 nt, Artificial Sequence
  Description of Artificial Sequence: Synthetic oligonucleotide
uguuuugguaagcugugcg

SEQ ID NO: 1459617 - RNA, 19 nt, Artificial Sequence
  Description of Artificial Sequence: Synthetic oligonucleotide
uuuaugaucccauuuucug

SEQ ID NO: 1459618 - RNA, 19 nt, Artificial Sequence
  Description of Artificial Sequence: Synthetic oligonucleotide
uuaugaucccauuuucugg

SEQ ID NO: 1459619 - RNA, 19 nt, Artificial Sequence
  Description of Artificial Sequence: Synthetic oligonucleotide
ucauuauagagccaagcga

SEQ ID NO: 1459620 - RNA, 19 nt, Artificial Sequence
  Description of Artificial Sequence: Synthetic oligonucleotide
gagagagugguacaggccg

SEQ ID NO: 1459621 - RNA, 19 nt, Artificial Sequence
  Description of Artificial Sequence: Synthetic oligonucleotide
aaacuuacugucugaauca

SEQ ID NO: 1459622 - RNA, 19 nt, Artificial Sequence
  Description of Artificial Sequence: Synthetic oligonucleotide
uuagagguauaccacacga

SEQ ID NO: 1459623 - RNA, 19 nt, Artificial Sequence
  Description of Artificial Sequence: Synthetic oligonucleotide
ucagaccagaucaagucgg

SEQ ID NO: 1459624 - RNA, 19 nt, Artificial Sequence
  Description of Artificial Sequence: Synthetic oligonucleotide
guaguuuucuuucaugaag

SEQ ID NO: 1459625 - RNA, 19 nt, Artificial Sequence
  Description of Artificial Sequence: Synthetic oligonucleotide
agucuuuagagguauacca

SEQ ID NO: 1459626 - RNA, 19 nt, Artificial Sequence
  Description of Artificial Sequence: Synthetic oligonucleotide
aauauccuuccauuccuag

SEQ ID NO: 1459627 - RNA, 19 nt, Artificial Sequence
  Description of Artificial Sequence: Synthetic oligonucleotide
aguuccaguaaguaucagg

SEQ ID NO: 1459628 - RNA, 19 nt, Artificial Sequence
  Description of Artificial Sequence: Synthetic oligonucleotide
uuuagagguauaccacacg

SEQ ID NO: 1459629 - RNA, 19 nt, Artificial Sequence
  Description of Artificial Sequence: Synthetic oligonucleotide
uaucguaaauuccucuucc

SEQ ID NO: 1459630 - RNA, 19 nt, Artificial Sequence
  Description of Artificial Sequence: Synthetic oligonucleotide
gacuguuauguucuuuucg

SEQ ID NO: 1459631 - RNA, 19 nt, Artificial Sequence
  Description of Artificial Sequence: Synthetic oligonucleotide
uuuaucagcuuuagagucc

SEQ ID NO: 1459632 - RNA, 19 nt, Artificial Sequence
  Description of Artificial Sequence: Synthetic oligonucleotide
caaacuuacugucugaauc

SEQ ID NO: 1459633 - RNA, 19 nt, Artificial Sequence
  Description of Artificial Sequence: Synthetic oligonucleotide
ugucaaguagguagagugg

SEQ ID NO: 1459634 - RNA, 19 nt, Artificial Sequence
  Description of Artificial Sequence: Synthetic oligonucleotide
cuuaguugguccaauguug

SEQ ID NO: 1459635 - RNA, 19 nt, Artificial Sequence
  Description of Artificial Sequence: Synthetic oligonucleotide
gaugggaucgaucagucca

SEQ ID NO: 1459636 - RNA, 19 nt, Artificial Sequence
  Description of Artificial Sequence: Synthetic oligonucleotide
uguucgcuggcaaugguag

SEQ ID NO: 1459637 - RNA, 19 nt, Artificial Sequence
  Description of Artificial Sequence: Synthetic oligonucleotide
uaaguaucaggacucuccc

SEQ ID NO: 1459638 - RNA, 19 nt, Artificial Sequence
  Description of Artificial Sequence: Synthetic oligonucleotide
agaucuuggguccagguca

SEQ ID NO: 1459639 - RNA, 19 nt, Artificial Sequence
  Description of Artificial Sequence: Synthetic oligonucleotide
ucuuuagagguauaccaca

SEQ ID NO: 1459640 - RNA, 19 nt, Artificial Sequence
  Description of Artificial Sequence: Synthetic oligonucleotide
uguuauguucuuuucgaac

SEQ ID NO: 1459641 - RNA, 19 nt, Artificial Sequence
  Description of Artificial Sequence: Synthetic oligonucleotide
gaccaaaucacgauggggc

SEQ ID NO: 1459642 - RNA, 19 nt, Artificial Sequence
  Description of Artificial Sequence: Synthetic oligonucleotide
uaaccuuuguggcugaggu

SEQ ID NO: 1459643 - RNA, 19 nt, Artificial Sequence
  Description of Artificial Sequence: Synthetic oligonucleotide
agagguauaccacacgacu

SEQ ID NO: 1459644 - RNA, 19 nt, Artificial Sequence
  Description of Artificial Sequence: Synthetic oligonucleotide
ugaaguucucauaggccgg

SEQ ID NO: 1459645 - RNA, 19 nt, Artificial Sequence
  Description of Artificial Sequence: Synthetic oligonucleotide
accaaaucacgauggggcc

SEQ ID NO: 1459646 - RNA, 19 nt, Artificial Sequence
  Description of Artificial Sequence: Synthetic oligonucleotide
ggagauuuaagguuuauga

SEQ ID NO: 1459647 - RNA, 19 nt, Artificial Sequence
  Description of Artificial Sequence: Synthetic oligonucleotide
uuaguugguccaauguuga

SEQ ID NO: 1459648 - RNA, 19 nt, Artificial Sequence
  Description of Artificial Sequence: Synthetic oligonucleotide
aaggucguacagcucuggc

SEQ ID NO: 1459649 - RNA, 19 nt, Artificial Sequence
  Description of Artificial Sequence: Synthetic oligonucleotide
uauaccacacgacuguuau

SEQ ID NO: 1459650 - RNA, 19 nt, Artificial Sequence
  Description of Artificial Sequence: Synthetic oligonucleotide
guuuugguaagcugugcgg

SEQ ID NO: 1459651 - RNA, 19 nt, Artificial Sequence
  Description of Artificial Sequence: Synthetic oligonucleotide
uuauguucuuuucgaacug

SEQ ID NO: 1459652 - RNA, 19 nt, Artificial Sequence
  Description of Artificial Sequence: Synthetic oligonucleotide
aggaaagccguggaguucc

SEQ ID NO: 1459653 - RNA, 19 nt, Artificial Sequence
  Description of Artificial Sequence: Synthetic oligonucleotide
aguacagaaagguagcaua

SEQ ID NO: 1459654 - RNA, 19 nt, Artificial Sequence
  Description of Artificial Sequence: Synthetic oligonucleotide
uguuaacaaggucguacag

SEQ ID NO: 1459655 - RNA, 19 nt, Artificial Sequence
  Description of Artificial Sequence: Synthetic oligonucleotide
aacucaccgaccaaaucac

SEQ ID NO: 1459656 - RNA, 19 nt, Artificial Sequence
  Description of Artificial Sequence: Synthetic oligonucleotide
aagagugcggcccacuggu

SEQ ID NO: 1459657 - RNA, 19 nt, Artificial Sequence
  Description of Artificial Sequence: Synthetic oligonucleotide
uaucauuauagagccaagc

SEQ ID NO: 1459658 - RNA, 19 nt, Artificial Sequence
  Description of Artificial Sequence: Synthetic oligonucleotide
guaaguaucaggacucucc

SEQ ID NO: 1459659 - RNA, 19 nt, Artificial Sequence
  Description of Artificial Sequence: Synthetic oligonucleotide
aguugguccaauguugagg

SEQ ID NO: 1459660 - RNA, 19 nt, Artificial Sequence
  Description of Artificial Sequence: Synthetic oligonucleotide
ucuuccgaacagcagcucc

SEQ ID NO: 1459661 - RNA, 19 nt, Artificial Sequence
  Description of Artificial Sequence: Synthetic oligonucleotide
uuucgaacugcacucucca

SEQ ID NO: 1459662 - RNA, 19 nt, Artificial Sequence
  Description of Artificial Sequence: Synthetic oligonucleotide
aagguuuaugaucccauuu

SEQ ID NO: 1459663 - RNA, 19 nt, Artificial Sequence
  Description of Artificial Sequence: Synthetic oligonucleotide
guaaauuccucuuccgaac

SEQ ID NO: 1459664 - RNA, 19 nt, Artificial Sequence
  Description of Artificial Sequence: Synthetic oligonucleotide
uaccacacgacuguuaugu

SEQ ID NO: 1459665 - RNA, 19 nt, Artificial Sequence
  Description of Artificial Sequence: Synthetic oligonucleotide
uuuaagguuuaugauccca

SEQ ID NO: 1459666 - RNA, 19 nt, Artificial Sequence
  Description of Artificial Sequence: Synthetic oligonucleotide
ucguaaauuccucuuccga

SEQ ID NO: 1459667 - RNA, 19 nt, Artificial Sequence
  Description of Artificial Sequence: Synthetic oligonucleotide
aaagccguggaguuccagu

SEQ ID NO: 1459668 - RNA, 19 nt, Artificial Sequence
  Description of Artificial Sequence: Synthetic oligonucleotide
aucguaaauuccucuuccg

SEQ ID NO: 1459669 - RNA, 19 nt, Artificial Sequence
  Description of Artificial Sequence: Synthetic oligonucleotide
aagacacgggacuuggcca

SEQ ID NO: 1459670 - RNA, 19 nt, Artificial Sequence
  Description of Artificial Sequence: Synthetic oligonucleotide
ucugaaucaauuccucaau

SEQ ID NO: 1459671 - RNA, 19 nt, Artificial Sequence
  Description of Artificial Sequence: Synthetic oligonucleotide
cuuuagagguauaccacac

SEQ ID NO: 1459672 - RNA, 19 nt, Artificial Sequence
  Description of Artificial Sequence: Synthetic oligonucleotide
uccacgcugguacacaucu

SEQ ID NO: 1459673 - RNA, 19 nt, Artificial Sequence
  Description of Artificial Sequence: Synthetic oligonucleotide
gaugaggaacccauccugg

SEQ ID NO: 1459674 - RNA, 19 nt, Artificial Sequence
  Description of Artificial Sequence: Synthetic oligonucleotide
gagaacacaccccagugca

SEQ ID NO: 1459675 - RNA, 19 nt, Artificial Sequence
  Description of Artificial Sequence: Synthetic oligonucleotide
auaguugccucccaaacuu

SEQ ID NO: 1459676 - RNA, 19 nt, Artificial Sequence
  Description of Artificial Sequence: Synthetic oligonucleotide
uucuugucaaguagguaga

SEQ ID NO: 1459677 - RNA, 19 nt, Artificial Sequence
  Description of Artificial Sequence: Synthetic oligonucleotide
ugaacugcgguccgaaguc

SEQ ID NO: 1459678 - RNA, 19 nt, Artificial Sequence
  Description of Artificial Sequence: Synthetic oligonucleotide
guuauguucuuuucgaacu

SEQ ID NO: 1459679 - RNA, 19 nt, Artificial Sequence
  Description of Artificial Sequence: Synthetic oligonucleotide
agugccaccagaaccacuc

SEQ ID NO: 1459680 - RNA, 19 nt, Artificial Sequence
  Description of Artificial Sequence: Synthetic oligonucleotide
caacucaccgaccaaauca

SEQ ID NO: 1459681 - RNA, 19 nt, Artificial Sequence
  Description of Artificial Sequence: Synthetic oligonucleotide
agcagcagcagcagcagcc

SEQ ID NO: 1459682 - RNA, 19 nt, Artificial Sequence
  Description of Artificial Sequence: Synthetic oligonucleotide
uuauagagccaagcgagga

SEQ ID NO: 1459683 - RNA, 19 nt, Artificial Sequence
  Description of Artificial Sequence: Synthetic oligonucleotide
agaugggaucgaucagucc

SEQ ID NO: 1459684 - RNA, 19 nt, Artificial Sequence
  Description of Artificial Sequence: Synthetic oligonucleotide
cacgcugguacacaucucc

SEQ ID NO: 1459685 - RNA, 19 nt, Artificial Sequence
  Description of Artificial Sequence: Synthetic oligonucleotide
guagcugaagcccggcggg

SEQ ID NO: 1459686 - RNA, 19 nt, Artificial Sequence
  Description of Artificial Sequence: Synthetic oligonucleotide
uuacugucugaaucaauuc

SEQ ID NO: 1459687 - RNA, 19 nt, Artificial Sequence
  Description of Artificial Sequence: Synthetic oligonucleotide
guacagaaagguagcauag

SEQ ID NO: 1459688 - RNA, 19 nt, Artificial Sequence
  Description of Artificial Sequence: Synthetic oligonucleotide
uauagagccaagcgaggaa

SEQ ID NO: 1459689 - RNA, 19 nt, Artificial Sequence
  Description of Artificial Sequence: Synthetic oligonucleotide
gguagaaauaaucugacau

SEQ ID NO: 1459690 - RNA, 19 nt, Artificial Sequence
  Description of Artificial Sequence: Synthetic oligonucleotide
guagaaauaaucugacaua

SEQ ID NO: 1459691 - RNA, 19 nt, Artificial Sequence
  Description of Artificial Sequence: Synthetic oligonucleotide
ucguuuggggagauuuaag

SEQ ID NO: 1459692 - RNA, 19 nt, Artificial Sequence
  Description of Artificial Sequence: Synthetic oligonucleotide
auaggccggaauccgcucg

SEQ ID NO: 1459693 - RNA, 19 nt, Artificial Sequence
  Description of Artificial Sequence: Synthetic oligonucleotide
uggauggaaccacuccaag

SEQ ID NO: 1459694 - RNA, 19 nt, Artificial Sequence
  Description of Artificial Sequence: Synthetic oligonucleotide
uucaugaugcuuugugguc

SEQ ID NO: 1459695 - RNA, 19 nt, Artificial Sequence
  Description of Artificial Sequence: Synthetic oligonucleotide
ucauaggccggaauccgcu

SEQ ID NO: 1459696 - RNA, 19 nt, Artificial Sequence
  Description of Artificial Sequence: Synthetic oligonucleotide
uccaagacacgggacuugg

SEQ ID NO: 1459697 - RNA, 19 nt, Artificial Sequence
  Description of Artificial Sequence: Synthetic oligonucleotide
agguuuaugaucccauuuu

SEQ ID NO: 1459698 - RNA, 19 nt, Artificial Sequence
  Description of Artificial Sequence: Synthetic oligonucleotide
aagaagcgcgccgugaacu

SEQ ID NO: 1459699 - RNA, 19 nt, Artificial Sequence
  Description of Artificial Sequence: Synthetic oligonucleotide
uagagguauaccacacgac

SEQ ID NO: 1459700 - RNA, 19 nt, Artificial Sequence
  Description of Artificial Sequence: Synthetic oligonucleotide
guacccuccauggugacag

SEQ ID NO: 1459701 - RNA, 19 nt, Artificial Sequence
  Description of Artificial Sequence: Synthetic oligonucleotide
auuauagagccaagcgagg

SEQ ID NO: 1459702 - RNA, 19 nt, Artificial Sequence
  Description of Artificial Sequence: Synthetic oligonucleotide
gagucuuuagagguauacc

SEQ ID NO: 1459703 - RNA, 19 nt, Artificial Sequence
  Description of Artificial Sequence: Synthetic oligonucleotide
cuuccgaacagcagcuccc

SEQ ID NO: 1459704 - RNA, 19 nt, Artificial Sequence
  Description of Artificial Sequence: Synthetic oligonucleotide
agcauagacagccgagucu

SEQ ID NO: 1459705 - RNA, 19 nt, Artificial Sequence
  Description of Artificial Sequence: Synthetic oligonucleotide
ugcacaggcggucugcccu

SEQ ID NO: 1459706 - RNA, 19 nt, Artificial Sequence
  Description of Artificial Sequence: Synthetic oligonucleotide
aaguaucaggacucuccca

SEQ ID NO: 1459707 - RNA, 19 nt, Artificial Sequence
  Description of Artificial Sequence: Synthetic oligonucleotide
ugugcgguguguauuuauc

SEQ ID NO: 1459708 - RNA, 19 nt, Artificial Sequence
  Description of Artificial Sequence: Synthetic oligonucleotide
uacacaucucccacuugug

SEQ ID NO: 1459709 - RNA, 19 nt, Artificial Sequence
  Description of Artificial Sequence: Synthetic oligonucleotide
guaucguaaauuccucuuc

SEQ ID NO: 1459710 - RNA, 19 nt, Artificial Sequence
  Description of Artificial Sequence: Synthetic oligonucleotide
acaaaauacugagucuuga

SEQ ID NO: 1459711 - RNA, 19 nt, Artificial Sequence
  Description of Artificial Sequence: Synthetic oligonucleotide
uccaagagagagugguaca

SEQ ID NO: 1459712 - RNA, 19 nt, Artificial Sequence
  Description of Artificial Sequence: Synthetic oligonucleotide
acaguuguaguacccucca

SEQ ID NO: 1459713 - RNA, 19 nt, Artificial Sequence
  Description of Artificial Sequence: Synthetic oligonucleotide
agacacgggacuuggccag

SEQ ID NO: 1459714 - RNA, 19 nt, Artificial Sequence
  Description of Artificial Sequence: Synthetic oligonucleotide
gagccaagcgaggaaagcc

SEQ ID NO: 1459715 - RNA, 19 nt, Artificial Sequence
  Description of Artificial Sequence: Synthetic oligonucleotide
acgacuguuauguucuuuu

SEQ ID NO: 1459716 - RNA, 19 nt, Artificial Sequence
  Description of Artificial Sequence: Synthetic oligonucleotide
aagccuucaugaugcuuug

SEQ ID NO: 1459717 - RNA, 19 nt, Artificial Sequence
  Description of Artificial Sequence: Synthetic oligonucleotide
aguaaguaucaggacucuc

SEQ ID NO: 1459718 - RNA, 19 nt, Artificial Sequence
  Description of Artificial Sequence: Synthetic oligonucleotide
accaucugggcaguggccg

SEQ ID NO: 1459719 - RNA, 19 nt, Artificial Sequence
  Description of Artificial Sequence: Synthetic oligonucleotide
aguggccgagaguccaggc

SEQ ID NO: 1459720 - RNA, 19 nt, Artificial Sequence
  Description of Artificial Sequence: Synthetic oligonucleotide
gagauuuaagguuuaugau

SEQ ID NO: 1459721 - RNA, 19 nt, Artificial Sequence
  Description of Artificial Sequence: Synthetic oligonucleotide
ucgaucaguccauccuuag

SEQ ID NO: 1459722 - RNA, 19 nt, Artificial Sequence
  Description of Artificial Sequence: Synthetic oligonucleotide
gccucgucaaaccaucugg

SEQ ID NO: 1459723 - RNA, 19 nt, Artificial Sequence
  Description of Artificial Sequence: Synthetic oligonucleotide
cauuuaucagcuuuagagu

SEQ ID NO: 1459724 - RNA, 19 nt, Artificial Sequence
  Description of Artificial Sequence: Synthetic oligonucleotide
caagcgaggaaagccgugg

SEQ ID NO: 1459725 - RNA, 19 nt, Artificial Sequence
  Description of Artificial Sequence: Synthetic oligonucleotide
uagcauagacagccgaguc

SEQ ID NO: 1459726 - RNA, 19 nt, Artificial Sequence
  Description of Artificial Sequence: Synthetic oligonucleotide
gcauuguaaccuuuguggc

SEQ ID NO: 1459727 - RNA, 19 nt, Artificial Sequence
  Description of Artificial Sequence: Synthetic oligonucleotide
caggaugccgaguccacgc

SEQ ID NO: 1459728 - RNA, 19 nt, Artificial Sequence
  Description of Artificial Sequence: Synthetic oligonucleotide
caaaucacgauggggcccc

SEQ ID NO: 1459729 - RNA, 19 nt, Artificial Sequence
  Description of Artificial Sequence: Synthetic oligonucleotide
uagaguggauggaaccacu

SEQ ID NO: 1459730 - RNA, 19 nt, Artificial Sequence
  Description of Artificial Sequence: Synthetic oligonucleotide
uugaggagauaguugccuc

SEQ ID NO: 1459731 - RNA, 19 nt, Artificial Sequence
  Description of Artificial Sequence: Synthetic oligonucleotide
accacucgcugccccaggc

SEQ ID NO: 1459732 - RNA, 19 nt, Artificial Sequence
  Description of Artificial Sequence: Synthetic oligonucleotide
gauaguugccucccaaacu

SEQ ID NO: 1459733 - RNA, 19 nt, Artificial Sequence
  Description of Artificial Sequence: Synthetic oligonucleotide
aagccguggaguuccagua

SEQ ID NO: 1459734 - RNA, 19 nt, Artificial Sequence
  Description of Artificial Sequence: Synthetic oligonucleotide
agaccagaucaagucgggc

SEQ ID NO: 1459735 - RNA, 19 nt, Artificial Sequence
  Description of Artificial Sequence: Synthetic oligonucleotide
ucaaguagguagaguggau

SEQ ID NO: 1459736 - RNA, 19 nt, Artificial Sequence
  Description of Artificial Sequence: Synthetic oligonucleotide
ggcaaugguagacaggguc

SEQ ID NO: 1459737 - RNA, 19 nt, Artificial Sequence
  Description of Artificial Sequence: Synthetic oligonucleotide
ggguaguuuucuuucauga

SEQ ID NO: 1459738 - RNA, 19 nt, Artificial Sequence
  Description of Artificial Sequence: Synthetic oligonucleotide
agccaagcgaggaaagccg

SEQ ID NO: 1459739 - RNA, 19 nt, Artificial Sequence
  Description of Artificial Sequence: Synthetic oligonucleotide
gucuuuagagguauaccac

SEQ ID NO: 1459740 - RNA, 19 nt, Artificial Sequence
  Description of Artificial Sequence: Synthetic oligonucleotide
ucaccgaccaaaucacgau

SEQ ID NO: 1459741 - RNA, 19 nt, Artificial Sequence
  Description of Artificial Sequence: Synthetic oligonucleotide
uuggccucgucaaaccauc

SEQ ID NO: 1459742 - RNA, 19 nt, Artificial Sequence
  Description of Artificial Sequence: Synthetic oligonucleotide
agcgaggaaagccguggag

SEQ ID NO: 1459743 - RNA, 19 nt, Artificial Sequence
  Description of Artificial Sequence: Synthetic oligonucleotide
uucgaacugcacucuccag

SEQ ID NO: 1459744 - RNA, 19 nt, Artificial Sequence
  Description of Artificial Sequence: Synthetic oligonucleotide
uccuguucgcuggcaaugg

SEQ ID NO: 1459745 - RNA, 19 nt, Artificial Sequence
  Description of Artificial Sequence: Synthetic oligonucleotide
agcggcgaggagccgaggg

SEQ ID NO: 1459746 - RNA, 19 nt, Artificial Sequence
  Description of Artificial Sequence: Synthetic oligonucleotide
cuuacugucugaaucaauu

SEQ ID NO: 1459747 - RNA, 19 nt, Artificial Sequence
  Description of Artificial Sequence: Synthetic oligonucleotide
augucccgucuguagcccc

SEQ ID NO: 1459748 - RNA, 19 nt, Artificial Sequence
  Description of Artificial Sequence: Synthetic oligonucleotide
cagaccagaucaagucggg

SEQ ID NO: 1459749 - RNA, 19 nt, Artificial Sequence
  Description of Artificial Sequence: Synthetic oligonucleotide
cucagcagcagcagcagca

SEQ ID NO: 1459750 - RNA, 19 nt, Artificial Sequence
  Description of Artificial Sequence: Synthetic oligonucleotide
agagcagucgguggcaaug

SEQ ID NO: 1459751 - RNA, 19 nt, Artificial Sequence
  Description of Artificial Sequence: Synthetic oligonucleotide
gucaaguagguagagugga

SEQ ID NO: 1459752 - RNA, 19 nt, Artificial Sequence
  Description of Artificial Sequence: Synthetic oligonucleotide
acgggacuuggccaguuug

SEQ ID NO: 1459753 - RNA, 19 nt, Artificial Sequence
  Description of Artificial Sequence: Synthetic oligonucleotide
ccaguaaguaucaggacuc

SEQ ID NO: 1459754 - RNA, 19 nt, Artificial Sequence
  Description of Artificial Sequence: Synthetic oligonucleotide
aggccguaucguaaauucc

SEQ ID NO: 1459755 - RNA, 19 nt, Artificial Sequence
  Description of Artificial Sequence: Synthetic oligonucleotide
aagcgaggaaagccgugga

SEQ ID NO: 1459756 - RNA, 19 nt, Artificial Sequence
  Description of Artificial Sequence: Synthetic oligonucleotide
gaccagaucaagucgggcu

SEQ ID NO: 1459757 - RNA, 19 nt, Artificial Sequence
  Description of Artificial Sequence: Synthetic oligonucleotide
aacugcgguccgaagucgg

SEQ ID NO: 1459758 - RNA, 19 nt, Artificial Sequence
  Description of Artificial Sequence: Synthetic oligonucleotide
cucaccgaccaaaucacga

SEQ ID NO: 1459759 - RNA, 19 nt, Artificial Sequence
  Description of Artificial Sequence: Synthetic oligonucleotide
ucagcagcagcagcagcag

SEQ ID NO: 1459760 - RNA, 19 nt, Artificial Sequence
  Description of Artificial Sequence: Synthetic oligonucleotide
agguagcauagacagccga

SEQ ID NO: 1459761 - RNA, 19 nt, Artificial Sequence
  Description of Artificial Sequence: Synthetic oligonucleotide
cuucaugaugcuuuguggu

SEQ ID NO: 1459762 - RNA, 19 nt, Artificial Sequence
  Description of Artificial Sequence: Synthetic oligonucleotide
aacuuacugucugaaucaa

SEQ ID NO: 1459763 - RNA, 19 nt, Artificial Sequence
  Description of Artificial Sequence: Synthetic oligonucleotide
gaccccagcggucauucac

SEQ ID NO: 1459764 - RNA, 19 nt, Artificial Sequence
  Description of Artificial Sequence: Synthetic oligonucleotide
ucguacagcucuggcauug

SEQ ID NO: 1459765 - RNA, 19 nt, Artificial Sequence
  Description of Artificial Sequence: Synthetic oligonucleotide
acuugccaacagcaagaag

SEQ ID NO: 1459766 - RNA, 19 nt, Artificial Sequence
  Description of Artificial Sequence: Synthetic oligonucleotide
ugcgguguguauuuaucuu

SEQ ID NO: 1459767 - RNA, 19 nt, Artificial Sequence
  Description of Artificial Sequence: Synthetic oligonucleotide
accagaucaagucgggcuu

SEQ ID NO: 1459768 - RNA, 19 nt, Artificial Sequence
  Description of Artificial Sequence: Synthetic oligonucleotide
gcuaucauuauagagccaa

SEQ ID NO: 1459769 - RNA, 19 nt, Artificial Sequence
  Description of Artificial Sequence: Synthetic oligonucleotide
gcaguucugaccccagcgg

SEQ ID NO: 1459770 - RNA, 19 nt, Artificial Sequence
  Description of Artificial Sequence: Synthetic oligonucleotide
agaagcgcgccgugaacug

SEQ ID NO: 1459771 - RNA, 19 nt, Artificial Sequence
  Description of Artificial Sequence: Synthetic oligonucleotide
aaccacucgcugccccagg

SEQ ID NO: 1459772 - RNA, 19 nt, Artificial Sequence
  Description of Artificial Sequence: Synthetic oligonucleotide
ucccaaacuuacugucuga

SEQ ID NO: 1459773 - RNA, 19 nt, Artificial Sequence
  Description of Artificial Sequence: Synthetic oligonucleotide
gaacugcgguccgaagucg

SEQ ID NO: 1459774 - RNA, 19 nt, Artificial Sequence
  Description of Artificial Sequence: Synthetic oligonucleotide
caguccgggguguagcggc

SEQ ID NO: 1459775 - RNA, 19 nt, Artificial Sequence
  Description of Artificial Sequence: Synthetic oligonucleotide
uguagcggcgaggagccga

SEQ ID NO: 1459776 - RNA, 19 nt, Artificial Sequence
  Description of Artificial Sequence: Synthetic oligonucleotide
gaagaagcgcgccgugaac

SEQ ID NO: 1459777 - RNA, 19 nt, Artificial Sequence
  Description of Artificial Sequence: Synthetic oligonucleotide
ucccacuuguguuuuggua

SEQ ID NO: 1459778 - RNA, 19 nt, Artificial Sequence
  Description of Artificial Sequence: Synthetic oligonucleotide
aagcgcgccgugaacugcg

SEQ ID NO: 1459779 - RNA, 19 nt, Artificial Sequence
  Description of Artificial Sequence: Synthetic oligonucleotide
uuuccuguucgcuggcaau

SEQ ID NO: 1459780 - RNA, 19 nt, Artificial Sequence
  Description of Artificial Sequence: Synthetic oligonucleotide
gagcagucgguggcaaugg

SEQ ID NO: 1459781 - RNA, 19 nt, Artificial Sequence
  Description of Artificial Sequence: Synthetic oligonucleotide
cacacgacuguuauguucu

SEQ ID NO: 1459782 - RNA, 19 nt, Artificial Sequence
  Description of Artificial Sequence: Synthetic oligonucleotide
cuuuucgaacugcacucuc

SEQ ID NO: 1459783 - RNA, 19 nt, Artificial Sequence
  Description of Artificial Sequence: Synthetic oligonucleotide
aguucugaccccagcgguc

SEQ ID NO: 1459784 - RNA, 19 nt, Artificial Sequence
  Description of Artificial Sequence: Synthetic oligonucleotide
agcagucgguggcaauggg

SEQ ID NO: 1459785 - RNA, 19 nt, Artificial Sequence
  Description of Artificial Sequence: Synthetic oligonucleotide
acaccccgaacuuggccuc

SEQ ID NO: 1459786 - RNA, 19 nt, Artificial Sequence
  Description of Artificial Sequence: Synthetic oligonucleotide
caaacaccccgaacuuggc

SEQ ID NO: 1459787 - RNA, 19 nt, Artificial Sequence
  Description of Artificial Sequence: Synthetic oligonucleotide
cuuuagaguccaggcaaac

SEQ ID NO: 1459788 - RNA, 19 nt, Artificial Sequence
  Description of Artificial Sequence: Synthetic oligonucleotide
ucuuggaagaugggaucga

SEQ ID NO: 1459789 - RNA, 19 nt, Artificial Sequence
  Description of Artificial Sequence: Synthetic oligonucleotide
uaggccggaauccgcucgc

SEQ ID NO: 1459790 - RNA, 19 nt, Artificial Sequence
  Description of Artificial Sequence: Synthetic oligonucleotide
auaccacacgacuguuaug

SEQ ID NO: 1459791 - RNA, 19 nt, Artificial Sequence
  Description of Artificial Sequence: Synthetic oligonucleotide
aaauauccuuccauuccua

SEQ ID NO: 1459792 - RNA, 19 nt, Artificial Sequence
  Description of Artificial Sequence: Synthetic oligonucleotide
guaguacccuccaugguga

SEQ ID NO: 1459793 - RNA, 19 nt, Artificial Sequence
  Description of Artificial Sequence: Synthetic oligonucleotide
gaugggaggcauagauggc

SEQ ID NO: 1459794 - RNA, 19 nt, Artificial Sequence
  Description of Artificial Sequence: Synthetic oligonucleotide
ucacgauggggccccacau

SEQ ID NO: 1459795 - RNA, 19 nt, Artificial Sequence
  Description of Artificial Sequence: Synthetic oligonucleotide
gaagucggcguagcugaag

SEQ ID NO: 1459796 - RNA, 19 nt, Artificial Sequence
  Description of Artificial Sequence: Synthetic oligonucleotide
agugcacaaacaccccgaa

SEQ ID NO: 1459797 - RNA, 19 nt, Artificial Sequence
  Description of Artificial Sequence: Synthetic oligonucleotide
uugguccaauguugaggag

SEQ ID NO: 1459798 - RNA, 19 nt, Artificial Sequence
  Description of Artificial Sequence: Synthetic oligonucleotide
ccucgucaaaccaucuggg

SEQ ID NO: 1459799 - RNA, 19 nt, Artificial Sequence
  Description of Artificial Sequence: Synthetic oligonucleotide
ccuagcauuguaaccuuug

SEQ ID NO: 1459800 - RNA, 19 nt, Artificial Sequence
  Description of Artificial Sequence: Synthetic oligonucleotide
caggcgggcaccgagaaca

SEQ ID NO: 1459801 - RNA, 19 nt, Artificial Sequence
  Description of Artificial Sequence: Synthetic oligonucleotide
ugucccgucuguagcccca

SEQ ID NO: 1459802 - RNA, 19 nt, Artificial Sequence
  Description of Artificial Sequence: Synthetic oligonucleotide
aggucguuuggggagauuu

SEQ ID NO: 1459803 - RNA, 19 nt, Artificial Sequence
  Description of Artificial Sequence: Synthetic oligonucleotide
guuuaugaucccauuuucu

SEQ ID NO: 1459804 - RNA, 19 nt, Artificial Sequence
  Description of Artificial Sequence: Synthetic oligonucleotide
gaaguucucauaggccgga

SEQ ID NO: 1459805 - RNA, 19 nt, Artificial Sequence
  Description of Artificial Sequence: Synthetic oligonucleotide
cagaaccacucgcugcccc

SEQ ID NO: 1459806 - RNA, 19 nt, Artificial Sequence
  Description of Artificial Sequence: Synthetic oligonucleotide
cuuggguccaggucaaaua

SEQ ID NO: 1459807 - RNA, 19 nt, Artificial Sequence
  Description of Artificial Sequence: Synthetic oligonucleotide
ucguccuugacagggcuau

SEQ ID NO: 1459808 - RNA, 19 nt, Artificial Sequence
  Description of Artificial Sequence: Synthetic oligonucleotide
cauuguaaccuuuguggcu

SEQ ID NO: 1459809 - RNA, 19 nt, Artificial Sequence
  Description of Artificial Sequence: Synthetic oligonucleotide
gguguagcggcgaggagcc

SEQ ID NO: 1459810 - RNA, 19 nt, Artificial Sequence
  Description of Artificial Sequence: Synthetic oligonucleotide
gccgaguccacgcugguac

SEQ ID NO: 1459811 - RNA, 19 nt, Artificial Sequence
  Description of Artificial Sequence: Synthetic oligonucleotide
ugcgguccgaagucggcgu

SEQ ID NO: 1459812 - RNA, 19 nt, Artificial Sequence
  Description of Artificial Sequence: Synthetic oligonucleotide
caaggucguacagcucugg

SEQ ID NO: 1459813 - RNA, 19 nt, Artificial Sequence
  Description of Artificial Sequence: Synthetic oligonucleotide
cagcuuuagaguccaggca

SEQ ID NO: 1459814 - RNA, 19 nt, Artificial Sequence
  Description of Artificial Sequence: Synthetic oligonucleotide
uuccuagcauuguaaccuu

SEQ ID NO: 1459815 - RNA, 19 nt, Artificial Sequence
  Description of Artificial Sequence: Synthetic oligonucleotide
agcugugcgguguguauuu

SEQ ID NO: 1459816 - RNA, 19 nt, Artificial Sequence
  Description of Artificial Sequence: Synthetic oligonucleotide
cuguuauguucuuuucgaa

SEQ ID NO: 1459817 - RNA, 19 nt, Artificial Sequence
  Description of Artificial Sequence: Synthetic oligonucleotide
gguagaguggauggaacca

SEQ ID NO: 1459818 - RNA, 19 nt, Artificial Sequence
  Description of Artificial Sequence: Synthetic oligonucleotide
acucaccgaccaaaucacg

SEQ ID NO: 1459819 - RNA, 19 nt, Artificial Sequence
  Description of Artificial Sequence: Synthetic oligonucleotide
ggaagagugcggcccacug

SEQ ID NO: 1459820 - RNA, 19 nt, Artificial Sequence
  Description of Artificial Sequence: Synthetic oligonucleotide
caacaaaauacugagucuu

SEQ ID NO: 1459821 - RNA, 19 nt, Artificial Sequence
  Description of Artificial Sequence: Synthetic oligonucleotide
gcgguguguauuuaucuuc

SEQ ID NO: 1459822 - RNA, 19 nt, Artificial Sequence
  Description of Artificial Sequence: Synthetic oligonucleotide
uuccgaacagcagcuccca

SEQ ID NO: 1459823 - RNA, 19 nt, Artificial Sequence
  Description of Artificial Sequence: Synthetic oligonucleotide
uacaggccguaucguaaau

SEQ ID NO: 1459824 - RNA, 19 nt, Artificial Sequence
  Description of Artificial Sequence: Synthetic oligonucleotide
gaucgaucaguccauccuu

SEQ ID NO: 1459825 - RNA, 19 nt, Artificial Sequence
  Description of Artificial Sequence: Synthetic oligonucleotide
uugcacaggcggucugccc

SEQ ID NO: 1459826 - RNA, 19 nt, Artificial Sequence
  Description of Artificial Sequence: Synthetic oligonucleotide
uccgggguguagcggcgag

SEQ ID NO: 1459827 - RNA, 19 nt, Artificial Sequence
  Description of Artificial Sequence: Synthetic oligonucleotide
ccaagagagagugguacag

SEQ ID NO: 1459828 - RNA, 19 nt, Artificial Sequence
  Description of Artificial Sequence: Synthetic oligonucleotide
gaaccacucgcugccccag

SEQ ID NO: 1459829 - RNA, 19 nt, Artificial Sequence
  Description of Artificial Sequence: Synthetic oligonucleotide
uccuagcauuguaaccuuu

SEQ ID NO: 1459830 - RNA, 19 nt, Artificial Sequence
  Description of Artificial Sequence: Synthetic oligonucleotide
gcggucauucaccaccacc

SEQ ID NO: 1459831 - RNA, 19 nt, Artificial Sequence
  Description of Artificial Sequence: Synthetic oligonucleotide
gggaucgaucaguccaucc

SEQ ID NO: 1459832 - RNA, 19 nt, Artificial Sequence
  Description of Artificial Sequence: Synthetic oligonucleotide
uggggagauuuaagguuua

SEQ ID NO: 1459833 - RNA, 19 nt, Artificial Sequence
  Description of Artificial Sequence: Synthetic oligonucleotide
gccaguacagaaagguagc

SEQ ID NO: 1459834 - RNA, 19 nt, Artificial Sequence
  Description of Artificial Sequence: Synthetic oligonucleotide
cauaggccggaauccgcuc

SEQ ID NO: 1459835 - RNA, 19 nt, Artificial Sequence
  Description of Artificial Sequence: Synthetic oligonucleotide
guacaggccguaucguaaa

SEQ ID NO: 1459836 - RNA, 19 nt, Artificial Sequence
  Description of Artificial Sequence: Synthetic oligonucleotide
uggcaaugguagacagggu

SEQ ID NO: 1459837 - RNA, 19 nt, Artificial Sequence
  Description of Artificial Sequence: Synthetic oligonucleotide
gaagcgcgccgugaacugc

SEQ ID NO: 1459838 - RNA, 19 nt, Artificial Sequence
  Description of Artificial Sequence: Synthetic oligonucleotide
cugcgguccgaagucggcg

SEQ ID NO: 1459839 - RNA, 19 nt, Artificial Sequence
  Description of Artificial Sequence: Synthetic oligonucleotide
gaguuccaguaaguaucag

SEQ ID NO: 1459840 - RNA, 19 nt, Artificial Sequence
  Description of Artificial Sequence: Synthetic oligonucleotide
gcaccgagaacacacccca

SEQ ID NO: 1459841 - RNA, 19 nt, Artificial Sequence
  Description of Artificial Sequence: Synthetic oligonucleotide
gcaaugguagacaggguca

SEQ ID NO: 1459842 - RNA, 19 nt, Artificial Sequence
  Description of Artificial Sequence: Synthetic oligonucleotide
gcagucgguggcaaugggg

SEQ ID NO: 1459843 - RNA, 19 nt, Artificial Sequence
  Description of Artificial Sequence: Synthetic oligonucleotide
ugcacucuccagggauggg

SEQ ID NO: 1459844 - RNA, 19 nt, Artificial Sequence
  Description of Artificial Sequence: Synthetic oligonucleotide
guggaguuccaguaaguau

SEQ ID NO: 1459845 - RNA, 19 nt, Artificial Sequence
  Description of Artificial Sequence: Synthetic oligonucleotide
gucguuuggggagauuuaa

SEQ ID NO: 1459846 - RNA, 19 nt, Artificial Sequence
  Description of Artificial Sequence: Synthetic oligonucleotide
gguguguauuuaucuucac

SEQ ID NO: 1459847 - RNA, 19 nt, Artificial Sequence
  Description of Artificial Sequence: Synthetic oligonucleotide
cagccgagucuuuagaggu

SEQ ID NO: 1459848 - RNA, 19 nt, Artificial Sequence
  Description of Artificial Sequence: Synthetic oligonucleotide
uggccucgucaaaccaucu

SEQ ID NO: 1459849 - RNA, 19 nt, Artificial Sequence
  Description of Artificial Sequence: Synthetic oligonucleotide
ccacacgacuguuauguuc

SEQ ID NO: 1459850 - RNA, 19 nt, Artificial Sequence
  Description of Artificial Sequence: Synthetic oligonucleotide
ggaucgaucaguccauccu

SEQ ID NO: 1459851 - RNA, 19 nt, Artificial Sequence
  Description of Artificial Sequence: Synthetic oligonucleotide
gcucccaacucaccgacca

SEQ ID NO: 1459852 - RNA, 19 nt, Artificial Sequence
  Description of Artificial Sequence: Synthetic oligonucleotide
ucccgucuguagccccagg

SEQ ID NO: 1459853 - RNA, 19 nt, Artificial Sequence
  Description of Artificial Sequence: Synthetic oligonucleotide
uacccuccauggugacagg

SEQ ID NO: 1459854 - RNA, 19 nt, Artificial Sequence
  Description of Artificial Sequence: Synthetic oligonucleotide
cacuccaagagagaguggu

SEQ ID NO: 1459855 - RNA, 19 nt, Artificial Sequence
  Description of Artificial Sequence: Synthetic oligonucleotide
guagcauagacagccgagu

SEQ ID NO: 1459856 - RNA, 19 nt, Artificial Sequence
  Description of Artificial Sequence: Synthetic oligonucleotide
gugcgguguguauuuaucu

SEQ ID NO: 1459857 - RNA, 19 nt, Artificial Sequence
  Description of Artificial Sequence: Synthetic oligonucleotide
agcucccaacucaccgacc

SEQ ID NO: 1459858 - RNA, 19 nt, Artificial Sequence
  Description of Artificial Sequence: Synthetic oligonucleotide
cucgcucugccagugccac

SEQ ID NO: 1459859 - RNA, 19 nt, Artificial Sequence
  Description of Artificial Sequence: Synthetic oligonucleotide
acaaggucguacagcucug

SEQ ID NO: 1459860 - RNA, 19 nt, Artificial Sequence
  Description of Artificial Sequence: Synthetic oligonucleotide
agccguggaguuccaguaa

SEQ ID NO: 1459861 - RNA, 19 nt, Artificial Sequence
  Description of Artificial Sequence: Synthetic oligonucleotide
uccgaacagcagcucccaa

SEQ ID NO: 1459862 - RNA, 19 nt, Artificial Sequence
  Description of Artificial Sequence: Synthetic oligonucleotide
caccgagaacacaccccag

SEQ ID NO: 1459863 - RNA, 19 nt, Artificial Sequence
  Description of Artificial Sequence: Synthetic oligonucleotide
gccucccaaacuuacuguc

SEQ ID NO: 1459864 - RNA, 19 nt, Artificial Sequence
  Description of Artificial Sequence: Synthetic oligonucleotide
cguaaauuccucuuccgaa

SEQ ID NO: 1459865 - RNA, 19 nt, Artificial Sequence
  Description of Artificial Sequence: Synthetic oligonucleotide
cuguucgcuggcaauggua

SEQ ID NO: 1459866 - RNA, 19 nt, Artificial Sequence
  Description of Artificial Sequence: Synthetic oligonucleotide
guagcggcgaggagccgag

SEQ ID NO: 1459867 - RNA, 19 nt, Artificial Sequence
  Description of Artificial Sequence: Synthetic oligonucleotide
aguacccuccauggugaca

SEQ ID NO: 1459868 - RNA, 19 nt, Artificial Sequence
  Description of Artificial Sequence: Synthetic oligonucleotide
cuguagccccaggaugccg

SEQ ID NO: 1459869 - RNA, 19 nt, Artificial Sequence
  Description of Artificial Sequence: Synthetic oligonucleotide
ccgagaacacaccccagug

SEQ ID NO: 1459870 - RNA, 19 nt, Artificial Sequence
  Description of Artificial Sequence: Synthetic oligonucleotide
aaguucucauaggccggaa

SEQ ID NO: 1459871 - RNA, 19 nt, Artificial Sequence
  Description of Artificial Sequence: Synthetic oligonucleotide
ccaaaucacgauggggccc

SEQ ID NO: 1459872 - RNA, 19 nt, Artificial Sequence
  Description of Artificial Sequence: Synthetic oligonucleotide
agagagugguacaggccgu

SEQ ID NO: 1459873 - RNA, 19 nt, Artificial Sequence
  Description of Artificial Sequence: Synthetic oligonucleotide
gaguccaggcaaacuccac

SEQ ID NO: 1459874 - RNA, 19 nt, Artificial Sequence
  Description of Artificial Sequence: Synthetic oligonucleotide
uggaagagugcggcccacu

SEQ ID NO: 1459875 - RNA, 19 nt, Artificial Sequence
  Description of Artificial Sequence: Synthetic oligonucleotide
ggcccacugguccgggugg

SEQ ID NO: 1459876 - RNA, 19 nt, Artificial Sequence
  Description of Artificial Sequence: Synthetic oligonucleotide
gguacaggccguaucguaa

SEQ ID NO: 1459877 - RNA, 19 nt, Artificial Sequence
  Description of Artificial Sequence: Synthetic oligonucleotide
guucgcuggcaaugguaga

SEQ ID NO: 1459878 - RNA, 19 nt, Artificial Sequence
  Description of Artificial Sequence: Synthetic oligonucleotide
cagcagcagcagcagcagc

SEQ ID NO: 1459879 - RNA, 19 nt, Artificial Sequence
  Description of Artificial Sequence: Synthetic oligonucleotide
augggaucgaucaguccau

SEQ ID NO: 1459880 - RNA, 19 nt, Artificial Sequence
  Description of Artificial Sequence: Synthetic oligonucleotide
ggccucgucaaaccaucug

SEQ ID NO: 1459881 - RNA, 19 nt, Artificial Sequence
  Description of Artificial Sequence: Synthetic oligonucleotide
caguggccgagaguccagg

SEQ ID NO: 1459882 - RNA, 19 nt, Artificial Sequence
  Description of Artificial Sequence: Synthetic oligonucleotide
gaguccacgcugguacaca

SEQ ID NO: 1459883 - RNA, 19 nt, Artificial Sequence
  Description of Artificial Sequence: Synthetic oligonucleotide
ccgaccaaaucacgauggg

SEQ ID NO: 1459884 - RNA, 19 nt, Artificial Sequence
  Description of Artificial Sequence: Synthetic oligonucleotide
gccuggaagagugcggccc

SEQ ID NO: 1459885 - RNA, 19 nt, Artificial Sequence
  Description of Artificial Sequence: Synthetic oligonucleotide
aucgaucaguccauccuua

SEQ ID NO: 1459886 - RNA, 19 nt, Artificial Sequence
  Description of Artificial Sequence: Synthetic oligonucleotide
cacauacuuggccccggca

SEQ ID NO: 1459887 - RNA, 19 nt, Artificial Sequence
  Description of Artificial Sequence: Synthetic oligonucleotide
gggacuuggccaguuugug

SEQ ID NO: 1459888 - RNA, 19 nt, Artificial Sequence
  Description of Artificial Sequence: Synthetic oligonucleotide
caaugauuuccuguucgcu

SEQ ID NO: 1459889 - RNA, 19 nt, Artificial Sequence
  Description of Artificial Sequence: Synthetic oligonucleotide
gcguagcugaagcccggcg

SEQ ID NO: 1459890 - RNA, 19 nt, Artificial Sequence
  Description of Artificial Sequence: Synthetic oligonucleotide
cgaccaaaucacgaugggg

SEQ ID NO: 1459891 - RNA, 19 nt, Artificial Sequence
  Description of Artificial Sequence: Synthetic oligonucleotide
guauaccacacgacuguua

SEQ ID NO: 1459892 - RNA, 19 nt, Artificial Sequence
  Description of Artificial Sequence: Synthetic oligonucleotide
ccaacaaaauacugagucu

SEQ ID NO: 1459893 - RNA, 19 nt, Artificial Sequence
  Description of Artificial Sequence: Synthetic oligonucleotide
cgagucuuuagagguauac

SEQ ID NO: 1459894 - RNA, 19 nt, Artificial Sequence
  Description of Artificial Sequence: Synthetic oligonucleotide
guaagcugugcggugugua

SEQ ID NO: 1459895 - RNA, 19 nt, Artificial Sequence
  Description of Artificial Sequence: Synthetic oligonucleotide
cuuggccucgucaaaccau

SEQ ID NO: 1459896 - RNA, 19 nt, Artificial Sequence
  Description of Artificial Sequence: Synthetic oligonucleotide
ugggaucgaucaguccauc

SEQ ID NO: 1459897 - RNA, 19 nt, Artificial Sequence
  Description of Artificial Sequence: Synthetic oligonucleotide
accacacgacuguuauguu

SEQ ID NO: 1459898 - RNA, 19 nt, Artificial Sequence
  Description of Artificial Sequence: Synthetic oligonucleotide
guaucaggacucucccagu

SEQ ID NO: 1459899 - RNA, 19 nt, Artificial Sequence
  Description of Artificial Sequence: Synthetic oligonucleotide
ugaccccagcggucauuca

SEQ ID NO: 1459900 - RNA, 19 nt, Artificial Sequence
  Description of Artificial Sequence: Synthetic oligonucleotide
gauggggccccacauccuu

SEQ ID NO: 1459901 - RNA, 19 nt, Artificial Sequence
  Description of Artificial Sequence: Synthetic oligonucleotide
cccagugcacaaacacccc

SEQ ID NO: 1459902 - RNA, 19 nt, Artificial Sequence
  Description of Artificial Sequence: Synthetic oligonucleotide
agagugguacaggccguau

SEQ ID NO: 1459903 - RNA, 19 nt, Artificial Sequence
  Description of Artificial Sequence: Synthetic oligonucleotide
ggccguaucguaaauuccu

SEQ ID NO: 1459904 - RNA, 19 nt, Artificial Sequence
  Description of Artificial Sequence: Synthetic oligonucleotide
aaaucacgauggggcccca

SEQ ID NO: 1459905 - RNA, 19 nt, Artificial Sequence
  Description of Artificial Sequence: Synthetic oligonucleotide
ccaacucaccgaccaaauc

SEQ ID NO: 1459906 - RNA, 19 nt, Artificial Sequence
  Description of Artificial Sequence: Synthetic oligonucleotide
ggaaccacuccaagagaga

SEQ ID NO: 1459907 - RNA, 19 nt, Artificial Sequence
  Description of Artificial Sequence: Synthetic oligonucleotide
ugaggucguuuggggagau

SEQ ID NO: 1459908 - RNA, 19 nt, Artificial Sequence
  Description of Artificial Sequence: Synthetic oligonucleotide
ccaagcgaggaaagccgug

SEQ ID NO: 1459909 - RNA, 19 nt, Artificial Sequence
  Description of Artificial Sequence: Synthetic oligonucleotide
gcagcagcagcagcagccc

SEQ ID NO: 1459910 - RNA, 19 nt, Artificial Sequence
  Description of Artificial Sequence: Synthetic oligonucleotide
ccccacauccuuugaguuc

SEQ ID NO: 1459911 - RNA, 19 nt, Artificial Sequence
  Description of Artificial Sequence: Synthetic oligonucleotide
gagagugguacaggccgua

SEQ ID NO: 1459912 - RNA, 19 nt, Artificial Sequence
  Description of Artificial Sequence: Synthetic oligonucleotide
acacgacuguuauguucuu

SEQ ID NO: 1459913 - RNA, 19 nt, Artificial Sequence
  Description of Artificial Sequence: Synthetic oligonucleotide
cccguugaucugcagccac

SEQ ID NO: 1459914 - RNA, 19 nt, Artificial Sequence
  Description of Artificial Sequence: Synthetic oligonucleotide
ccaguccccaucagaccag

SEQ ID NO: 1459915 - RNA, 19 nt, Artificial Sequence
  Description of Artificial Sequence: Synthetic oligonucleotide
ccggguggaagaagcgcgc

SEQ ID NO: 1459916 - RNA, 19 nt, Artificial Sequence
  Description of Artificial Sequence: Synthetic oligonucleotide
caccccgaacuuggccucg

SEQ ID NO: 1459917 - RNA, 19 nt, Artificial Sequence
  Description of Artificial Sequence: Synthetic oligonucleotide
cucuuccgaacagcagcuc

SEQ ID NO: 1459918 - RNA, 19 nt, Artificial Sequence
  Description of Artificial Sequence: Synthetic oligonucleotide
ccaggaugccgaguccacg

SEQ ID NO: 1459919 - RNA, 19 nt, Artificial Sequence
  Description of Artificial Sequence: Synthetic oligonucleotide
ugcggcccacugguccggg

SEQ ID NO: 1459920 - RNA, 19 nt, Artificial Sequence
  Description of Artificial Sequence: Synthetic oligonucleotide
ugaagcccggcggguaguu

SEQ ID NO: 1459921 - RNA, 19 nt, Artificial Sequence
  Description of Artificial Sequence: Synthetic oligonucleotide
gcgccgugaacugcggucc

SEQ ID NO: 1459922 - RNA, 19 nt, Artificial Sequence
  Description of Artificial Sequence: Synthetic oligonucleotide
gguccgaagucggcguagc

SEQ ID NO: 1459923 - RNA, 19 nt, Artificial Sequence
  Description of Artificial Sequence: Synthetic oligonucleotide
gccguaucguaaauuccuc

SEQ ID NO: 1459924 - RNA, 19 nt, Artificial Sequence
  Description of Artificial Sequence: Synthetic oligonucleotide
cacagggagagcagucggu

SEQ ID NO: 1459925 - RNA, 19 nt, Artificial Sequence
  Description of Artificial Sequence: Synthetic oligonucleotide
gguccaauguugaggagau

SEQ ID NO: 1459926 - RNA, 19 nt, Artificial Sequence
  Description of Artificial Sequence: Synthetic oligonucleotide
gcggucugcccuugaacuc

SEQ ID NO: 1459927 - RNA, 19 nt, Artificial Sequence
  Description of Artificial Sequence: Synthetic oligonucleotide
ccaucagaccagaucaagu

SEQ ID NO: 1459928 - RNA, 19 nt, Artificial Sequence
  Description of Artificial Sequence: Synthetic oligonucleotide
ggccccacauccuuugagu

SEQ ID NO: 1459929 - RNA, 19 nt, Artificial Sequence
  Description of Artificial Sequence: Synthetic oligonucleotide
gccggaauccgcucgcucu

SEQ ID NO: 1459930 - RNA, 19 nt, Artificial Sequence
  Description of Artificial Sequence: Synthetic oligonucleotide
ccagaucaagucgggcuug

SEQ ID NO: 1459931 - RNA, 19 nt, Artificial Sequence
  Description of Artificial Sequence: Synthetic oligonucleotide
cggucauucaccaccaccu

SEQ ID NO: 1459932 - RNA, 19 nt, Artificial Sequence
  Description of Artificial Sequence: Synthetic oligonucleotide
ccggaauccgcucgcucug

SEQ ID NO: 1459933 - RNA, 19 nt, Artificial Sequence
  Description of Artificial Sequence: Synthetic oligonucleotide
uagcggcgaggagccgagg

SEQ ID NO: 1459934 - RNA, 19 nt, Artificial Sequence
  Description of Artificial Sequence: Synthetic oligonucleotide
gcuuuagaguccaggcaaa

SEQ ID NO: 1459935 - RNA, 19 nt, Artificial Sequence
  Description of Artificial Sequence: Synthetic oligonucleotide
cuuggaagaugggaucgau

SEQ ID NO: 1459936 - RNA, 19 nt, Artificial Sequence
  Description of Artificial Sequence: Synthetic oligonucleotide
gcgaggaaagccguggagu

SEQ ID NO: 1459937 - RNA, 19 nt, Artificial Sequence
  Description of Artificial Sequence: Synthetic oligonucleotide
agcgcgccgugaacugcgg

SEQ ID NO: 1459938 - RNA, 19 nt, Artificial Sequence
  Description of Artificial Sequence: Synthetic oligonucleotide
ccaguacagaaagguagca

SEQ ID NO: 1459939 - RNA, 19 nt, Artificial Sequence
  Description of Artificial Sequence: Synthetic oligonucleotide
ccuuaguugguccaauguu

SEQ ID NO: 1459940 - RNA, 19 nt, Artificial Sequence
  Description of Artificial Sequence: Synthetic oligonucleotide
uagccccaggaugccgagu

SEQ ID NO: 1459941 - RNA, 19 nt, Artificial Sequence
  Description of Artificial Sequence: Synthetic oligonucleotide
ccaauguugaggagauagu

SEQ ID NO: 1459942 - RNA, 19 nt, Artificial Sequence
  Description of Artificial Sequence: Synthetic oligonucleotide
cgcucgcucugccagugcc

SEQ ID NO: 1459943 - RNA, 19 nt, Artificial Sequence
  Description of Artificial Sequence: Synthetic oligonucleotide
gagagcagucgguggcaau

SEQ ID NO: 1459944 - RNA, 19 nt, Artificial Sequence
  Description of Artificial Sequence: Synthetic oligonucleotide
cugugcgguguguauuuau

SEQ ID NO: 1459945 - RNA, 19 nt, Artificial Sequence
  Description of Artificial Sequence: Synthetic oligonucleotide
agccgagucuuuagaggua

SEQ ID NO: 1459946 - RNA, 19 nt, Artificial Sequence
  Description of Artificial Sequence: Synthetic oligonucleotide
cgugaacugcgguccgaag

SEQ ID NO: 1459947 - RNA, 19 nt, Artificial Sequence
  Description of Artificial Sequence: Synthetic oligonucleotide
cccgaacuuggccucguca

SEQ ID NO: 1459948 - RNA, 19 nt, Artificial Sequence
  Description of Artificial Sequence: Synthetic oligonucleotide
cggcggguaguuuucuuuc

SEQ ID NO: 1459949 - RNA, 19 nt, Artificial Sequence
  Description of Artificial Sequence: Synthetic oligonucleotide
ccaguccgggguguagcgg

SEQ ID NO: 1459950 - RNA, 19 nt, Artificial Sequence
  Description of Artificial Sequence: Synthetic oligonucleotide
ggcguagcugaagcccggc

SEQ ID NO: 1459951 - RNA, 19 nt, Artificial Sequence
  Description of Artificial Sequence: Synthetic oligonucleotide
guguagcggcgaggagccg

SEQ ID NO: 1459952 - RNA, 19 nt, Artificial Sequence
  Description of Artificial Sequence: Synthetic oligonucleotide
gcgaggagccgagggcgcg

SEQ ID NO: 1459953 - RNA, 19 nt, Artificial Sequence
  Description of Artificial Sequence: Synthetic oligonucleotide
cucccaacucaccgaccaa

SEQ ID NO: 1459954 - RNA, 19 nt, Artificial Sequence
  Description of Artificial Sequence: Synthetic oligonucleotide
caggcggucugcccuugaa

SEQ ID NO: 1459955 - RNA, 19 nt, Artificial Sequence
  Description of Artificial Sequence: Synthetic oligonucleotide
gccaccagaaccacucgcu

SEQ ID NO: 1459956 - RNA, 19 nt, Artificial Sequence
  Description of Artificial Sequence: Synthetic oligonucleotide
ccucuuccgaacagcagcu

SEQ ID NO: 1459957 - RNA, 19 nt, Artificial Sequence
  Description of Artificial Sequence: Synthetic oligonucleotide
acacgggacuuggccaguu

SEQ ID NO: 1459958 - RNA, 19 nt, Artificial Sequence
  Description of Artificial Sequence: Synthetic oligonucleotide
aggccggaauccgcucgcu

SEQ ID NO: 1459959 - RNA, 19 nt, Artificial Sequence
  Description of Artificial Sequence: Synthetic oligonucleotide
ccguaucguaaauuccucu

SEQ ID NO: 1459960 - RNA, 19 nt, Artificial Sequence
  Description of Artificial Sequence: Synthetic oligonucleotide
cacaggcggucugcccuug

SEQ ID NO: 1459961 - RNA, 19 nt, Artificial Sequence
  Description of Artificial Sequence: Synthetic oligonucleotide
ggucguuuggggagauuua

SEQ ID NO: 1459962 - RNA, 19 nt, Artificial Sequence
  Description of Artificial Sequence: Synthetic oligonucleotide
ggccggaauccgcucgcuc

SEQ ID NO: 1459963 - RNA, 19 nt, Artificial Sequence
  Description of Artificial Sequence: Synthetic oligonucleotide
ccaguuugugaagccuuca

SEQ ID NO: 1459964 - RNA, 19 nt, Artificial Sequence
  Description of Artificial Sequence: Synthetic oligonucleotide
cguaucguaaauuccucuu

SEQ ID NO: 1459965 - RNA, 19 nt, Artificial Sequence
  Description of Artificial Sequence: Synthetic oligonucleotide
aucuuggguccaggucaaa

SEQ ID NO: 1459966 - RNA, 19 nt, Artificial Sequence
  Description of Artificial Sequence: Synthetic oligonucleotide
ccugggccgcagcacucag

SEQ ID NO: 1459967 - RNA, 19 nt, Artificial Sequence
  Description of Artificial Sequence: Synthetic oligonucleotide
gcggguaguuuucuuucau

SEQ ID NO: 1459968 - RNA, 19 nt, Artificial Sequence
  Description of Artificial Sequence: Synthetic oligonucleotide
cagaucaagucgggcuugu

SEQ ID NO: 1459969 - RNA, 19 nt, Artificial Sequence
  Description of Artificial Sequence: Synthetic oligonucleotide
gacacgggacuuggccagu

SEQ ID NO: 1459970 - RNA, 19 nt, Artificial Sequence
  Description of Artificial Sequence: Synthetic oligonucleotide
ggaacccauccuggagauc

SEQ ID NO: 1459971 - RNA, 19 nt, Artificial Sequence
  Description of Artificial Sequence: Synthetic oligonucleotide
gccccacauccuuugaguu

SEQ ID NO: 1459972 - RNA, 19 nt, Artificial Sequence
  Description of Artificial Sequence: Synthetic oligonucleotide
ccaggcgggcaccgagaac

SEQ ID NO: 1459973 - RNA, 19 nt, Artificial Sequence
  Description of Artificial Sequence: Synthetic oligonucleotide
gucgggcuuguagcuguua

SEQ ID NO: 1459974 - RNA, 19 nt, Artificial Sequence
  Description of Artificial Sequence: Synthetic oligonucleotide
cacgacuguuauguucuuu

SEQ ID NO: 1459975 - RNA, 19 nt, Artificial Sequence
  Description of Artificial Sequence: Synthetic oligonucleotide
ggaaagccguggaguucca

SEQ ID NO: 1459976 - RNA, 19 nt, Artificial Sequence
  Description of Artificial Sequence: Synthetic oligonucleotide
ccgaguccacgcugguaca

SEQ ID NO: 1459977 - RNA, 19 nt, Artificial Sequence
  Description of Artificial Sequence: Synthetic oligonucleotide
cgccgugaacugcgguccg

SEQ ID NO: 1459978 - RNA, 19 nt, Artificial Sequence
  Description of Artificial Sequence: Synthetic oligonucleotide
cccaacucaccgaccaaau

SEQ ID NO: 1459979 - RNA, 19 nt, Artificial Sequence
  Description of Artificial Sequence: Synthetic oligonucleotide
gccgagaguccaggcucug

SEQ ID NO: 1459980 - RNA, 19 nt, Artificial Sequence
  Description of Artificial Sequence: Synthetic oligonucleotide
ggggagauuuaagguuuau

SEQ ID NO: 1459981 - RNA, 19 nt, Artificial Sequence
  Description of Artificial Sequence: Synthetic oligonucleotide
cugaagcccggcggguagu

SEQ ID NO: 1459982 - RNA, 19 nt, Artificial Sequence
  Description of Artificial Sequence: Synthetic oligonucleotide
cgguccgaagucggcguag

SEQ ID NO: 1459983 - RNA, 19 nt, Artificial Sequence
  Description of Artificial Sequence: Synthetic oligonucleotide
ccguugaucugcagccacu

SEQ ID NO: 1459984 - RNA, 19 nt, Artificial Sequence
  Description of Artificial Sequence: Synthetic oligonucleotide
ccucguccuugacagggcu

SEQ ID NO: 1459985 - RNA, 19 nt, Artificial Sequence
  Description of Artificial Sequence: Synthetic oligonucleotide
gccgugaacugcgguccga

SEQ ID NO: 1459986 - RNA, 19 nt, Artificial Sequence
  Description of Artificial Sequence: Synthetic oligonucleotide
gaagcccggcggguaguuu

SEQ ID NO: 1459987 - RNA, 19 nt, Artificial Sequence
  Description of Artificial Sequence: Synthetic oligonucleotide
ccgucuguagccccaggau

SEQ ID NO: 1459988 - RNA, 19 nt, Artificial Sequence
  Description of Artificial Sequence: Synthetic oligonucleotide
cccaggcgggcaccgagaa

SEQ ID NO: 1459989 - RNA, 19 nt, Artificial Sequence
  Description of Artificial Sequence: Synthetic oligonucleotide
ccguggaguuccaguaagu

SEQ ID NO: 1459990 - RNA, 19 nt, Artificial Sequence
  Description of Artificial Sequence: Synthetic oligonucleotide
gcugugcgguguguauuua

SEQ ID NO: 1459991 - RNA, 19 nt, Artificial Sequence
  Description of Artificial Sequence: Synthetic oligonucleotide
cgggacuuggccaguuugu

SEQ ID NO: 1459992 - RNA, 19 nt, Artificial Sequence
  Description of Artificial Sequence: Synthetic oligonucleotide
gcgguccgaagucggcgua

SEQ ID NO: 1459993 - RNA, 19 nt, Artificial Sequence
  Description of Artificial Sequence: Synthetic oligonucleotide
ccgugaacugcgguccgaa

SEQ ID NO: 1459994 - RNA, 19 nt, Artificial Sequence
  Description of Artificial Sequence: Synthetic oligonucleotide
cacgggacuuggccaguuu

SEQ ID NO: 1459995 - RNA, 19 nt, Artificial Sequence
  Description of Artificial Sequence: Synthetic oligonucleotide
ccuguucgcuggcaauggu

SEQ ID NO: 1459996 - RNA, 19 nt, Artificial Sequence
  Description of Artificial Sequence: Synthetic oligonucleotide
gaggucguuuggggagauu

SEQ ID NO: 1459997 - RNA, 19 nt, Artificial Sequence
  Description of Artificial Sequence: Synthetic oligonucleotide
ccgagucuuuagagguaua

SEQ ID NO: 1459998 - RNA, 19 nt, Artificial Sequence
  Description of Artificial Sequence: Synthetic oligonucleotide
ccccguugaucugcagcca

SEQ ID NO: 1459999 - RNA, 19 nt, Artificial Sequence
  Description of Artificial Sequence: Synthetic oligonucleotide
cguccuugacagggcuauc

SEQ ID NO: 1460000 - RNA, 19 nt, Artificial Sequence
  Description of Artificial Sequence: Synthetic oligonucleotide
gcgcgccgugaacugcggu

SEQ ID NO: 1460001 - RNA, 19 nt, Artificial Sequence
  Description of Artificial Sequence: Synthetic oligonucleotide
gcggcccacugguccgggu

SEQ ID NO: 1460002 - RNA, 19 nt, Artificial Sequence
  Description of Artificial Sequence: Synthetic oligonucleotide
aauaaagaagaguagcaug

SEQ ID NO: 1460003 - RNA, 19 nt, Artificial Sequence
  Description of Artificial Sequence: Synthetic oligonucleotide
aacugagcuaacuagcaac

SEQ ID NO: 1460004 - RNA, 19 nt, Artificial Sequence
  Description of Artificial Sequence: Synthetic oligonucleotide
uguggaauaaagaagagua

SEQ ID NO: 1460005 - RNA, 19 nt, Artificial Sequence
  Description of Artificial Sequence: Synthetic oligonucleotide
aaguuagugaaguaaacca

SEQ ID NO: 1460006 - RNA, 19 nt, Artificial Sequence
  Description of Artificial Sequence: Synthetic oligonucleotide
uugaguagcaaguugauga

SEQ ID NO: 1460007 - RNA, 19 nt, Artificial Sequence
  Description of Artificial Sequence: Synthetic oligonucleotide
auuaauuccugcuaggaug

SEQ ID NO: 1460008 - RNA, 19 nt, Artificial Sequence
  Description of Artificial Sequence: Synthetic oligonucleotide
aagacaaugauagaagcag

SEQ ID NO: 1460009 - RNA, 19 nt, Artificial Sequence
  Description of Artificial Sequence: Synthetic oligonucleotide
ugguauagcaaucccaagg

SEQ ID NO: 1460010 - RNA, 19 nt, Artificial Sequence
  Description of Artificial Sequence: Synthetic oligonucleotide
ugauaaggaaaacagcacc

SEQ ID NO: 1460011 - RNA, 19 nt, Artificial Sequence
  Description of Artificial Sequence: Synthetic oligonucleotide
acugucacuagcuggaggc

SEQ ID NO: 1460012 - RNA, 19 nt, Artificial Sequence
  Description of Artificial Sequence: Synthetic oligonucleotide
ucugcuaccuuuaaaauaa

SEQ ID NO: 1460013 - RNA, 19 nt, Artificial Sequence
  Description of Artificial Sequence: Synthetic oligonucleotide
uguuguuacauucagugaa

SEQ ID NO: 1460014 - RNA, 19 nt, Artificial Sequence
  Description of Artificial Sequence: Synthetic oligonucleotide
cuuggaauagcucaucucc

SEQ ID NO: 1460015 - RNA, 19 nt, Artificial Sequence
  Description of Artificial Sequence: Synthetic oligonucleotide
uauaggauucccaagucca

SEQ ID NO: 1460016 - RNA, 19 nt, Artificial Sequence
  Description of Artificial Sequence: Synthetic oligonucleotide
uguauugccaaaguuagug

SEQ ID NO: 1460017 - RNA, 19 nt, Artificial Sequence
  Description of Artificial Sequence: Synthetic oligonucleotide
gauaaggaaaacagcaccg

SEQ ID NO: 1460018 - RNA, 19 nt, Artificial Sequence
  Description of Artificial Sequence: Synthetic oligonucleotide
ggaaauugaacacuugugg

SEQ ID NO: 1460019 - RNA, 19 nt, Artificial Sequence
  Description of Artificial Sequence: Synthetic oligonucleotide
ugagcuaacuagcaacccg

SEQ ID NO: 1460020 - RNA, 19 nt, Artificial Sequence
  Description of Artificial Sequence: Synthetic oligonucleotide
agagggaaaagacaugauc

SEQ ID NO: 1460021 - RNA, 19 nt, Artificial Sequence
  Description of Artificial Sequence: Synthetic oligonucleotide
aaauugaacacuuguggaa

SEQ ID NO: 1460022 - RNA, 19 nt, Artificial Sequence
  Description of Artificial Sequence: Synthetic oligonucleotide
gaagagucggacaagcugg

SEQ ID NO: 1460023 - RNA, 19 nt, Artificial Sequence
  Description of Artificial Sequence: Synthetic oligonucleotide
aguuaugguauagcaaucc

SEQ ID NO: 1460024 - RNA, 19 nt, Artificial Sequence
  Description of Artificial Sequence: Synthetic oligonucleotide
aaguaaaccaugaggagag

SEQ ID NO: 1460025 - RNA, 19 nt, Artificial Sequence
  Description of Artificial Sequence: Synthetic oligonucleotide
uggaauaaagaagaguagc

SEQ ID NO: 1460026 - RNA, 19 nt, Artificial Sequence
  Description of Artificial Sequence: Synthetic oligonucleotide
uaugguauagcaaucccaa

SEQ ID NO: 1460027 - RNA, 19 nt, Artificial Sequence
  Description of Artificial Sequence: Synthetic oligonucleotide
agcagagaugacuagugac

SEQ ID NO: 1460028 - RNA, 19 nt, Artificial Sequence
  Description of Artificial Sequence: Synthetic oligonucleotide
aguacaucaucagcgaagc

SEQ ID NO: 1460029 - RNA, 19 nt, Artificial Sequence
  Description of Artificial Sequence: Synthetic oligonucleotide
uaguauaggauucccaagu

SEQ ID NO: 1460030 - RNA, 19 nt, Artificial Sequence
  Description of Artificial Sequence: Synthetic oligonucleotide
agagccgcuuccuacacgc

SEQ ID NO: 1460031 - RNA, 19 nt, Artificial Sequence
  Description of Artificial Sequence: Synthetic oligonucleotide
ucauagaagagucggacaa

SEQ ID NO: 1460032 - RNA, 19 nt, Artificial Sequence
  Description of Artificial Sequence: Synthetic oligonucleotide
ucauguaugggcccaaaga

SEQ ID NO: 1460033 - RNA, 19 nt, Artificial Sequence
  Description of Artificial Sequence: Synthetic oligonucleotide
gacaugaucaucccgauaa

SEQ ID NO: 1460034 - RNA, 19 nt, Artificial Sequence
  Description of Artificial Sequence: Synthetic oligonucleotide
uuagugaaguaaaccauga

SEQ ID NO: 1460035 - RNA, 19 nt, Artificial Sequence
  Description of Artificial Sequence: Synthetic oligonucleotide
aagauuuugaguagcaagu

SEQ ID NO: 1460036 - RNA, 19 nt, Artificial Sequence
  Description of Artificial Sequence: Synthetic oligonucleotide
uuaugguauagcaauccca

SEQ ID NO: 1460037 - RNA, 19 nt, Artificial Sequence
  Description of Artificial Sequence: Synthetic oligonucleotide
guuguauugccaaaguuag

SEQ ID NO: 1460038 - RNA, 19 nt, Artificial Sequence
  Description of Artificial Sequence: Synthetic oligonucleotide
gauugaguacaucaucagc

SEQ ID NO: 1460039 - RNA, 19 nt, Artificial Sequence
  Description of Artificial Sequence: Synthetic oligonucleotide
aagaagaguagcauggucu

SEQ ID NO: 1460040 - RNA, 19 nt, Artificial Sequence
  Description of Artificial Sequence: Synthetic oligonucleotide
aggaugauaaggaaaacag

SEQ ID NO: 1460041 - RNA, 19 nt, Artificial Sequence
  Description of Artificial Sequence: Synthetic oligonucleotide
uuucucucauguaugggcc

SEQ ID NO: 1460042 - RNA, 19 nt, Artificial Sequence
  Description of Artificial Sequence: Synthetic oligonucleotide
ucagacaucauagaagagu

SEQ ID NO: 1460043 - RNA, 19 nt, Artificial Sequence
  Description of Artificial Sequence: Synthetic oligonucleotide
ugaggcagcgaguagagga

SEQ ID NO: 1460044 - RNA, 19 nt, Artificial Sequence
  Description of Artificial Sequence: Synthetic oligonucleotide
cuaacuagcaacccggcac

SEQ ID NO: 1460045 - RNA, 19 nt, Artificial Sequence
  Description of Artificial Sequence: Synthetic oligonucleotide
auugguacagaacaccgca

SEQ ID NO: 1460046 - RNA, 19 nt, Artificial Sequence
  Description of Artificial Sequence: Synthetic oligonucleotide
aguagcaaguugaugaggg

SEQ ID NO: 1460047 - RNA, 19 nt, Artificial Sequence
  Description of Artificial Sequence: Synthetic oligonucleotide
gauuuugaguagcaaguug

SEQ ID NO: 1460048 - RNA, 19 nt, Artificial Sequence
  Description of Artificial Sequence: Synthetic oligonucleotide
uugaugagggucauguugu

SEQ ID NO: 1460049 - RNA, 19 nt, Artificial Sequence
  Description of Artificial Sequence: Synthetic oligonucleotide
auaaggaaaacagcaccgc

SEQ ID NO: 1460050 - RNA, 19 nt, Artificial Sequence
  Description of Artificial Sequence: Synthetic oligonucleotide
aaguugaugagggucaugu

SEQ ID NO: 1460051 - RNA, 19 nt, Artificial Sequence
  Description of Artificial Sequence: Synthetic oligonucleotide
agaagagucggacaagcug

SEQ ID NO: 1460052 - RNA, 19 nt, Artificial Sequence
  Description of Artificial Sequence: Synthetic oligonucleotide
ugucccaagauucccacca

SEQ ID NO: 1460053 - RNA, 19 nt, Artificial Sequence
  Description of Artificial Sequence: Synthetic oligonucleotide
aguauaggauucccaaguc

SEQ ID NO: 1460054 - RNA, 19 nt, Artificial Sequence
  Description of Artificial Sequence: Synthetic oligonucleotide
acacuuguggaauaaagaa

SEQ ID NO: 1460055 - RNA, 19 nt, Artificial Sequence
  Description of Artificial Sequence: Synthetic oligonucleotide
uagacauaguauaggauuc

SEQ ID NO: 1460056 - RNA, 19 nt, Artificial Sequence
  Description of Artificial Sequence: Synthetic oligonucleotide
gaugacuagugacugacca

SEQ ID NO: 1460057 - RNA, 19 nt, Artificial Sequence
  Description of Artificial Sequence: Synthetic oligonucleotide
uucggauugagucugggua

SEQ ID NO: 1460058 - RNA, 19 nt, Artificial Sequence
  Description of Artificial Sequence: Synthetic oligonucleotide
auaguauaggauucccaag

SEQ ID NO: 1460059 - RNA, 19 nt, Artificial Sequence
  Description of Artificial Sequence: Synthetic oligonucleotide
ugguaucgaauggagaagg

SEQ ID NO: 1460060 - RNA, 19 nt, Artificial Sequence
  Description of Artificial Sequence: Synthetic oligonucleotide
gacaaugauagaagcagag

SEQ ID NO: 1460061 - RNA, 19 nt, Artificial Sequence
  Description of Artificial Sequence: Synthetic oligonucleotide
aguauuccgcgccagcagg

SEQ ID NO: 1460062 - RNA, 19 nt, Artificial Sequence
  Description of Artificial Sequence: Synthetic oligonucleotide
aauugaacacuuguggaau

SEQ ID NO: 1460063 - RNA, 19 nt, Artificial Sequence
  Description of Artificial Sequence: Synthetic oligonucleotide
ugugauggguaccaguuau

SEQ ID NO: 1460064 - RNA, 19 nt, Artificial Sequence
  Description of Artificial Sequence: Synthetic oligonucleotide
auuuugaguagcaaguuga

SEQ ID NO: 1460065 - RNA, 19 nt, Artificial Sequence
  Description of Artificial Sequence: Synthetic oligonucleotide
gaaguaaaccaugaggaga

SEQ ID NO: 1460066 - RNA, 19 nt, Artificial Sequence
  Description of Artificial Sequence: Synthetic oligonucleotide
gacaagcugguaucgaaug

SEQ ID NO: 1460067 - RNA, 19 nt, Artificial Sequence
  Description of Artificial Sequence: Synthetic oligonucleotide
ugacuagugacugaccagc

SEQ ID NO: 1460068 - RNA, 19 nt, Artificial Sequence
  Description of Artificial Sequence: Synthetic oligonucleotide
accacggcaaaggucaugc

SEQ ID NO: 1460069 - RNA, 19 nt, Artificial Sequence
  Description of Artificial Sequence: Synthetic oligonucleotide
agcggaagggcuuggguac

SEQ ID NO: 1460070 - RNA, 19 nt, Artificial Sequence
  Description of Artificial Sequence: Synthetic oligonucleotide
acaagcugguaucgaaugg

SEQ ID NO: 1460071 - RNA, 19 nt, Artificial Sequence
  Description of Artificial Sequence: Synthetic oligonucleotide
agcaaaauaacagaaggua

SEQ ID NO: 1460072 - RNA, 19 nt, Artificial Sequence
  Description of Artificial Sequence: Synthetic oligonucleotide
uaccaguuaugguauagca

SEQ ID NO: 1460073 - RNA, 19 nt, Artificial Sequence
  Description of Artificial Sequence: Synthetic oligonucleotide
guauaggauucccaagucc

SEQ ID NO: 1460074 - RNA, 19 nt, Artificial Sequence
  Description of Artificial Sequence: Synthetic oligonucleotide
agacauaguauaggauucc

SEQ ID NO: 1460075 - RNA, 19 nt, Artificial Sequence
  Description of Artificial Sequence: Synthetic oligonucleotide
cacgcaagaguauuccgcg

SEQ ID NO: 1460076 - RNA, 19 nt, Artificial Sequence
  Description of Artificial Sequence: Synthetic oligonucleotide
guuaugguauagcaauccc

SEQ ID NO: 1460077 - RNA, 19 nt, Artificial Sequence
  Description of Artificial Sequence: Synthetic oligonucleotide
gagcuaacuagcaacccgg

SEQ ID NO: 1460078 - RNA, 19 nt, Artificial Sequence
  Description of Artificial Sequence: Synthetic oligonucleotide
agugucccaagauucccac

SEQ ID NO: 1460079 - RNA, 19 nt, Artificial Sequence
  Description of Artificial Sequence: Synthetic oligonucleotide
guuagugaaguaaaccaug

SEQ ID NO: 1460080 - RNA, 19 nt, Artificial Sequence
  Description of Artificial Sequence: Synthetic oligonucleotide
acugaccagccucuaggcc

SEQ ID NO: 1460081 - RNA, 19 nt, Artificial Sequence
  Description of Artificial Sequence: Synthetic oligonucleotide
agcaacccggcacaauccc

SEQ ID NO: 1460082 - RNA, 19 nt, Artificial Sequence
  Description of Artificial Sequence: Synthetic oligonucleotide
ugaucaucccgauaaucac

SEQ ID NO: 1460083 - RNA, 19 nt, Artificial Sequence
  Description of Artificial Sequence: Synthetic oligonucleotide
ugggugagcuccaacggag

SEQ ID NO: 1460084 - RNA, 19 nt, Artificial Sequence
  Description of Artificial Sequence: Synthetic oligonucleotide
uaacuagcaacccggcaca

SEQ ID NO: 1460085 - RNA, 19 nt, Artificial Sequence
  Description of Artificial Sequence: Synthetic oligonucleotide
uuggaauagcucaucucca

SEQ ID NO: 1460086 - RNA, 19 nt, Artificial Sequence
  Description of Artificial Sequence: Synthetic oligonucleotide
uuguuacauucagugaagg

SEQ ID NO: 1460087 - RNA, 19 nt, Artificial Sequence
  Description of Artificial Sequence: Synthetic oligonucleotide
aaugccuuacacugcuccu

SEQ ID NO: 1460088 - RNA, 19 nt, Artificial Sequence
  Description of Artificial Sequence: Synthetic oligonucleotide
agucggacaagcugguauc

SEQ ID NO: 1460089 - RNA, 19 nt, Artificial Sequence
  Description of Artificial Sequence: Synthetic oligonucleotide
uacacgcaagaguauuccg

SEQ ID NO: 1460090 - RNA, 19 nt, Artificial Sequence
  Description of Artificial Sequence: Synthetic oligonucleotide
aucccgauaaucaccuucc

SEQ ID NO: 1460091 - RNA, 19 nt, Artificial Sequence
  Description of Artificial Sequence: Synthetic oligonucleotide
uccaacggaggcuaugggc

SEQ ID NO: 1460092 - RNA, 19 nt, Artificial Sequence
  Description of Artificial Sequence: Synthetic oligonucleotide
cauaguauaggauucccaa

SEQ ID NO: 1460093 - RNA, 19 nt, Artificial Sequence
  Description of Artificial Sequence: Synthetic oligonucleotide
acacgcaagaguauuccgc

SEQ ID NO: 1460094 - RNA, 19 nt, Artificial Sequence
  Description of Artificial Sequence: Synthetic oligonucleotide
ccgauaaucaccuuccagc

SEQ ID NO: 1460095 - RNA, 19 nt, Artificial Sequence
  Description of Artificial Sequence: Synthetic oligonucleotide
agucgguagagccgcuucc

SEQ ID NO: 1460096 - RNA, 19 nt, Artificial Sequence
  Description of Artificial Sequence: Synthetic oligonucleotide
ucggugaacugucacuagc

SEQ ID NO: 1460097 - RNA, 19 nt, Artificial Sequence
  Description of Artificial Sequence: Synthetic oligonucleotide
ucccaagauucccaccacg

SEQ ID NO: 1460098 - RNA, 19 nt, Artificial Sequence
  Description of Artificial Sequence: Synthetic oligonucleotide
augaucaucccgauaauca

SEQ ID NO: 1460099 - RNA, 19 nt, Artificial Sequence
  Description of Artificial Sequence: Synthetic oligonucleotide
gaucaucccgauaaucacc

SEQ ID NO: 1460100 - RNA, 19 nt, Artificial Sequence
  Description of Artificial Sequence: Synthetic oligonucleotide
cuagugacugaccagccuc

SEQ ID NO: 1460101 - RNA, 19 nt, Artificial Sequence
  Description of Artificial Sequence: Synthetic oligonucleotide
ucggcagucgguagagccg

SEQ ID NO: 1460102 - RNA, 19 nt, Artificial Sequence
  Description of Artificial Sequence: Synthetic oligonucleotide
uuugaguagcaaguugaug

SEQ ID NO: 1460103 - RNA, 19 nt, Artificial Sequence
  Description of Artificial Sequence: Synthetic oligonucleotide
cuagcaacccggcacaauc

SEQ ID NO: 1460104 - RNA, 19 nt, Artificial Sequence
  Description of Artificial Sequence: Synthetic oligonucleotide
augacuagugacugaccag

SEQ ID NO: 1460105 - RNA, 19 nt, Artificial Sequence
  Description of Artificial Sequence: Synthetic oligonucleotide
gauagaagcagagaugacu

SEQ ID NO: 1460106 - RNA, 19 nt, Artificial Sequence
  Description of Artificial Sequence: Synthetic oligonucleotide
caucauagaagagucggac

SEQ ID NO: 1460107 - RNA, 19 nt, Artificial Sequence
  Description of Artificial Sequence: Synthetic oligonucleotide
gauugagucuggguaugcg

SEQ ID NO: 1460108 - RNA, 19 nt, Artificial Sequence
  Description of Artificial Sequence: Synthetic oligonucleotide
uugccaaaguuagugaagu

SEQ ID NO: 1460109 - RNA, 19 nt, Artificial Sequence
  Description of Artificial Sequence: Synthetic oligonucleotide
guagacauaguauaggauu

SEQ ID NO: 1460110 - RNA, 19 nt, Artificial Sequence
  Description of Artificial Sequence: Synthetic oligonucleotide
cucggcagucgguagagcc

SEQ ID NO: 1460111 - RNA, 19 nt, Artificial Sequence
  Description of Artificial Sequence: Synthetic oligonucleotide
gaaaacagcaccgcagauc

SEQ ID NO: 1460112 - RNA, 19 nt, Artificial Sequence
  Description of Artificial Sequence: Synthetic oligonucleotide
agggaugagggucacagua

SEQ ID NO: 1460113 - RNA, 19 nt, Artificial Sequence
  Description of Artificial Sequence: Synthetic oligonucleotide
cuuggaccagacagguugg

SEQ ID NO: 1460114 - RNA, 19 nt, Artificial Sequence
  Description of Artificial Sequence: Synthetic oligonucleotide
gaacaccgcaagcaguccc

SEQ ID NO: 1460115 - RNA, 19 nt, Artificial Sequence
  Description of Artificial Sequence: Synthetic oligonucleotide
agcaggaacaaaacccaac

SEQ ID NO: 1460116 - RNA, 19 nt, Artificial Sequence
  Description of Artificial Sequence: Synthetic oligonucleotide
ggaccagacagguuggucc

SEQ ID NO: 1460117 - RNA, 19 nt, Artificial Sequence
  Description of Artificial Sequence: Synthetic oligonucleotide
gaguauuccgcgccagcag

SEQ ID NO: 1460118 - RNA, 19 nt, Artificial Sequence
  Description of Artificial Sequence: Synthetic oligonucleotide
gauggcgugaaggagcuga

SEQ ID NO: 1460119 - RNA, 19 nt, Artificial Sequence
  Description of Artificial Sequence: Synthetic oligonucleotide
ggaacaaaacccaacuaug

SEQ ID NO: 1460120 - RNA, 19 nt, Artificial Sequence
  Description of Artificial Sequence: Synthetic oligonucleotide
gaguagcaaguugaugagg

SEQ ID NO: 1460121 - RNA, 19 nt, Artificial Sequence
  Description of Artificial Sequence: Synthetic oligonucleotide
acgcaagaguauuccgcgc

SEQ ID NO: 1460122 - RNA, 19 nt, Artificial Sequence
  Description of Artificial Sequence: Synthetic oligonucleotide
uuccgcgccagcaggaaca

SEQ ID NO: 1460123 - RNA, 19 nt, Artificial Sequence
  Description of Artificial Sequence: Synthetic oligonucleotide
uggguaugcggugucgagg

SEQ ID NO: 1460124 - RNA, 19 nt, Artificial Sequence
  Description of Artificial Sequence: Synthetic oligonucleotide
auggcgccagcgcagauug

SEQ ID NO: 1460125 - RNA, 19 nt, Artificial Sequence
  Description of Artificial Sequence: Synthetic oligonucleotide
uagcaacccggcacaaucc

SEQ ID NO: 1460126 - RNA, 19 nt, Artificial Sequence
  Description of Artificial Sequence: Synthetic oligonucleotide
cuacacgcaagaguauucc

SEQ ID NO: 1460127 - RNA, 19 nt, Artificial Sequence
  Description of Artificial Sequence: Synthetic oligonucleotide
ucuaggccauuaauuccug

SEQ ID NO: 1460128 - RNA, 19 nt, Artificial Sequence
  Description of Artificial Sequence: Synthetic oligonucleotide
caaugauagaagcagagau

SEQ ID NO: 1460129 - RNA, 19 nt, Artificial Sequence
  Description of Artificial Sequence: Synthetic oligonucleotide
acaaugauagaagcagaga

SEQ ID NO: 1460130 - RNA, 19 nt, Artificial Sequence
  Description of Artificial Sequence: Synthetic oligonucleotide
gauggcauugguacagaac

SEQ ID NO: 1460131 - RNA, 19 nt, Artificial Sequence
  Description of Artificial Sequence: Synthetic oligonucleotide
augguauagcaaucccaag

SEQ ID NO: 1460132 - RNA, 19 nt, Artificial Sequence
  Description of Artificial Sequence: Synthetic oligonucleotide
caucccgauaaucaccuuc

SEQ ID NO: 1460133 - RNA, 19 nt, Artificial Sequence
  Description of Artificial Sequence: Synthetic oligonucleotide
uagaagagucggacaagcu

SEQ ID NO: 1460134 - RNA, 19 nt, Artificial Sequence
  Description of Artificial Sequence: Synthetic oligonucleotide
ggguaugcggugucgaggg

SEQ ID NO: 1460135 - RNA, 19 nt, Artificial Sequence
  Description of Artificial Sequence: Synthetic oligonucleotide
ggaauaaagaagaguagca

SEQ ID NO: 1460136 - RNA, 19 nt, Artificial Sequence
  Description of Artificial Sequence: Synthetic oligonucleotide
uuugcccgucuucggauug

SEQ ID NO: 1460137 - RNA, 19 nt, Artificial Sequence
  Description of Artificial Sequence: Synthetic oligonucleotide
uucucucauguaugggccc

SEQ ID NO: 1460138 - RNA, 19 nt, Artificial Sequence
  Description of Artificial Sequence: Synthetic oligonucleotide
ugguuguauugccaaaguu

SEQ ID NO: 1460139 - RNA, 19 nt, Artificial Sequence
  Description of Artificial Sequence: Synthetic oligonucleotide
ucggauugagucuggguau

SEQ ID NO: 1460140 - RNA, 19 nt, Artificial Sequence
  Description of Artificial Sequence: Synthetic oligonucleotide
aggagggcaccuaucaggg

SEQ ID NO: 1460141 - RNA, 19 nt, Artificial Sequence
  Description of Artificial Sequence: Synthetic oligonucleotide
acagguugguccuggguga

SEQ ID NO: 1460142 - RNA, 19 nt, Artificial Sequence
  Description of Artificial Sequence: Synthetic oligonucleotide
ccaagaauccagcggaagg

SEQ ID NO: 1460143 - RNA, 19 nt, Artificial Sequence
  Description of Artificial Sequence: Synthetic oligonucleotide
accuaucagggccacaaau

SEQ ID NO: 1460144 - RNA, 19 nt, Artificial Sequence
  Description of Artificial Sequence: Synthetic oligonucleotide
caacccggcacaaucccag

SEQ ID NO: 1460145 - RNA, 19 nt, Artificial Sequence
  Description of Artificial Sequence: Synthetic oligonucleotide
agcaaguugaugaggguca

SEQ ID NO: 1460146 - RNA, 19 nt, Artificial Sequence
  Description of Artificial Sequence: Synthetic oligonucleotide
ggccauuaauuccugcuag

SEQ ID NO: 1460147 - RNA, 19 nt, Artificial Sequence
  Description of Artificial Sequence: Synthetic oligonucleotide
uagagccgcuuccuacacg

SEQ ID NO: 1460148 - RNA, 19 nt, Artificial Sequence
  Description of Artificial Sequence: Synthetic oligonucleotide
acuagugacugaccagccu

SEQ ID NO: 1460149 - RNA, 19 nt, Artificial Sequence
  Description of Artificial Sequence: Synthetic oligonucleotide
uagugacugaccagccucu

SEQ ID NO: 1460150 - RNA, 19 nt, Artificial Sequence
  Description of Artificial Sequence: Synthetic oligonucleotide
agaugacuagugacugacc

SEQ ID NO: 1460151 - RNA, 19 nt, Artificial Sequence
  Description of Artificial Sequence: Synthetic oligonucleotide
aucaucccgauaaucaccu

SEQ ID NO: 1460152 - RNA, 19 nt, Artificial Sequence
  Description of Artificial Sequence: Synthetic oligonucleotide
aaggucaugccagcaaaau

SEQ ID NO: 1460153 - RNA, 19 nt, Artificial Sequence
  Description of Artificial Sequence: Synthetic oligonucleotide
agaacaccgcaagcagucc

SEQ ID NO: 1460154 - RNA, 19 nt, Artificial Sequence
  Description of Artificial Sequence: Synthetic oligonucleotide
ggucaugccagcaaaauaa

SEQ ID NO: 1460155 - RNA, 19 nt, Artificial Sequence
  Description of Artificial Sequence: Synthetic oligonucleotide
gaauaaagaagaguagcau

SEQ ID NO: 1460156 - RNA, 19 nt, Artificial Sequence
  Description of Artificial Sequence: Synthetic oligonucleotide
uggcauugguacagaacac

SEQ ID NO: 1460157 - RNA, 19 nt, Artificial Sequence
  Description of Artificial Sequence: Synthetic oligonucleotide
cagcgagccgaacaaauuc

SEQ ID NO: 1460158 - RNA, 19 nt, Artificial Sequence
  Description of Artificial Sequence: Synthetic oligonucleotide
agagaugacuagugacuga

SEQ ID NO: 1460159 - RNA, 19 nt, Artificial Sequence
  Description of Artificial Sequence: Synthetic oligonucleotide
auuccgcgccagcaggaac

SEQ ID NO: 1460160 - RNA, 19 nt, Artificial Sequence
  Description of Artificial Sequence: Synthetic oligonucleotide
agcagcuuauggcgccagc

SEQ ID NO: 1460161 - RNA, 19 nt, Artificial Sequence
  Description of Artificial Sequence: Synthetic oligonucleotide
uugaacacuuguggaauaa

SEQ ID NO: 1460162 - RNA, 19 nt, Artificial Sequence
  Description of Artificial Sequence: Synthetic oligonucleotide
caugaucaucccgauaauc

SEQ ID NO: 1460163 - RNA, 19 nt, Artificial Sequence
  Description of Artificial Sequence: Synthetic oligonucleotide
cauagaagagucggacaag

SEQ ID NO: 1460164 - RNA, 19 nt, Artificial Sequence
  Description of Artificial Sequence: Synthetic oligonucleotide
agaguauuccgcgccagca

SEQ ID NO: 1460165 - RNA, 19 nt, Artificial Sequence
  Description of Artificial Sequence: Synthetic oligonucleotide
agcuaacuagcaacccggc

SEQ ID NO: 1460166 - RNA, 19 nt, Artificial Sequence
  Description of Artificial Sequence: Synthetic oligonucleotide
cuaggccauuaauuccugc

SEQ ID NO: 1460167 - RNA, 19 nt, Artificial Sequence
  Description of Artificial Sequence: Synthetic oligonucleotide
augguaucaugaaguagag

SEQ ID NO: 1460168 - RNA, 19 nt, Artificial Sequence
  Description of Artificial Sequence: Synthetic oligonucleotide
gguuguauugccaaaguua

SEQ ID NO: 1460169 - RNA, 19 nt, Artificial Sequence
  Description of Artificial Sequence: Synthetic oligonucleotide
caguuaugguauagcaauc

SEQ ID NO: 1460170 - RNA, 19 nt, Artificial Sequence
  Description of Artificial Sequence: Synthetic oligonucleotide
ucgagggcaggggauggcg

SEQ ID NO: 1460171 - RNA, 19 nt, Artificial Sequence
  Description of Artificial Sequence: Synthetic oligonucleotide
augaggagagguagagagg

SEQ ID NO: 1460172 - RNA, 19 nt, Artificial Sequence
  Description of Artificial Sequence: Synthetic oligonucleotide
agcgaguagaggaaauuga

SEQ ID NO: 1460173 - RNA, 19 nt, Artificial Sequence
  Description of Artificial Sequence: Synthetic oligonucleotide
acauaguauaggauuccca

SEQ ID NO: 1460174 - RNA, 19 nt, Artificial Sequence
  Description of Artificial Sequence: Synthetic oligonucleotide
ggcgauaaaguggcuacgg

SEQ ID NO: 1460175 - RNA, 19 nt, Artificial Sequence
  Description of Artificial Sequence: Synthetic oligonucleotide
cucugcuaccuuuaaaaua

SEQ ID NO: 1460176 - RNA, 19 nt, Artificial Sequence
  Description of Artificial Sequence: Synthetic oligonucleotide
aguuugcccgucuucggau

SEQ ID NO: 1460177 - RNA, 19 nt, Artificial Sequence
  Description of Artificial Sequence: Synthetic oligonucleotide
cagcuuauggcgccagcgc

SEQ ID NO: 1460178 - RNA, 19 nt, Artificial Sequence
  Description of Artificial Sequence: Synthetic oligonucleotide
ucucucauguaugggccca

SEQ ID NO: 1460179 - RNA, 19 nt, Artificial Sequence
  Description of Artificial Sequence: Synthetic oligonucleotide
gguauagcaaucccaaggu

SEQ ID NO: 1460180 - RNA, 19 nt, Artificial Sequence
  Description of Artificial Sequence: Synthetic oligonucleotide
cagcgaguagaggaaauug

SEQ ID NO: 1460181 - RNA, 19 nt, Artificial Sequence
  Description of Artificial Sequence: Synthetic oligonucleotide
gccucuaggccauuaauuc

SEQ ID NO: 1460182 - RNA, 19 nt, Artificial Sequence
  Description of Artificial Sequence: Synthetic oligonucleotide
gggucauguuguuacauuc

SEQ ID NO: 1460183 - RNA, 19 nt, Artificial Sequence
  Description of Artificial Sequence: Synthetic oligonucleotide
ugaacacuuguggaauaaa

SEQ ID NO: 1460184 - RNA, 19 nt, Artificial Sequence
  Description of Artificial Sequence: Synthetic oligonucleotide
aacaccgcaagcaguccca

SEQ ID NO: 1460185 - RNA, 19 nt, Artificial Sequence
  Description of Artificial Sequence: Synthetic oligonucleotide
aguaaaccaugaggagagg

SEQ ID NO: 1460186 - RNA, 19 nt, Artificial Sequence
  Description of Artificial Sequence: Synthetic oligonucleotide
aaaggucaugccagcaaaa

SEQ ID NO: 1460187 - RNA, 19 nt, Artificial Sequence
  Description of Artificial Sequence: Synthetic oligonucleotide
ggcauugguacagaacacc

SEQ ID NO: 1460188 - RNA, 19 nt, Artificial Sequence
  Description of Artificial Sequence: Synthetic oligonucleotide
agauuuugaguagcaaguu

SEQ ID NO: 1460189 - RNA, 19 nt, Artificial Sequence
  Description of Artificial Sequence: Synthetic oligonucleotide
aggucaugccagcaaaaua

SEQ ID NO: 1460190 - RNA, 19 nt, Artificial Sequence
  Description of Artificial Sequence: Synthetic oligonucleotide
cugagcuaacuagcaaccc

SEQ ID NO: 1460191 - RNA, 19 nt, Artificial Sequence
  Description of Artificial Sequence: Synthetic oligonucleotide
gucccauguagacauagua

SEQ ID NO: 1460192 - RNA, 19 nt, Artificial Sequence
  Description of Artificial Sequence: Synthetic oligonucleotide
cacggcaaaggucaugcca

SEQ ID NO: 1460193 - RNA, 19 nt, Artificial Sequence
  Description of Artificial Sequence: Synthetic oligonucleotide
cccgucuucggauugaguc

SEQ ID NO: 1460194 - RNA, 19 nt, Artificial Sequence
  Description of Artificial Sequence: Synthetic oligonucleotide
gguaccaguuaugguauag

SEQ ID NO: 1460195 - RNA, 19 nt, Artificial Sequence
  Description of Artificial Sequence: Synthetic oligonucleotide
gucggacaagcugguaucg

SEQ ID NO: 1460196 - RNA, 19 nt, Artificial Sequence
  Description of Artificial Sequence: Synthetic oligonucleotide
cucuaggccauuaauuccu

SEQ ID NO: 1460197 - RNA, 19 nt, Artificial Sequence
  Description of Artificial Sequence: Synthetic oligonucleotide
acauggugacccgccaggg

SEQ ID NO: 1460198 - RNA, 19 nt, Artificial Sequence
  Description of Artificial Sequence: Synthetic oligonucleotide
uggugacccgccaggggcc

SEQ ID NO: 1460199 - RNA, 19 nt, Artificial Sequence
  Description of Artificial Sequence: Synthetic oligonucleotide
ccucuaggccauuaauucc

SEQ ID NO: 1460200 - RNA, 19 nt, Artificial Sequence
  Description of Artificial Sequence: Synthetic oligonucleotide
agcgaagcccaggaagauc

SEQ ID NO: 1460201 - RNA, 19 nt, Artificial Sequence
  Description of Artificial Sequence: Synthetic oligonucleotide
gcgcagauugaguacauca

SEQ ID NO: 1460202 - RNA, 19 nt, Artificial Sequence
  Description of Artificial Sequence: Synthetic oligonucleotide
gccgaacaaauucaccagc

SEQ ID NO: 1460203 - RNA, 19 nt, Artificial Sequence
  Description of Artificial Sequence: Synthetic oligonucleotide
acucccugggauucuggga

SEQ ID NO: 1460204 - RNA, 19 nt, Artificial Sequence
  Description of Artificial Sequence: Synthetic oligonucleotide
caacggaggcuaugggcag

SEQ ID NO: 1460205 - RNA, 19 nt, Artificial Sequence
  Description of Artificial Sequence: Synthetic oligonucleotide
cucggugaacugucacuag

SEQ ID NO: 1460206 - RNA, 19 nt, Artificial Sequence
  Description of Artificial Sequence: Synthetic oligonucleotide
uccuacacgcaagaguauu

SEQ ID NO: 1460207 - RNA, 19 nt, Artificial Sequence
  Description of Artificial Sequence: Synthetic oligonucleotide
ucccgauaaucaccuucca

SEQ ID NO: 1460208 - RNA, 19 nt, Artificial Sequence
  Description of Artificial Sequence: Synthetic oligonucleotide
cucgccucggugaacuguc

SEQ ID NO: 1460209 - RNA, 19 nt, Artificial Sequence
  Description of Artificial Sequence: Synthetic oligonucleotide
accaguuaugguauagcaa

SEQ ID NO: 1460210 - RNA, 19 nt, Artificial Sequence
  Description of Artificial Sequence: Synthetic oligonucleotide
ggcaacuccgggaaggccc

SEQ ID NO: 1460211 - RNA, 19 nt, Artificial Sequence
  Description of Artificial Sequence: Synthetic oligonucleotide
agggucauguuguuacauu

SEQ ID NO: 1460212 - RNA, 19 nt, Artificial Sequence
  Description of Artificial Sequence: Synthetic oligonucleotide
agcgagccgaacaaauuca

SEQ ID NO: 1460213 - RNA, 19 nt, Artificial Sequence
  Description of Artificial Sequence: Synthetic oligonucleotide
gcagcuuauggcgccagcg

SEQ ID NO: 1460214 - RNA, 19 nt, Artificial Sequence
  Description of Artificial Sequence: Synthetic oligonucleotide
gagucggacaagcugguau

SEQ ID NO: 1460215 - RNA, 19 nt, Artificial Sequence
  Description of Artificial Sequence: Synthetic oligonucleotide
gaggcgcgcggcgauaaag

SEQ ID NO: 1460216 - RNA, 19 nt, Artificial Sequence
  Description of Artificial Sequence: Synthetic oligonucleotide
caagaguauuccgcgccag

SEQ ID NO: 1460217 - RNA, 19 nt, Artificial Sequence
  Description of Artificial Sequence: Synthetic oligonucleotide
cuccaacggaggcuauggg

SEQ ID NO: 1460218 - RNA, 19 nt, Artificial Sequence
  Description of Artificial Sequence: Synthetic oligonucleotide
gguagagccgcuuccuaca

SEQ ID NO: 1460219 - RNA, 19 nt, Artificial Sequence
  Description of Artificial Sequence: Synthetic oligonucleotide
acucucgccucggugaacu

SEQ ID NO: 1460220 - RNA, 19 nt, Artificial Sequence
  Description of Artificial Sequence: Synthetic oligonucleotide
ggugagcuccaacggaggc

SEQ ID NO: 1460221 - RNA, 19 nt, Artificial Sequence
  Description of Artificial Sequence: Synthetic oligonucleotide
gucaugccagcaaaauaac

SEQ ID NO: 1460222 - RNA, 19 nt, Artificial Sequence
  Description of Artificial Sequence: Synthetic oligonucleotide
aagagucggacaagcuggu

SEQ ID NO: 1460223 - RNA, 19 nt, Artificial Sequence
  Description of Artificial Sequence: Synthetic oligonucleotide
gauggguaccaguuauggu

SEQ ID NO: 1460224 - RNA, 19 nt, Artificial Sequence
  Description of Artificial Sequence: Synthetic oligonucleotide
guacaucaucagcgaagcc

SEQ ID NO: 1460225 - RNA, 19 nt, Artificial Sequence
  Description of Artificial Sequence: Synthetic oligonucleotide
ugcccaagaaagagagguu

SEQ ID NO: 1460226 - RNA, 19 nt, Artificial Sequence
  Description of Artificial Sequence: Synthetic oligonucleotide
cugucacuagcuggaggcg

SEQ ID NO: 1460227 - RNA, 19 nt, Artificial Sequence
  Description of Artificial Sequence: Synthetic oligonucleotide
aaguccaaaugcaggccaa

SEQ ID NO: 1460228 - RNA, 19 nt, Artificial Sequence
  Description of Artificial Sequence: Synthetic oligonucleotide
guagagccgcuuccuacac

SEQ ID NO: 1460229 - RNA, 19 nt, Artificial Sequence
  Description of Artificial Sequence: Synthetic oligonucleotide
uggcgugaaggagcugagg

SEQ ID NO: 1460230 - RNA, 19 nt, Artificial Sequence
  Description of Artificial Sequence: Synthetic oligonucleotide
uggcaaggagggcaccuau

SEQ ID NO: 1460231 - RNA, 19 nt, Artificial Sequence
  Description of Artificial Sequence: Synthetic oligonucleotide
aacccggcacaaucccaga

SEQ ID NO: 1460232 - RNA, 19 nt, Artificial Sequence
  Description of Artificial Sequence: Synthetic oligonucleotide
agaagguaucucccacaaa

SEQ ID NO: 1460233 - RNA, 19 nt, Artificial Sequence
  Description of Artificial Sequence: Synthetic oligonucleotide
ccaacggaggcuaugggca

SEQ ID NO: 1460234 - RNA, 19 nt, Artificial Sequence
  Description of Artificial Sequence: Synthetic oligonucleotide
agcgcagauugaguacauc

SEQ ID NO: 1460235 - RNA, 19 nt, Artificial Sequence
  Description of Artificial Sequence: Synthetic oligonucleotide
aguugaugagggucauguu

SEQ ID NO: 1460236 - RNA, 19 nt, Artificial Sequence
  Description of Artificial Sequence: Synthetic oligonucleotide
guaaaccaugaggagaggu

SEQ ID NO: 1460237 - RNA, 19 nt, Artificial Sequence
  Description of Artificial Sequence: Synthetic oligonucleotide
cccaaagauuuugaguagc

SEQ ID NO: 1460238 - RNA, 19 nt, Artificial Sequence
  Description of Artificial Sequence: Synthetic oligonucleotide
gcggcgauaaaguggcuac

SEQ ID NO: 1460239 - RNA, 19 nt, Artificial Sequence
  Description of Artificial Sequence: Synthetic oligonucleotide
caaacaccugugaugggua

SEQ ID NO: 1460240 - RNA, 19 nt, Artificial Sequence
  Description of Artificial Sequence: Synthetic oligonucleotide
agccgcuuccuacacgcaa

SEQ ID NO: 1460241 - RNA, 19 nt, Artificial Sequence
  Description of Artificial Sequence: Synthetic oligonucleotide
gggaugagggucacaguag

SEQ ID NO: 1460242 - RNA, 19 nt, Artificial Sequence
  Description of Artificial Sequence: Synthetic oligonucleotide
cauuaauuccugcuaggau

SEQ ID NO: 1460243 - RNA, 19 nt, Artificial Sequence
  Description of Artificial Sequence: Synthetic oligonucleotide
ccggcacaaucccagaggc

SEQ ID NO: 1460244 - RNA, 19 nt, Artificial Sequence
  Description of Artificial Sequence: Synthetic oligonucleotide
ccaagauucccaccacggc

SEQ ID NO: 1460245 - RNA, 19 nt, Artificial Sequence
  Description of Artificial Sequence: Synthetic oligonucleotide
agacaugaucaucccgaua

SEQ ID NO: 1460246 - RNA, 19 nt, Artificial Sequence
  Description of Artificial Sequence: Synthetic oligonucleotide
auguaugggcccaaagauu

SEQ ID NO: 1460247 - RNA, 19 nt, Artificial Sequence
  Description of Artificial Sequence: Synthetic oligonucleotide
cccgauaaucaccuuccag

SEQ ID NO: 1460248 - RNA, 19 nt, Artificial Sequence
  Description of Artificial Sequence: Synthetic oligonucleotide
agccucuaggccauuaauu

SEQ ID NO: 1460249 - RNA, 19 nt, Artificial Sequence
  Description of Artificial Sequence: Synthetic oligonucleotide
aggcccacauggugacccg

SEQ ID NO: 1460250 - RNA, 19 nt, Artificial Sequence
  Description of Artificial Sequence: Synthetic oligonucleotide
uggaccagacagguugguc

SEQ ID NO: 1460251 - RNA, 19 nt, Artificial Sequence
  Description of Artificial Sequence: Synthetic oligonucleotide
ccuacacgcaagaguauuc

SEQ ID NO: 1460252 - RNA, 19 nt, Artificial Sequence
  Description of Artificial Sequence: Synthetic oligonucleotide
cugggugagcuccaacgga

SEQ ID NO: 1460253 - RNA, 19 nt, Artificial Sequence
  Description of Artificial Sequence: Synthetic oligonucleotide
agggucacaguagccacaa

SEQ ID NO: 1460254 - RNA, 19 nt, Artificial Sequence
  Description of Artificial Sequence: Synthetic oligonucleotide
agcugguaucgaauggaga

SEQ ID NO: 1460255 - RNA, 19 nt, Artificial Sequence
  Description of Artificial Sequence: Synthetic oligonucleotide
cgcgcggcgauaaaguggc

SEQ ID NO: 1460256 - RNA, 19 nt, Artificial Sequence
  Description of Artificial Sequence: Synthetic oligonucleotide
uauggcgccagcgcagauu

SEQ ID NO: 1460257 - RNA, 19 nt, Artificial Sequence
  Description of Artificial Sequence: Synthetic oligonucleotide
cgcaagaguauuccgcgcc

SEQ ID NO: 1460258 - RNA, 19 nt, Artificial Sequence
  Description of Artificial Sequence: Synthetic oligonucleotide
cccggcacaaucccagagg

SEQ ID NO: 1460259 - RNA, 19 nt, Artificial Sequence
  Description of Artificial Sequence: Synthetic oligonucleotide
ccgaacaaauucaccagca

SEQ ID NO: 1460260 - RNA, 19 nt, Artificial Sequence
  Description of Artificial Sequence: Synthetic oligonucleotide
uauuccgcgccagcaggaa

SEQ ID NO: 1460261 - RNA, 19 nt, Artificial Sequence
  Description of Artificial Sequence: Synthetic oligonucleotide
ggcgccagcgcagauugag

SEQ ID NO: 1460262 - RNA, 19 nt, Artificial Sequence
  Description of Artificial Sequence: Synthetic oligonucleotide
acaaucccagaggccucgg

SEQ ID NO: 1460263 - RNA, 19 nt, Artificial Sequence
  Description of Artificial Sequence: Synthetic oligonucleotide
gcuaacuagcaacccggca

SEQ ID NO: 1460264 - RNA, 19 nt, Artificial Sequence
  Description of Artificial Sequence: Synthetic oligonucleotide
cagaggccucggcagucgg

SEQ ID NO: 1460265 - RNA, 19 nt, Artificial Sequence
  Description of Artificial Sequence: Synthetic oligonucleotide
cgccaacugagcuaacuag

SEQ ID NO: 1460266 - RNA, 19 nt, Artificial Sequence
  Description of Artificial Sequence: Synthetic oligonucleotide
aacuagcaacccggcacaa

SEQ ID NO: 1460267 - RNA, 19 nt, Artificial Sequence
  Description of Artificial Sequence: Synthetic oligonucleotide
gucccaagauucccaccac

SEQ ID NO: 1460268 - RNA, 19 nt, Artificial Sequence
  Description of Artificial Sequence: Synthetic oligonucleotide
guagcaaguugaugagggu

SEQ ID NO: 1460269 - RNA, 19 nt, Artificial Sequence
  Description of Artificial Sequence: Synthetic oligonucleotide
uuggaccagacagguuggu

SEQ ID NO: 1460270 - RNA, 19 nt, Artificial Sequence
  Description of Artificial Sequence: Synthetic oligonucleotide
ucgccucggugaacuguca

SEQ ID NO: 1460271 - RNA, 19 nt, Artificial Sequence
  Description of Artificial Sequence: Synthetic oligonucleotide
uuauggcgccagcgcagau

SEQ ID NO: 1460272 - RNA, 19 nt, Artificial Sequence
  Description of Artificial Sequence: Synthetic oligonucleotide
auggcgugaaggagcugag

SEQ ID NO: 1460273 - RNA, 19 nt, Artificial Sequence
  Description of Artificial Sequence: Synthetic oligonucleotide
gcaagaguauuccgcgcca

SEQ ID NO: 1460274 - RNA, 19 nt, Artificial Sequence
  Description of Artificial Sequence: Synthetic oligonucleotide
gcgauaaaguggcuacgga

SEQ ID NO: 1460275 - RNA, 19 nt, Artificial Sequence
  Description of Artificial Sequence: Synthetic oligonucleotide
ggauugagucuggguaugc

SEQ ID NO: 1460276 - RNA, 19 nt, Artificial Sequence
  Description of Artificial Sequence: Synthetic oligonucleotide
ccauuaauuccugcuagga

SEQ ID NO: 1460277 - RNA, 19 nt, Artificial Sequence
  Description of Artificial Sequence: Synthetic oligonucleotide
cgagccgaacaaauucacc

SEQ ID NO: 1460278 - RNA, 19 nt, Artificial Sequence
  Description of Artificial Sequence: Synthetic oligonucleotide
ggaauagcucaucuccagu

SEQ ID NO: 1460279 - RNA, 19 nt, Artificial Sequence
  Description of Artificial Sequence: Synthetic oligonucleotide
uuccugcuaggauguugau

SEQ ID NO: 1460280 - RNA, 19 nt, Artificial Sequence
  Description of Artificial Sequence: Synthetic oligonucleotide
guauuccgcgccagcagga

SEQ ID NO: 1460281 - RNA, 19 nt, Artificial Sequence
  Description of Artificial Sequence: Synthetic oligonucleotide
gcagcggcaacuccgggaa

SEQ ID NO: 1460282 - RNA, 19 nt, Artificial Sequence
  Description of Artificial Sequence: Synthetic oligonucleotide
gccagcgcagauugaguac

SEQ ID NO: 1460283 - RNA, 19 nt, Artificial Sequence
  Description of Artificial Sequence: Synthetic oligonucleotide
cgcucugcuaccuuuaaaa

SEQ ID NO: 1460284 - RNA, 19 nt, Artificial Sequence
  Description of Artificial Sequence: Synthetic oligonucleotide
acuagcaacccggcacaau

SEQ ID NO: 1460285 - RNA, 19 nt, Artificial Sequence
  Description of Artificial Sequence: Synthetic oligonucleotide
ggcgcgcggcgauaaagug

SEQ ID NO: 1460286 - RNA, 19 nt, Artificial Sequence
  Description of Artificial Sequence: Synthetic oligonucleotide
cuucggauugagucugggu

SEQ ID NO: 1460287 - RNA, 19 nt, Artificial Sequence
  Description of Artificial Sequence: Synthetic oligonucleotide
uugcccgucuucggauuga

SEQ ID NO: 1460288 - RNA, 19 nt, Artificial Sequence
  Description of Artificial Sequence: Synthetic oligonucleotide
gggugagcuccaacggagg

SEQ ID NO: 1460289 - RNA, 19 nt, Artificial Sequence
  Description of Artificial Sequence: Synthetic oligonucleotide
gcgcgcggcgauaaagugg

SEQ ID NO: 1460290 - RNA, 19 nt, Artificial Sequence
  Description of Artificial Sequence: Synthetic oligonucleotide
gggcccaaagauuuugagu

SEQ ID NO: 1460291 - RNA, 19 nt, Artificial Sequence
  Description of Artificial Sequence: Synthetic oligonucleotide
gccgcuuccuacacgcaag

SEQ ID NO: 1460292 - RNA, 19 nt, Artificial Sequence
  Description of Artificial Sequence: Synthetic oligonucleotide
uggaggcgcucugcuaccu

SEQ ID NO: 1460293 - RNA, 19 nt, Artificial Sequence
  Description of Artificial Sequence: Synthetic oligonucleotide
gaggccucggcagucggua

SEQ ID NO: 1460294 - RNA, 19 nt, Artificial Sequence
  Description of Artificial Sequence: Synthetic oligonucleotide
aggcgcgcggcgauaaagu

SEQ ID NO: 1460295 - RNA, 19 nt, Artificial Sequence
  Description of Artificial Sequence: Synthetic oligonucleotide
ugacccgccaggggccgcc

SEQ ID NO: 1460296 - RNA, 19 nt, Artificial Sequence
  Description of Artificial Sequence: Synthetic oligonucleotide
ucaucccgauaaucaccuu

SEQ ID NO: 1460297 - RNA, 19 nt, Artificial Sequence
  Description of Artificial Sequence: Synthetic oligonucleotide
gaauccagcggaagggcuu

SEQ ID NO: 1460298 - RNA, 19 nt, Artificial Sequence
  Description of Artificial Sequence: Synthetic oligonucleotide
ggaccagaaggcagucuug

SEQ ID NO: 1460299 - RNA, 19 nt, Artificial Sequence
  Description of Artificial Sequence: Synthetic oligonucleotide
gguaugcggugucgagggc

SEQ ID NO: 1460300 - RNA, 19 nt, Artificial Sequence
  Description of Artificial Sequence: Synthetic oligonucleotide
cugcuaccuuuaaaauaaa

SEQ ID NO: 1460301 - RNA, 19 nt, Artificial Sequence
  Description of Artificial Sequence: Synthetic oligonucleotide
aggcagggaugagggucac

SEQ ID NO: 1460302 - RNA, 19 nt, Artificial Sequence
  Description of Artificial Sequence: Synthetic oligonucleotide
gcuuggguaccacaauggu

SEQ ID NO: 1460303 - RNA, 19 nt, Artificial Sequence
  Description of Artificial Sequence: Synthetic oligonucleotide
ggcaaaggucaugccagca

SEQ ID NO: 1460304 - RNA, 19 nt, Artificial Sequence
  Description of Artificial Sequence: Synthetic oligonucleotide
uaauuccugcuaggauguu

SEQ ID NO: 1460305 - RNA, 19 nt, Artificial Sequence
  Description of Artificial Sequence: Synthetic oligonucleotide
gcuaggauguugauggcau

SEQ ID NO: 1460306 - RNA, 19 nt, Artificial Sequence
  Description of Artificial Sequence: Synthetic oligonucleotide
gcgagccgaacaaauucac

SEQ ID NO: 1460307 - RNA, 19 nt, Artificial Sequence
  Description of Artificial Sequence: Synthetic oligonucleotide
caccacggcaaaggucaug

SEQ ID NO: 1460308 - RNA, 19 nt, Artificial Sequence
  Description of Artificial Sequence: Synthetic oligonucleotide
uccgcgccagcaggaacaa

SEQ ID NO: 1460309 - RNA, 19 nt, Artificial Sequence
  Description of Artificial Sequence: Synthetic oligonucleotide
cgucuucggauugagucug

SEQ ID NO: 1460310 - RNA, 19 nt, Artificial Sequence
  Description of Artificial Sequence: Synthetic oligonucleotide
cgguagagccgcuuccuac

SEQ ID NO: 1460311 - RNA, 19 nt, Artificial Sequence
  Description of Artificial Sequence: Synthetic oligonucleotide
cgauaaucaccuuccagcu

SEQ ID NO: 1460312 - RNA, 19 nt, Artificial Sequence
  Description of Artificial Sequence: Synthetic oligonucleotide
ggugacccgccaggggccg

SEQ ID NO: 1460313 - RNA, 19 nt, Artificial Sequence
  Description of Artificial Sequence: Synthetic oligonucleotide
caccugugauggguaccag

SEQ ID NO: 1460314 - RNA, 19 nt, Artificial Sequence
  Description of Artificial Sequence: Synthetic oligonucleotide
ccagcgcagauugaguaca

SEQ ID NO: 1460315 - RNA, 19 nt, Artificial Sequence
  Description of Artificial Sequence: Synthetic oligonucleotide
gccucggcagucgguagag

SEQ ID NO: 1460316 - RNA, 19 nt, Artificial Sequence
  Description of Artificial Sequence: Synthetic oligonucleotide
cgcgccagcaggaacaaaa

SEQ ID NO: 1460317 - RNA, 19 nt, Artificial Sequence
  Description of Artificial Sequence: Synthetic oligonucleotide
augcggugucgagggcagg

SEQ ID NO: 1460318 - RNA, 19 nt, Artificial Sequence
  Description of Artificial Sequence: Synthetic oligonucleotide
uggcgccagcgcagauuga

SEQ ID NO: 1460319 - RNA, 19 nt, Artificial Sequence
  Description of Artificial Sequence: Synthetic oligonucleotide
agagucggacaagcuggua

SEQ ID NO: 1460320 - RNA, 19 nt, Artificial Sequence
  Description of Artificial Sequence: Synthetic oligonucleotide
gcggugucgagggcagggg

SEQ ID NO: 1460321 - RNA, 19 nt, Artificial Sequence
  Description of Artificial Sequence: Synthetic oligonucleotide
gucgguagagccgcuuccu

SEQ ID NO: 1460322 - RNA, 19 nt, Artificial Sequence
  Description of Artificial Sequence: Synthetic oligonucleotide
acaccgcaagcagucccau

SEQ ID NO: 1460323 - RNA, 19 nt, Artificial Sequence
  Description of Artificial Sequence: Synthetic oligonucleotide
ggcaaggagggcaccuauc

SEQ ID NO: 1460324 - RNA, 19 nt, Artificial Sequence
  Description of Artificial Sequence: Synthetic oligonucleotide
guuugcccgucuucggauu

SEQ ID NO: 1460325 - RNA, 19 nt, Artificial Sequence
  Description of Artificial Sequence: Synthetic oligonucleotide
agaggcgcgcggcgauaaa

SEQ ID NO: 1460326 - RNA, 19 nt, Artificial Sequence
  Description of Artificial Sequence: Synthetic oligonucleotide
cccaagaaagagagguucu

SEQ ID NO: 1460327 - RNA, 19 nt, Artificial Sequence
  Description of Artificial Sequence: Synthetic oligonucleotide
gcccacauggugacccgcc

SEQ ID NO: 1460328 - RNA, 19 nt, Artificial Sequence
  Description of Artificial Sequence: Synthetic oligonucleotide
ccacggcaaaggucaugcc

SEQ ID NO: 1460329 - RNA, 19 nt, Artificial Sequence
  Description of Artificial Sequence: Synthetic oligonucleotide
cuaggauguugauggcauu

SEQ ID NO: 1460330 - RNA, 19 nt, Artificial Sequence
  Description of Artificial Sequence: Synthetic oligonucleotide
accagccucuaggccauua

SEQ ID NO: 1460331 - RNA, 19 nt, Artificial Sequence
  Description of Artificial Sequence: Synthetic oligonucleotide
caccuaucagggccacaaa

SEQ ID NO: 1460332 - RNA, 19 nt, Artificial Sequence
  Description of Artificial Sequence: Synthetic oligonucleotide
gccucggugaacugucacu

SEQ ID NO: 1460333 - RNA, 19 nt, Artificial Sequence
  Description of Artificial Sequence: Synthetic oligonucleotide
gcaacuccgggaaggccca

SEQ ID NO: 1460334 - RNA, 19 nt, Artificial Sequence
  Description of Artificial Sequence: Synthetic oligonucleotide
gcggcaacuccgggaaggc

SEQ ID NO: 1460335 - RNA, 19 nt, Artificial Sequence
  Description of Artificial Sequence: Synthetic oligonucleotide
cacucucgccucggugaac

SEQ ID NO: 1460336 - RNA, 19 nt, Artificial Sequence
  Description of Artificial Sequence: Synthetic oligonucleotide
gcaacccggcacaauccca

SEQ ID NO: 1460337 - RNA, 19 nt, Artificial Sequence
  Description of Artificial Sequence: Synthetic oligonucleotide
gcggaagggcuuggguacc

SEQ ID NO: 1460338 - RNA, 19 nt, Artificial Sequence
  Description of Artificial Sequence: Synthetic oligonucleotide
ccgucuucggauugagucu

SEQ ID NO: 1460339 - RNA, 19 nt, Artificial Sequence
  Description of Artificial Sequence: Synthetic oligonucleotide
cucucauguaugggcccaa

SEQ ID NO: 1460340 - RNA, 19 nt, Artificial Sequence
  Description of Artificial Sequence: Synthetic oligonucleotide
ggcccacauggugacccgc

SEQ ID NO: 1460341 - RNA, 19 nt, Artificial Sequence
  Description of Artificial Sequence: Synthetic oligonucleotide
gggauggcgugaaggagcu

SEQ ID NO: 1460342 - RNA, 19 nt, Artificial Sequence
  Description of Artificial Sequence: Synthetic oligonucleotide
cggauugagucuggguaug

SEQ ID NO: 1460343 - RNA, 19 nt, Artificial Sequence
  Description of Artificial Sequence: Synthetic oligonucleotide
cggcgauaaaguggcuacg

SEQ ID NO: 1460344 - RNA, 19 nt, Artificial Sequence
  Description of Artificial Sequence: Synthetic oligonucleotide
cagaggcgcgcggcgauaa

SEQ ID NO: 1460345 - RNA, 19 nt, Artificial Sequence
  Description of Artificial Sequence: Synthetic oligonucleotide
ccaugaggagagguagaga

SEQ ID NO: 1460346 - RNA, 19 nt, Artificial Sequence
  Description of Artificial Sequence: Synthetic oligonucleotide
ccgccaacugagcuaacua

SEQ ID NO: 1460347 - RNA, 19 nt, Artificial Sequence
  Description of Artificial Sequence: Synthetic oligonucleotide
ucccagcagcgagccgaac

SEQ ID NO: 1460348 - RNA, 19 nt, Artificial Sequence
  Description of Artificial Sequence: Synthetic oligonucleotide
caacuccgggaaggcccac

SEQ ID NO: 1460349 - RNA, 19 nt, Artificial Sequence
  Description of Artificial Sequence: Synthetic oligonucleotide
ggccaagaauccagcggaa

SEQ ID NO: 1460350 - RNA, 19 nt, Artificial Sequence
  Description of Artificial Sequence: Synthetic oligonucleotide
ggugucgagggcaggggau

SEQ ID NO: 1460351 - RNA, 19 nt, Artificial Sequence
  Description of Artificial Sequence: Synthetic oligonucleotide
cuaccagguugaagacaau

SEQ ID NO: 1460352 - RNA, 19 nt, Artificial Sequence
  Description of Artificial Sequence: Synthetic oligonucleotide
cagcgcagauugaguacau

SEQ ID NO: 1460353 - RNA, 19 nt, Artificial Sequence
  Description of Artificial Sequence: Synthetic oligonucleotide
cacagaggcgcgcggcgau

SEQ ID NO: 1460354 - RNA, 19 nt, Artificial Sequence
  Description of Artificial Sequence: Synthetic oligonucleotide
gugacccgccaggggccgc

SEQ ID NO: 1460355 - RNA, 19 nt, Artificial Sequence
  Description of Artificial Sequence: Synthetic oligonucleotide
cgccagcgcagauugagua

SEQ ID NO: 1460356 - RNA, 19 nt, Artificial Sequence
  Description of Artificial Sequence: Synthetic oligonucleotide
gccgccaacugagcuaacu

SEQ ID NO: 1460357 - RNA, 19 nt, Artificial Sequence
  Description of Artificial Sequence: Synthetic oligonucleotide
gcagcgaguagaggaaauu

SEQ ID NO: 1460358 - RNA, 19 nt, Artificial Sequence
  Description of Artificial Sequence: Synthetic oligonucleotide
cacuagcuggaggcgcucu

SEQ ID NO: 1460359 - RNA, 19 nt, Artificial Sequence
  Description of Artificial Sequence: Synthetic oligonucleotide
ggcagcgaguagaggaaau

SEQ ID NO: 1460360 - RNA, 19 nt, Artificial Sequence
  Description of Artificial Sequence: Synthetic oligonucleotide
ccaagaaagagagguucuu

SEQ ID NO: 1460361 - RNA, 19 nt, Artificial Sequence
  Description of Artificial Sequence: Synthetic oligonucleotide
gcagcgagccgaacaaauu

SEQ ID NO: 1460362 - RNA, 19 nt, Artificial Sequence
  Description of Artificial Sequence: Synthetic oligonucleotide
cagcgaagcccaggaagau

SEQ ID NO: 1460363 - RNA, 19 nt, Artificial Sequence
  Description of Artificial Sequence: Synthetic oligonucleotide
gggcaccuaucagggccac

SEQ ID NO: 1460364 - RNA, 19 nt, Artificial Sequence
  Description of Artificial Sequence: Synthetic oligonucleotide
ccgccgccaacugagcuaa

SEQ ID NO: 1460365 - RNA, 19 nt, Artificial Sequence
  Description of Artificial Sequence: Synthetic oligonucleotide
cggugucgagggcagggga

SEQ ID NO: 1460366 - RNA, 19 nt, Artificial Sequence
  Description of Artificial Sequence: Synthetic oligonucleotide
ccacagaggcgcgcggcga

SEQ ID NO: 1460367 - RNA, 19 nt, Artificial Sequence
  Description of Artificial Sequence: Synthetic oligonucleotide
cgcggcgauaaaguggcua

SEQ ID NO: 1460368 - RNA, 19 nt, Artificial Sequence
  Description of Artificial Sequence: Synthetic oligonucleotide
ggaggcgcucugcuaccuu

SEQ ID NO: 1460369 - RNA, 19 nt, Artificial Sequence
  Description of Artificial Sequence: Synthetic oligonucleotide
gagcuccaacggaggcuau

SEQ ID NO: 1460370 - RNA, 19 nt, Artificial Sequence
  Description of Artificial Sequence: Synthetic oligonucleotide
gcgccagcgcagauugagu

SEQ ID NO: 1460371 - RNA, 19 nt, Artificial Sequence
  Description of Artificial Sequence: Synthetic oligonucleotide
gcagucgguagagccgcuu

SEQ ID NO: 1460372 - RNA, 19 nt, Artificial Sequence
  Description of Artificial Sequence: Synthetic oligonucleotide
cgccgccaacugagcuaac

SEQ ID NO: 1460373 - RNA, 19 nt, Artificial Sequence
  Description of Artificial Sequence: Synthetic oligonucleotide
gcgcggcgauaaaguggcu

SEQ ID NO: 1460374 - RNA, 19 nt, Artificial Sequence
  Description of Artificial Sequence: Synthetic oligonucleotide
ccgcgccagcaggaacaaa

SEQ ID NO: 1460375 - RNA, 19 nt, Artificial Sequence
  Description of Artificial Sequence: Synthetic oligonucleotide
aauuaugaaggucauaugc

SEQ ID NO: 1460376 - RNA, 19 nt, Artificial Sequence
  Description of Artificial Sequence: Synthetic oligonucleotide
aaaacauaguuauuuaacc

SEQ ID NO: 1460377 - RNA, 19 nt, Artificial Sequence
  Description of Artificial Sequence: Synthetic oligonucleotide
uauuuaaccaauaagacau

SEQ ID NO: 1460378 - RNA, 19 nt, Artificial Sequence
  Description of Artificial Sequence: Synthetic oligonucleotide
aagcccacaaaauaguugc

SEQ ID NO: 1460379 - RNA, 19 nt, Artificial Sequence
  Description of Artificial Sequence: Synthetic oligonucleotide
cauucaauggucuagagac

SEQ ID NO: 1460380 - RNA, 19 nt, Artificial Sequence
  Description of Artificial Sequence: Synthetic oligonucleotide
uaaccaauaagacaugggc

SEQ ID NO: 1460381 - RNA, 19 nt, Artificial Sequence
  Description of Artificial Sequence: Synthetic oligonucleotide
acaacuuccaccauggacc

SEQ ID NO: 1460382 - RNA, 19 nt, Artificial Sequence
  Description of Artificial Sequence: Synthetic oligonucleotide
uaugugauaaaugccaggg

SEQ ID NO: 1460383 - RNA, 19 nt, Artificial Sequence
  Description of Artificial Sequence: Synthetic oligonucleotide
uuauuuaaccaauaagaca

SEQ ID NO: 1460384 - RNA, 19 nt, Artificial Sequence
  Description of Artificial Sequence: Synthetic oligonucleotide
ugugauaaaugccagggac

SEQ ID NO: 1460385 - RNA, 19 nt, Artificial Sequence
  Description of Artificial Sequence: Synthetic oligonucleotide
gaaacugaagccaugcagg

SEQ ID NO: 1460386 - RNA, 19 nt, Artificial Sequence
  Description of Artificial Sequence: Synthetic oligonucleotide
uuaaccaauaagacauggg

SEQ ID NO: 1460387 - RNA, 19 nt, Artificial Sequence
  Description of Artificial Sequence: Synthetic oligonucleotide
aaaaugcaggcacugagga

SEQ ID NO: 1460388 - RNA, 19 nt, Artificial Sequence
  Description of Artificial Sequence: Synthetic oligonucleotide
uucuugaaaacauaguuau

SEQ ID NO: 1460389 - RNA, 19 nt, Artificial Sequence
  Description of Artificial Sequence: Synthetic oligonucleotide
aacagcacgagguagcaca

SEQ ID NO: 1460390 - RNA, 19 nt, Artificial Sequence
  Description of Artificial Sequence: Synthetic oligonucleotide
uuuaaccaauaagacaugg

SEQ ID NO: 1460391 - RNA, 19 nt, Artificial Sequence
  Description of Artificial Sequence: Synthetic oligonucleotide
aaaagugacccagugacug

SEQ ID NO: 1460392 - RNA, 19 nt, Artificial Sequence
  Description of Artificial Sequence: Synthetic oligonucleotide
gaaaacauaguuauuuaac

SEQ ID NO: 1460393 - RNA, 19 nt, Artificial Sequence
  Description of Artificial Sequence: Synthetic oligonucleotide
uaagacaugggcagguucc

SEQ ID NO: 1460394 - RNA, 19 nt, Artificial Sequence
  Description of Artificial Sequence: Synthetic oligonucleotide
acaaguggacaguacaagg

SEQ ID NO: 1460395 - RNA, 19 nt, Artificial Sequence
  Description of Artificial Sequence: Synthetic oligonucleotide
ucagguaagacgguaaccc

SEQ ID NO: 1460396 - RNA, 19 nt, Artificial Sequence
  Description of Artificial Sequence: Synthetic oligonucleotide
gaagaagccaccugccacg

SEQ ID NO: 1460397 - RNA, 19 nt, Artificial Sequence
  Description of Artificial Sequence: Synthetic oligonucleotide
cacaucgacaucaaacagg

SEQ ID NO: 1460398 - RNA, 19 nt, Artificial Sequence
  Description of Artificial Sequence: Synthetic oligonucleotide
uuaugaaggucauaugccu

SEQ ID NO: 1460399 - RNA, 19 nt, Artificial Sequence
  Description of Artificial Sequence: Synthetic oligonucleotide
auaaaugccagggacagca

SEQ ID NO: 1460400 - RNA, 19 nt, Artificial Sequence
  Description of Artificial Sequence: Synthetic oligonucleotide
gacgauggugcccacaaag

SEQ ID NO: 1460401 - RNA, 19 nt, Artificial Sequence
  Description of Artificial Sequence: Synthetic oligonucleotide
cuaaggaggagucuugaag

SEQ ID NO: 1460402 - RNA, 19 nt, Artificial Sequence
  Description of Artificial Sequence: Synthetic oligonucleotide
aaguggacaguacaaggca

SEQ ID NO: 1460403 - RNA, 19 nt, Artificial Sequence
  Description of Artificial Sequence: Synthetic oligonucleotide
uagagguagcccaugaacu

SEQ ID NO: 1460404 - RNA, 19 nt, Artificial Sequence
  Description of Artificial Sequence: Synthetic oligonucleotide
auaguuauuuaaccaauaa

SEQ ID NO: 1460405 - RNA, 19 nt, Artificial Sequence
  Description of Artificial Sequence: Synthetic oligonucleotide
uaagacgguaaccccagcc

SEQ ID NO: 1460406 - RNA, 19 nt, Artificial Sequence
  Description of Artificial Sequence: Synthetic oligonucleotide
gagucgaucaccgucgagg

SEQ ID NO: 1460407 - RNA, 19 nt, Artificial Sequence
  Description of Artificial Sequence: Synthetic oligonucleotide
acauaugugauaaaugcca

SEQ ID NO: 1460408 - RNA, 19 nt, Artificial Sequence
  Description of Artificial Sequence: Synthetic oligonucleotide
caguacaaggcacagcagg

SEQ ID NO: 1460409 - RNA, 19 nt, Artificial Sequence
  Description of Artificial Sequence: Synthetic oligonucleotide
aacgcuucgacaaaaugca

SEQ ID NO: 1460410 - RNA, 19 nt, Artificial Sequence
  Description of Artificial Sequence: Synthetic oligonucleotide
aagagguaggggcccacac

SEQ ID NO: 1460411 - RNA, 19 nt, Artificial Sequence
  Description of Artificial Sequence: Synthetic oligonucleotide
aagacgguaaccccagccu

SEQ ID NO: 1460412 - RNA, 19 nt, Artificial Sequence
  Description of Artificial Sequence: Synthetic oligonucleotide
cacgagguagcacaggagg

SEQ ID NO: 1460413 - RNA, 19 nt, Artificial Sequence
  Description of Artificial Sequence: Synthetic oligonucleotide
uuguggacaguauaugcca

SEQ ID NO: 1460414 - RNA, 19 nt, Artificial Sequence
  Description of Artificial Sequence: Synthetic oligonucleotide
aaacugaagccaugcagga

SEQ ID NO: 1460415 - RNA, 19 nt, Artificial Sequence
  Description of Artificial Sequence: Synthetic oligonucleotide
aagugacccagugacuggc

SEQ ID NO: 1460416 - RNA, 19 nt, Artificial Sequence
  Description of Artificial Sequence: Synthetic oligonucleotide
ucaagaauggagagggguc

SEQ ID NO: 1460417 - RNA, 19 nt, Artificial Sequence
  Description of Artificial Sequence: Synthetic oligonucleotide
uucuccuccgugaagccag

SEQ ID NO: 1460418 - RNA, 19 nt, Artificial Sequence
  Description of Artificial Sequence: Synthetic oligonucleotide
aaccaauaagacaugggca

SEQ ID NO: 1460419 - RNA, 19 nt, Artificial Sequence
  Description of Artificial Sequence: Synthetic oligonucleotide
ugcaucucacccaugagua

SEQ ID NO: 1460420 - RNA, 19 nt, Artificial Sequence
  Description of Artificial Sequence: Synthetic oligonucleotide
ggaaacugaagccaugcag

SEQ ID NO: 1460421 - RNA, 19 nt, Artificial Sequence
  Description of Artificial Sequence: Synthetic oligonucleotide
agccagaucuggucaaggc

SEQ ID NO: 1460422 - RNA, 19 nt, Artificial Sequence
  Description of Artificial Sequence: Synthetic oligonucleotide
gacgguagaagauccagca

SEQ ID NO: 1460423 - RNA, 19 nt, Artificial Sequence
  Description of Artificial Sequence: Synthetic oligonucleotide
agucgaucaccgucgaggg

SEQ ID NO: 1460424 - RNA, 19 nt, Artificial Sequence
  Description of Artificial Sequence: Synthetic oligonucleotide
caugaguagguagaugagg

SEQ ID NO: 1460425 - RNA, 19 nt, Artificial Sequence
  Description of Artificial Sequence: Synthetic oligonucleotide
uccacauucaauggucuag

SEQ ID NO: 1460426 - RNA, 19 nt, Artificial Sequence
  Description of Artificial Sequence: Synthetic oligonucleotide
augagacgguagaagaucc

SEQ ID NO: 1460427 - RNA, 19 nt, Artificial Sequence
  Description of Artificial Sequence: Synthetic oligonucleotide
aagacgauggugcccacaa

SEQ ID NO: 1460428 - RNA, 19 nt, Artificial Sequence
  Description of Artificial Sequence: Synthetic oligonucleotide
ucuucccucauuugggcug

SEQ ID NO: 1460429 - RNA, 19 nt, Artificial Sequence
  Description of Artificial Sequence: Synthetic oligonucleotide
acauucaauggucuagaga

SEQ ID NO: 1460430 - RNA, 19 nt, Artificial Sequence
  Description of Artificial Sequence: Synthetic oligonucleotide
aguacaaggcacagcaggg

SEQ ID NO: 1460431 - RNA, 19 nt, Artificial Sequence
  Description of Artificial Sequence: Synthetic oligonucleotide
cuagagacugucagguccc

SEQ ID NO: 1460432 - RNA, 19 nt, Artificial Sequence
  Description of Artificial Sequence: Synthetic oligonucleotide
uaugagacgguagaagauc

SEQ ID NO: 1460433 - RNA, 19 nt, Artificial Sequence
  Description of Artificial Sequence: Synthetic oligonucleotide
caggucgaagcccagagac

SEQ ID NO: 1460434 - RNA, 19 nt, Artificial Sequence
  Description of Artificial Sequence: Synthetic oligonucleotide
caccaugugcaucucaccc

SEQ ID NO: 1460435 - RNA, 19 nt, Artificial Sequence
  Description of Artificial Sequence: Synthetic oligonucleotide
uggacaguauaugccaugc

SEQ ID NO: 1460436 - RNA, 19 nt, Artificial Sequence
  Description of Artificial Sequence: Synthetic oligonucleotide
acaacgcuucgacaaaaug

SEQ ID NO: 1460437 - RNA, 19 nt, Artificial Sequence
  Description of Artificial Sequence: Synthetic oligonucleotide
agacgguaaccccagccuc

SEQ ID NO: 1460438 - RNA, 19 nt, Artificial Sequence
  Description of Artificial Sequence: Synthetic oligonucleotide
caucucacccaugaguagg

SEQ ID NO: 1460439 - RNA, 19 nt, Artificial Sequence
  Description of Artificial Sequence: Synthetic oligonucleotide
agcgaugccgaugugaaca

SEQ ID NO: 1460440 - RNA, 19 nt, Artificial Sequence
  Description of Artificial Sequence: Synthetic oligonucleotide
ucgacaaaaugcaggcacu

SEQ ID NO: 1460441 - RNA, 19 nt, Artificial Sequence
  Description of Artificial Sequence: Synthetic oligonucleotide
gcuucgacaaaaugcaggc

SEQ ID NO: 1460442 - RNA, 19 nt, Artificial Sequence
  Description of Artificial Sequence: Synthetic oligonucleotide
gcaaguuuaaggcucguac

SEQ ID NO: 1460443 - RNA, 19 nt, Artificial Sequence
  Description of Artificial Sequence: Synthetic oligonucleotide
cacgacccaaaccaugugc

SEQ ID NO: 1460444 - RNA, 19 nt, Artificial Sequence
  Description of Artificial Sequence: Synthetic oligonucleotide
uucagguaagacgguaacc

SEQ ID NO: 1460445 - RNA, 19 nt, Artificial Sequence
  Description of Artificial Sequence: Synthetic oligonucleotide
auaggugaccagcacggcu

SEQ ID NO: 1460446 - RNA, 19 nt, Artificial Sequence
  Description of Artificial Sequence: Synthetic oligonucleotide
agcacgagguagcacagga

SEQ ID NO: 1460447 - RNA, 19 nt, Artificial Sequence
  Description of Artificial Sequence: Synthetic oligonucleotide
ugugccaugucacgguguc

SEQ ID NO: 1460448 - RNA, 19 nt, Artificial Sequence
  Description of Artificial Sequence: Synthetic oligonucleotide
gagccaggcgcuuucggag

SEQ ID NO: 1460449 - RNA, 19 nt, Artificial Sequence
  Description of Artificial Sequence: Synthetic oligonucleotide
agacgguagaagauccagc

SEQ ID NO: 1460450 - RNA, 19 nt, Artificial Sequence
  Description of Artificial Sequence: Synthetic oligonucleotide
ucuugugccaugucacggu

SEQ ID NO: 1460451 - RNA, 19 nt, Artificial Sequence
  Description of Artificial Sequence: Synthetic oligonucleotide
aagcgaugccgaugugaac

SEQ ID NO: 1460452 - RNA, 19 nt, Artificial Sequence
  Description of Artificial Sequence: Synthetic oligonucleotide
cucauuugggcugguaccc

SEQ ID NO: 1460453 - RNA, 19 nt, Artificial Sequence
  Description of Artificial Sequence: Synthetic oligonucleotide
uggcagacaacgcuucgac

SEQ ID NO: 1460454 - RNA, 19 nt, Artificial Sequence
  Description of Artificial Sequence: Synthetic oligonucleotide
gaugccgaugugaacaguc

SEQ ID NO: 1460455 - RNA, 19 nt, Artificial Sequence
  Description of Artificial Sequence: Synthetic oligonucleotide
cagguaagacgguaacccc

SEQ ID NO: 1460456 - RNA, 19 nt, Artificial Sequence
  Description of Artificial Sequence: Synthetic oligonucleotide
agagcaaguuuaaggcucg

SEQ ID NO: 1460457 - RNA, 19 nt, Artificial Sequence
  Description of Artificial Sequence: Synthetic oligonucleotide
aggcgaagcagaugguaag

SEQ ID NO: 1460458 - RNA, 19 nt, Artificial Sequence
  Description of Artificial Sequence: Synthetic oligonucleotide
gccacgaucaucugggccc

SEQ ID NO: 1460459 - RNA, 19 nt, Artificial Sequence
  Description of Artificial Sequence: Synthetic oligonucleotide
acaguauaugccaugccgu

SEQ ID NO: 1460460 - RNA, 19 nt, Artificial Sequence
  Description of Artificial Sequence: Synthetic oligonucleotide
auaugccaugccguagccc

SEQ ID NO: 1460461 - RNA, 19 nt, Artificial Sequence
  Description of Artificial Sequence: Synthetic oligonucleotide
gaagggaauuaugaagguc

SEQ ID NO: 1460462 - RNA, 19 nt, Artificial Sequence
  Description of Artificial Sequence: Synthetic oligonucleotide
gguagaagauccagcaucc

SEQ ID NO: 1460463 - RNA, 19 nt, Artificial Sequence
  Description of Artificial Sequence: Synthetic oligonucleotide
gacccaaaccaugugcagc

SEQ ID NO: 1460464 - RNA, 19 nt, Artificial Sequence
  Description of Artificial Sequence: Synthetic oligonucleotide
cucucguaggcccguagcc

SEQ ID NO: 1460465 - RNA, 19 nt, Artificial Sequence
  Description of Artificial Sequence: Synthetic oligonucleotide
aagccaugcaggagggcac

SEQ ID NO: 1460466 - RNA, 19 nt, Artificial Sequence
  Description of Artificial Sequence: Synthetic oligonucleotide
uguggacaguauaugccau

SEQ ID NO: 1460467 - RNA, 19 nt, Artificial Sequence
  Description of Artificial Sequence: Synthetic oligonucleotide
cucgccccgguccaggucg

SEQ ID NO: 1460468 - RNA, 19 nt, Artificial Sequence
  Description of Artificial Sequence: Synthetic oligonucleotide
ugcgaaggagucgaucacc

SEQ ID NO: 1460469 - RNA, 19 nt, Artificial Sequence
  Description of Artificial Sequence: Synthetic oligonucleotide
ugagacgguagaagaucca

SEQ ID NO: 1460470 - RNA, 19 nt, Artificial Sequence
  Description of Artificial Sequence: Synthetic oligonucleotide
cacauucaauggucuagag

SEQ ID NO: 1460471 - RNA, 19 nt, Artificial Sequence
  Description of Artificial Sequence: Synthetic oligonucleotide
caggcggagagcauucuug

SEQ ID NO: 1460472 - RNA, 19 nt, Artificial Sequence
  Description of Artificial Sequence: Synthetic oligonucleotide
acauaguuauuuaaccaau

SEQ ID NO: 1460473 - RNA, 19 nt, Artificial Sequence
  Description of Artificial Sequence: Synthetic oligonucleotide
uaggcccguagccacuugc

SEQ ID NO: 1460474 - RNA, 19 nt, Artificial Sequence
  Description of Artificial Sequence: Synthetic oligonucleotide
gaaggucauaugccucagc

SEQ ID NO: 1460475 - RNA, 19 nt, Artificial Sequence
  Description of Artificial Sequence: Synthetic oligonucleotide
gaucaucugggccccucgc

SEQ ID NO: 1460476 - RNA, 19 nt, Artificial Sequence
  Description of Artificial Sequence: Synthetic oligonucleotide
acuugcgaaggagucgauc

SEQ ID NO: 1460477 - RNA, 19 nt, Artificial Sequence
  Description of Artificial Sequence: Synthetic oligonucleotide
agugucggcagaggaacag

SEQ ID NO: 1460478 - RNA, 19 nt, Artificial Sequence
  Description of Artificial Sequence: Synthetic oligonucleotide
auuuaaccaauaagacaug

SEQ ID NO: 1460479 - RNA, 19 nt, Artificial Sequence
  Description of Artificial Sequence: Synthetic oligonucleotide
acaguaggcaggagacagc

SEQ ID NO: 1460480 - RNA, 19 nt, Artificial Sequence
  Description of Artificial Sequence: Synthetic oligonucleotide
gcagacaacgcuucgacaa

SEQ ID NO: 1460481 - RNA, 19 nt, Artificial Sequence
  Description of Artificial Sequence: Synthetic oligonucleotide
ugccacggugcuugcaugc

SEQ ID NO: 1460482 - RNA, 19 nt, Artificial Sequence
  Description of Artificial Sequence: Synthetic oligonucleotide
agccaggcgcuuucggagg

SEQ ID NO: 1460483 - RNA, 19 nt, Artificial Sequence
  Description of Artificial Sequence: Synthetic oligonucleotide
gaggacguguuccacauau

SEQ ID NO: 1460484 - RNA, 19 nt, Artificial Sequence
  Description of Artificial Sequence: Synthetic oligonucleotide
ucggaggacguguuccaca

SEQ ID NO: 1460485 - RNA, 19 nt, Artificial Sequence
  Description of Artificial Sequence: Synthetic oligonucleotide
guggacaguauaugccaug

SEQ ID NO: 1460486 - RNA, 19 nt, Artificial Sequence
  Description of Artificial Sequence: Synthetic oligonucleotide
cucguaggcccguagccac

SEQ ID NO: 1460487 - RNA, 19 nt, Artificial Sequence
  Description of Artificial Sequence: Synthetic oligonucleotide
gacgguaaccccagccucc

SEQ ID NO: 1460488 - RNA, 19 nt, Artificial Sequence
  Description of Artificial Sequence: Synthetic oligonucleotide
guaggcaggagacagcccu

SEQ ID NO: 1460489 - RNA, 19 nt, Artificial Sequence
  Description of Artificial Sequence: Synthetic oligonucleotide
cccaugaguagguagauga

SEQ ID NO: 1460490 - RNA, 19 nt, Artificial Sequence
  Description of Artificial Sequence: Synthetic oligonucleotide
ucagccaucggcggcucag

SEQ ID NO: 1460491 - RNA, 19 nt, Artificial Sequence
  Description of Artificial Sequence: Synthetic oligonucleotide
ucucguaggcccguagcca

SEQ ID NO: 1460492 - RNA, 19 nt, Artificial Sequence
  Description of Artificial Sequence: Synthetic oligonucleotide
cuugugccaugucacggug

SEQ ID NO: 1460493 - RNA, 19 nt, Artificial Sequence
  Description of Artificial Sequence: Synthetic oligonucleotide
aaagacgauggugcccaca

SEQ ID NO: 1460494 - RNA, 19 nt, Artificial Sequence
  Description of Artificial Sequence: Synthetic oligonucleotide
caagcgaugccgaugugaa

SEQ ID NO: 1460495 - RNA, 19 nt, Artificial Sequence
  Description of Artificial Sequence: Synthetic oligonucleotide
agguaagacgguaacccca

SEQ ID NO: 1460496 - RNA, 19 nt, Artificial Sequence
  Description of Artificial Sequence: Synthetic oligonucleotide
ucggugggaggagugucgg

SEQ ID NO: 1460497 - RNA, 19 nt, Artificial Sequence
  Description of Artificial Sequence: Synthetic oligonucleotide
aggcggagagcauucuuga

SEQ ID NO: 1460498 - RNA, 19 nt, Artificial Sequence
  Description of Artificial Sequence: Synthetic oligonucleotide
gguaagacgguaaccccag

SEQ ID NO: 1460499 - RNA, 19 nt, Artificial Sequence
  Description of Artificial Sequence: Synthetic oligonucleotide
ccaucggcggcucaguggg

SEQ ID NO: 1460500 - RNA, 19 nt, Artificial Sequence
  Description of Artificial Sequence: Synthetic oligonucleotide
cacggugcuugcaugcuuc

SEQ ID NO: 1460501 - RNA, 19 nt, Artificial Sequence
  Description of Artificial Sequence: Synthetic oligonucleotide
agcacgacccaaaccaugu

SEQ ID NO: 1460502 - RNA, 19 nt, Artificial Sequence
  Description of Artificial Sequence: Synthetic oligonucleotide
cacuuguggacaguauaug

SEQ ID NO: 1460503 - RNA, 19 nt, Artificial Sequence
  Description of Artificial Sequence: Synthetic oligonucleotide
uugugccaugucacggugu

SEQ ID NO: 1460504 - RNA, 19 nt, Artificial Sequence
  Description of Artificial Sequence: Synthetic oligonucleotide
agccacuugcgaaggaguc

SEQ ID NO: 1460505 - RNA, 19 nt, Artificial Sequence
  Description of Artificial Sequence: Synthetic oligonucleotide
guggaaggauauccagggc

SEQ ID NO: 1460506 - RNA, 19 nt, Artificial Sequence
  Description of Artificial Sequence: Synthetic oligonucleotide
cuucccucauuugggcugg

SEQ ID NO: 1460507 - RNA, 19 nt, Artificial Sequence
  Description of Artificial Sequence: Synthetic oligonucleotide
cuccgugaagccagccccg

SEQ ID NO: 1460508 - RNA, 19 nt, Artificial Sequence
  Description of Artificial Sequence: Synthetic oligonucleotide
ggucgaagcccagagacac

SEQ ID NO: 1460509 - RNA, 19 nt, Artificial Sequence
  Description of Artificial Sequence: Synthetic oligonucleotide
uacccuaaggaggagucuu

SEQ ID NO: 1460510 - RNA, 19 nt, Artificial Sequence
  Description of Artificial Sequence: Synthetic oligonucleotide
ugacaacuuccaccaugga

SEQ ID NO: 1460511 - RNA, 19 nt, Artificial Sequence
  Description of Artificial Sequence: Synthetic oligonucleotide
cgcuucgacaaaaugcagg

SEQ ID NO: 1460512 - RNA, 19 nt, Artificial Sequence
  Description of Artificial Sequence: Synthetic oligonucleotide
gugacccagugacuggccc

SEQ ID NO: 1460513 - RNA, 19 nt, Artificial Sequence
  Description of Artificial Sequence: Synthetic oligonucleotide
cagccuaugagacgguaga

SEQ ID NO: 1460514 - RNA, 19 nt, Artificial Sequence
  Description of Artificial Sequence: Synthetic oligonucleotide
gacccagugacuggcccag

SEQ ID NO: 1460515 - RNA, 19 nt, Artificial Sequence
  Description of Artificial Sequence: Synthetic oligonucleotide
ggagugucggcagaggaac

SEQ ID NO: 1460516 - RNA, 19 nt, Artificial Sequence
  Description of Artificial Sequence: Synthetic oligonucleotide
gggucuucccucauuuggg

SEQ ID NO: 1460517 - RNA, 19 nt, Artificial Sequence
  Description of Artificial Sequence: Synthetic oligonucleotide
aaaccaugugcagcuggaa

SEQ ID NO: 1460518 - RNA, 19 nt, Artificial Sequence
  Description of Artificial Sequence: Synthetic oligonucleotide
auucaauggucuagagacu

SEQ ID NO: 1460519 - RNA, 19 nt, Artificial Sequence
  Description of Artificial Sequence: Synthetic oligonucleotide
gucgaucaccgucgagggg

SEQ ID NO: 1460520 - RNA, 19 nt, Artificial Sequence
  Description of Artificial Sequence: Synthetic oligonucleotide
gugcaucucacccaugagu

SEQ ID NO: 1460521 - RNA, 19 nt, Artificial Sequence
  Description of Artificial Sequence: Synthetic oligonucleotide
uugcaugcuucagguaaga

SEQ ID NO: 1460522 - RNA, 19 nt, Artificial Sequence
  Description of Artificial Sequence: Synthetic oligonucleotide
ugcaugcuucagguaagac

SEQ ID NO: 1460523 - RNA, 19 nt, Artificial Sequence
  Description of Artificial Sequence: Synthetic oligonucleotide
gagguagcacaggaggcuc

SEQ ID NO: 1460524 - RNA, 19 nt, Artificial Sequence
  Description of Artificial Sequence: Synthetic oligonucleotide
ucauuugggcugguacccu

SEQ ID NO: 1460525 - RNA, 19 nt, Artificial Sequence
  Description of Artificial Sequence: Synthetic oligonucleotide
ugaccacuuguggacagua

SEQ ID NO: 1460526 - RNA, 19 nt, Artificial Sequence
  Description of Artificial Sequence: Synthetic oligonucleotide
acgauggugcccacaaagu

SEQ ID NO: 1460527 - RNA, 19 nt, Artificial Sequence
  Description of Artificial Sequence: Synthetic oligonucleotide
ccagccccggccaaugugg

SEQ ID NO: 1460528 - RNA, 19 nt, Artificial Sequence
  Description of Artificial Sequence: Synthetic oligonucleotide
ggacaguauaugccaugcc

SEQ ID NO: 1460529 - RNA, 19 nt, Artificial Sequence
  Description of Artificial Sequence: Synthetic oligonucleotide
ccaauaagacaugggcagg

SEQ ID NO: 1460530 - RNA, 19 nt, Artificial Sequence
  Description of Artificial Sequence: Synthetic oligonucleotide
guggacaguacaaggcaca

SEQ ID NO: 1460531 - RNA, 19 nt, Artificial Sequence
  Description of Artificial Sequence: Synthetic oligonucleotide
ggacguguuccacauaugu

SEQ ID NO: 1460532 - RNA, 19 nt, Artificial Sequence
  Description of Artificial Sequence: Synthetic oligonucleotide
cuggcugcauaggugacca

SEQ ID NO: 1460533 - RNA, 19 nt, Artificial Sequence
  Description of Artificial Sequence: Synthetic oligonucleotide
agacaacgcuucgacaaaa

SEQ ID NO: 1460534 - RNA, 19 nt, Artificial Sequence
  Description of Artificial Sequence: Synthetic oligonucleotide
guagcuguggaaggauauc

SEQ ID NO: 1460535 - RNA, 19 nt, Artificial Sequence
  Description of Artificial Sequence: Synthetic oligonucleotide
cuaugagacgguagaagau

SEQ ID NO: 1460536 - RNA, 19 nt, Artificial Sequence
  Description of Artificial Sequence: Synthetic oligonucleotide
gccaucggcggcucagugg

SEQ ID NO: 1460537 - RNA, 19 nt, Artificial Sequence
  Description of Artificial Sequence: Synthetic oligonucleotide
gaacagucuggcagacaac

SEQ ID NO: 1460538 - RNA, 19 nt, Artificial Sequence
  Description of Artificial Sequence: Synthetic oligonucleotide
caguauaugccaugccgua

SEQ ID NO: 1460539 - RNA, 19 nt, Artificial Sequence
  Description of Artificial Sequence: Synthetic oligonucleotide
gucuagagacugucagguc

SEQ ID NO: 1460540 - RNA, 19 nt, Artificial Sequence
  Description of Artificial Sequence: Synthetic oligonucleotide
cccucauuugggcugguac

SEQ ID NO: 1460541 - RNA, 19 nt, Artificial Sequence
  Description of Artificial Sequence: Synthetic oligonucleotide
acgaucaucugggccccuc

SEQ ID NO: 1460542 - RNA, 19 nt, Artificial Sequence
  Description of Artificial Sequence: Synthetic oligonucleotide
ggagacagcccugcaguag

SEQ ID NO: 1460543 - RNA, 19 nt, Artificial Sequence
  Description of Artificial Sequence: Synthetic oligonucleotide
aucucacccaugaguaggu

SEQ ID NO: 1460544 - RNA, 19 nt, Artificial Sequence
  Description of Artificial Sequence: Synthetic oligonucleotide
cccguagccacuugcgaag

SEQ ID NO: 1460545 - RNA, 19 nt, Artificial Sequence
  Description of Artificial Sequence: Synthetic oligonucleotide
ggucuagagacugucaggu

SEQ ID NO: 1460546 - RNA, 19 nt, Artificial Sequence
  Description of Artificial Sequence: Synthetic oligonucleotide
gagacugucaggucccauu

SEQ ID NO: 1460547 - RNA, 19 nt, Artificial Sequence
  Description of Artificial Sequence: Synthetic oligonucleotide
aggcccguagccacuugcg

SEQ ID NO: 1460548 - RNA, 19 nt, Artificial Sequence
  Description of Artificial Sequence: Synthetic oligonucleotide
ucguaggcccguagccacu

SEQ ID NO: 1460549 - RNA, 19 nt, Artificial Sequence
  Description of Artificial Sequence: Synthetic oligonucleotide
gccccucgcaucuugugcc

SEQ ID NO: 1460550 - RNA, 19 nt, Artificial Sequence
  Description of Artificial Sequence: Synthetic oligonucleotide
gccacuugcgaaggagucg

SEQ ID NO: 1460551 - RNA, 19 nt, Artificial Sequence
  Description of Artificial Sequence: Synthetic oligonucleotide
gcggagagcauucuugaaa

SEQ ID NO: 1460552 - RNA, 19 nt, Artificial Sequence
  Description of Artificial Sequence: Synthetic oligonucleotide
agccaucggcggcucagug

SEQ ID NO: 1460553 - RNA, 19 nt, Artificial Sequence
  Description of Artificial Sequence: Synthetic oligonucleotide
agucuggcagacaacgcuu

SEQ ID NO: 1460554 - RNA, 19 nt, Artificial Sequence
  Description of Artificial Sequence: Synthetic oligonucleotide
augccgaugugaacagucu

SEQ ID NO: 1460555 - RNA, 19 nt, Artificial Sequence
  Description of Artificial Sequence: Synthetic oligonucleotide
ggugucguccacaucgaca

SEQ ID NO: 1460556 - RNA, 19 nt, Artificial Sequence
  Description of Artificial Sequence: Synthetic oligonucleotide
cacucucguaggcccguag

SEQ ID NO: 1460557 - RNA, 19 nt, Artificial Sequence
  Description of Artificial Sequence: Synthetic oligonucleotide
cagucuggcagacaacgcu

SEQ ID NO: 1460558 - RNA, 19 nt, Artificial Sequence
  Description of Artificial Sequence: Synthetic oligonucleotide
caaaagugacccagugacu

SEQ ID NO: 1460559 - RNA, 19 nt, Artificial Sequence
  Description of Artificial Sequence: Synthetic oligonucleotide
ugcuugcaugcuucaggua

SEQ ID NO: 1460560 - RNA, 19 nt, Artificial Sequence
  Description of Artificial Sequence: Synthetic oligonucleotide
caugugcaucucacccaug

SEQ ID NO: 1460561 - RNA, 19 nt, Artificial Sequence
  Description of Artificial Sequence: Synthetic oligonucleotide
cagguuccagcuugugaca

SEQ ID NO: 1460562 - RNA, 19 nt, Artificial Sequence
  Description of Artificial Sequence: Synthetic oligonucleotide
cugccacggugcuugcaug

SEQ ID NO: 1460563 - RNA, 19 nt, Artificial Sequence
  Description of Artificial Sequence: Synthetic oligonucleotide
agcaaguuuaaggcucgua

SEQ ID NO: 1460564 - RNA, 19 nt, Artificial Sequence
  Description of Artificial Sequence: Synthetic oligonucleotide
cauaugccucagccuauga

SEQ ID NO: 1460565 - RNA, 19 nt, Artificial Sequence
  Description of Artificial Sequence: Synthetic oligonucleotide
ggccccucgcaucuugugc

SEQ ID NO: 1460566 - RNA, 19 nt, Artificial Sequence
  Description of Artificial Sequence: Synthetic oligonucleotide
gggcccaaagacgauggug

SEQ ID NO: 1460567 - RNA, 19 nt, Artificial Sequence
  Description of Artificial Sequence: Synthetic oligonucleotide
gguggaaacugaagccaug

SEQ ID NO: 1460568 - RNA, 19 nt, Artificial Sequence
  Description of Artificial Sequence: Synthetic oligonucleotide
acgcuucgacaaaaugcag

SEQ ID NO: 1460569 - RNA, 19 nt, Artificial Sequence
  Description of Artificial Sequence: Synthetic oligonucleotide
aggauauccagggcccaaa

SEQ ID NO: 1460570 - RNA, 19 nt, Artificial Sequence
  Description of Artificial Sequence: Synthetic oligonucleotide
agccuccaaaggaggcggc

SEQ ID NO: 1460571 - RNA, 19 nt, Artificial Sequence
  Description of Artificial Sequence: Synthetic oligonucleotide
gccccaaagagcaaguuua

SEQ ID NO: 1460572 - RNA, 19 nt, Artificial Sequence
  Description of Artificial Sequence: Synthetic oligonucleotide
cuucgacaaaaugcaggca

SEQ ID NO: 1460573 - RNA, 19 nt, Artificial Sequence
  Description of Artificial Sequence: Synthetic oligonucleotide
guagaagauccagcaucca

SEQ ID NO: 1460574 - RNA, 19 nt, Artificial Sequence
  Description of Artificial Sequence: Synthetic oligonucleotide
ugggccccucgcaucuugu

SEQ ID NO: 1460575 - RNA, 19 nt, Artificial Sequence
  Description of Artificial Sequence: Synthetic oligonucleotide
gacgccucggugggaggag

SEQ ID NO: 1460576 - RNA, 19 nt, Artificial Sequence
  Description of Artificial Sequence: Synthetic oligonucleotide
agccuaugagacgguagaa

SEQ ID NO: 1460577 - RNA, 19 nt, Artificial Sequence
  Description of Artificial Sequence: Synthetic oligonucleotide
cagacaacgcuucgacaaa

SEQ ID NO: 1460578 - RNA, 19 nt, Artificial Sequence
  Description of Artificial Sequence: Synthetic oligonucleotide
ucgcaucuugugccauguc

SEQ ID NO: 1460579 - RNA, 19 nt, Artificial Sequence
  Description of Artificial Sequence: Synthetic oligonucleotide
aggucgaagcccagagaca

SEQ ID NO: 1460580 - RNA, 19 nt, Artificial Sequence
  Description of Artificial Sequence: Synthetic oligonucleotide
agacgccucggugggagga

SEQ ID NO: 1460581 - RNA, 19 nt, Artificial Sequence
  Description of Artificial Sequence: Synthetic oligonucleotide
caaagacgauggugcccac

SEQ ID NO: 1460582 - RNA, 19 nt, Artificial Sequence
  Description of Artificial Sequence: Synthetic oligonucleotide
cagccccggccaauguggc

SEQ ID NO: 1460583 - RNA, 19 nt, Artificial Sequence
  Description of Artificial Sequence: Synthetic oligonucleotide
gguuccagcuugugacaac

SEQ ID NO: 1460584 - RNA, 19 nt, Artificial Sequence
  Description of Artificial Sequence: Synthetic oligonucleotide
gucggcagaggaacagcac

SEQ ID NO: 1460585 - RNA, 19 nt, Artificial Sequence
  Description of Artificial Sequence: Synthetic oligonucleotide
acgguaaccccagccucca

SEQ ID NO: 1460586 - RNA, 19 nt, Artificial Sequence
  Description of Artificial Sequence: Synthetic oligonucleotide
aggacguguuccacauaug

SEQ ID NO: 1460587 - RNA, 19 nt, Artificial Sequence
  Description of Artificial Sequence: Synthetic oligonucleotide
ggucaaggcccuguuggac

SEQ ID NO: 1460588 - RNA, 19 nt, Artificial Sequence
  Description of Artificial Sequence: Synthetic oligonucleotide
cuggcagacaacgcuucga

SEQ ID NO: 1460589 - RNA, 19 nt, Artificial Sequence
  Description of Artificial Sequence: Synthetic oligonucleotide
gucgaagcccagagacacc

SEQ ID NO: 1460590 - RNA, 19 nt, Artificial Sequence
  Description of Artificial Sequence: Synthetic oligonucleotide
cucugaccacuuguggaca

SEQ ID NO: 1460591 - RNA, 19 nt, Artificial Sequence
  Description of Artificial Sequence: Synthetic oligonucleotide
cugcaguagcugcuggaaa

SEQ ID NO: 1460592 - RNA, 19 nt, Artificial Sequence
  Description of Artificial Sequence: Synthetic oligonucleotide
gcucaagaauggagagggg

SEQ ID NO: 1460593 - RNA, 19 nt, Artificial Sequence
  Description of Artificial Sequence: Synthetic oligonucleotide
ucucacccaugaguaggua

SEQ ID NO: 1460594 - RNA, 19 nt, Artificial Sequence
  Description of Artificial Sequence: Synthetic oligonucleotide
caggcccaagcgaugccga

SEQ ID NO: 1460595 - RNA, 19 nt, Artificial Sequence
  Description of Artificial Sequence: Synthetic oligonucleotide
ggcacugcacccaccucgc

SEQ ID NO: 1460596 - RNA, 19 nt, Artificial Sequence
  Description of Artificial Sequence: Synthetic oligonucleotide
guaggcccguagccacuug

SEQ ID NO: 1460597 - RNA, 19 nt, Artificial Sequence
  Description of Artificial Sequence: Synthetic oligonucleotide
gacaacgcuucgacaaaau

SEQ ID NO: 1460598 - RNA, 19 nt, Artificial Sequence
  Description of Artificial Sequence: Synthetic oligonucleotide
caucggcggcucagugggc

SEQ ID NO: 1460599 - RNA, 19 nt, Artificial Sequence
  Description of Artificial Sequence: Synthetic oligonucleotide
agagacugucaggucccau

SEQ ID NO: 1460600 - RNA, 19 nt, Artificial Sequence
  Description of Artificial Sequence: Synthetic oligonucleotide
gcacgacccaaaccaugug

SEQ ID NO: 1460601 - RNA, 19 nt, Artificial Sequence
  Description of Artificial Sequence: Synthetic oligonucleotide
gccccggccaauguggcug

SEQ ID NO: 1460602 - RNA, 19 nt, Artificial Sequence
  Description of Artificial Sequence: Synthetic oligonucleotide
ggcgcuuucggaggacgug

SEQ ID NO: 1460603 - RNA, 19 nt, Artificial Sequence
  Description of Artificial Sequence: Synthetic oligonucleotide
gcccguagccacuugcgaa

SEQ ID NO: 1460604 - RNA, 19 nt, Artificial Sequence
  Description of Artificial Sequence: Synthetic oligonucleotide
cgaucaucugggccccucg

SEQ ID NO: 1460605 - RNA, 19 nt, Artificial Sequence
  Description of Artificial Sequence: Synthetic oligonucleotide
ccacauucaauggucuaga

SEQ ID NO: 1460606 - RNA, 19 nt, Artificial Sequence
  Description of Artificial Sequence: Synthetic oligonucleotide
cagcacggcugagaagguc

SEQ ID NO: 1460607 - RNA, 19 nt, Artificial Sequence
  Description of Artificial Sequence: Synthetic oligonucleotide
caauguggcuguggccuca

SEQ ID NO: 1460608 - RNA, 19 nt, Artificial Sequence
  Description of Artificial Sequence: Synthetic oligonucleotide
ccacuugcgaaggagucga

SEQ ID NO: 1460609 - RNA, 19 nt, Artificial Sequence
  Description of Artificial Sequence: Synthetic oligonucleotide
caccucgccccgguccagg

SEQ ID NO: 1460610 - RNA, 19 nt, Artificial Sequence
  Description of Artificial Sequence: Synthetic oligonucleotide
cgacccaaaccaugugcag

SEQ ID NO: 1460611 - RNA, 19 nt, Artificial Sequence
  Description of Artificial Sequence: Synthetic oligonucleotide
ggcccguagccacuugcga

SEQ ID NO: 1460612 - RNA, 19 nt, Artificial Sequence
  Description of Artificial Sequence: Synthetic oligonucleotide
aggcgcuuucggaggacgu

SEQ ID NO: 1460613 - RNA, 19 nt, Artificial Sequence
  Description of Artificial Sequence: Synthetic oligonucleotide
ccuguagguagcuguggaa

SEQ ID NO: 1460614 - RNA, 19 nt, Artificial Sequence
  Description of Artificial Sequence: Synthetic oligonucleotide
ccuaaggaggagucuugaa

SEQ ID NO: 1460615 - RNA, 19 nt, Artificial Sequence
  Description of Artificial Sequence: Synthetic oligonucleotide
ggacaguaggcaggagaca

SEQ ID NO: 1460616 - RNA, 19 nt, Artificial Sequence
  Description of Artificial Sequence: Synthetic oligonucleotide
ccacuuguggacaguauau

SEQ ID NO: 1460617 - RNA, 19 nt, Artificial Sequence
  Description of Artificial Sequence: Synthetic oligonucleotide
ucccucauuugggcuggua

SEQ ID NO: 1460618 - RNA, 19 nt, Artificial Sequence
  Description of Artificial Sequence: Synthetic oligonucleotide
guacccuaaggaggagucu

SEQ ID NO: 1460619 - RNA, 19 nt, Artificial Sequence
  Description of Artificial Sequence: Synthetic oligonucleotide
cucagugggcggccuugga

SEQ ID NO: 1460620 - RNA, 19 nt, Artificial Sequence
  Description of Artificial Sequence: Synthetic oligonucleotide
ggcggagagcauucuugaa

SEQ ID NO: 1460621 - RNA, 19 nt, Artificial Sequence
  Description of Artificial Sequence: Synthetic oligonucleotide
cucagccuaugagacggua

SEQ ID NO: 1460622 - RNA, 19 nt, Artificial Sequence
  Description of Artificial Sequence: Synthetic oligonucleotide
gggccccucgcaucuugug

SEQ ID NO: 1460623 - RNA, 19 nt, Artificial Sequence
  Description of Artificial Sequence: Synthetic oligonucleotide
caccugccacggugcuugc

SEQ ID NO: 1460624 - RNA, 19 nt, Artificial Sequence
  Description of Artificial Sequence: Synthetic oligonucleotide
gcaggcgaagcagauggua

SEQ ID NO: 1460625 - RNA, 19 nt, Artificial Sequence
  Description of Artificial Sequence: Synthetic oligonucleotide
gggaauuaugaaggucaua

SEQ ID NO: 1460626 - RNA, 19 nt, Artificial Sequence
  Description of Artificial Sequence: Synthetic oligonucleotide
acgccucggugggaggagu

SEQ ID NO: 1460627 - RNA, 19 nt, Artificial Sequence
  Description of Artificial Sequence: Synthetic oligonucleotide
ggccccaaagagcaaguuu

SEQ ID NO: 1460628 - RNA, 19 nt, Artificial Sequence
  Description of Artificial Sequence: Synthetic oligonucleotide
gagcaaguuuaaggcucgu

SEQ ID NO: 1460629 - RNA, 19 nt, Artificial Sequence
  Description of Artificial Sequence: Synthetic oligonucleotide
gaucugagccaggcgcuuu

SEQ ID NO: 1460630 - RNA, 19 nt, Artificial Sequence
  Description of Artificial Sequence: Synthetic oligonucleotide
uucccucauuugggcuggu

SEQ ID NO: 1460631 - RNA, 19 nt, Artificial Sequence
  Description of Artificial Sequence: Synthetic oligonucleotide
ccgugaagccagccccggc

SEQ ID NO: 1460632 - RNA, 19 nt, Artificial Sequence
  Description of Artificial Sequence: Synthetic oligonucleotide
cacccaccucgccccgguc

SEQ ID NO: 1460633 - RNA, 19 nt, Artificial Sequence
  Description of Artificial Sequence: Synthetic oligonucleotide
gcgcuuucggaggacgugu

SEQ ID NO: 1460634 - RNA, 19 nt, Artificial Sequence
  Description of Artificial Sequence: Synthetic oligonucleotide
ggaagacgccucgguggga

SEQ ID NO: 1460635 - RNA, 19 nt, Artificial Sequence
  Description of Artificial Sequence: Synthetic oligonucleotide
cguguuccacauaugugau

SEQ ID NO: 1460636 - RNA, 19 nt, Artificial Sequence
  Description of Artificial Sequence: Synthetic oligonucleotide
caugggcagguuccagcuu

SEQ ID NO: 1460637 - RNA, 19 nt, Artificial Sequence
  Description of Artificial Sequence: Synthetic oligonucleotide
ccccucgcaucuugugcca

SEQ ID NO: 1460638 - RNA, 19 nt, Artificial Sequence
  Description of Artificial Sequence: Synthetic oligonucleotide
cgccucggugggaggagug

SEQ ID NO: 1460639 - RNA, 19 nt, Artificial Sequence
  Description of Artificial Sequence: Synthetic oligonucleotide
cacuugcgaaggagucgau

SEQ ID NO: 1460640 - RNA, 19 nt, Artificial Sequence
  Description of Artificial Sequence: Synthetic oligonucleotide
ggaucugagccaggcgcuu

SEQ ID NO: 1460641 - RNA, 19 nt, Artificial Sequence
  Description of Artificial Sequence: Synthetic oligonucleotide
gcacccaccucgccccggu

SEQ ID NO: 1460642 - RNA, 19 nt, Artificial Sequence
  Description of Artificial Sequence: Synthetic oligonucleotide
cagccaucggcggcucagu

SEQ ID NO: 1460643 - RNA, 19 nt, Artificial Sequence
  Description of Artificial Sequence: Synthetic oligonucleotide
gccucggugggaggagugu

SEQ ID NO: 1460644 - RNA, 19 nt, Artificial Sequence
  Description of Artificial Sequence: Synthetic oligonucleotide
ccaccucgccccgguccag

SEQ ID NO: 1460645 - RNA, 19 nt, Artificial Sequence
  Description of Artificial Sequence: Synthetic oligonucleotide
cacgaucaucugggccccu

SEQ ID NO: 1460646 - RNA, 19 nt, Artificial Sequence
  Description of Artificial Sequence: Synthetic oligonucleotide
gcacucucguaggcccgua

SEQ ID NO: 1460647 - RNA, 19 nt, Artificial Sequence
  Description of Artificial Sequence: Synthetic oligonucleotide
ccacggugcuugcaugcuu

SEQ ID NO: 1460648 - RNA, 19 nt, Artificial Sequence
  Description of Artificial Sequence: Synthetic oligonucleotide
cccggccaauguggcugug

SEQ ID NO: 1460649 - RNA, 19 nt, Artificial Sequence
  Description of Artificial Sequence: Synthetic oligonucleotide
cgcuuucggaggacguguu

SEQ ID NO: 1460650 - RNA, 19 nt, Artificial Sequence
  Description of Artificial Sequence: Synthetic oligonucleotide
cguaggcccguagccacuu

SEQ ID NO: 1460651 - RNA, 19 nt, Artificial Sequence
  Description of Artificial Sequence: Synthetic oligonucleotide
cccucgcaucuugugccau

SEQ ID NO: 1460652 - RNA, 19 nt, Artificial Sequence
  Description of Artificial Sequence: Synthetic oligonucleotide
cggcucagugggcggccuu

SEQ ID NO: 1460653 - RNA, 19 nt, Artificial Sequence
  Description of Artificial Sequence: Synthetic oligonucleotide
uguaugauauccaagauag

SEQ ID NO: 1460654 - RNA, 19 nt, Artificial Sequence
  Description of Artificial Sequence: Synthetic oligonucleotide
aauaauugcauuacguggc

SEQ ID NO: 1460655 - RNA, 19 nt, Artificial Sequence
  Description of Artificial Sequence: Synthetic oligonucleotide
ugauguuacaauaauauac

SEQ ID NO: 1460656 - RNA, 19 nt, Artificial Sequence
  Description of Artificial Sequence: Synthetic oligonucleotide
agaauuaggaacuucgaac

SEQ ID NO: 1460657 - RNA, 19 nt, Artificial Sequence
  Description of Artificial Sequence: Synthetic oligonucleotide
gauucaaugccuuuaaugc

SEQ ID NO: 1460658 - RNA, 19 nt, Artificial Sequence
  Description of Artificial Sequence: Synthetic oligonucleotide
gaauaauugcauuacgugg

SEQ ID NO: 1460659 - RNA, 19 nt, Artificial Sequence
  Description of Artificial Sequence: Synthetic oligonucleotide
acaauaauauacaugaucg

SEQ ID NO: 1460660 - RNA, 19 nt, Artificial Sequence
  Description of Artificial Sequence: Synthetic oligonucleotide
cauugugucauuaaagucc

SEQ ID NO: 1460661 - RNA, 19 nt, Artificial Sequence
  Description of Artificial Sequence: Synthetic oligonucleotide
uuuagcuaaaguuugugcc

SEQ ID NO: 1460662 - RNA, 19 nt, Artificial Sequence
  Description of Artificial Sequence: Synthetic oligonucleotide
aacaucaaggcauuuagcu

SEQ ID NO: 1460663 - RNA, 19 nt, Artificial Sequence
  Description of Artificial Sequence: Synthetic oligonucleotide
aacauugugucauuaaagu

SEQ ID NO: 1460664 - RNA, 19 nt, Artificial Sequence
  Description of Artificial Sequence: Synthetic oligonucleotide
auuuagcuaaaguuugugc

SEQ ID NO: 1460665 - RNA, 19 nt, Artificial Sequence
  Description of Artificial Sequence: Synthetic oligonucleotide
ugauauugaggaauaauug

SEQ ID NO: 1460666 - RNA, 19 nt, Artificial Sequence
  Description of Artificial Sequence: Synthetic oligonucleotide
uuuaucucuaaacauugug

SEQ ID NO: 1460667 - RNA, 19 nt, Artificial Sequence
  Description of Artificial Sequence: Synthetic oligonucleotide
uacaauaauauacaugauc

SEQ ID NO: 1460668 - RNA, 19 nt, Artificial Sequence
  Description of Artificial Sequence: Synthetic oligonucleotide
ucuuaaaggcuucugacca

SEQ ID NO: 1460669 - RNA, 19 nt, Artificial Sequence
  Description of Artificial Sequence: Synthetic oligonucleotide
uauaauuggcaucuuggag

SEQ ID NO: 1460670 - RNA, 19 nt, Artificial Sequence
  Description of Artificial Sequence: Synthetic oligonucleotide
uauuggauucuccacuucg

SEQ ID NO: 1460671 - RNA, 19 nt, Artificial Sequence
  Description of Artificial Sequence: Synthetic oligonucleotide
ucggaaacuguuaugaccc

SEQ ID NO: 1460672 - RNA, 19 nt, Artificial Sequence
  Description of Artificial Sequence: Synthetic oligonucleotide
aaagacaauuccuuguugu

SEQ ID NO: 1460673 - RNA, 19 nt, Artificial Sequence
  Description of Artificial Sequence: Synthetic oligonucleotide
uccacuucgauuagcaagg

SEQ ID NO: 1460674 - RNA, 19 nt, Artificial Sequence
  Description of Artificial Sequence: Synthetic oligonucleotide
uacauauccagccugaguc

SEQ ID NO: 1460675 - RNA, 19 nt, Artificial Sequence
  Description of Artificial Sequence: Synthetic oligonucleotide
uuuaaugccagacuucgga

SEQ ID NO: 1460676 - RNA, 19 nt, Artificial Sequence
  Description of Artificial Sequence: Synthetic oligonucleotide
ugaugauucugucuaagcc

SEQ ID NO: 1460677 - RNA, 19 nt, Artificial Sequence
  Description of Artificial Sequence: Synthetic oligonucleotide
aacuguuaugacccuaaac

SEQ ID NO: 1460678 - RNA, 19 nt, Artificial Sequence
  Description of Artificial Sequence: Synthetic oligonucleotide
aagaauccaauaccucgcc

SEQ ID NO: 1460679 - RNA, 19 nt, Artificial Sequence
  Description of Artificial Sequence: Synthetic oligonucleotide
uuaggaacuucgaacauug

SEQ ID NO: 1460680 - RNA, 19 nt, Artificial Sequence
  Description of Artificial Sequence: Synthetic oligonucleotide
aaggcauuuagcuaaaguu

SEQ ID NO: 1460681 - RNA, 19 nt, Artificial Sequence
  Description of Artificial Sequence: Synthetic oligonucleotide
auuauaauuggcaucuugg

SEQ ID NO: 1460682 - RNA, 19 nt, Artificial Sequence
  Description of Artificial Sequence: Synthetic oligonucleotide
uaugacccuaaacagaaca

SEQ ID NO: 1460683 - RNA, 19 nt, Artificial Sequence
  Description of Artificial Sequence: Synthetic oligonucleotide
uuaucucuaaacauugugu

SEQ ID NO: 1460684 - RNA, 19 nt, Artificial Sequence
  Description of Artificial Sequence: Synthetic oligonucleotide
agcaaaaggaacaucaagg

SEQ ID NO: 1460685 - RNA, 19 nt, Artificial Sequence
  Description of Artificial Sequence: Synthetic oligonucleotide
gaauuaggaacuucgaaca

SEQ ID NO: 1460686 - RNA, 19 nt, Artificial Sequence
  Description of Artificial Sequence: Synthetic oligonucleotide
aacgccuuccuccaccuac

SEQ ID NO: 1460687 - RNA, 19 nt, Artificial Sequence
  Description of Artificial Sequence: Synthetic oligonucleotide
uucgagaauucuuuucugg

SEQ ID NO: 1460688 - RNA, 19 nt, Artificial Sequence
  Description of Artificial Sequence: Synthetic oligonucleotide
ucuacauuauaauuggcau

SEQ ID NO: 1460689 - RNA, 19 nt, Artificial Sequence
  Description of Artificial Sequence: Synthetic oligonucleotide
aaacauugugucauuaaag

SEQ ID NO: 1460690 - RNA, 19 nt, Artificial Sequence
  Description of Artificial Sequence: Synthetic oligonucleotide
ugcauagaugcuccuaagg

SEQ ID NO: 1460691 - RNA, 19 nt, Artificial Sequence
  Description of Artificial Sequence: Synthetic oligonucleotide
ucggauucuuaucuuaaag

SEQ ID NO: 1460692 - RNA, 19 nt, Artificial Sequence
  Description of Artificial Sequence: Synthetic oligonucleotide
uggaacauugacuacugug

SEQ ID NO: 1460693 - RNA, 19 nt, Artificial Sequence
  Description of Artificial Sequence: Synthetic oligonucleotide
aacuccagagucauacucc

SEQ ID NO: 1460694 - RNA, 19 nt, Artificial Sequence
  Description of Artificial Sequence: Synthetic oligonucleotide
uccauuauggaccgaagac

SEQ ID NO: 1460695 - RNA, 19 nt, Artificial Sequence
  Description of Artificial Sequence: Synthetic oligonucleotide
ucugucuaagccauuaaaa

SEQ ID NO: 1460696 - RNA, 19 nt, Artificial Sequence
  Description of Artificial Sequence: Synthetic oligonucleotide
uucggaaacuguuaugacc

SEQ ID NO: 1460697 - RNA, 19 nt, Artificial Sequence
  Description of Artificial Sequence: Synthetic oligonucleotide
aaguuuggcgaucacagau

SEQ ID NO: 1460698 - RNA, 19 nt, Artificial Sequence
  Description of Artificial Sequence: Synthetic oligonucleotide
uuauaauuggcaucuugga

SEQ ID NO: 1460699 - RNA, 19 nt, Artificial Sequence
  Description of Artificial Sequence: Synthetic oligonucleotide
agcuauagcuuucaaagca

SEQ ID NO: 1460700 - RNA, 19 nt, Artificial Sequence
  Description of Artificial Sequence: Synthetic oligonucleotide
uuagcuaaaguuugugcca

SEQ ID NO: 1460701 - RNA, 19 nt, Artificial Sequence
  Description of Artificial Sequence: Synthetic oligonucleotide
aguucacacuuauccaugc

SEQ ID NO: 1460702 - RNA, 19 nt, Artificial Sequence
  Description of Artificial Sequence: Synthetic oligonucleotide
gucagaauuaggaacuucg

SEQ ID NO: 1460703 - RNA, 19 nt, Artificial Sequence
  Description of Artificial Sequence: Synthetic oligonucleotide
agucacagauagcaaaagg

SEQ ID NO: 1460704 - RNA, 19 nt, Artificial Sequence
  Description of Artificial Sequence: Synthetic oligonucleotide
uaucuuaaaggcuucugac

SEQ ID NO: 1460705 - RNA, 19 nt, Artificial Sequence
  Description of Artificial Sequence: Synthetic oligonucleotide
uuauggaccgaagaccucg

SEQ ID NO: 1460706 - RNA, 19 nt, Artificial Sequence
  Description of Artificial Sequence: Synthetic oligonucleotide
ucacagauagcaaaaggaa

SEQ ID NO: 1460707 - RNA, 19 nt, Artificial Sequence
  Description of Artificial Sequence: Synthetic oligonucleotide
uaucucuaaacauuguguc

SEQ ID NO: 1460708 - RNA, 19 nt, Artificial Sequence
  Description of Artificial Sequence: Synthetic oligonucleotide
uauccaugcugaauaaggc

SEQ ID NO: 1460709 - RNA, 19 nt, Artificial Sequence
  Description of Artificial Sequence: Synthetic oligonucleotide
auugcaauaccugcauugc

SEQ ID NO: 1460710 - RNA, 19 nt, Artificial Sequence
  Description of Artificial Sequence: Synthetic oligonucleotide
accugcauugcuuaaagga

SEQ ID NO: 1460711 - RNA, 19 nt, Artificial Sequence
  Description of Artificial Sequence: Synthetic oligonucleotide
aaacucagguaucaugcca

SEQ ID NO: 1460712 - RNA, 19 nt, Artificial Sequence
  Description of Artificial Sequence: Synthetic oligonucleotide
uuuugauggagcccguaug

SEQ ID NO: 1460713 - RNA, 19 nt, Artificial Sequence
  Description of Artificial Sequence: Synthetic oligonucleotide
uuuagcuauagcuuucaaa

SEQ ID NO: 1460714 - RNA, 19 nt, Artificial Sequence
  Description of Artificial Sequence: Synthetic oligonucleotide
agaaccaaaauaauguaca

SEQ ID NO: 1460715 - RNA, 19 nt, Artificial Sequence
  Description of Artificial Sequence: Synthetic oligonucleotide
ucaugccaaauucaaugag

SEQ ID NO: 1460716 - RNA, 19 nt, Artificial Sequence
  Description of Artificial Sequence: Synthetic oligonucleotide
uguauaaaucaaugugaug

SEQ ID NO: 1460717 - RNA, 19 nt, Artificial Sequence
  Description of Artificial Sequence: Synthetic oligonucleotide
uauuagaugguguuccaaa

SEQ ID NO: 1460718 - RNA, 19 nt, Artificial Sequence
  Description of Artificial Sequence: Synthetic oligonucleotide
gacccuaaacagaacaagg

SEQ ID NO: 1460719 - RNA, 19 nt, Artificial Sequence
  Description of Artificial Sequence: Synthetic oligonucleotide
uauugaggaauaauugcau

SEQ ID NO: 1460720 - RNA, 19 nt, Artificial Sequence
  Description of Artificial Sequence: Synthetic oligonucleotide
cuccacuucgauuagcaag

SEQ ID NO: 1460721 - RNA, 19 nt, Artificial Sequence
  Description of Artificial Sequence: Synthetic oligonucleotide
augaguauuggauucucca

SEQ ID NO: 1460722 - RNA, 19 nt, Artificial Sequence
  Description of Artificial Sequence: Synthetic oligonucleotide
caaguuuuaugucaucaug

SEQ ID NO: 1460723 - RNA, 19 nt, Artificial Sequence
  Description of Artificial Sequence: Synthetic oligonucleotide
uacaugaucggauucuuau

SEQ ID NO: 1460724 - RNA, 19 nt, Artificial Sequence
  Description of Artificial Sequence: Synthetic oligonucleotide
aucaaugugauguuacaau

SEQ ID NO: 1460725 - RNA, 19 nt, Artificial Sequence
  Description of Artificial Sequence: Synthetic oligonucleotide
cugauuaaccugcugcugc

SEQ ID NO: 1460726 - RNA, 19 nt, Artificial Sequence
  Description of Artificial Sequence: Synthetic oligonucleotide
ucagaauuaggaacuucga

SEQ ID NO: 1460727 - RNA, 19 nt, Artificial Sequence
  Description of Artificial Sequence: Synthetic oligonucleotide
uuguacaagugucuucuca

SEQ ID NO: 1460728 - RNA, 19 nt, Artificial Sequence
  Description of Artificial Sequence: Synthetic oligonucleotide
ucccguaaccugaugaaug

SEQ ID NO: 1460729 - RNA, 19 nt, Artificial Sequence
  Description of Artificial Sequence: Synthetic oligonucleotide
gaacuucgaacauugguuc

SEQ ID NO: 1460730 - RNA, 19 nt, Artificial Sequence
  Description of Artificial Sequence: Synthetic oligonucleotide
cacagauagcaaaaggaac

SEQ ID NO: 1460731 - RNA, 19 nt, Artificial Sequence
  Description of Artificial Sequence: Synthetic oligonucleotide
uugaggaauaauugcauua

SEQ ID NO: 1460732 - RNA, 19 nt, Artificial Sequence
  Description of Artificial Sequence: Synthetic oligonucleotide
cuuaaaggaauuccuaaga

SEQ ID NO: 1460733 - RNA, 19 nt, Artificial Sequence
  Description of Artificial Sequence: Synthetic oligonucleotide
gaauccaauaccucgccuc

SEQ ID NO: 1460734 - RNA, 19 nt, Artificial Sequence
  Description of Artificial Sequence: Synthetic oligonucleotide
uuccauuauggaccgaaga

SEQ ID NO: 1460735 - RNA, 19 nt, Artificial Sequence
  Description of Artificial Sequence: Synthetic oligonucleotide
ugaggaauaauugcauuac

SEQ ID NO: 1460736 - RNA, 19 nt, Artificial Sequence
  Description of Artificial Sequence: Synthetic oligonucleotide
ucgagaauucuuuucugga

SEQ ID NO: 1460737 - RNA, 19 nt, Artificial Sequence
  Description of Artificial Sequence: Synthetic oligonucleotide
aguaaccgaucuuuucuuc

SEQ ID NO: 1460738 - RNA, 19 nt, Artificial Sequence
  Description of Artificial Sequence: Synthetic oligonucleotide
uuagaugguguuccaaauc

SEQ ID NO: 1460739 - RNA, 19 nt, Artificial Sequence
  Description of Artificial Sequence: Synthetic oligonucleotide
agguaaccgucccacaaac

SEQ ID NO: 1460740 - RNA, 19 nt, Artificial Sequence
  Description of Artificial Sequence: Synthetic oligonucleotide
gucguacagucacagauag

SEQ ID NO: 1460741 - RNA, 19 nt, Artificial Sequence
  Description of Artificial Sequence: Synthetic oligonucleotide
augaaugccuggcacacug

SEQ ID NO: 1460742 - RNA, 19 nt, Artificial Sequence
  Description of Artificial Sequence: Synthetic oligonucleotide
cauuauaauuggcaucuug

SEQ ID NO: 1460743 - RNA, 19 nt, Artificial Sequence
  Description of Artificial Sequence: Synthetic oligonucleotide
uguacaagugucuucucau

SEQ ID NO: 1460744 - RNA, 19 nt, Artificial Sequence
  Description of Artificial Sequence: Synthetic oligonucleotide
ugaguauuggauucuccac

SEQ ID NO: 1460745 - RNA, 19 nt, Artificial Sequence
  Description of Artificial Sequence: Synthetic oligonucleotide
auaccugcauugcuuaaag

SEQ ID NO: 1460746 - RNA, 19 nt, Artificial Sequence
  Description of Artificial Sequence: Synthetic oligonucleotide
aggaacuucgaacauuggu

SEQ ID NO: 1460747 - RNA, 19 nt, Artificial Sequence
  Description of Artificial Sequence: Synthetic oligonucleotide
acuucggaaacuguuauga

SEQ ID NO: 1460748 - RNA, 19 nt, Artificial Sequence
  Description of Artificial Sequence: Synthetic oligonucleotide
gauuagcaaggucugcagc

SEQ ID NO: 1460749 - RNA, 19 nt, Artificial Sequence
  Description of Artificial Sequence: Synthetic oligonucleotide
aggacucugacaguuuagc

SEQ ID NO: 1460750 - RNA, 19 nt, Artificial Sequence
  Description of Artificial Sequence: Synthetic oligonucleotide
aggcauuugcugauuaacc

SEQ ID NO: 1460751 - RNA, 19 nt, Artificial Sequence
  Description of Artificial Sequence: Synthetic oligonucleotide
acaugaucggauucuuauc

SEQ ID NO: 1460752 - RNA, 19 nt, Artificial Sequence
  Description of Artificial Sequence: Synthetic oligonucleotide
uuuuaucucuaaacauugu

SEQ ID NO: 1460753 - RNA, 19 nt, Artificial Sequence
  Description of Artificial Sequence: Synthetic oligonucleotide
caguauuagaugguguucc

SEQ ID NO: 1460754 - RNA, 19 nt, Artificial Sequence
  Description of Artificial Sequence: Synthetic oligonucleotide
cuacauuauaauuggcauc

SEQ ID NO: 1460755 - RNA, 19 nt, Artificial Sequence
  Description of Artificial Sequence: Synthetic oligonucleotide
guaaccgucccacaaacuc

SEQ ID NO: 1460756 - RNA, 19 nt, Artificial Sequence
  Description of Artificial Sequence: Synthetic oligonucleotide
aaucaaugugauguuacaa

SEQ ID NO: 1460757 - RNA, 19 nt, Artificial Sequence
  Description of Artificial Sequence: Synthetic oligonucleotide
uucuaguaacagcuuuucc

SEQ ID NO: 1460758 - RNA, 19 nt, Artificial Sequence
  Description of Artificial Sequence: Synthetic oligonucleotide
uaauaaaccuuuagcugaa

SEQ ID NO: 1460759 - RNA, 19 nt, Artificial Sequence
  Description of Artificial Sequence: Synthetic oligonucleotide
aauuuagcuauagcuuuca

SEQ ID NO: 1460760 - RNA, 19 nt, Artificial Sequence
  Description of Artificial Sequence: Synthetic oligonucleotide
aucaugccaaauucaauga

SEQ ID NO: 1460761 - RNA, 19 nt, Artificial Sequence
  Description of Artificial Sequence: Synthetic oligonucleotide
uggaccgaagaccucgugc

SEQ ID NO: 1460762 - RNA, 19 nt, Artificial Sequence
  Description of Artificial Sequence: Synthetic oligonucleotide
ugacccuaaacagaacaag

SEQ ID NO: 1460763 - RNA, 19 nt, Artificial Sequence
  Description of Artificial Sequence: Synthetic oligonucleotide
aguuuagcuguuugcagca

SEQ ID NO: 1460764 - RNA, 19 nt, Artificial Sequence
  Description of Artificial Sequence: Synthetic oligonucleotide
uucugucuaagccauuaaa

SEQ ID NO: 1460765 - RNA, 19 nt, Artificial Sequence
  Description of Artificial Sequence: Synthetic oligonucleotide
uuuccauuauggaccgaag

SEQ ID NO: 1460766 - RNA, 19 nt, Artificial Sequence
  Description of Artificial Sequence: Synthetic oligonucleotide
gucagagucguacagucac

SEQ ID NO: 1460767 - RNA, 19 nt, Artificial Sequence
  Description of Artificial Sequence: Synthetic oligonucleotide
uuuuccauuauggaccgaa

SEQ ID NO: 1460768 - RNA, 19 nt, Artificial Sequence
  Description of Artificial Sequence: Synthetic oligonucleotide
ggaacauugacuacugugc

SEQ ID NO: 1460769 - RNA, 19 nt, Artificial Sequence
  Description of Artificial Sequence: Synthetic oligonucleotide
uaaccgucccacaaacuca

SEQ ID NO: 1460770 - RNA, 19 nt, Artificial Sequence
  Description of Artificial Sequence: Synthetic oligonucleotide
ucgaacauugguucuagua

SEQ ID NO: 1460771 - RNA, 19 nt, Artificial Sequence
  Description of Artificial Sequence: Synthetic oligonucleotide
aucucuaaacauuguguca

SEQ ID NO: 1460772 - RNA, 19 nt, Artificial Sequence
  Description of Artificial Sequence: Synthetic oligonucleotide
auaauauacaugaucggau

SEQ ID NO: 1460773 - RNA, 19 nt, Artificial Sequence
  Description of Artificial Sequence: Synthetic oligonucleotide
auguaugauauccaagaua

SEQ ID NO: 1460774 - RNA, 19 nt, Artificial Sequence
  Description of Artificial Sequence: Synthetic oligonucleotide
cuaagccauuaaaagcacc

SEQ ID NO: 1460775 - RNA, 19 nt, Artificial Sequence
  Description of Artificial Sequence: Synthetic oligonucleotide
uguacaggcaggacucuga

SEQ ID NO: 1460776 - RNA, 19 nt, Artificial Sequence
  Description of Artificial Sequence: Synthetic oligonucleotide
uuccacaugacggaguaac

SEQ ID NO: 1460777 - RNA, 19 nt, Artificial Sequence
  Description of Artificial Sequence: Synthetic oligonucleotide
auagauucaaugccuuuaa

SEQ ID NO: 1460778 - RNA, 19 nt, Artificial Sequence
  Description of Artificial Sequence: Synthetic oligonucleotide
auauacaugaucggauucu

SEQ ID NO: 1460779 - RNA, 19 nt, Artificial Sequence
  Description of Artificial Sequence: Synthetic oligonucleotide
uuuagcugaacgccuuccu

SEQ ID NO: 1460780 - RNA, 19 nt, Artificial Sequence
  Description of Artificial Sequence: Synthetic oligonucleotide
caagugucuucucaucuag

SEQ ID NO: 1460781 - RNA, 19 nt, Artificial Sequence
  Description of Artificial Sequence: Synthetic oligonucleotide
ugaccauguaugauaucca

SEQ ID NO: 1460782 - RNA, 19 nt, Artificial Sequence
  Description of Artificial Sequence: Synthetic oligonucleotide
aggaauaauugcauuacgu

SEQ ID NO: 1460783 - RNA, 19 nt, Artificial Sequence
  Description of Artificial Sequence: Synthetic oligonucleotide
gcauagaugcuccuaaggc

SEQ ID NO: 1460784 - RNA, 19 nt, Artificial Sequence
  Description of Artificial Sequence: Synthetic oligonucleotide
guuaugacccuaaacagaa

SEQ ID NO: 1460785 - RNA, 19 nt, Artificial Sequence
  Description of Artificial Sequence: Synthetic oligonucleotide
gagucagagucguacaguc

SEQ ID NO: 1460786 - RNA, 19 nt, Artificial Sequence
  Description of Artificial Sequence: Synthetic oligonucleotide
uuggcgaucacagauucaa

SEQ ID NO: 1460787 - RNA, 19 nt, Artificial Sequence
  Description of Artificial Sequence: Synthetic oligonucleotide
gacaguuuagcuguuugca

SEQ ID NO: 1460788 - RNA, 19 nt, Artificial Sequence
  Description of Artificial Sequence: Synthetic oligonucleotide
ucgauuagcaaggucugca

SEQ ID NO: 1460789 - RNA, 19 nt, Artificial Sequence
  Description of Artificial Sequence: Synthetic oligonucleotide
uuggcgaggccauccaucc

SEQ ID NO: 1460790 - RNA, 19 nt, Artificial Sequence
  Description of Artificial Sequence: Synthetic oligonucleotide
caugccaaauucaaugaga

SEQ ID NO: 1460791 - RNA, 19 nt, Artificial Sequence
  Description of Artificial Sequence: Synthetic oligonucleotide
ucaucaugagaagaaucca

SEQ ID NO: 1460792 - RNA, 19 nt, Artificial Sequence
  Description of Artificial Sequence: Synthetic oligonucleotide
uccagcaaucugaagcaac

SEQ ID NO: 1460793 - RNA, 19 nt, Artificial Sequence
  Description of Artificial Sequence: Synthetic oligonucleotide
uagcuaaaguuugugccag

SEQ ID NO: 1460794 - RNA, 19 nt, Artificial Sequence
  Description of Artificial Sequence: Synthetic oligonucleotide
uuucccaguauuagauggu

SEQ ID NO: 1460795 - RNA, 19 nt, Artificial Sequence
  Description of Artificial Sequence: Synthetic oligonucleotide
cuucgauuagcaaggucug

SEQ ID NO: 1460796 - RNA, 19 nt, Artificial Sequence
  Description of Artificial Sequence: Synthetic oligonucleotide
auugaggaauaauugcauu

SEQ ID NO: 1460797 - RNA, 19 nt, Artificial Sequence
  Description of Artificial Sequence: Synthetic oligonucleotide
aguuauugcaauaccugca

SEQ ID NO: 1460798 - RNA, 19 nt, Artificial Sequence
  Description of Artificial Sequence: Synthetic oligonucleotide
cuuaucuacuucauccaga

SEQ ID NO: 1460799 - RNA, 19 nt, Artificial Sequence
  Description of Artificial Sequence: Synthetic oligonucleotide
caauuuagcuauagcuuuc

SEQ ID NO: 1460800 - RNA, 19 nt, Artificial Sequence
  Description of Artificial Sequence: Synthetic oligonucleotide
uaaugccagacuucggaaa

SEQ ID NO: 1460801 - RNA, 19 nt, Artificial Sequence
  Description of Artificial Sequence: Synthetic oligonucleotide
aacauugguucuaguaaca

SEQ ID NO: 1460802 - RNA, 19 nt, Artificial Sequence
  Description of Artificial Sequence: Synthetic oligonucleotide
uacuacguccuugucaacu

SEQ ID NO: 1460803 - RNA, 19 nt, Artificial Sequence
  Description of Artificial Sequence: Synthetic oligonucleotide
ugaugaaugccuggcacac

SEQ ID NO: 1460804 - RNA, 19 nt, Artificial Sequence
  Description of Artificial Sequence: Synthetic oligonucleotide
agcuaaaguuugugccagc

SEQ ID NO: 1460805 - RNA, 19 nt, Artificial Sequence
  Description of Artificial Sequence: Synthetic oligonucleotide
gaugaguauuggauucucc

SEQ ID NO: 1460806 - RNA, 19 nt, Artificial Sequence
  Description of Artificial Sequence: Synthetic oligonucleotide
aguauuagaugguguucca

SEQ ID NO: 1460807 - RNA, 19 nt, Artificial Sequence
  Description of Artificial Sequence: Synthetic oligonucleotide
cauuuagcuaaaguuugug

SEQ ID NO: 1460808 - RNA, 19 nt, Artificial Sequence
  Description of Artificial Sequence: Synthetic oligonucleotide
gaggcauuugcugauuaac

SEQ ID NO: 1460809 - RNA, 19 nt, Artificial Sequence
  Description of Artificial Sequence: Synthetic oligonucleotide
ugaucggauucuuaucuua

SEQ ID NO: 1460810 - RNA, 19 nt, Artificial Sequence
  Description of Artificial Sequence: Synthetic oligonucleotide
cauuacguggcucuguuaa

SEQ ID NO: 1460811 - RNA, 19 nt, Artificial Sequence
  Description of Artificial Sequence: Synthetic oligonucleotide
uuuaccugacccaguuggu

SEQ ID NO: 1460812 - RNA, 19 nt, Artificial Sequence
  Description of Artificial Sequence: Synthetic oligonucleotide
uaggaacuucgaacauugg

SEQ ID NO: 1460813 - RNA, 19 nt, Artificial Sequence
  Description of Artificial Sequence: Synthetic oligonucleotide
acugaugauucugucuaag

SEQ ID NO: 1460814 - RNA, 19 nt, Artificial Sequence
  Description of Artificial Sequence: Synthetic oligonucleotide
aauucuuuucuggaacauu

SEQ ID NO: 1460815 - RNA, 19 nt, Artificial Sequence
  Description of Artificial Sequence: Synthetic oligonucleotide
aaccgucccacaaacucag

SEQ ID NO: 1460816 - RNA, 19 nt, Artificial Sequence
  Description of Artificial Sequence: Synthetic oligonucleotide
aauaccucgccuccucguu

SEQ ID NO: 1460817 - RNA, 19 nt, Artificial Sequence
  Description of Artificial Sequence: Synthetic oligonucleotide
guaaccgaucuuuucuuca

SEQ ID NO: 1460818 - RNA, 19 nt, Artificial Sequence
  Description of Artificial Sequence: Synthetic oligonucleotide
auagaugcuccuaaggcau

SEQ ID NO: 1460819 - RNA, 19 nt, Artificial Sequence
  Description of Artificial Sequence: Synthetic oligonucleotide
gaacaucaaggcauuuagc

SEQ ID NO: 1460820 - RNA, 19 nt, Artificial Sequence
  Description of Artificial Sequence: Synthetic oligonucleotide
gagucguacagucacagau

SEQ ID NO: 1460821 - RNA, 19 nt, Artificial Sequence
  Description of Artificial Sequence: Synthetic oligonucleotide
ggcauuuagcuaaaguuug

SEQ ID NO: 1460822 - RNA, 19 nt, Artificial Sequence
  Description of Artificial Sequence: Synthetic oligonucleotide
acauucaguucacacuuau

SEQ ID NO: 1460823 - RNA, 19 nt, Artificial Sequence
  Description of Artificial Sequence: Synthetic oligonucleotide
aacucagguaucaugccaa

SEQ ID NO: 1460824 - RNA, 19 nt, Artificial Sequence
  Description of Artificial Sequence: Synthetic oligonucleotide
guuuggcgaucacagauuc

SEQ ID NO: 1460825 - RNA, 19 nt, Artificial Sequence
  Description of Artificial Sequence: Synthetic oligonucleotide
acauauccagccugaguca

SEQ ID NO: 1460826 - RNA, 19 nt, Artificial Sequence
  Description of Artificial Sequence: Synthetic oligonucleotide
agauagcaaaaggaacauc

SEQ ID NO: 1460827 - RNA, 19 nt, Artificial Sequence
  Description of Artificial Sequence: Synthetic oligonucleotide
aaccaccacagguaaccgu

SEQ ID NO: 1460828 - RNA, 19 nt, Artificial Sequence
  Description of Artificial Sequence: Synthetic oligonucleotide
aaggaauuccuaagaauuu

SEQ ID NO: 1460829 - RNA, 19 nt, Artificial Sequence
  Description of Artificial Sequence: Synthetic oligonucleotide
gacuucggaaacuguuaug

SEQ ID NO: 1460830 - RNA, 19 nt, Artificial Sequence
  Description of Artificial Sequence: Synthetic oligonucleotide
cauuauggaccgaagaccu

SEQ ID NO: 1460831 - RNA, 19 nt, Artificial Sequence
  Description of Artificial Sequence: Synthetic oligonucleotide
gaggacucuuuugauggag

SEQ ID NO: 1460832 - RNA, 19 nt, Artificial Sequence
  Description of Artificial Sequence: Synthetic oligonucleotide
cuuauccaugcugaauaag

SEQ ID NO: 1460833 - RNA, 19 nt, Artificial Sequence
  Description of Artificial Sequence: Synthetic oligonucleotide
agacuucggaaacuguuau

SEQ ID NO: 1460834 - RNA, 19 nt, Artificial Sequence
  Description of Artificial Sequence: Synthetic oligonucleotide
aaacuguuaugacccuaaa

SEQ ID NO: 1460835 - RNA, 19 nt, Artificial Sequence
  Description of Artificial Sequence: Synthetic oligonucleotide
cacuuauccaugcugaaua

SEQ ID NO: 1460836 - RNA, 19 nt, Artificial Sequence
  Description of Artificial Sequence: Synthetic oligonucleotide
ccauguaugauauccaaga

SEQ ID NO: 1460837 - RNA, 19 nt, Artificial Sequence
  Description of Artificial Sequence: Synthetic oligonucleotide
uugaugaguauuggauucu

SEQ ID NO: 1460838 - RNA, 19 nt, Artificial Sequence
  Description of Artificial Sequence: Synthetic oligonucleotide
uggcacacugccaaucuua

SEQ ID NO: 1460839 - RNA, 19 nt, Artificial Sequence
  Description of Artificial Sequence: Synthetic oligonucleotide
gaccauguaugauauccaa

SEQ ID NO: 1460840 - RNA, 19 nt, Artificial Sequence
  Description of Artificial Sequence: Synthetic oligonucleotide
cuucggaaacuguuaugac

SEQ ID NO: 1460841 - RNA, 19 nt, Artificial Sequence
  Description of Artificial Sequence: Synthetic oligonucleotide
acuuauccaugcugaauaa

SEQ ID NO: 1460842 - RNA, 19 nt, Artificial Sequence
  Description of Artificial Sequence: Synthetic oligonucleotide
ugagucagagucguacagu

SEQ ID NO: 1460843 - RNA, 19 nt, Artificial Sequence
  Description of Artificial Sequence: Synthetic oligonucleotide
uuuggcgaucacagauuca

SEQ ID NO: 1460844 - RNA, 19 nt, Artificial Sequence
  Description of Artificial Sequence: Synthetic oligonucleotide
aaccuuuagcugaacgccu

SEQ ID NO: 1460845 - RNA, 19 nt, Artificial Sequence
  Description of Artificial Sequence: Synthetic oligonucleotide
uuaugacccuaaacagaac

SEQ ID NO: 1460846 - RNA, 19 nt, Artificial Sequence
  Description of Artificial Sequence: Synthetic oligonucleotide
uuauugcaauaccugcauu

SEQ ID NO: 1460847 - RNA, 19 nt, Artificial Sequence
  Description of Artificial Sequence: Synthetic oligonucleotide
cauauccagccugagucag

SEQ ID NO: 1460848 - RNA, 19 nt, Artificial Sequence
  Description of Artificial Sequence: Synthetic oligonucleotide
gauggagcccguauguauc

SEQ ID NO: 1460849 - RNA, 19 nt, Artificial Sequence
  Description of Artificial Sequence: Synthetic oligonucleotide
aaaggcuucugaccaugua

SEQ ID NO: 1460850 - RNA, 19 nt, Artificial Sequence
  Description of Artificial Sequence: Synthetic oligonucleotide
ugcauuacguggcucuguu

SEQ ID NO: 1460851 - RNA, 19 nt, Artificial Sequence
  Description of Artificial Sequence: Synthetic oligonucleotide
cuuggcgaggccauccauc

SEQ ID NO: 1460852 - RNA, 19 nt, Artificial Sequence
  Description of Artificial Sequence: Synthetic oligonucleotide
acccuaaacagaacaaggu

SEQ ID NO: 1460853 - RNA, 19 nt, Artificial Sequence
  Description of Artificial Sequence: Synthetic oligonucleotide
ucaaugucuugaugaguau

SEQ ID NO: 1460854 - RNA, 19 nt, Artificial Sequence
  Description of Artificial Sequence: Synthetic oligonucleotide
cacaugacggaguaaccga

SEQ ID NO: 1460855 - RNA, 19 nt, Artificial Sequence
  Description of Artificial Sequence: Synthetic oligonucleotide
gaaguuuggcgaucacaga

SEQ ID NO: 1460856 - RNA, 19 nt, Artificial Sequence
  Description of Artificial Sequence: Synthetic oligonucleotide
acaagugucuucucaucua

SEQ ID NO: 1460857 - RNA, 19 nt, Artificial Sequence
  Description of Artificial Sequence: Synthetic oligonucleotide
ucgugcaccuguuuuccgu

SEQ ID NO: 1460858 - RNA, 19 nt, Artificial Sequence
  Description of Artificial Sequence: Synthetic oligonucleotide
ccauuauggaccgaagacc

SEQ ID NO: 1460859 - RNA, 19 nt, Artificial Sequence
  Description of Artificial Sequence: Synthetic oligonucleotide
cuaguaacagcuuuuccau

SEQ ID NO: 1460860 - RNA, 19 nt, Artificial Sequence
  Description of Artificial Sequence: Synthetic oligonucleotide
uccaccuaccaucccguaa

SEQ ID NO: 1460861 - RNA, 19 nt, Artificial Sequence
  Description of Artificial Sequence: Synthetic oligonucleotide
uacguggcucuguuaauau

SEQ ID NO: 1460862 - RNA, 19 nt, Artificial Sequence
  Description of Artificial Sequence: Synthetic oligonucleotide
guuuuaccugacccaguug

SEQ ID NO: 1460863 - RNA, 19 nt, Artificial Sequence
  Description of Artificial Sequence: Synthetic oligonucleotide
uauacaugaucggauucuu

SEQ ID NO: 1460864 - RNA, 19 nt, Artificial Sequence
  Description of Artificial Sequence: Synthetic oligonucleotide
uucgauuagcaaggucugc

SEQ ID NO: 1460865 - RNA, 19 nt, Artificial Sequence
  Description of Artificial Sequence: Synthetic oligonucleotide
cagagucguacagucacag

SEQ ID NO: 1460866 - RNA, 19 nt, Artificial Sequence
  Description of Artificial Sequence: Synthetic oligonucleotide
agauagauucaaugccuuu

SEQ ID NO: 1460867 - RNA, 19 nt, Artificial Sequence
  Description of Artificial Sequence: Synthetic oligonucleotide
cuucgaacauugguucuag

SEQ ID NO: 1460868 - RNA, 19 nt, Artificial Sequence
  Description of Artificial Sequence: Synthetic oligonucleotide
guacaagugucuucucauc

SEQ ID NO: 1460869 - RNA, 19 nt, Artificial Sequence
  Description of Artificial Sequence: Synthetic oligonucleotide
uuacguggcucuguuaaua

SEQ ID NO: 1460870 - RNA, 19 nt, Artificial Sequence
  Description of Artificial Sequence: Synthetic oligonucleotide
uauggaccgaagaccucgu

SEQ ID NO: 1460871 - RNA, 19 nt, Artificial Sequence
  Description of Artificial Sequence: Synthetic oligonucleotide
ugccaaauucaaugagauc

SEQ ID NO: 1460872 - RNA, 19 nt, Artificial Sequence
  Description of Artificial Sequence: Synthetic oligonucleotide
ugccagacuucggaaacug

SEQ ID NO: 1460873 - RNA, 19 nt, Artificial Sequence
  Description of Artificial Sequence: Synthetic oligonucleotide
gaaccaaaauaauguacau

SEQ ID NO: 1460874 - RNA, 19 nt, Artificial Sequence
  Description of Artificial Sequence: Synthetic oligonucleotide
cuguauaaaucaaugugau

SEQ ID NO: 1460875 - RNA, 19 nt, Artificial Sequence
  Description of Artificial Sequence: Synthetic oligonucleotide
acuacguccuugucaacuu

SEQ ID NO: 1460876 - RNA, 19 nt, Artificial Sequence
  Description of Artificial Sequence: Synthetic oligonucleotide
ugaugaguauuggauucuc

SEQ ID NO: 1460877 - RNA, 19 nt, Artificial Sequence
  Description of Artificial Sequence: Synthetic oligonucleotide
cuacuucauccagaaagac

SEQ ID NO: 1460878 - RNA, 19 nt, Artificial Sequence
  Description of Artificial Sequence: Synthetic oligonucleotide
aggaauuccuaagaauuua

SEQ ID NO: 1460879 - RNA, 19 nt, Artificial Sequence
  Description of Artificial Sequence: Synthetic oligonucleotide
uccuacugaugauucuguc

SEQ ID NO: 1460880 - RNA, 19 nt, Artificial Sequence
  Description of Artificial Sequence: Synthetic oligonucleotide
ucguacagucacagauagc

SEQ ID NO: 1460881 - RNA, 19 nt, Artificial Sequence
  Description of Artificial Sequence: Synthetic oligonucleotide
uggcucuguuaauauuugu

SEQ ID NO: 1460882 - RNA, 19 nt, Artificial Sequence
  Description of Artificial Sequence: Synthetic oligonucleotide
ccuaccaucccguaaccug

SEQ ID NO: 1460883 - RNA, 19 nt, Artificial Sequence
  Description of Artificial Sequence: Synthetic oligonucleotide
auuggauucuccacuucga

SEQ ID NO: 1460884 - RNA, 19 nt, Artificial Sequence
  Description of Artificial Sequence: Synthetic oligonucleotide
uuaccugacccaguugguc

SEQ ID NO: 1460885 - RNA, 19 nt, Artificial Sequence
  Description of Artificial Sequence: Synthetic oligonucleotide
caggacucugacaguuuag

SEQ ID NO: 1460886 - RNA, 19 nt, Artificial Sequence
  Description of Artificial Sequence: Synthetic oligonucleotide
ggcuaauuccagcaaucug

SEQ ID NO: 1460887 - RNA, 19 nt, Artificial Sequence
  Description of Artificial Sequence: Synthetic oligonucleotide
auuuagcuauagcuuucaa

SEQ ID NO: 1460888 - RNA, 19 nt, Artificial Sequence
  Description of Artificial Sequence: Synthetic oligonucleotide
agggccaauuuagcuauag

SEQ ID NO: 1460889 - RNA, 19 nt, Artificial Sequence
  Description of Artificial Sequence: Synthetic oligonucleotide
ugucagaauuaggaacuuc

SEQ ID NO: 1460890 - RNA, 19 nt, Artificial Sequence
  Description of Artificial Sequence: Synthetic oligonucleotide
gaucggauucuuaucuuaa

SEQ ID NO: 1460891 - RNA, 19 nt, Artificial Sequence
  Description of Artificial Sequence: Synthetic oligonucleotide
caugacggaguaaccgauc

SEQ ID NO: 1460892 - RNA, 19 nt, Artificial Sequence
  Description of Artificial Sequence: Synthetic oligonucleotide
ggaguaaccgaucuuuucu

SEQ ID NO: 1460893 - RNA, 19 nt, Artificial Sequence
  Description of Artificial Sequence: Synthetic oligonucleotide
auuacguggcucuguuaau

SEQ ID NO: 1460894 - RNA, 19 nt, Artificial Sequence
  Description of Artificial Sequence: Synthetic oligonucleotide
uugguucuaguaacagcuu

SEQ ID NO: 1460895 - RNA, 19 nt, Artificial Sequence
  Description of Artificial Sequence: Synthetic oligonucleotide
auuauggaccgaagaccuc

SEQ ID NO: 1460896 - RNA, 19 nt, Artificial Sequence
  Description of Artificial Sequence: Synthetic oligonucleotide
agguaucaugccaaauuca

SEQ ID NO: 1460897 - RNA, 19 nt, Artificial Sequence
  Description of Artificial Sequence: Synthetic oligonucleotide
auugacuacugugccuucu

SEQ ID NO: 1460898 - RNA, 19 nt, Artificial Sequence
  Description of Artificial Sequence: Synthetic oligonucleotide
gguaucaugccaaauucaa

SEQ ID NO: 1460899 - RNA, 19 nt, Artificial Sequence
  Description of Artificial Sequence: Synthetic oligonucleotide
ggaccgaagaccucgugca

SEQ ID NO: 1460900 - RNA, 19 nt, Artificial Sequence
  Description of Artificial Sequence: Synthetic oligonucleotide
ucuaggcuaugcagaggaa

SEQ ID NO: 1460901 - RNA, 19 nt, Artificial Sequence
  Description of Artificial Sequence: Synthetic oligonucleotide
ucuccacuucgauuagcaa

SEQ ID NO: 1460902 - RNA, 19 nt, Artificial Sequence
  Description of Artificial Sequence: Synthetic oligonucleotide
agagucguacagucacaga

SEQ ID NO: 1460903 - RNA, 19 nt, Artificial Sequence
  Description of Artificial Sequence: Synthetic oligonucleotide
uccuccuacugaugauucu

SEQ ID NO: 1460904 - RNA, 19 nt, Artificial Sequence
  Description of Artificial Sequence: Synthetic oligonucleotide
ugccguuuucgagaauucu

SEQ ID NO: 1460905 - RNA, 19 nt, Artificial Sequence
  Description of Artificial Sequence: Synthetic oligonucleotide
augaucggauucuuaucuu

SEQ ID NO: 1460906 - RNA, 19 nt, Artificial Sequence
  Description of Artificial Sequence: Synthetic oligonucleotide
cccguaaccugaugaaugc

SEQ ID NO: 1460907 - RNA, 19 nt, Artificial Sequence
  Description of Artificial Sequence: Synthetic oligonucleotide
accacagguaaccguccca

SEQ ID NO: 1460908 - RNA, 19 nt, Artificial Sequence
  Description of Artificial Sequence: Synthetic oligonucleotide
cucgugcaccuguuuuccg

SEQ ID NO: 1460909 - RNA, 19 nt, Artificial Sequence
  Description of Artificial Sequence: Synthetic oligonucleotide
uucgaacauugguucuagu

SEQ ID NO: 1460910 - RNA, 19 nt, Artificial Sequence
  Description of Artificial Sequence: Synthetic oligonucleotide
gaugccguuuucgagaauu

SEQ ID NO: 1460911 - RNA, 19 nt, Artificial Sequence
  Description of Artificial Sequence: Synthetic oligonucleotide
acacuuauccaugcugaau

SEQ ID NO: 1460912 - RNA, 19 nt, Artificial Sequence
  Description of Artificial Sequence: Synthetic oligonucleotide
guggcucuguuaauauuug

SEQ ID NO: 1460913 - RNA, 19 nt, Artificial Sequence
  Description of Artificial Sequence: Synthetic oligonucleotide
caucuaggcuaugcagagg

SEQ ID NO: 1460914 - RNA, 19 nt, Artificial Sequence
  Description of Artificial Sequence: Synthetic oligonucleotide
aggcauugccaugugggcu

SEQ ID NO: 1460915 - RNA, 19 nt, Artificial Sequence
  Description of Artificial Sequence: Synthetic oligonucleotide
gguccaagcagcaaaauau

SEQ ID NO: 1460916 - RNA, 19 nt, Artificial Sequence
  Description of Artificial Sequence: Synthetic oligonucleotide
cagaggaaccaccacaggu

SEQ ID NO: 1460917 - RNA, 19 nt, Artificial Sequence
  Description of Artificial Sequence: Synthetic oligonucleotide
ccaccuaccaucccguaac

SEQ ID NO: 1460918 - RNA, 19 nt, Artificial Sequence
  Description of Artificial Sequence: Synthetic oligonucleotide
augacccuaaacagaacaa

SEQ ID NO: 1460919 - RNA, 19 nt, Artificial Sequence
  Description of Artificial Sequence: Synthetic oligonucleotide
caccacagguaaccguccc

SEQ ID NO: 1460920 - RNA, 19 nt, Artificial Sequence
  Description of Artificial Sequence: Synthetic oligonucleotide
cagacuucggaaacuguua

SEQ ID NO: 1460921 - RNA, 19 nt, Artificial Sequence
  Description of Artificial Sequence: Synthetic oligonucleotide
ggcgaucacagauucaaua

SEQ ID NO: 1460922 - RNA, 19 nt, Artificial Sequence
  Description of Artificial Sequence: Synthetic oligonucleotide
caaggcauuuagcuaaagu

SEQ ID NO: 1460923 - RNA, 19 nt, Artificial Sequence
  Description of Artificial Sequence: Synthetic oligonucleotide
acuucgaacauugguucua

SEQ ID NO: 1460924 - RNA, 19 nt, Artificial Sequence
  Description of Artificial Sequence: Synthetic oligonucleotide
cccguauguauccugguuc

SEQ ID NO: 1460925 - RNA, 19 nt, Artificial Sequence
  Description of Artificial Sequence: Synthetic oligonucleotide
gucaacuuccacacauaca

SEQ ID NO: 1460926 - RNA, 19 nt, Artificial Sequence
  Description of Artificial Sequence: Synthetic oligonucleotide
aagcaccagaugccguuuu

SEQ ID NO: 1460927 - RNA, 19 nt, Artificial Sequence
  Description of Artificial Sequence: Synthetic oligonucleotide
augccguuuucgagaauuc

SEQ ID NO: 1460928 - RNA, 19 nt, Artificial Sequence
  Description of Artificial Sequence: Synthetic oligonucleotide
ugccuucuagaaguuuuaa

SEQ ID NO: 1460929 - RNA, 19 nt, Artificial Sequence
  Description of Artificial Sequence: Synthetic oligonucleotide
caucccguaaccugaugaa

SEQ ID NO: 1460930 - RNA, 19 nt, Artificial Sequence
  Description of Artificial Sequence: Synthetic oligonucleotide
uugcauuacguggcucugu

SEQ ID NO: 1460931 - RNA, 19 nt, Artificial Sequence
  Description of Artificial Sequence: Synthetic oligonucleotide
gcugcauagaugcuccuaa

SEQ ID NO: 1460932 - RNA, 19 nt, Artificial Sequence
  Description of Artificial Sequence: Synthetic oligonucleotide
cuacguccuugucaacuuc

SEQ ID NO: 1460933 - RNA, 19 nt, Artificial Sequence
  Description of Artificial Sequence: Synthetic oligonucleotide
gacggaguaaccgaucuuu

SEQ ID NO: 1460934 - RNA, 19 nt, Artificial Sequence
  Description of Artificial Sequence: Synthetic oligonucleotide
ugacggaguaaccgaucuu

SEQ ID NO: 1460935 - RNA, 19 nt, Artificial Sequence
  Description of Artificial Sequence: Synthetic oligonucleotide
caccuaccaucccguaacc

SEQ ID NO: 1460936 - RNA, 19 nt, Artificial Sequence
  Description of Artificial Sequence: Synthetic oligonucleotide
caccagaugccguuuucga

SEQ ID NO: 1460937 - RNA, 19 nt, Artificial Sequence
  Description of Artificial Sequence: Synthetic oligonucleotide
aguuuggcgaucacagauu

SEQ ID NO: 1460938 - RNA, 19 nt, Artificial Sequence
  Description of Artificial Sequence: Synthetic oligonucleotide
gaguaaccgaucuuuucuu

SEQ ID NO: 1460939 - RNA, 19 nt, Artificial Sequence
  Description of Artificial Sequence: Synthetic oligonucleotide
acaugacggaguaaccgau

SEQ ID NO: 1460940 - RNA, 19 nt, Artificial Sequence
  Description of Artificial Sequence: Synthetic oligonucleotide
uggcgaucacagauucaau

SEQ ID NO: 1460941 - RNA, 19 nt, Artificial Sequence
  Description of Artificial Sequence: Synthetic oligonucleotide
agucguacagucacagaua

SEQ ID NO: 1460942 - RNA, 19 nt, Artificial Sequence
  Description of Artificial Sequence: Synthetic oligonucleotide
ggcgaggccauccauccuc

SEQ ID NO: 1460943 - RNA, 19 nt, Artificial Sequence
  Description of Artificial Sequence: Synthetic oligonucleotide
ucuuuugauggagcccgua

SEQ ID NO: 1460944 - RNA, 19 nt, Artificial Sequence
  Description of Artificial Sequence: Synthetic oligonucleotide
uaccaucccguaaccugau

SEQ ID NO: 1460945 - RNA, 19 nt, Artificial Sequence
  Description of Artificial Sequence: Synthetic oligonucleotide
cauugacuacugugccuuc

SEQ ID NO: 1460946 - RNA, 19 nt, Artificial Sequence
  Description of Artificial Sequence: Synthetic oligonucleotide
ggaacuucgaacauugguu

SEQ ID NO: 1460947 - RNA, 19 nt, Artificial Sequence
  Description of Artificial Sequence: Synthetic oligonucleotide
auguauccugguuccuuuu

SEQ ID NO: 1460948 - RNA, 19 nt, Artificial Sequence
  Description of Artificial Sequence: Synthetic oligonucleotide
cauguaugauauccaagau

SEQ ID NO: 1460949 - RNA, 19 nt, Artificial Sequence
  Description of Artificial Sequence: Synthetic oligonucleotide
ccuccucaacuccagaguc

SEQ ID NO: 1460950 - RNA, 19 nt, Artificial Sequence
  Description of Artificial Sequence: Synthetic oligonucleotide
agucagagucguacaguca

SEQ ID NO: 1460951 - RNA, 19 nt, Artificial Sequence
  Description of Artificial Sequence: Synthetic oligonucleotide
cgaacauugguucuaguaa

SEQ ID NO: 1460952 - RNA, 19 nt, Artificial Sequence
  Description of Artificial Sequence: Synthetic oligonucleotide
gcugauuaaccugcugcug

SEQ ID NO: 1460953 - RNA, 19 nt, Artificial Sequence
  Description of Artificial Sequence: Synthetic oligonucleotide
uaccucgccuccucguuuu

SEQ ID NO: 1460954 - RNA, 19 nt, Artificial Sequence
  Description of Artificial Sequence: Synthetic oligonucleotide
aucccguaaccugaugaau

SEQ ID NO: 1460955 - RNA, 19 nt, Artificial Sequence
  Description of Artificial Sequence: Synthetic oligonucleotide
accaucccguaaccugaug

SEQ ID NO: 1460956 - RNA, 19 nt, Artificial Sequence
  Description of Artificial Sequence: Synthetic oligonucleotide
ccaauaccucgccuccucg

SEQ ID NO: 1460957 - RNA, 19 nt, Artificial Sequence
  Description of Artificial Sequence: Synthetic oligonucleotide
guaugauauccaagauaga

SEQ ID NO: 1460958 - RNA, 19 nt, Artificial Sequence
  Description of Artificial Sequence: Synthetic oligonucleotide
cuuuugauggagcccguau

SEQ ID NO: 1460959 - RNA, 19 nt, Artificial Sequence
  Description of Artificial Sequence: Synthetic oligonucleotide
cuacauauccagccugagu

SEQ ID NO: 1460960 - RNA, 19 nt, Artificial Sequence
  Description of Artificial Sequence: Synthetic oligonucleotide
cgauuagcaaggucugcag

SEQ ID NO: 1460961 - RNA, 19 nt, Artificial Sequence
  Description of Artificial Sequence: Synthetic oligonucleotide
acguggcucuguuaauauu

SEQ ID NO: 1460962 - RNA, 19 nt, Artificial Sequence
  Description of Artificial Sequence: Synthetic oligonucleotide
gcgaucacagauucaauau

SEQ ID NO: 1460963 - RNA, 19 nt, Artificial Sequence
  Description of Artificial Sequence: Synthetic oligonucleotide
augccagacuucggaaacu

SEQ ID NO: 1460964 - RNA, 19 nt, Artificial Sequence
  Description of Artificial Sequence: Synthetic oligonucleotide
cagguaaccgucccacaaa

SEQ ID NO: 1460965 - RNA, 19 nt, Artificial Sequence
  Description of Artificial Sequence: Synthetic oligonucleotide
accuaccaucccguaaccu

SEQ ID NO: 1460966 - RNA, 19 nt, Artificial Sequence
  Description of Artificial Sequence: Synthetic oligonucleotide
ggcauugccaugugggcua

SEQ ID NO: 1460967 - RNA, 19 nt, Artificial Sequence
  Description of Artificial Sequence: Synthetic oligonucleotide
ccaauuuagcuauagcuuu

SEQ ID NO: 1460968 - RNA, 19 nt, Artificial Sequence
  Description of Artificial Sequence: Synthetic oligonucleotide
aagaccucgugcaccuguu

SEQ ID NO: 1460969 - RNA, 19 nt, Artificial Sequence
  Description of Artificial Sequence: Synthetic oligonucleotide
guucacacuuauccaugcu

SEQ ID NO: 1460970 - RNA, 19 nt, Artificial Sequence
  Description of Artificial Sequence: Synthetic oligonucleotide
ccaucccguaaccugauga

SEQ ID NO: 1460971 - RNA, 19 nt, Artificial Sequence
  Description of Artificial Sequence: Synthetic oligonucleotide
cuacuacguccuugucaac

SEQ ID NO: 1460972 - RNA, 19 nt, Artificial Sequence
  Description of Artificial Sequence: Synthetic oligonucleotide
ccaguauuagaugguguuc

SEQ ID NO: 1460973 - RNA, 19 nt, Artificial Sequence
  Description of Artificial Sequence: Synthetic oligonucleotide
auacaugaucggauucuua

SEQ ID NO: 1460974 - RNA, 19 nt, Artificial Sequence
  Description of Artificial Sequence: Synthetic oligonucleotide
ccauguacuguuuucugua

SEQ ID NO: 1460975 - RNA, 19 nt, Artificial Sequence
  Description of Artificial Sequence: Synthetic oligonucleotide
augucagaauuaggaacuu

SEQ ID NO: 1460976 - RNA, 19 nt, Artificial Sequence
  Description of Artificial Sequence: Synthetic oligonucleotide
ggcuaugcagaggaaccac

SEQ ID NO: 1460977 - RNA, 19 nt, Artificial Sequence
  Description of Artificial Sequence: Synthetic oligonucleotide
guacagucacagauagcaa

SEQ ID NO: 1460978 - RNA, 19 nt, Artificial Sequence
  Description of Artificial Sequence: Synthetic oligonucleotide
cccuaaacagaacaaggua

SEQ ID NO: 1460979 - RNA, 19 nt, Artificial Sequence
  Description of Artificial Sequence: Synthetic oligonucleotide
uggcgaggccauccauccu

SEQ ID NO: 1460980 - RNA, 19 nt, Artificial Sequence
  Description of Artificial Sequence: Synthetic oligonucleotide
cuuaaaggcuucugaccau

SEQ ID NO: 1460981 - RNA, 19 nt, Artificial Sequence
  Description of Artificial Sequence: Synthetic oligonucleotide
auauccagccugagucaga

SEQ ID NO: 1460982 - RNA, 19 nt, Artificial Sequence
  Description of Artificial Sequence: Synthetic oligonucleotide
gugcaccuguuuuccguuc

SEQ ID NO: 1460983 - RNA, 19 nt, Artificial Sequence
  Description of Artificial Sequence: Synthetic oligonucleotide
guaucaugccaaauucaau

SEQ ID NO: 1460984 - RNA, 19 nt, Artificial Sequence
  Description of Artificial Sequence: Synthetic oligonucleotide
cugaggcauuugcugauua

SEQ ID NO: 1460985 - RNA, 19 nt, Artificial Sequence
  Description of Artificial Sequence: Synthetic oligonucleotide
accuuuagcugaacgccuu

SEQ ID NO: 1460986 - RNA, 19 nt, Artificial Sequence
  Description of Artificial Sequence: Synthetic oligonucleotide
ccucgugcaccuguuuucc

SEQ ID NO: 1460987 - RNA, 19 nt, Artificial Sequence
  Description of Artificial Sequence: Synthetic oligonucleotide
ggagaaguuuggcgaucac

SEQ ID NO: 1460988 - RNA, 19 nt, Artificial Sequence
  Description of Artificial Sequence: Synthetic oligonucleotide
cagauagcaaaaggaacau

SEQ ID NO: 1460989 - RNA, 19 nt, Artificial Sequence
  Description of Artificial Sequence: Synthetic oligonucleotide
augagaucucuggcuucca

SEQ ID NO: 1460990 - RNA, 19 nt, Artificial Sequence
  Description of Artificial Sequence: Synthetic oligonucleotide
caauaccucgccuccucgu

SEQ ID NO: 1460991 - RNA, 19 nt, Artificial Sequence
  Description of Artificial Sequence: Synthetic oligonucleotide
uuuccguuccagggccaau

SEQ ID NO: 1460992 - RNA, 19 nt, Artificial Sequence
  Description of Artificial Sequence: Synthetic oligonucleotide
acggaguaaccgaucuuuu

SEQ ID NO: 1460993 - RNA, 19 nt, Artificial Sequence
  Description of Artificial Sequence: Synthetic oligonucleotide
caaugccuuuaaugccaga

SEQ ID NO: 1460994 - RNA, 19 nt, Artificial Sequence
  Description of Artificial Sequence: Synthetic oligonucleotide
caaugucuugaugaguauu

SEQ ID NO: 1460995 - RNA, 19 nt, Artificial Sequence
  Description of Artificial Sequence: Synthetic oligonucleotide
ggaaacuguuaugacccua

SEQ ID NO: 1460996 - RNA, 19 nt, Artificial Sequence
  Description of Artificial Sequence: Synthetic oligonucleotide
ccguaaccugaugaaugcc

SEQ ID NO: 1460997 - RNA, 19 nt, Artificial Sequence
  Description of Artificial Sequence: Synthetic oligonucleotide
accgucccacaaacucagg

SEQ ID NO: 1460998 - RNA, 19 nt, Artificial Sequence
  Description of Artificial Sequence: Synthetic oligonucleotide
ccgaucuuuucuucaaugu

SEQ ID NO: 1460999 - RNA, 19 nt, Artificial Sequence
  Description of Artificial Sequence: Synthetic oligonucleotide
agaugccguuuucgagaau

SEQ ID NO: 1461000 - RNA, 19 nt, Artificial Sequence
  Description of Artificial Sequence: Synthetic oligonucleotide
ccaguugguccaagcagca

SEQ ID NO: 1461001 - RNA, 19 nt, Artificial Sequence
  Description of Artificial Sequence: Synthetic oligonucleotide
cguaaccugaugaaugccu

SEQ ID NO: 1461002 - RNA, 19 nt, Artificial Sequence
  Description of Artificial Sequence: Synthetic oligonucleotide
gcauuuagcuaaaguuugu

SEQ ID NO: 1461003 - RNA, 19 nt, Artificial Sequence
  Description of Artificial Sequence: Synthetic oligonucleotide
cuggaacauugacuacugu

SEQ ID NO: 1461004 - RNA, 19 nt, Artificial Sequence
  Description of Artificial Sequence: Synthetic oligonucleotide
ccagggccaauuuagcuau

SEQ ID NO: 1461005 - RNA, 19 nt, Artificial Sequence
  Description of Artificial Sequence: Synthetic oligonucleotide
gggcuaauuccagcaaucu

SEQ ID NO: 1461006 - RNA, 19 nt, Artificial Sequence
  Description of Artificial Sequence: Synthetic oligonucleotide
gcugaacgccuuccuccac

SEQ ID NO: 1461007 - RNA, 19 nt, Artificial Sequence
  Description of Artificial Sequence: Synthetic oligonucleotide
gcgaggccauccauccucc

SEQ ID NO: 1461008 - RNA, 19 nt, Artificial Sequence
  Description of Artificial Sequence: Synthetic oligonucleotide
ccguuuucgagaauucuuu

SEQ ID NO: 1461009 - RNA, 19 nt, Artificial Sequence
  Description of Artificial Sequence: Synthetic oligonucleotide
cuuuuccauuauggaccga

SEQ ID NO: 1461010 - RNA, 19 nt, Artificial Sequence
  Description of Artificial Sequence: Synthetic oligonucleotide
gcauuacguggcucuguua

SEQ ID NO: 1461011 - RNA, 19 nt, Artificial Sequence
  Description of Artificial Sequence: Synthetic oligonucleotide
gccguuuucgagaauucuu

SEQ ID NO: 1461012 - RNA, 19 nt, Artificial Sequence
  Description of Artificial Sequence: Synthetic oligonucleotide
gguaaccgucccacaaacu

SEQ ID NO: 1461013 - RNA, 19 nt, Artificial Sequence
  Description of Artificial Sequence: Synthetic oligonucleotide
cuccaccuaccaucccgua

SEQ ID NO: 1461014 - RNA, 19 nt, Artificial Sequence
  Description of Artificial Sequence: Synthetic oligonucleotide
gccugauauugaggaauaa

SEQ ID NO: 1461015 - RNA, 19 nt, Artificial Sequence
  Description of Artificial Sequence: Synthetic oligonucleotide
ccgucccacaaacucaggu

SEQ ID NO: 1461016 - RNA, 19 nt, Artificial Sequence
  Description of Artificial Sequence: Synthetic oligonucleotide
cagggccaauuuagcuaua

SEQ ID NO: 1461017 - RNA, 19 nt, Artificial Sequence
  Description of Artificial Sequence: Synthetic oligonucleotide
gcccguauguauccugguu

SEQ ID NO: 1461018 - RNA, 19 nt, Artificial Sequence
  Description of Artificial Sequence: Synthetic oligonucleotide
gcauugccaugugggcuaa

SEQ ID NO: 1461019 - RNA, 19 nt, Artificial Sequence
  Description of Artificial Sequence: Synthetic oligonucleotide
ccucaacuccagagucaua

SEQ ID NO: 1461020 - RNA, 19 nt, Artificial Sequence
  Description of Artificial Sequence: Synthetic oligonucleotide
cggaaacuguuaugacccu

SEQ ID NO: 1461021 - RNA, 19 nt, Artificial Sequence
  Description of Artificial Sequence: Synthetic oligonucleotide
cgugcaccuguuuuccguu

SEQ ID NO: 1461022 - RNA, 19 nt, Artificial Sequence
  Description of Artificial Sequence: Synthetic oligonucleotide
cguauguauccugguuccu

SEQ ID NO: 1461023 - RNA, 19 nt, Artificial Sequence
  Description of Artificial Sequence: Synthetic oligonucleotide
ccacuucgauuagcaaggu

SEQ ID NO: 1461024 - RNA, 19 nt, Artificial Sequence
  Description of Artificial Sequence: Synthetic oligonucleotide
cauugccaugugggcuaau

SEQ ID NO: 1461025 - RNA, 19 nt, Artificial Sequence
  Description of Artificial Sequence: Synthetic oligonucleotide
uacgcagugaacuucaugg

SEQ ID NO: 1461026 - RNA, 19 nt, Artificial Sequence
  Description of Artificial Sequence: Synthetic oligonucleotide
ugauugacaaugaacaccc

SEQ ID NO: 1461027 - RNA, 19 nt, Artificial Sequence
  Description of Artificial Sequence: Synthetic oligonucleotide
uacacagugaccaauggag

SEQ ID NO: 1461028 - RNA, 19 nt, Artificial Sequence
  Description of Artificial Sequence: Synthetic oligonucleotide
aaugaaugcugccauacug

SEQ ID NO: 1461029 - RNA, 19 nt, Artificial Sequence
  Description of Artificial Sequence: Synthetic oligonucleotide
aauagauacgcagugaacu

SEQ ID NO: 1461030 - RNA, 19 nt, Artificial Sequence
  Description of Artificial Sequence: Synthetic oligonucleotide
uucaacacccuucaguggg

SEQ ID NO: 1461031 - RNA, 19 nt, Artificial Sequence
  Description of Artificial Sequence: Synthetic oligonucleotide
uguacuguuguaaacauau

SEQ ID NO: 1461032 - RNA, 19 nt, Artificial Sequence
  Description of Artificial Sequence: Synthetic oligonucleotide
aacuugcauagucaaagac

SEQ ID NO: 1461033 - RNA, 19 nt, Artificial Sequence
  Description of Artificial Sequence: Synthetic oligonucleotide
uuucccauaaauugggucc

SEQ ID NO: 1461034 - RNA, 19 nt, Artificial Sequence
  Description of Artificial Sequence: Synthetic oligonucleotide
uccuuuguaagauggacgg

SEQ ID NO: 1461035 - RNA, 19 nt, Artificial Sequence
  Description of Artificial Sequence: Synthetic oligonucleotide
uugacaaugaacacccucc

SEQ ID NO: 1461036 - RNA, 19 nt, Artificial Sequence
  Description of Artificial Sequence: Synthetic oligonucleotide
aagaauaaggcccuggauu

SEQ ID NO: 1461037 - RNA, 19 nt, Artificial Sequence
  Description of Artificial Sequence: Synthetic oligonucleotide
ugcugauucaaacucuggg

SEQ ID NO: 1461038 - RNA, 19 nt, Artificial Sequence
  Description of Artificial Sequence: Synthetic oligonucleotide
ucugaguuugccuuccugg

SEQ ID NO: 1461039 - RNA, 19 nt, Artificial Sequence
  Description of Artificial Sequence: Synthetic oligonucleotide
uuugcucauaguuaaaggu

SEQ ID NO: 1461040 - RNA, 19 nt, Artificial Sequence
  Description of Artificial Sequence: Synthetic oligonucleotide
aauuggguccugcaggauc

SEQ ID NO: 1461041 - RNA, 19 nt, Artificial Sequence
  Description of Artificial Sequence: Synthetic oligonucleotide
ugaccaauggagaucuugg

SEQ ID NO: 1461042 - RNA, 19 nt, Artificial Sequence
  Description of Artificial Sequence: Synthetic oligonucleotide
ucuugguucagaaggcugg

SEQ ID NO: 1461043 - RNA, 19 nt, Artificial Sequence
  Description of Artificial Sequence: Synthetic oligonucleotide
agaacaguaguccuguuug

SEQ ID NO: 1461044 - RNA, 19 nt, Artificial Sequence
  Description of Artificial Sequence: Synthetic oligonucleotide
augaacauccccuuucuuc

SEQ ID NO: 1461045 - RNA, 19 nt, Artificial Sequence
  Description of Artificial Sequence: Synthetic oligonucleotide
ugguucagaaggcuggucg

SEQ ID NO: 1461046 - RNA, 19 nt, Artificial Sequence
  Description of Artificial Sequence: Synthetic oligonucleotide
uguuguaaacauauagaac

SEQ ID NO: 1461047 - RNA, 19 nt, Artificial Sequence
  Description of Artificial Sequence: Synthetic oligonucleotide
agagaagugaguagcaacc

SEQ ID NO: 1461048 - RNA, 19 nt, Artificial Sequence
  Description of Artificial Sequence: Synthetic oligonucleotide
aggauuuucacugagcuug

SEQ ID NO: 1461049 - RNA, 19 nt, Artificial Sequence
  Description of Artificial Sequence: Synthetic oligonucleotide
auugacaaugaacacccuc

SEQ ID NO: 1461050 - RNA, 19 nt, Artificial Sequence
  Description of Artificial Sequence: Synthetic oligonucleotide
aaagacuucagagcuucac

SEQ ID NO: 1461051 - RNA, 19 nt, Artificial Sequence
  Description of Artificial Sequence: Synthetic oligonucleotide
agagcaaucgucucuacca

SEQ ID NO: 1461052 - RNA, 19 nt, Artificial Sequence
  Description of Artificial Sequence: Synthetic oligonucleotide
uggacugauaugaugguga

SEQ ID NO: 1461053 - RNA, 19 nt, Artificial Sequence
  Description of Artificial Sequence: Synthetic oligonucleotide
acaucccaagaauaaggcc

SEQ ID NO: 1461054 - RNA, 19 nt, Artificial Sequence
  Description of Artificial Sequence: Synthetic oligonucleotide
auaguuaaagguguccaac

SEQ ID NO: 1461055 - RNA, 19 nt, Artificial Sequence
  Description of Artificial Sequence: Synthetic oligonucleotide
uuuacagggcuucagcgac

SEQ ID NO: 1461056 - RNA, 19 nt, Artificial Sequence
  Description of Artificial Sequence: Synthetic oligonucleotide
uguaacacgcccaucuugu

SEQ ID NO: 1461057 - RNA, 19 nt, Artificial Sequence
  Description of Artificial Sequence: Synthetic oligonucleotide
ucaagaagacuccucaaaa

SEQ ID NO: 1461058 - RNA, 19 nt, Artificial Sequence
  Description of Artificial Sequence: Synthetic oligonucleotide
uguggugccaucauugccu

SEQ ID NO: 1461059 - RNA, 19 nt, Artificial Sequence
  Description of Artificial Sequence: Synthetic oligonucleotide
aaugauacaaauggccaca

SEQ ID NO: 1461060 - RNA, 19 nt, Artificial Sequence
  Description of Artificial Sequence: Synthetic oligonucleotide
aaugaacacccucccuugg

SEQ ID NO: 1461061 - RNA, 19 nt, Artificial Sequence
  Description of Artificial Sequence: Synthetic oligonucleotide
uuuguaagauggacgggag

SEQ ID NO: 1461062 - RNA, 19 nt, Artificial Sequence
  Description of Artificial Sequence: Synthetic oligonucleotide
acuguuuagaacuugcaua

SEQ ID NO: 1461063 - RNA, 19 nt, Artificial Sequence
  Description of Artificial Sequence: Synthetic oligonucleotide
aaugaacugcucuguaacu

SEQ ID NO: 1461064 - RNA, 19 nt, Artificial Sequence
  Description of Artificial Sequence: Synthetic oligonucleotide
agacuucagagcuucacag

SEQ ID NO: 1461065 - RNA, 19 nt, Artificial Sequence
  Description of Artificial Sequence: Synthetic oligonucleotide
gucucuaugacuuggucug

SEQ ID NO: 1461066 - RNA, 19 nt, Artificial Sequence
  Description of Artificial Sequence: Synthetic oligonucleotide
gaaugauacaaauggccac

SEQ ID NO: 1461067 - RNA, 19 nt, Artificial Sequence
  Description of Artificial Sequence: Synthetic oligonucleotide
auuuguugugggucgagag

SEQ ID NO: 1461068 - RNA, 19 nt, Artificial Sequence
  Description of Artificial Sequence: Synthetic oligonucleotide
ugguuugucucuaugacuu

SEQ ID NO: 1461069 - RNA, 19 nt, Artificial Sequence
  Description of Artificial Sequence: Synthetic oligonucleotide
cugauugacaaugaacacc

SEQ ID NO: 1461070 - RNA, 19 nt, Artificial Sequence
  Description of Artificial Sequence: Synthetic oligonucleotide
aaugacuacuucaaucugu

SEQ ID NO: 1461071 - RNA, 19 nt, Artificial Sequence
  Description of Artificial Sequence: Synthetic oligonucleotide
uuccugauugacaaugaac

SEQ ID NO: 1461072 - RNA, 19 nt, Artificial Sequence
  Description of Artificial Sequence: Synthetic oligonucleotide
ugucucuaugacuuggucu

SEQ ID NO: 1461073 - RNA, 19 nt, Artificial Sequence
  Description of Artificial Sequence: Synthetic oligonucleotide
ugcuuuguaggcagaauga

SEQ ID NO: 1461074 - RNA, 19 nt, Artificial Sequence
  Description of Artificial Sequence: Synthetic oligonucleotide
gacaguuccguaaggagag

SEQ ID NO: 1461075 - RNA, 19 nt, Artificial Sequence
  Description of Artificial Sequence: Synthetic oligonucleotide
uaguuaaagguguccaaca

SEQ ID NO: 1461076 - RNA, 19 nt, Artificial Sequence
  Description of Artificial Sequence: Synthetic oligonucleotide
guuuagaacuugcauaguc

SEQ ID NO: 1461077 - RNA, 19 nt, Artificial Sequence
  Description of Artificial Sequence: Synthetic oligonucleotide
uuacacagugaccaaugga

SEQ ID NO: 1461078 - RNA, 19 nt, Artificial Sequence
  Description of Artificial Sequence: Synthetic oligonucleotide
ugguguuuccauccugccg

SEQ ID NO: 1461079 - RNA, 19 nt, Artificial Sequence
  Description of Artificial Sequence: Synthetic oligonucleotide
augauccauggcuuucugc

SEQ ID NO: 1461080 - RNA, 19 nt, Artificial Sequence
  Description of Artificial Sequence: Synthetic oligonucleotide
ugcacuuguaacacgccca

SEQ ID NO: 1461081 - RNA, 19 nt, Artificial Sequence
  Description of Artificial Sequence: Synthetic oligonucleotide
uacuguuuagaacuugcau

SEQ ID NO: 1461082 - RNA, 19 nt, Artificial Sequence
  Description of Artificial Sequence: Synthetic oligonucleotide
cuguuguaaacauauagaa

SEQ ID NO: 1461083 - RNA, 19 nt, Artificial Sequence
  Description of Artificial Sequence: Synthetic oligonucleotide
gaucugaaugguuugucuc

SEQ ID NO: 1461084 - RNA, 19 nt, Artificial Sequence
  Description of Artificial Sequence: Synthetic oligonucleotide
ugacaaugaacacccuccc

SEQ ID NO: 1461085 - RNA, 19 nt, Artificial Sequence
  Description of Artificial Sequence: Synthetic oligonucleotide
aaagccuccuugguguuuc

SEQ ID NO: 1461086 - RNA, 19 nt, Artificial Sequence
  Description of Artificial Sequence: Synthetic oligonucleotide
uggcuuuauugcuugagcu

SEQ ID NO: 1461087 - RNA, 19 nt, Artificial Sequence
  Description of Artificial Sequence: Synthetic oligonucleotide
guuacacagugaccaaugg

SEQ ID NO: 1461088 - RNA, 19 nt, Artificial Sequence
  Description of Artificial Sequence: Synthetic oligonucleotide
agugcagaugaggagcagc

SEQ ID NO: 1461089 - RNA, 19 nt, Artificial Sequence
  Description of Artificial Sequence: Synthetic oligonucleotide
uggcaaagagcaaucgucu

SEQ ID NO: 1461090 - RNA, 19 nt, Artificial Sequence
  Description of Artificial Sequence: Synthetic oligonucleotide
uguccaacaucccaagaau

SEQ ID NO: 1461091 - RNA, 19 nt, Artificial Sequence
  Description of Artificial Sequence: Synthetic oligonucleotide
uucaaucuguccagagaag

SEQ ID NO: 1461092 - RNA, 19 nt, Artificial Sequence
  Description of Artificial Sequence: Synthetic oligonucleotide
uucuaaggugcauuccuug

SEQ ID NO: 1461093 - RNA, 19 nt, Artificial Sequence
  Description of Artificial Sequence: Synthetic oligonucleotide
agaaugaaugauacaaaug

SEQ ID NO: 1461094 - RNA, 19 nt, Artificial Sequence
  Description of Artificial Sequence: Synthetic oligonucleotide
gagccgauacuuuugugug

SEQ ID NO: 1461095 - RNA, 19 nt, Artificial Sequence
  Description of Artificial Sequence: Synthetic oligonucleotide
ucaaucuguccagagaagu

SEQ ID NO: 1461096 - RNA, 19 nt, Artificial Sequence
  Description of Artificial Sequence: Synthetic oligonucleotide
gaacuuccucgguagagcc

SEQ ID NO: 1461097 - RNA, 19 nt, Artificial Sequence
  Description of Artificial Sequence: Synthetic oligonucleotide
aggauccuuuguaagaugg

SEQ ID NO: 1461098 - RNA, 19 nt, Artificial Sequence
  Description of Artificial Sequence: Synthetic oligonucleotide
ugauaugauggugacauuu

SEQ ID NO: 1461099 - RNA, 19 nt, Artificial Sequence
  Description of Artificial Sequence: Synthetic oligonucleotide
ucaaugaacugcucuguaa

SEQ ID NO: 1461100 - RNA, 19 nt, Artificial Sequence
  Description of Artificial Sequence: Synthetic oligonucleotide
acuugcauagucaaagacu

SEQ ID NO: 1461101 - RNA, 19 nt, Artificial Sequence
  Description of Artificial Sequence: Synthetic oligonucleotide
guuugucucuaugacuugg

SEQ ID NO: 1461102 - RNA, 19 nt, Artificial Sequence
  Description of Artificial Sequence: Synthetic oligonucleotide
auccuuuguaagauggacg

SEQ ID NO: 1461103 - RNA, 19 nt, Artificial Sequence
  Description of Artificial Sequence: Synthetic oligonucleotide
uuaccugcgaagaggcuac

SEQ ID NO: 1461104 - RNA, 19 nt, Artificial Sequence
  Description of Artificial Sequence: Synthetic oligonucleotide
acuuccucgguagagccgg

SEQ ID NO: 1461105 - RNA, 19 nt, Artificial Sequence
  Description of Artificial Sequence: Synthetic oligonucleotide
acggccuacagcugucacc

SEQ ID NO: 1461106 - RNA, 19 nt, Artificial Sequence
  Description of Artificial Sequence: Synthetic oligonucleotide
aguuaaagguguccaacau

SEQ ID NO: 1461107 - RNA, 19 nt, Artificial Sequence
  Description of Artificial Sequence: Synthetic oligonucleotide
uuugucucuaugacuuggu

SEQ ID NO: 1461108 - RNA, 19 nt, Artificial Sequence
  Description of Artificial Sequence: Synthetic oligonucleotide
ugggaacccgcaaacggcc

SEQ ID NO: 1461109 - RNA, 19 nt, Artificial Sequence
  Description of Artificial Sequence: Synthetic oligonucleotide
aagugaguagcaaccagcu

SEQ ID NO: 1461110 - RNA, 19 nt, Artificial Sequence
  Description of Artificial Sequence: Synthetic oligonucleotide
uuuaccugcgaagaggcua

SEQ ID NO: 1461111 - RNA, 19 nt, Artificial Sequence
  Description of Artificial Sequence: Synthetic oligonucleotide
gcuuuacagggcuucagcg

SEQ ID NO: 1461112 - RNA, 19 nt, Artificial Sequence
  Description of Artificial Sequence: Synthetic oligonucleotide
cucauaguuaaaggugucc

SEQ ID NO: 1461113 - RNA, 19 nt, Artificial Sequence
  Description of Artificial Sequence: Synthetic oligonucleotide
caauagauacgcagugaac

SEQ ID NO: 1461114 - RNA, 19 nt, Artificial Sequence
  Description of Artificial Sequence: Synthetic oligonucleotide
uuauugcuugagcugcacu

SEQ ID NO: 1461115 - RNA, 19 nt, Artificial Sequence
  Description of Artificial Sequence: Synthetic oligonucleotide
agugaguagcaaccagcuc

SEQ ID NO: 1461116 - RNA, 19 nt, Artificial Sequence
  Description of Artificial Sequence: Synthetic oligonucleotide
acgggagggcaaugaaugc

SEQ ID NO: 1461117 - RNA, 19 nt, Artificial Sequence
  Description of Artificial Sequence: Synthetic oligonucleotide
uagaacaguaguccuguuu

SEQ ID NO: 1461118 - RNA, 19 nt, Artificial Sequence
  Description of Artificial Sequence: Synthetic oligonucleotide
cugggcugaacugacacag

SEQ ID NO: 1461119 - RNA, 19 nt, Artificial Sequence
  Description of Artificial Sequence: Synthetic oligonucleotide
acagugaccaauggagauc

SEQ ID NO: 1461120 - RNA, 19 nt, Artificial Sequence
  Description of Artificial Sequence: Synthetic oligonucleotide
cuuuguaagauggacggga

SEQ ID NO: 1461121 - RNA, 19 nt, Artificial Sequence
  Description of Artificial Sequence: Synthetic oligonucleotide
cuccaauagauacgcagug

SEQ ID NO: 1461122 - RNA, 19 nt, Artificial Sequence
  Description of Artificial Sequence: Synthetic oligonucleotide
cugggaacccgcaaacggc

SEQ ID NO: 1461123 - RNA, 19 nt, Artificial Sequence
  Description of Artificial Sequence: Synthetic oligonucleotide
uucagcgacacaaguuccu

SEQ ID NO: 1461124 - RNA, 19 nt, Artificial Sequence
  Description of Artificial Sequence: Synthetic oligonucleotide
uaaagguguccaacauccc

SEQ ID NO: 1461125 - RNA, 19 nt, Artificial Sequence
  Description of Artificial Sequence: Synthetic oligonucleotide
uuugugugaucugaauggu

SEQ ID NO: 1461126 - RNA, 19 nt, Artificial Sequence
  Description of Artificial Sequence: Synthetic oligonucleotide
aaccauagucccucucgcu

SEQ ID NO: 1461127 - RNA, 19 nt, Artificial Sequence
  Description of Artificial Sequence: Synthetic oligonucleotide
auagauacgcagugaacuu

SEQ ID NO: 1461128 - RNA, 19 nt, Artificial Sequence
  Description of Artificial Sequence: Synthetic oligonucleotide
agcgacacaaguuccucca

SEQ ID NO: 1461129 - RNA, 19 nt, Artificial Sequence
  Description of Artificial Sequence: Synthetic oligonucleotide
uguagucugcucugcaguc

SEQ ID NO: 1461130 - RNA, 19 nt, Artificial Sequence
  Description of Artificial Sequence: Synthetic oligonucleotide
ccuugggucaagaagacuc

SEQ ID NO: 1461131 - RNA, 19 nt, Artificial Sequence
  Description of Artificial Sequence: Synthetic oligonucleotide
cucagguuacacagugacc

SEQ ID NO: 1461132 - RNA, 19 nt, Artificial Sequence
  Description of Artificial Sequence: Synthetic oligonucleotide
cuccauaugauccauggcu

SEQ ID NO: 1461133 - RNA, 19 nt, Artificial Sequence
  Description of Artificial Sequence: Synthetic oligonucleotide
gucguuguuuccagcaagg

SEQ ID NO: 1461134 - RNA, 19 nt, Artificial Sequence
  Description of Artificial Sequence: Synthetic oligonucleotide
gguuugcucauaguuaaag

SEQ ID NO: 1461135 - RNA, 19 nt, Artificial Sequence
  Description of Artificial Sequence: Synthetic oligonucleotide
gcaaucgucucuaccaugg

SEQ ID NO: 1461136 - RNA, 19 nt, Artificial Sequence
  Description of Artificial Sequence: Synthetic oligonucleotide
agcaaaaccugguucugaa

SEQ ID NO: 1461137 - RNA, 19 nt, Artificial Sequence
  Description of Artificial Sequence: Synthetic oligonucleotide
gucgagagcaggcucugag

SEQ ID NO: 1461138 - RNA, 19 nt, Artificial Sequence
  Description of Artificial Sequence: Synthetic oligonucleotide
gaagcugcccaaugacuac

SEQ ID NO: 1461139 - RNA, 19 nt, Artificial Sequence
  Description of Artificial Sequence: Synthetic oligonucleotide
uucugggacaguuccguaa

SEQ ID NO: 1461140 - RNA, 19 nt, Artificial Sequence
  Description of Artificial Sequence: Synthetic oligonucleotide
auacgcagugaacuucaug

SEQ ID NO: 1461141 - RNA, 19 nt, Artificial Sequence
  Description of Artificial Sequence: Synthetic oligonucleotide
caaugacuacuucaaucug

SEQ ID NO: 1461142 - RNA, 19 nt, Artificial Sequence
  Description of Artificial Sequence: Synthetic oligonucleotide
ccagccgagaacuuccucg

SEQ ID NO: 1461143 - RNA, 19 nt, Artificial Sequence
  Description of Artificial Sequence: Synthetic oligonucleotide
uccccuuuggacugauaug

SEQ ID NO: 1461144 - RNA, 19 nt, Artificial Sequence
  Description of Artificial Sequence: Synthetic oligonucleotide
cagccgagaacuuccucgg

SEQ ID NO: 1461145 - RNA, 19 nt, Artificial Sequence
  Description of Artificial Sequence: Synthetic oligonucleotide
ugggucgagagcaggcucu

SEQ ID NO: 1461146 - RNA, 19 nt, Artificial Sequence
  Description of Artificial Sequence: Synthetic oligonucleotide
uguaacugauggagguauc

SEQ ID NO: 1461147 - RNA, 19 nt, Artificial Sequence
  Description of Artificial Sequence: Synthetic oligonucleotide
agcaaucgucucuaccaug

SEQ ID NO: 1461148 - RNA, 19 nt, Artificial Sequence
  Description of Artificial Sequence: Synthetic oligonucleotide
uggagguaucugcagcagu

SEQ ID NO: 1461149 - RNA, 19 nt, Artificial Sequence
  Description of Artificial Sequence: Synthetic oligonucleotide
uaacacgcccaucuuguuu

SEQ ID NO: 1461150 - RNA, 19 nt, Artificial Sequence
  Description of Artificial Sequence: Synthetic oligonucleotide
cauauagaacaguaguccu

SEQ ID NO: 1461151 - RNA, 19 nt, Artificial Sequence
  Description of Artificial Sequence: Synthetic oligonucleotide
cugcaggauccuuuguaag

SEQ ID NO: 1461152 - RNA, 19 nt, Artificial Sequence
  Description of Artificial Sequence: Synthetic oligonucleotide
aacuuccucgguagagccg

SEQ ID NO: 1461153 - RNA, 19 nt, Artificial Sequence
  Description of Artificial Sequence: Synthetic oligonucleotide
caagguuugcucauaguua

SEQ ID NO: 1461154 - RNA, 19 nt, Artificial Sequence
  Description of Artificial Sequence: Synthetic oligonucleotide
ucaccacugcgguucuggg

SEQ ID NO: 1461155 - RNA, 19 nt, Artificial Sequence
  Description of Artificial Sequence: Synthetic oligonucleotide
agaggcuacccguccuuuc

SEQ ID NO: 1461156 - RNA, 19 nt, Artificial Sequence
  Description of Artificial Sequence: Synthetic oligonucleotide
uuuuaccugcgaagaggcu

SEQ ID NO: 1461157 - RNA, 19 nt, Artificial Sequence
  Description of Artificial Sequence: Synthetic oligonucleotide
uagauacgcagugaacuuc

SEQ ID NO: 1461158 - RNA, 19 nt, Artificial Sequence
  Description of Artificial Sequence: Synthetic oligonucleotide
uuccguaaggagagccagc

SEQ ID NO: 1461159 - RNA, 19 nt, Artificial Sequence
  Description of Artificial Sequence: Synthetic oligonucleotide
ugggacaguuccguaagga

SEQ ID NO: 1461160 - RNA, 19 nt, Artificial Sequence
  Description of Artificial Sequence: Synthetic oligonucleotide
auggagccgauacuuuugu

SEQ ID NO: 1461161 - RNA, 19 nt, Artificial Sequence
  Description of Artificial Sequence: Synthetic oligonucleotide
agguguccaacaucccaag

SEQ ID NO: 1461162 - RNA, 19 nt, Artificial Sequence
  Description of Artificial Sequence: Synthetic oligonucleotide
auaugauccauggcuuucu

SEQ ID NO: 1461163 - RNA, 19 nt, Artificial Sequence
  Description of Artificial Sequence: Synthetic oligonucleotide
cuguggugccaucauugcc

SEQ ID NO: 1461164 - RNA, 19 nt, Artificial Sequence
  Description of Artificial Sequence: Synthetic oligonucleotide
agauacgcagugaacuuca

SEQ ID NO: 1461165 - RNA, 19 nt, Artificial Sequence
  Description of Artificial Sequence: Synthetic oligonucleotide
cauaugauccauggcuuuc

SEQ ID NO: 1461166 - RNA, 19 nt, Artificial Sequence
  Description of Artificial Sequence: Synthetic oligonucleotide
ucgagagcaggcucugagu

SEQ ID NO: 1461167 - RNA, 19 nt, Artificial Sequence
  Description of Artificial Sequence: Synthetic oligonucleotide
gaccgaagcccucagguua

SEQ ID NO: 1461168 - RNA, 19 nt, Artificial Sequence
  Description of Artificial Sequence: Synthetic oligonucleotide
ugcgaagaggcuacccguc

SEQ ID NO: 1461169 - RNA, 19 nt, Artificial Sequence
  Description of Artificial Sequence: Synthetic oligonucleotide
aggagugugggaggcagag

SEQ ID NO: 1461170 - RNA, 19 nt, Artificial Sequence
  Description of Artificial Sequence: Synthetic oligonucleotide
cucuaugacuuggucuggg

SEQ ID NO: 1461171 - RNA, 19 nt, Artificial Sequence
  Description of Artificial Sequence: Synthetic oligonucleotide
ugaacuucauggagccgau

SEQ ID NO: 1461172 - RNA, 19 nt, Artificial Sequence
  Description of Artificial Sequence: Synthetic oligonucleotide
aucgucucuaccauggcau

SEQ ID NO: 1461173 - RNA, 19 nt, Artificial Sequence
  Description of Artificial Sequence: Synthetic oligonucleotide
gacacaaguuccuccauau

SEQ ID NO: 1461174 - RNA, 19 nt, Artificial Sequence
  Description of Artificial Sequence: Synthetic oligonucleotide
gccguguuaucucuuguag

SEQ ID NO: 1461175 - RNA, 19 nt, Artificial Sequence
  Description of Artificial Sequence: Synthetic oligonucleotide
cauccugccguguuaucuc

SEQ ID NO: 1461176 - RNA, 19 nt, Artificial Sequence
  Description of Artificial Sequence: Synthetic oligonucleotide
acccuucagugggaaagcc

SEQ ID NO: 1461177 - RNA, 19 nt, Artificial Sequence
  Description of Artificial Sequence: Synthetic oligonucleotide
uuacagggcuucagcgaca

SEQ ID NO: 1461178 - RNA, 19 nt, Artificial Sequence
  Description of Artificial Sequence: Synthetic oligonucleotide
uuuccauccugccguguua

SEQ ID NO: 1461179 - RNA, 19 nt, Artificial Sequence
  Description of Artificial Sequence: Synthetic oligonucleotide
uaggaggaaggcgccauga

SEQ ID NO: 1461180 - RNA, 19 nt, Artificial Sequence
  Description of Artificial Sequence: Synthetic oligonucleotide
cagcgacacaaguuccucc

SEQ ID NO: 1461181 - RNA, 19 nt, Artificial Sequence
  Description of Artificial Sequence: Synthetic oligonucleotide
gguuacacagugaccaaug

SEQ ID NO: 1461182 - RNA, 19 nt, Artificial Sequence
  Description of Artificial Sequence: Synthetic oligonucleotide
cucgguagagccggcagag

SEQ ID NO: 1461183 - RNA, 19 nt, Artificial Sequence
  Description of Artificial Sequence: Synthetic oligonucleotide
cuggucguuguuuccagca

SEQ ID NO: 1461184 - RNA, 19 nt, Artificial Sequence
  Description of Artificial Sequence: Synthetic oligonucleotide
aagcugcccaaugacuacu

SEQ ID NO: 1461185 - RNA, 19 nt, Artificial Sequence
  Description of Artificial Sequence: Synthetic oligonucleotide
auacuguuuagaacuugca

SEQ ID NO: 1461186 - RNA, 19 nt, Artificial Sequence
  Description of Artificial Sequence: Synthetic oligonucleotide
accugcgaagaggcuaccc

SEQ ID NO: 1461187 - RNA, 19 nt, Artificial Sequence
  Description of Artificial Sequence: Synthetic oligonucleotide
ucuguaacugauggaggua

SEQ ID NO: 1461188 - RNA, 19 nt, Artificial Sequence
  Description of Artificial Sequence: Synthetic oligonucleotide
acgcagugaacuucaugga

SEQ ID NO: 1461189 - RNA, 19 nt, Artificial Sequence
  Description of Artificial Sequence: Synthetic oligonucleotide
agugaacuucauggagccg

SEQ ID NO: 1461190 - RNA, 19 nt, Artificial Sequence
  Description of Artificial Sequence: Synthetic oligonucleotide
gggucaagaagacuccuca

SEQ ID NO: 1461191 - RNA, 19 nt, Artificial Sequence
  Description of Artificial Sequence: Synthetic oligonucleotide
ccugcgaagaggcuacccg

SEQ ID NO: 1461192 - RNA, 19 nt, Artificial Sequence
  Description of Artificial Sequence: Synthetic oligonucleotide
ugugggucgagagcaggcu

SEQ ID NO: 1461193 - RNA, 19 nt, Artificial Sequence
  Description of Artificial Sequence: Synthetic oligonucleotide
accgaagcccucagguuac

SEQ ID NO: 1461194 - RNA, 19 nt, Artificial Sequence
  Description of Artificial Sequence: Synthetic oligonucleotide
acaguuccguaaggagagc

SEQ ID NO: 1461195 - RNA, 19 nt, Artificial Sequence
  Description of Artificial Sequence: Synthetic oligonucleotide
guaggcagaaugaaugaua

SEQ ID NO: 1461196 - RNA, 19 nt, Artificial Sequence
  Description of Artificial Sequence: Synthetic oligonucleotide
agccgauacuuuuguguga

SEQ ID NO: 1461197 - RNA, 19 nt, Artificial Sequence
  Description of Artificial Sequence: Synthetic oligonucleotide
ccugauugacaaugaacac

SEQ ID NO: 1461198 - RNA, 19 nt, Artificial Sequence
  Description of Artificial Sequence: Synthetic oligonucleotide
aggaaggcgccaugaacau

SEQ ID NO: 1461199 - RNA, 19 nt, Artificial Sequence
  Description of Artificial Sequence: Synthetic oligonucleotide
ccaaugacuacuucaaucu

SEQ ID NO: 1461200 - RNA, 19 nt, Artificial Sequence
  Description of Artificial Sequence: Synthetic oligonucleotide
aucccaagaauaaggcccu

SEQ ID NO: 1461201 - RNA, 19 nt, Artificial Sequence
  Description of Artificial Sequence: Synthetic oligonucleotide
ucguuguuuccagcaaggu

SEQ ID NO: 1461202 - RNA, 19 nt, Artificial Sequence
  Description of Artificial Sequence: Synthetic oligonucleotide
aguuccugauugacaauga

SEQ ID NO: 1461203 - RNA, 19 nt, Artificial Sequence
  Description of Artificial Sequence: Synthetic oligonucleotide
ugcgguucugggacaguuc

SEQ ID NO: 1461204 - RNA, 19 nt, Artificial Sequence
  Description of Artificial Sequence: Synthetic oligonucleotide
ccgagaacuuccucgguag

SEQ ID NO: 1461205 - RNA, 19 nt, Artificial Sequence
  Description of Artificial Sequence: Synthetic oligonucleotide
ggacugauaugauggugac

SEQ ID NO: 1461206 - RNA, 19 nt, Artificial Sequence
  Description of Artificial Sequence: Synthetic oligonucleotide
ggagccgauacuuuugugu

SEQ ID NO: 1461207 - RNA, 19 nt, Artificial Sequence
  Description of Artificial Sequence: Synthetic oligonucleotide
aguuccguaaggagagcca

SEQ ID NO: 1461208 - RNA, 19 nt, Artificial Sequence
  Description of Artificial Sequence: Synthetic oligonucleotide
ggacaguuccguaaggaga

SEQ ID NO: 1461209 - RNA, 19 nt, Artificial Sequence
  Description of Artificial Sequence: Synthetic oligonucleotide
ccauagucccucucgcugc

SEQ ID NO: 1461210 - RNA, 19 nt, Artificial Sequence
  Description of Artificial Sequence: Synthetic oligonucleotide
gcucuguaacugauggagg

SEQ ID NO: 1461211 - RNA, 19 nt, Artificial Sequence
  Description of Artificial Sequence: Synthetic oligonucleotide
aguaggaggaaggcgccau

SEQ ID NO: 1461212 - RNA, 19 nt, Artificial Sequence
  Description of Artificial Sequence: Synthetic oligonucleotide
gggguugaguccucuggag

SEQ ID NO: 1461213 - RNA, 19 nt, Artificial Sequence
  Description of Artificial Sequence: Synthetic oligonucleotide
caucuuguuuggcccucag

SEQ ID NO: 1461214 - RNA, 19 nt, Artificial Sequence
  Description of Artificial Sequence: Synthetic oligonucleotide
ucgucucuaccauggcauc

SEQ ID NO: 1461215 - RNA, 19 nt, Artificial Sequence
  Description of Artificial Sequence: Synthetic oligonucleotide
guaggaggaaggcgccaug

SEQ ID NO: 1461216 - RNA, 19 nt, Artificial Sequence
  Description of Artificial Sequence: Synthetic oligonucleotide
uuuggcccucaguuucuaa

SEQ ID NO: 1461217 - RNA, 19 nt, Artificial Sequence
  Description of Artificial Sequence: Synthetic oligonucleotide
acccgcaaacggccuacag

SEQ ID NO: 1461218 - RNA, 19 nt, Artificial Sequence
  Description of Artificial Sequence: Synthetic oligonucleotide
guaacugauggagguaucu

SEQ ID NO: 1461219 - RNA, 19 nt, Artificial Sequence
  Description of Artificial Sequence: Synthetic oligonucleotide
gaccaauggagaucuuggu

SEQ ID NO: 1461220 - RNA, 19 nt, Artificial Sequence
  Description of Artificial Sequence: Synthetic oligonucleotide
aaauuggguccugcaggau

SEQ ID NO: 1461221 - RNA, 19 nt, Artificial Sequence
  Description of Artificial Sequence: Synthetic oligonucleotide
guccccuuuggacugauau

SEQ ID NO: 1461222 - RNA, 19 nt, Artificial Sequence
  Description of Artificial Sequence: Synthetic oligonucleotide
auaaggcccuggauuucuc

SEQ ID NO: 1461223 - RNA, 19 nt, Artificial Sequence
  Description of Artificial Sequence: Synthetic oligonucleotide
cuaugacuuggucugggcu

SEQ ID NO: 1461224 - RNA, 19 nt, Artificial Sequence
  Description of Artificial Sequence: Synthetic oligonucleotide
gaacccgcaaacggccuac

SEQ ID NO: 1461225 - RNA, 19 nt, Artificial Sequence
  Description of Artificial Sequence: Synthetic oligonucleotide
ucccgggaggccucagucu

SEQ ID NO: 1461226 - RNA, 19 nt, Artificial Sequence
  Description of Artificial Sequence: Synthetic oligonucleotide
gguuugucucuaugacuug

SEQ ID NO: 1461227 - RNA, 19 nt, Artificial Sequence
  Description of Artificial Sequence: Synthetic oligonucleotide
cauugccuccaacaaugga

SEQ ID NO: 1461228 - RNA, 19 nt, Artificial Sequence
  Description of Artificial Sequence: Synthetic oligonucleotide
guaguccuguuugggguug

SEQ ID NO: 1461229 - RNA, 19 nt, Artificial Sequence
  Description of Artificial Sequence: Synthetic oligonucleotide
ggcaaagagcaaucgucuc

SEQ ID NO: 1461230 - RNA, 19 nt, Artificial Sequence
  Description of Artificial Sequence: Synthetic oligonucleotide
cccgcaaacggccuacagc

SEQ ID NO: 1461231 - RNA, 19 nt, Artificial Sequence
  Description of Artificial Sequence: Synthetic oligonucleotide
ugcuggcuuuauugcuuga

SEQ ID NO: 1461232 - RNA, 19 nt, Artificial Sequence
  Description of Artificial Sequence: Synthetic oligonucleotide
cagcuuuacagggcuucag

SEQ ID NO: 1461233 - RNA, 19 nt, Artificial Sequence
  Description of Artificial Sequence: Synthetic oligonucleotide
aagaggcuacccguccuuu

SEQ ID NO: 1461234 - RNA, 19 nt, Artificial Sequence
  Description of Artificial Sequence: Synthetic oligonucleotide
ggguugaguccucuggaga

SEQ ID NO: 1461235 - RNA, 19 nt, Artificial Sequence
  Description of Artificial Sequence: Synthetic oligonucleotide
gagccguccaggaggcccc

SEQ ID NO: 1461236 - RNA, 19 nt, Artificial Sequence
  Description of Artificial Sequence: Synthetic oligonucleotide
gcgaagaggcuacccgucc

SEQ ID NO: 1461237 - RNA, 19 nt, Artificial Sequence
  Description of Artificial Sequence: Synthetic oligonucleotide
ccccuuuggacugauauga

SEQ ID NO: 1461238 - RNA, 19 nt, Artificial Sequence
  Description of Artificial Sequence: Synthetic oligonucleotide
ggcuggucguuguuuccag

SEQ ID NO: 1461239 - RNA, 19 nt, Artificial Sequence
  Description of Artificial Sequence: Synthetic oligonucleotide
gagcaaucgucucuaccau

SEQ ID NO: 1461240 - RNA, 19 nt, Artificial Sequence
  Description of Artificial Sequence: Synthetic oligonucleotide
gcagaaugaaugauacaaa

SEQ ID NO: 1461241 - RNA, 19 nt, Artificial Sequence
  Description of Artificial Sequence: Synthetic oligonucleotide
caagaauaaggcccuggau

SEQ ID NO: 1461242 - RNA, 19 nt, Artificial Sequence
  Description of Artificial Sequence: Synthetic oligonucleotide
ggcuacccguccuuucuug

SEQ ID NO: 1461243 - RNA, 19 nt, Artificial Sequence
  Description of Artificial Sequence: Synthetic oligonucleotide
ccauaaauuggguccugca

SEQ ID NO: 1461244 - RNA, 19 nt, Artificial Sequence
  Description of Artificial Sequence: Synthetic oligonucleotide
ggucaagaagacuccucaa

SEQ ID NO: 1461245 - RNA, 19 nt, Artificial Sequence
  Description of Artificial Sequence: Synthetic oligonucleotide
agauggacgggagggcaau

SEQ ID NO: 1461246 - RNA, 19 nt, Artificial Sequence
  Description of Artificial Sequence: Synthetic oligonucleotide
cacugcgguucugggacag

SEQ ID NO: 1461247 - RNA, 19 nt, Artificial Sequence
  Description of Artificial Sequence: Synthetic oligonucleotide
cuguaacugauggagguau

SEQ ID NO: 1461248 - RNA, 19 nt, Artificial Sequence
  Description of Artificial Sequence: Synthetic oligonucleotide
aguccuguuugggguugag

SEQ ID NO: 1461249 - RNA, 19 nt, Artificial Sequence
  Description of Artificial Sequence: Synthetic oligonucleotide
acccguccuuucuuguuuu

SEQ ID NO: 1461250 - RNA, 19 nt, Artificial Sequence
  Description of Artificial Sequence: Synthetic oligonucleotide
gcaaacggccuacagcugu

SEQ ID NO: 1461251 - RNA, 19 nt, Artificial Sequence
  Description of Artificial Sequence: Synthetic oligonucleotide
gacuuggucugggcugaac

SEQ ID NO: 1461252 - RNA, 19 nt, Artificial Sequence
  Description of Artificial Sequence: Synthetic oligonucleotide
uccauccugccguguuauc

SEQ ID NO: 1461253 - RNA, 19 nt, Artificial Sequence
  Description of Artificial Sequence: Synthetic oligonucleotide
ggcgucuuuuguacuguug

SEQ ID NO: 1461254 - RNA, 19 nt, Artificial Sequence
  Description of Artificial Sequence: Synthetic oligonucleotide
gguguccaacaucccaaga

SEQ ID NO: 1461255 - RNA, 19 nt, Artificial Sequence
  Description of Artificial Sequence: Synthetic oligonucleotide
gugcauuccuugcuuugua

SEQ ID NO: 1461256 - RNA, 19 nt, Artificial Sequence
  Description of Artificial Sequence: Synthetic oligonucleotide
gcuggucguuguuuccagc

SEQ ID NO: 1461257 - RNA, 19 nt, Artificial Sequence
  Description of Artificial Sequence: Synthetic oligonucleotide
cugcgaagaggcuacccgu

SEQ ID NO: 1461258 - RNA, 19 nt, Artificial Sequence
  Description of Artificial Sequence: Synthetic oligonucleotide
cccauaaauuggguccugc

SEQ ID NO: 1461259 - RNA, 19 nt, Artificial Sequence
  Description of Artificial Sequence: Synthetic oligonucleotide
uggcgucuuuuguacuguu

SEQ ID NO: 1461260 - RNA, 19 nt, Artificial Sequence
  Description of Artificial Sequence: Synthetic oligonucleotide
gguucagaaggcuggucgu

SEQ ID NO: 1461261 - RNA, 19 nt, Artificial Sequence
  Description of Artificial Sequence: Synthetic oligonucleotide
ugcugaaagcagggccgcu

SEQ ID NO: 1461262 - RNA, 19 nt, Artificial Sequence
  Description of Artificial Sequence: Synthetic oligonucleotide
guuuccauccugccguguu

SEQ ID NO: 1461263 - RNA, 19 nt, Artificial Sequence
  Description of Artificial Sequence: Synthetic oligonucleotide
uaguccuguuugggguuga

SEQ ID NO: 1461264 - RNA, 19 nt, Artificial Sequence
  Description of Artificial Sequence: Synthetic oligonucleotide
aacccgcaaacggccuaca

SEQ ID NO: 1461265 - RNA, 19 nt, Artificial Sequence
  Description of Artificial Sequence: Synthetic oligonucleotide
ccauacuguuuagaacuug

SEQ ID NO: 1461266 - RNA, 19 nt, Artificial Sequence
  Description of Artificial Sequence: Synthetic oligonucleotide
ccuugguguuuccauccug

SEQ ID NO: 1461267 - RNA, 19 nt, Artificial Sequence
  Description of Artificial Sequence: Synthetic oligonucleotide
ggauccuuuguaagaugga

SEQ ID NO: 1461268 - RNA, 19 nt, Artificial Sequence
  Description of Artificial Sequence: Synthetic oligonucleotide
aggcuacccguccuuucuu

SEQ ID NO: 1461269 - RNA, 19 nt, Artificial Sequence
  Description of Artificial Sequence: Synthetic oligonucleotide
cagaggcggagccguccag

SEQ ID NO: 1461270 - RNA, 19 nt, Artificial Sequence
  Description of Artificial Sequence: Synthetic oligonucleotide
guacuguuguaaacauaua

SEQ ID NO: 1461271 - RNA, 19 nt, Artificial Sequence
  Description of Artificial Sequence: Synthetic oligonucleotide
gcucauaguuaaagguguc

SEQ ID NO: 1461272 - RNA, 19 nt, Artificial Sequence
  Description of Artificial Sequence: Synthetic oligonucleotide
cacuuguaacacgcccauc

SEQ ID NO: 1461273 - RNA, 19 nt, Artificial Sequence
  Description of Artificial Sequence: Synthetic oligonucleotide
gccgagaacuuccucggua

SEQ ID NO: 1461274 - RNA, 19 nt, Artificial Sequence
  Description of Artificial Sequence: Synthetic oligonucleotide
cuuguaacacgcccaucuu

SEQ ID NO: 1461275 - RNA, 19 nt, Artificial Sequence
  Description of Artificial Sequence: Synthetic oligonucleotide
gcuuggauuuguugugggu

SEQ ID NO: 1461276 - RNA, 19 nt, Artificial Sequence
  Description of Artificial Sequence: Synthetic oligonucleotide
caggauuuucacugagcuu

SEQ ID NO: 1461277 - RNA, 19 nt, Artificial Sequence
  Description of Artificial Sequence: Synthetic oligonucleotide
ggugcauuccuugcuuugu

SEQ ID NO: 1461278 - RNA, 19 nt, Artificial Sequence
  Description of Artificial Sequence: Synthetic oligonucleotide
ccguccaggaggccccucc

SEQ ID NO: 1461279 - RNA, 19 nt, Artificial Sequence
  Description of Artificial Sequence: Synthetic oligonucleotide
acacccucccuugggucaa

SEQ ID NO: 1461280 - RNA, 19 nt, Artificial Sequence
  Description of Artificial Sequence: Synthetic oligonucleotide
agcugcccaaugacuacuu

SEQ ID NO: 1461281 - RNA, 19 nt, Artificial Sequence
  Description of Artificial Sequence: Synthetic oligonucleotide
guaacacgcccaucuuguu

SEQ ID NO: 1461282 - RNA, 19 nt, Artificial Sequence
  Description of Artificial Sequence: Synthetic oligonucleotide
ggaacccgcaaacggccua

SEQ ID NO: 1461283 - RNA, 19 nt, Artificial Sequence
  Description of Artificial Sequence: Synthetic oligonucleotide
gucucuaccauggcaucuu

SEQ ID NO: 1461284 - RNA, 19 nt, Artificial Sequence
  Description of Artificial Sequence: Synthetic oligonucleotide
ugacuuggucugggcugaa

SEQ ID NO: 1461285 - RNA, 19 nt, Artificial Sequence
  Description of Artificial Sequence: Synthetic oligonucleotide
caacacccuucagugggaa

SEQ ID NO: 1461286 - RNA, 19 nt, Artificial Sequence
  Description of Artificial Sequence: Synthetic oligonucleotide
gauacgcagugaacuucau

SEQ ID NO: 1461287 - RNA, 19 nt, Artificial Sequence
  Description of Artificial Sequence: Synthetic oligonucleotide
caugaacauccccuuucuu

SEQ ID NO: 1461288 - RNA, 19 nt, Artificial Sequence
  Description of Artificial Sequence: Synthetic oligonucleotide
ggaaggcgccaugaacauc

SEQ ID NO: 1461289 - RNA, 19 nt, Artificial Sequence
  Description of Artificial Sequence: Synthetic oligonucleotide
gccgauacuuuugugugau

SEQ ID NO: 1461290 - RNA, 19 nt, Artificial Sequence
  Description of Artificial Sequence: Synthetic oligonucleotide
gaaagccuccuugguguuu

SEQ ID NO: 1461291 - RNA, 19 nt, Artificial Sequence
  Description of Artificial Sequence: Synthetic oligonucleotide
guucagaaggcuggucguu

SEQ ID NO: 1461292 - RNA, 19 nt, Artificial Sequence
  Description of Artificial Sequence: Synthetic oligonucleotide
ccguguuaucucuuguagu

SEQ ID NO: 1461293 - RNA, 19 nt, Artificial Sequence
  Description of Artificial Sequence: Synthetic oligonucleotide
gggucgagagcaggcucug

SEQ ID NO: 1461294 - RNA, 19 nt, Artificial Sequence
  Description of Artificial Sequence: Synthetic oligonucleotide
ccgauacuuuugugugauc

SEQ ID NO: 1461295 - RNA, 19 nt, Artificial Sequence
  Description of Artificial Sequence: Synthetic oligonucleotide
gccagccgagaacuuccuc

SEQ ID NO: 1461296 - RNA, 19 nt, Artificial Sequence
  Description of Artificial Sequence: Synthetic oligonucleotide
cuccaacaauggaaaccau

SEQ ID NO: 1461297 - RNA, 19 nt, Artificial Sequence
  Description of Artificial Sequence: Synthetic oligonucleotide
cugauaugauggugacauu

SEQ ID NO: 1461298 - RNA, 19 nt, Artificial Sequence
  Description of Artificial Sequence: Synthetic oligonucleotide
ccauccugccguguuaucu

SEQ ID NO: 1461299 - RNA, 19 nt, Artificial Sequence
  Description of Artificial Sequence: Synthetic oligonucleotide
agugaccaauggagaucuu

SEQ ID NO: 1461300 - RNA, 19 nt, Artificial Sequence
  Description of Artificial Sequence: Synthetic oligonucleotide
ggacgggagggcaaugaau

SEQ ID NO: 1461301 - RNA, 19 nt, Artificial Sequence
  Description of Artificial Sequence: Synthetic oligonucleotide
cccaucuuguuuggcccuc

SEQ ID NO: 1461302 - RNA, 19 nt, Artificial Sequence
  Description of Artificial Sequence: Synthetic oligonucleotide
ccauaugauccauggcuuu

SEQ ID NO: 1461303 - RNA, 19 nt, Artificial Sequence
  Description of Artificial Sequence: Synthetic oligonucleotide
gcccuggauuucuccaagu

SEQ ID NO: 1461304 - RNA, 19 nt, Artificial Sequence
  Description of Artificial Sequence: Synthetic oligonucleotide
cgacacaaguuccuccaua

SEQ ID NO: 1461305 - RNA, 19 nt, Artificial Sequence
  Description of Artificial Sequence: Synthetic oligonucleotide
gcccaaugacuacuucaau

SEQ ID NO: 1461306 - RNA, 19 nt, Artificial Sequence
  Description of Artificial Sequence: Synthetic oligonucleotide
agccguccaggaggccccu

SEQ ID NO: 1461307 - RNA, 19 nt, Artificial Sequence
  Description of Artificial Sequence: Synthetic oligonucleotide
cgagagcaggcucugaguu

SEQ ID NO: 1461308 - RNA, 19 nt, Artificial Sequence
  Description of Artificial Sequence: Synthetic oligonucleotide
gccauacuguuuagaacuu

SEQ ID NO: 1461309 - RNA, 19 nt, Artificial Sequence
  Description of Artificial Sequence: Synthetic oligonucleotide
gcgacacaaguuccuccau

SEQ ID NO: 1461310 - RNA, 19 nt, Artificial Sequence
  Description of Artificial Sequence: Synthetic oligonucleotide
ccacugcgguucugggaca

SEQ ID NO: 1461311 - RNA, 19 nt, Artificial Sequence
  Description of Artificial Sequence: Synthetic oligonucleotide
ccagcaagguuugcucaua

SEQ ID NO: 1461312 - RNA, 19 nt, Artificial Sequence
  Description of Artificial Sequence: Synthetic oligonucleotide
gggaacccgcaaacggccu

SEQ ID NO: 1461313 - RNA, 19 nt, Artificial Sequence
  Description of Artificial Sequence: Synthetic oligonucleotide
cccuuuggacugauaugau

SEQ ID NO: 1461314 - RNA, 19 nt, Artificial Sequence
  Description of Artificial Sequence: Synthetic oligonucleotide
ccgaagcccucagguuaca

SEQ ID NO: 1461315 - RNA, 19 nt, Artificial Sequence
  Description of Artificial Sequence: Synthetic oligonucleotide
gccguccaggaggccccuc

SEQ ID NO: 1461316 - RNA, 19 nt, Artificial Sequence
  Description of Artificial Sequence: Synthetic oligonucleotide
cggagccguccaggaggcc

SEQ ID NO: 1461317 - RNA, 19 nt, Artificial Sequence
  Description of Artificial Sequence: Synthetic oligonucleotide
aauguuaacagguuggugg

SEQ ID NO: 1461318 - RNA, 19 nt, Artificial Sequence
  Description of Artificial Sequence: Synthetic oligonucleotide
ugugauuugaugaauaucc

SEQ ID NO: 1461319 - RNA, 19 nt, Artificial Sequence
  Description of Artificial Sequence: Synthetic oligonucleotide
uggagaauaagaaagaagu

SEQ ID NO: 1461320 - RNA, 19 nt, Artificial Sequence
  Description of Artificial Sequence: Synthetic oligonucleotide
agccauuucaccuuaagac

SEQ ID NO: 1461321 - RNA, 19 nt, Artificial Sequence
  Description of Artificial Sequence: Synthetic oligonucleotide
caaguggagaauaagaaag

SEQ ID NO: 1461322 - RNA, 19 nt, Artificial Sequence
  Description of Artificial Sequence: Synthetic oligonucleotide
ugauuuuacagccauuuca

SEQ ID NO: 1461323 - RNA, 19 nt, Artificial Sequence
  Description of Artificial Sequence: Synthetic oligonucleotide
aaaacaguguaaaugauga

SEQ ID NO: 1461324 - RNA, 19 nt, Artificial Sequence
  Description of Artificial Sequence: Synthetic oligonucleotide
aaaugaugauuacaacagg

SEQ ID NO: 1461325 - RNA, 19 nt, Artificial Sequence
  Description of Artificial Sequence: Synthetic oligonucleotide
auaaagagaaacccacuac

SEQ ID NO: 1461326 - RNA, 19 nt, Artificial Sequence
  Description of Artificial Sequence: Synthetic oligonucleotide
uguccuugcacaaacuucc

SEQ ID NO: 1461327 - RNA, 19 nt, Artificial Sequence
  Description of Artificial Sequence: Synthetic oligonucleotide
aaaagguguuugaagaaac

SEQ ID NO: 1461328 - RNA, 19 nt, Artificial Sequence
  Description of Artificial Sequence: Synthetic oligonucleotide
uuacgcaguaauuaugucc

SEQ ID NO: 1461329 - RNA, 19 nt, Artificial Sequence
  Description of Artificial Sequence: Synthetic oligonucleotide
ugugcuuuggacacaaucu

SEQ ID NO: 1461330 - RNA, 19 nt, Artificial Sequence
  Description of Artificial Sequence: Synthetic oligonucleotide
acauugaagagucuuaacu

SEQ ID NO: 1461331 - RNA, 19 nt, Artificial Sequence
  Description of Artificial Sequence: Synthetic oligonucleotide
augacugucagccaggacu

SEQ ID NO: 1461332 - RNA, 19 nt, Artificial Sequence
  Description of Artificial Sequence: Synthetic oligonucleotide
ucuaggacagcuacaagca

SEQ ID NO: 1461333 - RNA, 19 nt, Artificial Sequence
  Description of Artificial Sequence: Synthetic oligonucleotide
uuuugcagaggauaggaga

SEQ ID NO: 1461334 - RNA, 19 nt, Artificial Sequence
  Description of Artificial Sequence: Synthetic oligonucleotide
aggauugugcuuuggacac

SEQ ID NO: 1461335 - RNA, 19 nt, Artificial Sequence
  Description of Artificial Sequence: Synthetic oligonucleotide
uugaauuuaucuugcaaac

SEQ ID NO: 1461336 - RNA, 19 nt, Artificial Sequence
  Description of Artificial Sequence: Synthetic oligonucleotide
cauugaagagucuuaacug

SEQ ID NO: 1461337 - RNA, 19 nt, Artificial Sequence
  Description of Artificial Sequence: Synthetic oligonucleotide
agaggauugugcuuuggac

SEQ ID NO: 1461338 - RNA, 19 nt, Artificial Sequence
  Description of Artificial Sequence: Synthetic oligonucleotide
guaacaucuguauugcacc

SEQ ID NO: 1461339 - RNA, 19 nt, Artificial Sequence
  Description of Artificial Sequence: Synthetic oligonucleotide
aauaagaaagaagucuccu

SEQ ID NO: 1461340 - RNA, 19 nt, Artificial Sequence
  Description of Artificial Sequence: Synthetic oligonucleotide
uuuaaugucggaguucuca

SEQ ID NO: 1461341 - RNA, 19 nt, Artificial Sequence
  Description of Artificial Sequence: Synthetic oligonucleotide
auuuaucuugcaaacacuc

SEQ ID NO: 1461342 - RNA, 19 nt, Artificial Sequence
  Description of Artificial Sequence: Synthetic oligonucleotide
ugaugauuacaacaggauc

SEQ ID NO: 1461343 - RNA, 19 nt, Artificial Sequence
  Description of Artificial Sequence: Synthetic oligonucleotide
uaacugucugcguugagag

SEQ ID NO: 1461344 - RNA, 19 nt, Artificial Sequence
  Description of Artificial Sequence: Synthetic oligonucleotide
auugaagagucuuaacugu

SEQ ID NO: 1461345 - RNA, 19 nt, Artificial Sequence
  Description of Artificial Sequence: Synthetic oligonucleotide
ugauuugaugaauauccug

SEQ ID NO: 1461346 - RNA, 19 nt, Artificial Sequence
  Description of Artificial Sequence: Synthetic oligonucleotide
accuuaggagcauaaagag

SEQ ID NO: 1461347 - RNA, 19 nt, Artificial Sequence
  Description of Artificial Sequence: Synthetic oligonucleotide
uuaaugucggaguucucag

SEQ ID NO: 1461348 - RNA, 19 nt, Artificial Sequence
  Description of Artificial Sequence: Synthetic oligonucleotide
uuaacugugcuguauucac

SEQ ID NO: 1461349 - RNA, 19 nt, Artificial Sequence
  Description of Artificial Sequence: Synthetic oligonucleotide
aagcauggcaaucccauca

SEQ ID NO: 1461350 - RNA, 19 nt, Artificial Sequence
  Description of Artificial Sequence: Synthetic oligonucleotide
cuaccuagaaccacugggg

SEQ ID NO: 1461351 - RNA, 19 nt, Artificial Sequence
  Description of Artificial Sequence: Synthetic oligonucleotide
uaggagauguucaggcugg

SEQ ID NO: 1461352 - RNA, 19 nt, Artificial Sequence
  Description of Artificial Sequence: Synthetic oligonucleotide
auguuaacagguugguggg

SEQ ID NO: 1461353 - RNA, 19 nt, Artificial Sequence
  Description of Artificial Sequence: Synthetic oligonucleotide
aauucuaggacagcuacaa

SEQ ID NO: 1461354 - RNA, 19 nt, Artificial Sequence
  Description of Artificial Sequence: Synthetic oligonucleotide
agaaggccaauucuaggac

SEQ ID NO: 1461355 - RNA, 19 nt, Artificial Sequence
  Description of Artificial Sequence: Synthetic oligonucleotide
cuugcuguagaaaggcccg

SEQ ID NO: 1461356 - RNA, 19 nt, Artificial Sequence
  Description of Artificial Sequence: Synthetic oligonucleotide
aaucccaucaggcccuaag

SEQ ID NO: 1461357 - RNA, 19 nt, Artificial Sequence
  Description of Artificial Sequence: Synthetic oligonucleotide
agaugcauauccugguggg

SEQ ID NO: 1461358 - RNA, 19 nt, Artificial Sequence
  Description of Artificial Sequence: Synthetic oligonucleotide
uguaaaugaugauuacaac

SEQ ID NO: 1461359 - RNA, 19 nt, Artificial Sequence
  Description of Artificial Sequence: Synthetic oligonucleotide
aaagaagucuccugcuaca

SEQ ID NO: 1461360 - RNA, 19 nt, Artificial Sequence
  Description of Artificial Sequence: Synthetic oligonucleotide
uuuaucuugcaaacacucu

SEQ ID NO: 1461361 - RNA, 19 nt, Artificial Sequence
  Description of Artificial Sequence: Synthetic oligonucleotide
aaugcaggcucuuuccagu

SEQ ID NO: 1461362 - RNA, 19 nt, Artificial Sequence
  Description of Artificial Sequence: Synthetic oligonucleotide
ugaugaauauccuguguga

SEQ ID NO: 1461363 - RNA, 19 nt, Artificial Sequence
  Description of Artificial Sequence: Synthetic oligonucleotide
uugaagagucuuaacugug

SEQ ID NO: 1461364 - RNA, 19 nt, Artificial Sequence
  Description of Artificial Sequence: Synthetic oligonucleotide
ugagcucuaguuuugcaga

SEQ ID NO: 1461365 - RNA, 19 nt, Artificial Sequence
  Description of Artificial Sequence: Synthetic oligonucleotide
agcaauugucaacaacuuc

SEQ ID NO: 1461366 - RNA, 19 nt, Artificial Sequence
  Description of Artificial Sequence: Synthetic oligonucleotide
ugguucaaagcuauucucu

SEQ ID NO: 1461367 - RNA, 19 nt, Artificial Sequence
  Description of Artificial Sequence: Synthetic oligonucleotide
ggacacaaucuucagaggg

SEQ ID NO: 1461368 - RNA, 19 nt, Artificial Sequence
  Description of Artificial Sequence: Synthetic oligonucleotide
auuacaacaggaucuuggu

SEQ ID NO: 1461369 - RNA, 19 nt, Artificial Sequence
  Description of Artificial Sequence: Synthetic oligonucleotide
gguacaaugggguaaugcc

SEQ ID NO: 1461370 - RNA, 19 nt, Artificial Sequence
  Description of Artificial Sequence: Synthetic oligonucleotide
ucaccuuaagacaauguua

SEQ ID NO: 1461371 - RNA, 19 nt, Artificial Sequence
  Description of Artificial Sequence: Synthetic oligonucleotide
guuagggugaaaguccugg

SEQ ID NO: 1461372 - RNA, 19 nt, Artificial Sequence
  Description of Artificial Sequence: Synthetic oligonucleotide
aagggaguguuggacaagg

SEQ ID NO: 1461373 - RNA, 19 nt, Artificial Sequence
  Description of Artificial Sequence: Synthetic oligonucleotide
uacccaguuguucuuuggg

SEQ ID NO: 1461374 - RNA, 19 nt, Artificial Sequence
  Description of Artificial Sequence: Synthetic oligonucleotide
aagcuauucucugcuacgg

SEQ ID NO: 1461375 - RNA, 19 nt, Artificial Sequence
  Description of Artificial Sequence: Synthetic oligonucleotide
agacaauguuaacagguug

SEQ ID NO: 1461376 - RNA, 19 nt, Artificial Sequence
  Description of Artificial Sequence: Synthetic oligonucleotide
ggagaaaacaguguaaaug

SEQ ID NO: 1461377 - RNA, 19 nt, Artificial Sequence
  Description of Artificial Sequence: Synthetic oligonucleotide
aagaguccugcuuggagcu

SEQ ID NO: 1461378 - RNA, 19 nt, Artificial Sequence
  Description of Artificial Sequence: Synthetic oligonucleotide
gacacaaucuucagagggg

SEQ ID NO: 1461379 - RNA, 19 nt, Artificial Sequence
  Description of Artificial Sequence: Synthetic oligonucleotide
gaggauugugcuuuggaca

SEQ ID NO: 1461380 - RNA, 19 nt, Artificial Sequence
  Description of Artificial Sequence: Synthetic oligonucleotide
aagaggauugugcuuugga

SEQ ID NO: 1461381 - RNA, 19 nt, Artificial Sequence
  Description of Artificial Sequence: Synthetic oligonucleotide
aguuccccuagccugcuac

SEQ ID NO: 1461382 - RNA, 19 nt, Artificial Sequence
  Description of Artificial Sequence: Synthetic oligonucleotide
ugucucuaagaaugcaggc

SEQ ID NO: 1461383 - RNA, 19 nt, Artificial Sequence
  Description of Artificial Sequence: Synthetic oligonucleotide
uaguuacgcaguaauuaug

SEQ ID NO: 1461384 - RNA, 19 nt, Artificial Sequence
  Description of Artificial Sequence: Synthetic oligonucleotide
agugacaggagaugcauau

SEQ ID NO: 1461385 - RNA, 19 nt, Artificial Sequence
  Description of Artificial Sequence: Synthetic oligonucleotide
ugaauuuaucuugcaaaca

SEQ ID NO: 1461386 - RNA, 19 nt, Artificial Sequence
  Description of Artificial Sequence: Synthetic oligonucleotide
cugagcucuaguuuugcag

SEQ ID NO: 1461387 - RNA, 19 nt, Artificial Sequence
  Description of Artificial Sequence: Synthetic oligonucleotide
uaaugucggaguucucagg

SEQ ID NO: 1461388 - RNA, 19 nt, Artificial Sequence
  Description of Artificial Sequence: Synthetic oligonucleotide
uacaaugggguaaugccau

SEQ ID NO: 1461389 - RNA, 19 nt, Artificial Sequence
  Description of Artificial Sequence: Synthetic oligonucleotide
gauuugaugaauauccugu

SEQ ID NO: 1461390 - RNA, 19 nt, Artificial Sequence
  Description of Artificial Sequence: Synthetic oligonucleotide
aaguucuacccaguuguuc

SEQ ID NO: 1461391 - RNA, 19 nt, Artificial Sequence
  Description of Artificial Sequence: Synthetic oligonucleotide
aaugggguaaugccauagu

SEQ ID NO: 1461392 - RNA, 19 nt, Artificial Sequence
  Description of Artificial Sequence: Synthetic oligonucleotide
gaagaaacccagcacccac

SEQ ID NO: 1461393 - RNA, 19 nt, Artificial Sequence
  Description of Artificial Sequence: Synthetic oligonucleotide
cuaggcuguuccaagaguc

SEQ ID NO: 1461394 - RNA, 19 nt, Artificial Sequence
  Description of Artificial Sequence: Synthetic oligonucleotide
gagaguuagggugaaaguc

SEQ ID NO: 1461395 - RNA, 19 nt, Artificial Sequence
  Description of Artificial Sequence: Synthetic oligonucleotide
agcuauucucugcuacggc

SEQ ID NO: 1461396 - RNA, 19 nt, Artificial Sequence
  Description of Artificial Sequence: Synthetic oligonucleotide
ggauaggagauguucaggc

SEQ ID NO: 1461397 - RNA, 19 nt, Artificial Sequence
  Description of Artificial Sequence: Synthetic oligonucleotide
cugguauggggcaugcagg

SEQ ID NO: 1461398 - RNA, 19 nt, Artificial Sequence
  Description of Artificial Sequence: Synthetic oligonucleotide
guagacacccugcucaggc

SEQ ID NO: 1461399 - RNA, 19 nt, Artificial Sequence
  Description of Artificial Sequence: Synthetic oligonucleotide
gacaugccaugcuucaaag

SEQ ID NO: 1461400 - RNA, 19 nt, Artificial Sequence
  Description of Artificial Sequence: Synthetic oligonucleotide
ugucggaguucucaggaga

SEQ ID NO: 1461401 - RNA, 19 nt, Artificial Sequence
  Description of Artificial Sequence: Synthetic oligonucleotide
uuuguccuugcacaaacuu

SEQ ID NO: 1461402 - RNA, 19 nt, Artificial Sequence
  Description of Artificial Sequence: Synthetic oligonucleotide
cuaagcaauugucaacaac

SEQ ID NO: 1461403 - RNA, 19 nt, Artificial Sequence
  Description of Artificial Sequence: Synthetic oligonucleotide
caucaaguagacacccugc

SEQ ID NO: 1461404 - RNA, 19 nt, Artificial Sequence
  Description of Artificial Sequence: Synthetic oligonucleotide
aaggccaauucuaggacag

SEQ ID NO: 1461405 - RNA, 19 nt, Artificial Sequence
  Description of Artificial Sequence: Synthetic oligonucleotide
guuugaagaaacccagcac

SEQ ID NO: 1461406 - RNA, 19 nt, Artificial Sequence
  Description of Artificial Sequence: Synthetic oligonucleotide
ucagaucugguauggggca

SEQ ID NO: 1461407 - RNA, 19 nt, Artificial Sequence
  Description of Artificial Sequence: Synthetic oligonucleotide
aauauccugugugaugggu

SEQ ID NO: 1461408 - RNA, 19 nt, Artificial Sequence
  Description of Artificial Sequence: Synthetic oligonucleotide
uucaaagggaguguuggac

SEQ ID NO: 1461409 - RNA, 19 nt, Artificial Sequence
  Description of Artificial Sequence: Synthetic oligonucleotide
gaugcuaggagcagcacca

SEQ ID NO: 1461410 - RNA, 19 nt, Artificial Sequence
  Description of Artificial Sequence: Synthetic oligonucleotide
gauccuugcuguagaaagg

SEQ ID NO: 1461411 - RNA, 19 nt, Artificial Sequence
  Description of Artificial Sequence: Synthetic oligonucleotide
uuguccuugcacaaacuuc

SEQ ID NO: 1461412 - RNA, 19 nt, Artificial Sequence
  Description of Artificial Sequence: Synthetic oligonucleotide
aguuacgcaguaauuaugu

SEQ ID NO: 1461413 - RNA, 19 nt, Artificial Sequence
  Description of Artificial Sequence: Synthetic oligonucleotide
aucaaguagacacccugcu

SEQ ID NO: 1461414 - RNA, 19 nt, Artificial Sequence
  Description of Artificial Sequence: Synthetic oligonucleotide
gacuaggcuguuccaagag

SEQ ID NO: 1461415 - RNA, 19 nt, Artificial Sequence
  Description of Artificial Sequence: Synthetic oligonucleotide
uugggaguuguucccagac

SEQ ID NO: 1461416 - RNA, 19 nt, Artificial Sequence
  Description of Artificial Sequence: Synthetic oligonucleotide
caccuuaagacaauguuaa

SEQ ID NO: 1461417 - RNA, 19 nt, Artificial Sequence
  Description of Artificial Sequence: Synthetic oligonucleotide
uguauugcacccagcacuu

SEQ ID NO: 1461418 - RNA, 19 nt, Artificial Sequence
  Description of Artificial Sequence: Synthetic oligonucleotide
acaacaggaucuugguuca

SEQ ID NO: 1461419 - RNA, 19 nt, Artificial Sequence
  Description of Artificial Sequence: Synthetic oligonucleotide
uagggugaaaguccuggac

SEQ ID NO: 1461420 - RNA, 19 nt, Artificial Sequence
  Description of Artificial Sequence: Synthetic oligonucleotide
accuuaagacaauguuaac

SEQ ID NO: 1461421 - RNA, 19 nt, Artificial Sequence
  Description of Artificial Sequence: Synthetic oligonucleotide
ucuuaacugugcuguauuc

SEQ ID NO: 1461422 - RNA, 19 nt, Artificial Sequence
  Description of Artificial Sequence: Synthetic oligonucleotide
aaggcccggauccagguaa

SEQ ID NO: 1461423 - RNA, 19 nt, Artificial Sequence
  Description of Artificial Sequence: Synthetic oligonucleotide
gcaauugucaacaacuuca

SEQ ID NO: 1461424 - RNA, 19 nt, Artificial Sequence
  Description of Artificial Sequence: Synthetic oligonucleotide
aaacaguguaaaugaugau

SEQ ID NO: 1461425 - RNA, 19 nt, Artificial Sequence
  Description of Artificial Sequence: Synthetic oligonucleotide
uacauugaagagucuuaac

SEQ ID NO: 1461426 - RNA, 19 nt, Artificial Sequence
  Description of Artificial Sequence: Synthetic oligonucleotide
gaauuugaagagggagggg

SEQ ID NO: 1461427 - RNA, 19 nt, Artificial Sequence
  Description of Artificial Sequence: Synthetic oligonucleotide
uuguucccagacaaaggga

SEQ ID NO: 1461428 - RNA, 19 nt, Artificial Sequence
  Description of Artificial Sequence: Synthetic oligonucleotide
gugaaaguccuggacaggc

SEQ ID NO: 1461429 - RNA, 19 nt, Artificial Sequence
  Description of Artificial Sequence: Synthetic oligonucleotide
uugcacccagcacuuuugg

SEQ ID NO: 1461430 - RNA, 19 nt, Artificial Sequence
  Description of Artificial Sequence: Synthetic oligonucleotide
acaucccuaagcaauuguc

SEQ ID NO: 1461431 - RNA, 19 nt, Artificial Sequence
  Description of Artificial Sequence: Synthetic oligonucleotide
gaguguuggacaagggcag

SEQ ID NO: 1461432 - RNA, 19 nt, Artificial Sequence
  Description of Artificial Sequence: Synthetic oligonucleotide
ccugcuacauugaagaguc

SEQ ID NO: 1461433 - RNA, 19 nt, Artificial Sequence
  Description of Artificial Sequence: Synthetic oligonucleotide
uggagucagaucugguaug

SEQ ID NO: 1461434 - RNA, 19 nt, Artificial Sequence
  Description of Artificial Sequence: Synthetic oligonucleotide
guauggggcaugcagggac

SEQ ID NO: 1461435 - RNA, 19 nt, Artificial Sequence
  Description of Artificial Sequence: Synthetic oligonucleotide
agacaaagggacugcccag

SEQ ID NO: 1461436 - RNA, 19 nt, Artificial Sequence
  Description of Artificial Sequence: Synthetic oligonucleotide
gagcucuaguuuugcagag

SEQ ID NO: 1461437 - RNA, 19 nt, Artificial Sequence
  Description of Artificial Sequence: Synthetic oligonucleotide
cucugcuacggccagcaag

SEQ ID NO: 1461438 - RNA, 19 nt, Artificial Sequence
  Description of Artificial Sequence: Synthetic oligonucleotide
uccugcuacauugaagagu

SEQ ID NO: 1461439 - RNA, 19 nt, Artificial Sequence
  Description of Artificial Sequence: Synthetic oligonucleotide
aagguuuaggguggggcug

SEQ ID NO: 1461440 - RNA, 19 nt, Artificial Sequence
  Description of Artificial Sequence: Synthetic oligonucleotide
uugcacaaacuuccuuuug

SEQ ID NO: 1461441 - RNA, 19 nt, Artificial Sequence
  Description of Artificial Sequence: Synthetic oligonucleotide
gaugcauauccuggugggg

SEQ ID NO: 1461442 - RNA, 19 nt, Artificial Sequence
  Description of Artificial Sequence: Synthetic oligonucleotide
uuagggugaaaguccugga

SEQ ID NO: 1461443 - RNA, 19 nt, Artificial Sequence
  Description of Artificial Sequence: Synthetic oligonucleotide
ugacugucagccaggacua

SEQ ID NO: 1461444 - RNA, 19 nt, Artificial Sequence
  Description of Artificial Sequence: Synthetic oligonucleotide
accuagaaccacuggggug

SEQ ID NO: 1461445 - RNA, 19 nt, Artificial Sequence
  Description of Artificial Sequence: Synthetic oligonucleotide
ucuacccaguuguucuuug

SEQ ID NO: 1461446 - RNA, 19 nt, Artificial Sequence
  Description of Artificial Sequence: Synthetic oligonucleotide
caucccuaagcaauuguca

SEQ ID NO: 1461447 - RNA, 19 nt, Artificial Sequence
  Description of Artificial Sequence: Synthetic oligonucleotide
ucaacaacuucaaguucua

SEQ ID NO: 1461448 - RNA, 19 nt, Artificial Sequence
  Description of Artificial Sequence: Synthetic oligonucleotide
agcacuuuuggagucagau

SEQ ID NO: 1461449 - RNA, 19 nt, Artificial Sequence
  Description of Artificial Sequence: Synthetic oligonucleotide
ccuagaaccacuggggugg

SEQ ID NO: 1461450 - RNA, 19 nt, Artificial Sequence
  Description of Artificial Sequence: Synthetic oligonucleotide
cuacaagcauggcaauccc

SEQ ID NO: 1461451 - RNA, 19 nt, Artificial Sequence
  Description of Artificial Sequence: Synthetic oligonucleotide
aagacaauguuaacagguu

SEQ ID NO: 1461452 - RNA, 19 nt, Artificial Sequence
  Description of Artificial Sequence: Synthetic oligonucleotide
acaauguuaacagguuggu

SEQ ID NO: 1461453 - RNA, 19 nt, Artificial Sequence
  Description of Artificial Sequence: Synthetic oligonucleotide
cuacccaguuguucuuugg

SEQ ID NO: 1461454 - RNA, 19 nt, Artificial Sequence
  Description of Artificial Sequence: Synthetic oligonucleotide
gcuacaagcauggcaaucc

SEQ ID NO: 1461455 - RNA, 19 nt, Artificial Sequence
  Description of Artificial Sequence: Synthetic oligonucleotide
ugggaguuguucccagaca

SEQ ID NO: 1461456 - RNA, 19 nt, Artificial Sequence
  Description of Artificial Sequence: Synthetic oligonucleotide
acgcaguaauuaugucccc

SEQ ID NO: 1461457 - RNA, 19 nt, Artificial Sequence
  Description of Artificial Sequence: Synthetic oligonucleotide
ugaagaaacccagcaccca

SEQ ID NO: 1461458 - RNA, 19 nt, Artificial Sequence
  Description of Artificial Sequence: Synthetic oligonucleotide
gaagaggauugugcuuugg

SEQ ID NO: 1461459 - RNA, 19 nt, Artificial Sequence
  Description of Artificial Sequence: Synthetic oligonucleotide
caguguaaaugaugauuac

SEQ ID NO: 1461460 - RNA, 19 nt, Artificial Sequence
  Description of Artificial Sequence: Synthetic oligonucleotide
gaguccugcuuggagcugg

SEQ ID NO: 1461461 - RNA, 19 nt, Artificial Sequence
  Description of Artificial Sequence: Synthetic oligonucleotide
acccaguuguucuuuggga

SEQ ID NO: 1461462 - RNA, 19 nt, Artificial Sequence
  Description of Artificial Sequence: Synthetic oligonucleotide
caaugggguaaugccauag

SEQ ID NO: 1461463 - RNA, 19 nt, Artificial Sequence
  Description of Artificial Sequence: Synthetic oligonucleotide
cuguauugcacccagcacu

SEQ ID NO: 1461464 - RNA, 19 nt, Artificial Sequence
  Description of Artificial Sequence: Synthetic oligonucleotide
agcuacaagcauggcaauc

SEQ ID NO: 1461465 - RNA, 19 nt, Artificial Sequence
  Description of Artificial Sequence: Synthetic oligonucleotide
acguccaguccacaucaag

SEQ ID NO: 1461466 - RNA, 19 nt, Artificial Sequence
  Description of Artificial Sequence: Synthetic oligonucleotide
ggcaagggguuuaaugucg

SEQ ID NO: 1461467 - RNA, 19 nt, Artificial Sequence
  Description of Artificial Sequence: Synthetic oligonucleotide
gugaugugccuucuccacc

SEQ ID NO: 1461468 - RNA, 19 nt, Artificial Sequence
  Description of Artificial Sequence: Synthetic oligonucleotide
ggaugcuaggagcagcacc

SEQ ID NO: 1461469 - RNA, 19 nt, Artificial Sequence
  Description of Artificial Sequence: Synthetic oligonucleotide
ggaguguuggacaagggca

SEQ ID NO: 1461470 - RNA, 19 nt, Artificial Sequence
  Description of Artificial Sequence: Synthetic oligonucleotide
gaagagucuuaacugugcu

SEQ ID NO: 1461471 - RNA, 19 nt, Artificial Sequence
  Description of Artificial Sequence: Synthetic oligonucleotide
aaggauccuugcuguagaa

SEQ ID NO: 1461472 - RNA, 19 nt, Artificial Sequence
  Description of Artificial Sequence: Synthetic oligonucleotide
aggcaaguggagaauaaga

SEQ ID NO: 1461473 - RNA, 19 nt, Artificial Sequence
  Description of Artificial Sequence: Synthetic oligonucleotide
augucggaguucucaggag

SEQ ID NO: 1461474 - RNA, 19 nt, Artificial Sequence
  Description of Artificial Sequence: Synthetic oligonucleotide
cugugauuugaugaauauc

SEQ ID NO: 1461475 - RNA, 19 nt, Artificial Sequence
  Description of Artificial Sequence: Synthetic oligonucleotide
augcauauccuggugggga

SEQ ID NO: 1461476 - RNA, 19 nt, Artificial Sequence
  Description of Artificial Sequence: Synthetic oligonucleotide
ucugcguugagaggccaug

SEQ ID NO: 1461477 - RNA, 19 nt, Artificial Sequence
  Description of Artificial Sequence: Synthetic oligonucleotide
aagcaauugucaacaacuu

SEQ ID NO: 1461478 - RNA, 19 nt, Artificial Sequence
  Description of Artificial Sequence: Synthetic oligonucleotide
ccaccuuaggagcauaaag

SEQ ID NO: 1461479 - RNA, 19 nt, Artificial Sequence
  Description of Artificial Sequence: Synthetic oligonucleotide
caguaauuauguccccaug

SEQ ID NO: 1461480 - RNA, 19 nt, Artificial Sequence
  Description of Artificial Sequence: Synthetic oligonucleotide
ggagaacucaguaacaucu

SEQ ID NO: 1461481 - RNA, 19 nt, Artificial Sequence
  Description of Artificial Sequence: Synthetic oligonucleotide
agaagggaaggcaccacug

SEQ ID NO: 1461482 - RNA, 19 nt, Artificial Sequence
  Description of Artificial Sequence: Synthetic oligonucleotide
guuacgcaguaauuauguc

SEQ ID NO: 1461483 - RNA, 19 nt, Artificial Sequence
  Description of Artificial Sequence: Synthetic oligonucleotide
guaguuacgcaguaauuau

SEQ ID NO: 1461484 - RNA, 19 nt, Artificial Sequence
  Description of Artificial Sequence: Synthetic oligonucleotide
aggacaaggaagaaucuuu

SEQ ID NO: 1461485 - RNA, 19 nt, Artificial Sequence
  Description of Artificial Sequence: Synthetic oligonucleotide
gguaguuacgcaguaauua

SEQ ID NO: 1461486 - RNA, 19 nt, Artificial Sequence
  Description of Artificial Sequence: Synthetic oligonucleotide
acaagcaagcuggagcccu

SEQ ID NO: 1461487 - RNA, 19 nt, Artificial Sequence
  Description of Artificial Sequence: Synthetic oligonucleotide
aaguccgagcaggaauuug

SEQ ID NO: 1461488 - RNA, 19 nt, Artificial Sequence
  Description of Artificial Sequence: Synthetic oligonucleotide
aguccgagcaggaauuuga

SEQ ID NO: 1461489 - RNA, 19 nt, Artificial Sequence
  Description of Artificial Sequence: Synthetic oligonucleotide
cauauccugguggggagag

SEQ ID NO: 1461490 - RNA, 19 nt, Artificial Sequence
  Description of Artificial Sequence: Synthetic oligonucleotide
acggccagcaagguuuagg

SEQ ID NO: 1461491 - RNA, 19 nt, Artificial Sequence
  Description of Artificial Sequence: Synthetic oligonucleotide
agcucuaguuuugcagagg

SEQ ID NO: 1461492 - RNA, 19 nt, Artificial Sequence
  Description of Artificial Sequence: Synthetic oligonucleotide
gugggcuugucucuaagaa

SEQ ID NO: 1461493 - RNA, 19 nt, Artificial Sequence
  Description of Artificial Sequence: Synthetic oligonucleotide
cacuaccuagaaccacugg

SEQ ID NO: 1461494 - RNA, 19 nt, Artificial Sequence
  Description of Artificial Sequence: Synthetic oligonucleotide
ggucccaaguccgagcagg

SEQ ID NO: 1461495 - RNA, 19 nt, Artificial Sequence
  Description of Artificial Sequence: Synthetic oligonucleotide
gauugugcuuuggacacaa

SEQ ID NO: 1461496 - RNA, 19 nt, Artificial Sequence
  Description of Artificial Sequence: Synthetic oligonucleotide
cccaguuguucuuugggag

SEQ ID NO: 1461497 - RNA, 19 nt, Artificial Sequence
  Description of Artificial Sequence: Synthetic oligonucleotide
auugcacccagcacuuuug

SEQ ID NO: 1461498 - RNA, 19 nt, Artificial Sequence
  Description of Artificial Sequence: Synthetic oligonucleotide
ggugaugugccuucuccac

SEQ ID NO: 1461499 - RNA, 19 nt, Artificial Sequence
  Description of Artificial Sequence: Synthetic oligonucleotide
caggcaaguggagaauaag

SEQ ID NO: 1461500 - RNA, 19 nt, Artificial Sequence
  Description of Artificial Sequence: Synthetic oligonucleotide
ugcacccagcacuuuugga

SEQ ID NO: 1461501 - RNA, 19 nt, Artificial Sequence
  Description of Artificial Sequence: Synthetic oligonucleotide
ggagaugcauauccuggug

SEQ ID NO: 1461502 - RNA, 19 nt, Artificial Sequence
  Description of Artificial Sequence: Synthetic oligonucleotide
ggaaaagguguuugaagaa

SEQ ID NO: 1461503 - RNA, 19 nt, Artificial Sequence
  Description of Artificial Sequence: Synthetic oligonucleotide
uuccccuagccugcuacag

SEQ ID NO: 1461504 - RNA, 19 nt, Artificial Sequence
  Description of Artificial Sequence: Synthetic oligonucleotide
uuauguccccaugacuguc

SEQ ID NO: 1461505 - RNA, 19 nt, Artificial Sequence
  Description of Artificial Sequence: Synthetic oligonucleotide
gcucuaguuuugcagagga

SEQ ID NO: 1461506 - RNA, 19 nt, Artificial Sequence
  Description of Artificial Sequence: Synthetic oligonucleotide
aucaggcccuaagacaucu

SEQ ID NO: 1461507 - RNA, 19 nt, Artificial Sequence
  Description of Artificial Sequence: Synthetic oligonucleotide
acccacuaccuagaaccac

SEQ ID NO: 1461508 - RNA, 19 nt, Artificial Sequence
  Description of Artificial Sequence: Synthetic oligonucleotide
caauucuaggacagcuaca

SEQ ID NO: 1461509 - RNA, 19 nt, Artificial Sequence
  Description of Artificial Sequence: Synthetic oligonucleotide
gaugaauauccugugugau

SEQ ID NO: 1461510 - RNA, 19 nt, Artificial Sequence
  Description of Artificial Sequence: Synthetic oligonucleotide
gcaagguuuaggguggggc

SEQ ID NO: 1461511 - RNA, 19 nt, Artificial Sequence
  Description of Artificial Sequence: Synthetic oligonucleotide
cagaacaagcaagcuggag

SEQ ID NO: 1461512 - RNA, 19 nt, Artificial Sequence
  Description of Artificial Sequence: Synthetic oligonucleotide
cuacauugaagagucuuaa

SEQ ID NO: 1461513 - RNA, 19 nt, Artificial Sequence
  Description of Artificial Sequence: Synthetic oligonucleotide
agucuuaacugugcuguau

SEQ ID NO: 1461514 - RNA, 19 nt, Artificial Sequence
  Description of Artificial Sequence: Synthetic oligonucleotide
aguuggcuacagcucugug

SEQ ID NO: 1461515 - RNA, 19 nt, Artificial Sequence
  Description of Artificial Sequence: Synthetic oligonucleotide
acaucuuccaugagucagu

SEQ ID NO: 1461516 - RNA, 19 nt, Artificial Sequence
  Description of Artificial Sequence: Synthetic oligonucleotide
uagacacccugcucaggcu

SEQ ID NO: 1461517 - RNA, 19 nt, Artificial Sequence
  Description of Artificial Sequence: Synthetic oligonucleotide
ugcuacagcugagcucuag

SEQ ID NO: 1461518 - RNA, 19 nt, Artificial Sequence
  Description of Artificial Sequence: Synthetic oligonucleotide
gguaaugccauaguuggcu

SEQ ID NO: 1461519 - RNA, 19 nt, Artificial Sequence
  Description of Artificial Sequence: Synthetic oligonucleotide
aacccacuaccuagaacca

SEQ ID NO: 1461520 - RNA, 19 nt, Artificial Sequence
  Description of Artificial Sequence: Synthetic oligonucleotide
aggccaauucuaggacagc

SEQ ID NO: 1461521 - RNA, 19 nt, Artificial Sequence
  Description of Artificial Sequence: Synthetic oligonucleotide
auauccugguggggagagc

SEQ ID NO: 1461522 - RNA, 19 nt, Artificial Sequence
  Description of Artificial Sequence: Synthetic oligonucleotide
ucuaagaaugcaggcucuu

SEQ ID NO: 1461523 - RNA, 19 nt, Artificial Sequence
  Description of Artificial Sequence: Synthetic oligonucleotide
ggguacaaugggguaaugc

SEQ ID NO: 1461524 - RNA, 19 nt, Artificial Sequence
  Description of Artificial Sequence: Synthetic oligonucleotide
gcguugagaggccauggcc

SEQ ID NO: 1461525 - RNA, 19 nt, Artificial Sequence
  Description of Artificial Sequence: Synthetic oligonucleotide
aagucuccugcuacauuga

SEQ ID NO: 1461526 - RNA, 19 nt, Artificial Sequence
  Description of Artificial Sequence: Synthetic oligonucleotide
ggcaaguggagaauaagaa

SEQ ID NO: 1461527 - RNA, 19 nt, Artificial Sequence
  Description of Artificial Sequence: Synthetic oligonucleotide
ggaaccccaguaaugggug

SEQ ID NO: 1461528 - RNA, 19 nt, Artificial Sequence
  Description of Artificial Sequence: Synthetic oligonucleotide
accccaguaaugggugagg

SEQ ID NO: 1461529 - RNA, 19 nt, Artificial Sequence
  Description of Artificial Sequence: Synthetic oligonucleotide
agggagaaggccaauucua

SEQ ID NO: 1461530 - RNA, 19 nt, Artificial Sequence
  Description of Artificial Sequence: Synthetic oligonucleotide
uaguuggcuacagcucugu

SEQ ID NO: 1461531 - RNA, 19 nt, Artificial Sequence
  Description of Artificial Sequence: Synthetic oligonucleotide
aggaugcuaggagcagcac

SEQ ID NO: 1461532 - RNA, 19 nt, Artificial Sequence
  Description of Artificial Sequence: Synthetic oligonucleotide
caagcaagcuggagcccug

SEQ ID NO: 1461533 - RNA, 19 nt, Artificial Sequence
  Description of Artificial Sequence: Synthetic oligonucleotide
ccauuucaccuuaagacaa

SEQ ID NO: 1461534 - RNA, 19 nt, Artificial Sequence
  Description of Artificial Sequence: Synthetic oligonucleotide
gaaccccaguaauggguga

SEQ ID NO: 1461535 - RNA, 19 nt, Artificial Sequence
  Description of Artificial Sequence: Synthetic oligonucleotide
guuugggguacaauggggu

SEQ ID NO: 1461536 - RNA, 19 nt, Artificial Sequence
  Description of Artificial Sequence: Synthetic oligonucleotide
caucuuccaugagucaguc

SEQ ID NO: 1461537 - RNA, 19 nt, Artificial Sequence
  Description of Artificial Sequence: Synthetic oligonucleotide
gaaaggcccggauccaggu

SEQ ID NO: 1461538 - RNA, 19 nt, Artificial Sequence
  Description of Artificial Sequence: Synthetic oligonucleotide
agcaagguuuagggugggg

SEQ ID NO: 1461539 - RNA, 19 nt, Artificial Sequence
  Description of Artificial Sequence: Synthetic oligonucleotide
aucuuccaugagucaguca

SEQ ID NO: 1461540 - RNA, 19 nt, Artificial Sequence
  Description of Artificial Sequence: Synthetic oligonucleotide
ggugaaaguccuggacagg

SEQ ID NO: 1461541 - RNA, 19 nt, Artificial Sequence
  Description of Artificial Sequence: Synthetic oligonucleotide
caggucccaaguccgagca

SEQ ID NO: 1461542 - RNA, 19 nt, Artificial Sequence
  Description of Artificial Sequence: Synthetic oligonucleotide
ugcuacggccagcaagguu

SEQ ID NO: 1461543 - RNA, 19 nt, Artificial Sequence
  Description of Artificial Sequence: Synthetic oligonucleotide
guucucaggagaggaagaa

SEQ ID NO: 1461544 - RNA, 19 nt, Artificial Sequence
  Description of Artificial Sequence: Synthetic oligonucleotide
gaguuagggugaaaguccu

SEQ ID NO: 1461545 - RNA, 19 nt, Artificial Sequence
  Description of Artificial Sequence: Synthetic oligonucleotide
cugugugaugggugaugug

SEQ ID NO: 1461546 - RNA, 19 nt, Artificial Sequence
  Description of Artificial Sequence: Synthetic oligonucleotide
ccuuaggagcauaaagaga

SEQ ID NO: 1461547 - RNA, 19 nt, Artificial Sequence
  Description of Artificial Sequence: Synthetic oligonucleotide
guaaugggugagggagaag

SEQ ID NO: 1461548 - RNA, 19 nt, Artificial Sequence
  Description of Artificial Sequence: Synthetic oligonucleotide
gcacuuuuggagucagauc

SEQ ID NO: 1461549 - RNA, 19 nt, Artificial Sequence
  Description of Artificial Sequence: Synthetic oligonucleotide
aggucccaaguccgagcag

SEQ ID NO: 1461550 - RNA, 19 nt, Artificial Sequence
  Description of Artificial Sequence: Synthetic oligonucleotide
cuguauucacagugaaggu

SEQ ID NO: 1461551 - RNA, 19 nt, Artificial Sequence
  Description of Artificial Sequence: Synthetic oligonucleotide
cccuaagcaauugucaaca

SEQ ID NO: 1461552 - RNA, 19 nt, Artificial Sequence
  Description of Artificial Sequence: Synthetic oligonucleotide
acaaugggguaaugccaua

SEQ ID NO: 1461553 - RNA, 19 nt, Artificial Sequence
  Description of Artificial Sequence: Synthetic oligonucleotide
ccuggacaaaggauccuug

SEQ ID NO: 1461554 - RNA, 19 nt, Artificial Sequence
  Description of Artificial Sequence: Synthetic oligonucleotide
aguuagggugaaaguccug

SEQ ID NO: 1461555 - RNA, 19 nt, Artificial Sequence
  Description of Artificial Sequence: Synthetic oligonucleotide
gugauuugaugaauauccu

SEQ ID NO: 1461556 - RNA, 19 nt, Artificial Sequence
  Description of Artificial Sequence: Synthetic oligonucleotide
aggauccuugcuguagaaa

SEQ ID NO: 1461557 - RNA, 19 nt, Artificial Sequence
  Description of Artificial Sequence: Synthetic oligonucleotide
guagaaaggcccggaucca

SEQ ID NO: 1461558 - RNA, 19 nt, Artificial Sequence
  Description of Artificial Sequence: Synthetic oligonucleotide
gguaacugucugcguugag

SEQ ID NO: 1461559 - RNA, 19 nt, Artificial Sequence
  Description of Artificial Sequence: Synthetic oligonucleotide
ggagaguuagggugaaagu

SEQ ID NO: 1461560 - RNA, 19 nt, Artificial Sequence
  Description of Artificial Sequence: Synthetic oligonucleotide
ugggaguuugggguacaau

SEQ ID NO: 1461561 - RNA, 19 nt, Artificial Sequence
  Description of Artificial Sequence: Synthetic oligonucleotide
cucuaagaaugcaggcucu

SEQ ID NO: 1461562 - RNA, 19 nt, Artificial Sequence
  Description of Artificial Sequence: Synthetic oligonucleotide
guuccccuagccugcuaca

SEQ ID NO: 1461563 - RNA, 19 nt, Artificial Sequence
  Description of Artificial Sequence: Synthetic oligonucleotide
gaggacaaggaagaaucuu

SEQ ID NO: 1461564 - RNA, 19 nt, Artificial Sequence
  Description of Artificial Sequence: Synthetic oligonucleotide
gugacaggagaugcauauc

SEQ ID NO: 1461565 - RNA, 19 nt, Artificial Sequence
  Description of Artificial Sequence: Synthetic oligonucleotide
gggguaguuacgcaguaau

SEQ ID NO: 1461566 - RNA, 19 nt, Artificial Sequence
  Description of Artificial Sequence: Synthetic oligonucleotide
gcuacauugaagagucuua

SEQ ID NO: 1461567 - RNA, 19 nt, Artificial Sequence
  Description of Artificial Sequence: Synthetic oligonucleotide
ccacuaccuagaaccacug

SEQ ID NO: 1461568 - RNA, 19 nt, Artificial Sequence
  Description of Artificial Sequence: Synthetic oligonucleotide
gcuacggccagcaagguuu

SEQ ID NO: 1461569 - RNA, 19 nt, Artificial Sequence
  Description of Artificial Sequence: Synthetic oligonucleotide
gcugagcucuaguuuugca

SEQ ID NO: 1461570 - RNA, 19 nt, Artificial Sequence
  Description of Artificial Sequence: Synthetic oligonucleotide
ggguuuaaugucggaguuc

SEQ ID NO: 1461571 - RNA, 19 nt, Artificial Sequence
  Description of Artificial Sequence: Synthetic oligonucleotide
gcuaggagcagcaccaagu

SEQ ID NO: 1461572 - RNA, 19 nt, Artificial Sequence
  Description of Artificial Sequence: Synthetic oligonucleotide
ucucugcuacggccagcaa

SEQ ID NO: 1461573 - RNA, 19 nt, Artificial Sequence
  Description of Artificial Sequence: Synthetic oligonucleotide
ucccaaguccgagcaggaa

SEQ ID NO: 1461574 - RNA, 19 nt, Artificial Sequence
  Description of Artificial Sequence: Synthetic oligonucleotide
agaguccugcuuggagcug

SEQ ID NO: 1461575 - RNA, 19 nt, Artificial Sequence
  Description of Artificial Sequence: Synthetic oligonucleotide
aaguuccccuagccugcua

SEQ ID NO: 1461576 - RNA, 19 nt, Artificial Sequence
  Description of Artificial Sequence: Synthetic oligonucleotide
guuuaaugucggaguucuc

SEQ ID NO: 1461577 - RNA, 19 nt, Artificial Sequence
  Description of Artificial Sequence: Synthetic oligonucleotide
cauuucaccuuaagacaau

SEQ ID NO: 1461578 - RNA, 19 nt, Artificial Sequence
  Description of Artificial Sequence: Synthetic oligonucleotide
gcaguaauuauguccccau

SEQ ID NO: 1461579 - RNA, 19 nt, Artificial Sequence
  Description of Artificial Sequence: Synthetic oligonucleotide
uggggcaugcagggacaug

SEQ ID NO: 1461580 - RNA, 19 nt, Artificial Sequence
  Description of Artificial Sequence: Synthetic oligonucleotide
caucuccccagggagaacu

SEQ ID NO: 1461581 - RNA, 19 nt, Artificial Sequence
  Description of Artificial Sequence: Synthetic oligonucleotide
caggacuaggcuguuccaa

SEQ ID NO: 1461582 - RNA, 19 nt, Artificial Sequence
  Description of Artificial Sequence: Synthetic oligonucleotide
ccggauccagguaacuguc

SEQ ID NO: 1461583 - RNA, 19 nt, Artificial Sequence
  Description of Artificial Sequence: Synthetic oligonucleotide
ggcugccacguccagucca

SEQ ID NO: 1461584 - RNA, 19 nt, Artificial Sequence
  Description of Artificial Sequence: Synthetic oligonucleotide
uacggccagcaagguuuag

SEQ ID NO: 1461585 - RNA, 19 nt, Artificial Sequence
  Description of Artificial Sequence: Synthetic oligonucleotide
ggggacgauggggagggug

SEQ ID NO: 1461586 - RNA, 19 nt, Artificial Sequence
  Description of Artificial Sequence: Synthetic oligonucleotide
gggagaaaacaguguaaau

SEQ ID NO: 1461587 - RNA, 19 nt, Artificial Sequence
  Description of Artificial Sequence: Synthetic oligonucleotide
guccgagcaggaauuugaa

SEQ ID NO: 1461588 - RNA, 19 nt, Artificial Sequence
  Description of Artificial Sequence: Synthetic oligonucleotide
gcaggaauuugaagaggga

SEQ ID NO: 1461589 - RNA, 19 nt, Artificial Sequence
  Description of Artificial Sequence: Synthetic oligonucleotide
ugcuuggagcuggccugug

SEQ ID NO: 1461590 - RNA, 19 nt, Artificial Sequence
  Description of Artificial Sequence: Synthetic oligonucleotide
aucugguauggggcaugca

SEQ ID NO: 1461591 - RNA, 19 nt, Artificial Sequence
  Description of Artificial Sequence: Synthetic oligonucleotide
gcuacagcugagcucuagu

SEQ ID NO: 1461592 - RNA, 19 nt, Artificial Sequence
  Description of Artificial Sequence: Synthetic oligonucleotide
gggguuuaaugucggaguu

SEQ ID NO: 1461593 - RNA, 19 nt, Artificial Sequence
  Description of Artificial Sequence: Synthetic oligonucleotide
agccaccuuaggagcauaa

SEQ ID NO: 1461594 - RNA, 19 nt, Artificial Sequence
  Description of Artificial Sequence: Synthetic oligonucleotide
guuuaggguggggcuggga

SEQ ID NO: 1461595 - RNA, 19 nt, Artificial Sequence
  Description of Artificial Sequence: Synthetic oligonucleotide
cccacuaccuagaaccacu

SEQ ID NO: 1461596 - RNA, 19 nt, Artificial Sequence
  Description of Artificial Sequence: Synthetic oligonucleotide
cucuaguuuugcagaggau

SEQ ID NO: 1461597 - RNA, 19 nt, Artificial Sequence
  Description of Artificial Sequence: Synthetic oligonucleotide
ggaguuguucccagacaaa

SEQ ID NO: 1461598 - RNA, 19 nt, Artificial Sequence
  Description of Artificial Sequence: Synthetic oligonucleotide
cuaagaaugcaggcucuuu

SEQ ID NO: 1461599 - RNA, 19 nt, Artificial Sequence
  Description of Artificial Sequence: Synthetic oligonucleotide
cuacggccagcaagguuua

SEQ ID NO: 1461600 - RNA, 19 nt, Artificial Sequence
  Description of Artificial Sequence: Synthetic oligonucleotide
gguauggggcaugcaggga

SEQ ID NO: 1461601 - RNA, 19 nt, Artificial Sequence
  Description of Artificial Sequence: Synthetic oligonucleotide
ccuaagcaauugucaacaa

SEQ ID NO: 1461602 - RNA, 19 nt, Artificial Sequence
  Description of Artificial Sequence: Synthetic oligonucleotide
gcugccacguccaguccac

SEQ ID NO: 1461603 - RNA, 19 nt, Artificial Sequence
  Description of Artificial Sequence: Synthetic oligonucleotide
cuagaaccacuggggugga

SEQ ID NO: 1461604 - RNA, 19 nt, Artificial Sequence
  Description of Artificial Sequence: Synthetic oligonucleotide
caaguucuacccaguuguu

SEQ ID NO: 1461605 - RNA, 19 nt, Artificial Sequence
  Description of Artificial Sequence: Synthetic oligonucleotide
cccggauccagguaacugu

SEQ ID NO: 1461606 - RNA, 19 nt, Artificial Sequence
  Description of Artificial Sequence: Synthetic oligonucleotide
ggauugugcuuuggacaca

SEQ ID NO: 1461607 - RNA, 19 nt, Artificial Sequence
  Description of Artificial Sequence: Synthetic oligonucleotide
cguccaguccacaucaagu

SEQ ID NO: 1461608 - RNA, 19 nt, Artificial Sequence
  Description of Artificial Sequence: Synthetic oligonucleotide
gguggagaguuagggugaa

SEQ ID NO: 1461609 - RNA, 19 nt, Artificial Sequence
  Description of Artificial Sequence: Synthetic oligonucleotide
ccaaguccgagcaggaauu

SEQ ID NO: 1461610 - RNA, 19 nt, Artificial Sequence
  Description of Artificial Sequence: Synthetic oligonucleotide
gugaugggugaugugccuu

SEQ ID NO: 1461611 - RNA, 19 nt, Artificial Sequence
  Description of Artificial Sequence: Synthetic oligonucleotide
cacguccaguccacaucaa

SEQ ID NO: 1461612 - RNA, 19 nt, Artificial Sequence
  Description of Artificial Sequence: Synthetic oligonucleotide
cccaaguccgagcaggaau

SEQ ID NO: 1461613 - RNA, 19 nt, Artificial Sequence
  Description of Artificial Sequence: Synthetic oligonucleotide
ccaggacuaggcuguucca

SEQ ID NO: 1461614 - RNA, 19 nt, Artificial Sequence
  Description of Artificial Sequence: Synthetic oligonucleotide
cugggaguuugggguacaa

SEQ ID NO: 1461615 - RNA, 19 nt, Artificial Sequence
  Description of Artificial Sequence: Synthetic oligonucleotide
cgcaguaauuaugucccca

SEQ ID NO: 1461616 - RNA, 19 nt, Artificial Sequence
  Description of Artificial Sequence: Synthetic oligonucleotide
gccaccuuaggagcauaaa

SEQ ID NO: 1461617 - RNA, 19 nt, Artificial Sequence
  Description of Artificial Sequence: Synthetic oligonucleotide
cuugaagcucaggccccua

SEQ ID NO: 1461618 - RNA, 19 nt, Artificial Sequence
  Description of Artificial Sequence: Synthetic oligonucleotide
caacaggaucuugguucaa

SEQ ID NO: 1461619 - RNA, 19 nt, Artificial Sequence
  Description of Artificial Sequence: Synthetic oligonucleotide
ggguaguuacgcaguaauu

SEQ ID NO: 1461620 - RNA, 19 nt, Artificial Sequence
  Description of Artificial Sequence: Synthetic oligonucleotide
gcugggaguuugggguaca

SEQ ID NO: 1461621 - RNA, 19 nt, Artificial Sequence
  Description of Artificial Sequence: Synthetic oligonucleotide
caaguccgagcaggaauuu

SEQ ID NO: 1461622 - RNA, 19 nt, Artificial Sequence
  Description of Artificial Sequence: Synthetic oligonucleotide
gucugcguugagaggccau

SEQ ID NO: 1461623 - RNA, 19 nt, Artificial Sequence
  Description of Artificial Sequence: Synthetic oligonucleotide
guauugcacccagcacuuu

SEQ ID NO: 1461624 - RNA, 19 nt, Artificial Sequence
  Description of Artificial Sequence: Synthetic oligonucleotide
cugcuacggccagcaaggu

SEQ ID NO: 1461625 - RNA, 19 nt, Artificial Sequence
  Description of Artificial Sequence: Synthetic oligonucleotide
cgauggggaggguggccuu

SEQ ID NO: 1461626 - RNA, 19 nt, Artificial Sequence
  Description of Artificial Sequence: Synthetic oligonucleotide
acuuaaaggauucaguggc

SEQ ID NO: 1461627 - RNA, 19 nt, Artificial Sequence
  Description of Artificial Sequence: Synthetic oligonucleotide
aagugaagugcucugaagc

SEQ ID NO: 1461628 - RNA, 19 nt, Artificial Sequence
  Description of Artificial Sequence: Synthetic oligonucleotide
aagaucauuuccuaagguc

SEQ ID NO: 1461629 - RNA, 19 nt, Artificial Sequence
  Description of Artificial Sequence: Synthetic oligonucleotide
uucagcaaggcgaugaugg

SEQ ID NO: 1461630 - RNA, 19 nt, Artificial Sequence
  Description of Artificial Sequence: Synthetic oligonucleotide
ugggcuaucaauaagcagc

SEQ ID NO: 1461631 - RNA, 19 nt, Artificial Sequence
  Description of Artificial Sequence: Synthetic oligonucleotide
ucuucucgcagucugaugg

SEQ ID NO: 1461632 - RNA, 19 nt, Artificial Sequence
  Description of Artificial Sequence: Synthetic oligonucleotide
gacagagcaagcuugaugc

SEQ ID NO: 1461633 - RNA, 19 nt, Artificial Sequence
  Description of Artificial Sequence: Synthetic oligonucleotide
acugacauuuacuuaacac

SEQ ID NO: 1461634 - RNA, 19 nt, Artificial Sequence
  Description of Artificial Sequence: Synthetic oligonucleotide
aguacaaauaaguugcgag

SEQ ID NO: 1461635 - RNA, 19 nt, Artificial Sequence
  Description of Artificial Sequence: Synthetic oligonucleotide
uacaaguacaaauaaguug

SEQ ID NO: 1461636 - RNA, 19 nt, Artificial Sequence
  Description of Artificial Sequence: Synthetic oligonucleotide
uugguuaugcuaucaaugg

SEQ ID NO: 1461637 - RNA, 19 nt, Artificial Sequence
  Description of Artificial Sequence: Synthetic oligonucleotide
agacuauucagccagaagu

SEQ ID NO: 1461638 - RNA, 19 nt, Artificial Sequence
  Description of Artificial Sequence: Synthetic oligonucleotide
uuuacuuaacacacacacg

SEQ ID NO: 1461639 - RNA, 19 nt, Artificial Sequence
  Description of Artificial Sequence: Synthetic oligonucleotide
acacugaaaacuuaaagga

SEQ ID NO: 1461640 - RNA, 19 nt, Artificial Sequence
  Description of Artificial Sequence: Synthetic oligonucleotide
aaaggauucaguggcgugc

SEQ ID NO: 1461641 - RNA, 19 nt, Artificial Sequence
  Description of Artificial Sequence: Synthetic oligonucleotide
uguagcacacuuaaaaccu

SEQ ID NO: 1461642 - RNA, 19 nt, Artificial Sequence
  Description of Artificial Sequence: Synthetic oligonucleotide
uugugguagaauuucaaag

SEQ ID NO: 1461643 - RNA, 19 nt, Artificial Sequence
  Description of Artificial Sequence: Synthetic oligonucleotide
uacaaacucacacugaaaa

SEQ ID NO: 1461644 - RNA, 19 nt, Artificial Sequence
  Description of Artificial Sequence: Synthetic oligonucleotide
uagaauuucaaagacucag

SEQ ID NO: 1461645 - RNA, 19 nt, Artificial Sequence
  Description of Artificial Sequence: Synthetic oligonucleotide
agugaagugcucugaagcc

SEQ ID NO: 1461646 - RNA, 19 nt, Artificial Sequence
  Description of Artificial Sequence: Synthetic oligonucleotide
acagauacuagugagugac

SEQ ID NO: 1461647 - RNA, 19 nt, Artificial Sequence
  Description of Artificial Sequence: Synthetic oligonucleotide
ugugguagaauuucaaaga

SEQ ID NO: 1461648 - RNA, 19 nt, Artificial Sequence
  Description of Artificial Sequence: Synthetic oligonucleotide
auuggcaucucucacugac

SEQ ID NO: 1461649 - RNA, 19 nt, Artificial Sequence
  Description of Artificial Sequence: Synthetic oligonucleotide
aaauaaguugcgagaaggc

SEQ ID NO: 1461650 - RNA, 19 nt, Artificial Sequence
  Description of Artificial Sequence: Synthetic oligonucleotide
uuguagcacacuuaaaacc

SEQ ID NO: 1461651 - RNA, 19 nt, Artificial Sequence
  Description of Artificial Sequence: Synthetic oligonucleotide
gaguuuuacaaacucacac

SEQ ID NO: 1461652 - RNA, 19 nt, Artificial Sequence
  Description of Artificial Sequence: Synthetic oligonucleotide
ucugaaacgaaagaggaac

SEQ ID NO: 1461653 - RNA, 19 nt, Artificial Sequence
  Description of Artificial Sequence: Synthetic oligonucleotide
aaguucaacagaaacuggg

SEQ ID NO: 1461654 - RNA, 19 nt, Artificial Sequence
  Description of Artificial Sequence: Synthetic oligonucleotide
agaagaucaauccugaguu

SEQ ID NO: 1461655 - RNA, 19 nt, Artificial Sequence
  Description of Artificial Sequence: Synthetic oligonucleotide
caaauaaguugcgagaagg

SEQ ID NO: 1461656 - RNA, 19 nt, Artificial Sequence
  Description of Artificial Sequence: Synthetic oligonucleotide
ugagagaacuccuucagac

SEQ ID NO: 1461657 - RNA, 19 nt, Artificial Sequence
  Description of Artificial Sequence: Synthetic oligonucleotide
aaacgaaagaggaacuuuc

SEQ ID NO: 1461658 - RNA, 19 nt, Artificial Sequence
  Description of Artificial Sequence: Synthetic oligonucleotide
uuuccuaaggucauggcaa

SEQ ID NO: 1461659 - RNA, 19 nt, Artificial Sequence
  Description of Artificial Sequence: Synthetic oligonucleotide
caaaguucaacagaaacug

SEQ ID NO: 1461660 - RNA, 19 nt, Artificial Sequence
  Description of Artificial Sequence: Synthetic oligonucleotide
cugaaguaaucauugugcg

SEQ ID NO: 1461661 - RNA, 19 nt, Artificial Sequence
  Description of Artificial Sequence: Synthetic oligonucleotide
aaagacucagcaaugcaag

SEQ ID NO: 1461662 - RNA, 19 nt, Artificial Sequence
  Description of Artificial Sequence: Synthetic oligonucleotide
aaugggaaucuugaaaucu

SEQ ID NO: 1461663 - RNA, 19 nt, Artificial Sequence
  Description of Artificial Sequence: Synthetic oligonucleotide
uuauucuguacagcaaugg

SEQ ID NO: 1461664 - RNA, 19 nt, Artificial Sequence
  Description of Artificial Sequence: Synthetic oligonucleotide
uuacagauacuagugagug

SEQ ID NO: 1461665 - RNA, 19 nt, Artificial Sequence
  Description of Artificial Sequence: Synthetic oligonucleotide
aauaaguugcgagaaggcu

SEQ ID NO: 1461666 - RNA, 19 nt, Artificial Sequence
  Description of Artificial Sequence: Synthetic oligonucleotide
uaaguugcgagaaggcuug

SEQ ID NO: 1461667 - RNA, 19 nt, Artificial Sequence
  Description of Artificial Sequence: Synthetic oligonucleotide
uauucagccagaagugaag

SEQ ID NO: 1461668 - RNA, 19 nt, Artificial Sequence
  Description of Artificial Sequence: Synthetic oligonucleotide
ucuuuaggcuguuacaagu

SEQ ID NO: 1461669 - RNA, 19 nt, Artificial Sequence
  Description of Artificial Sequence: Synthetic oligonucleotide
ugguuaugcuaucaauggg

SEQ ID NO: 1461670 - RNA, 19 nt, Artificial Sequence
  Description of Artificial Sequence: Synthetic oligonucleotide
uccagaaugccacauuaca

SEQ ID NO: 1461671 - RNA, 19 nt, Artificial Sequence
  Description of Artificial Sequence: Synthetic oligonucleotide
cauguaggaaacaggggcg

SEQ ID NO: 1461672 - RNA, 19 nt, Artificial Sequence
  Description of Artificial Sequence: Synthetic oligonucleotide
accuucuaccuucaaggcc

SEQ ID NO: 1461673 - RNA, 19 nt, Artificial Sequence
  Description of Artificial Sequence: Synthetic oligonucleotide
gacgacuccacuguaaugc

SEQ ID NO: 1461674 - RNA, 19 nt, Artificial Sequence
  Description of Artificial Sequence: Synthetic oligonucleotide
uuaacacacacacggagau

SEQ ID NO: 1461675 - RNA, 19 nt, Artificial Sequence
  Description of Artificial Sequence: Synthetic oligonucleotide
aacaggggcguauuuccgg

SEQ ID NO: 1461676 - RNA, 19 nt, Artificial Sequence
  Description of Artificial Sequence: Synthetic oligonucleotide
aauugugguggcgauugcg

SEQ ID NO: 1461677 - RNA, 19 nt, Artificial Sequence
  Description of Artificial Sequence: Synthetic oligonucleotide
agaaacugggugcugaagu

SEQ ID NO: 1461678 - RNA, 19 nt, Artificial Sequence
  Description of Artificial Sequence: Synthetic oligonucleotide
uagcacacuuaaaaccugg

SEQ ID NO: 1461679 - RNA, 19 nt, Artificial Sequence
  Description of Artificial Sequence: Synthetic oligonucleotide
agauacuagugagugacgg

SEQ ID NO: 1461680 - RNA, 19 nt, Artificial Sequence
  Description of Artificial Sequence: Synthetic oligonucleotide
cacacggagauacagaauc

SEQ ID NO: 1461681 - RNA, 19 nt, Artificial Sequence
  Description of Artificial Sequence: Synthetic oligonucleotide
uuacaaguacaaauaaguu

SEQ ID NO: 1461682 - RNA, 19 nt, Artificial Sequence
  Description of Artificial Sequence: Synthetic oligonucleotide
gaauagggguccuccaggg

SEQ ID NO: 1461683 - RNA, 19 nt, Artificial Sequence
  Description of Artificial Sequence: Synthetic oligonucleotide
ugcauguaggaaacagggg

SEQ ID NO: 1461684 - RNA, 19 nt, Artificial Sequence
  Description of Artificial Sequence: Synthetic oligonucleotide
uguggaagaaacacucaga

SEQ ID NO: 1461685 - RNA, 19 nt, Artificial Sequence
  Description of Artificial Sequence: Synthetic oligonucleotide
guggaagaaacacucagac

SEQ ID NO: 1461686 - RNA, 19 nt, Artificial Sequence
  Description of Artificial Sequence: Synthetic oligonucleotide
ucugauagaggucucggua

SEQ ID NO: 1461687 - RNA, 19 nt, Artificial Sequence
  Description of Artificial Sequence: Synthetic oligonucleotide
gugcauguaggaaacaggg

SEQ ID NO: 1461688 - RNA, 19 nt, Artificial Sequence
  Description of Artificial Sequence: Synthetic oligonucleotide
uauggcaugggcuaucaau

SEQ ID NO: 1461689 - RNA, 19 nt, Artificial Sequence
  Description of Artificial Sequence: Synthetic oligonucleotide
agugacggaucucacacug

SEQ ID NO: 1461690 - RNA, 19 nt, Artificial Sequence
  Description of Artificial Sequence: Synthetic oligonucleotide
ugguguaggcacuucgagg

SEQ ID NO: 1461691 - RNA, 19 nt, Artificial Sequence
  Description of Artificial Sequence: Synthetic oligonucleotide
ugaguuuuacaaacucaca

SEQ ID NO: 1461692 - RNA, 19 nt, Artificial Sequence
  Description of Artificial Sequence: Synthetic oligonucleotide
cuuggcuggauuuacucug

SEQ ID NO: 1461693 - RNA, 19 nt, Artificial Sequence
  Description of Artificial Sequence: Synthetic oligonucleotide
uacaaauaaguugcgagaa

SEQ ID NO: 1461694 - RNA, 19 nt, Artificial Sequence
  Description of Artificial Sequence: Synthetic oligonucleotide
guuacaaguacaaauaagu

SEQ ID NO: 1461695 - RNA, 19 nt, Artificial Sequence
  Description of Artificial Sequence: Synthetic oligonucleotide
caugccgugugcauguagg

SEQ ID NO: 1461696 - RNA, 19 nt, Artificial Sequence
  Description of Artificial Sequence: Synthetic oligonucleotide
acggccaucauucuucucu

SEQ ID NO: 1461697 - RNA, 19 nt, Artificial Sequence
  Description of Artificial Sequence: Synthetic oligonucleotide
uuccacacgaugccauugg

SEQ ID NO: 1461698 - RNA, 19 nt, Artificial Sequence
  Description of Artificial Sequence: Synthetic oligonucleotide
agcaaugcaagaaagugcu

SEQ ID NO: 1461699 - RNA, 19 nt, Artificial Sequence
  Description of Artificial Sequence: Synthetic oligonucleotide
ucauugugcggcucaaccc

SEQ ID NO: 1461700 - RNA, 19 nt, Artificial Sequence
  Description of Artificial Sequence: Synthetic oligonucleotide
uugacaaacaugguaguuc

SEQ ID NO: 1461701 - RNA, 19 nt, Artificial Sequence
  Description of Artificial Sequence: Synthetic oligonucleotide
acuagugagugacggaucu

SEQ ID NO: 1461702 - RNA, 19 nt, Artificial Sequence
  Description of Artificial Sequence: Synthetic oligonucleotide
acggaucucacacugacau

SEQ ID NO: 1461703 - RNA, 19 nt, Artificial Sequence
  Description of Artificial Sequence: Synthetic oligonucleotide
uacacggccaucauucuuc

SEQ ID NO: 1461704 - RNA, 19 nt, Artificial Sequence
  Description of Artificial Sequence: Synthetic oligonucleotide
guacaaauaaguugcgaga

SEQ ID NO: 1461705 - RNA, 19 nt, Artificial Sequence
  Description of Artificial Sequence: Synthetic oligonucleotide
uucaaagacucagcaaugc

SEQ ID NO: 1461706 - RNA, 19 nt, Artificial Sequence
  Description of Artificial Sequence: Synthetic oligonucleotide
ggaacuuucagcaaggcga

SEQ ID NO: 1461707 - RNA, 19 nt, Artificial Sequence
  Description of Artificial Sequence: Synthetic oligonucleotide
acgaaagaggaacuuucag

SEQ ID NO: 1461708 - RNA, 19 nt, Artificial Sequence
  Description of Artificial Sequence: Synthetic oligonucleotide
ugcgagaaggcuuggagaa

SEQ ID NO: 1461709 - RNA, 19 nt, Artificial Sequence
  Description of Artificial Sequence: Synthetic oligonucleotide
gcguauuuccgguugagcg

SEQ ID NO: 1461710 - RNA, 19 nt, Artificial Sequence
  Description of Artificial Sequence: Synthetic oligonucleotide
ucuaccuucaaggccagcu

SEQ ID NO: 1461711 - RNA, 19 nt, Artificial Sequence
  Description of Artificial Sequence: Synthetic oligonucleotide
ugaagugcucugaagccac

SEQ ID NO: 1461712 - RNA, 19 nt, Artificial Sequence
  Description of Artificial Sequence: Synthetic oligonucleotide
cucgguaccgggaagcaag

SEQ ID NO: 1461713 - RNA, 19 nt, Artificial Sequence
  Description of Artificial Sequence: Synthetic oligonucleotide
cugauagaggucucgguac

SEQ ID NO: 1461714 - RNA, 19 nt, Artificial Sequence
  Description of Artificial Sequence: Synthetic oligonucleotide
agacugaauucuucggaag

SEQ ID NO: 1461715 - RNA, 19 nt, Artificial Sequence
  Description of Artificial Sequence: Synthetic oligonucleotide
gacuauucagccagaagug

SEQ ID NO: 1461716 - RNA, 19 nt, Artificial Sequence
  Description of Artificial Sequence: Synthetic oligonucleotide
gauacagaaucuucucgca

SEQ ID NO: 1461717 - RNA, 19 nt, Artificial Sequence
  Description of Artificial Sequence: Synthetic oligonucleotide
cugguuauucuguacagca

SEQ ID NO: 1461718 - RNA, 19 nt, Artificial Sequence
  Description of Artificial Sequence: Synthetic oligonucleotide
ugacggaucucacacugac

SEQ ID NO: 1461719 - RNA, 19 nt, Artificial Sequence
  Description of Artificial Sequence: Synthetic oligonucleotide
ucagacacugcucggcgug

SEQ ID NO: 1461720 - RNA, 19 nt, Artificial Sequence
  Description of Artificial Sequence: Synthetic oligonucleotide
aagcuugaugcugguagac

SEQ ID NO: 1461721 - RNA, 19 nt, Artificial Sequence
  Description of Artificial Sequence: Synthetic oligonucleotide
uggcaucucucacugacga

SEQ ID NO: 1461722 - RNA, 19 nt, Artificial Sequence
  Description of Artificial Sequence: Synthetic oligonucleotide
uaaaggauucaguggcgug

SEQ ID NO: 1461723 - RNA, 19 nt, Artificial Sequence
  Description of Artificial Sequence: Synthetic oligonucleotide
ugauuggagauucggccac

SEQ ID NO: 1461724 - RNA, 19 nt, Artificial Sequence
  Description of Artificial Sequence: Synthetic oligonucleotide
gcugaaguaaucauugugc

SEQ ID NO: 1461725 - RNA, 19 nt, Artificial Sequence
  Description of Artificial Sequence: Synthetic oligonucleotide
ugucugauagaggucucgg

SEQ ID NO: 1461726 - RNA, 19 nt, Artificial Sequence
  Description of Artificial Sequence: Synthetic oligonucleotide
uguaggcgaauuugcuggg

SEQ ID NO: 1461727 - RNA, 19 nt, Artificial Sequence
  Description of Artificial Sequence: Synthetic oligonucleotide
ucacugacgacuccacugu

SEQ ID NO: 1461728 - RNA, 19 nt, Artificial Sequence
  Description of Artificial Sequence: Synthetic oligonucleotide
ucaucugauuggagauucg

SEQ ID NO: 1461729 - RNA, 19 nt, Artificial Sequence
  Description of Artificial Sequence: Synthetic oligonucleotide
aagaucaauccugaguuuu

SEQ ID NO: 1461730 - RNA, 19 nt, Artificial Sequence
  Description of Artificial Sequence: Synthetic oligonucleotide
ucauugguuaugcuaucaa

SEQ ID NO: 1461731 - RNA, 19 nt, Artificial Sequence
  Description of Artificial Sequence: Synthetic oligonucleotide
uuaaaggauucaguggcgu

SEQ ID NO: 1461732 - RNA, 19 nt, Artificial Sequence
  Description of Artificial Sequence: Synthetic oligonucleotide
aagacucagcaaugcaaga

SEQ ID NO: 1461733 - RNA, 19 nt, Artificial Sequence
  Description of Artificial Sequence: Synthetic oligonucleotide
uucccguggagccauacuc

SEQ ID NO: 1461734 - RNA, 19 nt, Artificial Sequence
  Description of Artificial Sequence: Synthetic oligonucleotide
uguuaaggaggcgaucccc

SEQ ID NO: 1461735 - RNA, 19 nt, Artificial Sequence
  Description of Artificial Sequence: Synthetic oligonucleotide
cuuaacacacacacggaga

SEQ ID NO: 1461736 - RNA, 19 nt, Artificial Sequence
  Description of Artificial Sequence: Synthetic oligonucleotide
uuccacguuccucagaguu

SEQ ID NO: 1461737 - RNA, 19 nt, Artificial Sequence
  Description of Artificial Sequence: Synthetic oligonucleotide
ucuuggcuggauuuacucu

SEQ ID NO: 1461738 - RNA, 19 nt, Artificial Sequence
  Description of Artificial Sequence: Synthetic oligonucleotide
ugccacauuacagauacua

SEQ ID NO: 1461739 - RNA, 19 nt, Artificial Sequence
  Description of Artificial Sequence: Synthetic oligonucleotide
gagaagaucaauccugagu

SEQ ID NO: 1461740 - RNA, 19 nt, Artificial Sequence
  Description of Artificial Sequence: Synthetic oligonucleotide
uugcgagaaggcuuggaga

SEQ ID NO: 1461741 - RNA, 19 nt, Artificial Sequence
  Description of Artificial Sequence: Synthetic oligonucleotide
gauuuacucugcagugugg

SEQ ID NO: 1461742 - RNA, 19 nt, Artificial Sequence
  Description of Artificial Sequence: Synthetic oligonucleotide
uccaucucauugguuaugc

SEQ ID NO: 1461743 - RNA, 19 nt, Artificial Sequence
  Description of Artificial Sequence: Synthetic oligonucleotide
ugagcaguucccguggagc

SEQ ID NO: 1461744 - RNA, 19 nt, Artificial Sequence
  Description of Artificial Sequence: Synthetic oligonucleotide
augggcuaucaauaagcag

SEQ ID NO: 1461745 - RNA, 19 nt, Artificial Sequence
  Description of Artificial Sequence: Synthetic oligonucleotide
aaggaggcgauccccuugu

SEQ ID NO: 1461746 - RNA, 19 nt, Artificial Sequence
  Description of Artificial Sequence: Synthetic oligonucleotide
aaucauugugcggcucaac

SEQ ID NO: 1461747 - RNA, 19 nt, Artificial Sequence
  Description of Artificial Sequence: Synthetic oligonucleotide
caaggcuucggaauucuuc

SEQ ID NO: 1461748 - RNA, 19 nt, Artificial Sequence
  Description of Artificial Sequence: Synthetic oligonucleotide
ugagucggcgucaaaggau

SEQ ID NO: 1461749 - RNA, 19 nt, Artificial Sequence
  Description of Artificial Sequence: Synthetic oligonucleotide
uaaggaggcgauccccuug

SEQ ID NO: 1461750 - RNA, 19 nt, Artificial Sequence
  Description of Artificial Sequence: Synthetic oligonucleotide
auuacagauacuagugagu

SEQ ID NO: 1461751 - RNA, 19 nt, Artificial Sequence
  Description of Artificial Sequence: Synthetic oligonucleotide
uccacguuccucagaguug

SEQ ID NO: 1461752 - RNA, 19 nt, Artificial Sequence
  Description of Artificial Sequence: Synthetic oligonucleotide
uucggaauucuuccaugga

SEQ ID NO: 1461753 - RNA, 19 nt, Artificial Sequence
  Description of Artificial Sequence: Synthetic oligonucleotide
ugaaaacuuaaaggauuca

SEQ ID NO: 1461754 - RNA, 19 nt, Artificial Sequence
  Description of Artificial Sequence: Synthetic oligonucleotide
ugguugccauccuggaacg

SEQ ID NO: 1461755 - RNA, 19 nt, Artificial Sequence
  Description of Artificial Sequence: Synthetic oligonucleotide
gucuuuaggcuguuacaag

SEQ ID NO: 1461756 - RNA, 19 nt, Artificial Sequence
  Description of Artificial Sequence: Synthetic oligonucleotide
gauacuagugagugacgga

SEQ ID NO: 1461757 - RNA, 19 nt, Artificial Sequence
  Description of Artificial Sequence: Synthetic oligonucleotide
cucugguacagcucucggg

SEQ ID NO: 1461758 - RNA, 19 nt, Artificial Sequence
  Description of Artificial Sequence: Synthetic oligonucleotide
ugugcuuguagcacacuua

SEQ ID NO: 1461759 - RNA, 19 nt, Artificial Sequence
  Description of Artificial Sequence: Synthetic oligonucleotide
gauagaggucucgguaccg

SEQ ID NO: 1461760 - RNA, 19 nt, Artificial Sequence
  Description of Artificial Sequence: Synthetic oligonucleotide
aaacaggggcguauuuccg

SEQ ID NO: 1461761 - RNA, 19 nt, Artificial Sequence
  Description of Artificial Sequence: Synthetic oligonucleotide
auacuagugagugacggau

SEQ ID NO: 1461762 - RNA, 19 nt, Artificial Sequence
  Description of Artificial Sequence: Synthetic oligonucleotide
cauggauugcuucaucuga

SEQ ID NO: 1461763 - RNA, 19 nt, Artificial Sequence
  Description of Artificial Sequence: Synthetic oligonucleotide
uacagauacuagugaguga

SEQ ID NO: 1461764 - RNA, 19 nt, Artificial Sequence
  Description of Artificial Sequence: Synthetic oligonucleotide
guaaucauugugcggcuca

SEQ ID NO: 1461765 - RNA, 19 nt, Artificial Sequence
  Description of Artificial Sequence: Synthetic oligonucleotide
ggauuuacucugcagugug

SEQ ID NO: 1461766 - RNA, 19 nt, Artificial Sequence
  Description of Artificial Sequence: Synthetic oligonucleotide
agaagugaagugcucugaa

SEQ ID NO: 1461767 - RNA, 19 nt, Artificial Sequence
  Description of Artificial Sequence: Synthetic oligonucleotide
uaucaaugggaaucuugaa

SEQ ID NO: 1461768 - RNA, 19 nt, Artificial Sequence
  Description of Artificial Sequence: Synthetic oligonucleotide
ugguuauucuguacagcaa

SEQ ID NO: 1461769 - RNA, 19 nt, Artificial Sequence
  Description of Artificial Sequence: Synthetic oligonucleotide
ucgguaccgggaagcaagg

SEQ ID NO: 1461770 - RNA, 19 nt, Artificial Sequence
  Description of Artificial Sequence: Synthetic oligonucleotide
acggagauacagaaucuuc

SEQ ID NO: 1461771 - RNA, 19 nt, Artificial Sequence
  Description of Artificial Sequence: Synthetic oligonucleotide
ugucagcgugagcaguucc

SEQ ID NO: 1461772 - RNA, 19 nt, Artificial Sequence
  Description of Artificial Sequence: Synthetic oligonucleotide
aucaauccugaguuuuaca

SEQ ID NO: 1461773 - RNA, 19 nt, Artificial Sequence
  Description of Artificial Sequence: Synthetic oligonucleotide
gaucaauccugaguuuuac

SEQ ID NO: 1461774 - RNA, 19 nt, Artificial Sequence
  Description of Artificial Sequence: Synthetic oligonucleotide
auaaguugcgagaaggcuu

SEQ ID NO: 1461775 - RNA, 19 nt, Artificial Sequence
  Description of Artificial Sequence: Synthetic oligonucleotide
auagaggucucgguaccgg

SEQ ID NO: 1461776 - RNA, 19 nt, Artificial Sequence
  Description of Artificial Sequence: Synthetic oligonucleotide
cacacagacugaauucuuc

SEQ ID NO: 1461777 - RNA, 19 nt, Artificial Sequence
  Description of Artificial Sequence: Synthetic oligonucleotide
gguuaugcuaucaauggga

SEQ ID NO: 1461778 - RNA, 19 nt, Artificial Sequence
  Description of Artificial Sequence: Synthetic oligonucleotide
cagauacuagugagugacg

SEQ ID NO: 1461779 - RNA, 19 nt, Artificial Sequence
  Description of Artificial Sequence: Synthetic oligonucleotide
ccagaaugccacauuacag

SEQ ID NO: 1461780 - RNA, 19 nt, Artificial Sequence
  Description of Artificial Sequence: Synthetic oligonucleotide
ucucgcagucugauggcug

SEQ ID NO: 1461781 - RNA, 19 nt, Artificial Sequence
  Description of Artificial Sequence: Synthetic oligonucleotide
uaggcgaauuugcugggaa

SEQ ID NO: 1461782 - RNA, 19 nt, Artificial Sequence
  Description of Artificial Sequence: Synthetic oligonucleotide
agaguugcugagucggcgu

SEQ ID NO: 1461783 - RNA, 19 nt, Artificial Sequence
  Description of Artificial Sequence: Synthetic oligonucleotide
caccuucuaccuucaaggc

SEQ ID NO: 1461784 - RNA, 19 nt, Artificial Sequence
  Description of Artificial Sequence: Synthetic oligonucleotide
uccacacgaugccauuggc

SEQ ID NO: 1461785 - RNA, 19 nt, Artificial Sequence
  Description of Artificial Sequence: Synthetic oligonucleotide
agcgugagcaguucccgug

SEQ ID NO: 1461786 - RNA, 19 nt, Artificial Sequence
  Description of Artificial Sequence: Synthetic oligonucleotide
cugguguaggcacuucgag

SEQ ID NO: 1461787 - RNA, 19 nt, Artificial Sequence
  Description of Artificial Sequence: Synthetic oligonucleotide
aaggauucaguggcgugcu

SEQ ID NO: 1461788 - RNA, 19 nt, Artificial Sequence
  Description of Artificial Sequence: Synthetic oligonucleotide
cucggcgugagagaacucc

SEQ ID NO: 1461789 - RNA, 19 nt, Artificial Sequence
  Description of Artificial Sequence: Synthetic oligonucleotide
aaaaccugguguaggcacu

SEQ ID NO: 1461790 - RNA, 19 nt, Artificial Sequence
  Description of Artificial Sequence: Synthetic oligonucleotide
aguaaucauugugcggcuc

SEQ ID NO: 1461791 - RNA, 19 nt, Artificial Sequence
  Description of Artificial Sequence: Synthetic oligonucleotide
gagucggcgucaaaggaug

SEQ ID NO: 1461792 - RNA, 19 nt, Artificial Sequence
  Description of Artificial Sequence: Synthetic oligonucleotide
caaacucacacugaaaacu

SEQ ID NO: 1461793 - RNA, 19 nt, Artificial Sequence
  Description of Artificial Sequence: Synthetic oligonucleotide
ugaaacgaaagaggaacuu

SEQ ID NO: 1461794 - RNA, 19 nt, Artificial Sequence
  Description of Artificial Sequence: Synthetic oligonucleotide
gcugagucggcgucaaagg

SEQ ID NO: 1461795 - RNA, 19 nt, Artificial Sequence
  Description of Artificial Sequence: Synthetic oligonucleotide
ggcacuucgaggcugcggc

SEQ ID NO: 1461796 - RNA, 19 nt, Artificial Sequence
  Description of Artificial Sequence: Synthetic oligonucleotide
uuaugcuaucaaugggaau

SEQ ID NO: 1461797 - RNA, 19 nt, Artificial Sequence
  Description of Artificial Sequence: Synthetic oligonucleotide
gaaacugggugcugaagua

SEQ ID NO: 1461798 - RNA, 19 nt, Artificial Sequence
  Description of Artificial Sequence: Synthetic oligonucleotide
ugacgacuccacuguaaug

SEQ ID NO: 1461799 - RNA, 19 nt, Artificial Sequence
  Description of Artificial Sequence: Synthetic oligonucleotide
guauuuccgguugagcgac

SEQ ID NO: 1461800 - RNA, 19 nt, Artificial Sequence
  Description of Artificial Sequence: Synthetic oligonucleotide
uuuccgguugagcgacucc

SEQ ID NO: 1461801 - RNA, 19 nt, Artificial Sequence
  Description of Artificial Sequence: Synthetic oligonucleotide
uacuagugagugacggauc

SEQ ID NO: 1461802 - RNA, 19 nt, Artificial Sequence
  Description of Artificial Sequence: Synthetic oligonucleotide
auggcaauugugguggcga

SEQ ID NO: 1461803 - RNA, 19 nt, Artificial Sequence
  Description of Artificial Sequence: Synthetic oligonucleotide
ucuauggcaugggcuauca

SEQ ID NO: 1461804 - RNA, 19 nt, Artificial Sequence
  Description of Artificial Sequence: Synthetic oligonucleotide
uuccgguugagcgacucca

SEQ ID NO: 1461805 - RNA, 19 nt, Artificial Sequence
  Description of Artificial Sequence: Synthetic oligonucleotide
aaacacucagacacacaga

SEQ ID NO: 1461806 - RNA, 19 nt, Artificial Sequence
  Description of Artificial Sequence: Synthetic oligonucleotide
ggagauacagaaucuucuc

SEQ ID NO: 1461807 - RNA, 19 nt, Artificial Sequence
  Description of Artificial Sequence: Synthetic oligonucleotide
uugaugcugguagacugca

SEQ ID NO: 1461808 - RNA, 19 nt, Artificial Sequence
  Description of Artificial Sequence: Synthetic oligonucleotide
auucagccagaagugaagu

SEQ ID NO: 1461809 - RNA, 19 nt, Artificial Sequence
  Description of Artificial Sequence: Synthetic oligonucleotide
caaacucugguacagcucu

SEQ ID NO: 1461810 - RNA, 19 nt, Artificial Sequence
  Description of Artificial Sequence: Synthetic oligonucleotide
cagucugauggcuguguag

SEQ ID NO: 1461811 - RNA, 19 nt, Artificial Sequence
  Description of Artificial Sequence: Synthetic oligonucleotide
cuauucagccagaagugaa

SEQ ID NO: 1461812 - RNA, 19 nt, Artificial Sequence
  Description of Artificial Sequence: Synthetic oligonucleotide
ugcucggcgugagagaacu

SEQ ID NO: 1461813 - RNA, 19 nt, Artificial Sequence
  Description of Artificial Sequence: Synthetic oligonucleotide
cuguuaaggaggcgauccc

SEQ ID NO: 1461814 - RNA, 19 nt, Artificial Sequence
  Description of Artificial Sequence: Synthetic oligonucleotide
gcuaucaauaagcagcucu

SEQ ID NO: 1461815 - RNA, 19 nt, Artificial Sequence
  Description of Artificial Sequence: Synthetic oligonucleotide
gcaauugugguggcgauug

SEQ ID NO: 1461816 - RNA, 19 nt, Artificial Sequence
  Description of Artificial Sequence: Synthetic oligonucleotide
cuccagaaugccacauuac

SEQ ID NO: 1461817 - RNA, 19 nt, Artificial Sequence
  Description of Artificial Sequence: Synthetic oligonucleotide
cuucucgcagucugauggc

SEQ ID NO: 1461818 - RNA, 19 nt, Artificial Sequence
  Description of Artificial Sequence: Synthetic oligonucleotide
cugagucagcaaacucugg

SEQ ID NO: 1461819 - RNA, 19 nt, Artificial Sequence
  Description of Artificial Sequence: Synthetic oligonucleotide
gaggcgauccccuuguggu

SEQ ID NO: 1461820 - RNA, 19 nt, Artificial Sequence
  Description of Artificial Sequence: Synthetic oligonucleotide
cagaguugcugagucggcg

SEQ ID NO: 1461821 - RNA, 19 nt, Artificial Sequence
  Description of Artificial Sequence: Synthetic oligonucleotide
uucagacuauucagccaga

SEQ ID NO: 1461822 - RNA, 19 nt, Artificial Sequence
  Description of Artificial Sequence: Synthetic oligonucleotide
aggggcguauuuccgguug

SEQ ID NO: 1461823 - RNA, 19 nt, Artificial Sequence
  Description of Artificial Sequence: Synthetic oligonucleotide
auuuccgguugagcgacuc

SEQ ID NO: 1461824 - RNA, 19 nt, Artificial Sequence
  Description of Artificial Sequence: Synthetic oligonucleotide
agaaagugcugaacugaag

SEQ ID NO: 1461825 - RNA, 19 nt, Artificial Sequence
  Description of Artificial Sequence: Synthetic oligonucleotide
gugcuuguagcacacuuaa

SEQ ID NO: 1461826 - RNA, 19 nt, Artificial Sequence
  Description of Artificial Sequence: Synthetic oligonucleotide
ucggcgugagagaacuccu

SEQ ID NO: 1461827 - RNA, 19 nt, Artificial Sequence
  Description of Artificial Sequence: Synthetic oligonucleotide
guuaugcuaucaaugggaa

SEQ ID NO: 1461828 - RNA, 19 nt, Artificial Sequence
  Description of Artificial Sequence: Synthetic oligonucleotide
cagagcaagcuugaugcug

SEQ ID NO: 1461829 - RNA, 19 nt, Artificial Sequence
  Description of Artificial Sequence: Synthetic oligonucleotide
ugggugcugaaguaaucau

SEQ ID NO: 1461830 - RNA, 19 nt, Artificial Sequence
  Description of Artificial Sequence: Synthetic oligonucleotide
uccggggagacggcgacag

SEQ ID NO: 1461831 - RNA, 19 nt, Artificial Sequence
  Description of Artificial Sequence: Synthetic oligonucleotide
guaaaggcugcugggcuug

SEQ ID NO: 1461832 - RNA, 19 nt, Artificial Sequence
  Description of Artificial Sequence: Synthetic oligonucleotide
ucagacuauucagccagaa

SEQ ID NO: 1461833 - RNA, 19 nt, Artificial Sequence
  Description of Artificial Sequence: Synthetic oligonucleotide
guaguuccacguuccucag

SEQ ID NO: 1461834 - RNA, 19 nt, Artificial Sequence
  Description of Artificial Sequence: Synthetic oligonucleotide
aaacucugguacagcucuc

SEQ ID NO: 1461835 - RNA, 19 nt, Artificial Sequence
  Description of Artificial Sequence: Synthetic oligonucleotide
ggaggcgauccccuugugg

SEQ ID NO: 1461836 - RNA, 19 nt, Artificial Sequence
  Description of Artificial Sequence: Synthetic oligonucleotide
acgacuccacuguaaugcu

SEQ ID NO: 1461837 - RNA, 19 nt, Artificial Sequence
  Description of Artificial Sequence: Synthetic oligonucleotide
ggcaugggcuaucaauaag

SEQ ID NO: 1461838 - RNA, 19 nt, Artificial Sequence
  Description of Artificial Sequence: Synthetic oligonucleotide
auggcaugggcuaucaaua

SEQ ID NO: 1461839 - RNA, 19 nt, Artificial Sequence
  Description of Artificial Sequence: Synthetic oligonucleotide
cauggcaauugugguggcg

SEQ ID NO: 1461840 - RNA, 19 nt, Artificial Sequence
  Description of Artificial Sequence: Synthetic oligonucleotide
gaggcaugccgugugcaug

SEQ ID NO: 1461841 - RNA, 19 nt, Artificial Sequence
  Description of Artificial Sequence: Synthetic oligonucleotide
agcgacuccaccucuucua

SEQ ID NO: 1461842 - RNA, 19 nt, Artificial Sequence
  Description of Artificial Sequence: Synthetic oligonucleotide
gugagagaacuccuucaga

SEQ ID NO: 1461843 - RNA, 19 nt, Artificial Sequence
  Description of Artificial Sequence: Synthetic oligonucleotide
uaaucauugugcggcucaa

SEQ ID NO: 1461844 - RNA, 19 nt, Artificial Sequence
  Description of Artificial Sequence: Synthetic oligonucleotide
uuaaggaggcgauccccuu

SEQ ID NO: 1461845 - RNA, 19 nt, Artificial Sequence
  Description of Artificial Sequence: Synthetic oligonucleotide
ugugcggcucaacccucug

SEQ ID NO: 1461846 - RNA, 19 nt, Artificial Sequence
  Description of Artificial Sequence: Synthetic oligonucleotide
uggcuggauuuacucugca

SEQ ID NO: 1461847 - RNA, 19 nt, Artificial Sequence
  Description of Artificial Sequence: Synthetic oligonucleotide
gugaagugcucugaagcca

SEQ ID NO: 1461848 - RNA, 19 nt, Artificial Sequence
  Description of Artificial Sequence: Synthetic oligonucleotide
gacuccacuguaaugcugu

SEQ ID NO: 1461849 - RNA, 19 nt, Artificial Sequence
  Description of Artificial Sequence: Synthetic oligonucleotide
augcugguagacugcaguu

SEQ ID NO: 1461850 - RNA, 19 nt, Artificial Sequence
  Description of Artificial Sequence: Synthetic oligonucleotide
gaaacgaaagaggaacuuu

SEQ ID NO: 1461851 - RNA, 19 nt, Artificial Sequence
  Description of Artificial Sequence: Synthetic oligonucleotide
aaguugcgagaaggcuugg

SEQ ID NO: 1461852 - RNA, 19 nt, Artificial Sequence
  Description of Artificial Sequence: Synthetic oligonucleotide
agacugcaguuucuggaaa

SEQ ID NO: 1461853 - RNA, 19 nt, Artificial Sequence
  Description of Artificial Sequence: Synthetic oligonucleotide
ucauggcaauugugguggc

SEQ ID NO: 1461854 - RNA, 19 nt, Artificial Sequence
  Description of Artificial Sequence: Synthetic oligonucleotide
augccgugugcauguagga

SEQ ID NO: 1461855 - RNA, 19 nt, Artificial Sequence
  Description of Artificial Sequence: Synthetic oligonucleotide
cugggugcugaaguaauca

SEQ ID NO: 1461856 - RNA, 19 nt, Artificial Sequence
  Description of Artificial Sequence: Synthetic oligonucleotide
gccacauuacagauacuag

SEQ ID NO: 1461857 - RNA, 19 nt, Artificial Sequence
  Description of Artificial Sequence: Synthetic oligonucleotide
agcuugaugcugguagacu

SEQ ID NO: 1461858 - RNA, 19 nt, Artificial Sequence
  Description of Artificial Sequence: Synthetic oligonucleotide
aaccugguguaggcacuuc

SEQ ID NO: 1461859 - RNA, 19 nt, Artificial Sequence
  Description of Artificial Sequence: Synthetic oligonucleotide
cauugugcggcucaacccu

SEQ ID NO: 1461860 - RNA, 19 nt, Artificial Sequence
  Description of Artificial Sequence: Synthetic oligonucleotide
uucucgcagucugauggcu

SEQ ID NO: 1461861 - RNA, 19 nt, Artificial Sequence
  Description of Artificial Sequence: Synthetic oligonucleotide
auugugcggcucaacccuc

SEQ ID NO: 1461862 - RNA, 19 nt, Artificial Sequence
  Description of Artificial Sequence: Synthetic oligonucleotide
cauugcagaggcaugccgu

SEQ ID NO: 1461863 - RNA, 19 nt, Artificial Sequence
  Description of Artificial Sequence: Synthetic oligonucleotide
uggcuguguagugugggaa

SEQ ID NO: 1461864 - RNA, 19 nt, Artificial Sequence
  Description of Artificial Sequence: Synthetic oligonucleotide
aggcgaauuugcugggaau

SEQ ID NO: 1461865 - RNA, 19 nt, Artificial Sequence
  Description of Artificial Sequence: Synthetic oligonucleotide
cugagucggcgucaaagga

SEQ ID NO: 1461866 - RNA, 19 nt, Artificial Sequence
  Description of Artificial Sequence: Synthetic oligonucleotide
acggcgacagagcaagcuu

SEQ ID NO: 1461867 - RNA, 19 nt, Artificial Sequence
  Description of Artificial Sequence: Synthetic oligonucleotide
uugugcggcucaacccucu

SEQ ID NO: 1461868 - RNA, 19 nt, Artificial Sequence
  Description of Artificial Sequence: Synthetic oligonucleotide
gcagcuguuaaggaggcga

SEQ ID NO: 1461869 - RNA, 19 nt, Artificial Sequence
  Description of Artificial Sequence: Synthetic oligonucleotide
gugcagugugcuuguagca

SEQ ID NO: 1461870 - RNA, 19 nt, Artificial Sequence
  Description of Artificial Sequence: Synthetic oligonucleotide
caauugugguggcgauugc

SEQ ID NO: 1461871 - RNA, 19 nt, Artificial Sequence
  Description of Artificial Sequence: Synthetic oligonucleotide
ugcugcuguaggcgaauuu

SEQ ID NO: 1461872 - RNA, 19 nt, Artificial Sequence
  Description of Artificial Sequence: Synthetic oligonucleotide
cauugguuaugcuaucaau

SEQ ID NO: 1461873 - RNA, 19 nt, Artificial Sequence
  Description of Artificial Sequence: Synthetic oligonucleotide
cugaaacgaaagaggaacu

SEQ ID NO: 1461874 - RNA, 19 nt, Artificial Sequence
  Description of Artificial Sequence: Synthetic oligonucleotide
gcgaauuugcugggaauag

SEQ ID NO: 1461875 - RNA, 19 nt, Artificial Sequence
  Description of Artificial Sequence: Synthetic oligonucleotide
ugcugguagacugcaguuu

SEQ ID NO: 1461876 - RNA, 19 nt, Artificial Sequence
  Description of Artificial Sequence: Synthetic oligonucleotide
agcaaggcuucggaauucu

SEQ ID NO: 1461877 - RNA, 19 nt, Artificial Sequence
  Description of Artificial Sequence: Synthetic oligonucleotide
ugauggcauugcagaggca

SEQ ID NO: 1461878 - RNA, 19 nt, Artificial Sequence
  Description of Artificial Sequence: Synthetic oligonucleotide
agcacacuuaaaaccuggu

SEQ ID NO: 1461879 - RNA, 19 nt, Artificial Sequence
  Description of Artificial Sequence: Synthetic oligonucleotide
gguugagcgacuccaccuc

SEQ ID NO: 1461880 - RNA, 19 nt, Artificial Sequence
  Description of Artificial Sequence: Synthetic oligonucleotide
gggagggcuugucuuuagg

SEQ ID NO: 1461881 - RNA, 19 nt, Artificial Sequence
  Description of Artificial Sequence: Synthetic oligonucleotide
gaugucugauagaggucuc

SEQ ID NO: 1461882 - RNA, 19 nt, Artificial Sequence
  Description of Artificial Sequence: Synthetic oligonucleotide
uucuauggcaugggcuauc

SEQ ID NO: 1461883 - RNA, 19 nt, Artificial Sequence
  Description of Artificial Sequence: Synthetic oligonucleotide
cacugacauuuacuuaaca

SEQ ID NO: 1461884 - RNA, 19 nt, Artificial Sequence
  Description of Artificial Sequence: Synthetic oligonucleotide
uauuuccgguugagcgacu

SEQ ID NO: 1461885 - RNA, 19 nt, Artificial Sequence
  Description of Artificial Sequence: Synthetic oligonucleotide
auccugaguuuuacaaacu

SEQ ID NO: 1461886 - RNA, 19 nt, Artificial Sequence
  Description of Artificial Sequence: Synthetic oligonucleotide
gaacugaagcucuccuccu

SEQ ID NO: 1461887 - RNA, 19 nt, Artificial Sequence
  Description of Artificial Sequence: Synthetic oligonucleotide
ugccgugugcauguaggaa

SEQ ID NO: 1461888 - RNA, 19 nt, Artificial Sequence
  Description of Artificial Sequence: Synthetic oligonucleotide
uggcaauugugguggcgau

SEQ ID NO: 1461889 - RNA, 19 nt, Artificial Sequence
  Description of Artificial Sequence: Synthetic oligonucleotide
gcgugagcaguucccgugg

SEQ ID NO: 1461890 - RNA, 19 nt, Artificial Sequence
  Description of Artificial Sequence: Synthetic oligonucleotide
gcugguuauucuguacagc

SEQ ID NO: 1461891 - RNA, 19 nt, Artificial Sequence
  Description of Artificial Sequence: Synthetic oligonucleotide
ccacguuccucagaguugc

SEQ ID NO: 1461892 - RNA, 19 nt, Artificial Sequence
  Description of Artificial Sequence: Synthetic oligonucleotide
gaucauuuccuaaggucau

SEQ ID NO: 1461893 - RNA, 19 nt, Artificial Sequence
  Description of Artificial Sequence: Synthetic oligonucleotide
guuccggggagacggcgac

SEQ ID NO: 1461894 - RNA, 19 nt, Artificial Sequence
  Description of Artificial Sequence: Synthetic oligonucleotide
agaucaauccugaguuuua

SEQ ID NO: 1461895 - RNA, 19 nt, Artificial Sequence
  Description of Artificial Sequence: Synthetic oligonucleotide
gcgacuccaccucuucuag

SEQ ID NO: 1461896 - RNA, 19 nt, Artificial Sequence
  Description of Artificial Sequence: Synthetic oligonucleotide
acugacgacuccacuguaa

SEQ ID NO: 1461897 - RNA, 19 nt, Artificial Sequence
  Description of Artificial Sequence: Synthetic oligonucleotide
cagcaaacucugguacagc

SEQ ID NO: 1461898 - RNA, 19 nt, Artificial Sequence
  Description of Artificial Sequence: Synthetic oligonucleotide
gccgugugcauguaggaaa

SEQ ID NO: 1461899 - RNA, 19 nt, Artificial Sequence
  Description of Artificial Sequence: Synthetic oligonucleotide
guuaaggaggcgauccccu

SEQ ID NO: 1461900 - RNA, 19 nt, Artificial Sequence
  Description of Artificial Sequence: Synthetic oligonucleotide
ggcgauccccuugugguag

SEQ ID NO: 1461901 - RNA, 19 nt, Artificial Sequence
  Description of Artificial Sequence: Synthetic oligonucleotide
agccagaagugaagugcuc

SEQ ID NO: 1461902 - RNA, 19 nt, Artificial Sequence
  Description of Artificial Sequence: Synthetic oligonucleotide
gauuggagauucggccaca

SEQ ID NO: 1461903 - RNA, 19 nt, Artificial Sequence
  Description of Artificial Sequence: Synthetic oligonucleotide
ccucagaguugcugagucg

SEQ ID NO: 1461904 - RNA, 19 nt, Artificial Sequence
  Description of Artificial Sequence: Synthetic oligonucleotide
cagaagugaagugcucuga

SEQ ID NO: 1461905 - RNA, 19 nt, Artificial Sequence
  Description of Artificial Sequence: Synthetic oligonucleotide
cuguaaaggcugcugggcu

SEQ ID NO: 1461906 - RNA, 19 nt, Artificial Sequence
  Description of Artificial Sequence: Synthetic oligonucleotide
gacggaucucacacugaca

SEQ ID NO: 1461907 - RNA, 19 nt, Artificial Sequence
  Description of Artificial Sequence: Synthetic oligonucleotide
gaacuuucagcaaggcgau

SEQ ID NO: 1461908 - RNA, 19 nt, Artificial Sequence
  Description of Artificial Sequence: Synthetic oligonucleotide
ccacauuacagauacuagu

SEQ ID NO: 1461909 - RNA, 19 nt, Artificial Sequence
  Description of Artificial Sequence: Synthetic oligonucleotide
auuggagauucggccacau

SEQ ID NO: 1461910 - RNA, 19 nt, Artificial Sequence
  Description of Artificial Sequence: Synthetic oligonucleotide
uaaaggcugcugggcuugc

SEQ ID NO: 1461911 - RNA, 19 nt, Artificial Sequence
  Description of Artificial Sequence: Synthetic oligonucleotide
ucucgguaccgggaagcaa

SEQ ID NO: 1461912 - RNA, 19 nt, Artificial Sequence
  Description of Artificial Sequence: Synthetic oligonucleotide
ccgugugcauguaggaaac

SEQ ID NO: 1461913 - RNA, 19 nt, Artificial Sequence
  Description of Artificial Sequence: Synthetic oligonucleotide
cuagugagugacggaucuc

SEQ ID NO: 1461914 - RNA, 19 nt, Artificial Sequence
  Description of Artificial Sequence: Synthetic oligonucleotide
ggggccaguuuuccacacg

SEQ ID NO: 1461915 - RNA, 19 nt, Artificial Sequence
  Description of Artificial Sequence: Synthetic oligonucleotide
cucugcuggguuccgggga

SEQ ID NO: 1461916 - RNA, 19 nt, Artificial Sequence
  Description of Artificial Sequence: Synthetic oligonucleotide
ggcgucaaaggaugucuga

SEQ ID NO: 1461917 - RNA, 19 nt, Artificial Sequence
  Description of Artificial Sequence: Synthetic oligonucleotide
gucugauagaggucucggu

SEQ ID NO: 1461918 - RNA, 19 nt, Artificial Sequence
  Description of Artificial Sequence: Synthetic oligonucleotide
gcaucucucacugacgacu

SEQ ID NO: 1461919 - RNA, 19 nt, Artificial Sequence
  Description of Artificial Sequence: Synthetic oligonucleotide
gggcuucuauggcaugggc

SEQ ID NO: 1461920 - RNA, 19 nt, Artificial Sequence
  Description of Artificial Sequence: Synthetic oligonucleotide
cgacagagcaagcuugaug

SEQ ID NO: 1461921 - RNA, 19 nt, Artificial Sequence
  Description of Artificial Sequence: Synthetic oligonucleotide
ggcgaauuugcugggaaua

SEQ ID NO: 1461922 - RNA, 19 nt, Artificial Sequence
  Description of Artificial Sequence: Synthetic oligonucleotide
gagugacggaucucacacu

SEQ ID NO: 1461923 - RNA, 19 nt, Artificial Sequence
  Description of Artificial Sequence: Synthetic oligonucleotide
gguuuagagccaugcugaa

SEQ ID NO: 1461924 - RNA, 19 nt, Artificial Sequence
  Description of Artificial Sequence: Synthetic oligonucleotide
uccuaaggucauggcaauu

SEQ ID NO: 1461925 - RNA, 19 nt, Artificial Sequence
  Description of Artificial Sequence: Synthetic oligonucleotide
cguauuuccgguugagcga

SEQ ID NO: 1461926 - RNA, 19 nt, Artificial Sequence
  Description of Artificial Sequence: Synthetic oligonucleotide
cugacgacuccacuguaau

SEQ ID NO: 1461927 - RNA, 19 nt, Artificial Sequence
  Description of Artificial Sequence: Synthetic oligonucleotide
guaggcgaauuugcuggga

SEQ ID NO: 1461928 - RNA, 19 nt, Artificial Sequence
  Description of Artificial Sequence: Synthetic oligonucleotide
agacggcgacagagcaagc

SEQ ID NO: 1461929 - RNA, 19 nt, Artificial Sequence
  Description of Artificial Sequence: Synthetic oligonucleotide
acacacggagauacagaau

SEQ ID NO: 1461930 - RNA, 19 nt, Artificial Sequence
  Description of Artificial Sequence: Synthetic oligonucleotide
aggaggcgauccccuugug

SEQ ID NO: 1461931 - RNA, 19 nt, Artificial Sequence
  Description of Artificial Sequence: Synthetic oligonucleotide
gucggcgucaaaggauguc

SEQ ID NO: 1461932 - RNA, 19 nt, Artificial Sequence
  Description of Artificial Sequence: Synthetic oligonucleotide
gaacaacaccuucuaccuu

SEQ ID NO: 1461933 - RNA, 19 nt, Artificial Sequence
  Description of Artificial Sequence: Synthetic oligonucleotide
gagcgacuccaccucuucu

SEQ ID NO: 1461934 - RNA, 19 nt, Artificial Sequence
  Description of Artificial Sequence: Synthetic oligonucleotide
cugcucggcgugagagaac

SEQ ID NO: 1461935 - RNA, 19 nt, Artificial Sequence
  Description of Artificial Sequence: Synthetic oligonucleotide
ccacacgaugccauuggca

SEQ ID NO: 1461936 - RNA, 19 nt, Artificial Sequence
  Description of Artificial Sequence: Synthetic oligonucleotide
cuucggaagaguccugguu

SEQ ID NO: 1461937 - RNA, 19 nt, Artificial Sequence
  Description of Artificial Sequence: Synthetic oligonucleotide
gugacggaucucacacuga

SEQ ID NO: 1461938 - RNA, 19 nt, Artificial Sequence
  Description of Artificial Sequence: Synthetic oligonucleotide
gucucgguaccgggaagca

SEQ ID NO: 1461939 - RNA, 19 nt, Artificial Sequence
  Description of Artificial Sequence: Synthetic oligonucleotide
agcaagcuugaugcuggua

SEQ ID NO: 1461940 - RNA, 19 nt, Artificial Sequence
  Description of Artificial Sequence: Synthetic oligonucleotide
gcgagaaggcuuggagaag

SEQ ID NO: 1461941 - RNA, 19 nt, Artificial Sequence
  Description of Artificial Sequence: Synthetic oligonucleotide
ggcagcuguuaaggaggcg

SEQ ID NO: 1461942 - RNA, 19 nt, Artificial Sequence
  Description of Artificial Sequence: Synthetic oligonucleotide
cagaggcaugccgugugca

SEQ ID NO: 1461943 - RNA, 19 nt, Artificial Sequence
  Description of Artificial Sequence: Synthetic oligonucleotide
uuccggggagacggcgaca

SEQ ID NO: 1461944 - RNA, 19 nt, Artificial Sequence
  Description of Artificial Sequence: Synthetic oligonucleotide
agucggcgucaaaggaugu

SEQ ID NO: 1461945 - RNA, 19 nt, Artificial Sequence
  Description of Artificial Sequence: Synthetic oligonucleotide
gggcuaucaauaagcagcu

SEQ ID NO: 1461946 - RNA, 19 nt, Artificial Sequence
  Description of Artificial Sequence: Synthetic oligonucleotide
gggcguauuuccgguugag

SEQ ID NO: 1461947 - RNA, 19 nt, Artificial Sequence
  Description of Artificial Sequence: Synthetic oligonucleotide
ggcuucuauggcaugggcu

SEQ ID NO: 1461948 - RNA, 19 nt, Artificial Sequence
  Description of Artificial Sequence: Synthetic oligonucleotide
guucccguggagccauacu

SEQ ID NO: 1461949 - RNA, 19 nt, Artificial Sequence
  Description of Artificial Sequence: Synthetic oligonucleotide
guacacggccaucauucuu

SEQ ID NO: 1461950 - RNA, 19 nt, Artificial Sequence
  Description of Artificial Sequence: Synthetic oligonucleotide
ccaucauucuucucucaua

SEQ ID NO: 1461951 - RNA, 19 nt, Artificial Sequence
  Description of Artificial Sequence: Synthetic oligonucleotide
cggagauacagaaucuucu

SEQ ID NO: 1461952 - RNA, 19 nt, Artificial Sequence
  Description of Artificial Sequence: Synthetic oligonucleotide
cauggcuguacacggccau

SEQ ID NO: 1461953 - RNA, 19 nt, Artificial Sequence
  Description of Artificial Sequence: Synthetic oligonucleotide
ggggcguauuuccgguuga

SEQ ID NO: 1461954 - RNA, 19 nt, Artificial Sequence
  Description of Artificial Sequence: Synthetic oligonucleotide
cgacuccaccucuucuagg

SEQ ID NO: 1461955 - RNA, 19 nt, Artificial Sequence
  Description of Artificial Sequence: Synthetic oligonucleotide
cuauggcaugggcuaucaa

SEQ ID NO: 1461956 - RNA, 19 nt, Artificial Sequence
  Description of Artificial Sequence: Synthetic oligonucleotide
ccgggaagcaaggcuucgg

SEQ ID NO: 1461957 - RNA, 19 nt, Artificial Sequence
  Description of Artificial Sequence: Synthetic oligonucleotide
guacagcaaugggcucugc

SEQ ID NO: 1461958 - RNA, 19 nt, Artificial Sequence
  Description of Artificial Sequence: Synthetic oligonucleotide
cagcuguuaaggaggcgau

SEQ ID NO: 1461959 - RNA, 19 nt, Artificial Sequence
  Description of Artificial Sequence: Synthetic oligonucleotide
cgacuccacuguaaugcug

SEQ ID NO: 1461960 - RNA, 19 nt, Artificial Sequence
  Description of Artificial Sequence: Synthetic oligonucleotide
ggcuguguagugugggaau

SEQ ID NO: 1461961 - RNA, 19 nt, Artificial Sequence
  Description of Artificial Sequence: Synthetic oligonucleotide
gcagucugauggcugugua

SEQ ID NO: 1461962 - RNA, 19 nt, Artificial Sequence
  Description of Artificial Sequence: Synthetic oligonucleotide
cacggagauacagaaucuu

SEQ ID NO: 1461963 - RNA, 19 nt, Artificial Sequence
  Description of Artificial Sequence: Synthetic oligonucleotide
cagacacugcucggcguga

SEQ ID NO: 1461964 - RNA, 19 nt, Artificial Sequence
  Description of Artificial Sequence: Synthetic oligonucleotide
cacugacgacuccacugua

SEQ ID NO: 1461965 - RNA, 19 nt, Artificial Sequence
  Description of Artificial Sequence: Synthetic oligonucleotide
ccguggagccauacuccug

SEQ ID NO: 1461966 - RNA, 19 nt, Artificial Sequence
  Description of Artificial Sequence: Synthetic oligonucleotide
cgucaaaggaugucugaua

SEQ ID NO: 1461967 - RNA, 19 nt, Artificial Sequence
  Description of Artificial Sequence: Synthetic oligonucleotide
cggcgucaaaggaugucug

SEQ ID NO: 1461968 - RNA, 19 nt, Artificial Sequence
  Description of Artificial Sequence: Synthetic oligonucleotide
gcuccaucucauugguuau

SEQ ID NO: 1461969 - RNA, 19 nt, Artificial Sequence
  Description of Artificial Sequence: Synthetic oligonucleotide
ggcuaucaauaagcagcuc

SEQ ID NO: 1461970 - RNA, 19 nt, Artificial Sequence
  Description of Artificial Sequence: Synthetic oligonucleotide
ggagacggcgacagagcaa

SEQ ID NO: 1461971 - RNA, 19 nt, Artificial Sequence
  Description of Artificial Sequence: Synthetic oligonucleotide
gcuguacacggccaucauu

SEQ ID NO: 1461972 - RNA, 19 nt, Artificial Sequence
  Description of Artificial Sequence: Synthetic oligonucleotide
gcggcucaacccucugcuc

SEQ ID NO: 1461973 - RNA, 19 nt, Artificial Sequence
  Description of Artificial Sequence: Synthetic oligonucleotide
gggccaugucaugguugcc

SEQ ID NO: 1461974 - RNA, 19 nt, Artificial Sequence
  Description of Artificial Sequence: Synthetic oligonucleotide
gcgauccccuugugguaga

SEQ ID NO: 1461975 - RNA, 19 nt, Artificial Sequence
  Description of Artificial Sequence: Synthetic oligonucleotide
cccguggagccauacuccu

SEQ ID NO: 1461976 - RNA, 19 nt, Artificial Sequence
  Description of Artificial Sequence: Synthetic oligonucleotide
ccacuguaaugcugugugu

SEQ ID NO: 1461977 - RNA, 19 nt, Artificial Sequence
  Description of Artificial Sequence: Synthetic oligonucleotide
ccaucucauugguuaugcu

SEQ ID NO: 1461978 - RNA, 19 nt, Artificial Sequence
  Description of Artificial Sequence: Synthetic oligonucleotide
cgguaccgggaagcaaggc

SEQ ID NO: 1461979 - RNA, 19 nt, Artificial Sequence
  Description of Artificial Sequence: Synthetic oligonucleotide
caggggcguauuuccgguu

SEQ ID NO: 1461980 - RNA, 19 nt, Artificial Sequence
  Description of Artificial Sequence: Synthetic oligonucleotide
ggcgugcuggcagcuguua

SEQ ID NO: 1461981 - RNA, 19 nt, Artificial Sequence
  Description of Artificial Sequence: Synthetic oligonucleotide
ggccaguuuuccacacgau

SEQ ID NO: 1461982 - RNA, 19 nt, Artificial Sequence
  Description of Artificial Sequence: Synthetic oligonucleotide
gcucggcgugagagaacuc

SEQ ID NO: 1461983 - RNA, 19 nt, Artificial Sequence
  Description of Artificial Sequence: Synthetic oligonucleotide
gcgacagagcaagcuugau

SEQ ID NO: 1461984 - RNA, 19 nt, Artificial Sequence
  Description of Artificial Sequence: Synthetic oligonucleotide
ccacaucucugaagaucau

SEQ ID NO: 1461985 - RNA, 19 nt, Artificial Sequence
  Description of Artificial Sequence: Synthetic oligonucleotide
gcaaggcuucggaauucuu

SEQ ID NO: 1461986 - RNA, 19 nt, Artificial Sequence
  Description of Artificial Sequence: Synthetic oligonucleotide
ccggggagacggcgacaga

SEQ ID NO: 1461987 - RNA, 19 nt, Artificial Sequence
  Description of Artificial Sequence: Synthetic oligonucleotide
ggcuugucuuuaggcuguu

SEQ ID NO: 1461988 - RNA, 19 nt, Artificial Sequence
  Description of Artificial Sequence: Synthetic oligonucleotide
cggaucucacacugacauu

SEQ ID NO: 1461989 - RNA, 19 nt, Artificial Sequence
  Description of Artificial Sequence: Synthetic oligonucleotide
cgauccccuugugguagaa

SEQ ID NO: 1461990 - RNA, 19 nt, Artificial Sequence
  Description of Artificial Sequence: Synthetic oligonucleotide
cggcgugagagaacuccuu

SEQ ID NO: 1461991 - RNA, 19 nt, Artificial Sequence
  Description of Artificial Sequence: Synthetic oligonucleotide
agaacuuaaacucaggccg

SEQ ID NO: 1461992 - RNA, 19 nt, Artificial Sequence
  Description of Artificial Sequence: Synthetic oligonucleotide
auaugagucggucaaaucc

SEQ ID NO: 1461993 - RNA, 19 nt, Artificial Sequence
  Description of Artificial Sequence: Synthetic oligonucleotide
uguguuauaaugcagcucc

SEQ ID NO: 1461994 - RNA, 19 nt, Artificial Sequence
  Description of Artificial Sequence: Synthetic oligonucleotide
uucacuaucccacacagcc

SEQ ID NO: 1461995 - RNA, 19 nt, Artificial Sequence
  Description of Artificial Sequence: Synthetic oligonucleotide
aauaauaugagucggucaa

SEQ ID NO: 1461996 - RNA, 19 nt, Artificial Sequence
  Description of Artificial Sequence: Synthetic oligonucleotide
uccacaauaauaugagucg

SEQ ID NO: 1461997 - RNA, 19 nt, Artificial Sequence
  Description of Artificial Sequence: Synthetic oligonucleotide
aucucacccauauacagcc

SEQ ID NO: 1461998 - RNA, 19 nt, Artificial Sequence
  Description of Artificial Sequence: Synthetic oligonucleotide
uuauacaggauccuucugc

SEQ ID NO: 1461999 - RNA, 19 nt, Artificial Sequence
  Description of Artificial Sequence: Synthetic oligonucleotide
aaagcuuaacuguaccauc

SEQ ID NO: 1462000 - RNA, 19 nt, Artificial Sequence
  Description of Artificial Sequence: Synthetic oligonucleotide
gauaagaucccucagaacu

SEQ ID NO: 1462001 - RNA, 19 nt, Artificial Sequence
  Description of Artificial Sequence: Synthetic oligonucleotide
gaaaugucuggauagcugc

SEQ ID NO: 1462002 - RNA, 19 nt, Artificial Sequence
  Description of Artificial Sequence: Synthetic oligonucleotide
ucagaacuuaaacucaggc

SEQ ID NO: 1462003 - RNA, 19 nt, Artificial Sequence
  Description of Artificial Sequence: Synthetic oligonucleotide
aauguggcauaguuaucgc

SEQ ID NO: 1462004 - RNA, 19 nt, Artificial Sequence
  Description of Artificial Sequence: Synthetic oligonucleotide
uguggcauaguuaucgcag

SEQ ID NO: 1462005 - RNA, 19 nt, Artificial Sequence
  Description of Artificial Sequence: Synthetic oligonucleotide
caugguauagguuaacuug

SEQ ID NO: 1462006 - RNA, 19 nt, Artificial Sequence
  Description of Artificial Sequence: Synthetic oligonucleotide
uguauuguccauugcauug

SEQ ID NO: 1462007 - RNA, 19 nt, Artificial Sequence
  Description of Artificial Sequence: Synthetic oligonucleotide
uauagguuaacuuguuuug

SEQ ID NO: 1462008 - RNA, 19 nt, Artificial Sequence
  Description of Artificial Sequence: Synthetic oligonucleotide
agccuuuuaacccucucgc

SEQ ID NO: 1462009 - RNA, 19 nt, Artificial Sequence
  Description of Artificial Sequence: Synthetic oligonucleotide
aauaugagucggucaaauc

SEQ ID NO: 1462010 - RNA, 19 nt, Artificial Sequence
  Description of Artificial Sequence: Synthetic oligonucleotide
aacaugaguucacaaagga

SEQ ID NO: 1462011 - RNA, 19 nt, Artificial Sequence
  Description of Artificial Sequence: Synthetic oligonucleotide
uaacaugaguucacaaagg

SEQ ID NO: 1462012 - RNA, 19 nt, Artificial Sequence
  Description of Artificial Sequence: Synthetic oligonucleotide
accagagauaaucugauca

SEQ ID NO: 1462013 - RNA, 19 nt, Artificial Sequence
  Description of Artificial Sequence: Synthetic oligonucleotide
ugucuauuccaccagagau

SEQ ID NO: 1462014 - RNA, 19 nt, Artificial Sequence
  Description of Artificial Sequence: Synthetic oligonucleotide
aagguaaucuguuuggauu

SEQ ID NO: 1462015 - RNA, 19 nt, Artificial Sequence
  Description of Artificial Sequence: Synthetic oligonucleotide
uagacauuccacaauaaua

SEQ ID NO: 1462016 - RNA, 19 nt, Artificial Sequence
  Description of Artificial Sequence: Synthetic oligonucleotide
auaguuaucgcagucacca

SEQ ID NO: 1462017 - RNA, 19 nt, Artificial Sequence
  Description of Artificial Sequence: Synthetic oligonucleotide
ugaaaugucuggauagcug

SEQ ID NO: 1462018 - RNA, 19 nt, Artificial Sequence
  Description of Artificial Sequence: Synthetic oligonucleotide
acagcuaacaccugguaug

SEQ ID NO: 1462019 - RNA, 19 nt, Artificial Sequence
  Description of Artificial Sequence: Synthetic oligonucleotide
uuguccauugcauuggaca

SEQ ID NO: 1462020 - RNA, 19 nt, Artificial Sequence
  Description of Artificial Sequence: Synthetic oligonucleotide
aaacuaauguuugucccuc

SEQ ID NO: 1462021 - RNA, 19 nt, Artificial Sequence
  Description of Artificial Sequence: Synthetic oligonucleotide
uguaccaucgucacugcca

SEQ ID NO: 1462022 - RNA, 19 nt, Artificial Sequence
  Description of Artificial Sequence: Synthetic oligonucleotide
auugcauuggacaagagau

SEQ ID NO: 1462023 - RNA, 19 nt, Artificial Sequence
  Description of Artificial Sequence: Synthetic oligonucleotide
augauuggggcuugaaggg

SEQ ID NO: 1462024 - RNA, 19 nt, Artificial Sequence
  Description of Artificial Sequence: Synthetic oligonucleotide
aaucccugaaaucuggcaa

SEQ ID NO: 1462025 - RNA, 19 nt, Artificial Sequence
  Description of Artificial Sequence: Synthetic oligonucleotide
cagaacuuaaacucaggcc

SEQ ID NO: 1462026 - RNA, 19 nt, Artificial Sequence
  Description of Artificial Sequence: Synthetic oligonucleotide
aagcuuaacuguaccaucg

SEQ ID NO: 1462027 - RNA, 19 nt, Artificial Sequence
  Description of Artificial Sequence: Synthetic oligonucleotide
uaucugucgaugcugagaa

SEQ ID NO: 1462028 - RNA, 19 nt, Artificial Sequence
  Description of Artificial Sequence: Synthetic oligonucleotide
aaauaauacaagccaguua

SEQ ID NO: 1462029 - RNA, 19 nt, Artificial Sequence
  Description of Artificial Sequence: Synthetic oligonucleotide
gauaucguugucuauucca

SEQ ID NO: 1462030 - RNA, 19 nt, Artificial Sequence
  Description of Artificial Sequence: Synthetic oligonucleotide
agguuaacuuguuuugacg

SEQ ID NO: 1462031 - RNA, 19 nt, Artificial Sequence
  Description of Artificial Sequence: Synthetic oligonucleotide
aaauccugaagaugccaag

SEQ ID NO: 1462032 - RNA, 19 nt, Artificial Sequence
  Description of Artificial Sequence: Synthetic oligonucleotide
uuaacuguaccaucgucac

SEQ ID NO: 1462033 - RNA, 19 nt, Artificial Sequence
  Description of Artificial Sequence: Synthetic oligonucleotide
ggugacagaaucugcaugg

SEQ ID NO: 1462034 - RNA, 19 nt, Artificial Sequence
  Description of Artificial Sequence: Synthetic oligonucleotide
agauaaucugaucacuugu

SEQ ID NO: 1462035 - RNA, 19 nt, Artificial Sequence
  Description of Artificial Sequence: Synthetic oligonucleotide
gagagcaacaugauugggg

SEQ ID NO: 1462036 - RNA, 19 nt, Artificial Sequence
  Description of Artificial Sequence: Synthetic oligonucleotide
uucaauugacauuuccugu

SEQ ID NO: 1462037 - RNA, 19 nt, Artificial Sequence
  Description of Artificial Sequence: Synthetic oligonucleotide
ucccucagaacuuaaacuc

SEQ ID NO: 1462038 - RNA, 19 nt, Artificial Sequence
  Description of Artificial Sequence: Synthetic oligonucleotide
aaagguaaucuguuuggau

SEQ ID NO: 1462039 - RNA, 19 nt, Artificial Sequence
  Description of Artificial Sequence: Synthetic oligonucleotide
gagauaaucugaucacuug

SEQ ID NO: 1462040 - RNA, 19 nt, Artificial Sequence
  Description of Artificial Sequence: Synthetic oligonucleotide
uaucuugcuuccaucaggu

SEQ ID NO: 1462041 - RNA, 19 nt, Artificial Sequence
  Description of Artificial Sequence: Synthetic oligonucleotide
aacaggagaccucaaacua

SEQ ID NO: 1462042 - RNA, 19 nt, Artificial Sequence
  Description of Artificial Sequence: Synthetic oligonucleotide
gguuaacuuguuuugacgc

SEQ ID NO: 1462043 - RNA, 19 nt, Artificial Sequence
  Description of Artificial Sequence: Synthetic oligonucleotide
cuaucuugcuuccaucagg

SEQ ID NO: 1462044 - RNA, 19 nt, Artificial Sequence
  Description of Artificial Sequence: Synthetic oligonucleotide
acguacacaaaccugucug

SEQ ID NO: 1462045 - RNA, 19 nt, Artificial Sequence
  Description of Artificial Sequence: Synthetic oligonucleotide
cuuaacuguaccaucguca

SEQ ID NO: 1462046 - RNA, 19 nt, Artificial Sequence
  Description of Artificial Sequence: Synthetic oligonucleotide
gaaacuugcagcaguacac

SEQ ID NO: 1462047 - RNA, 19 nt, Artificial Sequence
  Description of Artificial Sequence: Synthetic oligonucleotide
acuugugucguugaagguc

SEQ ID NO: 1462048 - RNA, 19 nt, Artificial Sequence
  Description of Artificial Sequence: Synthetic oligonucleotide
ccaacagcaacucaugucg

SEQ ID NO: 1462049 - RNA, 19 nt, Artificial Sequence
  Description of Artificial Sequence: Synthetic oligonucleotide
cugaaggcagaucagccgg

SEQ ID NO: 1462050 - RNA, 19 nt, Artificial Sequence
  Description of Artificial Sequence: Synthetic oligonucleotide
uuggggugaaacuugcagc

SEQ ID NO: 1462051 - RNA, 19 nt, Artificial Sequence
  Description of Artificial Sequence: Synthetic oligonucleotide
gauaaucugaucacuugug

SEQ ID NO: 1462052 - RNA, 19 nt, Artificial Sequence
  Description of Artificial Sequence: Synthetic oligonucleotide
aggaugauaggcucgucag

SEQ ID NO: 1462053 - RNA, 19 nt, Artificial Sequence
  Description of Artificial Sequence: Synthetic oligonucleotide
agauaagaucccucagaac

SEQ ID NO: 1462054 - RNA, 19 nt, Artificial Sequence
  Description of Artificial Sequence: Synthetic oligonucleotide
ucccauacguacacaaacc

SEQ ID NO: 1462055 - RNA, 19 nt, Artificial Sequence
  Description of Artificial Sequence: Synthetic oligonucleotide
aagccaguuacucaauuua

SEQ ID NO: 1462056 - RNA, 19 nt, Artificial Sequence
  Description of Artificial Sequence: Synthetic oligonucleotide
ucuauuccaccagagauaa

SEQ ID NO: 1462057 - RNA, 19 nt, Artificial Sequence
  Description of Artificial Sequence: Synthetic oligonucleotide
ugauaggcucgucagggug

SEQ ID NO: 1462058 - RNA, 19 nt, Artificial Sequence
  Description of Artificial Sequence: Synthetic oligonucleotide
ggucaaauccugaagaugc

SEQ ID NO: 1462059 - RNA, 19 nt, Artificial Sequence
  Description of Artificial Sequence: Synthetic oligonucleotide
agacauuccacaauaauau

SEQ ID NO: 1462060 - RNA, 19 nt, Artificial Sequence
  Description of Artificial Sequence: Synthetic oligonucleotide
auacaagccaguuacucaa

SEQ ID NO: 1462061 - RNA, 19 nt, Artificial Sequence
  Description of Artificial Sequence: Synthetic oligonucleotide
uaaucugaucacuuguguc

SEQ ID NO: 1462062 - RNA, 19 nt, Artificial Sequence
  Description of Artificial Sequence: Synthetic oligonucleotide
auaucguugucuauuccac

SEQ ID NO: 1462063 - RNA, 19 nt, Artificial Sequence
  Description of Artificial Sequence: Synthetic oligonucleotide
ugaaggucacagcuaacac

SEQ ID NO: 1462064 - RNA, 19 nt, Artificial Sequence
  Description of Artificial Sequence: Synthetic oligonucleotide
aaaagguaaucuguuugga

SEQ ID NO: 1462065 - RNA, 19 nt, Artificial Sequence
  Description of Artificial Sequence: Synthetic oligonucleotide
aucguugucuauuccacca

SEQ ID NO: 1462066 - RNA, 19 nt, Artificial Sequence
  Description of Artificial Sequence: Synthetic oligonucleotide
auagacauuccacaauaau

SEQ ID NO: 1462067 - RNA, 19 nt, Artificial Sequence
  Description of Artificial Sequence: Synthetic oligonucleotide
cuuuuaacccucucgccug

SEQ ID NO: 1462068 - RNA, 19 nt, Artificial Sequence
  Description of Artificial Sequence: Synthetic oligonucleotide
uccauuacugcuccacugu

SEQ ID NO: 1462069 - RNA, 19 nt, Artificial Sequence
  Description of Artificial Sequence: Synthetic oligonucleotide
guuaucgcagucaccauag

SEQ ID NO: 1462070 - RNA, 19 nt, Artificial Sequence
  Description of Artificial Sequence: Synthetic oligonucleotide
caguuuuaucugucgaugc

SEQ ID NO: 1462071 - RNA, 19 nt, Artificial Sequence
  Description of Artificial Sequence: Synthetic oligonucleotide
gaacuuaaacucaggccgg

SEQ ID NO: 1462072 - RNA, 19 nt, Artificial Sequence
  Description of Artificial Sequence: Synthetic oligonucleotide
uguccauugcauuggacaa

SEQ ID NO: 1462073 - RNA, 19 nt, Artificial Sequence
  Description of Artificial Sequence: Synthetic oligonucleotide
caaaccugucugcugagcc

SEQ ID NO: 1462074 - RNA, 19 nt, Artificial Sequence
  Description of Artificial Sequence: Synthetic oligonucleotide
uagguuaacuuguuuugac

SEQ ID NO: 1462075 - RNA, 19 nt, Artificial Sequence
  Description of Artificial Sequence: Synthetic oligonucleotide
gaagaugccaagguggauc

SEQ ID NO: 1462076 - RNA, 19 nt, Artificial Sequence
  Description of Artificial Sequence: Synthetic oligonucleotide
ugauaucguugucuauucc

SEQ ID NO: 1462077 - RNA, 19 nt, Artificial Sequence
  Description of Artificial Sequence: Synthetic oligonucleotide
gauaggcucgucagggugg

SEQ ID NO: 1462078 - RNA, 19 nt, Artificial Sequence
  Description of Artificial Sequence: Synthetic oligonucleotide
uugauaucguugucuauuc

SEQ ID NO: 1462079 - RNA, 19 nt, Artificial Sequence
  Description of Artificial Sequence: Synthetic oligonucleotide
ucugaaaugucuggauagc

SEQ ID NO: 1462080 - RNA, 19 nt, Artificial Sequence
  Description of Artificial Sequence: Synthetic oligonucleotide
acuaauguuugucccucug

SEQ ID NO: 1462081 - RNA, 19 nt, Artificial Sequence
  Description of Artificial Sequence: Synthetic oligonucleotide
uuaucugucgaugcugaga

SEQ ID NO: 1462082 - RNA, 19 nt, Artificial Sequence
  Description of Artificial Sequence: Synthetic oligonucleotide
uaucguugucuauuccacc

SEQ ID NO: 1462083 - RNA, 19 nt, Artificial Sequence
  Description of Artificial Sequence: Synthetic oligonucleotide
ucaugguauagguuaacuu

SEQ ID NO: 1462084 - RNA, 19 nt, Artificial Sequence
  Description of Artificial Sequence: Synthetic oligonucleotide
gaaaucuggcaagugguac

SEQ ID NO: 1462085 - RNA, 19 nt, Artificial Sequence
  Description of Artificial Sequence: Synthetic oligonucleotide
cucagaacuuaaacucagg

SEQ ID NO: 1462086 - RNA, 19 nt, Artificial Sequence
  Description of Artificial Sequence: Synthetic oligonucleotide
gacccuucagccuuuuaac

SEQ ID NO: 1462087 - RNA, 19 nt, Artificial Sequence
  Description of Artificial Sequence: Synthetic oligonucleotide
aaacuugcagcaguacacu

SEQ ID NO: 1462088 - RNA, 19 nt, Artificial Sequence
  Description of Artificial Sequence: Synthetic oligonucleotide
uacaagugguugcuggagu

SEQ ID NO: 1462089 - RNA, 19 nt, Artificial Sequence
  Description of Artificial Sequence: Synthetic oligonucleotide
cauacguacacaaaccugu

SEQ ID NO: 1462090 - RNA, 19 nt, Artificial Sequence
  Description of Artificial Sequence: Synthetic oligonucleotide
cuggauaacaugaguucac

SEQ ID NO: 1462091 - RNA, 19 nt, Artificial Sequence
  Description of Artificial Sequence: Synthetic oligonucleotide
agaacaccggaggagguuc

SEQ ID NO: 1462092 - RNA, 19 nt, Artificial Sequence
  Description of Artificial Sequence: Synthetic oligonucleotide
uggcuggauaacaugaguu

SEQ ID NO: 1462093 - RNA, 19 nt, Artificial Sequence
  Description of Artificial Sequence: Synthetic oligonucleotide
uccauugcauuggacaaga

SEQ ID NO: 1462094 - RNA, 19 nt, Artificial Sequence
  Description of Artificial Sequence: Synthetic oligonucleotide
aucgcagucaccauagaca

SEQ ID NO: 1462095 - RNA, 19 nt, Artificial Sequence
  Description of Artificial Sequence: Synthetic oligonucleotide
aaucuggcaagugguacca

SEQ ID NO: 1462096 - RNA, 19 nt, Artificial Sequence
  Description of Artificial Sequence: Synthetic oligonucleotide
uaauaugagucggucaaau

SEQ ID NO: 1462097 - RNA, 19 nt, Artificial Sequence
  Description of Artificial Sequence: Synthetic oligonucleotide
cauaguuaucgcagucacc

SEQ ID NO: 1462098 - RNA, 19 nt, Artificial Sequence
  Description of Artificial Sequence: Synthetic oligonucleotide
acaagagauaagaucccuc

SEQ ID NO: 1462099 - RNA, 19 nt, Artificial Sequence
  Description of Artificial Sequence: Synthetic oligonucleotide
uacguacacaaaccugucu

SEQ ID NO: 1462100 - RNA, 19 nt, Artificial Sequence
  Description of Artificial Sequence: Synthetic oligonucleotide
caauaauaugagucgguca

SEQ ID NO: 1462101 - RNA, 19 nt, Artificial Sequence
  Description of Artificial Sequence: Synthetic oligonucleotide
guuaacuuguuuugacgca

SEQ ID NO: 1462102 - RNA, 19 nt, Artificial Sequence
  Description of Artificial Sequence: Synthetic oligonucleotide
uugacgcaggucccaaacc

SEQ ID NO: 1462103 - RNA, 19 nt, Artificial Sequence
  Description of Artificial Sequence: Synthetic oligonucleotide
ugaaaucuggcaaguggua

SEQ ID NO: 1462104 - RNA, 19 nt, Artificial Sequence
  Description of Artificial Sequence: Synthetic oligonucleotide
uuucacuaucccacacagc

SEQ ID NO: 1462105 - RNA, 19 nt, Artificial Sequence
  Description of Artificial Sequence: Synthetic oligonucleotide
aguacacuucuccuucgug

SEQ ID NO: 1462106 - RNA, 19 nt, Artificial Sequence
  Description of Artificial Sequence: Synthetic oligonucleotide
gguggugucccauacguac

SEQ ID NO: 1462107 - RNA, 19 nt, Artificial Sequence
  Description of Artificial Sequence: Synthetic oligonucleotide
aacuaauguuugucccucu

SEQ ID NO: 1462108 - RNA, 19 nt, Artificial Sequence
  Description of Artificial Sequence: Synthetic oligonucleotide
gagaccaaucccugaaauc

SEQ ID NO: 1462109 - RNA, 19 nt, Artificial Sequence
  Description of Artificial Sequence: Synthetic oligonucleotide
ucaggugaccaagaacacc

SEQ ID NO: 1462110 - RNA, 19 nt, Artificial Sequence
  Description of Artificial Sequence: Synthetic oligonucleotide
cuggaguauggccaucacc

SEQ ID NO: 1462111 - RNA, 19 nt, Artificial Sequence
  Description of Artificial Sequence: Synthetic oligonucleotide
auagguuaacuuguuuuga

SEQ ID NO: 1462112 - RNA, 19 nt, Artificial Sequence
  Description of Artificial Sequence: Synthetic oligonucleotide
uggauaacaugaguucaca

SEQ ID NO: 1462113 - RNA, 19 nt, Artificial Sequence
  Description of Artificial Sequence: Synthetic oligonucleotide
caaaccuugauaucguugu

SEQ ID NO: 1462114 - RNA, 19 nt, Artificial Sequence
  Description of Artificial Sequence: Synthetic oligonucleotide
agacucgcacuguauuguc

SEQ ID NO: 1462115 - RNA, 19 nt, Artificial Sequence
  Description of Artificial Sequence: Synthetic oligonucleotide
aguuaucgcagucaccaua

SEQ ID NO: 1462116 - RNA, 19 nt, Artificial Sequence
  Description of Artificial Sequence: Synthetic oligonucleotide
ucacuaucccacacagcca

SEQ ID NO: 1462117 - RNA, 19 nt, Artificial Sequence
  Description of Artificial Sequence: Synthetic oligonucleotide
acaaaccugucugcugagc

SEQ ID NO: 1462118 - RNA, 19 nt, Artificial Sequence
  Description of Artificial Sequence: Synthetic oligonucleotide
cucgucaggguggaaagcc

SEQ ID NO: 1462119 - RNA, 19 nt, Artificial Sequence
  Description of Artificial Sequence: Synthetic oligonucleotide
ggguacaagugguugcugg

SEQ ID NO: 1462120 - RNA, 19 nt, Artificial Sequence
  Description of Artificial Sequence: Synthetic oligonucleotide
ugcauggccucucauggua

SEQ ID NO: 1462121 - RNA, 19 nt, Artificial Sequence
  Description of Artificial Sequence: Synthetic oligonucleotide
cugucgaugcugagaagag

SEQ ID NO: 1462122 - RNA, 19 nt, Artificial Sequence
  Description of Artificial Sequence: Synthetic oligonucleotide
aacccucucgccuguuuca

SEQ ID NO: 1462123 - RNA, 19 nt, Artificial Sequence
  Description of Artificial Sequence: Synthetic oligonucleotide
uuuuaacccucucgccugu

SEQ ID NO: 1462124 - RNA, 19 nt, Artificial Sequence
  Description of Artificial Sequence: Synthetic oligonucleotide
ugagucggucaaauccuga

SEQ ID NO: 1462125 - RNA, 19 nt, Artificial Sequence
  Description of Artificial Sequence: Synthetic oligonucleotide
cuuauacaggauccuucug

SEQ ID NO: 1462126 - RNA, 19 nt, Artificial Sequence
  Description of Artificial Sequence: Synthetic oligonucleotide
accauagacauuccacaau

SEQ ID NO: 1462127 - RNA, 19 nt, Artificial Sequence
  Description of Artificial Sequence: Synthetic oligonucleotide
ucccucugaagaaaucuua

SEQ ID NO: 1462128 - RNA, 19 nt, Artificial Sequence
  Description of Artificial Sequence: Synthetic oligonucleotide
ucggucaaauccugaagau

SEQ ID NO: 1462129 - RNA, 19 nt, Artificial Sequence
  Description of Artificial Sequence: Synthetic oligonucleotide
accucaaacuaauguuugu

SEQ ID NO: 1462130 - RNA, 19 nt, Artificial Sequence
  Description of Artificial Sequence: Synthetic oligonucleotide
uaacccucucgccuguuuc

SEQ ID NO: 1462131 - RNA, 19 nt, Artificial Sequence
  Description of Artificial Sequence: Synthetic oligonucleotide
acuguauuguccauugcau

SEQ ID NO: 1462132 - RNA, 19 nt, Artificial Sequence
  Description of Artificial Sequence: Synthetic oligonucleotide
aaaugucuggauagcugcu

SEQ ID NO: 1462133 - RNA, 19 nt, Artificial Sequence
  Description of Artificial Sequence: Synthetic oligonucleotide
agguucuuuucaaaguugu

SEQ ID NO: 1462134 - RNA, 19 nt, Artificial Sequence
  Description of Artificial Sequence: Synthetic oligonucleotide
ugugcacauuuccuugaaa

SEQ ID NO: 1462135 - RNA, 19 nt, Artificial Sequence
  Description of Artificial Sequence: Synthetic oligonucleotide
gagaccucaaacuaauguu

SEQ ID NO: 1462136 - RNA, 19 nt, Artificial Sequence
  Description of Artificial Sequence: Synthetic oligonucleotide
cuaauguuugucccucuga

SEQ ID NO: 1462137 - RNA, 19 nt, Artificial Sequence
  Description of Artificial Sequence: Synthetic oligonucleotide
ugucgaugcugagaagagc

SEQ ID NO: 1462138 - RNA, 19 nt, Artificial Sequence
  Description of Artificial Sequence: Synthetic oligonucleotide
ucaauguggcauaguuauc

SEQ ID NO: 1462139 - RNA, 19 nt, Artificial Sequence
  Description of Artificial Sequence: Synthetic oligonucleotide
auuuccugucuccagcaua

SEQ ID NO: 1462140 - RNA, 19 nt, Artificial Sequence
  Description of Artificial Sequence: Synthetic oligonucleotide
cucacccauauacagccuc

SEQ ID NO: 1462141 - RNA, 19 nt, Artificial Sequence
  Description of Artificial Sequence: Synthetic oligonucleotide
aacuuaaacucaggccggu

SEQ ID NO: 1462142 - RNA, 19 nt, Artificial Sequence
  Description of Artificial Sequence: Synthetic oligonucleotide
ggaugauaggcucgucagg

SEQ ID NO: 1462143 - RNA, 19 nt, Artificial Sequence
  Description of Artificial Sequence: Synthetic oligonucleotide
aucaggugaccaagaacac

SEQ ID NO: 1462144 - RNA, 19 nt, Artificial Sequence
  Description of Artificial Sequence: Synthetic oligonucleotide
cugaaaucuggcaaguggu

SEQ ID NO: 1462145 - RNA, 19 nt, Artificial Sequence
  Description of Artificial Sequence: Synthetic oligonucleotide
agcaacaugauuggggcuu

SEQ ID NO: 1462146 - RNA, 19 nt, Artificial Sequence
  Description of Artificial Sequence: Synthetic oligonucleotide
auacguacacaaaccuguc

SEQ ID NO: 1462147 - RNA, 19 nt, Artificial Sequence
  Description of Artificial Sequence: Synthetic oligonucleotide
agcuuaacuguaccaucgu

SEQ ID NO: 1462148 - RNA, 19 nt, Artificial Sequence
  Description of Artificial Sequence: Synthetic oligonucleotide
uaacuguaccaucgucacu

SEQ ID NO: 1462149 - RNA, 19 nt, Artificial Sequence
  Description of Artificial Sequence: Synthetic oligonucleotide
ucgucaggguggaaagcca

SEQ ID NO: 1462150 - RNA, 19 nt, Artificial Sequence
  Description of Artificial Sequence: Synthetic oligonucleotide
uucguguccugagagcaac

SEQ ID NO: 1462151 - RNA, 19 nt, Artificial Sequence
  Description of Artificial Sequence: Synthetic oligonucleotide
aaagggccggacaucccag

SEQ ID NO: 1462152 - RNA, 19 nt, Artificial Sequence
  Description of Artificial Sequence: Synthetic oligonucleotide
ggcagcuuauacaggaucc

SEQ ID NO: 1462153 - RNA, 19 nt, Artificial Sequence
  Description of Artificial Sequence: Synthetic oligonucleotide
auuccaccagagauaaucu

SEQ ID NO: 1462154 - RNA, 19 nt, Artificial Sequence
  Description of Artificial Sequence: Synthetic oligonucleotide
agaccucaaacuaauguuu

SEQ ID NO: 1462155 - RNA, 19 nt, Artificial Sequence
  Description of Artificial Sequence: Synthetic oligonucleotide
uccugagagcaacaugauu

SEQ ID NO: 1462156 - RNA, 19 nt, Artificial Sequence
  Description of Artificial Sequence: Synthetic oligonucleotide
uugaagggaagaacaccuu

SEQ ID NO: 1462157 - RNA, 19 nt, Artificial Sequence
  Description of Artificial Sequence: Synthetic oligonucleotide
caguuacucaauuuaaaau

SEQ ID NO: 1462158 - RNA, 19 nt, Artificial Sequence
  Description of Artificial Sequence: Synthetic oligonucleotide
ugucuggauagcugcuuuc

SEQ ID NO: 1462159 - RNA, 19 nt, Artificial Sequence
  Description of Artificial Sequence: Synthetic oligonucleotide
ccaagaacaccggaggagg

SEQ ID NO: 1462160 - RNA, 19 nt, Artificial Sequence
  Description of Artificial Sequence: Synthetic oligonucleotide
gccaucuguguuauaaugc

SEQ ID NO: 1462161 - RNA, 19 nt, Artificial Sequence
  Description of Artificial Sequence: Synthetic oligonucleotide
gugcacauuuccuugaaau

SEQ ID NO: 1462162 - RNA, 19 nt, Artificial Sequence
  Description of Artificial Sequence: Synthetic oligonucleotide
gaccaaucccugaaaucug

SEQ ID NO: 1462163 - RNA, 19 nt, Artificial Sequence
  Description of Artificial Sequence: Synthetic oligonucleotide
ucagccuuuuaacccucuc

SEQ ID NO: 1462164 - RNA, 19 nt, Artificial Sequence
  Description of Artificial Sequence: Synthetic oligonucleotide
caaacuaauguuugucccu

SEQ ID NO: 1462165 - RNA, 19 nt, Artificial Sequence
  Description of Artificial Sequence: Synthetic oligonucleotide
ugggguacaagugguugcu

SEQ ID NO: 1462166 - RNA, 19 nt, Artificial Sequence
  Description of Artificial Sequence: Synthetic oligonucleotide
gacucgcacuguauugucc

SEQ ID NO: 1462167 - RNA, 19 nt, Artificial Sequence
  Description of Artificial Sequence: Synthetic oligonucleotide
gucaaauccugaagaugcc

SEQ ID NO: 1462168 - RNA, 19 nt, Artificial Sequence
  Description of Artificial Sequence: Synthetic oligonucleotide
gcuaucuugcuuccaucag

SEQ ID NO: 1462169 - RNA, 19 nt, Artificial Sequence
  Description of Artificial Sequence: Synthetic oligonucleotide
ccaaaccuugauaucguug

SEQ ID NO: 1462170 - RNA, 19 nt, Artificial Sequence
  Description of Artificial Sequence: Synthetic oligonucleotide
cuucacuggaucucaccca

SEQ ID NO: 1462171 - RNA, 19 nt, Artificial Sequence
  Description of Artificial Sequence: Synthetic oligonucleotide
ggagaccucaaacuaaugu

SEQ ID NO: 1462172 - RNA, 19 nt, Artificial Sequence
  Description of Artificial Sequence: Synthetic oligonucleotide
guguccugagagcaacaug

SEQ ID NO: 1462173 - RNA, 19 nt, Artificial Sequence
  Description of Artificial Sequence: Synthetic oligonucleotide
acaagccaguuacucaauu

SEQ ID NO: 1462174 - RNA, 19 nt, Artificial Sequence
  Description of Artificial Sequence: Synthetic oligonucleotide
aacaugauuggggcuugaa

SEQ ID NO: 1462175 - RNA, 19 nt, Artificial Sequence
  Description of Artificial Sequence: Synthetic oligonucleotide
auaauacaagccaguuacu

SEQ ID NO: 1462176 - RNA, 19 nt, Artificial Sequence
  Description of Artificial Sequence: Synthetic oligonucleotide
cugguaaaugggguacaag

SEQ ID NO: 1462177 - RNA, 19 nt, Artificial Sequence
  Description of Artificial Sequence: Synthetic oligonucleotide
ucucgccuguuucacuauc

SEQ ID NO: 1462178 - RNA, 19 nt, Artificial Sequence
  Description of Artificial Sequence: Synthetic oligonucleotide
cugacucuggccagucgug

SEQ ID NO: 1462179 - RNA, 19 nt, Artificial Sequence
  Description of Artificial Sequence: Synthetic oligonucleotide
cauagacauuccacaauaa

SEQ ID NO: 1462180 - RNA, 19 nt, Artificial Sequence
  Description of Artificial Sequence: Synthetic oligonucleotide
uacaagccaguuacucaau

SEQ ID NO: 1462181 - RNA, 19 nt, Artificial Sequence
  Description of Artificial Sequence: Synthetic oligonucleotide
ugcggaugucccaaagcuu

SEQ ID NO: 1462182 - RNA, 19 nt, Artificial Sequence
  Description of Artificial Sequence: Synthetic oligonucleotide
cacaaaccugucugcugag

SEQ ID NO: 1462183 - RNA, 19 nt, Artificial Sequence
  Description of Artificial Sequence: Synthetic oligonucleotide
uuaacccucucgccuguuu

SEQ ID NO: 1462184 - RNA, 19 nt, Artificial Sequence
  Description of Artificial Sequence: Synthetic oligonucleotide
uuuugacgcaggucccaaa

SEQ ID NO: 1462185 - RNA, 19 nt, Artificial Sequence
  Description of Artificial Sequence: Synthetic oligonucleotide
auaauaugagucggucaaa

SEQ ID NO: 1462186 - RNA, 19 nt, Artificial Sequence
  Description of Artificial Sequence: Synthetic oligonucleotide
ucucaugguauagguuaac

SEQ ID NO: 1462187 - RNA, 19 nt, Artificial Sequence
  Description of Artificial Sequence: Synthetic oligonucleotide
agucgccugcggcuguccg

SEQ ID NO: 1462188 - RNA, 19 nt, Artificial Sequence
  Description of Artificial Sequence: Synthetic oligonucleotide
ucucacccauauacagccu

SEQ ID NO: 1462189 - RNA, 19 nt, Artificial Sequence
  Description of Artificial Sequence: Synthetic oligonucleotide
augucuggauagcugcuuu

SEQ ID NO: 1462190 - RNA, 19 nt, Artificial Sequence
  Description of Artificial Sequence: Synthetic oligonucleotide
caaagcucccggagucgcc

SEQ ID NO: 1462191 - RNA, 19 nt, Artificial Sequence
  Description of Artificial Sequence: Synthetic oligonucleotide
ugugucguugaaggucaca

SEQ ID NO: 1462192 - RNA, 19 nt, Artificial Sequence
  Description of Artificial Sequence: Synthetic oligonucleotide
guccauugcauuggacaag

SEQ ID NO: 1462193 - RNA, 19 nt, Artificial Sequence
  Description of Artificial Sequence: Synthetic oligonucleotide
aggccggugacagaaucug

SEQ ID NO: 1462194 - RNA, 19 nt, Artificial Sequence
  Description of Artificial Sequence: Synthetic oligonucleotide
cuguaccaucgucacugcc

SEQ ID NO: 1462195 - RNA, 19 nt, Artificial Sequence
  Description of Artificial Sequence: Synthetic oligonucleotide
acuuaaacucaggccggug

SEQ ID NO: 1462196 - RNA, 19 nt, Artificial Sequence
  Description of Artificial Sequence: Synthetic oligonucleotide
caccauagacauuccacaa

SEQ ID NO: 1462197 - RNA, 19 nt, Artificial Sequence
  Description of Artificial Sequence: Synthetic oligonucleotide
gccacaguuguucugguaa

SEQ ID NO: 1462198 - RNA, 19 nt, Artificial Sequence
  Description of Artificial Sequence: Synthetic oligonucleotide
acaggagaccucaaacuaa

SEQ ID NO: 1462199 - RNA, 19 nt, Artificial Sequence
  Description of Artificial Sequence: Synthetic oligonucleotide
gauuggggcuugaagggaa

SEQ ID NO: 1462200 - RNA, 19 nt, Artificial Sequence
  Description of Artificial Sequence: Synthetic oligonucleotide
ggcucgucaggguggaaag

SEQ ID NO: 1462201 - RNA, 19 nt, Artificial Sequence
  Description of Artificial Sequence: Synthetic oligonucleotide
ucccggagucgccugcggc

SEQ ID NO: 1462202 - RNA, 19 nt, Artificial Sequence
  Description of Artificial Sequence: Synthetic oligonucleotide
cacaauaauaugagucggu

SEQ ID NO: 1462203 - RNA, 19 nt, Artificial Sequence
  Description of Artificial Sequence: Synthetic oligonucleotide
ucguguccugagagcaaca

SEQ ID NO: 1462204 - RNA, 19 nt, Artificial Sequence
  Description of Artificial Sequence: Synthetic oligonucleotide
gacaagagauaagaucccu

SEQ ID NO: 1462205 - RNA, 19 nt, Artificial Sequence
  Description of Artificial Sequence: Synthetic oligonucleotide
ccucucaugguauagguua

SEQ ID NO: 1462206 - RNA, 19 nt, Artificial Sequence
  Description of Artificial Sequence: Synthetic oligonucleotide
gcuggauaacaugaguuca

SEQ ID NO: 1462207 - RNA, 19 nt, Artificial Sequence
  Description of Artificial Sequence: Synthetic oligonucleotide
aucugucgaugcugagaag

SEQ ID NO: 1462208 - RNA, 19 nt, Artificial Sequence
  Description of Artificial Sequence: Synthetic oligonucleotide
ccaacuaacacauuucaau

SEQ ID NO: 1462209 - RNA, 19 nt, Artificial Sequence
  Description of Artificial Sequence: Synthetic oligonucleotide
ucccgccugcagcaaagcu

SEQ ID NO: 1462210 - RNA, 19 nt, Artificial Sequence
  Description of Artificial Sequence: Synthetic oligonucleotide
gucuauuccaccagagaua

SEQ ID NO: 1462211 - RNA, 19 nt, Artificial Sequence
  Description of Artificial Sequence: Synthetic oligonucleotide
ggacaagagauaagauccc

SEQ ID NO: 1462212 - RNA, 19 nt, Artificial Sequence
  Description of Artificial Sequence: Synthetic oligonucleotide
agccaguuacucaauuuaa

SEQ ID NO: 1462213 - RNA, 19 nt, Artificial Sequence
  Description of Artificial Sequence: Synthetic oligonucleotide
gagucucaggucacacagc

SEQ ID NO: 1462214 - RNA, 19 nt, Artificial Sequence
  Description of Artificial Sequence: Synthetic oligonucleotide
cagcuaucuugcuuccauc

SEQ ID NO: 1462215 - RNA, 19 nt, Artificial Sequence
  Description of Artificial Sequence: Synthetic oligonucleotide
gguggauccauugggguga

SEQ ID NO: 1462216 - RNA, 19 nt, Artificial Sequence
  Description of Artificial Sequence: Synthetic oligonucleotide
gccuuuuaacccucucgcc

SEQ ID NO: 1462217 - RNA, 19 nt, Artificial Sequence
  Description of Artificial Sequence: Synthetic oligonucleotide
uaguuaucgcagucaccau

SEQ ID NO: 1462218 - RNA, 19 nt, Artificial Sequence
  Description of Artificial Sequence: Synthetic oligonucleotide
ucgucacugccagugcaga

SEQ ID NO: 1462219 - RNA, 19 nt, Artificial Sequence
  Description of Artificial Sequence: Synthetic oligonucleotide
gcugccaucuguguuauaa

SEQ ID NO: 1462220 - RNA, 19 nt, Artificial Sequence
  Description of Artificial Sequence: Synthetic oligonucleotide
augagucggucaaauccug

SEQ ID NO: 1462221 - RNA, 19 nt, Artificial Sequence
  Description of Artificial Sequence: Synthetic oligonucleotide
caaagcuuaacuguaccau

SEQ ID NO: 1462222 - RNA, 19 nt, Artificial Sequence
  Description of Artificial Sequence: Synthetic oligonucleotide
gugaaacuugcagcaguac

SEQ ID NO: 1462223 - RNA, 19 nt, Artificial Sequence
  Description of Artificial Sequence: Synthetic oligonucleotide
agucgugcagcuggagucu

SEQ ID NO: 1462224 - RNA, 19 nt, Artificial Sequence
  Description of Artificial Sequence: Synthetic oligonucleotide
ucccagacucgcacuguau

SEQ ID NO: 1462225 - RNA, 19 nt, Artificial Sequence
  Description of Artificial Sequence: Synthetic oligonucleotide
acccauauacagccucuua

SEQ ID NO: 1462226 - RNA, 19 nt, Artificial Sequence
  Description of Artificial Sequence: Synthetic oligonucleotide
gcugguggugucccauacg

SEQ ID NO: 1462227 - RNA, 19 nt, Artificial Sequence
  Description of Artificial Sequence: Synthetic oligonucleotide
ggcauaguuaucgcaguca

SEQ ID NO: 1462228 - RNA, 19 nt, Artificial Sequence
  Description of Artificial Sequence: Synthetic oligonucleotide
cugguggugucccauacgu

SEQ ID NO: 1462229 - RNA, 19 nt, Artificial Sequence
  Description of Artificial Sequence: Synthetic oligonucleotide
agaggaugauaggcucguc

SEQ ID NO: 1462230 - RNA, 19 nt, Artificial Sequence
  Description of Artificial Sequence: Synthetic oligonucleotide
aggugaccaagaacaccgg

SEQ ID NO: 1462231 - RNA, 19 nt, Artificial Sequence
  Description of Artificial Sequence: Synthetic oligonucleotide
ccaaucccugaaaucuggc

SEQ ID NO: 1462232 - RNA, 19 nt, Artificial Sequence
  Description of Artificial Sequence: Synthetic oligonucleotide
aagaucccucagaacuuaa

SEQ ID NO: 1462233 - RNA, 19 nt, Artificial Sequence
  Description of Artificial Sequence: Synthetic oligonucleotide
ugguggugucccauacgua

SEQ ID NO: 1462234 - RNA, 19 nt, Artificial Sequence
  Description of Artificial Sequence: Synthetic oligonucleotide
ccauagacauuccacaaua

SEQ ID NO: 1462235 - RNA, 19 nt, Artificial Sequence
  Description of Artificial Sequence: Synthetic oligonucleotide
ugguaccagaggccacagu

SEQ ID NO: 1462236 - RNA, 19 nt, Artificial Sequence
  Description of Artificial Sequence: Synthetic oligonucleotide
uugugucguugaaggucac

SEQ ID NO: 1462237 - RNA, 19 nt, Artificial Sequence
  Description of Artificial Sequence: Synthetic oligonucleotide
ucugaucacuugugucguu

SEQ ID NO: 1462238 - RNA, 19 nt, Artificial Sequence
  Description of Artificial Sequence: Synthetic oligonucleotide
gaugccaagguggauccau

SEQ ID NO: 1462239 - RNA, 19 nt, Artificial Sequence
  Description of Artificial Sequence: Synthetic oligonucleotide
auaggcucgucagggugga

SEQ ID NO: 1462240 - RNA, 19 nt, Artificial Sequence
  Description of Artificial Sequence: Synthetic oligonucleotide
aggcucgucaggguggaaa

SEQ ID NO: 1462241 - RNA, 19 nt, Artificial Sequence
  Description of Artificial Sequence: Synthetic oligonucleotide
guggcauaguuaucgcagu

SEQ ID NO: 1462242 - RNA, 19 nt, Artificial Sequence
  Description of Artificial Sequence: Synthetic oligonucleotide
cugaaaugucuggauagcu

SEQ ID NO: 1462243 - RNA, 19 nt, Artificial Sequence
  Description of Artificial Sequence: Synthetic oligonucleotide
cacagcuaacaccugguau

SEQ ID NO: 1462244 - RNA, 19 nt, Artificial Sequence
  Description of Artificial Sequence: Synthetic oligonucleotide
aggagaccucaaacuaaug

SEQ ID NO: 1462245 - RNA, 19 nt, Artificial Sequence
  Description of Artificial Sequence: Synthetic oligonucleotide
caggagaccucaaacuaau

SEQ ID NO: 1462246 - RNA, 19 nt, Artificial Sequence
  Description of Artificial Sequence: Synthetic oligonucleotide
gugguaccagaggccacag

SEQ ID NO: 1462247 - RNA, 19 nt, Artificial Sequence
  Description of Artificial Sequence: Synthetic oligonucleotide
cccucagaacuuaaacuca

SEQ ID NO: 1462248 - RNA, 19 nt, Artificial Sequence
  Description of Artificial Sequence: Synthetic oligonucleotide
agcuaacaccugguaugug

SEQ ID NO: 1462249 - RNA, 19 nt, Artificial Sequence
  Description of Artificial Sequence: Synthetic oligonucleotide
guuuugacgcaggucccaa

SEQ ID NO: 1462250 - RNA, 19 nt, Artificial Sequence
  Description of Artificial Sequence: Synthetic oligonucleotide
aucuggcaagugguaccag

SEQ ID NO: 1462251 - RNA, 19 nt, Artificial Sequence
  Description of Artificial Sequence: Synthetic oligonucleotide
ccuuuuaacccucucgccu

SEQ ID NO: 1462252 - RNA, 19 nt, Artificial Sequence
  Description of Artificial Sequence: Synthetic oligonucleotide
ccggacaucccagacucgc

SEQ ID NO: 1462253 - RNA, 19 nt, Artificial Sequence
  Description of Artificial Sequence: Synthetic oligonucleotide
ggugaaacuugcagcagua

SEQ ID NO: 1462254 - RNA, 19 nt, Artificial Sequence
  Description of Artificial Sequence: Synthetic oligonucleotide
cuguccggcuccggggccg

SEQ ID NO: 1462255 - RNA, 19 nt, Artificial Sequence
  Description of Artificial Sequence: Synthetic oligonucleotide
gggugaaacuugcagcagu

SEQ ID NO: 1462256 - RNA, 19 nt, Artificial Sequence
  Description of Artificial Sequence: Synthetic oligonucleotide
agcagcuaucuugcuucca

SEQ ID NO: 1462257 - RNA, 19 nt, Artificial Sequence
  Description of Artificial Sequence: Synthetic oligonucleotide
gcggaugucccaaagcuua

SEQ ID NO: 1462258 - RNA, 19 nt, Artificial Sequence
  Description of Artificial Sequence: Synthetic oligonucleotide
gccggugacagaaucugca

SEQ ID NO: 1462259 - RNA, 19 nt, Artificial Sequence
  Description of Artificial Sequence: Synthetic oligonucleotide
aacaccggaggagguucuu

SEQ ID NO: 1462260 - RNA, 19 nt, Artificial Sequence
  Description of Artificial Sequence: Synthetic oligonucleotide
aggucccgccugcagcaaa

SEQ ID NO: 1462261 - RNA, 19 nt, Artificial Sequence
  Description of Artificial Sequence: Synthetic oligonucleotide
gcuggaguauggccaucac

SEQ ID NO: 1462262 - RNA, 19 nt, Artificial Sequence
  Description of Artificial Sequence: Synthetic oligonucleotide
cagccgggacaccaucuga

SEQ ID NO: 1462263 - RNA, 19 nt, Artificial Sequence
  Description of Artificial Sequence: Synthetic oligonucleotide
cacuugugucguugaaggu

SEQ ID NO: 1462264 - RNA, 19 nt, Artificial Sequence
  Description of Artificial Sequence: Synthetic oligonucleotide
cccauacguacacaaaccu

SEQ ID NO: 1462265 - RNA, 19 nt, Artificial Sequence
  Description of Artificial Sequence: Synthetic oligonucleotide
acaccggaggagguucuuu

SEQ ID NO: 1462266 - RNA, 19 nt, Artificial Sequence
  Description of Artificial Sequence: Synthetic oligonucleotide
ugcggcuguccggcuccgg

SEQ ID NO: 1462267 - RNA, 19 nt, Artificial Sequence
  Description of Artificial Sequence: Synthetic oligonucleotide
caggccggugacagaaucu

SEQ ID NO: 1462268 - RNA, 19 nt, Artificial Sequence
  Description of Artificial Sequence: Synthetic oligonucleotide
cagcuaacaccugguaugu

SEQ ID NO: 1462269 - RNA, 19 nt, Artificial Sequence
  Description of Artificial Sequence: Synthetic oligonucleotide
ugugacccuucagccuuuu

SEQ ID NO: 1462270 - RNA, 19 nt, Artificial Sequence
  Description of Artificial Sequence: Synthetic oligonucleotide
gcucgucaggguggaaagc

SEQ ID NO: 1462271 - RNA, 19 nt, Artificial Sequence
  Description of Artificial Sequence: Synthetic oligonucleotide
gucccgccugcagcaaagc

SEQ ID NO: 1462272 - RNA, 19 nt, Artificial Sequence
  Description of Artificial Sequence: Synthetic oligonucleotide
gaacaccggaggagguucu

SEQ ID NO: 1462273 - RNA, 19 nt, Artificial Sequence
  Description of Artificial Sequence: Synthetic oligonucleotide
gucaggguggaaagccacu

SEQ ID NO: 1462274 - RNA, 19 nt, Artificial Sequence
  Description of Artificial Sequence: Synthetic oligonucleotide
gcuugcuagugacugucau

SEQ ID NO: 1462275 - RNA, 19 nt, Artificial Sequence
  Description of Artificial Sequence: Synthetic oligonucleotide
gccccgucuggcuggauaa

SEQ ID NO: 1462276 - RNA, 19 nt, Artificial Sequence
  Description of Artificial Sequence: Synthetic oligonucleotide
cagccucuuaucacuggau

SEQ ID NO: 1462277 - RNA, 19 nt, Artificial Sequence
  Description of Artificial Sequence: Synthetic oligonucleotide
gcagcuuauacaggauccu

SEQ ID NO: 1462278 - RNA, 19 nt, Artificial Sequence
  Description of Artificial Sequence: Synthetic oligonucleotide
ccaccagagauaaucugau

SEQ ID NO: 1462279 - RNA, 19 nt, Artificial Sequence
  Description of Artificial Sequence: Synthetic oligonucleotide
caccggaggagguucuuuu

SEQ ID NO: 1462280 - RNA, 19 nt, Artificial Sequence
  Description of Artificial Sequence: Synthetic oligonucleotide
cagcuuauacaggauccuu

SEQ ID NO: 1462281 - RNA, 19 nt, Artificial Sequence
  Description of Artificial Sequence: Synthetic oligonucleotide
uggauccauuggggugaaa

SEQ ID NO: 1462282 - RNA, 19 nt, Artificial Sequence
  Description of Artificial Sequence: Synthetic oligonucleotide
ugggccccgucuggcugga

SEQ ID NO: 1462283 - RNA, 19 nt, Artificial Sequence
  Description of Artificial Sequence: Synthetic oligonucleotide
ggccacaguuguucuggua

SEQ ID NO: 1462284 - RNA, 19 nt, Artificial Sequence
  Description of Artificial Sequence: Synthetic oligonucleotide
gccggacaucccagacucg

SEQ ID NO: 1462285 - RNA, 19 nt, Artificial Sequence
  Description of Artificial Sequence: Synthetic oligonucleotide
ggccccgucuggcuggaua

SEQ ID NO: 1462286 - RNA, 19 nt, Artificial Sequence
  Description of Artificial Sequence: Synthetic oligonucleotide
gggccggacaucccagacu

SEQ ID NO: 1462287 - RNA, 19 nt, Artificial Sequence
  Description of Artificial Sequence: Synthetic oligonucleotide
uaggcucgucaggguggaa

SEQ ID NO: 1462288 - RNA, 19 nt, Artificial Sequence
  Description of Artificial Sequence: Synthetic oligonucleotide
cagcuccauuacugcucca

SEQ ID NO: 1462289 - RNA, 19 nt, Artificial Sequence
  Description of Artificial Sequence: Synthetic oligonucleotide
cucucgccuguuucacuau

SEQ ID NO: 1462290 - RNA, 19 nt, Artificial Sequence
  Description of Artificial Sequence: Synthetic oligonucleotide
gaggucccgccugcagcaa

SEQ ID NO: 1462291 - RNA, 19 nt, Artificial Sequence
  Description of Artificial Sequence: Synthetic oligonucleotide
cccgucuggcuggauaaca

SEQ ID NO: 1462292 - RNA, 19 nt, Artificial Sequence
  Description of Artificial Sequence: Synthetic oligonucleotide
ccggagucgccugcggcug

SEQ ID NO: 1462293 - RNA, 19 nt, Artificial Sequence
  Description of Artificial Sequence: Synthetic oligonucleotide
ggagucgccugcggcuguc

SEQ ID NO: 1462294 - RNA, 19 nt, Artificial Sequence
  Description of Artificial Sequence: Synthetic oligonucleotide
gacaagcugugggccccgu

SEQ ID NO: 1462295 - RNA, 19 nt, Artificial Sequence
  Description of Artificial Sequence: Synthetic oligonucleotide
cucaggccggugacagaau

SEQ ID NO: 1462296 - RNA, 19 nt, Artificial Sequence
  Description of Artificial Sequence: Synthetic oligonucleotide
cggacaucccagacucgca

SEQ ID NO: 1462297 - RNA, 19 nt, Artificial Sequence
  Description of Artificial Sequence: Synthetic oligonucleotide
cacccauauacagccucuu

SEQ ID NO: 1462298 - RNA, 19 nt, Artificial Sequence
  Description of Artificial Sequence: Synthetic oligonucleotide
ccggugacagaaucugcau

SEQ ID NO: 1462299 - RNA, 19 nt, Artificial Sequence
  Description of Artificial Sequence: Synthetic oligonucleotide
ccgucuggcuggauaacau

SEQ ID NO: 1462300 - RNA, 19 nt, Artificial Sequence
  Description of Artificial Sequence: Synthetic oligonucleotide
cccggagucgccugcggcu

SEQ ID NO: 1462301 - RNA, 19 nt, Artificial Sequence
  Description of Artificial Sequence: Synthetic oligonucleotide
ggccagucgugcagcugga

SEQ ID NO: 1462302 - RNA, 19 nt, Artificial Sequence
  Description of Artificial Sequence: Synthetic oligonucleotide
cccaaaccuugauaucguu

SEQ ID NO: 1462303 - RNA, 19 nt, Artificial Sequence
  Description of Artificial Sequence: Synthetic oligonucleotide
gccucucaugguauagguu

SEQ ID NO: 1462304 - RNA, 19 nt, Artificial Sequence
  Description of Artificial Sequence: Synthetic oligonucleotide
ccccgucuggcuggauaac

SEQ ID NO: 1462305 - RNA, 19 nt, Artificial Sequence
  Description of Artificial Sequence: Synthetic oligonucleotide
cccucucgccuguuucacu

SEQ ID NO: 1462306 - RNA, 19 nt, Artificial Sequence
  Description of Artificial Sequence: Synthetic oligonucleotide
cguguccugagagcaacau

SEQ ID NO: 1462307 - RNA, 19 nt, Artificial Sequence
  Description of Artificial Sequence: Synthetic oligonucleotide
cccuucaauguggcauagu

SEQ ID NO: 1462308 - RNA, 19 nt, Artificial Sequence
  Description of Artificial Sequence: Synthetic oligonucleotide
cggagucgccugcggcugu

SEQ ID NO: 1462309 - RNA, 19 nt, Artificial Sequence
  Description of Artificial Sequence: Synthetic oligonucleotide
gggccccgucuggcuggau

SEQ ID NO: 1462310 - RNA, 19 nt, Artificial Sequence
  Description of Artificial Sequence: Synthetic oligonucleotide
aaaacuguggaauacuagg

SEQ ID NO: 1462311 - RNA, 19 nt, Artificial Sequence
  Description of Artificial Sequence: Synthetic oligonucleotide
aacaaugaaaaccggcucc

SEQ ID NO: 1462312 - RNA, 19 nt, Artificial Sequence
  Description of Artificial Sequence: Synthetic oligonucleotide
aaucccauguuccagacag

SEQ ID NO: 1462313 - RNA, 19 nt, Artificial Sequence
  Description of Artificial Sequence: Synthetic oligonucleotide
uuugcaauaaacaaugaaa

SEQ ID NO: 1462314 - RNA, 19 nt, Artificial Sequence
  Description of Artificial Sequence: Synthetic oligonucleotide
uacaguaggcuccagaucc

SEQ ID NO: 1462315 - RNA, 19 nt, Artificial Sequence
  Description of Artificial Sequence: Synthetic oligonucleotide
augaaaaccggcuccaagc

SEQ ID NO: 1462316 - RNA, 19 nt, Artificial Sequence
  Description of Artificial Sequence: Synthetic oligonucleotide
uccaccaauggucuuaucg

SEQ ID NO: 1462317 - RNA, 19 nt, Artificial Sequence
  Description of Artificial Sequence: Synthetic oligonucleotide
gauuuugcaauaaacaaug

SEQ ID NO: 1462318 - RNA, 19 nt, Artificial Sequence
  Description of Artificial Sequence: Synthetic oligonucleotide
uaaacaaugaaaaccggcu

SEQ ID NO: 1462319 - RNA, 19 nt, Artificial Sequence
  Description of Artificial Sequence: Synthetic oligonucleotide
uguacaaaagcccucuuug

SEQ ID NO: 1462320 - RNA, 19 nt, Artificial Sequence
  Description of Artificial Sequence: Synthetic oligonucleotide
uuugcauacaucaagucaa

SEQ ID NO: 1462321 - RNA, 19 nt, Artificial Sequence
  Description of Artificial Sequence: Synthetic oligonucleotide
guugauaccaaccuugaag

SEQ ID NO: 1462322 - RNA, 19 nt, Artificial Sequence
  Description of Artificial Sequence: Synthetic oligonucleotide
uugauaccaaccuugaagc

SEQ ID NO: 1462323 - RNA, 19 nt, Artificial Sequence
  Description of Artificial Sequence: Synthetic oligonucleotide
aaacaaugaaaaccggcuc

SEQ ID NO: 1462324 - RNA, 19 nt, Artificial Sequence
  Description of Artificial Sequence: Synthetic oligonucleotide
auagucaacagaaagccgc

SEQ ID NO: 1462325 - RNA, 19 nt, Artificial Sequence
  Description of Artificial Sequence: Synthetic oligonucleotide
uuuuauuucgaaaggauuu

SEQ ID NO: 1462326 - RNA, 19 nt, Artificial Sequence
  Description of Artificial Sequence: Synthetic oligonucleotide
guuuguauagguuggacgc

SEQ ID NO: 1462327 - RNA, 19 nt, Artificial Sequence
  Description of Artificial Sequence: Synthetic oligonucleotide
auaaacaaugaaaaccggc

SEQ ID NO: 1462328 - RNA, 19 nt, Artificial Sequence
  Description of Artificial Sequence: Synthetic oligonucleotide
gauagcggcguucacaucc

SEQ ID NO: 1462329 - RNA, 19 nt, Artificial Sequence
  Description of Artificial Sequence: Synthetic oligonucleotide
caucaagucaaacuugugg

SEQ ID NO: 1462330 - RNA, 19 nt, Artificial Sequence
  Description of Artificial Sequence: Synthetic oligonucleotide
uugagguuuguauagguug

SEQ ID NO: 1462331 - RNA, 19 nt, Artificial Sequence
  Description of Artificial Sequence: Synthetic oligonucleotide
ugagguuuguauagguugg

SEQ ID NO: 1462332 - RNA, 19 nt, Artificial Sequence
  Description of Artificial Sequence: Synthetic oligonucleotide
aaugaaaaccggcuccaag

SEQ ID NO: 1462333 - RNA, 19 nt, Artificial Sequence
  Description of Artificial Sequence: Synthetic oligonucleotide
aaaaccggcuccaagcggc

SEQ ID NO: 1462334 - RNA, 19 nt, Artificial Sequence
  Description of Artificial Sequence: Synthetic oligonucleotide
ugaaaaccggcuccaagcg

SEQ ID NO: 1462335 - RNA, 19 nt, Artificial Sequence
  Description of Artificial Sequence: Synthetic oligonucleotide
uggaauacuaggaagcccu

SEQ ID NO: 1462336 - RNA, 19 nt, Artificial Sequence
  Description of Artificial Sequence: Synthetic oligonucleotide
cauaccaguguacaaaagc

SEQ ID NO: 1462337 - RNA, 19 nt, Artificial Sequence
  Description of Artificial Sequence: Synthetic oligonucleotide
uuucccagugauaagcugc

SEQ ID NO: 1462338 - RNA, 19 nt, Artificial Sequence
  Description of Artificial Sequence: Synthetic oligonucleotide
auagauagccucguugucc

SEQ ID NO: 1462339 - RNA, 19 nt, Artificial Sequence
  Description of Artificial Sequence: Synthetic oligonucleotide
uccaguuucacagaagaag

SEQ ID NO: 1462340 - RNA, 19 nt, Artificial Sequence
  Description of Artificial Sequence: Synthetic oligonucleotide
ugaucagacaguuugcgga

SEQ ID NO: 1462341 - RNA, 19 nt, Artificial Sequence
  Description of Artificial Sequence: Synthetic oligonucleotide
ugccauagucaacagaaag

SEQ ID NO: 1462342 - RNA, 19 nt, Artificial Sequence
  Description of Artificial Sequence: Synthetic oligonucleotide
uuuugcaauaaacaaugaa

SEQ ID NO: 1462343 - RNA, 19 nt, Artificial Sequence
  Description of Artificial Sequence: Synthetic oligonucleotide
gacgauuuggcugaugagg

SEQ ID NO: 1462344 - RNA, 19 nt, Artificial Sequence
  Description of Artificial Sequence: Synthetic oligonucleotide
agagcugucgguaugggcc

SEQ ID NO: 1462345 - RNA, 19 nt, Artificial Sequence
  Description of Artificial Sequence: Synthetic oligonucleotide
ugauaagcugcucugggug

SEQ ID NO: 1462346 - RNA, 19 nt, Artificial Sequence
  Description of Artificial Sequence: Synthetic oligonucleotide
gucgguaugggccauuucg

SEQ ID NO: 1462347 - RNA, 19 nt, Artificial Sequence
  Description of Artificial Sequence: Synthetic oligonucleotide
agacuuuuauuucgaaagg

SEQ ID NO: 1462348 - RNA, 19 nt, Artificial Sequence
  Description of Artificial Sequence: Synthetic oligonucleotide
cuucucugcagaaaugacg

SEQ ID NO: 1462349 - RNA, 19 nt, Artificial Sequence
  Description of Artificial Sequence: Synthetic oligonucleotide
uucgaaaggauuuugcaau

SEQ ID NO: 1462350 - RNA, 19 nt, Artificial Sequence
  Description of Artificial Sequence: Synthetic oligonucleotide
auagguuggacgcucaaug

SEQ ID NO: 1462351 - RNA, 19 nt, Artificial Sequence
  Description of Artificial Sequence: Synthetic oligonucleotide
agaaaugacgggugcauag

SEQ ID NO: 1462352 - RNA, 19 nt, Artificial Sequence
  Description of Artificial Sequence: Synthetic oligonucleotide
gacugaaaugcacucacgc

SEQ ID NO: 1462353 - RNA, 19 nt, Artificial Sequence
  Description of Artificial Sequence: Synthetic oligonucleotide
aucgauuacaguaggcucc

SEQ ID NO: 1462354 - RNA, 19 nt, Artificial Sequence
  Description of Artificial Sequence: Synthetic oligonucleotide
gaucucaucgauuacagua

SEQ ID NO: 1462355 - RNA, 19 nt, Artificial Sequence
  Description of Artificial Sequence: Synthetic oligonucleotide
uacuaggaagcccugaagu

SEQ ID NO: 1462356 - RNA, 19 nt, Artificial Sequence
  Description of Artificial Sequence: Synthetic oligonucleotide
augacgggugcauaggugg

SEQ ID NO: 1462357 - RNA, 19 nt, Artificial Sequence
  Description of Artificial Sequence: Synthetic oligonucleotide
aggauuuugcaauaaacaa

SEQ ID NO: 1462358 - RNA, 19 nt, Artificial Sequence
  Description of Artificial Sequence: Synthetic oligonucleotide
uacaucaagucaaacuugu

SEQ ID NO: 1462359 - RNA, 19 nt, Artificial Sequence
  Description of Artificial Sequence: Synthetic oligonucleotide
aagagcugucgguaugggc

SEQ ID NO: 1462360 - RNA, 19 nt, Artificial Sequence
  Description of Artificial Sequence: Synthetic oligonucleotide
aauacuaggaagcccugaa

SEQ ID NO: 1462361 - RNA, 19 nt, Artificial Sequence
  Description of Artificial Sequence: Synthetic oligonucleotide
ucaauguccagguuacggc

SEQ ID NO: 1462362 - RNA, 19 nt, Artificial Sequence
  Description of Artificial Sequence: Synthetic oligonucleotide
gauaagcugcucugggugg

SEQ ID NO: 1462363 - RNA, 19 nt, Artificial Sequence
  Description of Artificial Sequence: Synthetic oligonucleotide
cuguggaauacuaggaagc

SEQ ID NO: 1462364 - RNA, 19 nt, Artificial Sequence
  Description of Artificial Sequence: Synthetic oligonucleotide
uggugaaggagucaucccc

SEQ ID NO: 1462365 - RNA, 19 nt, Artificial Sequence
  Description of Artificial Sequence: Synthetic oligonucleotide
acuaggaagcccugaaguc

SEQ ID NO: 1462366 - RNA, 19 nt, Artificial Sequence
  Description of Artificial Sequence: Synthetic oligonucleotide
uuucgaaaggauuuugcaa

SEQ ID NO: 1462367 - RNA, 19 nt, Artificial Sequence
  Description of Artificial Sequence: Synthetic oligonucleotide
ucucaucgauuacaguagg

SEQ ID NO: 1462368 - RNA, 19 nt, Artificial Sequence
  Description of Artificial Sequence: Synthetic oligonucleotide
gccauuucggaucucaucg

SEQ ID NO: 1462369 - RNA, 19 nt, Artificial Sequence
  Description of Artificial Sequence: Synthetic oligonucleotide
uaauccuuuuccagggcag

SEQ ID NO: 1462370 - RNA, 19 nt, Artificial Sequence
  Description of Artificial Sequence: Synthetic oligonucleotide
aauccuuuuccagggcagc

SEQ ID NO: 1462371 - RNA, 19 nt, Artificial Sequence
  Description of Artificial Sequence: Synthetic oligonucleotide
gguuuguauagguuggacg

SEQ ID NO: 1462372 - RNA, 19 nt, Artificial Sequence
  Description of Artificial Sequence: Synthetic oligonucleotide
uaccaguguacaaaagccc

SEQ ID NO: 1462373 - RNA, 19 nt, Artificial Sequence
  Description of Artificial Sequence: Synthetic oligonucleotide
acaaagacugcccuaggca

SEQ ID NO: 1462374 - RNA, 19 nt, Artificial Sequence
  Description of Artificial Sequence: Synthetic oligonucleotide
ugggcaucugcccaucagg

SEQ ID NO: 1462375 - RNA, 19 nt, Artificial Sequence
  Description of Artificial Sequence: Synthetic oligonucleotide
caauguccagguuacggcg

SEQ ID NO: 1462376 - RNA, 19 nt, Artificial Sequence
  Description of Artificial Sequence: Synthetic oligonucleotide
ucgguaugggccauuucgg

SEQ ID NO: 1462377 - RNA, 19 nt, Artificial Sequence
  Description of Artificial Sequence: Synthetic oligonucleotide
acgauuuggcugaugaggc

SEQ ID NO: 1462378 - RNA, 19 nt, Artificial Sequence
  Description of Artificial Sequence: Synthetic oligonucleotide
uggacugaaaugcacucac

SEQ ID NO: 1462379 - RNA, 19 nt, Artificial Sequence
  Description of Artificial Sequence: Synthetic oligonucleotide
aaaugacgggugcauaggu

SEQ ID NO: 1462380 - RNA, 19 nt, Artificial Sequence
  Description of Artificial Sequence: Synthetic oligonucleotide
uuucggaucucaucgauua

SEQ ID NO: 1462381 - RNA, 19 nt, Artificial Sequence
  Description of Artificial Sequence: Synthetic oligonucleotide
ucaucgauuacaguaggcu

SEQ ID NO: 1462382 - RNA, 19 nt, Artificial Sequence
  Description of Artificial Sequence: Synthetic oligonucleotide
gauggaggagacgauuugg

SEQ ID NO: 1462383 - RNA, 19 nt, Artificial Sequence
  Description of Artificial Sequence: Synthetic oligonucleotide
cauagucaacagaaagccg

SEQ ID NO: 1462384 - RNA, 19 nt, Artificial Sequence
  Description of Artificial Sequence: Synthetic oligonucleotide
cagggagacuuuuauuucg

SEQ ID NO: 1462385 - RNA, 19 nt, Artificial Sequence
  Description of Artificial Sequence: Synthetic oligonucleotide
gagacgauuuggcugauga

SEQ ID NO: 1462386 - RNA, 19 nt, Artificial Sequence
  Description of Artificial Sequence: Synthetic oligonucleotide
ucgaugaucuccuugccaa

SEQ ID NO: 1462387 - RNA, 19 nt, Artificial Sequence
  Description of Artificial Sequence: Synthetic oligonucleotide
ucagacaguuugcggaucc

SEQ ID NO: 1462388 - RNA, 19 nt, Artificial Sequence
  Description of Artificial Sequence: Synthetic oligonucleotide
gaagcugugauggaggaga

SEQ ID NO: 1462389 - RNA, 19 nt, Artificial Sequence
  Description of Artificial Sequence: Synthetic oligonucleotide
ucaacagaaagccgcucca

SEQ ID NO: 1462390 - RNA, 19 nt, Artificial Sequence
  Description of Artificial Sequence: Synthetic oligonucleotide
gaaaaccggcuccaagcgg

SEQ ID NO: 1462391 - RNA, 19 nt, Artificial Sequence
  Description of Artificial Sequence: Synthetic oligonucleotide
uguggaauacuaggaagcc

SEQ ID NO: 1462392 - RNA, 19 nt, Artificial Sequence
  Description of Artificial Sequence: Synthetic oligonucleotide
acugaaaugcacucacgca

SEQ ID NO: 1462393 - RNA, 19 nt, Artificial Sequence
  Description of Artificial Sequence: Synthetic oligonucleotide
gaaaugacgggugcauagg

SEQ ID NO: 1462394 - RNA, 19 nt, Artificial Sequence
  Description of Artificial Sequence: Synthetic oligonucleotide
aguuucacagaagaaggug

SEQ ID NO: 1462395 - RNA, 19 nt, Artificial Sequence
  Description of Artificial Sequence: Synthetic oligonucleotide
aaacuguggaauacuagga

SEQ ID NO: 1462396 - RNA, 19 nt, Artificial Sequence
  Description of Artificial Sequence: Synthetic oligonucleotide
uagauagccucguugucca

SEQ ID NO: 1462397 - RNA, 19 nt, Artificial Sequence
  Description of Artificial Sequence: Synthetic oligonucleotide
agguuggacgcucaauguc

SEQ ID NO: 1462398 - RNA, 19 nt, Artificial Sequence
  Description of Artificial Sequence: Synthetic oligonucleotide
acaguuugcggauccgguc

SEQ ID NO: 1462399 - RNA, 19 nt, Artificial Sequence
  Description of Artificial Sequence: Synthetic oligonucleotide
uggguugugcgucucacgu

SEQ ID NO: 1462400 - RNA, 19 nt, Artificial Sequence
  Description of Artificial Sequence: Synthetic oligonucleotide
uuauuucgaaaggauuuug

SEQ ID NO: 1462401 - RNA, 19 nt, Artificial Sequence
  Description of Artificial Sequence: Synthetic oligonucleotide
gucaacagaaagccgcucc

SEQ ID NO: 1462402 - RNA, 19 nt, Artificial Sequence
  Description of Artificial Sequence: Synthetic oligonucleotide
cuaggcacauguuuuccag

SEQ ID NO: 1462403 - RNA, 19 nt, Artificial Sequence
  Description of Artificial Sequence: Synthetic oligonucleotide
gaggagacgauuuggcuga

SEQ ID NO: 1462404 - RNA, 19 nt, Artificial Sequence
  Description of Artificial Sequence: Synthetic oligonucleotide
gcacugaucagacaguuug

SEQ ID NO: 1462405 - RNA, 19 nt, Artificial Sequence
  Description of Artificial Sequence: Synthetic oligonucleotide
uaguugauaccaaccuuga

SEQ ID NO: 1462406 - RNA, 19 nt, Artificial Sequence
  Description of Artificial Sequence: Synthetic oligonucleotide
ucaagucaaacuugugguc

SEQ ID NO: 1462407 - RNA, 19 nt, Artificial Sequence
  Description of Artificial Sequence: Synthetic oligonucleotide
caucgauuacaguaggcuc

SEQ ID NO: 1462408 - RNA, 19 nt, Artificial Sequence
  Description of Artificial Sequence: Synthetic oligonucleotide
auacuaggaagcccugaag

SEQ ID NO: 1462409 - RNA, 19 nt, Artificial Sequence
  Description of Artificial Sequence: Synthetic oligonucleotide
ugauaccaaccuugaagcc

SEQ ID NO: 1462410 - RNA, 19 nt, Artificial Sequence
  Description of Artificial Sequence: Synthetic oligonucleotide
ugcuuauucuucucccuca

SEQ ID NO: 1462411 - RNA, 19 nt, Artificial Sequence
  Description of Artificial Sequence: Synthetic oligonucleotide
guccucucgagccucagag

SEQ ID NO: 1462412 - RNA, 19 nt, Artificial Sequence
  Description of Artificial Sequence: Synthetic oligonucleotide
auggaggagacgauuuggc

SEQ ID NO: 1462413 - RNA, 19 nt, Artificial Sequence
  Description of Artificial Sequence: Synthetic oligonucleotide
aucucaucgauuacaguag

SEQ ID NO: 1462414 - RNA, 19 nt, Artificial Sequence
  Description of Artificial Sequence: Synthetic oligonucleotide
gauuacaguaggcuccaga

SEQ ID NO: 1462415 - RNA, 19 nt, Artificial Sequence
  Description of Artificial Sequence: Synthetic oligonucleotide
cugcccaucaggcugaauc

SEQ ID NO: 1462416 - RNA, 19 nt, Artificial Sequence
  Description of Artificial Sequence: Synthetic oligonucleotide
gauccgguccagcacuggg

SEQ ID NO: 1462417 - RNA, 19 nt, Artificial Sequence
  Description of Artificial Sequence: Synthetic oligonucleotide
uuuauuucgaaaggauuuu

SEQ ID NO: 1462418 - RNA, 19 nt, Artificial Sequence
  Description of Artificial Sequence: Synthetic oligonucleotide
aguggauucgaggguaggg

SEQ ID NO: 1462419 - RNA, 19 nt, Artificial Sequence
  Description of Artificial Sequence: Synthetic oligonucleotide
cacaaagacugcccuaggc

SEQ ID NO: 1462420 - RNA, 19 nt, Artificial Sequence
  Description of Artificial Sequence: Synthetic oligonucleotide
uaggaagcccugaaguccu

SEQ ID NO: 1462421 - RNA, 19 nt, Artificial Sequence
  Description of Artificial Sequence: Synthetic oligonucleotide
accugccugccccacaugg

SEQ ID NO: 1462422 - RNA, 19 nt, Artificial Sequence
  Description of Artificial Sequence: Synthetic oligonucleotide
gaaaggauuuugcaauaaa

SEQ ID NO: 1462423 - RNA, 19 nt, Artificial Sequence
  Description of Artificial Sequence: Synthetic oligonucleotide
uggauucgaggguagggca

SEQ ID NO: 1462424 - RNA, 19 nt, Artificial Sequence
  Description of Artificial Sequence: Synthetic oligonucleotide
uggacgcucaauguccagg

SEQ ID NO: 1462425 - RNA, 19 nt, Artificial Sequence
  Description of Artificial Sequence: Synthetic oligonucleotide
ggaggagacgauuuggcug

SEQ ID NO: 1462426 - RNA, 19 nt, Artificial Sequence
  Description of Artificial Sequence: Synthetic oligonucleotide
ucggaucucaucgauuaca

SEQ ID NO: 1462427 - RNA, 19 nt, Artificial Sequence
  Description of Artificial Sequence: Synthetic oligonucleotide
aggcugaaucccauguucc

SEQ ID NO: 1462428 - RNA, 19 nt, Artificial Sequence
  Description of Artificial Sequence: Synthetic oligonucleotide
uagucaacagaaagccgcu

SEQ ID NO: 1462429 - RNA, 19 nt, Artificial Sequence
  Description of Artificial Sequence: Synthetic oligonucleotide
aaugacgggugcauaggug

SEQ ID NO: 1462430 - RNA, 19 nt, Artificial Sequence
  Description of Artificial Sequence: Synthetic oligonucleotide
cucaucgauuacaguaggc

SEQ ID NO: 1462431 - RNA, 19 nt, Artificial Sequence
  Description of Artificial Sequence: Synthetic oligonucleotide
uuacaguaggcuccagauc

SEQ ID NO: 1462432 - RNA, 19 nt, Artificial Sequence
  Description of Artificial Sequence: Synthetic oligonucleotide
guaugggccauuucggauc

SEQ ID NO: 1462433 - RNA, 19 nt, Artificial Sequence
  Description of Artificial Sequence: Synthetic oligonucleotide
accggcuccaagcggcugc

SEQ ID NO: 1462434 - RNA, 19 nt, Artificial Sequence
  Description of Artificial Sequence: Synthetic oligonucleotide
ugaaucccauguuccagac

SEQ ID NO: 1462435 - RNA, 19 nt, Artificial Sequence
  Description of Artificial Sequence: Synthetic oligonucleotide
agguuuguauagguuggac

SEQ ID NO: 1462436 - RNA, 19 nt, Artificial Sequence
  Description of Artificial Sequence: Synthetic oligonucleotide
uagguuggacgcucaaugu

SEQ ID NO: 1462437 - RNA, 19 nt, Artificial Sequence
  Description of Artificial Sequence: Synthetic oligonucleotide
ggagucgaugccuacuucc

SEQ ID NO: 1462438 - RNA, 19 nt, Artificial Sequence
  Description of Artificial Sequence: Synthetic oligonucleotide
cacucacgcaugaugaguc

SEQ ID NO: 1462439 - RNA, 19 nt, Artificial Sequence
  Description of Artificial Sequence: Synthetic oligonucleotide
agcgcaaggaagcugugau

SEQ ID NO: 1462440 - RNA, 19 nt, Artificial Sequence
  Description of Artificial Sequence: Synthetic oligonucleotide
cccacauggacugaaaugc

SEQ ID NO: 1462441 - RNA, 19 nt, Artificial Sequence
  Description of Artificial Sequence: Synthetic oligonucleotide
gucugagugcuccaaggug

SEQ ID NO: 1462442 - RNA, 19 nt, Artificial Sequence
  Description of Artificial Sequence: Synthetic oligonucleotide
ugaugagucuggguugugc

SEQ ID NO: 1462443 - RNA, 19 nt, Artificial Sequence
  Description of Artificial Sequence: Synthetic oligonucleotide
agacgauuuggcugaugag

SEQ ID NO: 1462444 - RNA, 19 nt, Artificial Sequence
  Description of Artificial Sequence: Synthetic oligonucleotide
agucgaugccuacuuccuc

SEQ ID NO: 1462445 - RNA, 19 nt, Artificial Sequence
  Description of Artificial Sequence: Synthetic oligonucleotide
uuuguauagguuggacgcu

SEQ ID NO: 1462446 - RNA, 19 nt, Artificial Sequence
  Description of Artificial Sequence: Synthetic oligonucleotide
auaccaaccuugaagccug

SEQ ID NO: 1462447 - RNA, 19 nt, Artificial Sequence
  Description of Artificial Sequence: Synthetic oligonucleotide
gugcgucucacguugaguc

SEQ ID NO: 1462448 - RNA, 19 nt, Artificial Sequence
  Description of Artificial Sequence: Synthetic oligonucleotide
uaggcacauguuuuccagc

SEQ ID NO: 1462449 - RNA, 19 nt, Artificial Sequence
  Description of Artificial Sequence: Synthetic oligonucleotide
ucaaagcgcaaggaagcug

SEQ ID NO: 1462450 - RNA, 19 nt, Artificial Sequence
  Description of Artificial Sequence: Synthetic oligonucleotide
ugccuacuuccucauaauc

SEQ ID NO: 1462451 - RNA, 19 nt, Artificial Sequence
  Description of Artificial Sequence: Synthetic oligonucleotide
aguccugugcacugaucag

SEQ ID NO: 1462452 - RNA, 19 nt, Artificial Sequence
  Description of Artificial Sequence: Synthetic oligonucleotide
agacaguuugcggauccgg

SEQ ID NO: 1462453 - RNA, 19 nt, Artificial Sequence
  Description of Artificial Sequence: Synthetic oligonucleotide
auagccucguuguccacca

SEQ ID NO: 1462454 - RNA, 19 nt, Artificial Sequence
  Description of Artificial Sequence: Synthetic oligonucleotide
uaucgcugggcaucugccc

SEQ ID NO: 1462455 - RNA, 19 nt, Artificial Sequence
  Description of Artificial Sequence: Synthetic oligonucleotide
caggcugaaucccauguuc

SEQ ID NO: 1462456 - RNA, 19 nt, Artificial Sequence
  Description of Artificial Sequence: Synthetic oligonucleotide
agcacugggucgaugaucu

SEQ ID NO: 1462457 - RNA, 19 nt, Artificial Sequence
  Description of Artificial Sequence: Synthetic oligonucleotide
gauaccaaccuugaagccu

SEQ ID NO: 1462458 - RNA, 19 nt, Artificial Sequence
  Description of Artificial Sequence: Synthetic oligonucleotide
cuuucccagugauaagcug

SEQ ID NO: 1462459 - RNA, 19 nt, Artificial Sequence
  Description of Artificial Sequence: Synthetic oligonucleotide
aagcccucuuugcauacau

SEQ ID NO: 1462460 - RNA, 19 nt, Artificial Sequence
  Description of Artificial Sequence: Synthetic oligonucleotide
ucgaaaggauuuugcaaua

SEQ ID NO: 1462461 - RNA, 19 nt, Artificial Sequence
  Description of Artificial Sequence: Synthetic oligonucleotide
agcuguggacacuugugga

SEQ ID NO: 1462462 - RNA, 19 nt, Artificial Sequence
  Description of Artificial Sequence: Synthetic oligonucleotide
ccaccaauggucuuaucgc

SEQ ID NO: 1462463 - RNA, 19 nt, Artificial Sequence
  Description of Artificial Sequence: Synthetic oligonucleotide
cauguacuugccaugccga

SEQ ID NO: 1462464 - RNA, 19 nt, Artificial Sequence
  Description of Artificial Sequence: Synthetic oligonucleotide
gucgaugccuacuuccuca

SEQ ID NO: 1462465 - RNA, 19 nt, Artificial Sequence
  Description of Artificial Sequence: Synthetic oligonucleotide
uugcauacaucaagucaaa

SEQ ID NO: 1462466 - RNA, 19 nt, Artificial Sequence
  Description of Artificial Sequence: Synthetic oligonucleotide
gauucgaggguagggcacc

SEQ ID NO: 1462467 - RNA, 19 nt, Artificial Sequence
  Description of Artificial Sequence: Synthetic oligonucleotide
cacugggucgaugaucucc

SEQ ID NO: 1462468 - RNA, 19 nt, Artificial Sequence
  Description of Artificial Sequence: Synthetic oligonucleotide
guuacggcggcagauguca

SEQ ID NO: 1462469 - RNA, 19 nt, Artificial Sequence
  Description of Artificial Sequence: Synthetic oligonucleotide
ccaauggucuuaucgcugg

SEQ ID NO: 1462470 - RNA, 19 nt, Artificial Sequence
  Description of Artificial Sequence: Synthetic oligonucleotide
gguggcugguaguugauac

SEQ ID NO: 1462471 - RNA, 19 nt, Artificial Sequence
  Description of Artificial Sequence: Synthetic oligonucleotide
uaggagucgaugccuacuu

SEQ ID NO: 1462472 - RNA, 19 nt, Artificial Sequence
  Description of Artificial Sequence: Synthetic oligonucleotide
ccauguacuugccaugccg

SEQ ID NO: 1462473 - RNA, 19 nt, Artificial Sequence
  Description of Artificial Sequence: Synthetic oligonucleotide
ugacgggugcauagguggc

SEQ ID NO: 1462474 - RNA, 19 nt, Artificial Sequence
  Description of Artificial Sequence: Synthetic oligonucleotide
guggauucgaggguagggc

SEQ ID NO: 1462475 - RNA, 19 nt, Artificial Sequence
  Description of Artificial Sequence: Synthetic oligonucleotide
gguuggacgcucaaugucc

SEQ ID NO: 1462476 - RNA, 19 nt, Artificial Sequence
  Description of Artificial Sequence: Synthetic oligonucleotide
aucgcugggcaucugccca

SEQ ID NO: 1462477 - RNA, 19 nt, Artificial Sequence
  Description of Artificial Sequence: Synthetic oligonucleotide
ucgauuacaguaggcucca

SEQ ID NO: 1462478 - RNA, 19 nt, Artificial Sequence
  Description of Artificial Sequence: Synthetic oligonucleotide
aggaagcugugauggagga

SEQ ID NO: 1462479 - RNA, 19 nt, Artificial Sequence
  Description of Artificial Sequence: Synthetic oligonucleotide
gaagagcugucgguauggg

SEQ ID NO: 1462480 - RNA, 19 nt, Artificial Sequence
  Description of Artificial Sequence: Synthetic oligonucleotide
uuguauagguuggacgcuc

SEQ ID NO: 1462481 - RNA, 19 nt, Artificial Sequence
  Description of Artificial Sequence: Synthetic oligonucleotide
aggagucgaugccuacuuc

SEQ ID NO: 1462482 - RNA, 19 nt, Artificial Sequence
  Description of Artificial Sequence: Synthetic oligonucleotide
uccccuccaccaauggucu

SEQ ID NO: 1462483 - RNA, 19 nt, Artificial Sequence
  Description of Artificial Sequence: Synthetic oligonucleotide
acuugccaugccgaggguc

SEQ ID NO: 1462484 - RNA, 19 nt, Artificial Sequence
  Description of Artificial Sequence: Synthetic oligonucleotide
gcuguggacacuuguggag

SEQ ID NO: 1462485 - RNA, 19 nt, Artificial Sequence
  Description of Artificial Sequence: Synthetic oligonucleotide
cagcaugcacacugcacgc

SEQ ID NO: 1462486 - RNA, 19 nt, Artificial Sequence
  Description of Artificial Sequence: Synthetic oligonucleotide
guggaauacuaggaagccc

SEQ ID NO: 1462487 - RNA, 19 nt, Artificial Sequence
  Description of Artificial Sequence: Synthetic oligonucleotide
uauagguuggacgcucaau

SEQ ID NO: 1462488 - RNA, 19 nt, Artificial Sequence
  Description of Artificial Sequence: Synthetic oligonucleotide
uucggaucucaucgauuac

SEQ ID NO: 1462489 - RNA, 19 nt, Artificial Sequence
  Description of Artificial Sequence: Synthetic oligonucleotide
cugaaucccauguuccaga

SEQ ID NO: 1462490 - RNA, 19 nt, Artificial Sequence
  Description of Artificial Sequence: Synthetic oligonucleotide
agguuacggcggcagaugu

SEQ ID NO: 1462491 - RNA, 19 nt, Artificial Sequence
  Description of Artificial Sequence: Synthetic oligonucleotide
uugccauagucaacagaaa

SEQ ID NO: 1462492 - RNA, 19 nt, Artificial Sequence
  Description of Artificial Sequence: Synthetic oligonucleotide
cugaaaugcacucacgcau

SEQ ID NO: 1462493 - RNA, 19 nt, Artificial Sequence
  Description of Artificial Sequence: Synthetic oligonucleotide
aguugauaccaaccuugaa

SEQ ID NO: 1462494 - RNA, 19 nt, Artificial Sequence
  Description of Artificial Sequence: Synthetic oligonucleotide
augagucuggguugugcgu

SEQ ID NO: 1462495 - RNA, 19 nt, Artificial Sequence
  Description of Artificial Sequence: Synthetic oligonucleotide
ugcggauccgguccagcac

SEQ ID NO: 1462496 - RNA, 19 nt, Artificial Sequence
  Description of Artificial Sequence: Synthetic oligonucleotide
cuggguggaagagcugucg

SEQ ID NO: 1462497 - RNA, 19 nt, Artificial Sequence
  Description of Artificial Sequence: Synthetic oligonucleotide
gauccacaaagacugcccu

SEQ ID NO: 1462498 - RNA, 19 nt, Artificial Sequence
  Description of Artificial Sequence: Synthetic oligonucleotide
cuggguugugcgucucacg

SEQ ID NO: 1462499 - RNA, 19 nt, Artificial Sequence
  Description of Artificial Sequence: Synthetic oligonucleotide
cauaggagucgaugccuac

SEQ ID NO: 1462500 - RNA, 19 nt, Artificial Sequence
  Description of Artificial Sequence: Synthetic oligonucleotide
gaauacuaggaagcccuga

SEQ ID NO: 1462501 - RNA, 19 nt, Artificial Sequence
  Description of Artificial Sequence: Synthetic oligonucleotide
cacguugagucggggaucc

SEQ ID NO: 1462502 - RNA, 19 nt, Artificial Sequence
  Description of Artificial Sequence: Synthetic oligonucleotide
caauggucuuaucgcuggg

SEQ ID NO: 1462503 - RNA, 19 nt, Artificial Sequence
  Description of Artificial Sequence: Synthetic oligonucleotide
auaggagucgaugccuacu

SEQ ID NO: 1462504 - RNA, 19 nt, Artificial Sequence
  Description of Artificial Sequence: Synthetic oligonucleotide
agucaacagaaagccgcuc

SEQ ID NO: 1462505 - RNA, 19 nt, Artificial Sequence
  Description of Artificial Sequence: Synthetic oligonucleotide
gcaugaugagucuggguug

SEQ ID NO: 1462506 - RNA, 19 nt, Artificial Sequence
  Description of Artificial Sequence: Synthetic oligonucleotide
ggugguauggguggucagg

SEQ ID NO: 1462507 - RNA, 19 nt, Artificial Sequence
  Description of Artificial Sequence: Synthetic oligonucleotide
agcgauagcggcguucaca

SEQ ID NO: 1462508 - RNA, 19 nt, Artificial Sequence
  Description of Artificial Sequence: Synthetic oligonucleotide
uccaagcggcugcuuauuc

SEQ ID NO: 1462509 - RNA, 19 nt, Artificial Sequence
  Description of Artificial Sequence: Synthetic oligonucleotide
gucgaugaucuccuugcca

SEQ ID NO: 1462510 - RNA, 19 nt, Artificial Sequence
  Description of Artificial Sequence: Synthetic oligonucleotide
aucaaagcgcaaggaagcu

SEQ ID NO: 1462511 - RNA, 19 nt, Artificial Sequence
  Description of Artificial Sequence: Synthetic oligonucleotide
accaauggucuuaucgcug

SEQ ID NO: 1462512 - RNA, 19 nt, Artificial Sequence
  Description of Artificial Sequence: Synthetic oligonucleotide
agauagccucguuguccac

SEQ ID NO: 1462513 - RNA, 19 nt, Artificial Sequence
  Description of Artificial Sequence: Synthetic oligonucleotide
aguuugcggauccggucca

SEQ ID NO: 1462514 - RNA, 19 nt, Artificial Sequence
  Description of Artificial Sequence: Synthetic oligonucleotide
ugugcgucucacguugagu

SEQ ID NO: 1462515 - RNA, 19 nt, Artificial Sequence
  Description of Artificial Sequence: Synthetic oligonucleotide
acccacauaccaguguaca

SEQ ID NO: 1462516 - RNA, 19 nt, Artificial Sequence
  Description of Artificial Sequence: Synthetic oligonucleotide
acauaccaguguacaaaag

SEQ ID NO: 1462517 - RNA, 19 nt, Artificial Sequence
  Description of Artificial Sequence: Synthetic oligonucleotide
aagcggcugcuuauucuuc

SEQ ID NO: 1462518 - RNA, 19 nt, Artificial Sequence
  Description of Artificial Sequence: Synthetic oligonucleotide
aucagacaguuugcggauc

SEQ ID NO: 1462519 - RNA, 19 nt, Artificial Sequence
  Description of Artificial Sequence: Synthetic oligonucleotide
uuggacgcucaauguccag

SEQ ID NO: 1462520 - RNA, 19 nt, Artificial Sequence
  Description of Artificial Sequence: Synthetic oligonucleotide
aagcgcaaggaagcuguga

SEQ ID NO: 1462521 - RNA, 19 nt, Artificial Sequence
  Description of Artificial Sequence: Synthetic oligonucleotide
acucacgcaugaugagucu

SEQ ID NO: 1462522 - RNA, 19 nt, Artificial Sequence
  Description of Artificial Sequence: Synthetic oligonucleotide
aaagcccucuuugcauaca

SEQ ID NO: 1462523 - RNA, 19 nt, Artificial Sequence
  Description of Artificial Sequence: Synthetic oligonucleotide
acugggucgaugaucuccu

SEQ ID NO: 1462524 - RNA, 19 nt, Artificial Sequence
  Description of Artificial Sequence: Synthetic oligonucleotide
gaaucccauguuccagaca

SEQ ID NO: 1462525 - RNA, 19 nt, Artificial Sequence
  Description of Artificial Sequence: Synthetic oligonucleotide
aaaugcacucacgcaugau

SEQ ID NO: 1462526 - RNA, 19 nt, Artificial Sequence
  Description of Artificial Sequence: Synthetic oligonucleotide
gaucagacaguuugcggau

SEQ ID NO: 1462527 - RNA, 19 nt, Artificial Sequence
  Description of Artificial Sequence: Synthetic oligonucleotide
cacgcaugaugagucuggg

SEQ ID NO: 1462528 - RNA, 19 nt, Artificial Sequence
  Description of Artificial Sequence: Synthetic oligonucleotide
ccucauaggagucgaugcc

SEQ ID NO: 1462529 - RNA, 19 nt, Artificial Sequence
  Description of Artificial Sequence: Synthetic oligonucleotide
ugcacugaucagacaguuu

SEQ ID NO: 1462530 - RNA, 19 nt, Artificial Sequence
  Description of Artificial Sequence: Synthetic oligonucleotide
gagcugucgguaugggcca

SEQ ID NO: 1462531 - RNA, 19 nt, Artificial Sequence
  Description of Artificial Sequence: Synthetic oligonucleotide
augccuacuuccucauaau

SEQ ID NO: 1462532 - RNA, 19 nt, Artificial Sequence
  Description of Artificial Sequence: Synthetic oligonucleotide
acaucaagucaaacuugug

SEQ ID NO: 1462533 - RNA, 19 nt, Artificial Sequence
  Description of Artificial Sequence: Synthetic oligonucleotide
cucucgagccucagagaac

SEQ ID NO: 1462534 - RNA, 19 nt, Artificial Sequence
  Description of Artificial Sequence: Synthetic oligonucleotide
aggugguauggguggucag

SEQ ID NO: 1462535 - RNA, 19 nt, Artificial Sequence
  Description of Artificial Sequence: Synthetic oligonucleotide
gccccaucaaagcgcaagg

SEQ ID NO: 1462536 - RNA, 19 nt, Artificial Sequence
  Description of Artificial Sequence: Synthetic oligonucleotide
agggagacuuuuauuucga

SEQ ID NO: 1462537 - RNA, 19 nt, Artificial Sequence
  Description of Artificial Sequence: Synthetic oligonucleotide
aaagcgcaaggaagcugug

SEQ ID NO: 1462538 - RNA, 19 nt, Artificial Sequence
  Description of Artificial Sequence: Synthetic oligonucleotide
uuguggagcuggguagaug

SEQ ID NO: 1462539 - RNA, 19 nt, Artificial Sequence
  Description of Artificial Sequence: Synthetic oligonucleotide
cauaguuguuggcggcauc

SEQ ID NO: 1462540 - RNA, 19 nt, Artificial Sequence
  Description of Artificial Sequence: Synthetic oligonucleotide
augcacacugcacgcugca

SEQ ID NO: 1462541 - RNA, 19 nt, Artificial Sequence
  Description of Artificial Sequence: Synthetic oligonucleotide
gcaauggcagugguguugc

SEQ ID NO: 1462542 - RNA, 19 nt, Artificial Sequence
  Description of Artificial Sequence: Synthetic oligonucleotide
auccacaaagacugcccua

SEQ ID NO: 1462543 - RNA, 19 nt, Artificial Sequence
  Description of Artificial Sequence: Synthetic oligonucleotide
guuguuggcggcaucuucu

SEQ ID NO: 1462544 - RNA, 19 nt, Artificial Sequence
  Description of Artificial Sequence: Synthetic oligonucleotide
ucacguugagucggggauc

SEQ ID NO: 1462545 - RNA, 19 nt, Artificial Sequence
  Description of Artificial Sequence: Synthetic oligonucleotide
gagguuuguauagguugga

SEQ ID NO: 1462546 - RNA, 19 nt, Artificial Sequence
  Description of Artificial Sequence: Synthetic oligonucleotide
acgcaugaugagucugggu

SEQ ID NO: 1462547 - RNA, 19 nt, Artificial Sequence
  Description of Artificial Sequence: Synthetic oligonucleotide
cagacaguuugcggauccg

SEQ ID NO: 1462548 - RNA, 19 nt, Artificial Sequence
  Description of Artificial Sequence: Synthetic oligonucleotide
ggacugaaaugcacucacg

SEQ ID NO: 1462549 - RNA, 19 nt, Artificial Sequence
  Description of Artificial Sequence: Synthetic oligonucleotide
auugcccaucuggacaccu

SEQ ID NO: 1462550 - RNA, 19 nt, Artificial Sequence
  Description of Artificial Sequence: Synthetic oligonucleotide
gcggcaucuucuuucccag

SEQ ID NO: 1462551 - RNA, 19 nt, Artificial Sequence
  Description of Artificial Sequence: Synthetic oligonucleotide
ggucuuaucgcugggcauc

SEQ ID NO: 1462552 - RNA, 19 nt, Artificial Sequence
  Description of Artificial Sequence: Synthetic oligonucleotide
uuguuggcggcaucuucuu

SEQ ID NO: 1462553 - RNA, 19 nt, Artificial Sequence
  Description of Artificial Sequence: Synthetic oligonucleotide
ggcggcaucuucuuuccca

SEQ ID NO: 1462554 - RNA, 19 nt, Artificial Sequence
  Description of Artificial Sequence: Synthetic oligonucleotide
ccccacauggacugaaaug

SEQ ID NO: 1462555 - RNA, 19 nt, Artificial Sequence
  Description of Artificial Sequence: Synthetic oligonucleotide
cuguggggcaccaguccac

SEQ ID NO: 1462556 - RNA, 19 nt, Artificial Sequence
  Description of Artificial Sequence: Synthetic oligonucleotide
ugucgguaugggccauuuc

SEQ ID NO: 1462557 - RNA, 19 nt, Artificial Sequence
  Description of Artificial Sequence: Synthetic oligonucleotide
ggugaagccagagccggug

SEQ ID NO: 1462558 - RNA, 19 nt, Artificial Sequence
  Description of Artificial Sequence: Synthetic oligonucleotide
gacugcccuaggcacaugu

SEQ ID NO: 1462559 - RNA, 19 nt, Artificial Sequence
  Description of Artificial Sequence: Synthetic oligonucleotide
uguuggcggcaucuucuuu

SEQ ID NO: 1462560 - RNA, 19 nt, Artificial Sequence
  Description of Artificial Sequence: Synthetic oligonucleotide
guccagguuacggcggcag

SEQ ID NO: 1462561 - RNA, 19 nt, Artificial Sequence
  Description of Artificial Sequence: Synthetic oligonucleotide
augccgagggucacacuuc

SEQ ID NO: 1462562 - RNA, 19 nt, Artificial Sequence
  Description of Artificial Sequence: Synthetic oligonucleotide
gagucauccccuccaccaa

SEQ ID NO: 1462563 - RNA, 19 nt, Artificial Sequence
  Description of Artificial Sequence: Synthetic oligonucleotide
cagguuacggcggcagaug

SEQ ID NO: 1462564 - RNA, 19 nt, Artificial Sequence
  Description of Artificial Sequence: Synthetic oligonucleotide
caucugcccaucaggcuga

SEQ ID NO: 1462565 - RNA, 19 nt, Artificial Sequence
  Description of Artificial Sequence: Synthetic oligonucleotide
guuggacgcucaaugucca

SEQ ID NO: 1462566 - RNA, 19 nt, Artificial Sequence
  Description of Artificial Sequence: Synthetic oligonucleotide
guagagcaggcagcaggcc

SEQ ID NO: 1462567 - RNA, 19 nt, Artificial Sequence
  Description of Artificial Sequence: Synthetic oligonucleotide
uucgaggguagggcaccag

SEQ ID NO: 1462568 - RNA, 19 nt, Artificial Sequence
  Description of Artificial Sequence: Synthetic oligonucleotide
guauagguuggacgcucaa

SEQ ID NO: 1462569 - RNA, 19 nt, Artificial Sequence
  Description of Artificial Sequence: Synthetic oligonucleotide
gacaguuugcggauccggu

SEQ ID NO: 1462570 - RNA, 19 nt, Artificial Sequence
  Description of Artificial Sequence: Synthetic oligonucleotide
caccaauggucuuaucgcu

SEQ ID NO: 1462571 - RNA, 19 nt, Artificial Sequence
  Description of Artificial Sequence: Synthetic oligonucleotide
acugcacgcugcaccuugg

SEQ ID NO: 1462572 - RNA, 19 nt, Artificial Sequence
  Description of Artificial Sequence: Synthetic oligonucleotide
cucacguugagucggggau

SEQ ID NO: 1462573 - RNA, 19 nt, Artificial Sequence
  Description of Artificial Sequence: Synthetic oligonucleotide
cucugcagaaaugacgggu

SEQ ID NO: 1462574 - RNA, 19 nt, Artificial Sequence
  Description of Artificial Sequence: Synthetic oligonucleotide
agcggcguucacauccuug

SEQ ID NO: 1462575 - RNA, 19 nt, Artificial Sequence
  Description of Artificial Sequence: Synthetic oligonucleotide
uacggcggcagaugucaua

SEQ ID NO: 1462576 - RNA, 19 nt, Artificial Sequence
  Description of Artificial Sequence: Synthetic oligonucleotide
uggcggcaucuucuuuccc

SEQ ID NO: 1462577 - RNA, 19 nt, Artificial Sequence
  Description of Artificial Sequence: Synthetic oligonucleotide
cugcacgcugcaccuuggc

SEQ ID NO: 1462578 - RNA, 19 nt, Artificial Sequence
  Description of Artificial Sequence: Synthetic oligonucleotide
aaaccggcuccaagcggcu

SEQ ID NO: 1462579 - RNA, 19 nt, Artificial Sequence
  Description of Artificial Sequence: Synthetic oligonucleotide
uacuugccaugccgagggu

SEQ ID NO: 1462580 - RNA, 19 nt, Artificial Sequence
  Description of Artificial Sequence: Synthetic oligonucleotide
cagcacugggucgaugauc

SEQ ID NO: 1462581 - RNA, 19 nt, Artificial Sequence
  Description of Artificial Sequence: Synthetic oligonucleotide
ggaauacuaggaagcccug

SEQ ID NO: 1462582 - RNA, 19 nt, Artificial Sequence
  Description of Artificial Sequence: Synthetic oligonucleotide
cucauaggagucgaugccu

SEQ ID NO: 1462583 - RNA, 19 nt, Artificial Sequence
  Description of Artificial Sequence: Synthetic oligonucleotide
uuacggcggcagaugucau

SEQ ID NO: 1462584 - RNA, 19 nt, Artificial Sequence
  Description of Artificial Sequence: Synthetic oligonucleotide
caguaggcuccagauccac

SEQ ID NO: 1462585 - RNA, 19 nt, Artificial Sequence
  Description of Artificial Sequence: Synthetic oligonucleotide
auagcggcguucacauccu

SEQ ID NO: 1462586 - RNA, 19 nt, Artificial Sequence
  Description of Artificial Sequence: Synthetic oligonucleotide
agucuggguugugcgucuc

SEQ ID NO: 1462587 - RNA, 19 nt, Artificial Sequence
  Description of Artificial Sequence: Synthetic oligonucleotide
gucucacguugagucgggg

SEQ ID NO: 1462588 - RNA, 19 nt, Artificial Sequence
  Description of Artificial Sequence: Synthetic oligonucleotide
acaguaggcuccagaucca

SEQ ID NO: 1462589 - RNA, 19 nt, Artificial Sequence
  Description of Artificial Sequence: Synthetic oligonucleotide
ucuuaucgcugggcaucug

SEQ ID NO: 1462590 - RNA, 19 nt, Artificial Sequence
  Description of Artificial Sequence: Synthetic oligonucleotide
gagucgaugccuacuuccu

SEQ ID NO: 1462591 - RNA, 19 nt, Artificial Sequence
  Description of Artificial Sequence: Synthetic oligonucleotide
guaggccuucucugcagaa

SEQ ID NO: 1462592 - RNA, 19 nt, Artificial Sequence
  Description of Artificial Sequence: Synthetic oligonucleotide
auccgguccagcacugggu

SEQ ID NO: 1462593 - RNA, 19 nt, Artificial Sequence
  Description of Artificial Sequence: Synthetic oligonucleotide
aaccggcuccaagcggcug

SEQ ID NO: 1462594 - RNA, 19 nt, Artificial Sequence
  Description of Artificial Sequence: Synthetic oligonucleotide
uguccagguuacggcggca

SEQ ID NO: 1462595 - RNA, 19 nt, Artificial Sequence
  Description of Artificial Sequence: Synthetic oligonucleotide
agggccccaucaaagcgca

SEQ ID NO: 1462596 - RNA, 19 nt, Artificial Sequence
  Description of Artificial Sequence: Synthetic oligonucleotide
acguugagucggggauccc

SEQ ID NO: 1462597 - RNA, 19 nt, Artificial Sequence
  Description of Artificial Sequence: Synthetic oligonucleotide
ccucucgagccucagagaa

SEQ ID NO: 1462598 - RNA, 19 nt, Artificial Sequence
  Description of Artificial Sequence: Synthetic oligonucleotide
gcgcaaggaagcugugaug

SEQ ID NO: 1462599 - RNA, 19 nt, Artificial Sequence
  Description of Artificial Sequence: Synthetic oligonucleotide
auucgaggguagggcacca

SEQ ID NO: 1462600 - RNA, 19 nt, Artificial Sequence
  Description of Artificial Sequence: Synthetic oligonucleotide
gguaugggccauuucggau

SEQ ID NO: 1462601 - RNA, 19 nt, Artificial Sequence
  Description of Artificial Sequence: Synthetic oligonucleotide
gccauguacuugccaugcc

SEQ ID NO: 1462602 - RNA, 19 nt, Artificial Sequence
  Description of Artificial Sequence: Synthetic oligonucleotide
cguugagucggggaucccg

SEQ ID NO: 1462603 - RNA, 19 nt, Artificial Sequence
  Description of Artificial Sequence: Synthetic oligonucleotide
cugaaguccugugcacuga

SEQ ID NO: 1462604 - RNA, 19 nt, Artificial Sequence
  Description of Artificial Sequence: Synthetic oligonucleotide
cccaucaaagcgcaaggaa

SEQ ID NO: 1462605 - RNA, 19 nt, Artificial Sequence
  Description of Artificial Sequence: Synthetic oligonucleotide
gagucuggguugugcgucu

SEQ ID NO: 1462606 - RNA, 19 nt, Artificial Sequence
  Description of Artificial Sequence: Synthetic oligonucleotide
ccuaggcacauguuuucca

SEQ ID NO: 1462607 - RNA, 19 nt, Artificial Sequence
  Description of Artificial Sequence: Synthetic oligonucleotide
gcagcgauagcggcguuca

SEQ ID NO: 1462608 - RNA, 19 nt, Artificial Sequence
  Description of Artificial Sequence: Synthetic oligonucleotide
ggcuccagauccacaaaga

SEQ ID NO: 1462609 - RNA, 19 nt, Artificial Sequence
  Description of Artificial Sequence: Synthetic oligonucleotide
ccacauaccaguguacaaa

SEQ ID NO: 1462610 - RNA, 19 nt, Artificial Sequence
  Description of Artificial Sequence: Synthetic oligonucleotide
gcaaggaagcugugaugga

SEQ ID NO: 1462611 - RNA, 19 nt, Artificial Sequence
  Description of Artificial Sequence: Synthetic oligonucleotide
cucgagccucagagaacuc

SEQ ID NO: 1462612 - RNA, 19 nt, Artificial Sequence
  Description of Artificial Sequence: Synthetic oligonucleotide
cccuaggcacauguuuucc

SEQ ID NO: 1462613 - RNA, 19 nt, Artificial Sequence
  Description of Artificial Sequence: Synthetic oligonucleotide
gcgauagcggcguucacau

SEQ ID NO: 1462614 - RNA, 19 nt, Artificial Sequence
  Description of Artificial Sequence: Synthetic oligonucleotide
gcccaucaggcugaauccc

SEQ ID NO: 1462615 - RNA, 19 nt, Artificial Sequence
  Description of Artificial Sequence: Synthetic oligonucleotide
gcccuaggcacauguuuuc

SEQ ID NO: 1462616 - RNA, 19 nt, Artificial Sequence
  Description of Artificial Sequence: Synthetic oligonucleotide
cugagugcuccaagguggu

SEQ ID NO: 1462617 - RNA, 19 nt, Artificial Sequence
  Description of Artificial Sequence: Synthetic oligonucleotide
caaugaaaaccggcuccaa

SEQ ID NO: 1462618 - RNA, 19 nt, Artificial Sequence
  Description of Artificial Sequence: Synthetic oligonucleotide
ccacauggacugaaaugca

SEQ ID NO: 1462619 - RNA, 19 nt, Artificial Sequence
  Description of Artificial Sequence: Synthetic oligonucleotide
guugugcgucucacguuga

SEQ ID NO: 1462620 - RNA, 19 nt, Artificial Sequence
  Description of Artificial Sequence: Synthetic oligonucleotide
ucccagugauaagcugcuc

SEQ ID NO: 1462621 - RNA, 19 nt, Artificial Sequence
  Description of Artificial Sequence: Synthetic oligonucleotide
ggauccgguccagcacugg

SEQ ID NO: 1462622 - RNA, 19 nt, Artificial Sequence
  Description of Artificial Sequence: Synthetic oligonucleotide
ccauuucggaucucaucga

SEQ ID NO: 1462623 - RNA, 19 nt, Artificial Sequence
  Description of Artificial Sequence: Synthetic oligonucleotide
ggaacucugucagguccac

SEQ ID NO: 1462624 - RNA, 19 nt, Artificial Sequence
  Description of Artificial Sequence: Synthetic oligonucleotide
cugcccuaggcacauguuu

SEQ ID NO: 1462625 - RNA, 19 nt, Artificial Sequence
  Description of Artificial Sequence: Synthetic oligonucleotide
gucuuaucgcugggcaucu

SEQ ID NO: 1462626 - RNA, 19 nt, Artificial Sequence
  Description of Artificial Sequence: Synthetic oligonucleotide
ggaucucaucgauuacagu

SEQ ID NO: 1462627 - RNA, 19 nt, Artificial Sequence
  Description of Artificial Sequence: Synthetic oligonucleotide
uagcggcguucacauccuu

SEQ ID NO: 1462628 - RNA, 19 nt, Artificial Sequence
  Description of Artificial Sequence: Synthetic oligonucleotide
gguuacggcggcagauguc

SEQ ID NO: 1462629 - RNA, 19 nt, Artificial Sequence
  Description of Artificial Sequence: Synthetic oligonucleotide
cgucucacguugagucggg

SEQ ID NO: 1462630 - RNA, 19 nt, Artificial Sequence
  Description of Artificial Sequence: Synthetic oligonucleotide
cagcgauagcggcguucac

SEQ ID NO: 1462631 - RNA, 19 nt, Artificial Sequence
  Description of Artificial Sequence: Synthetic oligonucleotide
cgcaugaugagucuggguu

SEQ ID NO: 1462632 - RNA, 19 nt, Artificial Sequence
  Description of Artificial Sequence: Synthetic oligonucleotide
gugcacugaucagacaguu

SEQ ID NO: 1462633 - RNA, 19 nt, Artificial Sequence
  Description of Artificial Sequence: Synthetic oligonucleotide
gacgcucaauguccagguu

SEQ ID NO: 1462634 - RNA, 19 nt, Artificial Sequence
  Description of Artificial Sequence: Synthetic oligonucleotide
caccugccugccccacaug

SEQ ID NO: 1462635 - RNA, 19 nt, Artificial Sequence
  Description of Artificial Sequence: Synthetic oligonucleotide
ggcagcgauagcggcguuc

SEQ ID NO: 1462636 - RNA, 19 nt, Artificial Sequence
  Description of Artificial Sequence: Synthetic oligonucleotide
guccagcacugggucgaug

SEQ ID NO: 1462637 - RNA, 19 nt, Artificial Sequence
  Description of Artificial Sequence: Synthetic oligonucleotide
cccuccaaaacuguggaau

SEQ ID NO: 1462638 - RNA, 19 nt, Artificial Sequence
  Description of Artificial Sequence: Synthetic oligonucleotide
gcacucacgcaugaugagu

SEQ ID NO: 1462639 - RNA, 19 nt, Artificial Sequence
  Description of Artificial Sequence: Synthetic oligonucleotide
cggcguucacauccuuggg

SEQ ID NO: 1462640 - RNA, 19 nt, Artificial Sequence
  Description of Artificial Sequence: Synthetic oligonucleotide
cgguaugggccauuucgga

SEQ ID NO: 1462641 - RNA, 19 nt, Artificial Sequence
  Description of Artificial Sequence: Synthetic oligonucleotide
aggagacgauuuggcugau

SEQ ID NO: 1462642 - RNA, 19 nt, Artificial Sequence
  Description of Artificial Sequence: Synthetic oligonucleotide
gcuccaagcggcugcuuau

SEQ ID NO: 1462643 - RNA, 19 nt, Artificial Sequence
  Description of Artificial Sequence: Synthetic oligonucleotide
agcugucgguaugggccau

SEQ ID NO: 1462644 - RNA, 19 nt, Artificial Sequence
  Description of Artificial Sequence: Synthetic oligonucleotide
cgaaaggauuuugcaauaa

SEQ ID NO: 1462645 - RNA, 19 nt, Artificial Sequence
  Description of Artificial Sequence: Synthetic oligonucleotide
cuuguggagcuggguagau

SEQ ID NO: 1462646 - RNA, 19 nt, Artificial Sequence
  Description of Artificial Sequence: Synthetic oligonucleotide
uggcagcgauagcggcguu

SEQ ID NO: 1462647 - RNA, 19 nt, Artificial Sequence
  Description of Artificial Sequence: Synthetic oligonucleotide
gccccacauggacugaaau

SEQ ID NO: 1462648 - RNA, 19 nt, Artificial Sequence
  Description of Artificial Sequence: Synthetic oligonucleotide
ccccaucaaagcgcaagga

SEQ ID NO: 1462649 - RNA, 19 nt, Artificial Sequence
  Description of Artificial Sequence: Synthetic oligonucleotide
caguggguggcugguaguu

SEQ ID NO: 1462650 - RNA, 19 nt, Artificial Sequence
  Description of Artificial Sequence: Synthetic oligonucleotide
ggacaccugccugccccac

SEQ ID NO: 1462651 - RNA, 19 nt, Artificial Sequence
  Description of Artificial Sequence: Synthetic oligonucleotide
gcacugggucgaugaucuc

SEQ ID NO: 1462652 - RNA, 19 nt, Artificial Sequence
  Description of Artificial Sequence: Synthetic oligonucleotide
ggguugugcgucucacguu

SEQ ID NO: 1462653 - RNA, 19 nt, Artificial Sequence
  Description of Artificial Sequence: Synthetic oligonucleotide
cugucgguaugggccauuu

SEQ ID NO: 1462654 - RNA, 19 nt, Artificial Sequence
  Description of Artificial Sequence: Synthetic oligonucleotide
cccuccaccaauggucuua

SEQ ID NO: 1462655 - RNA, 19 nt, Artificial Sequence
  Description of Artificial Sequence: Synthetic oligonucleotide
cgauagcggcguucacauc

SEQ ID NO: 1462656 - RNA, 19 nt, Artificial Sequence
  Description of Artificial Sequence: Synthetic oligonucleotide
ccccuccaaaacuguggaa

SEQ ID NO: 1462657 - RNA, 19 nt, Artificial Sequence
  Description of Artificial Sequence: Synthetic oligonucleotide
cuccaagcggcugcuuauu

SEQ ID NO: 1462658 - RNA, 19 nt, Artificial Sequence
  Description of Artificial Sequence: Synthetic oligonucleotide
ccagguuacggcggcagau

SEQ ID NO: 1462659 - RNA, 19 nt, Artificial Sequence
  Description of Artificial Sequence: Synthetic oligonucleotide
cgauuacaguaggcuccag

SEQ ID NO: 1462660 - RNA, 19 nt, Artificial Sequence
  Description of Artificial Sequence: Synthetic oligonucleotide
cugggucgaugaucuccuu

SEQ ID NO: 1462661 - RNA, 19 nt, Artificial Sequence
  Description of Artificial Sequence: Synthetic oligonucleotide
ccuccaccaauggucuuau

SEQ ID NO: 1462662 - RNA, 19 nt, Artificial Sequence
  Description of Artificial Sequence: Synthetic oligonucleotide
cgaugccuacuuccucaua

SEQ ID NO: 1462663 - RNA, 19 nt, Artificial Sequence
  Description of Artificial Sequence: Synthetic oligonucleotide
gguccagcacugggucgau

SEQ ID NO: 1462664 - RNA, 19 nt, Artificial Sequence
  Description of Artificial Sequence: Synthetic oligonucleotide
gggccccaucaaagcgcaa

SEQ ID NO: 1462665 - RNA, 19 nt, Artificial Sequence
  Description of Artificial Sequence: Synthetic oligonucleotide
ccggcuccaagcggcugcu

SEQ ID NO: 1462666 - RNA, 19 nt, Artificial Sequence
  Description of Artificial Sequence: Synthetic oligonucleotide
ccccuccaccaauggucuu

SEQ ID NO: 1462667 - RNA, 19 nt, Artificial Sequence
  Description of Artificial Sequence: Synthetic oligonucleotide
cggcuccaagcggcugcuu

SEQ ID NO: 1462668 - RNA, 19 nt, Artificial Sequence
  Description of Artificial Sequence: Synthetic oligonucleotide
uuugacauuauucacaagg

SEQ ID NO: 1462669 - RNA, 19 nt, Artificial Sequence
  Description of Artificial Sequence: Synthetic oligonucleotide
aacguugggaacuuuauac

SEQ ID NO: 1462670 - RNA, 19 nt, Artificial Sequence
  Description of Artificial Sequence: Synthetic oligonucleotide
uuaaauugcagucuuacug

SEQ ID NO: 1462671 - RNA, 19 nt, Artificial Sequence
  Description of Artificial Sequence: Synthetic oligonucleotide
uguaaaucaccuuuugugg

SEQ ID NO: 1462672 - RNA, 19 nt, Artificial Sequence
  Description of Artificial Sequence: Synthetic oligonucleotide
uuuagugaaugauagaugu

SEQ ID NO: 1462673 - RNA, 19 nt, Artificial Sequence
  Description of Artificial Sequence: Synthetic oligonucleotide
uccuauucauaucugagag

SEQ ID NO: 1462674 - RNA, 19 nt, Artificial Sequence
  Description of Artificial Sequence: Synthetic oligonucleotide
aaugauagauguaaaucac

SEQ ID NO: 1462675 - RNA, 19 nt, Artificial Sequence
  Description of Artificial Sequence: Synthetic oligonucleotide
gaaugauagauguaaauca

SEQ ID NO: 1462676 - RNA, 19 nt, Artificial Sequence
  Description of Artificial Sequence: Synthetic oligonucleotide
aauauguggccagugaagg

SEQ ID NO: 1462677 - RNA, 19 nt, Artificial Sequence
  Description of Artificial Sequence: Synthetic oligonucleotide
aaaguucauccuuaaaucu

SEQ ID NO: 1462678 - RNA, 19 nt, Artificial Sequence
  Description of Artificial Sequence: Synthetic oligonucleotide
uuuaaugcagacauacugu

SEQ ID NO: 1462679 - RNA, 19 nt, Artificial Sequence
  Description of Artificial Sequence: Synthetic oligonucleotide
agauacauccaccuucacc

SEQ ID NO: 1462680 - RNA, 19 nt, Artificial Sequence
  Description of Artificial Sequence: Synthetic oligonucleotide
aauaugaagucauguguug

SEQ ID NO: 1462681 - RNA, 19 nt, Artificial Sequence
  Description of Artificial Sequence: Synthetic oligonucleotide
ugauagauguaaaucaccu

SEQ ID NO: 1462682 - RNA, 19 nt, Artificial Sequence
  Description of Artificial Sequence: Synthetic oligonucleotide
uuugagccgacuaaggagc

SEQ ID NO: 1462683 - RNA, 19 nt, Artificial Sequence
  Description of Artificial Sequence: Synthetic oligonucleotide
ucauccuuaaaucuuugug

SEQ ID NO: 1462684 - RNA, 19 nt, Artificial Sequence
  Description of Artificial Sequence: Synthetic oligonucleotide
auaguacagcccuugaagg

SEQ ID NO: 1462685 - RNA, 19 nt, Artificial Sequence
  Description of Artificial Sequence: Synthetic oligonucleotide
aggaguauuggccugauga

SEQ ID NO: 1462686 - RNA, 19 nt, Artificial Sequence
  Description of Artificial Sequence: Synthetic oligonucleotide
uauaccugguuccaacagg

SEQ ID NO: 1462687 - RNA, 19 nt, Artificial Sequence
  Description of Artificial Sequence: Synthetic oligonucleotide
uucuuugacauuauucaca

SEQ ID NO: 1462688 - RNA, 19 nt, Artificial Sequence
  Description of Artificial Sequence: Synthetic oligonucleotide
uuuccauugaugcaccggc

SEQ ID NO: 1462689 - RNA, 19 nt, Artificial Sequence
  Description of Artificial Sequence: Synthetic oligonucleotide
cuuuccauguaguaagggg

SEQ ID NO: 1462690 - RNA, 19 nt, Artificial Sequence
  Description of Artificial Sequence: Synthetic oligonucleotide
uaauauguggccagugaag

SEQ ID NO: 1462691 - RNA, 19 nt, Artificial Sequence
  Description of Artificial Sequence: Synthetic oligonucleotide
ugaauuguugcccucuucu

SEQ ID NO: 1462692 - RNA, 19 nt, Artificial Sequence
  Description of Artificial Sequence: Synthetic oligonucleotide
ugggaaguacaacaaauca

SEQ ID NO: 1462693 - RNA, 19 nt, Artificial Sequence
  Description of Artificial Sequence: Synthetic oligonucleotide
ucgacaucaucauaauggg

SEQ ID NO: 1462694 - RNA, 19 nt, Artificial Sequence
  Description of Artificial Sequence: Synthetic oligonucleotide
ucuuuucccaucaugugug

SEQ ID NO: 1462695 - RNA, 19 nt, Artificial Sequence
  Description of Artificial Sequence: Synthetic oligonucleotide
ucuuuagugaaugauagau

SEQ ID NO: 1462696 - RNA, 19 nt, Artificial Sequence
  Description of Artificial Sequence: Synthetic oligonucleotide
ugaugggugagauuaaacu

SEQ ID NO: 1462697 - RNA, 19 nt, Artificial Sequence
  Description of Artificial Sequence: Synthetic oligonucleotide
ugaaugauagauguaaauc

SEQ ID NO: 1462698 - RNA, 19 nt, Artificial Sequence
  Description of Artificial Sequence: Synthetic oligonucleotide
agaaaauuaacaguucucu

SEQ ID NO: 1462699 - RNA, 19 nt, Artificial Sequence
  Description of Artificial Sequence: Synthetic oligonucleotide
gaaagcgaaguccaugaag

SEQ ID NO: 1462700 - RNA, 19 nt, Artificial Sequence
  Description of Artificial Sequence: Synthetic oligonucleotide
aaauuaacaguucucucua

SEQ ID NO: 1462701 - RNA, 19 nt, Artificial Sequence
  Description of Artificial Sequence: Synthetic oligonucleotide
gagucuugaacagagacug

SEQ ID NO: 1462702 - RNA, 19 nt, Artificial Sequence
  Description of Artificial Sequence: Synthetic oligonucleotide
cuaauggucacaugaguag

SEQ ID NO: 1462703 - RNA, 19 nt, Artificial Sequence
  Description of Artificial Sequence: Synthetic oligonucleotide
caaaguucauccuuaaauc

SEQ ID NO: 1462704 - RNA, 19 nt, Artificial Sequence
  Description of Artificial Sequence: Synthetic oligonucleotide
cuauucauaucugagaguc

SEQ ID NO: 1462705 - RNA, 19 nt, Artificial Sequence
  Description of Artificial Sequence: Synthetic oligonucleotide
acguugggaacuuuauacc

SEQ ID NO: 1462706 - RNA, 19 nt, Artificial Sequence
  Description of Artificial Sequence: Synthetic oligonucleotide
auucuuuagugaaugauag

SEQ ID NO: 1462707 - RNA, 19 nt, Artificial Sequence
  Description of Artificial Sequence: Synthetic oligonucleotide
ucugugggaaguuucaagu

SEQ ID NO: 1462708 - RNA, 19 nt, Artificial Sequence
  Description of Artificial Sequence: Synthetic oligonucleotide
caugaauuguucugguagg

SEQ ID NO: 1462709 - RNA, 19 nt, Artificial Sequence
  Description of Artificial Sequence: Synthetic oligonucleotide
ucuuuuccauaguacagcc

SEQ ID NO: 1462710 - RNA, 19 nt, Artificial Sequence
  Description of Artificial Sequence: Synthetic oligonucleotide
gaaaucuccccaugaauug

SEQ ID NO: 1462711 - RNA, 19 nt, Artificial Sequence
  Description of Artificial Sequence: Synthetic oligonucleotide
ucuuugacauuauucacaa

SEQ ID NO: 1462712 - RNA, 19 nt, Artificial Sequence
  Description of Artificial Sequence: Synthetic oligonucleotide
uauacauuugagccgacua

SEQ ID NO: 1462713 - RNA, 19 nt, Artificial Sequence
  Description of Artificial Sequence: Synthetic oligonucleotide
gagagucuugaacagagac

SEQ ID NO: 1462714 - RNA, 19 nt, Artificial Sequence
  Description of Artificial Sequence: Synthetic oligonucleotide
ugucucagauucuuuagug

SEQ ID NO: 1462715 - RNA, 19 nt, Artificial Sequence
  Description of Artificial Sequence: Synthetic oligonucleotide
gucauguauacauuugagc

SEQ ID NO: 1462716 - RNA, 19 nt, Artificial Sequence
  Description of Artificial Sequence: Synthetic oligonucleotide
gaaggaacuguacuuugcc

SEQ ID NO: 1462717 - RNA, 19 nt, Artificial Sequence
  Description of Artificial Sequence: Synthetic oligonucleotide
uggucuuuaaauugcaguc

SEQ ID NO: 1462718 - RNA, 19 nt, Artificial Sequence
  Description of Artificial Sequence: Synthetic oligonucleotide
aaauugcagucuuacugug

SEQ ID NO: 1462719 - RNA, 19 nt, Artificial Sequence
  Description of Artificial Sequence: Synthetic oligonucleotide
uguuggugugccaauccgg

SEQ ID NO: 1462720 - RNA, 19 nt, Artificial Sequence
  Description of Artificial Sequence: Synthetic oligonucleotide
ugaugaauggucccucuug

SEQ ID NO: 1462721 - RNA, 19 nt, Artificial Sequence
  Description of Artificial Sequence: Synthetic oligonucleotide
gacuacguggaguaaacac

SEQ ID NO: 1462722 - RNA, 19 nt, Artificial Sequence
  Description of Artificial Sequence: Synthetic oligonucleotide
aacagagacugguaauaug

SEQ ID NO: 1462723 - RNA, 19 nt, Artificial Sequence
  Description of Artificial Sequence: Synthetic oligonucleotide
caaugucaaauacaagccc

SEQ ID NO: 1462724 - RNA, 19 nt, Artificial Sequence
  Description of Artificial Sequence: Synthetic oligonucleotide
uuuaaauugcagucuuacu

SEQ ID NO: 1462725 - RNA, 19 nt, Artificial Sequence
  Description of Artificial Sequence: Synthetic oligonucleotide
auccagaugugauaaagga

SEQ ID NO: 1462726 - RNA, 19 nt, Artificial Sequence
  Description of Artificial Sequence: Synthetic oligonucleotide
accacuccagauuugcuuc

SEQ ID NO: 1462727 - RNA, 19 nt, Artificial Sequence
  Description of Artificial Sequence: Synthetic oligonucleotide
uacuuugccgcucuuauuu

SEQ ID NO: 1462728 - RNA, 19 nt, Artificial Sequence
  Description of Artificial Sequence: Synthetic oligonucleotide
gauccuauucauaucugag

SEQ ID NO: 1462729 - RNA, 19 nt, Artificial Sequence
  Description of Artificial Sequence: Synthetic oligonucleotide
ugguuggugaaacugaauu

SEQ ID NO: 1462730 - RNA, 19 nt, Artificial Sequence
  Description of Artificial Sequence: Synthetic oligonucleotide
acuaaggagccaaaguaac

SEQ ID NO: 1462731 - RNA, 19 nt, Artificial Sequence
  Description of Artificial Sequence: Synthetic oligonucleotide
uuuauaccugguuccaaca

SEQ ID NO: 1462732 - RNA, 19 nt, Artificial Sequence
  Description of Artificial Sequence: Synthetic oligonucleotide
gagacugguaauauguggc

SEQ ID NO: 1462733 - RNA, 19 nt, Artificial Sequence
  Description of Artificial Sequence: Synthetic oligonucleotide
uacauuugagccgacuaag

SEQ ID NO: 1462734 - RNA, 19 nt, Artificial Sequence
  Description of Artificial Sequence: Synthetic oligonucleotide
cauccagaugugauaaagg

SEQ ID NO: 1462735 - RNA, 19 nt, Artificial Sequence
  Description of Artificial Sequence: Synthetic oligonucleotide
uuauucacaagggaggaaa

SEQ ID NO: 1462736 - RNA, 19 nt, Artificial Sequence
  Description of Artificial Sequence: Synthetic oligonucleotide
gaaguuucaaguccucgac

SEQ ID NO: 1462737 - RNA, 19 nt, Artificial Sequence
  Description of Artificial Sequence: Synthetic oligonucleotide
ucugguccuacugugauga

SEQ ID NO: 1462738 - RNA, 19 nt, Artificial Sequence
  Description of Artificial Sequence: Synthetic oligonucleotide
acgugcaugaccaucugcc

SEQ ID NO: 1462739 - RNA, 19 nt, Artificial Sequence
  Description of Artificial Sequence: Synthetic oligonucleotide
gaugacaggaguucuuuuc

SEQ ID NO: 1462740 - RNA, 19 nt, Artificial Sequence
  Description of Artificial Sequence: Synthetic oligonucleotide
gagaaggggcuuuuguucc

SEQ ID NO: 1462741 - RNA, 19 nt, Artificial Sequence
  Description of Artificial Sequence: Synthetic oligonucleotide
acuuucuuagugcagcagu

SEQ ID NO: 1462742 - RNA, 19 nt, Artificial Sequence
  Description of Artificial Sequence: Synthetic oligonucleotide
aaucuuuucucagcugaag

SEQ ID NO: 1462743 - RNA, 19 nt, Artificial Sequence
  Description of Artificial Sequence: Synthetic oligonucleotide
uguacuuugccgcucuuau

SEQ ID NO: 1462744 - RNA, 19 nt, Artificial Sequence
  Description of Artificial Sequence: Synthetic oligonucleotide
cacucaacuuucuuagugc

SEQ ID NO: 1462745 - RNA, 19 nt, Artificial Sequence
  Description of Artificial Sequence: Synthetic oligonucleotide
ugaaggcagauccuauuca

SEQ ID NO: 1462746 - RNA, 19 nt, Artificial Sequence
  Description of Artificial Sequence: Synthetic oligonucleotide
cuuagugcagcaguugggg

SEQ ID NO: 1462747 - RNA, 19 nt, Artificial Sequence
  Description of Artificial Sequence: Synthetic oligonucleotide
uguguuggugugccaaucc

SEQ ID NO: 1462748 - RNA, 19 nt, Artificial Sequence
  Description of Artificial Sequence: Synthetic oligonucleotide
uguggucuuuaaauugcag

SEQ ID NO: 1462749 - RNA, 19 nt, Artificial Sequence
  Description of Artificial Sequence: Synthetic oligonucleotide
uuccucugaaugagaaggg

SEQ ID NO: 1462750 - RNA, 19 nt, Artificial Sequence
  Description of Artificial Sequence: Synthetic oligonucleotide
uugggaaguacaacaaauc

SEQ ID NO: 1462751 - RNA, 19 nt, Artificial Sequence
  Description of Artificial Sequence: Synthetic oligonucleotide
guaaacacucuguccagag

SEQ ID NO: 1462752 - RNA, 19 nt, Artificial Sequence
  Description of Artificial Sequence: Synthetic oligonucleotide
aaacugaauuguugcccuc

SEQ ID NO: 1462753 - RNA, 19 nt, Artificial Sequence
  Description of Artificial Sequence: Synthetic oligonucleotide
agauguaaaucaccuuuug

SEQ ID NO: 1462754 - RNA, 19 nt, Artificial Sequence
  Description of Artificial Sequence: Synthetic oligonucleotide
ggaacuuuauaccugguuc

SEQ ID NO: 1462755 - RNA, 19 nt, Artificial Sequence
  Description of Artificial Sequence: Synthetic oligonucleotide
gucacaugaguagaguggg

SEQ ID NO: 1462756 - RNA, 19 nt, Artificial Sequence
  Description of Artificial Sequence: Synthetic oligonucleotide
guauuggccugaugaaugg

SEQ ID NO: 1462757 - RNA, 19 nt, Artificial Sequence
  Description of Artificial Sequence: Synthetic oligonucleotide
uaaugcagacauacuguca

SEQ ID NO: 1462758 - RNA, 19 nt, Artificial Sequence
  Description of Artificial Sequence: Synthetic oligonucleotide
ucacaagggaggaaaugca

SEQ ID NO: 1462759 - RNA, 19 nt, Artificial Sequence
  Description of Artificial Sequence: Synthetic oligonucleotide
uuagaaagccacucaacuu

SEQ ID NO: 1462760 - RNA, 19 nt, Artificial Sequence
  Description of Artificial Sequence: Synthetic oligonucleotide
aucuugaugggugagauua

SEQ ID NO: 1462761 - RNA, 19 nt, Artificial Sequence
  Description of Artificial Sequence: Synthetic oligonucleotide
ggcugucaaaauuuaaugc

SEQ ID NO: 1462762 - RNA, 19 nt, Artificial Sequence
  Description of Artificial Sequence: Synthetic oligonucleotide
agauccuauucauaucuga

SEQ ID NO: 1462763 - RNA, 19 nt, Artificial Sequence
  Description of Artificial Sequence: Synthetic oligonucleotide
uaguacagcccuugaaggc

SEQ ID NO: 1462764 - RNA, 19 nt, Artificial Sequence
  Description of Artificial Sequence: Synthetic oligonucleotide
caguucucucuacagaggc

SEQ ID NO: 1462765 - RNA, 19 nt, Artificial Sequence
  Description of Artificial Sequence: Synthetic oligonucleotide
gagucauguauacauuuga

SEQ ID NO: 1462766 - RNA, 19 nt, Artificial Sequence
  Description of Artificial Sequence: Synthetic oligonucleotide
aguauuggccugaugaaug

SEQ ID NO: 1462767 - RNA, 19 nt, Artificial Sequence
  Description of Artificial Sequence: Synthetic oligonucleotide
ugcuaauggucacaugagu

SEQ ID NO: 1462768 - RNA, 19 nt, Artificial Sequence
  Description of Artificial Sequence: Synthetic oligonucleotide
auccuauucauaucugaga

SEQ ID NO: 1462769 - RNA, 19 nt, Artificial Sequence
  Description of Artificial Sequence: Synthetic oligonucleotide
aggagccaaaguaacauuc

SEQ ID NO: 1462770 - RNA, 19 nt, Artificial Sequence
  Description of Artificial Sequence: Synthetic oligonucleotide
guaaaucaccuuuugugga

SEQ ID NO: 1462771 - RNA, 19 nt, Artificial Sequence
  Description of Artificial Sequence: Synthetic oligonucleotide
uugaugggugagauuaaac

SEQ ID NO: 1462772 - RNA, 19 nt, Artificial Sequence
  Description of Artificial Sequence: Synthetic oligonucleotide
cuacguggaguaaacacuc

SEQ ID NO: 1462773 - RNA, 19 nt, Artificial Sequence
  Description of Artificial Sequence: Synthetic oligonucleotide
ucauaucugagagucuuga

SEQ ID NO: 1462774 - RNA, 19 nt, Artificial Sequence
  Description of Artificial Sequence: Synthetic oligonucleotide
cacacuguacucacgugcc

SEQ ID NO: 1462775 - RNA, 19 nt, Artificial Sequence
  Description of Artificial Sequence: Synthetic oligonucleotide
uagacuacguggaguaaac

SEQ ID NO: 1462776 - RNA, 19 nt, Artificial Sequence
  Description of Artificial Sequence: Synthetic oligonucleotide
acucaacuuucuuagugca

SEQ ID NO: 1462777 - RNA, 19 nt, Artificial Sequence
  Description of Artificial Sequence: Synthetic oligonucleotide
gaauuguugcccucuucug

SEQ ID NO: 1462778 - RNA, 19 nt, Artificial Sequence
  Description of Artificial Sequence: Synthetic oligonucleotide
aaaccuucuucuuuccauu

SEQ ID NO: 1462779 - RNA, 19 nt, Artificial Sequence
  Description of Artificial Sequence: Synthetic oligonucleotide
uccccaugaauuguucugg

SEQ ID NO: 1462780 - RNA, 19 nt, Artificial Sequence
  Description of Artificial Sequence: Synthetic oligonucleotide
uacagaggcauuagacuac

SEQ ID NO: 1462781 - RNA, 19 nt, Artificial Sequence
  Description of Artificial Sequence: Synthetic oligonucleotide
ccaugaauuguucugguag

SEQ ID NO: 1462782 - RNA, 19 nt, Artificial Sequence
  Description of Artificial Sequence: Synthetic oligonucleotide
aaccucgacaucaucauaa

SEQ ID NO: 1462783 - RNA, 19 nt, Artificial Sequence
  Description of Artificial Sequence: Synthetic oligonucleotide
aacuguacuuugccgcucu

SEQ ID NO: 1462784 - RNA, 19 nt, Artificial Sequence
  Description of Artificial Sequence: Synthetic oligonucleotide
auacauuugagccgacuaa

SEQ ID NO: 1462785 - RNA, 19 nt, Artificial Sequence
  Description of Artificial Sequence: Synthetic oligonucleotide
uccucugaaugagaagggg

SEQ ID NO: 1462786 - RNA, 19 nt, Artificial Sequence
  Description of Artificial Sequence: Synthetic oligonucleotide
ucuugggaaguacaacaaa

SEQ ID NO: 1462787 - RNA, 19 nt, Artificial Sequence
  Description of Artificial Sequence: Synthetic oligonucleotide
aggcagauccuauucauau

SEQ ID NO: 1462788 - RNA, 19 nt, Artificial Sequence
  Description of Artificial Sequence: Synthetic oligonucleotide
gccgcucuuauuuaaaacc

SEQ ID NO: 1462789 - RNA, 19 nt, Artificial Sequence
  Description of Artificial Sequence: Synthetic oligonucleotide
uuuguucccagaauuccuu

SEQ ID NO: 1462790 - RNA, 19 nt, Artificial Sequence
  Description of Artificial Sequence: Synthetic oligonucleotide
agucauguauacauuugag

SEQ ID NO: 1462791 - RNA, 19 nt, Artificial Sequence
  Description of Artificial Sequence: Synthetic oligonucleotide
guaauauguggccagugaa

SEQ ID NO: 1462792 - RNA, 19 nt, Artificial Sequence
  Description of Artificial Sequence: Synthetic oligonucleotide
acacucuguccagagagac

SEQ ID NO: 1462793 - RNA, 19 nt, Artificial Sequence
  Description of Artificial Sequence: Synthetic oligonucleotide
ugaacagagacugguaaua

SEQ ID NO: 1462794 - RNA, 19 nt, Artificial Sequence
  Description of Artificial Sequence: Synthetic oligonucleotide
acucacgugccagugguac

SEQ ID NO: 1462795 - RNA, 19 nt, Artificial Sequence
  Description of Artificial Sequence: Synthetic oligonucleotide
uucuuuagugaaugauaga

SEQ ID NO: 1462796 - RNA, 19 nt, Artificial Sequence
  Description of Artificial Sequence: Synthetic oligonucleotide
aaaucuccccaugaauugu

SEQ ID NO: 1462797 - RNA, 19 nt, Artificial Sequence
  Description of Artificial Sequence: Synthetic oligonucleotide
caaggguccuuagaaagcc

SEQ ID NO: 1462798 - RNA, 19 nt, Artificial Sequence
  Description of Artificial Sequence: Synthetic oligonucleotide
uuagacuacguggaguaaa

SEQ ID NO: 1462799 - RNA, 19 nt, Artificial Sequence
  Description of Artificial Sequence: Synthetic oligonucleotide
aacuuuauaccugguucca

SEQ ID NO: 1462800 - RNA, 19 nt, Artificial Sequence
  Description of Artificial Sequence: Synthetic oligonucleotide
aacuuucuuagugcagcag

SEQ ID NO: 1462801 - RNA, 19 nt, Artificial Sequence
  Description of Artificial Sequence: Synthetic oligonucleotide
aggucuauuccacuuucca

SEQ ID NO: 1462802 - RNA, 19 nt, Artificial Sequence
  Description of Artificial Sequence: Synthetic oligonucleotide
acuacguggaguaaacacu

SEQ ID NO: 1462803 - RNA, 19 nt, Artificial Sequence
  Description of Artificial Sequence: Synthetic oligonucleotide
aacugaauuguugcccucu

SEQ ID NO: 1462804 - RNA, 19 nt, Artificial Sequence
  Description of Artificial Sequence: Synthetic oligonucleotide
guguuggugugccaauccg

SEQ ID NO: 1462805 - RNA, 19 nt, Artificial Sequence
  Description of Artificial Sequence: Synthetic oligonucleotide
ucucuacagaggcauuaga

SEQ ID NO: 1462806 - RNA, 19 nt, Artificial Sequence
  Description of Artificial Sequence: Synthetic oligonucleotide
uuucuuagugcagcaguug

SEQ ID NO: 1462807 - RNA, 19 nt, Artificial Sequence
  Description of Artificial Sequence: Synthetic oligonucleotide
uuagugaaugauagaugua

SEQ ID NO: 1462808 - RNA, 19 nt, Artificial Sequence
  Description of Artificial Sequence: Synthetic oligonucleotide
aacaggucuauuccacuuu

SEQ ID NO: 1462809 - RNA, 19 nt, Artificial Sequence
  Description of Artificial Sequence: Synthetic oligonucleotide
auuggccugaugaaugguc

SEQ ID NO: 1462810 - RNA, 19 nt, Artificial Sequence
  Description of Artificial Sequence: Synthetic oligonucleotide
ugggugagauuaaacuuuc

SEQ ID NO: 1462811 - RNA, 19 nt, Artificial Sequence
  Description of Artificial Sequence: Synthetic oligonucleotide
cuuagaaagccacucaacu

SEQ ID NO: 1462812 - RNA, 19 nt, Artificial Sequence
  Description of Artificial Sequence: Synthetic oligonucleotide
ugugcaugacaaaauccuu

SEQ ID NO: 1462813 - RNA, 19 nt, Artificial Sequence
  Description of Artificial Sequence: Synthetic oligonucleotide
augucaaauacaagcccgg

SEQ ID NO: 1462814 - RNA, 19 nt, Artificial Sequence
  Description of Artificial Sequence: Synthetic oligonucleotide
ucuuugugguuggugaaac

SEQ ID NO: 1462815 - RNA, 19 nt, Artificial Sequence
  Description of Artificial Sequence: Synthetic oligonucleotide
acguggaguaaacacucug

SEQ ID NO: 1462816 - RNA, 19 nt, Artificial Sequence
  Description of Artificial Sequence: Synthetic oligonucleotide
gaugcaccggcagacauuc

SEQ ID NO: 1462817 - RNA, 19 nt, Artificial Sequence
  Description of Artificial Sequence: Synthetic oligonucleotide
acauuugagccgacuaagg

SEQ ID NO: 1462818 - RNA, 19 nt, Artificial Sequence
  Description of Artificial Sequence: Synthetic oligonucleotide
uuugccgcucuuauuuaaa

SEQ ID NO: 1462819 - RNA, 19 nt, Artificial Sequence
  Description of Artificial Sequence: Synthetic oligonucleotide
guacaacaaaucaccaggc

SEQ ID NO: 1462820 - RNA, 19 nt, Artificial Sequence
  Description of Artificial Sequence: Synthetic oligonucleotide
cauuagacuacguggagua

SEQ ID NO: 1462821 - RNA, 19 nt, Artificial Sequence
  Description of Artificial Sequence: Synthetic oligonucleotide
agaggcgccaauguuucuc

SEQ ID NO: 1462822 - RNA, 19 nt, Artificial Sequence
  Description of Artificial Sequence: Synthetic oligonucleotide
uuacugugcuguccaacgu

SEQ ID NO: 1462823 - RNA, 19 nt, Artificial Sequence
  Description of Artificial Sequence: Synthetic oligonucleotide
uccaacguugggaacuuua

SEQ ID NO: 1462824 - RNA, 19 nt, Artificial Sequence
  Description of Artificial Sequence: Synthetic oligonucleotide
gaugggugagauuaaacuu

SEQ ID NO: 1462825 - RNA, 19 nt, Artificial Sequence
  Description of Artificial Sequence: Synthetic oligonucleotide
cugguaggugcuaaugguc

SEQ ID NO: 1462826 - RNA, 19 nt, Artificial Sequence
  Description of Artificial Sequence: Synthetic oligonucleotide
cauugaugcaccggcagac

SEQ ID NO: 1462827 - RNA, 19 nt, Artificial Sequence
  Description of Artificial Sequence: Synthetic oligonucleotide
ugagagucuugaacagaga

SEQ ID NO: 1462828 - RNA, 19 nt, Artificial Sequence
  Description of Artificial Sequence: Synthetic oligonucleotide
cuccccaugaauuguucug

SEQ ID NO: 1462829 - RNA, 19 nt, Artificial Sequence
  Description of Artificial Sequence: Synthetic oligonucleotide
uccauaguacagcccuuga

SEQ ID NO: 1462830 - RNA, 19 nt, Artificial Sequence
  Description of Artificial Sequence: Synthetic oligonucleotide
ugccgcucuuauuuaaaac

SEQ ID NO: 1462831 - RNA, 19 nt, Artificial Sequence
  Description of Artificial Sequence: Synthetic oligonucleotide
cauuugagccgacuaagga

SEQ ID NO: 1462832 - RNA, 19 nt, Artificial Sequence
  Description of Artificial Sequence: Synthetic oligonucleotide
cugagaucccgcuggaguc

SEQ ID NO: 1462833 - RNA, 19 nt, Artificial Sequence
  Description of Artificial Sequence: Synthetic oligonucleotide
gacuaaggagccaaaguaa

SEQ ID NO: 1462834 - RNA, 19 nt, Artificial Sequence
  Description of Artificial Sequence: Synthetic oligonucleotide
augugauaaaggaaagcga

SEQ ID NO: 1462835 - RNA, 19 nt, Artificial Sequence
  Description of Artificial Sequence: Synthetic oligonucleotide
uugaugcaccggcagacau

SEQ ID NO: 1462836 - RNA, 19 nt, Artificial Sequence
  Description of Artificial Sequence: Synthetic oligonucleotide
ucuccccaugaauuguucu

SEQ ID NO: 1462837 - RNA, 19 nt, Artificial Sequence
  Description of Artificial Sequence: Synthetic oligonucleotide
uuagugcagcaguuggggu

SEQ ID NO: 1462838 - RNA, 19 nt, Artificial Sequence
  Description of Artificial Sequence: Synthetic oligonucleotide
ggugagauuaaacuuucaa

SEQ ID NO: 1462839 - RNA, 19 nt, Artificial Sequence
  Description of Artificial Sequence: Synthetic oligonucleotide
cagagacugguaauaugug

SEQ ID NO: 1462840 - RNA, 19 nt, Artificial Sequence
  Description of Artificial Sequence: Synthetic oligonucleotide
cuaaggagccaaaguaaca

SEQ ID NO: 1462841 - RNA, 19 nt, Artificial Sequence
  Description of Artificial Sequence: Synthetic oligonucleotide
agagcauccagaugugaua

SEQ ID NO: 1462842 - RNA, 19 nt, Artificial Sequence
  Description of Artificial Sequence: Synthetic oligonucleotide
ugaaggaguauuggccuga

SEQ ID NO: 1462843 - RNA, 19 nt, Artificial Sequence
  Description of Artificial Sequence: Synthetic oligonucleotide
agagucuugaacagagacu

SEQ ID NO: 1462844 - RNA, 19 nt, Artificial Sequence
  Description of Artificial Sequence: Synthetic oligonucleotide
uuggugaaacugaauuguu

SEQ ID NO: 1462845 - RNA, 19 nt, Artificial Sequence
  Description of Artificial Sequence: Synthetic oligonucleotide
cuggaucuuccaaaguuca

SEQ ID NO: 1462846 - RNA, 19 nt, Artificial Sequence
  Description of Artificial Sequence: Synthetic oligonucleotide
ugcagacauacugucagau

SEQ ID NO: 1462847 - RNA, 19 nt, Artificial Sequence
  Description of Artificial Sequence: Synthetic oligonucleotide
ucccgcuggagucauguau

SEQ ID NO: 1462848 - RNA, 19 nt, Artificial Sequence
  Description of Artificial Sequence: Synthetic oligonucleotide
gguaauauguggccaguga

SEQ ID NO: 1462849 - RNA, 19 nt, Artificial Sequence
  Description of Artificial Sequence: Synthetic oligonucleotide
auaccugguuccaacaggu

SEQ ID NO: 1462850 - RNA, 19 nt, Artificial Sequence
  Description of Artificial Sequence: Synthetic oligonucleotide
cugugcaugacaaaauccu

SEQ ID NO: 1462851 - RNA, 19 nt, Artificial Sequence
  Description of Artificial Sequence: Synthetic oligonucleotide
ugacaguguggucuuuaaa

SEQ ID NO: 1462852 - RNA, 19 nt, Artificial Sequence
  Description of Artificial Sequence: Synthetic oligonucleotide
ggaaguuucaaguccucga

SEQ ID NO: 1462853 - RNA, 19 nt, Artificial Sequence
  Description of Artificial Sequence: Synthetic oligonucleotide
gggaaguacaacaaaucac

SEQ ID NO: 1462854 - RNA, 19 nt, Artificial Sequence
  Description of Artificial Sequence: Synthetic oligonucleotide
ccagagagacaauaccagg

SEQ ID NO: 1462855 - RNA, 19 nt, Artificial Sequence
  Description of Artificial Sequence: Synthetic oligonucleotide
uacugugcuguccaacguu

SEQ ID NO: 1462856 - RNA, 19 nt, Artificial Sequence
  Description of Artificial Sequence: Synthetic oligonucleotide
aaaccucgacaucaucaua

SEQ ID NO: 1462857 - RNA, 19 nt, Artificial Sequence
  Description of Artificial Sequence: Synthetic oligonucleotide
aucaugugugucugucuca

SEQ ID NO: 1462858 - RNA, 19 nt, Artificial Sequence
  Description of Artificial Sequence: Synthetic oligonucleotide
cauuauucacaagggagga

SEQ ID NO: 1462859 - RNA, 19 nt, Artificial Sequence
  Description of Artificial Sequence: Synthetic oligonucleotide
ucuugaugggugagauuaa

SEQ ID NO: 1462860 - RNA, 19 nt, Artificial Sequence
  Description of Artificial Sequence: Synthetic oligonucleotide
cuuugacauuauucacaag

SEQ ID NO: 1462861 - RNA, 19 nt, Artificial Sequence
  Description of Artificial Sequence: Synthetic oligonucleotide
augggugagauuaaacuuu

SEQ ID NO: 1462862 - RNA, 19 nt, Artificial Sequence
  Description of Artificial Sequence: Synthetic oligonucleotide
acuguacucacgugccagu

SEQ ID NO: 1462863 - RNA, 19 nt, Artificial Sequence
  Description of Artificial Sequence: Synthetic oligonucleotide
caggucuauuccacuuucc

SEQ ID NO: 1462864 - RNA, 19 nt, Artificial Sequence
  Description of Artificial Sequence: Synthetic oligonucleotide
gugcuaauggucacaugag

SEQ ID NO: 1462865 - RNA, 19 nt, Artificial Sequence
  Description of Artificial Sequence: Synthetic oligonucleotide
caauccgggccucaggcuc

SEQ ID NO: 1462866 - RNA, 19 nt, Artificial Sequence
  Description of Artificial Sequence: Synthetic oligonucleotide
augaauuguucugguaggu

SEQ ID NO: 1462867 - RNA, 19 nt, Artificial Sequence
  Description of Artificial Sequence: Synthetic oligonucleotide
aggcauuagacuacgugga

SEQ ID NO: 1462868 - RNA, 19 nt, Artificial Sequence
  Description of Artificial Sequence: Synthetic oligonucleotide
cagauccuauucauaucug

SEQ ID NO: 1462869 - RNA, 19 nt, Artificial Sequence
  Description of Artificial Sequence: Synthetic oligonucleotide
uacguggaguaaacacucu

SEQ ID NO: 1462870 - RNA, 19 nt, Artificial Sequence
  Description of Artificial Sequence: Synthetic oligonucleotide
ucccucuugggaaguacaa

SEQ ID NO: 1462871 - RNA, 19 nt, Artificial Sequence
  Description of Artificial Sequence: Synthetic oligonucleotide
gauuugcuucagagcaucc

SEQ ID NO: 1462872 - RNA, 19 nt, Artificial Sequence
  Description of Artificial Sequence: Synthetic oligonucleotide
uuggugugccaauccgggc

SEQ ID NO: 1462873 - RNA, 19 nt, Artificial Sequence
  Description of Artificial Sequence: Synthetic oligonucleotide
agacaauaccagguuccuc

SEQ ID NO: 1462874 - RNA, 19 nt, Artificial Sequence
  Description of Artificial Sequence: Synthetic oligonucleotide
cugugcuguccaacguugg

SEQ ID NO: 1462875 - RNA, 19 nt, Artificial Sequence
  Description of Artificial Sequence: Synthetic oligonucleotide
acugugcuguccaacguug

SEQ ID NO: 1462876 - RNA, 19 nt, Artificial Sequence
  Description of Artificial Sequence: Synthetic oligonucleotide
uuccuguaggcucuucguu

SEQ ID NO: 1462877 - RNA, 19 nt, Artificial Sequence
  Description of Artificial Sequence: Synthetic oligonucleotide
cacuguacucacgugccag

SEQ ID NO: 1462878 - RNA, 19 nt, Artificial Sequence
  Description of Artificial Sequence: Synthetic oligonucleotide
gagcauccagaugugauaa

SEQ ID NO: 1462879 - RNA, 19 nt, Artificial Sequence
  Description of Artificial Sequence: Synthetic oligonucleotide
gugaaugauagauguaaau

SEQ ID NO: 1462880 - RNA, 19 nt, Artificial Sequence
  Description of Artificial Sequence: Synthetic oligonucleotide
gacaggaguucuuuucugu

SEQ ID NO: 1462881 - RNA, 19 nt, Artificial Sequence
  Description of Artificial Sequence: Synthetic oligonucleotide
cucuuauuuaaaaccuucu

SEQ ID NO: 1462882 - RNA, 19 nt, Artificial Sequence
  Description of Artificial Sequence: Synthetic oligonucleotide
ggcccugagaucccgcugg

SEQ ID NO: 1462883 - RNA, 19 nt, Artificial Sequence
  Description of Artificial Sequence: Synthetic oligonucleotide
gcagauccuauucauaucu

SEQ ID NO: 1462884 - RNA, 19 nt, Artificial Sequence
  Description of Artificial Sequence: Synthetic oligonucleotide
ugagaucccgcuggaguca

SEQ ID NO: 1462885 - RNA, 19 nt, Artificial Sequence
  Description of Artificial Sequence: Synthetic oligonucleotide
aucugguccuacugugaug

SEQ ID NO: 1462886 - RNA, 19 nt, Artificial Sequence
  Description of Artificial Sequence: Synthetic oligonucleotide
guagaggcgccaauguuuc

SEQ ID NO: 1462887 - RNA, 19 nt, Artificial Sequence
  Description of Artificial Sequence: Synthetic oligonucleotide
cagucuuacugugcugucc

SEQ ID NO: 1462888 - RNA, 19 nt, Artificial Sequence
  Description of Artificial Sequence: Synthetic oligonucleotide
uguucugguaggugcuaau

SEQ ID NO: 1462889 - RNA, 19 nt, Artificial Sequence
  Description of Artificial Sequence: Synthetic oligonucleotide
ggcauuagacuacguggag

SEQ ID NO: 1462890 - RNA, 19 nt, Artificial Sequence
  Description of Artificial Sequence: Synthetic oligonucleotide
ggagccaaaguaacauucc

SEQ ID NO: 1462891 - RNA, 19 nt, Artificial Sequence
  Description of Artificial Sequence: Synthetic oligonucleotide
ggagucauguauacauuug

SEQ ID NO: 1462892 - RNA, 19 nt, Artificial Sequence
  Description of Artificial Sequence: Synthetic oligonucleotide
agucucuaucuugaugggu

SEQ ID NO: 1462893 - RNA, 19 nt, Artificial Sequence
  Description of Artificial Sequence: Synthetic oligonucleotide
uaggugcuaauggucacau

SEQ ID NO: 1462894 - RNA, 19 nt, Artificial Sequence
  Description of Artificial Sequence: Synthetic oligonucleotide
cuucaauaugaagucaugu

SEQ ID NO: 1462895 - RNA, 19 nt, Artificial Sequence
  Description of Artificial Sequence: Synthetic oligonucleotide
cagcaguugggguuuccac

SEQ ID NO: 1462896 - RNA, 19 nt, Artificial Sequence
  Description of Artificial Sequence: Synthetic oligonucleotide
agacauacugucagauaca

SEQ ID NO: 1462897 - RNA, 19 nt, Artificial Sequence
  Description of Artificial Sequence: Synthetic oligonucleotide
agacugauucucaucuggu

SEQ ID NO: 1462898 - RNA, 19 nt, Artificial Sequence
  Description of Artificial Sequence: Synthetic oligonucleotide
ugaugcaccggcagacauu

SEQ ID NO: 1462899 - RNA, 19 nt, Artificial Sequence
  Description of Artificial Sequence: Synthetic oligonucleotide
uugcagucuuacugugcug

SEQ ID NO: 1462900 - RNA, 19 nt, Artificial Sequence
  Description of Artificial Sequence: Synthetic oligonucleotide
ugggaaguuucaaguccuc

SEQ ID NO: 1462901 - RNA, 19 nt, Artificial Sequence
  Description of Artificial Sequence: Synthetic oligonucleotide
gguuuccacgugcaugacc

SEQ ID NO: 1462902 - RNA, 19 nt, Artificial Sequence
  Description of Artificial Sequence: Synthetic oligonucleotide
cacaagggaggaaaugcaa

SEQ ID NO: 1462903 - RNA, 19 nt, Artificial Sequence
  Description of Artificial Sequence: Synthetic oligonucleotide
auuauucacaagggaggaa

SEQ ID NO: 1462904 - RNA, 19 nt, Artificial Sequence
  Description of Artificial Sequence: Synthetic oligonucleotide
agucuugaacagagacugg

SEQ ID NO: 1462905 - RNA, 19 nt, Artificial Sequence
  Description of Artificial Sequence: Synthetic oligonucleotide
ccuuugcaaugucaaauac

SEQ ID NO: 1462906 - RNA, 19 nt, Artificial Sequence
  Description of Artificial Sequence: Synthetic oligonucleotide
ggcgccaauguuucucucc

SEQ ID NO: 1462907 - RNA, 19 nt, Artificial Sequence
  Description of Artificial Sequence: Synthetic oligonucleotide
acugaauuguugcccucuu

SEQ ID NO: 1462908 - RNA, 19 nt, Artificial Sequence
  Description of Artificial Sequence: Synthetic oligonucleotide
auacaagcccggaaaggga

SEQ ID NO: 1462909 - RNA, 19 nt, Artificial Sequence
  Description of Artificial Sequence: Synthetic oligonucleotide
ugguuugcaaggguccuua

SEQ ID NO: 1462910 - RNA, 19 nt, Artificial Sequence
  Description of Artificial Sequence: Synthetic oligonucleotide
acacuguacucacgugcca

SEQ ID NO: 1462911 - RNA, 19 nt, Artificial Sequence
  Description of Artificial Sequence: Synthetic oligonucleotide
guacucacgugccaguggu

SEQ ID NO: 1462912 - RNA, 19 nt, Artificial Sequence
  Description of Artificial Sequence: Synthetic oligonucleotide
accucgacaucaucauaau

SEQ ID NO: 1462913 - RNA, 19 nt, Artificial Sequence
  Description of Artificial Sequence: Synthetic oligonucleotide
gauucucaucugguccuac

SEQ ID NO: 1462914 - RNA, 19 nt, Artificial Sequence
  Description of Artificial Sequence: Synthetic oligonucleotide
aaggguccuuagaaagcca

SEQ ID NO: 1462915 - RNA, 19 nt, Artificial Sequence
  Description of Artificial Sequence: Synthetic oligonucleotide
ggaguauuggccugaugaa

SEQ ID NO: 1462916 - RNA, 19 nt, Artificial Sequence
  Description of Artificial Sequence: Synthetic oligonucleotide
acuuugccgcucuuauuua

SEQ ID NO: 1462917 - RNA, 19 nt, Artificial Sequence
  Description of Artificial Sequence: Synthetic oligonucleotide
gcgccaauguuucucuccc

SEQ ID NO: 1462918 - RNA, 19 nt, Artificial Sequence
  Description of Artificial Sequence: Synthetic oligonucleotide
cuuugccgcucuuauuuaa

SEQ ID NO: 1462919 - RNA, 19 nt, Artificial Sequence
  Description of Artificial Sequence: Synthetic oligonucleotide
acuuuauaccugguuccaa

SEQ ID NO: 1462920 - RNA, 19 nt, Artificial Sequence
  Description of Artificial Sequence: Synthetic oligonucleotide
gcuaauggucacaugagua

SEQ ID NO: 1462921 - RNA, 19 nt, Artificial Sequence
  Description of Artificial Sequence: Synthetic oligonucleotide
uaccugguuccaacagguc

SEQ ID NO: 1462922 - RNA, 19 nt, Artificial Sequence
  Description of Artificial Sequence: Synthetic oligonucleotide
cuguacucacgugccagug

SEQ ID NO: 1462923 - RNA, 19 nt, Artificial Sequence
  Description of Artificial Sequence: Synthetic oligonucleotide
agacuacguggaguaaaca

SEQ ID NO: 1462924 - RNA, 19 nt, Artificial Sequence
  Description of Artificial Sequence: Synthetic oligonucleotide
guaggugcuaauggucaca

SEQ ID NO: 1462925 - RNA, 19 nt, Artificial Sequence
  Description of Artificial Sequence: Synthetic oligonucleotide
gggaguagaggcgccaaug

SEQ ID NO: 1462926 - RNA, 19 nt, Artificial Sequence
  Description of Artificial Sequence: Synthetic oligonucleotide
auuagacuacguggaguaa

SEQ ID NO: 1462927 - RNA, 19 nt, Artificial Sequence
  Description of Artificial Sequence: Synthetic oligonucleotide
aggggcuuuuguucccaga

SEQ ID NO: 1462928 - RNA, 19 nt, Artificial Sequence
  Description of Artificial Sequence: Synthetic oligonucleotide
cuugaugggugagauuaaa

SEQ ID NO: 1462929 - RNA, 19 nt, Artificial Sequence
  Description of Artificial Sequence: Synthetic oligonucleotide
ugagccgacuaaggagcca

SEQ ID NO: 1462930 - RNA, 19 nt, Artificial Sequence
  Description of Artificial Sequence: Synthetic oligonucleotide
gagccgacuaaggagccaa

SEQ ID NO: 1462931 - RNA, 19 nt, Artificial Sequence
  Description of Artificial Sequence: Synthetic oligonucleotide
caagcccggaaagggaauc

SEQ ID NO: 1462932 - RNA, 19 nt, Artificial Sequence
  Description of Artificial Sequence: Synthetic oligonucleotide
cuuucuuagugcagcaguu

SEQ ID NO: 1462933 - RNA, 19 nt, Artificial Sequence
  Description of Artificial Sequence: Synthetic oligonucleotide
gaguauuggccugaugaau

SEQ ID NO: 1462934 - RNA, 19 nt, Artificial Sequence
  Description of Artificial Sequence: Synthetic oligonucleotide
ggcagauccuauucauauc

SEQ ID NO: 1462935 - RNA, 19 nt, Artificial Sequence
  Description of Artificial Sequence: Synthetic oligonucleotide
agcauccagaugugauaaa

SEQ ID NO: 1462936 - RNA, 19 nt, Artificial Sequence
  Description of Artificial Sequence: Synthetic oligonucleotide
guguggucuuuaaauugca

SEQ ID NO: 1462937 - RNA, 19 nt, Artificial Sequence
  Description of Artificial Sequence: Synthetic oligonucleotide
ugauucucaucugguccua

SEQ ID NO: 1462938 - RNA, 19 nt, Artificial Sequence
  Description of Artificial Sequence: Synthetic oligonucleotide
caacguugggaacuuuaua

SEQ ID NO: 1462939 - RNA, 19 nt, Artificial Sequence
  Description of Artificial Sequence: Synthetic oligonucleotide
guuggggaguagaggcgcc

SEQ ID NO: 1462940 - RNA, 19 nt, Artificial Sequence
  Description of Artificial Sequence: Synthetic oligonucleotide
uagaggcgccaauguuucu

SEQ ID NO: 1462941 - RNA, 19 nt, Artificial Sequence
  Description of Artificial Sequence: Synthetic oligonucleotide
ggaacuguacuuugccgcu

SEQ ID NO: 1462942 - RNA, 19 nt, Artificial Sequence
  Description of Artificial Sequence: Synthetic oligonucleotide
cagagcauccagaugugau

SEQ ID NO: 1462943 - RNA, 19 nt, Artificial Sequence
  Description of Artificial Sequence: Synthetic oligonucleotide
ggcuuuuguucccagaauu

SEQ ID NO: 1462944 - RNA, 19 nt, Artificial Sequence
  Description of Artificial Sequence: Synthetic oligonucleotide
gugggaaguuucaaguccu

SEQ ID NO: 1462945 - RNA, 19 nt, Artificial Sequence
  Description of Artificial Sequence: Synthetic oligonucleotide
uacucacgugccaguggua

SEQ ID NO: 1462946 - RNA, 19 nt, Artificial Sequence
  Description of Artificial Sequence: Synthetic oligonucleotide
ccucgacaucaucauaaug

SEQ ID NO: 1462947 - RNA, 19 nt, Artificial Sequence
  Description of Artificial Sequence: Synthetic oligonucleotide
agcccggaaagggaaucca

SEQ ID NO: 1462948 - RNA, 19 nt, Artificial Sequence
  Description of Artificial Sequence: Synthetic oligonucleotide
ggaguagaggcgccaaugu

SEQ ID NO: 1462949 - RNA, 19 nt, Artificial Sequence
  Description of Artificial Sequence: Synthetic oligonucleotide
gaguagaggcgccaauguu

SEQ ID NO: 1462950 - RNA, 19 nt, Artificial Sequence
  Description of Artificial Sequence: Synthetic oligonucleotide
cuguccaacguugggaacu

SEQ ID NO: 1462951 - RNA, 19 nt, Artificial Sequence
  Description of Artificial Sequence: Synthetic oligonucleotide
cucacgugccagugguaca

SEQ ID NO: 1462952 - RNA, 19 nt, Artificial Sequence
  Description of Artificial Sequence: Synthetic oligonucleotide
uggggaguagaggcgccaa

SEQ ID NO: 1462953 - RNA, 19 nt, Artificial Sequence
  Description of Artificial Sequence: Synthetic oligonucleotide
gccgacuaaggagccaaag

SEQ ID NO: 1462954 - RNA, 19 nt, Artificial Sequence
  Description of Artificial Sequence: Synthetic oligonucleotide
gucccucuugggaaguaca

SEQ ID NO: 1462955 - RNA, 19 nt, Artificial Sequence
  Description of Artificial Sequence: Synthetic oligonucleotide
ggucuauuccacuuuccau

SEQ ID NO: 1462956 - RNA, 19 nt, Artificial Sequence
  Description of Artificial Sequence: Synthetic oligonucleotide
cgacuaaggagccaaagua

SEQ ID NO: 1462957 - RNA, 19 nt, Artificial Sequence
  Description of Artificial Sequence: Synthetic oligonucleotide
caguugggguuuccacgug

SEQ ID NO: 1462958 - RNA, 19 nt, Artificial Sequence
  Description of Artificial Sequence: Synthetic oligonucleotide
guugcccucuucugaucaa

SEQ ID NO: 1462959 - RNA, 19 nt, Artificial Sequence
  Description of Artificial Sequence: Synthetic oligonucleotide
gaaagccacucaacuuucu

SEQ ID NO: 1462960 - RNA, 19 nt, Artificial Sequence
  Description of Artificial Sequence: Synthetic oligonucleotide
guccucgacaggcacugcu

SEQ ID NO: 1462961 - RNA, 19 nt, Artificial Sequence
  Description of Artificial Sequence: Synthetic oligonucleotide
gcagacauacugucagaua

SEQ ID NO: 1462962 - RNA, 19 nt, Artificial Sequence
  Description of Artificial Sequence: Synthetic oligonucleotide
ccugguuccaacaggucua

SEQ ID NO: 1462963 - RNA, 19 nt, Artificial Sequence
  Description of Artificial Sequence: Synthetic oligonucleotide
acaagcccggaaagggaau

SEQ ID NO: 1462964 - RNA, 19 nt, Artificial Sequence
  Description of Artificial Sequence: Synthetic oligonucleotide
gcuguccaacguugggaac

SEQ ID NO: 1462965 - RNA, 19 nt, Artificial Sequence
  Description of Artificial Sequence: Synthetic oligonucleotide
cugcugaaccacuccagau

SEQ ID NO: 1462966 - RNA, 19 nt, Artificial Sequence
  Description of Artificial Sequence: Synthetic oligonucleotide
gucuuacugugcuguccaa

SEQ ID NO: 1462967 - RNA, 19 nt, Artificial Sequence
  Description of Artificial Sequence: Synthetic oligonucleotide
ccgcucuuauuuaaaaccu

SEQ ID NO: 1462968 - RNA, 19 nt, Artificial Sequence
  Description of Artificial Sequence: Synthetic oligonucleotide
gcauuagacuacguggagu

SEQ ID NO: 1462969 - RNA, 19 nt, Artificial Sequence
  Description of Artificial Sequence: Synthetic oligonucleotide
ccauugaugcaccggcaga

SEQ ID NO: 1462970 - RNA, 19 nt, Artificial Sequence
  Description of Artificial Sequence: Synthetic oligonucleotide
caccggcagacauucacau

SEQ ID NO: 1462971 - RNA, 19 nt, Artificial Sequence
  Description of Artificial Sequence: Synthetic oligonucleotide
ccugagaucccgcuggagu

SEQ ID NO: 1462972 - RNA, 19 nt, Artificial Sequence
  Description of Artificial Sequence: Synthetic oligonucleotide
ccgcuggagucauguauac

SEQ ID NO: 1462973 - RNA, 19 nt, Artificial Sequence
  Description of Artificial Sequence: Synthetic oligonucleotide
cuguacuuugccgcucuua

SEQ ID NO: 1462974 - RNA, 19 nt, Artificial Sequence
  Description of Artificial Sequence: Synthetic oligonucleotide
ccuauucauaucugagagu

SEQ ID NO: 1462975 - RNA, 19 nt, Artificial Sequence
  Description of Artificial Sequence: Synthetic oligonucleotide
cccggaaagggaauccaaa

SEQ ID NO: 1462976 - RNA, 19 nt, Artificial Sequence
  Description of Artificial Sequence: Synthetic oligonucleotide
cuucguucuuugacauuau

SEQ ID NO: 1462977 - RNA, 19 nt, Artificial Sequence
  Description of Artificial Sequence: Synthetic oligonucleotide
gaaggaguauuggccugau

SEQ ID NO: 1462978 - RNA, 19 nt, Artificial Sequence
  Description of Artificial Sequence: Synthetic oligonucleotide
aucccgcuggagucaugua

SEQ ID NO: 1462979 - RNA, 19 nt, Artificial Sequence
  Description of Artificial Sequence: Synthetic oligonucleotide
caccugcuugcagggaaca

SEQ ID NO: 1462980 - RNA, 19 nt, Artificial Sequence
  Description of Artificial Sequence: Synthetic oligonucleotide
ccuguaggcucuucguucu

SEQ ID NO: 1462981 - RNA, 19 nt, Artificial Sequence
  Description of Artificial Sequence: Synthetic oligonucleotide
ccgacuaaggagccaaagu

SEQ ID NO: 1462982 - RNA, 19 nt, Artificial Sequence
  Description of Artificial Sequence: Synthetic oligonucleotide
gccgggguaucccaguccu

SEQ ID NO: 1462983 - RNA, 19 nt, Artificial Sequence
  Description of Artificial Sequence: Synthetic oligonucleotide
caguggggcugucaaaauu

SEQ ID NO: 1462984 - RNA, 19 nt, Artificial Sequence
  Description of Artificial Sequence: Synthetic oligonucleotide
cccgcuggagucauguaua

SEQ ID NO: 1462985 - RNA, 19 nt, Artificial Sequence
  Description of Artificial Sequence: Synthetic oligonucleotide
ccacuccagauuugcuuca

SEQ ID NO: 1462986 - RNA, 19 nt, Artificial Sequence
  Description of Artificial Sequence: Synthetic oligonucleotide
ccaacguugggaacuuuau

SEQ ID NO: 1462987 - RNA, 19 nt, Artificial Sequence
  Description of Artificial Sequence: Synthetic oligonucleotide
cccaugaauuguucuggua

SEQ ID NO: 1462988 - RNA, 19 nt, Artificial Sequence
  Description of Artificial Sequence: Synthetic oligonucleotide
gggguaucccaguccucaa

SEQ ID NO: 1462989 - RNA, 19 nt, Artificial Sequence
  Description of Artificial Sequence: Synthetic oligonucleotide
gagaucccgcuggagucau

SEQ ID NO: 1462990 - RNA, 19 nt, Artificial Sequence
  Description of Artificial Sequence: Synthetic oligonucleotide
gggcuuuuguucccagaau

SEQ ID NO: 1462991 - RNA, 19 nt, Artificial Sequence
  Description of Artificial Sequence: Synthetic oligonucleotide
gccacucaacuuucuuagu

SEQ ID NO: 1462992 - RNA, 19 nt, Artificial Sequence
  Description of Artificial Sequence: Synthetic oligonucleotide
ggccugaugaauggucccu

SEQ ID NO: 1462993 - RNA, 19 nt, Artificial Sequence
  Description of Artificial Sequence: Synthetic oligonucleotide
agccgacuaaggagccaaa

SEQ ID NO: 1462994 - RNA, 19 nt, Artificial Sequence
  Description of Artificial Sequence: Synthetic oligonucleotide
ggguccuuagaaagccacu

SEQ ID NO: 1462995 - RNA, 19 nt, Artificial Sequence
  Description of Artificial Sequence: Synthetic oligonucleotide
cccuugaaggcagauccua

SEQ ID NO: 1462996 - RNA, 19 nt, Artificial Sequence
  Description of Artificial Sequence: Synthetic oligonucleotide
cccugagaucccgcuggag

SEQ ID NO: 1462997 - RNA, 19 nt, Artificial Sequence
  Description of Artificial Sequence: Synthetic oligonucleotide
augcaccggcagacauuca

SEQ ID NO: 1462998 - RNA, 19 nt, Artificial Sequence
  Description of Artificial Sequence: Synthetic oligonucleotide
gcccugagaucccgcugga

SEQ ID NO: 1462999 - RNA, 19 nt, Artificial Sequence
  Description of Artificial Sequence: Synthetic oligonucleotide
ggggaguagaggcgccaau

SEQ ID NO: 1463000 - RNA, 19 nt, Artificial Sequence
  Description of Artificial Sequence: Synthetic oligonucleotide
ccgggguaucccaguccuc

SEQ ID NO: 1463001 - RNA, 19 nt, Artificial Sequence
  Description of Artificial Sequence: Synthetic oligonucleotide
guccaacguugggaacuuu

SEQ ID NO: 1463002 - RNA, 19 nt, Artificial Sequence
  Description of Artificial Sequence: Synthetic oligonucleotide
cgccaauguuucucucccu

SEQ ID NO: 1463003 - RNA, 19 nt, Artificial Sequence
  Description of Artificial Sequence: Synthetic oligonucleotide
cggcagacauucacaucuu

SEQ ID NO: 1463004 - RNA, 19 nt, Artificial Sequence
  Description of Artificial Sequence: Synthetic oligonucleotide
agaaaggugaucuauauac

SEQ ID NO: 1463005 - RNA, 19 nt, Artificial Sequence
  Description of Artificial Sequence: Synthetic oligonucleotide
auauccauguaucugaggc

SEQ ID NO: 1463006 - RNA, 19 nt, Artificial Sequence
  Description of Artificial Sequence: Synthetic oligonucleotide
aaaguucaaggucugaagg

SEQ ID NO: 1463007 - RNA, 19 nt, Artificial Sequence
  Description of Artificial Sequence: Synthetic oligonucleotide
auuaguaucaggcaaaaca

SEQ ID NO: 1463008 - RNA, 19 nt, Artificial Sequence
  Description of Artificial Sequence: Synthetic oligonucleotide
aauuguuacaaguaacaca

SEQ ID NO: 1463009 - RNA, 19 nt, Artificial Sequence
  Description of Artificial Sequence: Synthetic oligonucleotide
aaaccgaucaaucauggcu

SEQ ID NO: 1463010 - RNA, 19 nt, Artificial Sequence
  Description of Artificial Sequence: Synthetic oligonucleotide
aagauuaugucauagucaa

SEQ ID NO: 1463011 - RNA, 19 nt, Artificial Sequence
  Description of Artificial Sequence: Synthetic oligonucleotide
ugguacauuaguaucaggc

SEQ ID NO: 1463012 - RNA, 19 nt, Artificial Sequence
  Description of Artificial Sequence: Synthetic oligonucleotide
aaucacguaucucugagcu

SEQ ID NO: 1463013 - RNA, 19 nt, Artificial Sequence
  Description of Artificial Sequence: Synthetic oligonucleotide
acagcuuuauuugacagcc

SEQ ID NO: 1463014 - RNA, 19 nt, Artificial Sequence
  Description of Artificial Sequence: Synthetic oligonucleotide
agcuuuauuugacagcccc

SEQ ID NO: 1463015 - RNA, 19 nt, Artificial Sequence
  Description of Artificial Sequence: Synthetic oligonucleotide
agagucuuugaauuguuac

SEQ ID NO: 1463016 - RNA, 19 nt, Artificial Sequence
  Description of Artificial Sequence: Synthetic oligonucleotide
agguauuuuacuuccaguc

SEQ ID NO: 1463017 - RNA, 19 nt, Artificial Sequence
  Description of Artificial Sequence: Synthetic oligonucleotide
agugcaaucacguaucucu

SEQ ID NO: 1463018 - RNA, 19 nt, Artificial Sequence
  Description of Artificial Sequence: Synthetic oligonucleotide
gaagaugauccucaguggg

SEQ ID NO: 1463019 - RNA, 19 nt, Artificial Sequence
  Description of Artificial Sequence: Synthetic oligonucleotide
aggccuugcaaucucaugc

SEQ ID NO: 1463020 - RNA, 19 nt, Artificial Sequence
  Description of Artificial Sequence: Synthetic oligonucleotide
aagacauugugcuccagag

SEQ ID NO: 1463021 - RNA, 19 nt, Artificial Sequence
  Description of Artificial Sequence: Synthetic oligonucleotide
gucuucauauaccugaggg

SEQ ID NO: 1463022 - RNA, 19 nt, Artificial Sequence
  Description of Artificial Sequence: Synthetic oligonucleotide
acaaguaacacaaaauauc

SEQ ID NO: 1463023 - RNA, 19 nt, Artificial Sequence
  Description of Artificial Sequence: Synthetic oligonucleotide
uuggugaaugcaaagagac

SEQ ID NO: 1463024 - RNA, 19 nt, Artificial Sequence
  Description of Artificial Sequence: Synthetic oligonucleotide
acaaagaccagguucgauc

SEQ ID NO: 1463025 - RNA, 19 nt, Artificial Sequence
  Description of Artificial Sequence: Synthetic oligonucleotide
ugaaaccgaucaaucaugg

SEQ ID NO: 1463026 - RNA, 19 nt, Artificial Sequence
  Description of Artificial Sequence: Synthetic oligonucleotide
ucacguaucucugagcugg

SEQ ID NO: 1463027 - RNA, 19 nt, Artificial Sequence
  Description of Artificial Sequence: Synthetic oligonucleotide
aaggacggcaggcugaaag

SEQ ID NO: 1463028 - RNA, 19 nt, Artificial Sequence
  Description of Artificial Sequence: Synthetic oligonucleotide
aaaggugaucuauauacau

SEQ ID NO: 1463029 - RNA, 19 nt, Artificial Sequence
  Description of Artificial Sequence: Synthetic oligonucleotide
acucagucaaucaugaggg

SEQ ID NO: 1463030 - RNA, 19 nt, Artificial Sequence
  Description of Artificial Sequence: Synthetic oligonucleotide
guauuuuacuuccaguccc

SEQ ID NO: 1463031 - RNA, 19 nt, Artificial Sequence
  Description of Artificial Sequence: Synthetic oligonucleotide
uuauccuucugauaccaag

SEQ ID NO: 1463032 - RNA, 19 nt, Artificial Sequence
  Description of Artificial Sequence: Synthetic oligonucleotide
uuucaggucauauccaugu

SEQ ID NO: 1463033 - RNA, 19 nt, Artificial Sequence
  Description of Artificial Sequence: Synthetic oligonucleotide
aaugaucgcugcguguucc

SEQ ID NO: 1463034 - RNA, 19 nt, Artificial Sequence
  Description of Artificial Sequence: Synthetic oligonucleotide
aacugaaaccgaucaauca

SEQ ID NO: 1463035 - RNA, 19 nt, Artificial Sequence
  Description of Artificial Sequence: Synthetic oligonucleotide
cuucauauaccugagggag

SEQ ID NO: 1463036 - RNA, 19 nt, Artificial Sequence
  Description of Artificial Sequence: Synthetic oligonucleotide
aaacaaaucuucccacucu

SEQ ID NO: 1463037 - RNA, 19 nt, Artificial Sequence
  Description of Artificial Sequence: Synthetic oligonucleotide
ucugauaccaagugcguga

SEQ ID NO: 1463038 - RNA, 19 nt, Artificial Sequence
  Description of Artificial Sequence: Synthetic oligonucleotide
aaaauuucgaggagcagca

SEQ ID NO: 1463039 - RNA, 19 nt, Artificial Sequence
  Description of Artificial Sequence: Synthetic oligonucleotide
uggauuuguuucuauacac

SEQ ID NO: 1463040 - RNA, 19 nt, Artificial Sequence
  Description of Artificial Sequence: Synthetic oligonucleotide
accaaugguuguccaaucc

SEQ ID NO: 1463041 - RNA, 19 nt, Artificial Sequence
  Description of Artificial Sequence: Synthetic oligonucleotide
aaguucaaggucugaaggu

SEQ ID NO: 1463042 - RNA, 19 nt, Artificial Sequence
  Description of Artificial Sequence: Synthetic oligonucleotide
gauagggaaacucagucaa

SEQ ID NO: 1463043 - RNA, 19 nt, Artificial Sequence
  Description of Artificial Sequence: Synthetic oligonucleotide
caauccaagugcaaucacg

SEQ ID NO: 1463044 - RNA, 19 nt, Artificial Sequence
  Description of Artificial Sequence: Synthetic oligonucleotide
cagcuuauccuucugauac

SEQ ID NO: 1463045 - RNA, 19 nt, Artificial Sequence
  Description of Artificial Sequence: Synthetic oligonucleotide
ugcguguuccuucugagcu

SEQ ID NO: 1463046 - RNA, 19 nt, Artificial Sequence
  Description of Artificial Sequence: Synthetic oligonucleotide
uuuuggagucaucaucacc

SEQ ID NO: 1463047 - RNA, 19 nt, Artificial Sequence
  Description of Artificial Sequence: Synthetic oligonucleotide
uccaagugcaaucacguau

SEQ ID NO: 1463048 - RNA, 19 nt, Artificial Sequence
  Description of Artificial Sequence: Synthetic oligonucleotide
agugacugcccugaaaugg

SEQ ID NO: 1463049 - RNA, 19 nt, Artificial Sequence
  Description of Artificial Sequence: Synthetic oligonucleotide
cuugcuaucaggacuccag

SEQ ID NO: 1463050 - RNA, 19 nt, Artificial Sequence
  Description of Artificial Sequence: Synthetic oligonucleotide
aggugaucuauauacauaa

SEQ ID NO: 1463051 - RNA, 19 nt, Artificial Sequence
  Description of Artificial Sequence: Synthetic oligonucleotide
uuuacuuccagucccuuuu

SEQ ID NO: 1463052 - RNA, 19 nt, Artificial Sequence
  Description of Artificial Sequence: Synthetic oligonucleotide
aauaucucauggccauguc

SEQ ID NO: 1463053 - RNA, 19 nt, Artificial Sequence
  Description of Artificial Sequence: Synthetic oligonucleotide
uuccacgaggucaucauug

SEQ ID NO: 1463054 - RNA, 19 nt, Artificial Sequence
  Description of Artificial Sequence: Synthetic oligonucleotide
uguuuccaagacauugugc

SEQ ID NO: 1463055 - RNA, 19 nt, Artificial Sequence
  Description of Artificial Sequence: Synthetic oligonucleotide
aaauaucucauggccaugu

SEQ ID NO: 1463056 - RNA, 19 nt, Artificial Sequence
  Description of Artificial Sequence: Synthetic oligonucleotide
agaaggucgcuaccaaugg

SEQ ID NO: 1463057 - RNA, 19 nt, Artificial Sequence
  Description of Artificial Sequence: Synthetic oligonucleotide
aaucucaugccaagucacc

SEQ ID NO: 1463058 - RNA, 19 nt, Artificial Sequence
  Description of Artificial Sequence: Synthetic oligonucleotide
ucaccgcacgcuaauauug

SEQ ID NO: 1463059 - RNA, 19 nt, Artificial Sequence
  Description of Artificial Sequence: Synthetic oligonucleotide
ccuucugauaccaagugcg

SEQ ID NO: 1463060 - RNA, 19 nt, Artificial Sequence
  Description of Artificial Sequence: Synthetic oligonucleotide
aauccaagugcaaucacgu

SEQ ID NO: 1463061 - RNA, 19 nt, Artificial Sequence
  Description of Artificial Sequence: Synthetic oligonucleotide
agacagcuuuauuugacag

SEQ ID NO: 1463062 - RNA, 19 nt, Artificial Sequence
  Description of Artificial Sequence: Synthetic oligonucleotide
aggucucccggauagacag

SEQ ID NO: 1463063 - RNA, 19 nt, Artificial Sequence
  Description of Artificial Sequence: Synthetic oligonucleotide
uguccauacaguuucugaa

SEQ ID NO: 1463064 - RNA, 19 nt, Artificial Sequence
  Description of Artificial Sequence: Synthetic oligonucleotide
cucagcaaagggcagacac

SEQ ID NO: 1463065 - RNA, 19 nt, Artificial Sequence
  Description of Artificial Sequence: Synthetic oligonucleotide
uuugagagcgcauugucuu

SEQ ID NO: 1463066 - RNA, 19 nt, Artificial Sequence
  Description of Artificial Sequence: Synthetic oligonucleotide
uauuugagagcgcauuguc

SEQ ID NO: 1463067 - RNA, 19 nt, Artificial Sequence
  Description of Artificial Sequence: Synthetic oligonucleotide
cuguugaauaaauaaguga

SEQ ID NO: 1463068 - RNA, 19 nt, Artificial Sequence
  Description of Artificial Sequence: Synthetic oligonucleotide
gacagcuuuauuugacagc

SEQ ID NO: 1463069 - RNA, 19 nt, Artificial Sequence
  Description of Artificial Sequence: Synthetic oligonucleotide
aguaagaacuugucaucag

SEQ ID NO: 1463070 - RNA, 19 nt, Artificial Sequence
  Description of Artificial Sequence: Synthetic oligonucleotide
gaauuguuacaaguaacac

SEQ ID NO: 1463071 - RNA, 19 nt, Artificial Sequence
  Description of Artificial Sequence: Synthetic oligonucleotide
caagucaccagugauuggc

SEQ ID NO: 1463072 - RNA, 19 nt, Artificial Sequence
  Description of Artificial Sequence: Synthetic oligonucleotide
aggcugaaagauuauguca

SEQ ID NO: 1463073 - RNA, 19 nt, Artificial Sequence
  Description of Artificial Sequence: Synthetic oligonucleotide
ucauauaccugagggagca

SEQ ID NO: 1463074 - RNA, 19 nt, Artificial Sequence
  Description of Artificial Sequence: Synthetic oligonucleotide
uuuugucucgacuuccagu

SEQ ID NO: 1463075 - RNA, 19 nt, Artificial Sequence
  Description of Artificial Sequence: Synthetic oligonucleotide
cuugcaaucucaugccaag

SEQ ID NO: 1463076 - RNA, 19 nt, Artificial Sequence
  Description of Artificial Sequence: Synthetic oligonucleotide
uauacauaacaaugcaguu

SEQ ID NO: 1463077 - RNA, 19 nt, Artificial Sequence
  Description of Artificial Sequence: Synthetic oligonucleotide
aaucaugaggguaaagaaa

SEQ ID NO: 1463078 - RNA, 19 nt, Artificial Sequence
  Description of Artificial Sequence: Synthetic oligonucleotide
uucauauaccugagggagc

SEQ ID NO: 1463079 - RNA, 19 nt, Artificial Sequence
  Description of Artificial Sequence: Synthetic oligonucleotide
gagucuuugaauuguuaca

SEQ ID NO: 1463080 - RNA, 19 nt, Artificial Sequence
  Description of Artificial Sequence: Synthetic oligonucleotide
gguauuuuacuuccagucc

SEQ ID NO: 1463081 - RNA, 19 nt, Artificial Sequence
  Description of Artificial Sequence: Synthetic oligonucleotide
auacuugcuaucaggacuc

SEQ ID NO: 1463082 - RNA, 19 nt, Artificial Sequence
  Description of Artificial Sequence: Synthetic oligonucleotide
cauccuguugaauaaauaa

SEQ ID NO: 1463083 - RNA, 19 nt, Artificial Sequence
  Description of Artificial Sequence: Synthetic oligonucleotide
cugaaaccgaucaaucaug

SEQ ID NO: 1463084 - RNA, 19 nt, Artificial Sequence
  Description of Artificial Sequence: Synthetic oligonucleotide
ucaggucauauccauguau

SEQ ID NO: 1463085 - RNA, 19 nt, Artificial Sequence
  Description of Artificial Sequence: Synthetic oligonucleotide
uuccagugaagaaauacuu

SEQ ID NO: 1463086 - RNA, 19 nt, Artificial Sequence
  Description of Artificial Sequence: Synthetic oligonucleotide
cugaaagauuaugucauag

SEQ ID NO: 1463087 - RNA, 19 nt, Artificial Sequence
  Description of Artificial Sequence: Synthetic oligonucleotide
agauagggaaacucaguca

SEQ ID NO: 1463088 - RNA, 19 nt, Artificial Sequence
  Description of Artificial Sequence: Synthetic oligonucleotide
gagucaucaucaccgcacg

SEQ ID NO: 1463089 - RNA, 19 nt, Artificial Sequence
  Description of Artificial Sequence: Synthetic oligonucleotide
uuccccaaaguucaagguc

SEQ ID NO: 1463090 - RNA, 19 nt, Artificial Sequence
  Description of Artificial Sequence: Synthetic oligonucleotide
aaggucugaagguauuuua

SEQ ID NO: 1463091 - RNA, 19 nt, Artificial Sequence
  Description of Artificial Sequence: Synthetic oligonucleotide
auccuguugaauaaauaag

SEQ ID NO: 1463092 - RNA, 19 nt, Artificial Sequence
  Description of Artificial Sequence: Synthetic oligonucleotide
auugguacauuaguaucag

SEQ ID NO: 1463093 - RNA, 19 nt, Artificial Sequence
  Description of Artificial Sequence: Synthetic oligonucleotide
aagucaccagugauuggcc

SEQ ID NO: 1463094 - RNA, 19 nt, Artificial Sequence
  Description of Artificial Sequence: Synthetic oligonucleotide
aaagaccagguucgaucuc

SEQ ID NO: 1463095 - RNA, 19 nt, Artificial Sequence
  Description of Artificial Sequence: Synthetic oligonucleotide
uuuagaccacagucgaacu

SEQ ID NO: 1463096 - RNA, 19 nt, Artificial Sequence
  Description of Artificial Sequence: Synthetic oligonucleotide
agagaaugaucgcugcgug

SEQ ID NO: 1463097 - RNA, 19 nt, Artificial Sequence
  Description of Artificial Sequence: Synthetic oligonucleotide
uugcacucgccccagacaa

SEQ ID NO: 1463098 - RNA, 19 nt, Artificial Sequence
  Description of Artificial Sequence: Synthetic oligonucleotide
uuucuauacacagggucca

SEQ ID NO: 1463099 - RNA, 19 nt, Artificial Sequence
  Description of Artificial Sequence: Synthetic oligonucleotide
cugugaacagcuugcuagg

SEQ ID NO: 1463100 - RNA, 19 nt, Artificial Sequence
  Description of Artificial Sequence: Synthetic oligonucleotide
uauaccugagggagcaggu

SEQ ID NO: 1463101 - RNA, 19 nt, Artificial Sequence
  Description of Artificial Sequence: Synthetic oligonucleotide
gcaggguuauuugagagcg

SEQ ID NO: 1463102 - RNA, 19 nt, Artificial Sequence
  Description of Artificial Sequence: Synthetic oligonucleotide
caggucauauccauguauc

SEQ ID NO: 1463103 - RNA, 19 nt, Artificial Sequence
  Description of Artificial Sequence: Synthetic oligonucleotide
cacaaaauuucgaggagca

SEQ ID NO: 1463104 - RNA, 19 nt, Artificial Sequence
  Description of Artificial Sequence: Synthetic oligonucleotide
uuauuugagagcgcauugu

SEQ ID NO: 1463105 - RNA, 19 nt, Artificial Sequence
  Description of Artificial Sequence: Synthetic oligonucleotide
uccaauccaagugcaauca

SEQ ID NO: 1463106 - RNA, 19 nt, Artificial Sequence
  Description of Artificial Sequence: Synthetic oligonucleotide
aggcaggguuauuugagag

SEQ ID NO: 1463107 - RNA, 19 nt, Artificial Sequence
  Description of Artificial Sequence: Synthetic oligonucleotide
ucgaacuguagaaucugaa

SEQ ID NO: 1463108 - RNA, 19 nt, Artificial Sequence
  Description of Artificial Sequence: Synthetic oligonucleotide
ucauuggaguugcacucgc

SEQ ID NO: 1463109 - RNA, 19 nt, Artificial Sequence
  Description of Artificial Sequence: Synthetic oligonucleotide
aagaccagguucgaucucu

SEQ ID NO: 1463110 - RNA, 19 nt, Artificial Sequence
  Description of Artificial Sequence: Synthetic oligonucleotide
ggcuaaacauuucagguca

SEQ ID NO: 1463111 - RNA, 19 nt, Artificial Sequence
  Description of Artificial Sequence: Synthetic oligonucleotide
cuaucaggacuccagucac

SEQ ID NO: 1463112 - RNA, 19 nt, Artificial Sequence
  Description of Artificial Sequence: Synthetic oligonucleotide
uccagagaaugaucgcugc

SEQ ID NO: 1463113 - RNA, 19 nt, Artificial Sequence
  Description of Artificial Sequence: Synthetic oligonucleotide
cauauccauguaucugagg

SEQ ID NO: 1463114 - RNA, 19 nt, Artificial Sequence
  Description of Artificial Sequence: Synthetic oligonucleotide
ugucucgacuuccagugaa

SEQ ID NO: 1463115 - RNA, 19 nt, Artificial Sequence
  Description of Artificial Sequence: Synthetic oligonucleotide
auguccauacaguuucuga

SEQ ID NO: 1463116 - RNA, 19 nt, Artificial Sequence
  Description of Artificial Sequence: Synthetic oligonucleotide
aaaauaucucauggccaug

SEQ ID NO: 1463117 - RNA, 19 nt, Artificial Sequence
  Description of Artificial Sequence: Synthetic oligonucleotide
uggaguugcacucgcccca

SEQ ID NO: 1463118 - RNA, 19 nt, Artificial Sequence
  Description of Artificial Sequence: Synthetic oligonucleotide
ugcagaagaugauccucag

SEQ ID NO: 1463119 - RNA, 19 nt, Artificial Sequence
  Description of Artificial Sequence: Synthetic oligonucleotide
aagugcaaucacguaucuc

SEQ ID NO: 1463120 - RNA, 19 nt, Artificial Sequence
  Description of Artificial Sequence: Synthetic oligonucleotide
ucauccuguugaauaaaua

SEQ ID NO: 1463121 - RNA, 19 nt, Artificial Sequence
  Description of Artificial Sequence: Synthetic oligonucleotide
gguacauuaguaucaggca

SEQ ID NO: 1463122 - RNA, 19 nt, Artificial Sequence
  Description of Artificial Sequence: Synthetic oligonucleotide
auccauguaucugaggccu

SEQ ID NO: 1463123 - RNA, 19 nt, Artificial Sequence
  Description of Artificial Sequence: Synthetic oligonucleotide
ugcaaucacguaucucuga

SEQ ID NO: 1463124 - RNA, 19 nt, Artificial Sequence
  Description of Artificial Sequence: Synthetic oligonucleotide
aagugaauuuuggagucau

SEQ ID NO: 1463125 - RNA, 19 nt, Artificial Sequence
  Description of Artificial Sequence: Synthetic oligonucleotide
uggugaaugcaaagagacu

SEQ ID NO: 1463126 - RNA, 19 nt, Artificial Sequence
  Description of Artificial Sequence: Synthetic oligonucleotide
aggucauauccauguaucu

SEQ ID NO: 1463127 - RNA, 19 nt, Artificial Sequence
  Description of Artificial Sequence: Synthetic oligonucleotide
ccuguugaauaaauaagug

SEQ ID NO: 1463128 - RNA, 19 nt, Artificial Sequence
  Description of Artificial Sequence: Synthetic oligonucleotide
uucugauaccaagugcgug

SEQ ID NO: 1463129 - RNA, 19 nt, Artificial Sequence
  Description of Artificial Sequence: Synthetic oligonucleotide
aaccgaucaaucauggcua

SEQ ID NO: 1463130 - RNA, 19 nt, Artificial Sequence
  Description of Artificial Sequence: Synthetic oligonucleotide
uacugugcacagaagugau

SEQ ID NO: 1463131 - RNA, 19 nt, Artificial Sequence
  Description of Artificial Sequence: Synthetic oligonucleotide
uuuauuugacagccccaau

SEQ ID NO: 1463132 - RNA, 19 nt, Artificial Sequence
  Description of Artificial Sequence: Synthetic oligonucleotide
aagaugauccucaguggga

SEQ ID NO: 1463133 - RNA, 19 nt, Artificial Sequence
  Description of Artificial Sequence: Synthetic oligonucleotide
uaggagaaggucgcuacca

SEQ ID NO: 1463134 - RNA, 19 nt, Artificial Sequence
  Description of Artificial Sequence: Synthetic oligonucleotide
uugcuaucaggacuccagu

SEQ ID NO: 1463135 - RNA, 19 nt, Artificial Sequence
  Description of Artificial Sequence: Synthetic oligonucleotide
cuccagagaaugaucgcug

SEQ ID NO: 1463136 - RNA, 19 nt, Artificial Sequence
  Description of Artificial Sequence: Synthetic oligonucleotide
cagacagucagaacacauc

SEQ ID NO: 1463137 - RNA, 19 nt, Artificial Sequence
  Description of Artificial Sequence: Synthetic oligonucleotide
gaaaggugaucuauauaca

SEQ ID NO: 1463138 - RNA, 19 nt, Artificial Sequence
  Description of Artificial Sequence: Synthetic oligonucleotide
gcuugcuaggagaaggucg

SEQ ID NO: 1463139 - RNA, 19 nt, Artificial Sequence
  Description of Artificial Sequence: Synthetic oligonucleotide
aggguuauuugagagcgca

SEQ ID NO: 1463140 - RNA, 19 nt, Artificial Sequence
  Description of Artificial Sequence: Synthetic oligonucleotide
auugacuucuugacugguc

SEQ ID NO: 1463141 - RNA, 19 nt, Artificial Sequence
  Description of Artificial Sequence: Synthetic oligonucleotide
acucgccccagacaaccac

SEQ ID NO: 1463142 - RNA, 19 nt, Artificial Sequence
  Description of Artificial Sequence: Synthetic oligonucleotide
agugcgugacuuuggcuug

SEQ ID NO: 1463143 - RNA, 19 nt, Artificial Sequence
  Description of Artificial Sequence: Synthetic oligonucleotide
uccagucacaagaccagau

SEQ ID NO: 1463144 - RNA, 19 nt, Artificial Sequence
  Description of Artificial Sequence: Synthetic oligonucleotide
caaaucuucccacucucca

SEQ ID NO: 1463145 - RNA, 19 nt, Artificial Sequence
  Description of Artificial Sequence: Synthetic oligonucleotide
aaggugaucuauauacaua

SEQ ID NO: 1463146 - RNA, 19 nt, Artificial Sequence
  Description of Artificial Sequence: Synthetic oligonucleotide
uguuccacgaggucaucau

SEQ ID NO: 1463147 - RNA, 19 nt, Artificial Sequence
  Description of Artificial Sequence: Synthetic oligonucleotide
caccgcacgcuaauauugg

SEQ ID NO: 1463148 - RNA, 19 nt, Artificial Sequence
  Description of Artificial Sequence: Synthetic oligonucleotide
uaccaagugcgugacuuug

SEQ ID NO: 1463149 - RNA, 19 nt, Artificial Sequence
  Description of Artificial Sequence: Synthetic oligonucleotide
agacauugugcuccagaga

SEQ ID NO: 1463150 - RNA, 19 nt, Artificial Sequence
  Description of Artificial Sequence: Synthetic oligonucleotide
ugauccagugacugcccug

SEQ ID NO: 1463151 - RNA, 19 nt, Artificial Sequence
  Description of Artificial Sequence: Synthetic oligonucleotide
gaacugcccacauccagga

SEQ ID NO: 1463152 - RNA, 19 nt, Artificial Sequence
  Description of Artificial Sequence: Synthetic oligonucleotide
cuaggagaaggucgcuacc

SEQ ID NO: 1463153 - RNA, 19 nt, Artificial Sequence
  Description of Artificial Sequence: Synthetic oligonucleotide
agucgaacuguagaaucug

SEQ ID NO: 1463154 - RNA, 19 nt, Artificial Sequence
  Description of Artificial Sequence: Synthetic oligonucleotide
ucccacucuccaauccaag

SEQ ID NO: 1463155 - RNA, 19 nt, Artificial Sequence
  Description of Artificial Sequence: Synthetic oligonucleotide
agaaugaucgcugcguguu

SEQ ID NO: 1463156 - RNA, 19 nt, Artificial Sequence
  Description of Artificial Sequence: Synthetic oligonucleotide
aaggucgcuaccaaugguu

SEQ ID NO: 1463157 - RNA, 19 nt, Artificial Sequence
  Description of Artificial Sequence: Synthetic oligonucleotide
uuauccaguccuccauguc

SEQ ID NO: 1463158 - RNA, 19 nt, Artificial Sequence
  Description of Artificial Sequence: Synthetic oligonucleotide
gaccagguucgaucucugg

SEQ ID NO: 1463159 - RNA, 19 nt, Artificial Sequence
  Description of Artificial Sequence: Synthetic oligonucleotide
cacaauguguucugcagaa

SEQ ID NO: 1463160 - RNA, 19 nt, Artificial Sequence
  Description of Artificial Sequence: Synthetic oligonucleotide
guuacaaguaacacaaaau

SEQ ID NO: 1463161 - RNA, 19 nt, Artificial Sequence
  Description of Artificial Sequence: Synthetic oligonucleotide
caaaauaucucauggccau

SEQ ID NO: 1463162 - RNA, 19 nt, Artificial Sequence
  Description of Artificial Sequence: Synthetic oligonucleotide
ucucgacuuccagugaaga

SEQ ID NO: 1463163 - RNA, 19 nt, Artificial Sequence
  Description of Artificial Sequence: Synthetic oligonucleotide
gcuaucaggacuccaguca

SEQ ID NO: 1463164 - RNA, 19 nt, Artificial Sequence
  Description of Artificial Sequence: Synthetic oligonucleotide
aguucaaggucugaaggua

SEQ ID NO: 1463165 - RNA, 19 nt, Artificial Sequence
  Description of Artificial Sequence: Synthetic oligonucleotide
guaucugaggccuugcaau

SEQ ID NO: 1463166 - RNA, 19 nt, Artificial Sequence
  Description of Artificial Sequence: Synthetic oligonucleotide
aggacggcaggcugaaaga

SEQ ID NO: 1463167 - RNA, 19 nt, Artificial Sequence
  Description of Artificial Sequence: Synthetic oligonucleotide
agucaccagugauuggccu

SEQ ID NO: 1463168 - RNA, 19 nt, Artificial Sequence
  Description of Artificial Sequence: Synthetic oligonucleotide
ggucauauccauguaucug

SEQ ID NO: 1463169 - RNA, 19 nt, Artificial Sequence
  Description of Artificial Sequence: Synthetic oligonucleotide
uguccaauccacuccucuu

SEQ ID NO: 1463170 - RNA, 19 nt, Artificial Sequence
  Description of Artificial Sequence: Synthetic oligonucleotide
gauaccaagugcgugacuu

SEQ ID NO: 1463171 - RNA, 19 nt, Artificial Sequence
  Description of Artificial Sequence: Synthetic oligonucleotide
uucuauacacaggguccag

SEQ ID NO: 1463172 - RNA, 19 nt, Artificial Sequence
  Description of Artificial Sequence: Synthetic oligonucleotide
auguaucugaggccuugca

SEQ ID NO: 1463173 - RNA, 19 nt, Artificial Sequence
  Description of Artificial Sequence: Synthetic oligonucleotide
gaucgcugcguguuccuuc

SEQ ID NO: 1463174 - RNA, 19 nt, Artificial Sequence
  Description of Artificial Sequence: Synthetic oligonucleotide
cuacugugcacagaaguga

SEQ ID NO: 1463175 - RNA, 19 nt, Artificial Sequence
  Description of Artificial Sequence: Synthetic oligonucleotide
aucaucaccgcacgcuaau

SEQ ID NO: 1463176 - RNA, 19 nt, Artificial Sequence
  Description of Artificial Sequence: Synthetic oligonucleotide
aucgcugcguguuccuucu

SEQ ID NO: 1463177 - RNA, 19 nt, Artificial Sequence
  Description of Artificial Sequence: Synthetic oligonucleotide
caguaagaacuugucauca

SEQ ID NO: 1463178 - RNA, 19 nt, Artificial Sequence
  Description of Artificial Sequence: Synthetic oligonucleotide
uugagagcgcauugucuuc

SEQ ID NO: 1463179 - RNA, 19 nt, Artificial Sequence
  Description of Artificial Sequence: Synthetic oligonucleotide
agugaauuuuggagucauc

SEQ ID NO: 1463180 - RNA, 19 nt, Artificial Sequence
  Description of Artificial Sequence: Synthetic oligonucleotide
agcuugcuaggagaagguc

SEQ ID NO: 1463181 - RNA, 19 nt, Artificial Sequence
  Description of Artificial Sequence: Synthetic oligonucleotide
cugcguguuccuucugagc

SEQ ID NO: 1463182 - RNA, 19 nt, Artificial Sequence
  Description of Artificial Sequence: Synthetic oligonucleotide
uaccaaugguuguccaauc

SEQ ID NO: 1463183 - RNA, 19 nt, Artificial Sequence
  Description of Artificial Sequence: Synthetic oligonucleotide
gcuaggagaaggucgcuac

SEQ ID NO: 1463184 - RNA, 19 nt, Artificial Sequence
  Description of Artificial Sequence: Synthetic oligonucleotide
aucaccgcacgcuaauauu

SEQ ID NO: 1463185 - RNA, 19 nt, Artificial Sequence
  Description of Artificial Sequence: Synthetic oligonucleotide
ugaggccuugcaaucucau

SEQ ID NO: 1463186 - RNA, 19 nt, Artificial Sequence
  Description of Artificial Sequence: Synthetic oligonucleotide
acauuucaggucauaucca

SEQ ID NO: 1463187 - RNA, 19 nt, Artificial Sequence
  Description of Artificial Sequence: Synthetic oligonucleotide
gaaugaucgcugcguguuc

SEQ ID NO: 1463188 - RNA, 19 nt, Artificial Sequence
  Description of Artificial Sequence: Synthetic oligonucleotide
agcagggaccaauggugug

SEQ ID NO: 1463189 - RNA, 19 nt, Artificial Sequence
  Description of Artificial Sequence: Synthetic oligonucleotide
acguaucucugagcugggc

SEQ ID NO: 1463190 - RNA, 19 nt, Artificial Sequence
  Description of Artificial Sequence: Synthetic oligonucleotide
agcgcauugucuucauaua

SEQ ID NO: 1463191 - RNA, 19 nt, Artificial Sequence
  Description of Artificial Sequence: Synthetic oligonucleotide
ugauucuacugugcacaga

SEQ ID NO: 1463192 - RNA, 19 nt, Artificial Sequence
  Description of Artificial Sequence: Synthetic oligonucleotide
cauuaguaucaggcaaaac

SEQ ID NO: 1463193 - RNA, 19 nt, Artificial Sequence
  Description of Artificial Sequence: Synthetic oligonucleotide
accaagugcgugacuuugg

SEQ ID NO: 1463194 - RNA, 19 nt, Artificial Sequence
  Description of Artificial Sequence: Synthetic oligonucleotide
ccaguaagaacuugucauc

SEQ ID NO: 1463195 - RNA, 19 nt, Artificial Sequence
  Description of Artificial Sequence: Synthetic oligonucleotide
aggguccagucauugacuu

SEQ ID NO: 1463196 - RNA, 19 nt, Artificial Sequence
  Description of Artificial Sequence: Synthetic oligonucleotide
cagcuuuauuugacagccc

SEQ ID NO: 1463197 - RNA, 19 nt, Artificial Sequence
  Description of Artificial Sequence: Synthetic oligonucleotide
ucgcuaccaaugguugucc

SEQ ID NO: 1463198 - RNA, 19 nt, Artificial Sequence
  Description of Artificial Sequence: Synthetic oligonucleotide
cugauaccaagugcgugac

SEQ ID NO: 1463199 - RNA, 19 nt, Artificial Sequence
  Description of Artificial Sequence: Synthetic oligonucleotide
agucacaagaccagaugau

SEQ ID NO: 1463200 - RNA, 19 nt, Artificial Sequence
  Description of Artificial Sequence: Synthetic oligonucleotide
gcgcauugucuucauauac

SEQ ID NO: 1463201 - RNA, 19 nt, Artificial Sequence
  Description of Artificial Sequence: Synthetic oligonucleotide
cagugacugcccugaaaug

SEQ ID NO: 1463202 - RNA, 19 nt, Artificial Sequence
  Description of Artificial Sequence: Synthetic oligonucleotide
cagugauuggccuuucugu

SEQ ID NO: 1463203 - RNA, 19 nt, Artificial Sequence
  Description of Artificial Sequence: Synthetic oligonucleotide
ucccggauagacagcuuua

SEQ ID NO: 1463204 - RNA, 19 nt, Artificial Sequence
  Description of Artificial Sequence: Synthetic oligonucleotide
gucgcuaccaaugguuguc

SEQ ID NO: 1463205 - RNA, 19 nt, Artificial Sequence
  Description of Artificial Sequence: Synthetic oligonucleotide
cacguaucucugagcuggg

SEQ ID NO: 1463206 - RNA, 19 nt, Artificial Sequence
  Description of Artificial Sequence: Synthetic oligonucleotide
gaacagcuugcuaggagaa

SEQ ID NO: 1463207 - RNA, 19 nt, Artificial Sequence
  Description of Artificial Sequence: Synthetic oligonucleotide
caugaggguaaagaaaggu

SEQ ID NO: 1463208 - RNA, 19 nt, Artificial Sequence
  Description of Artificial Sequence: Synthetic oligonucleotide
accgcacgcuaauauuggu

SEQ ID NO: 1463209 - RNA, 19 nt, Artificial Sequence
  Description of Artificial Sequence: Synthetic oligonucleotide
caggguuauuugagagcgc

SEQ ID NO: 1463210 - RNA, 19 nt, Artificial Sequence
  Description of Artificial Sequence: Synthetic oligonucleotide
cgcacgcuaauauugguac

SEQ ID NO: 1463211 - RNA, 19 nt, Artificial Sequence
  Description of Artificial Sequence: Synthetic oligonucleotide
ugguguguuccacgagguc

SEQ ID NO: 1463212 - RNA, 19 nt, Artificial Sequence
  Description of Artificial Sequence: Synthetic oligonucleotide
auccaguccuccaugucca

SEQ ID NO: 1463213 - RNA, 19 nt, Artificial Sequence
  Description of Artificial Sequence: Synthetic oligonucleotide
aggucgcuaccaaugguug

SEQ ID NO: 1463214 - RNA, 19 nt, Artificial Sequence
  Description of Artificial Sequence: Synthetic oligonucleotide
acggcaggcugaaagauua

SEQ ID NO: 1463215 - RNA, 19 nt, Artificial Sequence
  Description of Artificial Sequence: Synthetic oligonucleotide
gugcaaucacguaucucug

SEQ ID NO: 1463216 - RNA, 19 nt, Artificial Sequence
  Description of Artificial Sequence: Synthetic oligonucleotide
accgaucaaucauggcuaa

SEQ ID NO: 1463217 - RNA, 19 nt, Artificial Sequence
  Description of Artificial Sequence: Synthetic oligonucleotide
agaacacauccuuccccaa

SEQ ID NO: 1463218 - RNA, 19 nt, Artificial Sequence
  Description of Artificial Sequence: Synthetic oligonucleotide
gcugcguguuccuucugag

SEQ ID NO: 1463219 - RNA, 19 nt, Artificial Sequence
  Description of Artificial Sequence: Synthetic oligonucleotide
gagaaugaucgcugcgugu

SEQ ID NO: 1463220 - RNA, 19 nt, Artificial Sequence
  Description of Artificial Sequence: Synthetic oligonucleotide
cuuauccaguccuccaugu

SEQ ID NO: 1463221 - RNA, 19 nt, Artificial Sequence
  Description of Artificial Sequence: Synthetic oligonucleotide
auaccaagugcgugacuuu

SEQ ID NO: 1463222 - RNA, 19 nt, Artificial Sequence
  Description of Artificial Sequence: Synthetic oligonucleotide
cauuucaggucauauccau

SEQ ID NO: 1463223 - RNA, 19 nt, Artificial Sequence
  Description of Artificial Sequence: Synthetic oligonucleotide
ccagugauuggccuuucug

SEQ ID NO: 1463224 - RNA, 19 nt, Artificial Sequence
  Description of Artificial Sequence: Synthetic oligonucleotide
augaucgcugcguguuccu

SEQ ID NO: 1463225 - RNA, 19 nt, Artificial Sequence
  Description of Artificial Sequence: Synthetic oligonucleotide
ccaagugcgugacuuuggc

SEQ ID NO: 1463226 - RNA, 19 nt, Artificial Sequence
  Description of Artificial Sequence: Synthetic oligonucleotide
cagugaagaaauacuugcu

SEQ ID NO: 1463227 - RNA, 19 nt, Artificial Sequence
  Description of Artificial Sequence: Synthetic oligonucleotide
ugcuaggagaaggucgcua

SEQ ID NO: 1463228 - RNA, 19 nt, Artificial Sequence
  Description of Artificial Sequence: Synthetic oligonucleotide
uacacaggguccagucauu

SEQ ID NO: 1463229 - RNA, 19 nt, Artificial Sequence
  Description of Artificial Sequence: Synthetic oligonucleotide
gucucgacuuccagugaag

SEQ ID NO: 1463230 - RNA, 19 nt, Artificial Sequence
  Description of Artificial Sequence: Synthetic oligonucleotide
cgaucaaucauggcuaaac

SEQ ID NO: 1463231 - RNA, 19 nt, Artificial Sequence
  Description of Artificial Sequence: Synthetic oligonucleotide
acaagaccagaugauucua

SEQ ID NO: 1463232 - RNA, 19 nt, Artificial Sequence
  Description of Artificial Sequence: Synthetic oligonucleotide
accagugauuggccuuucu

SEQ ID NO: 1463233 - RNA, 19 nt, Artificial Sequence
  Description of Artificial Sequence: Synthetic oligonucleotide
gguaaagaaaggugaucua

SEQ ID NO: 1463234 - RNA, 19 nt, Artificial Sequence
  Description of Artificial Sequence: Synthetic oligonucleotide
cucgacuuccagugaagaa

SEQ ID NO: 1463235 - RNA, 19 nt, Artificial Sequence
  Description of Artificial Sequence: Synthetic oligonucleotide
auugugcuccagagaauga

SEQ ID NO: 1463236 - RNA, 19 nt, Artificial Sequence
  Description of Artificial Sequence: Synthetic oligonucleotide
caggcaaaacagacaggca

SEQ ID NO: 1463237 - RNA, 19 nt, Artificial Sequence
  Description of Artificial Sequence: Synthetic oligonucleotide
gaaggucgcuaccaauggu

SEQ ID NO: 1463238 - RNA, 19 nt, Artificial Sequence
  Description of Artificial Sequence: Synthetic oligonucleotide
cagguucgaucucuggaca

SEQ ID NO: 1463239 - RNA, 19 nt, Artificial Sequence
  Description of Artificial Sequence: Synthetic oligonucleotide
auccaagugcaaucacgua

SEQ ID NO: 1463240 - RNA, 19 nt, Artificial Sequence
  Description of Artificial Sequence: Synthetic oligonucleotide
agggaccaaugguguguuc

SEQ ID NO: 1463241 - RNA, 19 nt, Artificial Sequence
  Description of Artificial Sequence: Synthetic oligonucleotide
ggucugaagguauuuuacu

SEQ ID NO: 1463242 - RNA, 19 nt, Artificial Sequence
  Description of Artificial Sequence: Synthetic oligonucleotide
ggacuccagucacaagacc

SEQ ID NO: 1463243 - RNA, 19 nt, Artificial Sequence
  Description of Artificial Sequence: Synthetic oligonucleotide
aucucauggccauguccau

SEQ ID NO: 1463244 - RNA, 19 nt, Artificial Sequence
  Description of Artificial Sequence: Synthetic oligonucleotide
ugcacucgccccagacaac

SEQ ID NO: 1463245 - RNA, 19 nt, Artificial Sequence
  Description of Artificial Sequence: Synthetic oligonucleotide
cuccucuuauccaguccuc

SEQ ID NO: 1463246 - RNA, 19 nt, Artificial Sequence
  Description of Artificial Sequence: Synthetic oligonucleotide
gucgaacuguagaaucuga

SEQ ID NO: 1463247 - RNA, 19 nt, Artificial Sequence
  Description of Artificial Sequence: Synthetic oligonucleotide
cuuauccuucugauaccaa

SEQ ID NO: 1463248 - RNA, 19 nt, Artificial Sequence
  Description of Artificial Sequence: Synthetic oligonucleotide
ggcaggcugaaagauuaug

SEQ ID NO: 1463249 - RNA, 19 nt, Artificial Sequence
  Description of Artificial Sequence: Synthetic oligonucleotide
ggugaucuauauacauaac

SEQ ID NO: 1463250 - RNA, 19 nt, Artificial Sequence
  Description of Artificial Sequence: Synthetic oligonucleotide
cauauaccugagggagcag

SEQ ID NO: 1463251 - RNA, 19 nt, Artificial Sequence
  Description of Artificial Sequence: Synthetic oligonucleotide
gaggguaaagaaaggugau

SEQ ID NO: 1463252 - RNA, 19 nt, Artificial Sequence
  Description of Artificial Sequence: Synthetic oligonucleotide
cagagaaugaucgcugcgu

SEQ ID NO: 1463253 - RNA, 19 nt, Artificial Sequence
  Description of Artificial Sequence: Synthetic oligonucleotide
auagggaaacucagucaau

SEQ ID NO: 1463254 - RNA, 19 nt, Artificial Sequence
  Description of Artificial Sequence: Synthetic oligonucleotide
gcuuggauuuguuucuaua

SEQ ID NO: 1463255 - RNA, 19 nt, Artificial Sequence
  Description of Artificial Sequence: Synthetic oligonucleotide
acagaacugcccacaucca

SEQ ID NO: 1463256 - RNA, 19 nt, Artificial Sequence
  Description of Artificial Sequence: Synthetic oligonucleotide
ucaucaccgcacgcuaaua

SEQ ID NO: 1463257 - RNA, 19 nt, Artificial Sequence
  Description of Artificial Sequence: Synthetic oligonucleotide
gugcgugacuuuggcuugg

SEQ ID NO: 1463258 - RNA, 19 nt, Artificial Sequence
  Description of Artificial Sequence: Synthetic oligonucleotide
gcacucgccccagacaacc

SEQ ID NO: 1463259 - RNA, 19 nt, Artificial Sequence
  Description of Artificial Sequence: Synthetic oligonucleotide
caucaucaccgcacgcuaa

SEQ ID NO: 1463260 - RNA, 19 nt, Artificial Sequence
  Description of Artificial Sequence: Synthetic oligonucleotide
agauuaugucauagucaaa

SEQ ID NO: 1463261 - RNA, 19 nt, Artificial Sequence
  Description of Artificial Sequence: Synthetic oligonucleotide
ccaagucaccagugauugg

SEQ ID NO: 1463262 - RNA, 19 nt, Artificial Sequence
  Description of Artificial Sequence: Synthetic oligonucleotide
cuaccaaugguuguccaau

SEQ ID NO: 1463263 - RNA, 19 nt, Artificial Sequence
  Description of Artificial Sequence: Synthetic oligonucleotide
ccaauccaagugcaaucac

SEQ ID NO: 1463264 - RNA, 19 nt, Artificial Sequence
  Description of Artificial Sequence: Synthetic oligonucleotide
cacgcuaauauugguacau

SEQ ID NO: 1463265 - RNA, 19 nt, Artificial Sequence
  Description of Artificial Sequence: Synthetic oligonucleotide
agaccagguucgaucucug

SEQ ID NO: 1463266 - RNA, 19 nt, Artificial Sequence
  Description of Artificial Sequence: Synthetic oligonucleotide
gcaggcugaaagauuaugu

SEQ ID NO: 1463267 - RNA, 19 nt, Artificial Sequence
  Description of Artificial Sequence: Synthetic oligonucleotide
acauugugcuccagagaau

SEQ ID NO: 1463268 - RNA, 19 nt, Artificial Sequence
  Description of Artificial Sequence: Synthetic oligonucleotide
gcguguuccuucugagcug

SEQ ID NO: 1463269 - RNA, 19 nt, Artificial Sequence
  Description of Artificial Sequence: Synthetic oligonucleotide
acgcuaauauugguacauu

SEQ ID NO: 1463270 - RNA, 19 nt, Artificial Sequence
  Description of Artificial Sequence: Synthetic oligonucleotide
agcaaagggcagacacuga

SEQ ID NO: 1463271 - RNA, 19 nt, Artificial Sequence
  Description of Artificial Sequence: Synthetic oligonucleotide
ccccaaugcagggacagug

SEQ ID NO: 1463272 - RNA, 19 nt, Artificial Sequence
  Description of Artificial Sequence: Synthetic oligonucleotide
gucacaagaccagaugauu

SEQ ID NO: 1463273 - RNA, 19 nt, Artificial Sequence
  Description of Artificial Sequence: Synthetic oligonucleotide
gagcagggaccaauggugu

SEQ ID NO: 1463274 - RNA, 19 nt, Artificial Sequence
  Description of Artificial Sequence: Synthetic oligonucleotide
caucaccgcacgcuaauau

SEQ ID NO: 1463275 - RNA, 19 nt, Artificial Sequence
  Description of Artificial Sequence: Synthetic oligonucleotide
gucauccuguugaauaaau

SEQ ID NO: 1463276 - RNA, 19 nt, Artificial Sequence
  Description of Artificial Sequence: Synthetic oligonucleotide
gcugaaagauuaugucaua

SEQ ID NO: 1463277 - RNA, 19 nt, Artificial Sequence
  Description of Artificial Sequence: Synthetic oligonucleotide
gcacgcuaauauugguaca

SEQ ID NO: 1463278 - RNA, 19 nt, Artificial Sequence
  Description of Artificial Sequence: Synthetic oligonucleotide
ugaucgcugcguguuccuu

SEQ ID NO: 1463279 - RNA, 19 nt, Artificial Sequence
  Description of Artificial Sequence: Synthetic oligonucleotide
cugaacuucaggccacaau

SEQ ID NO: 1463280 - RNA, 19 nt, Artificial Sequence
  Description of Artificial Sequence: Synthetic oligonucleotide
caagugcaaucacguaucu

SEQ ID NO: 1463281 - RNA, 19 nt, Artificial Sequence
  Description of Artificial Sequence: Synthetic oligonucleotide
caggguccagucauugacu

SEQ ID NO: 1463282 - RNA, 19 nt, Artificial Sequence
  Description of Artificial Sequence: Synthetic oligonucleotide
ucgcugcguguuccuucug

SEQ ID NO: 1463283 - RNA, 19 nt, Artificial Sequence
  Description of Artificial Sequence: Synthetic oligonucleotide
gucaccagugauuggccuu

SEQ ID NO: 1463284 - RNA, 19 nt, Artificial Sequence
  Description of Artificial Sequence: Synthetic oligonucleotide
gcuccagagaaugaucgcu

SEQ ID NO: 1463285 - RNA, 19 nt, Artificial Sequence
  Description of Artificial Sequence: Synthetic oligonucleotide
ggccuuucugugaacagcu

SEQ ID NO: 1463286 - RNA, 19 nt, Artificial Sequence
  Description of Artificial Sequence: Synthetic oligonucleotide
cucccggauagacagcuuu

SEQ ID NO: 1463287 - RNA, 19 nt, Artificial Sequence
  Description of Artificial Sequence: Synthetic oligonucleotide
cauugacuucuugacuggu

SEQ ID NO: 1463288 - RNA, 19 nt, Artificial Sequence
  Description of Artificial Sequence: Synthetic oligonucleotide
cgcuaauauugguacauua

SEQ ID NO: 1463289 - RNA, 19 nt, Artificial Sequence
  Description of Artificial Sequence: Synthetic oligonucleotide
gaguugcacucgccccaga

SEQ ID NO: 1463290 - RNA, 19 nt, Artificial Sequence
  Description of Artificial Sequence: Synthetic oligonucleotide
cacucgccccagacaacca

SEQ ID NO: 1463291 - RNA, 19 nt, Artificial Sequence
  Description of Artificial Sequence: Synthetic oligonucleotide
agucaaaggcaggguuauu

SEQ ID NO: 1463292 - RNA, 19 nt, Artificial Sequence
  Description of Artificial Sequence: Synthetic oligonucleotide
guuccacgaggucaucauu

SEQ ID NO: 1463293 - RNA, 19 nt, Artificial Sequence
  Description of Artificial Sequence: Synthetic oligonucleotide
gagagcgcauugucuucau

SEQ ID NO: 1463294 - RNA, 19 nt, Artificial Sequence
  Description of Artificial Sequence: Synthetic oligonucleotide
ggucgcuaccaaugguugu

SEQ ID NO: 1463295 - RNA, 19 nt, Artificial Sequence
  Description of Artificial Sequence: Synthetic oligonucleotide
gacggcaggcugaaagauu

SEQ ID NO: 1463296 - RNA, 19 nt, Artificial Sequence
  Description of Artificial Sequence: Synthetic oligonucleotide
gcagacagucagaacacau

SEQ ID NO: 1463297 - RNA, 19 nt, Artificial Sequence
  Description of Artificial Sequence: Synthetic oligonucleotide
ggagcaggucucccggaua

SEQ ID NO: 1463298 - RNA, 19 nt, Artificial Sequence
  Description of Artificial Sequence: Synthetic oligonucleotide
gcagggaccaauggugugu

SEQ ID NO: 1463299 - RNA, 19 nt, Artificial Sequence
  Description of Artificial Sequence: Synthetic oligonucleotide
cacaaagaccagguucgau

SEQ ID NO: 1463300 - RNA, 19 nt, Artificial Sequence
  Description of Artificial Sequence: Synthetic oligonucleotide
cguaucucugagcugggcu

SEQ ID NO: 1463301 - RNA, 19 nt, Artificial Sequence
  Description of Artificial Sequence: Synthetic oligonucleotide
gccuugcaagcagaggcaa

SEQ ID NO: 1463302 - RNA, 19 nt, Artificial Sequence
  Description of Artificial Sequence: Synthetic oligonucleotide
gggaggucacauccugccu

SEQ ID NO: 1463303 - RNA, 19 nt, Artificial Sequence
  Description of Artificial Sequence: Synthetic oligonucleotide
cgacuuccagugaagaaau

SEQ ID NO: 1463304 - RNA, 19 nt, Artificial Sequence
  Description of Artificial Sequence: Synthetic oligonucleotide
ggacggcaggcugaaagau

SEQ ID NO: 1463305 - RNA, 19 nt, Artificial Sequence
  Description of Artificial Sequence: Synthetic oligonucleotide
gcucagcaaagggcagaca

SEQ ID NO: 1463306 - RNA, 19 nt, Artificial Sequence
  Description of Artificial Sequence: Synthetic oligonucleotide
cagggaccaaugguguguu

SEQ ID NO: 1463307 - RNA, 19 nt, Artificial Sequence
  Description of Artificial Sequence: Synthetic oligonucleotide
cgcuaccaaugguugucca

SEQ ID NO: 1463308 - RNA, 19 nt, Artificial Sequence
  Description of Artificial Sequence: Synthetic oligonucleotide
ccggauagacagcuuuauu

SEQ ID NO: 1463309 - RNA, 19 nt, Artificial Sequence
  Description of Artificial Sequence: Synthetic oligonucleotide
cgaggucaucauuggaguu

SEQ ID NO: 1463310 - RNA, 19 nt, Artificial Sequence
  Description of Artificial Sequence: Synthetic oligonucleotide
cggcaggcugaaagauuau

SEQ ID NO: 1463311 - RNA, 19 nt, Artificial Sequence
  Description of Artificial Sequence: Synthetic oligonucleotide
aauaaggcaaacccaacuc

SEQ ID NO: 1463312 - RNA, 19 nt, Artificial Sequence
  Description of Artificial Sequence: Synthetic oligonucleotide
aaugaugcaaaagagaagu

SEQ ID NO: 1463313 - RNA, 19 nt, Artificial Sequence
  Description of Artificial Sequence: Synthetic oligonucleotide
uauacauccaucuagcacu

SEQ ID NO: 1463314 - RNA, 19 nt, Artificial Sequence
  Description of Artificial Sequence: Synthetic oligonucleotide
aguaaugacaucuccugcc

SEQ ID NO: 1463315 - RNA, 19 nt, Artificial Sequence
  Description of Artificial Sequence: Synthetic oligonucleotide
gaauggaucagcuuagggg

SEQ ID NO: 1463316 - RNA, 19 nt, Artificial Sequence
  Description of Artificial Sequence: Synthetic oligonucleotide
uuagaguuaggguaaagag

SEQ ID NO: 1463317 - RNA, 19 nt, Artificial Sequence
  Description of Artificial Sequence: Synthetic oligonucleotide
ugaguauguacauauauac

SEQ ID NO: 1463318 - RNA, 19 nt, Artificial Sequence
  Description of Artificial Sequence: Synthetic oligonucleotide
ucaaaugcagccaccauag

SEQ ID NO: 1463319 - RNA, 19 nt, Artificial Sequence
  Description of Artificial Sequence: Synthetic oligonucleotide
aaauagagccacaaagacc

SEQ ID NO: 1463320 - RNA, 19 nt, Artificial Sequence
  Description of Artificial Sequence: Synthetic oligonucleotide
aauccaaugagcaaaauaa

SEQ ID NO: 1463321 - RNA, 19 nt, Artificial Sequence
  Description of Artificial Sequence: Synthetic oligonucleotide
auauacauccaucuagcac

SEQ ID NO: 1463322 - RNA, 19 nt, Artificial Sequence
  Description of Artificial Sequence: Synthetic oligonucleotide
guuggauggaaccagaccc

SEQ ID NO: 1463323 - RNA, 19 nt, Artificial Sequence
  Description of Artificial Sequence: Synthetic oligonucleotide
aguuaggguaaagagaccc

SEQ ID NO: 1463324 - RNA, 19 nt, Artificial Sequence
  Description of Artificial Sequence: Synthetic oligonucleotide
agaaguugaauccaaugag

SEQ ID NO: 1463325 - RNA, 19 nt, Artificial Sequence
  Description of Artificial Sequence: Synthetic oligonucleotide
aaauaaggcaaacccaacu

SEQ ID NO: 1463326 - RNA, 19 nt, Artificial Sequence
  Description of Artificial Sequence: Synthetic oligonucleotide
aguagaaaccaucaucauc

SEQ ID NO: 1463327 - RNA, 19 nt, Artificial Sequence
  Description of Artificial Sequence: Synthetic oligonucleotide
ucaaacaucucccaccaca

SEQ ID NO: 1463328 - RNA, 19 nt, Artificial Sequence
  Description of Artificial Sequence: Synthetic oligonucleotide
aaacacaguaaugacaucu

SEQ ID NO: 1463329 - RNA, 19 nt, Artificial Sequence
  Description of Artificial Sequence: Synthetic oligonucleotide
gaaacaugcaaagagacuc

SEQ ID NO: 1463330 - RNA, 19 nt, Artificial Sequence
  Description of Artificial Sequence: Synthetic oligonucleotide
uugggugacauugagacag

SEQ ID NO: 1463331 - RNA, 19 nt, Artificial Sequence
  Description of Artificial Sequence: Synthetic oligonucleotide
gguucaaucaaacaucucc

SEQ ID NO: 1463332 - RNA, 19 nt, Artificial Sequence
  Description of Artificial Sequence: Synthetic oligonucleotide
aguuggauggaaccagacc

SEQ ID NO: 1463333 - RNA, 19 nt, Artificial Sequence
  Description of Artificial Sequence: Synthetic oligonucleotide
aagagacucgcccagacaa

SEQ ID NO: 1463334 - RNA, 19 nt, Artificial Sequence
  Description of Artificial Sequence: Synthetic oligonucleotide
aaccaucugagucuuuguc

SEQ ID NO: 1463335 - RNA, 19 nt, Artificial Sequence
  Description of Artificial Sequence: Synthetic oligonucleotide
caugcaaagagacucgccc

SEQ ID NO: 1463336 - RNA, 19 nt, Artificial Sequence
  Description of Artificial Sequence: Synthetic oligonucleotide
auaguagaaaccaucauca

SEQ ID NO: 1463337 - RNA, 19 nt, Artificial Sequence
  Description of Artificial Sequence: Synthetic oligonucleotide
cauaguagaaaccaucauc

SEQ ID NO: 1463338 - RNA, 19 nt, Artificial Sequence
  Description of Artificial Sequence: Synthetic oligonucleotide
cugagggauacacagagag

SEQ ID NO: 1463339 - RNA, 19 nt, Artificial Sequence
  Description of Artificial Sequence: Synthetic oligonucleotide
uucaguuccccauaguaga

SEQ ID NO: 1463340 - RNA, 19 nt, Artificial Sequence
  Description of Artificial Sequence: Synthetic oligonucleotide
ucgggaaguuuucaggagg

SEQ ID NO: 1463341 - RNA, 19 nt, Artificial Sequence
  Description of Artificial Sequence: Synthetic oligonucleotide
auccaaaguagacuccagc

SEQ ID NO: 1463342 - RNA, 19 nt, Artificial Sequence
  Description of Artificial Sequence: Synthetic oligonucleotide
uccucuacgcccaaaguug

SEQ ID NO: 1463343 - RNA, 19 nt, Artificial Sequence
  Description of Artificial Sequence: Synthetic oligonucleotide
cauaaaucuguccuuuccc

SEQ ID NO: 1463344 - RNA, 19 nt, Artificial Sequence
  Description of Artificial Sequence: Synthetic oligonucleotide
aacaugcaaagagacucgc

SEQ ID NO: 1463345 - RNA, 19 nt, Artificial Sequence
  Description of Artificial Sequence: Synthetic oligonucleotide
ugaugcaaaagagaaguug

SEQ ID NO: 1463346 - RNA, 19 nt, Artificial Sequence
  Description of Artificial Sequence: Synthetic oligonucleotide
cuugggaugucccagacuc

SEQ ID NO: 1463347 - RNA, 19 nt, Artificial Sequence
  Description of Artificial Sequence: Synthetic oligonucleotide
cauauuuccaaacacagua

SEQ ID NO: 1463348 - RNA, 19 nt, Artificial Sequence
  Description of Artificial Sequence: Synthetic oligonucleotide
uccaaaguagacuccagcu

SEQ ID NO: 1463349 - RNA, 19 nt, Artificial Sequence
  Description of Artificial Sequence: Synthetic oligonucleotide
ucuuucuuagaccggcgag

SEQ ID NO: 1463350 - RNA, 19 nt, Artificial Sequence
  Description of Artificial Sequence: Synthetic oligonucleotide
gaaguugaauccaaugagc

SEQ ID NO: 1463351 - RNA, 19 nt, Artificial Sequence
  Description of Artificial Sequence: Synthetic oligonucleotide
ucauagucaaauagagcca

SEQ ID NO: 1463352 - RNA, 19 nt, Artificial Sequence
  Description of Artificial Sequence: Synthetic oligonucleotide
uggacugaggcacugagua

SEQ ID NO: 1463353 - RNA, 19 nt, Artificial Sequence
  Description of Artificial Sequence: Synthetic oligonucleotide
gguaaagagaccccuaccc

SEQ ID NO: 1463354 - RNA, 19 nt, Artificial Sequence
  Description of Artificial Sequence: Synthetic oligonucleotide
uaaggcaaacccaacuccu

SEQ ID NO: 1463355 - RNA, 19 nt, Artificial Sequence
  Description of Artificial Sequence: Synthetic oligonucleotide
uaaagagaccccuacccac

SEQ ID NO: 1463356 - RNA, 19 nt, Artificial Sequence
  Description of Artificial Sequence: Synthetic oligonucleotide
cugaacaagggcauguaug

SEQ ID NO: 1463357 - RNA, 19 nt, Artificial Sequence
  Description of Artificial Sequence: Synthetic oligonucleotide
gaaccagaccccuuugucc

SEQ ID NO: 1463358 - RNA, 19 nt, Artificial Sequence
  Description of Artificial Sequence: Synthetic oligonucleotide
uguggugaagcagauggag

SEQ ID NO: 1463359 - RNA, 19 nt, Artificial Sequence
  Description of Artificial Sequence: Synthetic oligonucleotide
ugcaaagagacucgcccag

SEQ ID NO: 1463360 - RNA, 19 nt, Artificial Sequence
  Description of Artificial Sequence: Synthetic oligonucleotide
aacacaguaaugacaucuc

SEQ ID NO: 1463361 - RNA, 19 nt, Artificial Sequence
  Description of Artificial Sequence: Synthetic oligonucleotide
aggcaaacccaacuccugc

SEQ ID NO: 1463362 - RNA, 19 nt, Artificial Sequence
  Description of Artificial Sequence: Synthetic oligonucleotide
gguagaaaccaucugaguc

SEQ ID NO: 1463363 - RNA, 19 nt, Artificial Sequence
  Description of Artificial Sequence: Synthetic oligonucleotide
ugggaugacacagaggcca

SEQ ID NO: 1463364 - RNA, 19 nt, Artificial Sequence
  Description of Artificial Sequence: Synthetic oligonucleotide
uauauacauccaucuagca

SEQ ID NO: 1463365 - RNA, 19 nt, Artificial Sequence
  Description of Artificial Sequence: Synthetic oligonucleotide
ucuuugucuccgaacaccu

SEQ ID NO: 1463366 - RNA, 19 nt, Artificial Sequence
  Description of Artificial Sequence: Synthetic oligonucleotide
caaugagcaaaauaaggca

SEQ ID NO: 1463367 - RNA, 19 nt, Artificial Sequence
  Description of Artificial Sequence: Synthetic oligonucleotide
gagucuuugucuccgaaca

SEQ ID NO: 1463368 - RNA, 19 nt, Artificial Sequence
  Description of Artificial Sequence: Synthetic oligonucleotide
uguccgguccccuagacuc

SEQ ID NO: 1463369 - RNA, 19 nt, Artificial Sequence
  Description of Artificial Sequence: Synthetic oligonucleotide
aggggauguagccugugcg

SEQ ID NO: 1463370 - RNA, 19 nt, Artificial Sequence
  Description of Artificial Sequence: Synthetic oligonucleotide
aggagcuggacugaggcac

SEQ ID NO: 1463371 - RNA, 19 nt, Artificial Sequence
  Description of Artificial Sequence: Synthetic oligonucleotide
aguagacuccagcuggguc

SEQ ID NO: 1463372 - RNA, 19 nt, Artificial Sequence
  Description of Artificial Sequence: Synthetic oligonucleotide
uugagacagggucauaguc

SEQ ID NO: 1463373 - RNA, 19 nt, Artificial Sequence
  Description of Artificial Sequence: Synthetic oligonucleotide
caaagacccucacagguag

SEQ ID NO: 1463374 - RNA, 19 nt, Artificial Sequence
  Description of Artificial Sequence: Synthetic oligonucleotide
agcacuauggggcgggguc

SEQ ID NO: 1463375 - RNA, 19 nt, Artificial Sequence
  Description of Artificial Sequence: Synthetic oligonucleotide
cauccauauuuccaaacac

SEQ ID NO: 1463376 - RNA, 19 nt, Artificial Sequence
  Description of Artificial Sequence: Synthetic oligonucleotide
cauugagacagggucauag

SEQ ID NO: 1463377 - RNA, 19 nt, Artificial Sequence
  Description of Artificial Sequence: Synthetic oligonucleotide
uccauucaguuccccauag

SEQ ID NO: 1463378 - RNA, 19 nt, Artificial Sequence
  Description of Artificial Sequence: Synthetic oligonucleotide
guaaugacaucuccugccc

SEQ ID NO: 1463379 - RNA, 19 nt, Artificial Sequence
  Description of Artificial Sequence: Synthetic oligonucleotide
gaaaccaucaucauccaua

SEQ ID NO: 1463380 - RNA, 19 nt, Artificial Sequence
  Description of Artificial Sequence: Synthetic oligonucleotide
ccuuuguccauucaguucc

SEQ ID NO: 1463381 - RNA, 19 nt, Artificial Sequence
  Description of Artificial Sequence: Synthetic oligonucleotide
uuggauggaaccagacccc

SEQ ID NO: 1463382 - RNA, 19 nt, Artificial Sequence
  Description of Artificial Sequence: Synthetic oligonucleotide
ugcuggacuguccacggcc

SEQ ID NO: 1463383 - RNA, 19 nt, Artificial Sequence
  Description of Artificial Sequence: Synthetic oligonucleotide
aggucgggaaguuuucagg

SEQ ID NO: 1463384 - RNA, 19 nt, Artificial Sequence
  Description of Artificial Sequence: Synthetic oligonucleotide
acuggaagaaaaugaugca

SEQ ID NO: 1463385 - RNA, 19 nt, Artificial Sequence
  Description of Artificial Sequence: Synthetic oligonucleotide
cuuucaccccgguagaaac

SEQ ID NO: 1463386 - RNA, 19 nt, Artificial Sequence
  Description of Artificial Sequence: Synthetic oligonucleotide
cauagucaaauagagccac

SEQ ID NO: 1463387 - RNA, 19 nt, Artificial Sequence
  Description of Artificial Sequence: Synthetic oligonucleotide
aaaguagacuccagcuggg

SEQ ID NO: 1463388 - RNA, 19 nt, Artificial Sequence
  Description of Artificial Sequence: Synthetic oligonucleotide
gacucgcccagacaagagg

SEQ ID NO: 1463389 - RNA, 19 nt, Artificial Sequence
  Description of Artificial Sequence: Synthetic oligonucleotide
accaucugagucuuugucu

SEQ ID NO: 1463390 - RNA, 19 nt, Artificial Sequence
  Description of Artificial Sequence: Synthetic oligonucleotide
guugaauccaaugagcaaa

SEQ ID NO: 1463391 - RNA, 19 nt, Artificial Sequence
  Description of Artificial Sequence: Synthetic oligonucleotide
ccagcucuuucuuagaccg

SEQ ID NO: 1463392 - RNA, 19 nt, Artificial Sequence
  Description of Artificial Sequence: Synthetic oligonucleotide
ucuacgcccaaaguugucc

SEQ ID NO: 1463393 - RNA, 19 nt, Artificial Sequence
  Description of Artificial Sequence: Synthetic oligonucleotide
aguuucuacugcccgggag

SEQ ID NO: 1463394 - RNA, 19 nt, Artificial Sequence
  Description of Artificial Sequence: Synthetic oligonucleotide
aaguuggauggaaccagac

SEQ ID NO: 1463395 - RNA, 19 nt, Artificial Sequence
  Description of Artificial Sequence: Synthetic oligonucleotide
gacugaggcacugaguaug

SEQ ID NO: 1463396 - RNA, 19 nt, Artificial Sequence
  Description of Artificial Sequence: Synthetic oligonucleotide
uugaauccaaugagcaaaa

SEQ ID NO: 1463397 - RNA, 19 nt, Artificial Sequence
  Description of Artificial Sequence: Synthetic oligonucleotide
uucccucagccccugaccc

SEQ ID NO: 1463398 - RNA, 19 nt, Artificial Sequence
  Description of Artificial Sequence: Synthetic oligonucleotide
aagggcauguaugaaaaua

SEQ ID NO: 1463399 - RNA, 19 nt, Artificial Sequence
  Description of Artificial Sequence: Synthetic oligonucleotide
guagacuccagcuggguca

SEQ ID NO: 1463400 - RNA, 19 nt, Artificial Sequence
  Description of Artificial Sequence: Synthetic oligonucleotide
uguaugaaaauagcugcau

SEQ ID NO: 1463401 - RNA, 19 nt, Artificial Sequence
  Description of Artificial Sequence: Synthetic oligonucleotide
uuucccucagccccugacc

SEQ ID NO: 1463402 - RNA, 19 nt, Artificial Sequence
  Description of Artificial Sequence: Synthetic oligonucleotide
ugacucucagcuugggaug

SEQ ID NO: 1463403 - RNA, 19 nt, Artificial Sequence
  Description of Artificial Sequence: Synthetic oligonucleotide
ucccuggagaccaggguag

SEQ ID NO: 1463404 - RNA, 19 nt, Artificial Sequence
  Description of Artificial Sequence: Synthetic oligonucleotide
cugacuuguguggugaagc

SEQ ID NO: 1463405 - RNA, 19 nt, Artificial Sequence
  Description of Artificial Sequence: Synthetic oligonucleotide
guuagaguuaggguaaaga

SEQ ID NO: 1463406 - RNA, 19 nt, Artificial Sequence
  Description of Artificial Sequence: Synthetic oligonucleotide
guagaaaccaucugagucu

SEQ ID NO: 1463407 - RNA, 19 nt, Artificial Sequence
  Description of Artificial Sequence: Synthetic oligonucleotide
auccaucuagcacuggacu

SEQ ID NO: 1463408 - RNA, 19 nt, Artificial Sequence
  Description of Artificial Sequence: Synthetic oligonucleotide
gggaauccaaaguagacuc

SEQ ID NO: 1463409 - RNA, 19 nt, Artificial Sequence
  Description of Artificial Sequence: Synthetic oligonucleotide
uuucaccccgguagaaacc

SEQ ID NO: 1463410 - RNA, 19 nt, Artificial Sequence
  Description of Artificial Sequence: Synthetic oligonucleotide
uaggucgggaaguuuucag

SEQ ID NO: 1463411 - RNA, 19 nt, Artificial Sequence
  Description of Artificial Sequence: Synthetic oligonucleotide
uuucuacugcccgggaggg

SEQ ID NO: 1463412 - RNA, 19 nt, Artificial Sequence
  Description of Artificial Sequence: Synthetic oligonucleotide
cagacucuaggccaccugc

SEQ ID NO: 1463413 - RNA, 19 nt, Artificial Sequence
  Description of Artificial Sequence: Synthetic oligonucleotide
ucuacugcccgggagggug

SEQ ID NO: 1463414 - RNA, 19 nt, Artificial Sequence
  Description of Artificial Sequence: Synthetic oligonucleotide
ucugaacaagggcauguau

SEQ ID NO: 1463415 - RNA, 19 nt, Artificial Sequence
  Description of Artificial Sequence: Synthetic oligonucleotide
uugcaggggauguagccug

SEQ ID NO: 1463416 - RNA, 19 nt, Artificial Sequence
  Description of Artificial Sequence: Synthetic oligonucleotide
caguaaugacaucuccugc

SEQ ID NO: 1463417 - RNA, 19 nt, Artificial Sequence
  Description of Artificial Sequence: Synthetic oligonucleotide
cuacgcccaaaguuguccg

SEQ ID NO: 1463418 - RNA, 19 nt, Artificial Sequence
  Description of Artificial Sequence: Synthetic oligonucleotide
cauguugcaggggauguag

SEQ ID NO: 1463419 - RNA, 19 nt, Artificial Sequence
  Description of Artificial Sequence: Synthetic oligonucleotide
ugcaaaagagaaguugaau

SEQ ID NO: 1463420 - RNA, 19 nt, Artificial Sequence
  Description of Artificial Sequence: Synthetic oligonucleotide
ugacuuguguggugaagca

SEQ ID NO: 1463421 - RNA, 19 nt, Artificial Sequence
  Description of Artificial Sequence: Synthetic oligonucleotide
aguugaauccaaugagcaa

SEQ ID NO: 1463422 - RNA, 19 nt, Artificial Sequence
  Description of Artificial Sequence: Synthetic oligonucleotide
uccaucuagcacuggacuc

SEQ ID NO: 1463423 - RNA, 19 nt, Artificial Sequence
  Description of Artificial Sequence: Synthetic oligonucleotide
auugagacagggucauagu

SEQ ID NO: 1463424 - RNA, 19 nt, Artificial Sequence
  Description of Artificial Sequence: Synthetic oligonucleotide
guaaagagaccccuaccca

SEQ ID NO: 1463425 - RNA, 19 nt, Artificial Sequence
  Description of Artificial Sequence: Synthetic oligonucleotide
gacccucacagguagguuc

SEQ ID NO: 1463426 - RNA, 19 nt, Artificial Sequence
  Description of Artificial Sequence: Synthetic oligonucleotide
uaugggcugagggauacac

SEQ ID NO: 1463427 - RNA, 19 nt, Artificial Sequence
  Description of Artificial Sequence: Synthetic oligonucleotide
uuggauccgcagcuggcag

SEQ ID NO: 1463428 - RNA, 19 nt, Artificial Sequence
  Description of Artificial Sequence: Synthetic oligonucleotide
aauccaaaguagacuccag

SEQ ID NO: 1463429 - RNA, 19 nt, Artificial Sequence
  Description of Artificial Sequence: Synthetic oligonucleotide
cauccaucuagcacuggac

SEQ ID NO: 1463430 - RNA, 19 nt, Artificial Sequence
  Description of Artificial Sequence: Synthetic oligonucleotide
agaccggcgaggcuugggg

SEQ ID NO: 1463431 - RNA, 19 nt, Artificial Sequence
  Description of Artificial Sequence: Synthetic oligonucleotide
agggaauccaaaguagacu

SEQ ID NO: 1463432 - RNA, 19 nt, Artificial Sequence
  Description of Artificial Sequence: Synthetic oligonucleotide
auccaaugagcaaaauaag

SEQ ID NO: 1463433 - RNA, 19 nt, Artificial Sequence
  Description of Artificial Sequence: Synthetic oligonucleotide
gucuccgaacaccuugagg

SEQ ID NO: 1463434 - RNA, 19 nt, Artificial Sequence
  Description of Artificial Sequence: Synthetic oligonucleotide
ucucagcuugggauguccc

SEQ ID NO: 1463435 - RNA, 19 nt, Artificial Sequence
  Description of Artificial Sequence: Synthetic oligonucleotide
gucuuugucuccgaacacc

SEQ ID NO: 1463436 - RNA, 19 nt, Artificial Sequence
  Description of Artificial Sequence: Synthetic oligonucleotide
ggugguagcaggccuaggc

SEQ ID NO: 1463437 - RNA, 19 nt, Artificial Sequence
  Description of Artificial Sequence: Synthetic oligonucleotide
aggguugggugacauugag

SEQ ID NO: 1463438 - RNA, 19 nt, Artificial Sequence
  Description of Artificial Sequence: Synthetic oligonucleotide
ccuuguuggggccagcucg

SEQ ID NO: 1463439 - RNA, 19 nt, Artificial Sequence
  Description of Artificial Sequence: Synthetic oligonucleotide
augggaugguuagaguuag

SEQ ID NO: 1463440 - RNA, 19 nt, Artificial Sequence
  Description of Artificial Sequence: Synthetic oligonucleotide
gaggguggcuccuuggauc

SEQ ID NO: 1463441 - RNA, 19 nt, Artificial Sequence
  Description of Artificial Sequence: Synthetic oligonucleotide
aucccacaucccuggagac

SEQ ID NO: 1463442 - RNA, 19 nt, Artificial Sequence
  Description of Artificial Sequence: Synthetic oligonucleotide
ugugcggccuccacuuuca

SEQ ID NO: 1463443 - RNA, 19 nt, Artificial Sequence
  Description of Artificial Sequence: Synthetic oligonucleotide
cauucaguuccccauagua

SEQ ID NO: 1463444 - RNA, 19 nt, Artificial Sequence
  Description of Artificial Sequence: Synthetic oligonucleotide
ggcagaauggaucagcuua

SEQ ID NO: 1463445 - RNA, 19 nt, Artificial Sequence
  Description of Artificial Sequence: Synthetic oligonucleotide
agcaucaggguugggugac

SEQ ID NO: 1463446 - RNA, 19 nt, Artificial Sequence
  Description of Artificial Sequence: Synthetic oligonucleotide
gacuuguguggugaagcag

SEQ ID NO: 1463447 - RNA, 19 nt, Artificial Sequence
  Description of Artificial Sequence: Synthetic oligonucleotide
gacuccccaguuucuacug

SEQ ID NO: 1463448 - RNA, 19 nt, Artificial Sequence
  Description of Artificial Sequence: Synthetic oligonucleotide
aucaaacaucucccaccac

SEQ ID NO: 1463449 - RNA, 19 nt, Artificial Sequence
  Description of Artificial Sequence: Synthetic oligonucleotide
ggaugucccagacucuagg

SEQ ID NO: 1463450 - RNA, 19 nt, Artificial Sequence
  Description of Artificial Sequence: Synthetic oligonucleotide
aaaguuguccgguccccua

SEQ ID NO: 1463451 - RNA, 19 nt, Artificial Sequence
  Description of Artificial Sequence: Synthetic oligonucleotide
uggaaccagaccccuuugu

SEQ ID NO: 1463452 - RNA, 19 nt, Artificial Sequence
  Description of Artificial Sequence: Synthetic oligonucleotide
cuccccaguuucuacugcc

SEQ ID NO: 1463453 - RNA, 19 nt, Artificial Sequence
  Description of Artificial Sequence: Synthetic oligonucleotide
gguucuggugagcuggugc

SEQ ID NO: 1463454 - RNA, 19 nt, Artificial Sequence
  Description of Artificial Sequence: Synthetic oligonucleotide
uagagggcuccuuguuggg

SEQ ID NO: 1463455 - RNA, 19 nt, Artificial Sequence
  Description of Artificial Sequence: Synthetic oligonucleotide
ggggauguagccugugcgg

SEQ ID NO: 1463456 - RNA, 19 nt, Artificial Sequence
  Description of Artificial Sequence: Synthetic oligonucleotide
auguaugaaaauagcugca

SEQ ID NO: 1463457 - RNA, 19 nt, Artificial Sequence
  Description of Artificial Sequence: Synthetic oligonucleotide
ugucuccgaacaccuugag

SEQ ID NO: 1463458 - RNA, 19 nt, Artificial Sequence
  Description of Artificial Sequence: Synthetic oligonucleotide
aggaaguuggauggaacca

SEQ ID NO: 1463459 - RNA, 19 nt, Artificial Sequence
  Description of Artificial Sequence: Synthetic oligonucleotide
ggaaguuggauggaaccag

SEQ ID NO: 1463460 - RNA, 19 nt, Artificial Sequence
  Description of Artificial Sequence: Synthetic oligonucleotide
gggcaagaaaccccgcugg

SEQ ID NO: 1463461 - RNA, 19 nt, Artificial Sequence
  Description of Artificial Sequence: Synthetic oligonucleotide
agacuccccaguuucuacu

SEQ ID NO: 1463462 - RNA, 19 nt, Artificial Sequence
  Description of Artificial Sequence: Synthetic oligonucleotide
uaguagaaaccaucaucau

SEQ ID NO: 1463463 - RNA, 19 nt, Artificial Sequence
  Description of Artificial Sequence: Synthetic oligonucleotide
aaagacccucacagguagg

SEQ ID NO: 1463464 - RNA, 19 nt, Artificial Sequence
  Description of Artificial Sequence: Synthetic oligonucleotide
ucguucucugacucucagc

SEQ ID NO: 1463465 - RNA, 19 nt, Artificial Sequence
  Description of Artificial Sequence: Synthetic oligonucleotide
cauaggucgggaaguuuuc

SEQ ID NO: 1463466 - RNA, 19 nt, Artificial Sequence
  Description of Artificial Sequence: Synthetic oligonucleotide
uauggggcggggucaggcc

SEQ ID NO: 1463467 - RNA, 19 nt, Artificial Sequence
  Description of Artificial Sequence: Synthetic oligonucleotide
gguuguagucaaaugcagc

SEQ ID NO: 1463468 - RNA, 19 nt, Artificial Sequence
  Description of Artificial Sequence: Synthetic oligonucleotide
aagagaaguugaauccaau

SEQ ID NO: 1463469 - RNA, 19 nt, Artificial Sequence
  Description of Artificial Sequence: Synthetic oligonucleotide
agcucggugguagcaggcc

SEQ ID NO: 1463470 - RNA, 19 nt, Artificial Sequence
  Description of Artificial Sequence: Synthetic oligonucleotide
cacaaagacccucacaggu

SEQ ID NO: 1463471 - RNA, 19 nt, Artificial Sequence
  Description of Artificial Sequence: Synthetic oligonucleotide
agaaaccaucaucauccau

SEQ ID NO: 1463472 - RNA, 19 nt, Artificial Sequence
  Description of Artificial Sequence: Synthetic oligonucleotide
cuguccacggccaccucag

SEQ ID NO: 1463473 - RNA, 19 nt, Artificial Sequence
  Description of Artificial Sequence: Synthetic oligonucleotide
uggccuuucuccuccccug

SEQ ID NO: 1463474 - RNA, 19 nt, Artificial Sequence
  Description of Artificial Sequence: Synthetic oligonucleotide
cuuagaccggcgaggcuug

SEQ ID NO: 1463475 - RNA, 19 nt, Artificial Sequence
  Description of Artificial Sequence: Synthetic oligonucleotide
caagaggugaaggauggga

SEQ ID NO: 1463476 - RNA, 19 nt, Artificial Sequence
  Description of Artificial Sequence: Synthetic oligonucleotide
gaugggaugguuagaguua

SEQ ID NO: 1463477 - RNA, 19 nt, Artificial Sequence
  Description of Artificial Sequence: Synthetic oligonucleotide
cuagcacuggacucuucuc

SEQ ID NO: 1463478 - RNA, 19 nt, Artificial Sequence
  Description of Artificial Sequence: Synthetic oligonucleotide
cucguucucugacucucag

SEQ ID NO: 1463479 - RNA, 19 nt, Artificial Sequence
  Description of Artificial Sequence: Synthetic oligonucleotide
gccaccauaggucgggaag

SEQ ID NO: 1463480 - RNA, 19 nt, Artificial Sequence
  Description of Artificial Sequence: Synthetic oligonucleotide
cuuucccucagccccugac

SEQ ID NO: 1463481 - RNA, 19 nt, Artificial Sequence
  Description of Artificial Sequence: Synthetic oligonucleotide
ccgguagaaaccaucugag

SEQ ID NO: 1463482 - RNA, 19 nt, Artificial Sequence
  Description of Artificial Sequence: Synthetic oligonucleotide
uuguccgguccccuagacu

SEQ ID NO: 1463483 - RNA, 19 nt, Artificial Sequence
  Description of Artificial Sequence: Synthetic oligonucleotide
agagccacaaagacccuca

SEQ ID NO: 1463484 - RNA, 19 nt, Artificial Sequence
  Description of Artificial Sequence: Synthetic oligonucleotide
gcuucuagagggcuccuug

SEQ ID NO: 1463485 - RNA, 19 nt, Artificial Sequence
  Description of Artificial Sequence: Synthetic oligonucleotide
ggucgggaaguuuucagga

SEQ ID NO: 1463486 - RNA, 19 nt, Artificial Sequence
  Description of Artificial Sequence: Synthetic oligonucleotide
cacaguaaugacaucuccu

SEQ ID NO: 1463487 - RNA, 19 nt, Artificial Sequence
  Description of Artificial Sequence: Synthetic oligonucleotide
guagucaaaugcagccacc

SEQ ID NO: 1463488 - RNA, 19 nt, Artificial Sequence
  Description of Artificial Sequence: Synthetic oligonucleotide
ucgcccagacaagagguga

SEQ ID NO: 1463489 - RNA, 19 nt, Artificial Sequence
  Description of Artificial Sequence: Synthetic oligonucleotide
ugggccuuccagcucuuuc

SEQ ID NO: 1463490 - RNA, 19 nt, Artificial Sequence
  Description of Artificial Sequence: Synthetic oligonucleotide
aaguagacuccagcugggu

SEQ ID NO: 1463491 - RNA, 19 nt, Artificial Sequence
  Description of Artificial Sequence: Synthetic oligonucleotide
uagaaaccaucugagucuu

SEQ ID NO: 1463492 - RNA, 19 nt, Artificial Sequence
  Description of Artificial Sequence: Synthetic oligonucleotide
gugguagcaggccuaggca

SEQ ID NO: 1463493 - RNA, 19 nt, Artificial Sequence
  Description of Artificial Sequence: Synthetic oligonucleotide
cagaauggaucagcuuagg

SEQ ID NO: 1463494 - RNA, 19 nt, Artificial Sequence
  Description of Artificial Sequence: Synthetic oligonucleotide
uccucguucucugacucuc

SEQ ID NO: 1463495 - RNA, 19 nt, Artificial Sequence
  Description of Artificial Sequence: Synthetic oligonucleotide
uccccauaguagaaaccau

SEQ ID NO: 1463496 - RNA, 19 nt, Artificial Sequence
  Description of Artificial Sequence: Synthetic oligonucleotide
aacccaacuccugcuuucu

SEQ ID NO: 1463497 - RNA, 19 nt, Artificial Sequence
  Description of Artificial Sequence: Synthetic oligonucleotide
ggaaguuuucaggagggca

SEQ ID NO: 1463498 - RNA, 19 nt, Artificial Sequence
  Description of Artificial Sequence: Synthetic oligonucleotide
acucgcccagacaagaggu

SEQ ID NO: 1463499 - RNA, 19 nt, Artificial Sequence
  Description of Artificial Sequence: Synthetic oligonucleotide
aggaugggaugguuagagu

SEQ ID NO: 1463500 - RNA, 19 nt, Artificial Sequence
  Description of Artificial Sequence: Synthetic oligonucleotide
uccgaacaccuugaggauc

SEQ ID NO: 1463501 - RNA, 19 nt, Artificial Sequence
  Description of Artificial Sequence: Synthetic oligonucleotide
gagacucgcccagacaaga

SEQ ID NO: 1463502 - RNA, 19 nt, Artificial Sequence
  Description of Artificial Sequence: Synthetic oligonucleotide
guuccccauaguagaaacc

SEQ ID NO: 1463503 - RNA, 19 nt, Artificial Sequence
  Description of Artificial Sequence: Synthetic oligonucleotide
uugggaugucccagacucu

SEQ ID NO: 1463504 - RNA, 19 nt, Artificial Sequence
  Description of Artificial Sequence: Synthetic oligonucleotide
auacauccaucuagcacug

SEQ ID NO: 1463505 - RNA, 19 nt, Artificial Sequence
  Description of Artificial Sequence: Synthetic oligonucleotide
ggguaaagagaccccuacc

SEQ ID NO: 1463506 - RNA, 19 nt, Artificial Sequence
  Description of Artificial Sequence: Synthetic oligonucleotide
ggugcuucuagagggcucc

SEQ ID NO: 1463507 - RNA, 19 nt, Artificial Sequence
  Description of Artificial Sequence: Synthetic oligonucleotide
gcagaauggaucagcuuag

SEQ ID NO: 1463508 - RNA, 19 nt, Artificial Sequence
  Description of Artificial Sequence: Synthetic oligonucleotide
gaguuaggguaaagagacc

SEQ ID NO: 1463509 - RNA, 19 nt, Artificial Sequence
  Description of Artificial Sequence: Synthetic oligonucleotide
cucucagcuugggaugucc

SEQ ID NO: 1463510 - RNA, 19 nt, Artificial Sequence
  Description of Artificial Sequence: Synthetic oligonucleotide
uccccuagacuccccaguu

SEQ ID NO: 1463511 - RNA, 19 nt, Artificial Sequence
  Description of Artificial Sequence: Synthetic oligonucleotide
ggaaccagaccccuuuguc

SEQ ID NO: 1463512 - RNA, 19 nt, Artificial Sequence
  Description of Artificial Sequence: Synthetic oligonucleotide
ggguuguagucaaaugcag

SEQ ID NO: 1463513 - RNA, 19 nt, Artificial Sequence
  Description of Artificial Sequence: Synthetic oligonucleotide
uggacuguccacggccacc

SEQ ID NO: 1463514 - RNA, 19 nt, Artificial Sequence
  Description of Artificial Sequence: Synthetic oligonucleotide
auaggucgggaaguuuuca

SEQ ID NO: 1463515 - RNA, 19 nt, Artificial Sequence
  Description of Artificial Sequence: Synthetic oligonucleotide
cucuuucuuagaccggcga

SEQ ID NO: 1463516 - RNA, 19 nt, Artificial Sequence
  Description of Artificial Sequence: Synthetic oligonucleotide
uguugucucccugcuggac

SEQ ID NO: 1463517 - RNA, 19 nt, Artificial Sequence
  Description of Artificial Sequence: Synthetic oligonucleotide
cagcucuuucuuagaccgg

SEQ ID NO: 1463518 - RNA, 19 nt, Artificial Sequence
  Description of Artificial Sequence: Synthetic oligonucleotide
aguuguccgguccccuaga

SEQ ID NO: 1463519 - RNA, 19 nt, Artificial Sequence
  Description of Artificial Sequence: Synthetic oligonucleotide
gggguuguagucaaaugca

SEQ ID NO: 1463520 - RNA, 19 nt, Artificial Sequence
  Description of Artificial Sequence: Synthetic oligonucleotide
ggagggguggagcacuaug

SEQ ID NO: 1463521 - RNA, 19 nt, Artificial Sequence
  Description of Artificial Sequence: Synthetic oligonucleotide
caggccuaggcacccgggc

SEQ ID NO: 1463522 - RNA, 19 nt, Artificial Sequence
  Description of Artificial Sequence: Synthetic oligonucleotide
ggguccucuacgcccaaag

SEQ ID NO: 1463523 - RNA, 19 nt, Artificial Sequence
  Description of Artificial Sequence: Synthetic oligonucleotide
agggcagaauggaucagcu

SEQ ID NO: 1463524 - RNA, 19 nt, Artificial Sequence
  Description of Artificial Sequence: Synthetic oligonucleotide
gggcauguaugaaaauagc

SEQ ID NO: 1463525 - RNA, 19 nt, Artificial Sequence
  Description of Artificial Sequence: Synthetic oligonucleotide
acuuucaccccgguagaaa

SEQ ID NO: 1463526 - RNA, 19 nt, Artificial Sequence
  Description of Artificial Sequence: Synthetic oligonucleotide
guugucucccugcuggacu

SEQ ID NO: 1463527 - RNA, 19 nt, Artificial Sequence
  Description of Artificial Sequence: Synthetic oligonucleotide
ggauguagccugugcggcc

SEQ ID NO: 1463528 - RNA, 19 nt, Artificial Sequence
  Description of Artificial Sequence: Synthetic oligonucleotide
uagaccggcgaggcuuggg

SEQ ID NO: 1463529 - RNA, 19 nt, Artificial Sequence
  Description of Artificial Sequence: Synthetic oligonucleotide
auagucaaauagagccaca

SEQ ID NO: 1463530 - RNA, 19 nt, Artificial Sequence
  Description of Artificial Sequence: Synthetic oligonucleotide
agagacucgcccagacaag

SEQ ID NO: 1463531 - RNA, 19 nt, Artificial Sequence
  Description of Artificial Sequence: Synthetic oligonucleotide
gguagguucuggugagcug

SEQ ID NO: 1463532 - RNA, 19 nt, Artificial Sequence
  Description of Artificial Sequence: Synthetic oligonucleotide
accccuuuguccauucagu

SEQ ID NO: 1463533 - RNA, 19 nt, Artificial Sequence
  Description of Artificial Sequence: Synthetic oligonucleotide
cucgcccagacaagaggug

SEQ ID NO: 1463534 - RNA, 19 nt, Artificial Sequence
  Description of Artificial Sequence: Synthetic oligonucleotide
guuguccgguccccuagac

SEQ ID NO: 1463535 - RNA, 19 nt, Artificial Sequence
  Description of Artificial Sequence: Synthetic oligonucleotide
cccaguuucuacugcccgg

SEQ ID NO: 1463536 - RNA, 19 nt, Artificial Sequence
  Description of Artificial Sequence: Synthetic oligonucleotide
cucugggguccucuacgcc

SEQ ID NO: 1463537 - RNA, 19 nt, Artificial Sequence
  Description of Artificial Sequence: Synthetic oligonucleotide
uccccugacuuguguggug

SEQ ID NO: 1463538 - RNA, 19 nt, Artificial Sequence
  Description of Artificial Sequence: Synthetic oligonucleotide
gaaggaugggaugguuaga

SEQ ID NO: 1463539 - RNA, 19 nt, Artificial Sequence
  Description of Artificial Sequence: Synthetic oligonucleotide
gcaagaaaccccgcuggag

SEQ ID NO: 1463540 - RNA, 19 nt, Artificial Sequence
  Description of Artificial Sequence: Synthetic oligonucleotide
ucaggcccgcuuuggcaug

SEQ ID NO: 1463541 - RNA, 19 nt, Artificial Sequence
  Description of Artificial Sequence: Synthetic oligonucleotide
ccccauaguagaaaccauc

SEQ ID NO: 1463542 - RNA, 19 nt, Artificial Sequence
  Description of Artificial Sequence: Synthetic oligonucleotide
caccccgguagaaaccauc

SEQ ID NO: 1463543 - RNA, 19 nt, Artificial Sequence
  Description of Artificial Sequence: Synthetic oligonucleotide
ggcauguaugaaaauagcu

SEQ ID NO: 1463544 - RNA, 19 nt, Artificial Sequence
  Description of Artificial Sequence: Synthetic oligonucleotide
ccuccccugacuugugugg

SEQ ID NO: 1463545 - RNA, 19 nt, Artificial Sequence
  Description of Artificial Sequence: Synthetic oligonucleotide
cccaccacagcaaaggaaa

SEQ ID NO: 1463546 - RNA, 19 nt, Artificial Sequence
  Description of Artificial Sequence: Synthetic oligonucleotide
cuuuggcauggccuuucuc

SEQ ID NO: 1463547 - RNA, 19 nt, Artificial Sequence
  Description of Artificial Sequence: Synthetic oligonucleotide
caccauguugcaggggaug

SEQ ID NO: 1463548 - RNA, 19 nt, Artificial Sequence
  Description of Artificial Sequence: Synthetic oligonucleotide
ugacaucuccugcccugaa

SEQ ID NO: 1463549 - RNA, 19 nt, Artificial Sequence
  Description of Artificial Sequence: Synthetic oligonucleotide
accccgguagaaaccaucu

SEQ ID NO: 1463550 - RNA, 19 nt, Artificial Sequence
  Description of Artificial Sequence: Synthetic oligonucleotide
gggauguagccugugcggc

SEQ ID NO: 1463551 - RNA, 19 nt, Artificial Sequence
  Description of Artificial Sequence: Synthetic oligonucleotide
cccgguagaaaccaucuga

SEQ ID NO: 1463552 - RNA, 19 nt, Artificial Sequence
  Description of Artificial Sequence: Synthetic oligonucleotide
gacauugagacagggucau

SEQ ID NO: 1463553 - RNA, 19 nt, Artificial Sequence
  Description of Artificial Sequence: Synthetic oligonucleotide
cuuggauccgcagcuggca

SEQ ID NO: 1463554 - RNA, 19 nt, Artificial Sequence
  Description of Artificial Sequence: Synthetic oligonucleotide
ggaugggaugguuagaguu

SEQ ID NO: 1463555 - RNA, 19 nt, Artificial Sequence
  Description of Artificial Sequence: Synthetic oligonucleotide
agacucgcccagacaagag

SEQ ID NO: 1463556 - RNA, 19 nt, Artificial Sequence
  Description of Artificial Sequence: Synthetic oligonucleotide
gguuagaguuaggguaaag

SEQ ID NO: 1463557 - RNA, 19 nt, Artificial Sequence
  Description of Artificial Sequence: Synthetic oligonucleotide
uuagaccggcgaggcuugg

SEQ ID NO: 1463558 - RNA, 19 nt, Artificial Sequence
  Description of Artificial Sequence: Synthetic oligonucleotide
gacucuaggccaccugccu

SEQ ID NO: 1463559 - RNA, 19 nt, Artificial Sequence
  Description of Artificial Sequence: Synthetic oligonucleotide
uggcuccuuggauccgcag

SEQ ID NO: 1463560 - RNA, 19 nt, Artificial Sequence
  Description of Artificial Sequence: Synthetic oligonucleotide
ccuccacauccauauuggg

SEQ ID NO: 1463561 - RNA, 19 nt, Artificial Sequence
  Description of Artificial Sequence: Synthetic oligonucleotide
cugugcggccuccacuuuc

SEQ ID NO: 1463562 - RNA, 19 nt, Artificial Sequence
  Description of Artificial Sequence: Synthetic oligonucleotide
guccucuacgcccaaaguu

SEQ ID NO: 1463563 - RNA, 19 nt, Artificial Sequence
  Description of Artificial Sequence: Synthetic oligonucleotide
gcacugaguauguacauau

SEQ ID NO: 1463564 - RNA, 19 nt, Artificial Sequence
  Description of Artificial Sequence: Synthetic oligonucleotide
auguagccugugcggccuc

SEQ ID NO: 1463565 - RNA, 19 nt, Artificial Sequence
  Description of Artificial Sequence: Synthetic oligonucleotide
cucuacgcccaaaguuguc

SEQ ID NO: 1463566 - RNA, 19 nt, Artificial Sequence
  Description of Artificial Sequence: Synthetic oligonucleotide
cccuagacuccccaguuuc

SEQ ID NO: 1463567 - RNA, 19 nt, Artificial Sequence
  Description of Artificial Sequence: Synthetic oligonucleotide
gaccccuacccacucugaa

SEQ ID NO: 1463568 - RNA, 19 nt, Artificial Sequence
  Description of Artificial Sequence: Synthetic oligonucleotide
acgcccaaaguuguccggu

SEQ ID NO: 1463569 - RNA, 19 nt, Artificial Sequence
  Description of Artificial Sequence: Synthetic oligonucleotide
gauguagccugugcggccu

SEQ ID NO: 1463570 - RNA, 19 nt, Artificial Sequence
  Description of Artificial Sequence: Synthetic oligonucleotide
agaccccuuuguccauuca

SEQ ID NO: 1463571 - RNA, 19 nt, Artificial Sequence
  Description of Artificial Sequence: Synthetic oligonucleotide
cuccucugggguccucuac

SEQ ID NO: 1463572 - RNA, 19 nt, Artificial Sequence
  Description of Artificial Sequence: Synthetic oligonucleotide
cagaccccuuuguccauuc

SEQ ID NO: 1463573 - RNA, 19 nt, Artificial Sequence
  Description of Artificial Sequence: Synthetic oligonucleotide
guugcaggggauguagccu

SEQ ID NO: 1463574 - RNA, 19 nt, Artificial Sequence
  Description of Artificial Sequence: Synthetic oligonucleotide
cuucuagagggcuccuugu

SEQ ID NO: 1463575 - RNA, 19 nt, Artificial Sequence
  Description of Artificial Sequence: Synthetic oligonucleotide
cacuauggggcggggucag

SEQ ID NO: 1463576 - RNA, 19 nt, Artificial Sequence
  Description of Artificial Sequence: Synthetic oligonucleotide
guggagcacuauggggcgg

SEQ ID NO: 1463577 - RNA, 19 nt, Artificial Sequence
  Description of Artificial Sequence: Synthetic oligonucleotide
guccauucaguuccccaua

SEQ ID NO: 1463578 - RNA, 19 nt, Artificial Sequence
  Description of Artificial Sequence: Synthetic oligonucleotide
acucucagcuugggauguc

SEQ ID NO: 1463579 - RNA, 19 nt, Artificial Sequence
  Description of Artificial Sequence: Synthetic oligonucleotide
caggguugggugacauuga

SEQ ID NO: 1463580 - RNA, 19 nt, Artificial Sequence
  Description of Artificial Sequence: Synthetic oligonucleotide
cagacaagaggugaaggau

SEQ ID NO: 1463581 - RNA, 19 nt, Artificial Sequence
  Description of Artificial Sequence: Synthetic oligonucleotide
ccccuacccacucugaaca

SEQ ID NO: 1463582 - RNA, 19 nt, Artificial Sequence
  Description of Artificial Sequence: Synthetic oligonucleotide
ggcaagaaaccccgcugga

SEQ ID NO: 1463583 - RNA, 19 nt, Artificial Sequence
  Description of Artificial Sequence: Synthetic oligonucleotide
ucccugcuggacuguccac

SEQ ID NO: 1463584 - RNA, 19 nt, Artificial Sequence
  Description of Artificial Sequence: Synthetic oligonucleotide
caucucccaccacagcaaa

SEQ ID NO: 1463585 - RNA, 19 nt, Artificial Sequence
  Description of Artificial Sequence: Synthetic oligonucleotide
ccaucccacaucccuggag

SEQ ID NO: 1463586 - RNA, 19 nt, Artificial Sequence
  Description of Artificial Sequence: Synthetic oligonucleotide
cccugcuggacuguccacg

SEQ ID NO: 1463587 - RNA, 19 nt, Artificial Sequence
  Description of Artificial Sequence: Synthetic oligonucleotide
gggguucaaucaaacaucu

SEQ ID NO: 1463588 - RNA, 19 nt, Artificial Sequence
  Description of Artificial Sequence: Synthetic oligonucleotide
cagcuugggaugucccaga

SEQ ID NO: 1463589 - RNA, 19 nt, Artificial Sequence
  Description of Artificial Sequence: Synthetic oligonucleotide
cuagacuccccaguuucua

SEQ ID NO: 1463590 - RNA, 19 nt, Artificial Sequence
  Description of Artificial Sequence: Synthetic oligonucleotide
uucuacugcccgggagggu

SEQ ID NO: 1463591 - RNA, 19 nt, Artificial Sequence
  Description of Artificial Sequence: Synthetic oligonucleotide
cuuguguggugaagcagau

SEQ ID NO: 1463592 - RNA, 19 nt, Artificial Sequence
  Description of Artificial Sequence: Synthetic oligonucleotide
caggcccgcuuuggcaugg

SEQ ID NO: 1463593 - RNA, 19 nt, Artificial Sequence
  Description of Artificial Sequence: Synthetic oligonucleotide
uucuggugagcuggugcuu

SEQ ID NO: 1463594 - RNA, 19 nt, Artificial Sequence
  Description of Artificial Sequence: Synthetic oligonucleotide
ugcuucuagagggcuccuu

SEQ ID NO: 1463595 - RNA, 19 nt, Artificial Sequence
  Description of Artificial Sequence: Synthetic oligonucleotide
ggcaaacccaacuccugcu

SEQ ID NO: 1463596 - RNA, 19 nt, Artificial Sequence
  Description of Artificial Sequence: Synthetic oligonucleotide
cucggugguagcaggccua

SEQ ID NO: 1463597 - RNA, 19 nt, Artificial Sequence
  Description of Artificial Sequence: Synthetic oligonucleotide
gggaugucccagacucuag

SEQ ID NO: 1463598 - RNA, 19 nt, Artificial Sequence
  Description of Artificial Sequence: Synthetic oligonucleotide
gcccagacaagaggugaag

SEQ ID NO: 1463599 - RNA, 19 nt, Artificial Sequence
  Description of Artificial Sequence: Synthetic oligonucleotide
cuggacugaggcacugagu

SEQ ID NO: 1463600 - RNA, 19 nt, Artificial Sequence
  Description of Artificial Sequence: Synthetic oligonucleotide
caaacccaacuccugcuuu

SEQ ID NO: 1463601 - RNA, 19 nt, Artificial Sequence
  Description of Artificial Sequence: Synthetic oligonucleotide
agacccucacagguagguu

SEQ ID NO: 1463602 - RNA, 19 nt, Artificial Sequence
  Description of Artificial Sequence: Synthetic oligonucleotide
cccugaccccaacagggac

SEQ ID NO: 1463603 - RNA, 19 nt, Artificial Sequence
  Description of Artificial Sequence: Synthetic oligonucleotide
caguuucuacugcccggga

SEQ ID NO: 1463604 - RNA, 19 nt, Artificial Sequence
  Description of Artificial Sequence: Synthetic oligonucleotide
agaccccuacccacucuga

SEQ ID NO: 1463605 - RNA, 19 nt, Artificial Sequence
  Description of Artificial Sequence: Synthetic oligonucleotide
cucagccccugaccccaac

SEQ ID NO: 1463606 - RNA, 19 nt, Artificial Sequence
  Description of Artificial Sequence: Synthetic oligonucleotide
caucccuggagaccagggu

SEQ ID NO: 1463607 - RNA, 19 nt, Artificial Sequence
  Description of Artificial Sequence: Synthetic oligonucleotide
aggcccgcuuuggcauggc

SEQ ID NO: 1463608 - RNA, 19 nt, Artificial Sequence
  Description of Artificial Sequence: Synthetic oligonucleotide
ggcacugaguauguacaua

SEQ ID NO: 1463609 - RNA, 19 nt, Artificial Sequence
  Description of Artificial Sequence: Synthetic oligonucleotide
ggguugggugacauugaga

SEQ ID NO: 1463610 - RNA, 19 nt, Artificial Sequence
  Description of Artificial Sequence: Synthetic oligonucleotide
ggagcacuauggggcgggg

SEQ ID NO: 1463611 - RNA, 19 nt, Artificial Sequence
  Description of Artificial Sequence: Synthetic oligonucleotide
ggacucuucuccuccucgu

SEQ ID NO: 1463612 - RNA, 19 nt, Artificial Sequence
  Description of Artificial Sequence: Synthetic oligonucleotide
ggccuuucuccuccccuga

SEQ ID NO: 1463613 - RNA, 19 nt, Artificial Sequence
  Description of Artificial Sequence: Synthetic oligonucleotide
gcaggccuaggcacccggg

SEQ ID NO: 1463614 - RNA, 19 nt, Artificial Sequence
  Description of Artificial Sequence: Synthetic oligonucleotide
gcaaagagacucgcccaga

SEQ ID NO: 1463615 - RNA, 19 nt, Artificial Sequence
  Description of Artificial Sequence: Synthetic oligonucleotide
cuccgaacaccuugaggau

SEQ ID NO: 1463616 - RNA, 19 nt, Artificial Sequence
  Description of Artificial Sequence: Synthetic oligonucleotide
caaaguuguccgguccccu

SEQ ID NO: 1463617 - RNA, 19 nt, Artificial Sequence
  Description of Artificial Sequence: Synthetic oligonucleotide
acauugagacagggucaua

SEQ ID NO: 1463618 - RNA, 19 nt, Artificial Sequence
  Description of Artificial Sequence: Synthetic oligonucleotide
guucucugacucucagcuu

SEQ ID NO: 1463619 - RNA, 19 nt, Artificial Sequence
  Description of Artificial Sequence: Synthetic oligonucleotide
gguccucuacgcccaaagu

SEQ ID NO: 1463620 - RNA, 19 nt, Artificial Sequence
  Description of Artificial Sequence: Synthetic oligonucleotide
ggguucaaucaaacaucuc

SEQ ID NO: 1463621 - RNA, 19 nt, Artificial Sequence
  Description of Artificial Sequence: Synthetic oligonucleotide
cuccacuuucaccccggua

SEQ ID NO: 1463622 - RNA, 19 nt, Artificial Sequence
  Description of Artificial Sequence: Synthetic oligonucleotide
cacuuucaccccgguagaa

SEQ ID NO: 1463623 - RNA, 19 nt, Artificial Sequence
  Description of Artificial Sequence: Synthetic oligonucleotide
cuaggcacccgggccccuc

SEQ ID NO: 1463624 - RNA, 19 nt, Artificial Sequence
  Description of Artificial Sequence: Synthetic oligonucleotide
gcugugggccuuccagcuc

SEQ ID NO: 1463625 - RNA, 19 nt, Artificial Sequence
  Description of Artificial Sequence: Synthetic oligonucleotide
gcacuauggggcgggguca

SEQ ID NO: 1463626 - RNA, 19 nt, Artificial Sequence
  Description of Artificial Sequence: Synthetic oligonucleotide
cacccgggccccucuccuc

SEQ ID NO: 1463627 - RNA, 19 nt, Artificial Sequence
  Description of Artificial Sequence: Synthetic oligonucleotide
cuuugucuccgaacaccuu

SEQ ID NO: 1463628 - RNA, 19 nt, Artificial Sequence
  Description of Artificial Sequence: Synthetic oligonucleotide
cuccucguucucugacucu

SEQ ID NO: 1463629 - RNA, 19 nt, Artificial Sequence
  Description of Artificial Sequence: Synthetic oligonucleotide
cacagaggccagguggccu

SEQ ID NO: 1463630 - RNA, 19 nt, Artificial Sequence
  Description of Artificial Sequence: Synthetic oligonucleotide
gagcacuauggggcggggu

SEQ ID NO: 1463631 - RNA, 19 nt, Artificial Sequence
  Description of Artificial Sequence: Synthetic oligonucleotide
gcuugggaugucccagacu

SEQ ID NO: 1463632 - RNA, 19 nt, Artificial Sequence
  Description of Artificial Sequence: Synthetic oligonucleotide
ggacugaggcacugaguau

SEQ ID NO: 1463633 - RNA, 19 nt, Artificial Sequence
  Description of Artificial Sequence: Synthetic oligonucleotide
ccugaccccaacagggacu

SEQ ID NO: 1463634 - RNA, 19 nt, Artificial Sequence
  Description of Artificial Sequence: Synthetic oligonucleotide
cagggagggguggagcacu

SEQ ID NO: 1463635 - RNA, 19 nt, Artificial Sequence
  Description of Artificial Sequence: Synthetic oligonucleotide
ggguggcuccuuggauccg

SEQ ID NO: 1463636 - RNA, 19 nt, Artificial Sequence
  Description of Artificial Sequence: Synthetic oligonucleotide
ccucuacgcccaaaguugu

SEQ ID NO: 1463637 - RNA, 19 nt, Artificial Sequence
  Description of Artificial Sequence: Synthetic oligonucleotide
caucaggguugggugacau

SEQ ID NO: 1463638 - RNA, 19 nt, Artificial Sequence
  Description of Artificial Sequence: Synthetic oligonucleotide
gcccugaagggcagcucug

SEQ ID NO: 1463639 - RNA, 19 nt, Artificial Sequence
  Description of Artificial Sequence: Synthetic oligonucleotide
cuccccugacuuguguggu

SEQ ID NO: 1463640 - RNA, 19 nt, Artificial Sequence
  Description of Artificial Sequence: Synthetic oligonucleotide
gccugugcggccuccacuu

SEQ ID NO: 1463641 - RNA, 19 nt, Artificial Sequence
  Description of Artificial Sequence: Synthetic oligonucleotide
ccuagacuccccaguuucu

SEQ ID NO: 1463642 - RNA, 19 nt, Artificial Sequence
  Description of Artificial Sequence: Synthetic oligonucleotide
cuccuccccugacuugugu

SEQ ID NO: 1463643 - RNA, 19 nt, Artificial Sequence
  Description of Artificial Sequence: Synthetic oligonucleotide
ccccugaccccaacaggga

SEQ ID NO: 1463644 - RNA, 19 nt, Artificial Sequence
  Description of Artificial Sequence: Synthetic oligonucleotide
ccaccauaggucgggaagu

SEQ ID NO: 1463645 - RNA, 19 nt, Artificial Sequence
  Description of Artificial Sequence: Synthetic oligonucleotide
gcccagucauaugggcuga

SEQ ID NO: 1463646 - RNA, 19 nt, Artificial Sequence
  Description of Artificial Sequence: Synthetic oligonucleotide
caucuagcacuggacucuu

SEQ ID NO: 1463647 - RNA, 19 nt, Artificial Sequence
  Description of Artificial Sequence: Synthetic oligonucleotide
gcccgcuuuggcauggccu

SEQ ID NO: 1463648 - RNA, 19 nt, Artificial Sequence
  Description of Artificial Sequence: Synthetic oligonucleotide
ccugguccccuggguuugg

SEQ ID NO: 1463649 - RNA, 19 nt, Artificial Sequence
  Description of Artificial Sequence: Synthetic oligonucleotide
gggcagaauggaucagcuu

SEQ ID NO: 1463650 - RNA, 19 nt, Artificial Sequence
  Description of Artificial Sequence: Synthetic oligonucleotide
uggggccagcucgguggua

SEQ ID NO: 1463651 - RNA, 19 nt, Artificial Sequence
  Description of Artificial Sequence: Synthetic oligonucleotide
cccuacccacucugaacaa

SEQ ID NO: 1463652 - RNA, 19 nt, Artificial Sequence
  Description of Artificial Sequence: Synthetic oligonucleotide
cgcccagacaagaggugaa

SEQ ID NO: 1463653 - RNA, 19 nt, Artificial Sequence
  Description of Artificial Sequence: Synthetic oligonucleotide
gugcuucuagagggcuccu

SEQ ID NO: 1463654 - RNA, 19 nt, Artificial Sequence
  Description of Artificial Sequence: Synthetic oligonucleotide
cgguccccuagacucccca

SEQ ID NO: 1463655 - RNA, 19 nt, Artificial Sequence
  Description of Artificial Sequence: Synthetic oligonucleotide
gggguccucuacgcccaaa

SEQ ID NO: 1463656 - RNA, 19 nt, Artificial Sequence
  Description of Artificial Sequence: Synthetic oligonucleotide
ccuccacuuucaccccggu

SEQ ID NO: 1463657 - RNA, 19 nt, Artificial Sequence
  Description of Artificial Sequence: Synthetic oligonucleotide
ccccuagacuccccaguuu

SEQ ID NO: 1463658 - RNA, 19 nt, Artificial Sequence
  Description of Artificial Sequence: Synthetic oligonucleotide
ccagaccccuuuguccauu

SEQ ID NO: 1463659 - RNA, 19 nt, Artificial Sequence
  Description of Artificial Sequence: Synthetic oligonucleotide
cagggcccuccaggaaguu

SEQ ID NO: 1463660 - RNA, 19 nt, Artificial Sequence
  Description of Artificial Sequence: Synthetic oligonucleotide
ccugugcggccuccacuuu

SEQ ID NO: 1463661 - RNA, 19 nt, Artificial Sequence
  Description of Artificial Sequence: Synthetic oligonucleotide
gggcggggucaggcccgcu

SEQ ID NO: 1463662 - RNA, 19 nt, Artificial Sequence
  Description of Artificial Sequence: Synthetic oligonucleotide
aauguauugucauaucccc

SEQ ID NO: 1463663 - RNA, 19 nt, Artificial Sequence
  Description of Artificial Sequence: Synthetic oligonucleotide
auagaugggaucuuguccc

SEQ ID NO: 1463664 - RNA, 19 nt, Artificial Sequence
  Description of Artificial Sequence: Synthetic oligonucleotide
ucauaacuuaauuuuaucc

SEQ ID NO: 1463665 - RNA, 19 nt, Artificial Sequence
  Description of Artificial Sequence: Synthetic oligonucleotide
uacaagaaaucccuuauag

SEQ ID NO: 1463666 - RNA, 19 nt, Artificial Sequence
  Description of Artificial Sequence: Synthetic oligonucleotide
gacauagacgccuauagag

SEQ ID NO: 1463667 - RNA, 19 nt, Artificial Sequence
  Description of Artificial Sequence: Synthetic oligonucleotide
uuuauccugacauauagaa

SEQ ID NO: 1463668 - RNA, 19 nt, Artificial Sequence
  Description of Artificial Sequence: Synthetic oligonucleotide
aaucccauaccuauguagc

SEQ ID NO: 1463669 - RNA, 19 nt, Artificial Sequence
  Description of Artificial Sequence: Synthetic oligonucleotide
auacaaaucugccccagcc

SEQ ID NO: 1463670 - RNA, 19 nt, Artificial Sequence
  Description of Artificial Sequence: Synthetic oligonucleotide
guaccugauucauagaugg

SEQ ID NO: 1463671 - RNA, 19 nt, Artificial Sequence
  Description of Artificial Sequence: Synthetic oligonucleotide
uguagcccaacuuuaaucc

SEQ ID NO: 1463672 - RNA, 19 nt, Artificial Sequence
  Description of Artificial Sequence: Synthetic oligonucleotide
auaacuuaauuuuauccug

SEQ ID NO: 1463673 - RNA, 19 nt, Artificial Sequence
  Description of Artificial Sequence: Synthetic oligonucleotide
aacuuaauuuuauccugac

SEQ ID NO: 1463674 - RNA, 19 nt, Artificial Sequence
  Description of Artificial Sequence: Synthetic oligonucleotide
uuauaggucagcaucagau

SEQ ID NO: 1463675 - RNA, 19 nt, Artificial Sequence
  Description of Artificial Sequence: Synthetic oligonucleotide
acauguaccugauucauag

SEQ ID NO: 1463676 - RNA, 19 nt, Artificial Sequence
  Description of Artificial Sequence: Synthetic oligonucleotide
aaccugaguagcuagggag

SEQ ID NO: 1463677 - RNA, 19 nt, Artificial Sequence
  Description of Artificial Sequence: Synthetic oligonucleotide
aggggagcauccuaaaacc

SEQ ID NO: 1463678 - RNA, 19 nt, Artificial Sequence
  Description of Artificial Sequence: Synthetic oligonucleotide
uuuaaucccuguuagugca

SEQ ID NO: 1463679 - RNA, 19 nt, Artificial Sequence
  Description of Artificial Sequence: Synthetic oligonucleotide
acaagaaaucccuuauagg

SEQ ID NO: 1463680 - RNA, 19 nt, Artificial Sequence
  Description of Artificial Sequence: Synthetic oligonucleotide
uggacauagacgccuauag

SEQ ID NO: 1463681 - RNA, 19 nt, Artificial Sequence
  Description of Artificial Sequence: Synthetic oligonucleotide
aaccuuagaaugcuggaca

SEQ ID NO: 1463682 - RNA, 19 nt, Artificial Sequence
  Description of Artificial Sequence: Synthetic oligonucleotide
agaaagugggcucuggaag

SEQ ID NO: 1463683 - RNA, 19 nt, Artificial Sequence
  Description of Artificial Sequence: Synthetic oligonucleotide
guuguauacguccacucgg

SEQ ID NO: 1463684 - RNA, 19 nt, Artificial Sequence
  Description of Artificial Sequence: Synthetic oligonucleotide
aaaccuuagaaugcuggac

SEQ ID NO: 1463685 - RNA, 19 nt, Artificial Sequence
  Description of Artificial Sequence: Synthetic oligonucleotide
ugauguggaaaccugagua

SEQ ID NO: 1463686 - RNA, 19 nt, Artificial Sequence
  Description of Artificial Sequence: Synthetic oligonucleotide
uccuaaaaccuuagaaugc

SEQ ID NO: 1463687 - RNA, 19 nt, Artificial Sequence
  Description of Artificial Sequence: Synthetic oligonucleotide
agaaaucccuuauagguca

SEQ ID NO: 1463688 - RNA, 19 nt, Artificial Sequence
  Description of Artificial Sequence: Synthetic oligonucleotide
aagaaaucccuuauagguc

SEQ ID NO: 1463689 - RNA, 19 nt, Artificial Sequence
  Description of Artificial Sequence: Synthetic oligonucleotide
cauagaugggaucuugucc

SEQ ID NO: 1463690 - RNA, 19 nt, Artificial Sequence
  Description of Artificial Sequence: Synthetic oligonucleotide
aauauacaaaucugcccca

SEQ ID NO: 1463691 - RNA, 19 nt, Artificial Sequence
  Description of Artificial Sequence: Synthetic oligonucleotide
uuauccugacauauagaag

SEQ ID NO: 1463692 - RNA, 19 nt, Artificial Sequence
  Description of Artificial Sequence: Synthetic oligonucleotide
gagacauaaagcuugccuc

SEQ ID NO: 1463693 - RNA, 19 nt, Artificial Sequence
  Description of Artificial Sequence: Synthetic oligonucleotide
ugccgugccagaaaguggg

SEQ ID NO: 1463694 - RNA, 19 nt, Artificial Sequence
  Description of Artificial Sequence: Synthetic oligonucleotide
cacacacacacacacacgg

SEQ ID NO: 1463695 - RNA, 19 nt, Artificial Sequence
  Description of Artificial Sequence: Synthetic oligonucleotide
accgugaccaacucgucgc

SEQ ID NO: 1463696 - RNA, 19 nt, Artificial Sequence
  Description of Artificial Sequence: Synthetic oligonucleotide
uauacguccacucggcaga

SEQ ID NO: 1463697 - RNA, 19 nt, Artificial Sequence
  Description of Artificial Sequence: Synthetic oligonucleotide
ucccauucauucuuugugg

SEQ ID NO: 1463698 - RNA, 19 nt, Artificial Sequence
  Description of Artificial Sequence: Synthetic oligonucleotide
auguagcccaacuuuaauc

SEQ ID NO: 1463699 - RNA, 19 nt, Artificial Sequence
  Description of Artificial Sequence: Synthetic oligonucleotide
ugugggguuguauacgucc

SEQ ID NO: 1463700 - RNA, 19 nt, Artificial Sequence
  Description of Artificial Sequence: Synthetic oligonucleotide
uagcacacgauacuguagc

SEQ ID NO: 1463701 - RNA, 19 nt, Artificial Sequence
  Description of Artificial Sequence: Synthetic oligonucleotide
accuucauuaauaagucuc

SEQ ID NO: 1463702 - RNA, 19 nt, Artificial Sequence
  Description of Artificial Sequence: Synthetic oligonucleotide
ugauucauagaugggaucu

SEQ ID NO: 1463703 - RNA, 19 nt, Artificial Sequence
  Description of Artificial Sequence: Synthetic oligonucleotide
ggugcaaaggccaaggugg

SEQ ID NO: 1463704 - RNA, 19 nt, Artificial Sequence
  Description of Artificial Sequence: Synthetic oligonucleotide
agugcagacgugucaagcg

SEQ ID NO: 1463705 - RNA, 19 nt, Artificial Sequence
  Description of Artificial Sequence: Synthetic oligonucleotide
ucccugacgaaguacauga

SEQ ID NO: 1463706 - RNA, 19 nt, Artificial Sequence
  Description of Artificial Sequence: Synthetic oligonucleotide
uguaccugauucauagaug

SEQ ID NO: 1463707 - RNA, 19 nt, Artificial Sequence
  Description of Artificial Sequence: Synthetic oligonucleotide
gaugucauaaauacaagaa

SEQ ID NO: 1463708 - RNA, 19 nt, Artificial Sequence
  Description of Artificial Sequence: Synthetic oligonucleotide
ugaccauaggucagcaucc

SEQ ID NO: 1463709 - RNA, 19 nt, Artificial Sequence
  Description of Artificial Sequence: Synthetic oligonucleotide
uguggcaugaacuggcgga

SEQ ID NO: 1463710 - RNA, 19 nt, Artificial Sequence
  Description of Artificial Sequence: Synthetic oligonucleotide
ucucauaacuuaauuuuau

SEQ ID NO: 1463711 - RNA, 19 nt, Artificial Sequence
  Description of Artificial Sequence: Synthetic oligonucleotide
agauaccaggcacagaacu

SEQ ID NO: 1463712 - RNA, 19 nt, Artificial Sequence
  Description of Artificial Sequence: Synthetic oligonucleotide
ugaggauuguagcagucga

SEQ ID NO: 1463713 - RNA, 19 nt, Artificial Sequence
  Description of Artificial Sequence: Synthetic oligonucleotide
aucccauaccuauguagcc

SEQ ID NO: 1463714 - RNA, 19 nt, Artificial Sequence
  Description of Artificial Sequence: Synthetic oligonucleotide
ugaccuucauuaauaaguc

SEQ ID NO: 1463715 - RNA, 19 nt, Artificial Sequence
  Description of Artificial Sequence: Synthetic oligonucleotide
caggaucucggcuaggccg

SEQ ID NO: 1463716 - RNA, 19 nt, Artificial Sequence
  Description of Artificial Sequence: Synthetic oligonucleotide
cauuaauaagucucugaug

SEQ ID NO: 1463717 - RNA, 19 nt, Artificial Sequence
  Description of Artificial Sequence: Synthetic oligonucleotide
gggguugcaacccagagcc

SEQ ID NO: 1463718 - RNA, 19 nt, Artificial Sequence
  Description of Artificial Sequence: Synthetic oligonucleotide
caaucccauaccuauguag

SEQ ID NO: 1463719 - RNA, 19 nt, Artificial Sequence
  Description of Artificial Sequence: Synthetic oligonucleotide
aagcggugggguugcaacc

SEQ ID NO: 1463720 - RNA, 19 nt, Artificial Sequence
  Description of Artificial Sequence: Synthetic oligonucleotide
acgccuauagaguagacaa

SEQ ID NO: 1463721 - RNA, 19 nt, Artificial Sequence
  Description of Artificial Sequence: Synthetic oligonucleotide
auguggaaaccugaguagc

SEQ ID NO: 1463722 - RNA, 19 nt, Artificial Sequence
  Description of Artificial Sequence: Synthetic oligonucleotide
gaaaccugaguagcuaggg

SEQ ID NO: 1463723 - RNA, 19 nt, Artificial Sequence
  Description of Artificial Sequence: Synthetic oligonucleotide
auaugccuccaccacgucg

SEQ ID NO: 1463724 - RNA, 19 nt, Artificial Sequence
  Description of Artificial Sequence: Synthetic oligonucleotide
uuguauacguccacucggc

SEQ ID NO: 1463725 - RNA, 19 nt, Artificial Sequence
  Description of Artificial Sequence: Synthetic oligonucleotide
cacacacacacacacacac

SEQ ID NO: 1463726 - RNA, 19 nt, Artificial Sequence
  Description of Artificial Sequence: Synthetic oligonucleotide
ugacgaaguacaugagucc

SEQ ID NO: 1463727 - RNA, 19 nt, Artificial Sequence
  Description of Artificial Sequence: Synthetic oligonucleotide
auguaccugauucauagau

SEQ ID NO: 1463728 - RNA, 19 nt, Artificial Sequence
  Description of Artificial Sequence: Synthetic oligonucleotide
uuacaugugacagggacaa

SEQ ID NO: 1463729 - RNA, 19 nt, Artificial Sequence
  Description of Artificial Sequence: Synthetic oligonucleotide
uguuagugcagacguguca

SEQ ID NO: 1463730 - RNA, 19 nt, Artificial Sequence
  Description of Artificial Sequence: Synthetic oligonucleotide
uggaaaccugaguagcuag

SEQ ID NO: 1463731 - RNA, 19 nt, Artificial Sequence
  Description of Artificial Sequence: Synthetic oligonucleotide
ucccuguuagugcagacgu

SEQ ID NO: 1463732 - RNA, 19 nt, Artificial Sequence
  Description of Artificial Sequence: Synthetic oligonucleotide
gucauaugccuccaccacg

SEQ ID NO: 1463733 - RNA, 19 nt, Artificial Sequence
  Description of Artificial Sequence: Synthetic oligonucleotide
uacaaaucugccccagcca

SEQ ID NO: 1463734 - RNA, 19 nt, Artificial Sequence
  Description of Artificial Sequence: Synthetic oligonucleotide
gugaccauaggucagcauc

SEQ ID NO: 1463735 - RNA, 19 nt, Artificial Sequence
  Description of Artificial Sequence: Synthetic oligonucleotide
aaaucccuuauaggucagc

SEQ ID NO: 1463736 - RNA, 19 nt, Artificial Sequence
  Description of Artificial Sequence: Synthetic oligonucleotide
acuuaauuuuauccugaca

SEQ ID NO: 1463737 - RNA, 19 nt, Artificial Sequence
  Description of Artificial Sequence: Synthetic oligonucleotide
cucgucgcaguccuggucg

SEQ ID NO: 1463738 - RNA, 19 nt, Artificial Sequence
  Description of Artificial Sequence: Synthetic oligonucleotide
aaaccugaguagcuaggga

SEQ ID NO: 1463739 - RNA, 19 nt, Artificial Sequence
  Description of Artificial Sequence: Synthetic oligonucleotide
guauacguccacucggcag

SEQ ID NO: 1463740 - RNA, 19 nt, Artificial Sequence
  Description of Artificial Sequence: Synthetic oligonucleotide
agacgugucaagcgguggg

SEQ ID NO: 1463741 - RNA, 19 nt, Artificial Sequence
  Description of Artificial Sequence: Synthetic oligonucleotide
cucauaacuuaauuuuauc

SEQ ID NO: 1463742 - RNA, 19 nt, Artificial Sequence
  Description of Artificial Sequence: Synthetic oligonucleotide
aaucccuuauaggucagca

SEQ ID NO: 1463743 - RNA, 19 nt, Artificial Sequence
  Description of Artificial Sequence: Synthetic oligonucleotide
agaaugcuggacauagacg

SEQ ID NO: 1463744 - RNA, 19 nt, Artificial Sequence
  Description of Artificial Sequence: Synthetic oligonucleotide
ucauagaugggaucuuguc

SEQ ID NO: 1463745 - RNA, 19 nt, Artificial Sequence
  Description of Artificial Sequence: Synthetic oligonucleotide
acguccacucggcagaguc

SEQ ID NO: 1463746 - RNA, 19 nt, Artificial Sequence
  Description of Artificial Sequence: Synthetic oligonucleotide
gaccgugaccaacucgucg

SEQ ID NO: 1463747 - RNA, 19 nt, Artificial Sequence
  Description of Artificial Sequence: Synthetic oligonucleotide
ucugcgcgcacccagcgca

SEQ ID NO: 1463748 - RNA, 19 nt, Artificial Sequence
  Description of Artificial Sequence: Synthetic oligonucleotide
agcgccagcugguaggccg

SEQ ID NO: 1463749 - RNA, 19 nt, Artificial Sequence
  Description of Artificial Sequence: Synthetic oligonucleotide
uaccugauucauagauggg

SEQ ID NO: 1463750 - RNA, 19 nt, Artificial Sequence
  Description of Artificial Sequence: Synthetic oligonucleotide
agugcuggucaccuaagga

SEQ ID NO: 1463751 - RNA, 19 nt, Artificial Sequence
  Description of Artificial Sequence: Synthetic oligonucleotide
guacaugaguccauucagg

SEQ ID NO: 1463752 - RNA, 19 nt, Artificial Sequence
  Description of Artificial Sequence: Synthetic oligonucleotide
accuauguagcccaacuuu

SEQ ID NO: 1463753 - RNA, 19 nt, Artificial Sequence
  Description of Artificial Sequence: Synthetic oligonucleotide
ugggugauguggaaaccug

SEQ ID NO: 1463754 - RNA, 19 nt, Artificial Sequence
  Description of Artificial Sequence: Synthetic oligonucleotide
ugaguagcuagggagcaca

SEQ ID NO: 1463755 - RNA, 19 nt, Artificial Sequence
  Description of Artificial Sequence: Synthetic oligonucleotide
acgucggagaguucaaaug

SEQ ID NO: 1463756 - RNA, 19 nt, Artificial Sequence
  Description of Artificial Sequence: Synthetic oligonucleotide
ggauuguagcagucgaccg

SEQ ID NO: 1463757 - RNA, 19 nt, Artificial Sequence
  Description of Artificial Sequence: Synthetic oligonucleotide
uguauacguccacucggca

SEQ ID NO: 1463758 - RNA, 19 nt, Artificial Sequence
  Description of Artificial Sequence: Synthetic oligonucleotide
caaaaguuaggggagcauc

SEQ ID NO: 1463759 - RNA, 19 nt, Artificial Sequence
  Description of Artificial Sequence: Synthetic oligonucleotide
uucaaaaguuaggggagca

SEQ ID NO: 1463760 - RNA, 19 nt, Artificial Sequence
  Description of Artificial Sequence: Synthetic oligonucleotide
aauaagucucugaugucau

SEQ ID NO: 1463761 - RNA, 19 nt, Artificial Sequence
  Description of Artificial Sequence: Synthetic oligonucleotide
caugucgucacugccacug

SEQ ID NO: 1463762 - RNA, 19 nt, Artificial Sequence
  Description of Artificial Sequence: Synthetic oligonucleotide
gugcagacgugucaagcgg

SEQ ID NO: 1463763 - RNA, 19 nt, Artificial Sequence
  Description of Artificial Sequence: Synthetic oligonucleotide
guagcagucgaccgugacc

SEQ ID NO: 1463764 - RNA, 19 nt, Artificial Sequence
  Description of Artificial Sequence: Synthetic oligonucleotide
ucggagaguucaaauguau

SEQ ID NO: 1463765 - RNA, 19 nt, Artificial Sequence
  Description of Artificial Sequence: Synthetic oligonucleotide
cugucccacacacacacac

SEQ ID NO: 1463766 - RNA, 19 nt, Artificial Sequence
  Description of Artificial Sequence: Synthetic oligonucleotide
uuagaaugcuggacauaga

SEQ ID NO: 1463767 - RNA, 19 nt, Artificial Sequence
  Description of Artificial Sequence: Synthetic oligonucleotide
uuaggggagcauccuaaaa

SEQ ID NO: 1463768 - RNA, 19 nt, Artificial Sequence
  Description of Artificial Sequence: Synthetic oligonucleotide
gaagucgcgggccucucgc

SEQ ID NO: 1463769 - RNA, 19 nt, Artificial Sequence
  Description of Artificial Sequence: Synthetic oligonucleotide
ugucccauucauucuuugu

SEQ ID NO: 1463770 - RNA, 19 nt, Artificial Sequence
  Description of Artificial Sequence: Synthetic oligonucleotide
aaggugaccuucauuaaua

SEQ ID NO: 1463771 - RNA, 19 nt, Artificial Sequence
  Description of Artificial Sequence: Synthetic oligonucleotide
aucucggcuaggccggugg

SEQ ID NO: 1463772 - RNA, 19 nt, Artificial Sequence
  Description of Artificial Sequence: Synthetic oligonucleotide
auauacaaaucugccccag

SEQ ID NO: 1463773 - RNA, 19 nt, Artificial Sequence
  Description of Artificial Sequence: Synthetic oligonucleotide
cccagagacauaaagcuug

SEQ ID NO: 1463774 - RNA, 19 nt, Artificial Sequence
  Description of Artificial Sequence: Synthetic oligonucleotide
cugaggauuguagcagucg

SEQ ID NO: 1463775 - RNA, 19 nt, Artificial Sequence
  Description of Artificial Sequence: Synthetic oligonucleotide
caagcggugggguugcaac

SEQ ID NO: 1463776 - RNA, 19 nt, Artificial Sequence
  Description of Artificial Sequence: Synthetic oligonucleotide
cucccagugggugaugugg

SEQ ID NO: 1463777 - RNA, 19 nt, Artificial Sequence
  Description of Artificial Sequence: Synthetic oligonucleotide
ucggcuaggccgguggacg

SEQ ID NO: 1463778 - RNA, 19 nt, Artificial Sequence
  Description of Artificial Sequence: Synthetic oligonucleotide
accaacucgucgcaguccu

SEQ ID NO: 1463779 - RNA, 19 nt, Artificial Sequence
  Description of Artificial Sequence: Synthetic oligonucleotide
ucgucucgcagguagcgca

SEQ ID NO: 1463780 - RNA, 19 nt, Artificial Sequence
  Description of Artificial Sequence: Synthetic oligonucleotide
gucccacacacacacacac

SEQ ID NO: 1463781 - RNA, 19 nt, Artificial Sequence
  Description of Artificial Sequence: Synthetic oligonucleotide
guagcuagggagcacaggu

SEQ ID NO: 1463782 - RNA, 19 nt, Artificial Sequence
  Description of Artificial Sequence: Synthetic oligonucleotide
accauaggucagcauccgg

SEQ ID NO: 1463783 - RNA, 19 nt, Artificial Sequence
  Description of Artificial Sequence: Synthetic oligonucleotide
uguagcagucgaccgugac

SEQ ID NO: 1463784 - RNA, 19 nt, Artificial Sequence
  Description of Artificial Sequence: Synthetic oligonucleotide
aucccuguuagugcagacg

SEQ ID NO: 1463785 - RNA, 19 nt, Artificial Sequence
  Description of Artificial Sequence: Synthetic oligonucleotide
acgaaggggaggcgcacgg

SEQ ID NO: 1463786 - RNA, 19 nt, Artificial Sequence
  Description of Artificial Sequence: Synthetic oligonucleotide
agcggugggguugcaaccc

SEQ ID NO: 1463787 - RNA, 19 nt, Artificial Sequence
  Description of Artificial Sequence: Synthetic oligonucleotide
cugauucauagaugggauc

SEQ ID NO: 1463788 - RNA, 19 nt, Artificial Sequence
  Description of Artificial Sequence: Synthetic oligonucleotide
ugucccacacacacacaca

SEQ ID NO: 1463789 - RNA, 19 nt, Artificial Sequence
  Description of Artificial Sequence: Synthetic oligonucleotide
gguugcaacccagagcccg

SEQ ID NO: 1463790 - RNA, 19 nt, Artificial Sequence
  Description of Artificial Sequence: Synthetic oligonucleotide
caaggugggagcuggccac

SEQ ID NO: 1463791 - RNA, 19 nt, Artificial Sequence
  Description of Artificial Sequence: Synthetic oligonucleotide
gcggccugcauccaugucg

SEQ ID NO: 1463792 - RNA, 19 nt, Artificial Sequence
  Description of Artificial Sequence: Synthetic oligonucleotide
uagacgccuauagaguaga

SEQ ID NO: 1463793 - RNA, 19 nt, Artificial Sequence
  Description of Artificial Sequence: Synthetic oligonucleotide
gacgugucaagcggugggg

SEQ ID NO: 1463794 - RNA, 19 nt, Artificial Sequence
  Description of Artificial Sequence: Synthetic oligonucleotide
gugcuggucaccuaaggaa

SEQ ID NO: 1463795 - RNA, 19 nt, Artificial Sequence
  Description of Artificial Sequence: Synthetic oligonucleotide
auagcacacgauacuguag

SEQ ID NO: 1463796 - RNA, 19 nt, Artificial Sequence
  Description of Artificial Sequence: Synthetic oligonucleotide
cuaaggaaggugaccuuca

SEQ ID NO: 1463797 - RNA, 19 nt, Artificial Sequence
  Description of Artificial Sequence: Synthetic oligonucleotide
gauuguagcagucgaccgu

SEQ ID NO: 1463798 - RNA, 19 nt, Artificial Sequence
  Description of Artificial Sequence: Synthetic oligonucleotide
gucgaccgugaccaacucg

SEQ ID NO: 1463799 - RNA, 19 nt, Artificial Sequence
  Description of Artificial Sequence: Synthetic oligonucleotide
uaccuauguagcccaacuu

SEQ ID NO: 1463800 - RNA, 19 nt, Artificial Sequence
  Description of Artificial Sequence: Synthetic oligonucleotide
uggaagccgucccaccaca

SEQ ID NO: 1463801 - RNA, 19 nt, Artificial Sequence
  Description of Artificial Sequence: Synthetic oligonucleotide
auagacgccuauagaguag

SEQ ID NO: 1463802 - RNA, 19 nt, Artificial Sequence
  Description of Artificial Sequence: Synthetic oligonucleotide
cacacacacacacggguuc

SEQ ID NO: 1463803 - RNA, 19 nt, Artificial Sequence
  Description of Artificial Sequence: Synthetic oligonucleotide
gugggguugcaacccagag

SEQ ID NO: 1463804 - RNA, 19 nt, Artificial Sequence
  Description of Artificial Sequence: Synthetic oligonucleotide
gaccauaggucagcauccg

SEQ ID NO: 1463805 - RNA, 19 nt, Artificial Sequence
  Description of Artificial Sequence: Synthetic oligonucleotide
uaaucccuguuagugcaga

SEQ ID NO: 1463806 - RNA, 19 nt, Artificial Sequence
  Description of Artificial Sequence: Synthetic oligonucleotide
cauagcacacgauacugua

SEQ ID NO: 1463807 - RNA, 19 nt, Artificial Sequence
  Description of Artificial Sequence: Synthetic oligonucleotide
ucaaaaguuaggggagcau

SEQ ID NO: 1463808 - RNA, 19 nt, Artificial Sequence
  Description of Artificial Sequence: Synthetic oligonucleotide
aggaucucggcuaggccgg

SEQ ID NO: 1463809 - RNA, 19 nt, Artificial Sequence
  Description of Artificial Sequence: Synthetic oligonucleotide
ggucgugccggucguagcg

SEQ ID NO: 1463810 - RNA, 19 nt, Artificial Sequence
  Description of Artificial Sequence: Synthetic oligonucleotide
caccagugaccauagguca

SEQ ID NO: 1463811 - RNA, 19 nt, Artificial Sequence
  Description of Artificial Sequence: Synthetic oligonucleotide
acacggguucuguggcggc

SEQ ID NO: 1463812 - RNA, 19 nt, Artificial Sequence
  Description of Artificial Sequence: Synthetic oligonucleotide
cuguggcaugaacuggcgg

SEQ ID NO: 1463813 - RNA, 19 nt, Artificial Sequence
  Description of Artificial Sequence: Synthetic oligonucleotide
ugggguuguauacguccac

SEQ ID NO: 1463814 - RNA, 19 nt, Artificial Sequence
  Description of Artificial Sequence: Synthetic oligonucleotide
acacacacacacacacacg

SEQ ID NO: 1463815 - RNA, 19 nt, Artificial Sequence
  Description of Artificial Sequence: Synthetic oligonucleotide
cuugccucccaggacggcc

SEQ ID NO: 1463816 - RNA, 19 nt, Artificial Sequence
  Description of Artificial Sequence: Synthetic oligonucleotide
gacgccuauagaguagaca

SEQ ID NO: 1463817 - RNA, 19 nt, Artificial Sequence
  Description of Artificial Sequence: Synthetic oligonucleotide
ucccacacacacacacaca

SEQ ID NO: 1463818 - RNA, 19 nt, Artificial Sequence
  Description of Artificial Sequence: Synthetic oligonucleotide
cccauucauucuuuguggg

SEQ ID NO: 1463819 - RNA, 19 nt, Artificial Sequence
  Description of Artificial Sequence: Synthetic oligonucleotide
gaaggugaccuucauuaau

SEQ ID NO: 1463820 - RNA, 19 nt, Artificial Sequence
  Description of Artificial Sequence: Synthetic oligonucleotide
ucgugccggucguagcgcg

SEQ ID NO: 1463821 - RNA, 19 nt, Artificial Sequence
  Description of Artificial Sequence: Synthetic oligonucleotide
gacuguccuggacucccag

SEQ ID NO: 1463822 - RNA, 19 nt, Artificial Sequence
  Description of Artificial Sequence: Synthetic oligonucleotide
aguuaggggagcauccuaa

SEQ ID NO: 1463823 - RNA, 19 nt, Artificial Sequence
  Description of Artificial Sequence: Synthetic oligonucleotide
cccacacacacacacacac

SEQ ID NO: 1463824 - RNA, 19 nt, Artificial Sequence
  Description of Artificial Sequence: Synthetic oligonucleotide
gggugcaaaggccaaggug

SEQ ID NO: 1463825 - RNA, 19 nt, Artificial Sequence
  Description of Artificial Sequence: Synthetic oligonucleotide
ggaaaccugaguagcuagg

SEQ ID NO: 1463826 - RNA, 19 nt, Artificial Sequence
  Description of Artificial Sequence: Synthetic oligonucleotide
cuuauaggucagcaucaga

SEQ ID NO: 1463827 - RNA, 19 nt, Artificial Sequence
  Description of Artificial Sequence: Synthetic oligonucleotide
agucgaccgugaccaacuc

SEQ ID NO: 1463828 - RNA, 19 nt, Artificial Sequence
  Description of Artificial Sequence: Synthetic oligonucleotide
cuauguagcccaacuuuaa

SEQ ID NO: 1463829 - RNA, 19 nt, Artificial Sequence
  Description of Artificial Sequence: Synthetic oligonucleotide
uagcgcgccgccuggaagu

SEQ ID NO: 1463830 - RNA, 19 nt, Artificial Sequence
  Description of Artificial Sequence: Synthetic oligonucleotide
uccaugcccgggucucugg

SEQ ID NO: 1463831 - RNA, 19 nt, Artificial Sequence
  Description of Artificial Sequence: Synthetic oligonucleotide
acacacacacacacacggg

SEQ ID NO: 1463832 - RNA, 19 nt, Artificial Sequence
  Description of Artificial Sequence: Synthetic oligonucleotide
ugggugcaaaggccaaggu

SEQ ID NO: 1463833 - RNA, 19 nt, Artificial Sequence
  Description of Artificial Sequence: Synthetic oligonucleotide
uggucaccuaaggaaggug

SEQ ID NO: 1463834 - RNA, 19 nt, Artificial Sequence
  Description of Artificial Sequence: Synthetic oligonucleotide
ugucaagcggugggguugc

SEQ ID NO: 1463835 - RNA, 19 nt, Artificial Sequence
  Description of Artificial Sequence: Synthetic oligonucleotide
agucgcgggccucucgcag

SEQ ID NO: 1463836 - RNA, 19 nt, Artificial Sequence
  Description of Artificial Sequence: Synthetic oligonucleotide
cuguuagugcagacguguc

SEQ ID NO: 1463837 - RNA, 19 nt, Artificial Sequence
  Description of Artificial Sequence: Synthetic oligonucleotide
ccugaggcggccugcaucc

SEQ ID NO: 1463838 - RNA, 19 nt, Artificial Sequence
  Description of Artificial Sequence: Synthetic oligonucleotide
aucccuuauaggucagcau

SEQ ID NO: 1463839 - RNA, 19 nt, Artificial Sequence
  Description of Artificial Sequence: Synthetic oligonucleotide
aacauguaccugauucaua

SEQ ID NO: 1463840 - RNA, 19 nt, Artificial Sequence
  Description of Artificial Sequence: Synthetic oligonucleotide
gaacuggcggaagaugcuc

SEQ ID NO: 1463841 - RNA, 19 nt, Artificial Sequence
  Description of Artificial Sequence: Synthetic oligonucleotide
gugucaagcggugggguug

SEQ ID NO: 1463842 - RNA, 19 nt, Artificial Sequence
  Description of Artificial Sequence: Synthetic oligonucleotide
agccgucccaccacacucc

SEQ ID NO: 1463843 - RNA, 19 nt, Artificial Sequence
  Description of Artificial Sequence: Synthetic oligonucleotide
auaagucucugaugucaua

SEQ ID NO: 1463844 - RNA, 19 nt, Artificial Sequence
  Description of Artificial Sequence: Synthetic oligonucleotide
uggucgcaaccucccacca

SEQ ID NO: 1463845 - RNA, 19 nt, Artificial Sequence
  Description of Artificial Sequence: Synthetic oligonucleotide
aucccugacgaaguacaug

SEQ ID NO: 1463846 - RNA, 19 nt, Artificial Sequence
  Description of Artificial Sequence: Synthetic oligonucleotide
cauaccuauguagcccaac

SEQ ID NO: 1463847 - RNA, 19 nt, Artificial Sequence
  Description of Artificial Sequence: Synthetic oligonucleotide
guagcgcgccgccuggaag

SEQ ID NO: 1463848 - RNA, 19 nt, Artificial Sequence
  Description of Artificial Sequence: Synthetic oligonucleotide
cugagugcuggucaccuaa

SEQ ID NO: 1463849 - RNA, 19 nt, Artificial Sequence
  Description of Artificial Sequence: Synthetic oligonucleotide
gaccaacucgucgcagucc

SEQ ID NO: 1463850 - RNA, 19 nt, Artificial Sequence
  Description of Artificial Sequence: Synthetic oligonucleotide
gucaccuaaggaaggugac

SEQ ID NO: 1463851 - RNA, 19 nt, Artificial Sequence
  Description of Artificial Sequence: Synthetic oligonucleotide
aagucgcgggccucucgca

SEQ ID NO: 1463852 - RNA, 19 nt, Artificial Sequence
  Description of Artificial Sequence: Synthetic oligonucleotide
acaaucccauaccuaugua

SEQ ID NO: 1463853 - RNA, 19 nt, Artificial Sequence
  Description of Artificial Sequence: Synthetic oligonucleotide
cacucggcagagucauccc

SEQ ID NO: 1463854 - RNA, 19 nt, Artificial Sequence
  Description of Artificial Sequence: Synthetic oligonucleotide
ucgcaaccucccaccagca

SEQ ID NO: 1463855 - RNA, 19 nt, Artificial Sequence
  Description of Artificial Sequence: Synthetic oligonucleotide
gggacaaucccauaccuau

SEQ ID NO: 1463856 - RNA, 19 nt, Artificial Sequence
  Description of Artificial Sequence: Synthetic oligonucleotide
guuaggggagcauccuaaa

SEQ ID NO: 1463857 - RNA, 19 nt, Artificial Sequence
  Description of Artificial Sequence: Synthetic oligonucleotide
ucucggcuaggccggugga

SEQ ID NO: 1463858 - RNA, 19 nt, Artificial Sequence
  Description of Artificial Sequence: Synthetic oligonucleotide
agugaccauaggucagcau

SEQ ID NO: 1463859 - RNA, 19 nt, Artificial Sequence
  Description of Artificial Sequence: Synthetic oligonucleotide
uaggccgguggacgggcgc

SEQ ID NO: 1463860 - RNA, 19 nt, Artificial Sequence
  Description of Artificial Sequence: Synthetic oligonucleotide
uggcaugaacuggcggaag

SEQ ID NO: 1463861 - RNA, 19 nt, Artificial Sequence
  Description of Artificial Sequence: Synthetic oligonucleotide
aagcggcgcacgaagggga

SEQ ID NO: 1463862 - RNA, 19 nt, Artificial Sequence
  Description of Artificial Sequence: Synthetic oligonucleotide
ggucaccuaaggaagguga

SEQ ID NO: 1463863 - RNA, 19 nt, Artificial Sequence
  Description of Artificial Sequence: Synthetic oligonucleotide
cauguaccugauucauaga

SEQ ID NO: 1463864 - RNA, 19 nt, Artificial Sequence
  Description of Artificial Sequence: Synthetic oligonucleotide
guucuguggcggccugagg

SEQ ID NO: 1463865 - RNA, 19 nt, Artificial Sequence
  Description of Artificial Sequence: Synthetic oligonucleotide
ggguuguauacguccacuc

SEQ ID NO: 1463866 - RNA, 19 nt, Artificial Sequence
  Description of Artificial Sequence: Synthetic oligonucleotide
cacacacacacacacgggu

SEQ ID NO: 1463867 - RNA, 19 nt, Artificial Sequence
  Description of Artificial Sequence: Synthetic oligonucleotide
acacacacacacggguucu

SEQ ID NO: 1463868 - RNA, 19 nt, Artificial Sequence
  Description of Artificial Sequence: Synthetic oligonucleotide
gcuggucaccuaaggaagg

SEQ ID NO: 1463869 - RNA, 19 nt, Artificial Sequence
  Description of Artificial Sequence: Synthetic oligonucleotide
uccuggucgcaaccuccca

SEQ ID NO: 1463870 - RNA, 19 nt, Artificial Sequence
  Description of Artificial Sequence: Synthetic oligonucleotide
ugaggcggccugcauccau

SEQ ID NO: 1463871 - RNA, 19 nt, Artificial Sequence
  Description of Artificial Sequence: Synthetic oligonucleotide
gcagcgcgccaccagaggc

SEQ ID NO: 1463872 - RNA, 19 nt, Artificial Sequence
  Description of Artificial Sequence: Synthetic oligonucleotide
acagcccgucgucucgcag

SEQ ID NO: 1463873 - RNA, 19 nt, Artificial Sequence
  Description of Artificial Sequence: Synthetic oligonucleotide
agcccaacuuuaaucccug

SEQ ID NO: 1463874 - RNA, 19 nt, Artificial Sequence
  Description of Artificial Sequence: Synthetic oligonucleotide
aggcucggccuccacgugu

SEQ ID NO: 1463875 - RNA, 19 nt, Artificial Sequence
  Description of Artificial Sequence: Synthetic oligonucleotide
acacuccaugcccgggucu

SEQ ID NO: 1463876 - RNA, 19 nt, Artificial Sequence
  Description of Artificial Sequence: Synthetic oligonucleotide
agacgccuauagaguagac

SEQ ID NO: 1463877 - RNA, 19 nt, Artificial Sequence
  Description of Artificial Sequence: Synthetic oligonucleotide
caggcgcaggcaaggcggg

SEQ ID NO: 1463878 - RNA, 19 nt, Artificial Sequence
  Description of Artificial Sequence: Synthetic oligonucleotide
caccacgucggagaguuca

SEQ ID NO: 1463879 - RNA, 19 nt, Artificial Sequence
  Description of Artificial Sequence: Synthetic oligonucleotide
uccuagccugucccacaca

SEQ ID NO: 1463880 - RNA, 19 nt, Artificial Sequence
  Description of Artificial Sequence: Synthetic oligonucleotide
ucgucgcaguccuggucgc

SEQ ID NO: 1463881 - RNA, 19 nt, Artificial Sequence
  Description of Artificial Sequence: Synthetic oligonucleotide
acgugugccagcagguaga

SEQ ID NO: 1463882 - RNA, 19 nt, Artificial Sequence
  Description of Artificial Sequence: Synthetic oligonucleotide
ccuaaggaaggugaccuuc

SEQ ID NO: 1463883 - RNA, 19 nt, Artificial Sequence
  Description of Artificial Sequence: Synthetic oligonucleotide
gacgggcgcggacgcaugc

SEQ ID NO: 1463884 - RNA, 19 nt, Artificial Sequence
  Description of Artificial Sequence: Synthetic oligonucleotide
ucacacugccgugccagaa

SEQ ID NO: 1463885 - RNA, 19 nt, Artificial Sequence
  Description of Artificial Sequence: Synthetic oligonucleotide
ucugagugcuggucaccua

SEQ ID NO: 1463886 - RNA, 19 nt, Artificial Sequence
  Description of Artificial Sequence: Synthetic oligonucleotide
acacacacacacacacaca

SEQ ID NO: 1463887 - RNA, 19 nt, Artificial Sequence
  Description of Artificial Sequence: Synthetic oligonucleotide
ggucugcgcgcacccagcg

SEQ ID NO: 1463888 - RNA, 19 nt, Artificial Sequence
  Description of Artificial Sequence: Synthetic oligonucleotide
ggaagucgcgggccucucg

SEQ ID NO: 1463889 - RNA, 19 nt, Artificial Sequence
  Description of Artificial Sequence: Synthetic oligonucleotide
guaggccgccuccuccuug

SEQ ID NO: 1463890 - RNA, 19 nt, Artificial Sequence
  Description of Artificial Sequence: Synthetic oligonucleotide
ucgcaguccuggucgcaac

SEQ ID NO: 1463891 - RNA, 19 nt, Artificial Sequence
  Description of Artificial Sequence: Synthetic oligonucleotide
cccuuauaggucagcauca

SEQ ID NO: 1463892 - RNA, 19 nt, Artificial Sequence
  Description of Artificial Sequence: Synthetic oligonucleotide
ggcgcggacgcaugcgggg

SEQ ID NO: 1463893 - RNA, 19 nt, Artificial Sequence
  Description of Artificial Sequence: Synthetic oligonucleotide
ucaagcggugggguugcaa

SEQ ID NO: 1463894 - RNA, 19 nt, Artificial Sequence
  Description of Artificial Sequence: Synthetic oligonucleotide
gugggguuguauacgucca

SEQ ID NO: 1463895 - RNA, 19 nt, Artificial Sequence
  Description of Artificial Sequence: Synthetic oligonucleotide
cugaguagcuagggagcac

SEQ ID NO: 1463896 - RNA, 19 nt, Artificial Sequence
  Description of Artificial Sequence: Synthetic oligonucleotide
gugaccaacucgucgcagu

SEQ ID NO: 1463897 - RNA, 19 nt, Artificial Sequence
  Description of Artificial Sequence: Synthetic oligonucleotide
ccuauguagcccaacuuua

SEQ ID NO: 1463898 - RNA, 19 nt, Artificial Sequence
  Description of Artificial Sequence: Synthetic oligonucleotide
ggagcauccuaaaaccuua

SEQ ID NO: 1463899 - RNA, 19 nt, Artificial Sequence
  Description of Artificial Sequence: Synthetic oligonucleotide
acacacacacacacggguu

SEQ ID NO: 1463900 - RNA, 19 nt, Artificial Sequence
  Description of Artificial Sequence: Synthetic oligonucleotide
ggucgcaaccucccaccag

SEQ ID NO: 1463901 - RNA, 19 nt, Artificial Sequence
  Description of Artificial Sequence: Synthetic oligonucleotide
ggaaggugaccuucauuaa

SEQ ID NO: 1463902 - RNA, 19 nt, Artificial Sequence
  Description of Artificial Sequence: Synthetic oligonucleotide
gaugggaucuugucccauu

SEQ ID NO: 1463903 - RNA, 19 nt, Artificial Sequence
  Description of Artificial Sequence: Synthetic oligonucleotide
acgugucaagcgguggggu

SEQ ID NO: 1463904 - RNA, 19 nt, Artificial Sequence
  Description of Artificial Sequence: Synthetic oligonucleotide
acgaaguacaugaguccau

SEQ ID NO: 1463905 - RNA, 19 nt, Artificial Sequence
  Description of Artificial Sequence: Synthetic oligonucleotide
gucgucucgcagguagcgc

SEQ ID NO: 1463906 - RNA, 19 nt, Artificial Sequence
  Description of Artificial Sequence: Synthetic oligonucleotide
ggccucucgcagcaggcgc

SEQ ID NO: 1463907 - RNA, 19 nt, Artificial Sequence
  Description of Artificial Sequence: Synthetic oligonucleotide
cacuccaugcccgggucuc

SEQ ID NO: 1463908 - RNA, 19 nt, Artificial Sequence
  Description of Artificial Sequence: Synthetic oligonucleotide
cagucgaccgugaccaacu

SEQ ID NO: 1463909 - RNA, 19 nt, Artificial Sequence
  Description of Artificial Sequence: Synthetic oligonucleotide
cccgccuaaguggucaggg

SEQ ID NO: 1463910 - RNA, 19 nt, Artificial Sequence
  Description of Artificial Sequence: Synthetic oligonucleotide
gucugcgcgcacccagcgc

SEQ ID NO: 1463911 - RNA, 19 nt, Artificial Sequence
  Description of Artificial Sequence: Synthetic oligonucleotide
gucggagaguucaaaugua

SEQ ID NO: 1463912 - RNA, 19 nt, Artificial Sequence
  Description of Artificial Sequence: Synthetic oligonucleotide
cccauaccuauguagccca

SEQ ID NO: 1463913 - RNA, 19 nt, Artificial Sequence
  Description of Artificial Sequence: Synthetic oligonucleotide
cgucugaggauuguagcag

SEQ ID NO: 1463914 - RNA, 19 nt, Artificial Sequence
  Description of Artificial Sequence: Synthetic oligonucleotide
agggacaaucccauaccua

SEQ ID NO: 1463915 - RNA, 19 nt, Artificial Sequence
  Description of Artificial Sequence: Synthetic oligonucleotide
cagggacaaucccauaccu

SEQ ID NO: 1463916 - RNA, 19 nt, Artificial Sequence
  Description of Artificial Sequence: Synthetic oligonucleotide
ccgucugaggauuguagca

SEQ ID NO: 1463917 - RNA, 19 nt, Artificial Sequence
  Description of Artificial Sequence: Synthetic oligonucleotide
guggcaugaacuggcggaa

SEQ ID NO: 1463918 - RNA, 19 nt, Artificial Sequence
  Description of Artificial Sequence: Synthetic oligonucleotide
caacauguaccugauucau

SEQ ID NO: 1463919 - RNA, 19 nt, Artificial Sequence
  Description of Artificial Sequence: Synthetic oligonucleotide
ccuggucgcaaccucccac

SEQ ID NO: 1463920 - RNA, 19 nt, Artificial Sequence
  Description of Artificial Sequence: Synthetic oligonucleotide
cucggcuaggccgguggac

SEQ ID NO: 1463921 - RNA, 19 nt, Artificial Sequence
  Description of Artificial Sequence: Synthetic oligonucleotide
cgugccagaaagugggcuc

SEQ ID NO: 1463922 - RNA, 19 nt, Artificial Sequence
  Description of Artificial Sequence: Synthetic oligonucleotide
gaucucggcuaggccggug

SEQ ID NO: 1463923 - RNA, 19 nt, Artificial Sequence
  Description of Artificial Sequence: Synthetic oligonucleotide
uccacucggcagagucauc

SEQ ID NO: 1463924 - RNA, 19 nt, Artificial Sequence
  Description of Artificial Sequence: Synthetic oligonucleotide
cacgucggagaguucaaau

SEQ ID NO: 1463925 - RNA, 19 nt, Artificial Sequence
  Description of Artificial Sequence: Synthetic oligonucleotide
gggugauguggaaaccuga

SEQ ID NO: 1463926 - RNA, 19 nt, Artificial Sequence
  Description of Artificial Sequence: Synthetic oligonucleotide
cugcgcgcacccagcgcag

SEQ ID NO: 1463927 - RNA, 19 nt, Artificial Sequence
  Description of Artificial Sequence: Synthetic oligonucleotide
cuggacauagacgccuaua

SEQ ID NO: 1463928 - RNA, 19 nt, Artificial Sequence
  Description of Artificial Sequence: Synthetic oligonucleotide
ccaugcccgggucucuggg

SEQ ID NO: 1463929 - RNA, 19 nt, Artificial Sequence
  Description of Artificial Sequence: Synthetic oligonucleotide
gucucgcagguagcgcagc

SEQ ID NO: 1463930 - RNA, 19 nt, Artificial Sequence
  Description of Artificial Sequence: Synthetic oligonucleotide
caggcaaggcgggcagcgc

SEQ ID NO: 1463931 - RNA, 19 nt, Artificial Sequence
  Description of Artificial Sequence: Synthetic oligonucleotide
cccugacgaaguacaugag

SEQ ID NO: 1463932 - RNA, 19 nt, Artificial Sequence
  Description of Artificial Sequence: Synthetic oligonucleotide
guagcgcagcaggcgggcc

SEQ ID NO: 1463933 - RNA, 19 nt, Artificial Sequence
  Description of Artificial Sequence: Synthetic oligonucleotide
gguagaagcggcgcacgaa

SEQ ID NO: 1463934 - RNA, 19 nt, Artificial Sequence
  Description of Artificial Sequence: Synthetic oligonucleotide
gcagucgaccgugaccaac

SEQ ID NO: 1463935 - RNA, 19 nt, Artificial Sequence
  Description of Artificial Sequence: Synthetic oligonucleotide
ggcgggucugcgcgcaccc

SEQ ID NO: 1463936 - RNA, 19 nt, Artificial Sequence
  Description of Artificial Sequence: Synthetic oligonucleotide
gccugaggcggccugcauc

SEQ ID NO: 1463937 - RNA, 19 nt, Artificial Sequence
  Description of Artificial Sequence: Synthetic oligonucleotide
gucgcaguccuggucgcaa

SEQ ID NO: 1463938 - RNA, 19 nt, Artificial Sequence
  Description of Artificial Sequence: Synthetic oligonucleotide
ugcgcgcacccagcgcagc

SEQ ID NO: 1463939 - RNA, 19 nt, Artificial Sequence
  Description of Artificial Sequence: Synthetic oligonucleotide
ugggcacggcacagcccgu

SEQ ID NO: 1463940 - RNA, 19 nt, Artificial Sequence
  Description of Artificial Sequence: Synthetic oligonucleotide
gcggccagugcgcggcgcg

SEQ ID NO: 1463941 - RNA, 19 nt, Artificial Sequence
  Description of Artificial Sequence: Synthetic oligonucleotide
ccuguuagugcagacgugu

SEQ ID NO: 1463942 - RNA, 19 nt, Artificial Sequence
  Description of Artificial Sequence: Synthetic oligonucleotide
ggcuaggccgguggacggg

SEQ ID NO: 1463943 - RNA, 19 nt, Artificial Sequence
  Description of Artificial Sequence: Synthetic oligonucleotide
caccaggaucucggcuagg

SEQ ID NO: 1463944 - RNA, 19 nt, Artificial Sequence
  Description of Artificial Sequence: Synthetic oligonucleotide
ggcaaggcgggcagcgcgc

SEQ ID NO: 1463945 - RNA, 19 nt, Artificial Sequence
  Description of Artificial Sequence: Synthetic oligonucleotide
cccuguuagugcagacgug

SEQ ID NO: 1463946 - RNA, 19 nt, Artificial Sequence
  Description of Artificial Sequence: Synthetic oligonucleotide
guccacucggcagagucau

SEQ ID NO: 1463947 - RNA, 19 nt, Artificial Sequence
  Description of Artificial Sequence: Synthetic oligonucleotide
uggcccgucugaggauugu

SEQ ID NO: 1463948 - RNA, 19 nt, Artificial Sequence
  Description of Artificial Sequence: Synthetic oligonucleotide
uggaagucgcgggccucuc

SEQ ID NO: 1463949 - RNA, 19 nt, Artificial Sequence
  Description of Artificial Sequence: Synthetic oligonucleotide
gcuaggccgguggacgggc

SEQ ID NO: 1463950 - RNA, 19 nt, Artificial Sequence
  Description of Artificial Sequence: Synthetic oligonucleotide
ggcgcccugugcaagcuuc

SEQ ID NO: 1463951 - RNA, 19 nt, Artificial Sequence
  Description of Artificial Sequence: Synthetic oligonucleotide
uacguccacucggcagagu

SEQ ID NO: 1463952 - RNA, 19 nt, Artificial Sequence
  Description of Artificial Sequence: Synthetic oligonucleotide
ugcggccagugcgcggcgc

SEQ ID NO: 1463953 - RNA, 19 nt, Artificial Sequence
  Description of Artificial Sequence: Synthetic oligonucleotide
guugcaacccagagcccgu

SEQ ID NO: 1463954 - RNA, 19 nt, Artificial Sequence
  Description of Artificial Sequence: Synthetic oligonucleotide
cgucggagaguucaaaugu

SEQ ID NO: 1463955 - RNA, 19 nt, Artificial Sequence
  Description of Artificial Sequence: Synthetic oligonucleotide
cacccagcgcagcgccagc

SEQ ID NO: 1463956 - RNA, 19 nt, Artificial Sequence
  Description of Artificial Sequence: Synthetic oligonucleotide
cgucgucucgcagguagcg

SEQ ID NO: 1463957 - RNA, 19 nt, Artificial Sequence
  Description of Artificial Sequence: Synthetic oligonucleotide
ccacacacacacacacaca

SEQ ID NO: 1463958 - RNA, 19 nt, Artificial Sequence
  Description of Artificial Sequence: Synthetic oligonucleotide
gcggucgugccggucguag

SEQ ID NO: 1463959 - RNA, 19 nt, Artificial Sequence
  Description of Artificial Sequence: Synthetic oligonucleotide
gcgcacgaaggggaggcgc

SEQ ID NO: 1463960 - RNA, 19 nt, Artificial Sequence
  Description of Artificial Sequence: Synthetic oligonucleotide
ccgucgucucgcagguagc

SEQ ID NO: 1463961 - RNA, 19 nt, Artificial Sequence
  Description of Artificial Sequence: Synthetic oligonucleotide
gggagcauccuaaaaccuu

SEQ ID NO: 1463962 - RNA, 19 nt, Artificial Sequence
  Description of Artificial Sequence: Synthetic oligonucleotide
caugcccgggucucugggu

SEQ ID NO: 1463963 - RNA, 19 nt, Artificial Sequence
  Description of Artificial Sequence: Synthetic oligonucleotide
gggucugcgcgcacccagc

SEQ ID NO: 1463964 - RNA, 19 nt, Artificial Sequence
  Description of Artificial Sequence: Synthetic oligonucleotide
ggggagcauccuaaaaccu

SEQ ID NO: 1463965 - RNA, 19 nt, Artificial Sequence
  Description of Artificial Sequence: Synthetic oligonucleotide
gggcagcgcgccaccagag

SEQ ID NO: 1463966 - RNA, 19 nt, Artificial Sequence
  Description of Artificial Sequence: Synthetic oligonucleotide
cacagcccgucgucucgca

SEQ ID NO: 1463967 - RNA, 19 nt, Artificial Sequence
  Description of Artificial Sequence: Synthetic oligonucleotide
gcgggcagcgcgccaccag

SEQ ID NO: 1463968 - RNA, 19 nt, Artificial Sequence
  Description of Artificial Sequence: Synthetic oligonucleotide
cagcgcgccaccagaggcu

SEQ ID NO: 1463969 - RNA, 19 nt, Artificial Sequence
  Description of Artificial Sequence: Synthetic oligonucleotide
aggcgcccugugcaagcuu

SEQ ID NO: 1463970 - RNA, 19 nt, Artificial Sequence
  Description of Artificial Sequence: Synthetic oligonucleotide
gcacagcccgucgucucgc

SEQ ID NO: 1463971 - RNA, 19 nt, Artificial Sequence
  Description of Artificial Sequence: Synthetic oligonucleotide
ccuccuagccugucccaca

SEQ ID NO: 1463972 - RNA, 19 nt, Artificial Sequence
  Description of Artificial Sequence: Synthetic oligonucleotide
ccaacucgucgcaguccug

SEQ ID NO: 1463973 - RNA, 19 nt, Artificial Sequence
  Description of Artificial Sequence: Synthetic oligonucleotide
cgggucugcgcgcacccag

SEQ ID NO: 1463974 - RNA, 19 nt, Artificial Sequence
  Description of Artificial Sequence: Synthetic oligonucleotide
cggcuaggccgguggacgg

SEQ ID NO: 1463975 - RNA, 19 nt, Artificial Sequence
  Description of Artificial Sequence: Synthetic oligonucleotide
ggguugcaacccagagccc

SEQ ID NO: 1463976 - RNA, 19 nt, Artificial Sequence
  Description of Artificial Sequence: Synthetic oligonucleotide
cuggaagucgcgggccucu

SEQ ID NO: 1463977 - RNA, 19 nt, Artificial Sequence
  Description of Artificial Sequence: Synthetic oligonucleotide
cgguggacgggcgcggacg

SEQ ID NO: 1463978 - RNA, 19 nt, Artificial Sequence
  Description of Artificial Sequence: Synthetic oligonucleotide
gaggcgcccugugcaagcu

SEQ ID NO: 1463979 - RNA, 19 nt, Artificial Sequence
  Description of Artificial Sequence: Synthetic oligonucleotide
caaggcgggcagcgcgcca

SEQ ID NO: 1463980 - RNA, 19 nt, Artificial Sequence
  Description of Artificial Sequence: Synthetic oligonucleotide
cgugaccaacucgucgcag

SEQ ID NO: 1463981 - RNA, 19 nt, Artificial Sequence
  Description of Artificial Sequence: Synthetic oligonucleotide
gcggugggguugcaaccca

SEQ ID NO: 1463982 - RNA, 19 nt, Artificial Sequence
  Description of Artificial Sequence: Synthetic oligonucleotide
cacugccgugccagaaagu

SEQ ID NO: 1463983 - RNA, 19 nt, Artificial Sequence
  Description of Artificial Sequence: Synthetic oligonucleotide
ggccgguggacgggcgcgg

SEQ ID NO: 1463984 - RNA, 19 nt, Artificial Sequence
  Description of Artificial Sequence: Synthetic oligonucleotide
gccgugccagaaagugggc

SEQ ID NO: 1463985 - RNA, 19 nt, Artificial Sequence
  Description of Artificial Sequence: Synthetic oligonucleotide
cccaacuuuaaucccuguu

SEQ ID NO: 1463986 - RNA, 19 nt, Artificial Sequence
  Description of Artificial Sequence: Synthetic oligonucleotide
ccgccuaaguggucaggga

SEQ ID NO: 1463987 - RNA, 19 nt, Artificial Sequence
  Description of Artificial Sequence: Synthetic oligonucleotide
ggcggccugcauccauguc

SEQ ID NO: 1463988 - RNA, 19 nt, Artificial Sequence
  Description of Artificial Sequence: Synthetic oligonucleotide
cgugccggucguagcgcgc

SEQ ID NO: 1463989 - RNA, 19 nt, Artificial Sequence
  Description of Artificial Sequence: Synthetic oligonucleotide
cgccuauagaguagacaaa

SEQ ID NO: 1463990 - RNA, 19 nt, Artificial Sequence
  Description of Artificial Sequence: Synthetic oligonucleotide
gcgcccugugcaagcuucc

SEQ ID NO: 1463991 - RNA, 19 nt, Artificial Sequence
  Description of Artificial Sequence: Synthetic oligonucleotide
ccugucccacacacacaca

SEQ ID NO: 1463992 - RNA, 19 nt, Artificial Sequence
  Description of Artificial Sequence: Synthetic oligonucleotide
cggucgugccggucguagc

SEQ ID NO: 1463993 - RNA, 19 nt, Artificial Sequence
  Description of Artificial Sequence: Synthetic oligonucleotide
ccauaccuauguagcccaa

SEQ ID NO: 1463994 - RNA, 19 nt, Artificial Sequence
  Description of Artificial Sequence: Synthetic oligonucleotide
ccgugaccaacucgucgca

SEQ ID NO: 1463995 - RNA, 19 nt, Artificial Sequence
  Description of Artificial Sequence: Synthetic oligonucleotide
ggacgggcgcggacgcaug

SEQ ID NO: 1463996 - RNA, 19 nt, Artificial Sequence
  Description of Artificial Sequence: Synthetic oligonucleotide
cugcauccaugucgucacu

SEQ ID NO: 1463997 - RNA, 19 nt, Artificial Sequence
  Description of Artificial Sequence: Synthetic oligonucleotide
cgggucucugggucauaug

SEQ ID NO: 1463998 - RNA, 19 nt, Artificial Sequence
  Description of Artificial Sequence: Synthetic oligonucleotide
cgaaggggaggcgcacggc

SEQ ID NO: 1463999 - RNA, 19 nt, Artificial Sequence
  Description of Artificial Sequence: Synthetic oligonucleotide
guagcgccacuggcccguc

SEQ ID NO: 1464000 - RNA, 19 nt, Artificial Sequence
  Description of Artificial Sequence: Synthetic oligonucleotide
guggacgggcgcggacgca

SEQ ID NO: 1464001 - RNA, 19 nt, Artificial Sequence
  Description of Artificial Sequence: Synthetic oligonucleotide
cgaccgugaccaacucguc

SEQ ID NO: 1464002 - RNA, 19 nt, Artificial Sequence
  Description of Artificial Sequence: Synthetic oligonucleotide
ccccgccuaaguggucagg

SEQ ID NO: 1464003 - RNA, 19 nt, Artificial Sequence
  Description of Artificial Sequence: Synthetic oligonucleotide
gucaagcggugggguugca

SEQ ID NO: 1464004 - RNA, 19 nt, Artificial Sequence
  Description of Artificial Sequence: Synthetic oligonucleotide
gcccaacuuuaaucccugu

SEQ ID NO: 1464005 - RNA, 19 nt, Artificial Sequence
  Description of Artificial Sequence: Synthetic oligonucleotide
ccgguggacgggcgcggac

SEQ ID NO: 1464006 - RNA, 19 nt, Artificial Sequence
  Description of Artificial Sequence: Synthetic oligonucleotide
cggagaguucaaauguauu

SEQ ID NO: 1464007 - RNA, 19 nt, Artificial Sequence
  Description of Artificial Sequence: Synthetic oligonucleotide
cgaaguacaugaguccauu

SEQ ID NO: 1464008 - RNA, 19 nt, Artificial Sequence
  Description of Artificial Sequence: Synthetic oligonucleotide
ccgugccagaaagugggcu

SEQ ID NO: 1464009 - RNA, 19 nt, Artificial Sequence
  Description of Artificial Sequence: Synthetic oligonucleotide
gcggcgcggcgggucugcg

SEQ ID NO: 1464010 - RNA, 19 nt, Artificial Sequence
  Description of Artificial Sequence: Synthetic oligonucleotide
gcgccaccagaggcucggc

SEQ ID NO: 1464011 - RNA, 19 nt, Artificial Sequence
  Description of Artificial Sequence: Synthetic oligonucleotide
cguagcgcgccgccuggaa

SEQ ID NO: 1464012 - RNA, 19 nt, Artificial Sequence
  Description of Artificial Sequence: Synthetic oligonucleotide
cggccagugcgcggcgcgg

SEQ ID NO: 1464013 - RNA, 19 nt, Artificial Sequence
  Description of Artificial Sequence: Synthetic oligonucleotide
gcgcggcgcggcgcggcgg

SEQ ID NO: 1464014 - RNA, 19 nt, Artificial Sequence
  Description of Artificial Sequence: Synthetic oligonucleotide
cgugucaagcggugggguu

SEQ ID NO: 1464015 - RNA, 19 nt, Artificial Sequence
  Description of Artificial Sequence: Synthetic oligonucleotide
gcggcgggucugcgcgcac

SEQ ID NO: 1464016 - RNA, 19 nt, Artificial Sequence
  Description of Artificial Sequence: Synthetic oligonucleotide
gccgguggacgggcgcgga

SEQ ID NO: 1464017 - RNA, 19 nt, Artificial Sequence
  Description of Artificial Sequence: Synthetic oligonucleotide
ggaucucggcuaggccggu

SEQ ID NO: 1464018 - RNA, 19 nt, Artificial Sequence
  Description of Artificial Sequence: Synthetic oligonucleotide
ccgggucauagcacacgau

SEQ ID NO: 1464019 - RNA, 19 nt, Artificial Sequence
  Description of Artificial Sequence: Synthetic oligonucleotide
ccgggucucugggucauau

SEQ ID NO: 1464020 - RNA, 19 nt, Artificial Sequence
  Description of Artificial Sequence: Synthetic oligonucleotide
cgcggcgcggcgggucugc

SEQ ID NO: 1464021 - RNA, 19 nt, Artificial Sequence
  Description of Artificial Sequence: Synthetic oligonucleotide
gcccgcggucgugccgguc

SEQ ID NO: 1464022 - RNA, 19 nt, Artificial Sequence
  Description of Artificial Sequence: Synthetic oligonucleotide
ccccaacauguaccugauu

SEQ ID NO: 1464023 - RNA, 19 nt, Artificial Sequence
  Description of Artificial Sequence: Synthetic oligonucleotide
ccgucccaccacacuccau

SEQ ID NO: 1464024 - RNA, 19 nt, Artificial Sequence
  Description of Artificial Sequence: Synthetic oligonucleotide
ccgcggucgugccggucgu

SEQ ID NO: 1464025 - RNA, 19 nt, Artificial Sequence
  Description of Artificial Sequence: Synthetic oligonucleotide
ggcccgcggucgugccggu

SEQ ID NO: 1464026 - RNA, 19 nt, Artificial Sequence
  Description of Artificial Sequence: Synthetic oligonucleotide
cccgggucucugggucaua

SEQ ID NO: 1464027 - RNA, 19 nt, Artificial Sequence
  Description of Artificial Sequence: Synthetic oligonucleotide
cgcggucgugccggucgua

SEQ ID NO: 1464028 - RNA, 19 nt, Artificial Sequence
  Description of Artificial Sequence: Synthetic oligonucleotide
aaaucgaugagccauacac

SEQ ID NO: 1464029 - RNA, 19 nt, Artificial Sequence
  Description of Artificial Sequence: Synthetic oligonucleotide
aaugagauuguccagcccc

SEQ ID NO: 1464030 - RNA, 19 nt, Artificial Sequence
  Description of Artificial Sequence: Synthetic oligonucleotide
aaagacacgagucaccugc

SEQ ID NO: 1464031 - RNA, 19 nt, Artificial Sequence
  Description of Artificial Sequence: Synthetic oligonucleotide
uugaguuuuauuaggaagg

SEQ ID NO: 1464032 - RNA, 19 nt, Artificial Sequence
  Description of Artificial Sequence: Synthetic oligonucleotide
aaagugggaacacacccgc

SEQ ID NO: 1464033 - RNA, 19 nt, Artificial Sequence
  Description of Artificial Sequence: Synthetic oligonucleotide
aaucagugcugcaagaucc

SEQ ID NO: 1464034 - RNA, 19 nt, Artificial Sequence
  Description of Artificial Sequence: Synthetic oligonucleotide
uugaaaggacucaugaccg

SEQ ID NO: 1464035 - RNA, 19 nt, Artificial Sequence
  Description of Artificial Sequence: Synthetic oligonucleotide
caaauagccauccucacgg

SEQ ID NO: 1464036 - RNA, 19 nt, Artificial Sequence
  Description of Artificial Sequence: Synthetic oligonucleotide
acugcaaguagcuuucacc

SEQ ID NO: 1464037 - RNA, 19 nt, Artificial Sequence
  Description of Artificial Sequence: Synthetic oligonucleotide
aaacuagugucauucagcu

SEQ ID NO: 1464038 - RNA, 19 nt, Artificial Sequence
  Description of Artificial Sequence: Synthetic oligonucleotide
ucuagagaggugcaaagcc

SEQ ID NO: 1464039 - RNA, 19 nt, Artificial Sequence
  Description of Artificial Sequence: Synthetic oligonucleotide
agaccaggaagucuuauac

SEQ ID NO: 1464040 - RNA, 19 nt, Artificial Sequence
  Description of Artificial Sequence: Synthetic oligonucleotide
uccacuguaguguagaggu

SEQ ID NO: 1464041 - RNA, 19 nt, Artificial Sequence
  Description of Artificial Sequence: Synthetic oligonucleotide
uugaccaugguucggaucu

SEQ ID NO: 1464042 - RNA, 19 nt, Artificial Sequence
  Description of Artificial Sequence: Synthetic oligonucleotide
aguggauggcaccuggucc

SEQ ID NO: 1464043 - RNA, 19 nt, Artificial Sequence
  Description of Artificial Sequence: Synthetic oligonucleotide
aguuuuauuaggaagggug

SEQ ID NO: 1464044 - RNA, 19 nt, Artificial Sequence
  Description of Artificial Sequence: Synthetic oligonucleotide
ucuccgaugauccaggauc

SEQ ID NO: 1464045 - RNA, 19 nt, Artificial Sequence
  Description of Artificial Sequence: Synthetic oligonucleotide
uugccaaaaucgaugagcc

SEQ ID NO: 1464046 - RNA, 19 nt, Artificial Sequence
  Description of Artificial Sequence: Synthetic oligonucleotide
caucuugcagucaagcacg

SEQ ID NO: 1464047 - RNA, 19 nt, Artificial Sequence
  Description of Artificial Sequence: Synthetic oligonucleotide
aaucgaugagccauacacc

SEQ ID NO: 1464048 - RNA, 19 nt, Artificial Sequence
  Description of Artificial Sequence: Synthetic oligonucleotide
aggcgguucagauaccucc

SEQ ID NO: 1464049 - RNA, 19 nt, Artificial Sequence
  Description of Artificial Sequence: Synthetic oligonucleotide
guaguguagagguagacca

SEQ ID NO: 1464050 - RNA, 19 nt, Artificial Sequence
  Description of Artificial Sequence: Synthetic oligonucleotide
aguagcuuucaccaucccg

SEQ ID NO: 1464051 - RNA, 19 nt, Artificial Sequence
  Description of Artificial Sequence: Synthetic oligonucleotide
ucauggacgaagaggagug

SEQ ID NO: 1464052 - RNA, 19 nt, Artificial Sequence
  Description of Artificial Sequence: Synthetic oligonucleotide
acugucgcucagcagaucg

SEQ ID NO: 1464053 - RNA, 19 nt, Artificial Sequence
  Description of Artificial Sequence: Synthetic oligonucleotide
uguaacugcaaguagcuuu

SEQ ID NO: 1464054 - RNA, 19 nt, Artificial Sequence
  Description of Artificial Sequence: Synthetic oligonucleotide
ugaguuuuauuaggaaggg

SEQ ID NO: 1464055 - RNA, 19 nt, Artificial Sequence
  Description of Artificial Sequence: Synthetic oligonucleotide
ugguauugguaguauaccc

SEQ ID NO: 1464056 - RNA, 19 nt, Artificial Sequence
  Description of Artificial Sequence: Synthetic oligonucleotide
augaccggcagauugacca

SEQ ID NO: 1464057 - RNA, 19 nt, Artificial Sequence
  Description of Artificial Sequence: Synthetic oligonucleotide
uuuugaaaggacucaugac

SEQ ID NO: 1464058 - RNA, 19 nt, Artificial Sequence
  Description of Artificial Sequence: Synthetic oligonucleotide
aagcccauuguuuccuuuc

SEQ ID NO: 1464059 - RNA, 19 nt, Artificial Sequence
  Description of Artificial Sequence: Synthetic oligonucleotide
acuugagaagagcuggguc

SEQ ID NO: 1464060 - RNA, 19 nt, Artificial Sequence
  Description of Artificial Sequence: Synthetic oligonucleotide
cuuugaaacucccugugug

SEQ ID NO: 1464061 - RNA, 19 nt, Artificial Sequence
  Description of Artificial Sequence: Synthetic oligonucleotide
uuugaaaucagugcugcaa

SEQ ID NO: 1464062 - RNA, 19 nt, Artificial Sequence
  Description of Artificial Sequence: Synthetic oligonucleotide
cuguaggcgguucagauac

SEQ ID NO: 1464063 - RNA, 19 nt, Artificial Sequence
  Description of Artificial Sequence: Synthetic oligonucleotide
aaggguguccacuguagug

SEQ ID NO: 1464064 - RNA, 19 nt, Artificial Sequence
  Description of Artificial Sequence: Synthetic oligonucleotide
aacgacgaggagccggugg

SEQ ID NO: 1464065 - RNA, 19 nt, Artificial Sequence
  Description of Artificial Sequence: Synthetic oligonucleotide
ccauacaccagcacgaugg

SEQ ID NO: 1464066 - RNA, 19 nt, Artificial Sequence
  Description of Artificial Sequence: Synthetic oligonucleotide
gaguccucgagcaacgacg

SEQ ID NO: 1464067 - RNA, 19 nt, Artificial Sequence
  Description of Artificial Sequence: Synthetic oligonucleotide
uguaguguagagguagacc

SEQ ID NO: 1464068 - RNA, 19 nt, Artificial Sequence
  Description of Artificial Sequence: Synthetic oligonucleotide
aacguccugacacccaucu

SEQ ID NO: 1464069 - RNA, 19 nt, Artificial Sequence
  Description of Artificial Sequence: Synthetic oligonucleotide
agucaagcacgcaaggccc

SEQ ID NO: 1464070 - RNA, 19 nt, Artificial Sequence
  Description of Artificial Sequence: Synthetic oligonucleotide
gaugccaaugagauugucc

SEQ ID NO: 1464071 - RNA, 19 nt, Artificial Sequence
  Description of Artificial Sequence: Synthetic oligonucleotide
uccucgagcaacgacgagg

SEQ ID NO: 1464072 - RNA, 19 nt, Artificial Sequence
  Description of Artificial Sequence: Synthetic oligonucleotide
agcaaauagccauccucac

SEQ ID NO: 1464073 - RNA, 19 nt, Artificial Sequence
  Description of Artificial Sequence: Synthetic oligonucleotide
cagucaagcacgcaaggcc

SEQ ID NO: 1464074 - RNA, 19 nt, Artificial Sequence
  Description of Artificial Sequence: Synthetic oligonucleotide
cuguaaacuagugucauuc

SEQ ID NO: 1464075 - RNA, 19 nt, Artificial Sequence
  Description of Artificial Sequence: Synthetic oligonucleotide
ugaaaggacucaugaccgg

SEQ ID NO: 1464076 - RNA, 19 nt, Artificial Sequence
  Description of Artificial Sequence: Synthetic oligonucleotide
ugcagucaagcacgcaagg

SEQ ID NO: 1464077 - RNA, 19 nt, Artificial Sequence
  Description of Artificial Sequence: Synthetic oligonucleotide
aucgccuugcaugaacucc

SEQ ID NO: 1464078 - RNA, 19 nt, Artificial Sequence
  Description of Artificial Sequence: Synthetic oligonucleotide
uguaaacuagugucauuca

SEQ ID NO: 1464079 - RNA, 19 nt, Artificial Sequence
  Description of Artificial Sequence: Synthetic oligonucleotide
ugaacugcccgcccagcgg

SEQ ID NO: 1464080 - RNA, 19 nt, Artificial Sequence
  Description of Artificial Sequence: Synthetic oligonucleotide
cuaaagaaaucugagaucu

SEQ ID NO: 1464081 - RNA, 19 nt, Artificial Sequence
  Description of Artificial Sequence: Synthetic oligonucleotide
uagagaggugcaaagccac

SEQ ID NO: 1464082 - RNA, 19 nt, Artificial Sequence
  Description of Artificial Sequence: Synthetic oligonucleotide
aaguagcuuucaccauccc

SEQ ID NO: 1464083 - RNA, 19 nt, Artificial Sequence
  Description of Artificial Sequence: Synthetic oligonucleotide
uugcagucaagcacgcaag

SEQ ID NO: 1464084 - RNA, 19 nt, Artificial Sequence
  Description of Artificial Sequence: Synthetic oligonucleotide
ucguguaguuuugaaauca

SEQ ID NO: 1464085 - RNA, 19 nt, Artificial Sequence
  Description of Artificial Sequence: Synthetic oligonucleotide
acgauggcaauggucaugg

SEQ ID NO: 1464086 - RNA, 19 nt, Artificial Sequence
  Description of Artificial Sequence: Synthetic oligonucleotide
uuauuaggaagggugucca

SEQ ID NO: 1464087 - RNA, 19 nt, Artificial Sequence
  Description of Artificial Sequence: Synthetic oligonucleotide
cucaaagacacgagucacc

SEQ ID NO: 1464088 - RNA, 19 nt, Artificial Sequence
  Description of Artificial Sequence: Synthetic oligonucleotide
aaaaucgaugagccauaca

SEQ ID NO: 1464089 - RNA, 19 nt, Artificial Sequence
  Description of Artificial Sequence: Synthetic oligonucleotide
cacuacaccauggaaagug

SEQ ID NO: 1464090 - RNA, 19 nt, Artificial Sequence
  Description of Artificial Sequence: Synthetic oligonucleotide
auugaccaugguucggauc

SEQ ID NO: 1464091 - RNA, 19 nt, Artificial Sequence
  Description of Artificial Sequence: Synthetic oligonucleotide
agcaucgccuugcaugaac

SEQ ID NO: 1464092 - RNA, 19 nt, Artificial Sequence
  Description of Artificial Sequence: Synthetic oligonucleotide
uugaaacucccugugugcc

SEQ ID NO: 1464093 - RNA, 19 nt, Artificial Sequence
  Description of Artificial Sequence: Synthetic oligonucleotide
gaccaugugaacugcccgc

SEQ ID NO: 1464094 - RNA, 19 nt, Artificial Sequence
  Description of Artificial Sequence: Synthetic oligonucleotide
caucucucagccaggcugg

SEQ ID NO: 1464095 - RNA, 19 nt, Artificial Sequence
  Description of Artificial Sequence: Synthetic oligonucleotide
gaaaggacucaugaccggc

SEQ ID NO: 1464096 - RNA, 19 nt, Artificial Sequence
  Description of Artificial Sequence: Synthetic oligonucleotide
uccgaguccucgagcaacg

SEQ ID NO: 1464097 - RNA, 19 nt, Artificial Sequence
  Description of Artificial Sequence: Synthetic oligonucleotide
ccuucuaaagaaaucugag

SEQ ID NO: 1464098 - RNA, 19 nt, Artificial Sequence
  Description of Artificial Sequence: Synthetic oligonucleotide
gauccgucggcuuucuuga

SEQ ID NO: 1464099 - RNA, 19 nt, Artificial Sequence
  Description of Artificial Sequence: Synthetic oligonucleotide
aguaggugccucagggucc

SEQ ID NO: 1464100 - RNA, 19 nt, Artificial Sequence
  Description of Artificial Sequence: Synthetic oligonucleotide
ucuugccaaaaucgaugag

SEQ ID NO: 1464101 - RNA, 19 nt, Artificial Sequence
  Description of Artificial Sequence: Synthetic oligonucleotide
agucuuauacacugugaaa

SEQ ID NO: 1464102 - RNA, 19 nt, Artificial Sequence
  Description of Artificial Sequence: Synthetic oligonucleotide
uguagcgcgguuuggugac

SEQ ID NO: 1464103 - RNA, 19 nt, Artificial Sequence
  Description of Artificial Sequence: Synthetic oligonucleotide
ugcugcaagauccgucggc

SEQ ID NO: 1464104 - RNA, 19 nt, Artificial Sequence
  Description of Artificial Sequence: Synthetic oligonucleotide
ugaaacucccugugugccc

SEQ ID NO: 1464105 - RNA, 19 nt, Artificial Sequence
  Description of Artificial Sequence: Synthetic oligonucleotide
ucgaugagccauacaccag

SEQ ID NO: 1464106 - RNA, 19 nt, Artificial Sequence
  Description of Artificial Sequence: Synthetic oligonucleotide
acccgcgcagcacaucugc

SEQ ID NO: 1464107 - RNA, 19 nt, Artificial Sequence
  Description of Artificial Sequence: Synthetic oligonucleotide
accaugugaacugcccgcc

SEQ ID NO: 1464108 - RNA, 19 nt, Artificial Sequence
  Description of Artificial Sequence: Synthetic oligonucleotide
ucgccuugcaugaacuccu

SEQ ID NO: 1464109 - RNA, 19 nt, Artificial Sequence
  Description of Artificial Sequence: Synthetic oligonucleotide
gaucuggccaucggggagg

SEQ ID NO: 1464110 - RNA, 19 nt, Artificial Sequence
  Description of Artificial Sequence: Synthetic oligonucleotide
cuucguguaguuuugaaau

SEQ ID NO: 1464111 - RNA, 19 nt, Artificial Sequence
  Description of Artificial Sequence: Synthetic oligonucleotide
uucguguaguuuugaaauc

SEQ ID NO: 1464112 - RNA, 19 nt, Artificial Sequence
  Description of Artificial Sequence: Synthetic oligonucleotide
agguaacguccugacaccc

SEQ ID NO: 1464113 - RNA, 19 nt, Artificial Sequence
  Description of Artificial Sequence: Synthetic oligonucleotide
gguauugguaguauacccc

SEQ ID NO: 1464114 - RNA, 19 nt, Artificial Sequence
  Description of Artificial Sequence: Synthetic oligonucleotide
cuagagaggugcaaagcca

SEQ ID NO: 1464115 - RNA, 19 nt, Artificial Sequence
  Description of Artificial Sequence: Synthetic oligonucleotide
agccccagcaaauagccau

SEQ ID NO: 1464116 - RNA, 19 nt, Artificial Sequence
  Description of Artificial Sequence: Synthetic oligonucleotide
cuugcagucaagcacgcaa

SEQ ID NO: 1464117 - RNA, 19 nt, Artificial Sequence
  Description of Artificial Sequence: Synthetic oligonucleotide
agcaacgacgaggagccgg

SEQ ID NO: 1464118 - RNA, 19 nt, Artificial Sequence
  Description of Artificial Sequence: Synthetic oligonucleotide
gaucuggucccucuagaga

SEQ ID NO: 1464119 - RNA, 19 nt, Artificial Sequence
  Description of Artificial Sequence: Synthetic oligonucleotide
uggaucuggucccucuaga

SEQ ID NO: 1464120 - RNA, 19 nt, Artificial Sequence
  Description of Artificial Sequence: Synthetic oligonucleotide
ccugguauugguaguauac

SEQ ID NO: 1464121 - RNA, 19 nt, Artificial Sequence
  Description of Artificial Sequence: Synthetic oligonucleotide
gagugagcugccaaucacc

SEQ ID NO: 1464122 - RNA, 19 nt, Artificial Sequence
  Description of Artificial Sequence: Synthetic oligonucleotide
uguccacuguaguguagag

SEQ ID NO: 1464123 - RNA, 19 nt, Artificial Sequence
  Description of Artificial Sequence: Synthetic oligonucleotide
uggaaaggcggcguggcug

SEQ ID NO: 1464124 - RNA, 19 nt, Artificial Sequence
  Description of Artificial Sequence: Synthetic oligonucleotide
uggcaauggucauggacga

SEQ ID NO: 1464125 - RNA, 19 nt, Artificial Sequence
  Description of Artificial Sequence: Synthetic oligonucleotide
ucgagcagguccuguaacu

SEQ ID NO: 1464126 - RNA, 19 nt, Artificial Sequence
  Description of Artificial Sequence: Synthetic oligonucleotide
uaguggauggcaccugguc

SEQ ID NO: 1464127 - RNA, 19 nt, Artificial Sequence
  Description of Artificial Sequence: Synthetic oligonucleotide
cagcagaucguccuccgag

SEQ ID NO: 1464128 - RNA, 19 nt, Artificial Sequence
  Description of Artificial Sequence: Synthetic oligonucleotide
ugggaacacacccgcgcag

SEQ ID NO: 1464129 - RNA, 19 nt, Artificial Sequence
  Description of Artificial Sequence: Synthetic oligonucleotide
agauugaccaugguucgga

SEQ ID NO: 1464130 - RNA, 19 nt, Artificial Sequence
  Description of Artificial Sequence: Synthetic oligonucleotide
auguagcgcgguuugguga

SEQ ID NO: 1464131 - RNA, 19 nt, Artificial Sequence
  Description of Artificial Sequence: Synthetic oligonucleotide
cauguagcgcgguuuggug

SEQ ID NO: 1464132 - RNA, 19 nt, Artificial Sequence
  Description of Artificial Sequence: Synthetic oligonucleotide
cucuagagaggugcaaagc

SEQ ID NO: 1464133 - RNA, 19 nt, Artificial Sequence
  Description of Artificial Sequence: Synthetic oligonucleotide
gugaacugcccgcccagcg

SEQ ID NO: 1464134 - RNA, 19 nt, Artificial Sequence
  Description of Artificial Sequence: Synthetic oligonucleotide
cagguaacguccugacacc

SEQ ID NO: 1464135 - RNA, 19 nt, Artificial Sequence
  Description of Artificial Sequence: Synthetic oligonucleotide
ucggcuucguguaguuuug

SEQ ID NO: 1464136 - RNA, 19 nt, Artificial Sequence
  Description of Artificial Sequence: Synthetic oligonucleotide
agccggcccaagcaggugg

SEQ ID NO: 1464137 - RNA, 19 nt, Artificial Sequence
  Description of Artificial Sequence: Synthetic oligonucleotide
accucgugccuucuaaaga

SEQ ID NO: 1464138 - RNA, 19 nt, Artificial Sequence
  Description of Artificial Sequence: Synthetic oligonucleotide
ggaccaugugaacugcccg

SEQ ID NO: 1464139 - RNA, 19 nt, Artificial Sequence
  Description of Artificial Sequence: Synthetic oligonucleotide
cacugugaaauaaaauucu

SEQ ID NO: 1464140 - RNA, 19 nt, Artificial Sequence
  Description of Artificial Sequence: Synthetic oligonucleotide
gaugcggaagccaagugua

SEQ ID NO: 1464141 - RNA, 19 nt, Artificial Sequence
  Description of Artificial Sequence: Synthetic oligonucleotide
gcaggugcgagccagcggc

SEQ ID NO: 1464142 - RNA, 19 nt, Artificial Sequence
  Description of Artificial Sequence: Synthetic oligonucleotide
caccucgugccuucuaaag

SEQ ID NO: 1464143 - RNA, 19 nt, Artificial Sequence
  Description of Artificial Sequence: Synthetic oligonucleotide
ugcacccaggaguagcgcu

SEQ ID NO: 1464144 - RNA, 19 nt, Artificial Sequence
  Description of Artificial Sequence: Synthetic oligonucleotide
uucgcgccacugcauguag

SEQ ID NO: 1464145 - RNA, 19 nt, Artificial Sequence
  Description of Artificial Sequence: Synthetic oligonucleotide
acaggcuuguguggaggcc

SEQ ID NO: 1464146 - RNA, 19 nt, Artificial Sequence
  Description of Artificial Sequence: Synthetic oligonucleotide
gcaauggucauggacgaag

SEQ ID NO: 1464147 - RNA, 19 nt, Artificial Sequence
  Description of Artificial Sequence: Synthetic oligonucleotide
uuuucugccccacguccuc

SEQ ID NO: 1464148 - RNA, 19 nt, Artificial Sequence
  Description of Artificial Sequence: Synthetic oligonucleotide
uagaccaggaagucuuaua

SEQ ID NO: 1464149 - RNA, 19 nt, Artificial Sequence
  Description of Artificial Sequence: Synthetic oligonucleotide
agacacgagucaccugcuc

SEQ ID NO: 1464150 - RNA, 19 nt, Artificial Sequence
  Description of Artificial Sequence: Synthetic oligonucleotide
ugcgcaugcuccuccucag

SEQ ID NO: 1464151 - RNA, 19 nt, Artificial Sequence
  Description of Artificial Sequence: Synthetic oligonucleotide
guuuggugacagcacgcug

SEQ ID NO: 1464152 - RNA, 19 nt, Artificial Sequence
  Description of Artificial Sequence: Synthetic oligonucleotide
agcagaucguccuccgagu

SEQ ID NO: 1464153 - RNA, 19 nt, Artificial Sequence
  Description of Artificial Sequence: Synthetic oligonucleotide
ggaucuggucccucuagag

SEQ ID NO: 1464154 - RNA, 19 nt, Artificial Sequence
  Description of Artificial Sequence: Synthetic oligonucleotide
uccuguaaacuagugucau

SEQ ID NO: 1464155 - RNA, 19 nt, Artificial Sequence
  Description of Artificial Sequence: Synthetic oligonucleotide
uucccuccuguaaacuagu

SEQ ID NO: 1464156 - RNA, 19 nt, Artificial Sequence
  Description of Artificial Sequence: Synthetic oligonucleotide
augcauuauggggaugcag

SEQ ID NO: 1464157 - RNA, 19 nt, Artificial Sequence
  Description of Artificial Sequence: Synthetic oligonucleotide
cagaucguccuccgagucc

SEQ ID NO: 1464158 - RNA, 19 nt, Artificial Sequence
  Description of Artificial Sequence: Synthetic oligonucleotide
gcuaacugcacccaggagu

SEQ ID NO: 1464159 - RNA, 19 nt, Artificial Sequence
  Description of Artificial Sequence: Synthetic oligonucleotide
aucaccucgugccuucuaa

SEQ ID NO: 1464160 - RNA, 19 nt, Artificial Sequence
  Description of Artificial Sequence: Synthetic oligonucleotide
acgacgaggagccggugga

SEQ ID NO: 1464161 - RNA, 19 nt, Artificial Sequence
  Description of Artificial Sequence: Synthetic oligonucleotide
gggagaagcccauuguuuc

SEQ ID NO: 1464162 - RNA, 19 nt, Artificial Sequence
  Description of Artificial Sequence: Synthetic oligonucleotide
caagggcucagcuucaucu

SEQ ID NO: 1464163 - RNA, 19 nt, Artificial Sequence
  Description of Artificial Sequence: Synthetic oligonucleotide
gcgguuuggugacagcacg

SEQ ID NO: 1464164 - RNA, 19 nt, Artificial Sequence
  Description of Artificial Sequence: Synthetic oligonucleotide
gcaguaguguucuggcucc

SEQ ID NO: 1464165 - RNA, 19 nt, Artificial Sequence
  Description of Artificial Sequence: Synthetic oligonucleotide
caaaaucgaugagccauac

SEQ ID NO: 1464166 - RNA, 19 nt, Artificial Sequence
  Description of Artificial Sequence: Synthetic oligonucleotide
gcaugcauuauggggaugc

SEQ ID NO: 1464167 - RNA, 19 nt, Artificial Sequence
  Description of Artificial Sequence: Synthetic oligonucleotide
ggagaagcccauuguuucc

SEQ ID NO: 1464168 - RNA, 19 nt, Artificial Sequence
  Description of Artificial Sequence: Synthetic oligonucleotide
ucagcagaucguccuccga

SEQ ID NO: 1464169 - RNA, 19 nt, Artificial Sequence
  Description of Artificial Sequence: Synthetic oligonucleotide
ggucccucuagagaggugc

SEQ ID NO: 1464170 - RNA, 19 nt, Artificial Sequence
  Description of Artificial Sequence: Synthetic oligonucleotide
gguucggaucuucugccag

SEQ ID NO: 1464171 - RNA, 19 nt, Artificial Sequence
  Description of Artificial Sequence: Synthetic oligonucleotide
agcuuucaccaucccgcuc

SEQ ID NO: 1464172 - RNA, 19 nt, Artificial Sequence
  Description of Artificial Sequence: Synthetic oligonucleotide
caugaccggcagauugacc

SEQ ID NO: 1464173 - RNA, 19 nt, Artificial Sequence
  Description of Artificial Sequence: Synthetic oligonucleotide
ucccuccuguaaacuagug

SEQ ID NO: 1464174 - RNA, 19 nt, Artificial Sequence
  Description of Artificial Sequence: Synthetic oligonucleotide
ucacugucgcucagcagau

SEQ ID NO: 1464175 - RNA, 19 nt, Artificial Sequence
  Description of Artificial Sequence: Synthetic oligonucleotide
ucaugaccggcagauugac

SEQ ID NO: 1464176 - RNA, 19 nt, Artificial Sequence
  Description of Artificial Sequence: Synthetic oligonucleotide
aggggcguggucuugccaa

SEQ ID NO: 1464177 - RNA, 19 nt, Artificial Sequence
  Description of Artificial Sequence: Synthetic oligonucleotide
gcugccaaucaccucgugc

SEQ ID NO: 1464178 - RNA, 19 nt, Artificial Sequence
  Description of Artificial Sequence: Synthetic oligonucleotide
aucuugcagucaagcacgc

SEQ ID NO: 1464179 - RNA, 19 nt, Artificial Sequence
  Description of Artificial Sequence: Synthetic oligonucleotide
acgagucaccugcucucgg

SEQ ID NO: 1464180 - RNA, 19 nt, Artificial Sequence
  Description of Artificial Sequence: Synthetic oligonucleotide
ugcggaagccaaguguagu

SEQ ID NO: 1464181 - RNA, 19 nt, Artificial Sequence
  Description of Artificial Sequence: Synthetic oligonucleotide
gacacgagucaccugcucu

SEQ ID NO: 1464182 - RNA, 19 nt, Artificial Sequence
  Description of Artificial Sequence: Synthetic oligonucleotide
uuauggggaugcagccaca

SEQ ID NO: 1464183 - RNA, 19 nt, Artificial Sequence
  Description of Artificial Sequence: Synthetic oligonucleotide
cugugugcccggcuaacug

SEQ ID NO: 1464184 - RNA, 19 nt, Artificial Sequence
  Description of Artificial Sequence: Synthetic oligonucleotide
uguaggcgguucagauacc

SEQ ID NO: 1464185 - RNA, 19 nt, Artificial Sequence
  Description of Artificial Sequence: Synthetic oligonucleotide
cucaugaccggcagauuga

SEQ ID NO: 1464186 - RNA, 19 nt, Artificial Sequence
  Description of Artificial Sequence: Synthetic oligonucleotide
agcgcgguuuggugacagc

SEQ ID NO: 1464187 - RNA, 19 nt, Artificial Sequence
  Description of Artificial Sequence: Synthetic oligonucleotide
guccugacacccaucuugc

SEQ ID NO: 1464188 - RNA, 19 nt, Artificial Sequence
  Description of Artificial Sequence: Synthetic oligonucleotide
uccugguauugguaguaua

SEQ ID NO: 1464189 - RNA, 19 nt, Artificial Sequence
  Description of Artificial Sequence: Synthetic oligonucleotide
ccgucggcuuucuugaugc

SEQ ID NO: 1464190 - RNA, 19 nt, Artificial Sequence
  Description of Artificial Sequence: Synthetic oligonucleotide
ggagugagcugccaaucac

SEQ ID NO: 1464191 - RNA, 19 nt, Artificial Sequence
  Description of Artificial Sequence: Synthetic oligonucleotide
ucaccucgugccuucuaaa

SEQ ID NO: 1464192 - RNA, 19 nt, Artificial Sequence
  Description of Artificial Sequence: Synthetic oligonucleotide
caugugaacugcccgccca

SEQ ID NO: 1464193 - RNA, 19 nt, Artificial Sequence
  Description of Artificial Sequence: Synthetic oligonucleotide
accggcagauugaccaugg

SEQ ID NO: 1464194 - RNA, 19 nt, Artificial Sequence
  Description of Artificial Sequence: Synthetic oligonucleotide
cgaugagccauacaccagc

SEQ ID NO: 1464195 - RNA, 19 nt, Artificial Sequence
  Description of Artificial Sequence: Synthetic oligonucleotide
cacgagucaccugcucucg

SEQ ID NO: 1464196 - RNA, 19 nt, Artificial Sequence
  Description of Artificial Sequence: Synthetic oligonucleotide
ugugaacugcccgcccagc

SEQ ID NO: 1464197 - RNA, 19 nt, Artificial Sequence
  Description of Artificial Sequence: Synthetic oligonucleotide
uaggcgguucagauaccuc

SEQ ID NO: 1464198 - RNA, 19 nt, Artificial Sequence
  Description of Artificial Sequence: Synthetic oligonucleotide
aagacacgagucaccugcu

SEQ ID NO: 1464199 - RNA, 19 nt, Artificial Sequence
  Description of Artificial Sequence: Synthetic oligonucleotide
cuccgagcugcgcuucagg

SEQ ID NO: 1464200 - RNA, 19 nt, Artificial Sequence
  Description of Artificial Sequence: Synthetic oligonucleotide
aaucaccucgugccuucua

SEQ ID NO: 1464201 - RNA, 19 nt, Artificial Sequence
  Description of Artificial Sequence: Synthetic oligonucleotide
cauggaaagugggaacaca

SEQ ID NO: 1464202 - RNA, 19 nt, Artificial Sequence
  Description of Artificial Sequence: Synthetic oligonucleotide
cacagguccacaucugucu

SEQ ID NO: 1464203 - RNA, 19 nt, Artificial Sequence
  Description of Artificial Sequence: Synthetic oligonucleotide
gugcugcaagauccgucgg

SEQ ID NO: 1464204 - RNA, 19 nt, Artificial Sequence
  Description of Artificial Sequence: Synthetic oligonucleotide
guaggugccucaggguccc

SEQ ID NO: 1464205 - RNA, 19 nt, Artificial Sequence
  Description of Artificial Sequence: Synthetic oligonucleotide
caucgccuugcaugaacuc

SEQ ID NO: 1464206 - RNA, 19 nt, Artificial Sequence
  Description of Artificial Sequence: Synthetic oligonucleotide
ucgcgccacugcauguagc

SEQ ID NO: 1464207 - RNA, 19 nt, Artificial Sequence
  Description of Artificial Sequence: Synthetic oligonucleotide
cacgauggcaauggucaug

SEQ ID NO: 1464208 - RNA, 19 nt, Artificial Sequence
  Description of Artificial Sequence: Synthetic oligonucleotide
uaacguccugacacccauc

SEQ ID NO: 1464209 - RNA, 19 nt, Artificial Sequence
  Description of Artificial Sequence: Synthetic oligonucleotide
uagcgcgguuuggugacag

SEQ ID NO: 1464210 - RNA, 19 nt, Artificial Sequence
  Description of Artificial Sequence: Synthetic oligonucleotide
auacaccagcacgauggca

SEQ ID NO: 1464211 - RNA, 19 nt, Artificial Sequence
  Description of Artificial Sequence: Synthetic oligonucleotide
gaacacacccgcgcagcac

SEQ ID NO: 1464212 - RNA, 19 nt, Artificial Sequence
  Description of Artificial Sequence: Synthetic oligonucleotide
gcaaagccacuugagaaga

SEQ ID NO: 1464213 - RNA, 19 nt, Artificial Sequence
  Description of Artificial Sequence: Synthetic oligonucleotide
gguccuguaacugcaagua

SEQ ID NO: 1464214 - RNA, 19 nt, Artificial Sequence
  Description of Artificial Sequence: Synthetic oligonucleotide
aggugccucagggucccac

SEQ ID NO: 1464215 - RNA, 19 nt, Artificial Sequence
  Description of Artificial Sequence: Synthetic oligonucleotide
uguccagccccagcaaaua

SEQ ID NO: 1464216 - RNA, 19 nt, Artificial Sequence
  Description of Artificial Sequence: Synthetic oligonucleotide
guaacguccugacacccau

SEQ ID NO: 1464217 - RNA, 19 nt, Artificial Sequence
  Description of Artificial Sequence: Synthetic oligonucleotide
gcagucaagcacgcaaggc

SEQ ID NO: 1464218 - RNA, 19 nt, Artificial Sequence
  Description of Artificial Sequence: Synthetic oligonucleotide
aguaguguucuggcuccga

SEQ ID NO: 1464219 - RNA, 19 nt, Artificial Sequence
  Description of Artificial Sequence: Synthetic oligonucleotide
augcggaagccaaguguag

SEQ ID NO: 1464220 - RNA, 19 nt, Artificial Sequence
  Description of Artificial Sequence: Synthetic oligonucleotide
gggucuccgaugauccagg

SEQ ID NO: 1464221 - RNA, 19 nt, Artificial Sequence
  Description of Artificial Sequence: Synthetic oligonucleotide
gccaaaaucgaugagccau

SEQ ID NO: 1464222 - RNA, 19 nt, Artificial Sequence
  Description of Artificial Sequence: Synthetic oligonucleotide
caccaucccgcuccacuac

SEQ ID NO: 1464223 - RNA, 19 nt, Artificial Sequence
  Description of Artificial Sequence: Synthetic oligonucleotide
ccggcuaacugcacccagg

SEQ ID NO: 1464224 - RNA, 19 nt, Artificial Sequence
  Description of Artificial Sequence: Synthetic oligonucleotide
ggugcgagccagcggccgg

SEQ ID NO: 1464225 - RNA, 19 nt, Artificial Sequence
  Description of Artificial Sequence: Synthetic oligonucleotide
cgcgccacugcauguagcg

SEQ ID NO: 1464226 - RNA, 19 nt, Artificial Sequence
  Description of Artificial Sequence: Synthetic oligonucleotide
ccucgugccuucuaaagaa

SEQ ID NO: 1464227 - RNA, 19 nt, Artificial Sequence
  Description of Artificial Sequence: Synthetic oligonucleotide
ucaagcacgcaaggcccau

SEQ ID NO: 1464228 - RNA, 19 nt, Artificial Sequence
  Description of Artificial Sequence: Synthetic oligonucleotide
caagggagaagcccauugu

SEQ ID NO: 1464229 - RNA, 19 nt, Artificial Sequence
  Description of Artificial Sequence: Synthetic oligonucleotide
gcccauuguuuccuuuccc

SEQ ID NO: 1464230 - RNA, 19 nt, Artificial Sequence
  Description of Artificial Sequence: Synthetic oligonucleotide
caucgagcagguccuguaa

SEQ ID NO: 1464231 - RNA, 19 nt, Artificial Sequence
  Description of Artificial Sequence: Synthetic oligonucleotide
guguaguuuugaaaucagu

SEQ ID NO: 1464232 - RNA, 19 nt, Artificial Sequence
  Description of Artificial Sequence: Synthetic oligonucleotide
cgagcugcgcuucaggauc

SEQ ID NO: 1464233 - RNA, 19 nt, Artificial Sequence
  Description of Artificial Sequence: Synthetic oligonucleotide
cucgugccuucuaaagaaa

SEQ ID NO: 1464234 - RNA, 19 nt, Artificial Sequence
  Description of Artificial Sequence: Synthetic oligonucleotide
caggugcgagccagcggcc

SEQ ID NO: 1464235 - RNA, 19 nt, Artificial Sequence
  Description of Artificial Sequence: Synthetic oligonucleotide
uugggccucucucgggcuu

SEQ ID NO: 1464236 - RNA, 19 nt, Artificial Sequence
  Description of Artificial Sequence: Synthetic oligonucleotide
gccauacaccagcacgaug

SEQ ID NO: 1464237 - RNA, 19 nt, Artificial Sequence
  Description of Artificial Sequence: Synthetic oligonucleotide
ucccucuagagaggugcaa

SEQ ID NO: 1464238 - RNA, 19 nt, Artificial Sequence
  Description of Artificial Sequence: Synthetic oligonucleotide
gcguggucuugccaaaauc

SEQ ID NO: 1464239 - RNA, 19 nt, Artificial Sequence
  Description of Artificial Sequence: Synthetic oligonucleotide
ggcccaagcaggugggaca

SEQ ID NO: 1464240 - RNA, 19 nt, Artificial Sequence
  Description of Artificial Sequence: Synthetic oligonucleotide
gcagaucguccuccgaguc

SEQ ID NO: 1464241 - RNA, 19 nt, Artificial Sequence
  Description of Artificial Sequence: Synthetic oligonucleotide
gccacugcauguagcgcgg

SEQ ID NO: 1464242 - RNA, 19 nt, Artificial Sequence
  Description of Artificial Sequence: Synthetic oligonucleotide
guaggcgguucagauaccu

SEQ ID NO: 1464243 - RNA, 19 nt, Artificial Sequence
  Description of Artificial Sequence: Synthetic oligonucleotide
guccucgagcaacgacgag

SEQ ID NO: 1464244 - RNA, 19 nt, Artificial Sequence
  Description of Artificial Sequence: Synthetic oligonucleotide
agccauacaccagcacgau

SEQ ID NO: 1464245 - RNA, 19 nt, Artificial Sequence
  Description of Artificial Sequence: Synthetic oligonucleotide
agcacgcaaggcccaucaa

SEQ ID NO: 1464246 - RNA, 19 nt, Artificial Sequence
  Description of Artificial Sequence: Synthetic oligonucleotide
ggaacacacccgcgcagca

SEQ ID NO: 1464247 - RNA, 19 nt, Artificial Sequence
  Description of Artificial Sequence: Synthetic oligonucleotide
gguguccacuguaguguag

SEQ ID NO: 1464248 - RNA, 19 nt, Artificial Sequence
  Description of Artificial Sequence: Synthetic oligonucleotide
cugcacccaggaguagcgc

SEQ ID NO: 1464249 - RNA, 19 nt, Artificial Sequence
  Description of Artificial Sequence: Synthetic oligonucleotide
gugggacaagggcucagcu

SEQ ID NO: 1464250 - RNA, 19 nt, Artificial Sequence
  Description of Artificial Sequence: Synthetic oligonucleotide
agccgguggaggagagggg

SEQ ID NO: 1464251 - RNA, 19 nt, Artificial Sequence
  Description of Artificial Sequence: Synthetic oligonucleotide
uagugucauucagcucuaa

SEQ ID NO: 1464252 - RNA, 19 nt, Artificial Sequence
  Description of Artificial Sequence: Synthetic oligonucleotide
gagcaacgacgaggagccg

SEQ ID NO: 1464253 - RNA, 19 nt, Artificial Sequence
  Description of Artificial Sequence: Synthetic oligonucleotide
gguaacguccugacaccca

SEQ ID NO: 1464254 - RNA, 19 nt, Artificial Sequence
  Description of Artificial Sequence: Synthetic oligonucleotide
ccaugugaacugcccgccc

SEQ ID NO: 1464255 - RNA, 19 nt, Artificial Sequence
  Description of Artificial Sequence: Synthetic oligonucleotide
ccaaaaucgaugagccaua
